United States Patent Application Publication US 2018/0305689 A1 - sequence listing, part 30

SEQ ID NO: 384574 - RNA, 19 nt, Artificial Sequence
  Description of Artificial Sequence: Synthetic oligonucleotide
  Antisense Strand to SEQ ID NO: 384573
aagucacagagauuccuug

SEQ ID NO: 384575 - RNA, 19 nt, Artificial Sequence
  Description of Artificial Sequence: Synthetic oligonucleotide
  Sense Strand Starting at position 837 of SEQ ID NO: 316558
aaggaaucucugugacuug

SEQ ID NO: 384576 - RNA, 19 nt, Artificial Sequence
  Description of Artificial Sequence: Synthetic oligonucleotide
  Antisense Strand to SEQ ID NO: 384575
caagucacagagauuccuu

SEQ ID NO: 384577 - RNA, 19 nt, Artificial Sequence
  Description of Artificial Sequence: Synthetic oligonucleotide
  Sense Strand Starting at position 837 of SEQ ID NO: 317702
guuccuugaucuguuaaua

SEQ ID NO: 384578 - RNA, 19 nt, Artificial Sequence
  Description of Artificial Sequence: Synthetic oligonucleotide
  Antisense Strand to SEQ ID NO: 384577
uauuaacagaucaaggaac

SEQ ID NO: 384579 - RNA, 19 nt, Artificial Sequence
  Description of Artificial Sequence: Synthetic oligonucleotide
  Sense Strand Starting at position 837 of SEQ ID NO: 317720
acuacaugucuagaaaugu

SEQ ID NO: 384580 - RNA, 19 nt, Artificial Sequence
  Description of Artificial Sequence: Synthetic oligonucleotide
  Antisense Strand to SEQ ID NO: 384579
acauuucuagacauguagu

SEQ ID NO: 384581 - RNA, 19 nt, Artificial Sequence
  Description of Artificial Sequence: Synthetic oligonucleotide
  Sense Strand Starting at position 837 of SEQ ID NO: 317824
cggagcuauggugaacaca

SEQ ID NO: 384582 - RNA, 19 nt, Artificial Sequence
  Description of Artificial Sequence: Synthetic oligonucleotide
  Antisense Strand to SEQ ID NO: 384581
uguguucaccauagcuccg

SEQ ID NO: 384583 - RNA, 19 nt, Artificial Sequence
  Description of Artificial Sequence: Synthetic oligonucleotide
  Sense Strand Starting at position 837 of SEQ ID NO: 317846
ggcaauaggugcucuggga

SEQ ID NO: 384584 - RNA, 19 nt, Artificial Sequence
  Description of Artificial Sequence: Synthetic oligonucleotide
  Antisense Strand to SEQ ID NO: 384583
ucccagagcaccuauugcc

SEQ ID NO: 384585 - RNA, 19 nt, Artificial Sequence
  Description of Artificial Sequence: Synthetic oligonucleotide
  Sense Strand Starting at position 837 of SEQ ID NO: 317850
auaggugcucugggaaaga

SEQ ID NO: 384586 - RNA, 19 nt, Artificial Sequence
  Description of Artificial Sequence: Synthetic oligonucleotide
  Antisense Strand to SEQ ID NO: 384585
ucuuucccagagcaccuau

SEQ ID NO: 384587 - RNA, 19 nt, Artificial Sequence
  Description of Artificial Sequence: Synthetic oligonucleotide
  Sense Strand Starting at position 837 of SEQ ID NO: 317863
gaaagaauauacuuguguu

SEQ ID NO: 384588 - RNA, 19 nt, Artificial Sequence
  Description of Artificial Sequence: Synthetic oligonucleotide
  Antisense Strand to SEQ ID NO: 384587
aacacaaguauauucuuuc

SEQ ID NO: 384589 - RNA, 19 nt, Artificial Sequence
  Description of Artificial Sequence: Synthetic oligonucleotide
  Sense Strand Starting at position 837 of SEQ ID NO: 317871
auacuuguguuccuggaac

SEQ ID NO: 384590 - RNA, 19 nt, Artificial Sequence
  Description of Artificial Sequence: Synthetic oligonucleotide
  Antisense Strand to SEQ ID NO: 384589
guuccaggaacacaaguau

SEQ ID NO: 384591 - RNA, 19 nt, Artificial Sequence
  Description of Artificial Sequence: Synthetic oligonucleotide
  Sense Strand Starting at position 837 of SEQ ID NO: 317873
acuuguguuccuggaacag

SEQ ID NO: 384592 - RNA, 19 nt, Artificial Sequence
  Description of Artificial Sequence: Synthetic oligonucleotide
  Antisense Strand to SEQ ID NO: 384591
cuguuccaggaacacaagu

SEQ ID NO: 384593 - RNA, 19 nt, Artificial Sequence
  Description of Artificial Sequence: Synthetic oligonucleotide
  Sense Strand Starting at position 837 of SEQ ID NO: 317945
ggugacauguaaccugaua

SEQ ID NO: 384594 - RNA, 19 nt, Artificial Sequence
  Description of Artificial Sequence: Synthetic oligonucleotide
  Antisense Strand to SEQ ID NO: 384593
uaucagguuacaugucacc

SEQ ID NO: 384595 - RNA, 19 nt, Artificial Sequence
  Description of Artificial Sequence: Synthetic oligonucleotide
  Sense Strand Starting at position 837 of SEQ ID NO: 318098
uaguguccuaagugagaga

SEQ ID NO: 384596 - RNA, 19 nt, Artificial Sequence
  Description of Artificial Sequence: Synthetic oligonucleotide
  Antisense Strand to SEQ ID NO: 384595
ucucucacuuaggacacua

SEQ ID NO: 384597 - RNA, 19 nt, Artificial Sequence
  Description of Artificial Sequence: Synthetic oligonucleotide
  Sense Strand Starting at position 837 of SEQ ID NO: 318188
gcaggacuugcugaagaau

SEQ ID NO: 384598 - RNA, 19 nt, Artificial Sequence
  Description of Artificial Sequence: Synthetic oligonucleotide
  Antisense Strand to SEQ ID NO: 384597
auucuucagcaaguccugc

SEQ ID NO: 384599 - RNA, 19 nt, Artificial Sequence
  Description of Artificial Sequence: Synthetic oligonucleotide
  Sense Strand Starting at position 837 of SEQ ID NO: 318199
ugaagaaugugagccuuga

SEQ ID NO: 384600 - RNA, 19 nt, Artificial Sequence
  Description of Artificial Sequence: Synthetic oligonucleotide
  Antisense Strand to SEQ ID NO: 384599
ucaaggcucacauucuuca

SEQ ID NO: 384601 - RNA, 19 nt, Artificial Sequence
  Description of Artificial Sequence: Synthetic oligonucleotide
  Sense Strand Starting at position 837 of SEQ ID NO: 318203
gaaugugagccuugagaga

SEQ ID NO: 384602 - RNA, 19 nt, Artificial Sequence
  Description of Artificial Sequence: Synthetic oligonucleotide
  Antisense Strand to SEQ ID NO: 384601
ucucucaaggcucacauuc

SEQ ID NO: 384603 - RNA, 19 nt, Artificial Sequence
  Description of Artificial Sequence: Synthetic oligonucleotide
  Sense Strand Starting at position 837 of SEQ ID NO: 318422
cagagaagugucugcugga

SEQ ID NO: 384604 - RNA, 19 nt, Artificial Sequence
  Description of Artificial Sequence: Synthetic oligonucleotide
  Antisense Strand to SEQ ID NO: 384603
uccagcagacacuucucug

SEQ ID NO: 384605 - RNA, 19 nt, Artificial Sequence
  Description of Artificial Sequence: Synthetic oligonucleotide
  Sense Strand Starting at position 837 of SEQ ID NO: 318423
agagaagugucugcuggac

SEQ ID NO: 384606 - RNA, 19 nt, Artificial Sequence
  Description of Artificial Sequence: Synthetic oligonucleotide
  Antisense Strand to SEQ ID NO: 384605
guccagcagacacuucucu

SEQ ID NO: 384607 - RNA, 19 nt, Artificial Sequence
  Description of Artificial Sequence: Synthetic oligonucleotide
  Sense Strand Starting at position 837 of SEQ ID NO: 318557
gcagaaaugugaccgugaa

SEQ ID NO: 384608 - RNA, 19 nt, Artificial Sequence
  Description of Artificial Sequence: Synthetic oligonucleotide
  Antisense Strand to SEQ ID NO: 384607
uucacggucacauuucugc

SEQ ID NO: 384609 - RNA, 19 nt, Artificial Sequence
  Description of Artificial Sequence: Synthetic oligonucleotide
  Sense Strand Starting at position 837 of SEQ ID NO: 318558
cagaaaugugaccgugaag

SEQ ID NO: 384610 - RNA, 19 nt, Artificial Sequence
  Description of Artificial Sequence: Synthetic oligonucleotide
  Antisense Strand to SEQ ID NO: 384609
cuucacggucacauuucug

SEQ ID NO: 384611 - RNA, 19 nt, Artificial Sequence
  Description of Artificial Sequence: Synthetic oligonucleotide
  Sense Strand Starting at position 837 of SEQ ID NO: 318675
uuauuucggcucuguaaua

SEQ ID NO: 384612 - RNA, 19 nt, Artificial Sequence
  Description of Artificial Sequence: Synthetic oligonucleotide
  Antisense Strand to SEQ ID NO: 384611
uauuacagagccgaaauaa

SEQ ID NO: 384613 - RNA, 19 nt, Artificial Sequence
  Description of Artificial Sequence: Synthetic oligonucleotide
  Sense Strand Starting at position 837 of SEQ ID NO: 318676
uauuucggcucuguaauaa

SEQ ID NO: 384614 - RNA, 19 nt, Artificial Sequence
  Description of Artificial Sequence: Synthetic oligonucleotide
  Antisense Strand to SEQ ID NO: 384613
uuauuacagagccgaaaua

SEQ ID NO: 384615 - RNA, 19 nt, Artificial Sequence
  Description of Artificial Sequence: Synthetic oligonucleotide
  Sense Strand Starting at position 837 of SEQ ID NO: 318818
gccagacuuggugacuguu

SEQ ID NO: 384616 - RNA, 19 nt, Artificial Sequence
  Description of Artificial Sequence: Synthetic oligonucleotide
  Antisense Strand to SEQ ID NO: 384615
aacagucaccaagucuggc

SEQ ID NO: 384617 - RNA, 19 nt, Artificial Sequence
  Description of Artificial Sequence: Synthetic oligonucleotide
  Sense Strand Starting at position 837 of SEQ ID NO: 319014
uuuaauuaucgacaaugug

SEQ ID NO: 384618 - RNA, 19 nt, Artificial Sequence
  Description of Artificial Sequence: Synthetic oligonucleotide
  Antisense Strand to SEQ ID NO: 384617
cacauugucgauaauuaaa

SEQ ID NO: 384619 - RNA, 19 nt, Artificial Sequence
  Description of Artificial Sequence: Synthetic oligonucleotide
  Sense Strand Starting at position 837 of SEQ ID NO: 319077
ggagcuaucagaggaucag

SEQ ID NO: 384620 - RNA, 19 nt, Artificial Sequence
  Description of Artificial Sequence: Synthetic oligonucleotide
  Antisense Strand to SEQ ID NO: 384619
cugauccucugauagcucc

SEQ ID NO: 384621 - RNA, 19 nt, Artificial Sequence
  Description of Artificial Sequence: Synthetic oligonucleotide
  Sense Strand Starting at position 837 of SEQ ID NO: 319119
gaaagaaaguucuagaagg

SEQ ID NO: 384622 - RNA, 19 nt, Artificial Sequence
  Description of Artificial Sequence: Synthetic oligonucleotide
  Antisense Strand to SEQ ID NO: 384621
ccuucuagaacuuucuuuc

SEQ ID NO: 384623 - RNA, 19 nt, Artificial Sequence
  Description of Artificial Sequence: Synthetic oligonucleotide
  Sense Strand Starting at position 837 of SEQ ID NO: 319203
ucacuugaagaaugcguau

SEQ ID NO: 384624 - RNA, 19 nt, Artificial Sequence
  Description of Artificial Sequence: Synthetic oligonucleotide
  Antisense Strand to SEQ ID NO: 384623
auacgcauucuucaaguga

SEQ ID NO: 384625 - RNA, 19 nt, Artificial Sequence
  Description of Artificial Sequence: Synthetic oligonucleotide
  Sense Strand Starting at position 838 of SEQ ID NO: 315255
agacucucugcugaaugau

SEQ ID NO: 384626 - RNA, 19 nt, Artificial Sequence
  Description of Artificial Sequence: Synthetic oligonucleotide
  Antisense Strand to SEQ ID NO: 384625
aucauucagcagagagucu

SEQ ID NO: 384627 - RNA, 19 nt, Artificial Sequence
  Description of Artificial Sequence: Synthetic oligonucleotide
  Sense Strand Starting at position 838 of SEQ ID NO: 315332
ggagcucaucuugagugaa

SEQ ID NO: 384628 - RNA, 19 nt, Artificial Sequence
  Description of Artificial Sequence: Synthetic oligonucleotide
  Antisense Strand to SEQ ID NO: 384627
uucacucaagaugagcucc

SEQ ID NO: 384629 - RNA, 19 nt, Artificial Sequence
  Description of Artificial Sequence: Synthetic oligonucleotide
  Sense Strand Starting at position 838 of SEQ ID NO: 315334
agcucaucuugagugaaga

SEQ ID NO: 384630 - RNA, 19 nt, Artificial Sequence
  Description of Artificial Sequence: Synthetic oligonucleotide
  Antisense Strand to SEQ ID NO: 384629
ucuucacucaagaugagcu

SEQ ID NO: 384631 - RNA, 19 nt, Artificial Sequence
  Description of Artificial Sequence: Synthetic oligonucleotide
  Sense Strand Starting at position 838 of SEQ ID NO: 315335
gcucaucuugagugaagag

SEQ ID NO: 384632 - RNA, 19 nt, Artificial Sequence
  Description of Artificial Sequence: Synthetic oligonucleotide
  Antisense Strand to SEQ ID NO: 384631
cucuucacucaagaugagc

SEQ ID NO: 384633 - RNA, 19 nt, Artificial Sequence
  Description of Artificial Sequence: Synthetic oligonucleotide
  Sense Strand Starting at position 838 of SEQ ID NO: 315540
caacauagcgaaugaguaa

SEQ ID NO: 384634 - RNA, 19 nt, Artificial Sequence
  Description of Artificial Sequence: Synthetic oligonucleotide
  Antisense Strand to SEQ ID NO: 384633
uuacucauucgcuauguug

SEQ ID NO: 384635 - RNA, 19 nt, Artificial Sequence
  Description of Artificial Sequence: Synthetic oligonucleotide
  Sense Strand Starting at position 838 of SEQ ID NO: 315725
auugguugugucgaggauc

SEQ ID NO: 384636 - RNA, 19 nt, Artificial Sequence
  Description of Artificial Sequence: Synthetic oligonucleotide
  Antisense Strand to SEQ ID NO: 384635
gauccucgacacaaccaau

SEQ ID NO: 384637 - RNA, 19 nt, Artificial Sequence
  Description of Artificial Sequence: Synthetic oligonucleotide
  Sense Strand Starting at position 838 of SEQ ID NO: 315999
uagguuagaccaugucaac

SEQ ID NO: 384638 - RNA, 19 nt, Artificial Sequence
  Description of Artificial Sequence: Synthetic oligonucleotide
  Antisense Strand to SEQ ID NO: 384637
guugacauggucuaaccua

SEQ ID NO: 384639 - RNA, 19 nt, Artificial Sequence
  Description of Artificial Sequence: Synthetic oligonucleotide
  Sense Strand Starting at position 838 of SEQ ID NO: 316309
caugauaaagcugguaucu

SEQ ID NO: 384640 - RNA, 19 nt, Artificial Sequence
  Description of Artificial Sequence: Synthetic oligonucleotide
  Antisense Strand to SEQ ID NO: 384639
agauaccagcuuuaucaug

SEQ ID NO: 384641 - RNA, 19 nt, Artificial Sequence
  Description of Artificial Sequence: Synthetic oligonucleotide
  Sense Strand Starting at position 838 of SEQ ID NO: 316342
agugacgaccuuuauaaua

SEQ ID NO: 384642 - RNA, 19 nt, Artificial Sequence
  Description of Artificial Sequence: Synthetic oligonucleotide
  Antisense Strand to SEQ ID NO: 384641
uauuauaaaggucgucacu

SEQ ID NO: 384643 - RNA, 19 nt, Artificial Sequence
  Description of Artificial Sequence: Synthetic oligonucleotide
  Sense Strand Starting at position 838 of SEQ ID NO: 316509
cuucuauaacuugggugua

SEQ ID NO: 384644 - RNA, 19 nt, Artificial Sequence
  Description of Artificial Sequence: Synthetic oligonucleotide
  Antisense Strand to SEQ ID NO: 384643
uacacccaaguuauagaag

SEQ ID NO: 384645 - RNA, 19 nt, Artificial Sequence
  Description of Artificial Sequence: Synthetic oligonucleotide
  Sense Strand Starting at position 838 of SEQ ID NO: 316527
agggaagaguaugacuaaa

SEQ ID NO: 384646 - RNA, 19 nt, Artificial Sequence
  Description of Artificial Sequence: Synthetic oligonucleotide
  Antisense Strand to SEQ ID NO: 384645
uuuagucauacucuucccu

SEQ ID NO: 384647 - RNA, 19 nt, Artificial Sequence
  Description of Artificial Sequence: Synthetic oligonucleotide
  Sense Strand Starting at position 838 of SEQ ID NO: 316982
caccauacuccgggaggaa

SEQ ID NO: 384648 - RNA, 19 nt, Artificial Sequence
  Description of Artificial Sequence: Synthetic oligonucleotide
  Antisense Strand to SEQ ID NO: 384647
uuccucccggaguauggug

SEQ ID NO: 384649 - RNA, 19 nt, Artificial Sequence
  Description of Artificial Sequence: Synthetic oligonucleotide
  Sense Strand Starting at position 838 of SEQ ID NO: 317240
aaccgcuuccgucaaagau

SEQ ID NO: 384650 - RNA, 19 nt, Artificial Sequence
  Description of Artificial Sequence: Synthetic oligonucleotide
  Antisense Strand to SEQ ID NO: 384649
aucuuugacggaagcgguu

SEQ ID NO: 384651 - RNA, 19 nt, Artificial Sequence
  Description of Artificial Sequence: Synthetic oligonucleotide
  Sense Strand Starting at position 838 of SEQ ID NO: 317256
gauugaggccucgaguuug

SEQ ID NO: 384652 - RNA, 19 nt, Artificial Sequence
  Description of Artificial Sequence: Synthetic oligonucleotide
  Antisense Strand to SEQ ID NO: 384651
caaacucgaggccucaauc

SEQ ID NO: 384653 - RNA, 19 nt, Artificial Sequence
  Description of Artificial Sequence: Synthetic oligonucleotide
  Sense Strand Starting at position 838 of SEQ ID NO: 317314
acguuacugccagacaaau

SEQ ID NO: 384654 - RNA, 19 nt, Artificial Sequence
  Description of Artificial Sequence: Synthetic oligonucleotide
  Antisense Strand to SEQ ID NO: 384653
auuugucuggcaguaacgu

SEQ ID NO: 384655 - RNA, 19 nt, Artificial Sequence
  Description of Artificial Sequence: Synthetic oligonucleotide
  Sense Strand Starting at position 838 of SEQ ID NO: 317324
cagacaaauccugggucaa

SEQ ID NO: 384656 - RNA, 19 nt, Artificial Sequence
  Description of Artificial Sequence: Synthetic oligonucleotide
  Antisense Strand to SEQ ID NO: 384655
uugacccaggauuugucug

SEQ ID NO: 384657 - RNA, 19 nt, Artificial Sequence
  Description of Artificial Sequence: Synthetic oligonucleotide
  Sense Strand Starting at position 838 of SEQ ID NO: 317343
aauccugaggucugcaauu

SEQ ID NO: 384658 - RNA, 19 nt, Artificial Sequence
  Description of Artificial Sequence: Synthetic oligonucleotide
  Antisense Strand to SEQ ID NO: 384657
aauugcagaccucaggauu

SEQ ID NO: 384659 - RNA, 19 nt, Artificial Sequence
  Description of Artificial Sequence: Synthetic oligonucleotide
  Sense Strand Starting at position 838 of SEQ ID NO: 317446
ugagauaaagucuguagaa

SEQ ID NO: 384660 - RNA, 19 nt, Artificial Sequence
  Description of Artificial Sequence: Synthetic oligonucleotide
  Antisense Strand to SEQ ID NO: 384659
uucuacagacuuuaucuca

SEQ ID NO: 384661 - RNA, 19 nt, Artificial Sequence
  Description of Artificial Sequence: Synthetic oligonucleotide
  Sense Strand Starting at position 838 of SEQ ID NO: 317447
gagauaaagucuguagaau

SEQ ID NO: 384662 - RNA, 19 nt, Artificial Sequence
  Description of Artificial Sequence: Synthetic oligonucleotide
  Antisense Strand to SEQ ID NO: 384661
auucuacagacuuuaucuc

SEQ ID NO: 384663 - RNA, 19 nt, Artificial Sequence
  Description of Artificial Sequence: Synthetic oligonucleotide
  Sense Strand Starting at position 838 of SEQ ID NO: 317647
ucaaucaacgcguauugaa

SEQ ID NO: 384664 - RNA, 19 nt, Artificial Sequence
  Description of Artificial Sequence: Synthetic oligonucleotide
  Antisense Strand to SEQ ID NO: 384663
uucaauacgcguugauuga

SEQ ID NO: 384665 - RNA, 19 nt, Artificial Sequence
  Description of Artificial Sequence: Synthetic oligonucleotide
  Sense Strand Starting at position 838 of SEQ ID NO: 317660
auugaaggccuuugauaug

SEQ ID NO: 384666 - RNA, 19 nt, Artificial Sequence
  Description of Artificial Sequence: Synthetic oligonucleotide
  Antisense Strand to SEQ ID NO: 384665
cauaucaaaggccuucaau

SEQ ID NO: 384667 - RNA, 19 nt, Artificial Sequence
  Description of Artificial Sequence: Synthetic oligonucleotide
  Sense Strand Starting at position 838 of SEQ ID NO: 317811
gcaguauacagaugguaua

SEQ ID NO: 384668 - RNA, 19 nt, Artificial Sequence
  Description of Artificial Sequence: Synthetic oligonucleotide
  Antisense Strand to SEQ ID NO: 384667
uauaccaucuguauacugc

SEQ ID NO: 384669 - RNA, 19 nt, Artificial Sequence
  Description of Artificial Sequence: Synthetic oligonucleotide
  Sense Strand Starting at position 838 of SEQ ID NO: 317862
agaaauuauuuacacaggu

SEQ ID NO: 384670 - RNA, 19 nt, Artificial Sequence
  Description of Artificial Sequence: Synthetic oligonucleotide
  Antisense Strand to SEQ ID NO: 384669
accuguguaaauaauuucu

SEQ ID NO: 384671 - RNA, 19 nt, Artificial Sequence
  Description of Artificial Sequence: Synthetic oligonucleotide
  Sense Strand Starting at position 838 of SEQ ID NO: 317969
ucuccugaacuugguaaga

SEQ ID NO: 384672 - RNA, 19 nt, Artificial Sequence
  Description of Artificial Sequence: Synthetic oligonucleotide
  Antisense Strand to SEQ ID NO: 384671
ucuuaccaaguucaggaga

SEQ ID NO: 384673 - RNA, 19 nt, Artificial Sequence
  Description of Artificial Sequence: Synthetic oligonucleotide
  Sense Strand Starting at position 838 of SEQ ID NO: 318004
gcagguagaacccaugacu

SEQ ID NO: 384674 - RNA, 19 nt, Artificial Sequence
  Description of Artificial Sequence: Synthetic oligonucleotide
  Antisense Strand to SEQ ID NO: 384673
agucauggguucuaccugc

SEQ ID NO: 384675 - RNA, 19 nt, Artificial Sequence
  Description of Artificial Sequence: Synthetic oligonucleotide
  Sense Strand Starting at position 838 of SEQ ID NO: 318106
ugcagaacccaaugaguaa

SEQ ID NO: 384676 - RNA, 19 nt, Artificial Sequence
  Description of Artificial Sequence: Synthetic oligonucleotide
  Antisense Strand to SEQ ID NO: 384675
uuacucauuggguucugca

SEQ ID NO: 384677 - RNA, 19 nt, Artificial Sequence
  Description of Artificial Sequence: Synthetic oligonucleotide
  Sense Strand Starting at position 838 of SEQ ID NO: 318139
ugaugugguacuuagaggu

SEQ ID NO: 384678 - RNA, 19 nt, Artificial Sequence
  Description of Artificial Sequence: Synthetic oligonucleotide
  Antisense Strand to SEQ ID NO: 384677
accucuaaguaccacauca

SEQ ID NO: 384679 - RNA, 19 nt, Artificial Sequence
  Description of Artificial Sequence: Synthetic oligonucleotide
  Sense Strand Starting at position 838 of SEQ ID NO: 318203
uugguaucguauuugcauu

SEQ ID NO: 384680 - RNA, 19 nt, Artificial Sequence
  Description of Artificial Sequence: Synthetic oligonucleotide
  Antisense Strand to SEQ ID NO: 384679
aaugcaaauacgauaccaa

SEQ ID NO: 384681 - RNA, 19 nt, Artificial Sequence
  Description of Artificial Sequence: Synthetic oligonucleotide
  Sense Strand Starting at position 838 of SEQ ID NO: 318209
ucguauuugcauugagaua

SEQ ID NO: 384682 - RNA, 19 nt, Artificial Sequence
  Description of Artificial Sequence: Synthetic oligonucleotide
  Antisense Strand to SEQ ID NO: 384681
uaucucaaugcaaauacga

SEQ ID NO: 384683 - RNA, 19 nt, Artificial Sequence
  Description of Artificial Sequence: Synthetic oligonucleotide
  Sense Strand Starting at position 838 of SEQ ID NO: 318257
gugguucguuguaauuuag

SEQ ID NO: 384684 - RNA, 19 nt, Artificial Sequence
  Description of Artificial Sequence: Synthetic oligonucleotide
  Antisense Strand to SEQ ID NO: 384683
cuaaauuacaacgaaccac

SEQ ID NO: 384685 - RNA, 19 nt, Artificial Sequence
  Description of Artificial Sequence: Synthetic oligonucleotide
  Sense Strand Starting at position 838 of SEQ ID NO: 318314
ucaguaagaccuugcauga

SEQ ID NO: 384686 - RNA, 19 nt, Artificial Sequence
  Description of Artificial Sequence: Synthetic oligonucleotide
  Antisense Strand to SEQ ID NO: 384685
ucaugcaaggucuuacuga

SEQ ID NO: 384687 - RNA, 19 nt, Artificial Sequence
  Description of Artificial Sequence: Synthetic oligonucleotide
  Sense Strand Starting at position 838 of SEQ ID NO: 318319
aagaccuugcaugaugagu

SEQ ID NO: 384688 - RNA, 19 nt, Artificial Sequence
  Description of Artificial Sequence: Synthetic oligonucleotide
  Antisense Strand to SEQ ID NO: 384687
acucaucaugcaaggucuu

SEQ ID NO: 384689 - RNA, 19 nt, Artificial Sequence
  Description of Artificial Sequence: Synthetic oligonucleotide
  Sense Strand Starting at position 838 of SEQ ID NO: 318340
gggacuuucuaagaggaaa

SEQ ID NO: 384690 - RNA, 19 nt, Artificial Sequence
  Description of Artificial Sequence: Synthetic oligonucleotide
  Antisense Strand to SEQ ID NO: 384689
uuuccucuuagaaaguccc

SEQ ID NO: 384691 - RNA, 19 nt, Artificial Sequence
  Description of Artificial Sequence: Synthetic oligonucleotide
  Sense Strand Starting at position 838 of SEQ ID NO: 318373
gagaaugaggugugucucu

SEQ ID NO: 384692 - RNA, 19 nt, Artificial Sequence
  Description of Artificial Sequence: Synthetic oligonucleotide
  Antisense Strand to SEQ ID NO: 384691
agagacacaccucauucuc

SEQ ID NO: 384693 - RNA, 19 nt, Artificial Sequence
  Description of Artificial Sequence: Synthetic oligonucleotide
  Sense Strand Starting at position 838 of SEQ ID NO: 318426
ucaucugucaugcagagag

SEQ ID NO: 384694 - RNA, 19 nt, Artificial Sequence
  Description of Artificial Sequence: Synthetic oligonucleotide
  Antisense Strand to SEQ ID NO: 384693
cucucugcaugacagauga

SEQ ID NO: 384695 - RNA, 19 nt, Artificial Sequence
  Description of Artificial Sequence: Synthetic oligonucleotide
  Sense Strand Starting at position 838 of SEQ ID NO: 318634
gccaguggaucucuaaaug

SEQ ID NO: 384696 - RNA, 19 nt, Artificial Sequence
  Description of Artificial Sequence: Synthetic oligonucleotide
  Antisense Strand to SEQ ID NO: 384695
cauuuagagauccacuggc

SEQ ID NO: 384697 - RNA, 19 nt, Artificial Sequence
  Description of Artificial Sequence: Synthetic oligonucleotide
  Sense Strand Starting at position 838 of SEQ ID NO: 318688
agcaguaaccagggugaua

SEQ ID NO: 384698 - RNA, 19 nt, Artificial Sequence
  Description of Artificial Sequence: Synthetic oligonucleotide
  Antisense Strand to SEQ ID NO: 384697
uaucacccugguuacugcu

SEQ ID NO: 384699 - RNA, 19 nt, Artificial Sequence
  Description of Artificial Sequence: Synthetic oligonucleotide
  Sense Strand Starting at position 838 of SEQ ID NO: 318710
ccuagcaccgcguuacauu

SEQ ID NO: 384700 - RNA, 19 nt, Artificial Sequence
  Description of Artificial Sequence: Synthetic oligonucleotide
  Antisense Strand to SEQ ID NO: 384699
aauguaacgcggugcuagg

SEQ ID NO: 384701 - RNA, 19 nt, Artificial Sequence
  Description of Artificial Sequence: Synthetic oligonucleotide
  Sense Strand Starting at position 838 of SEQ ID NO: 318873
cuaacuucuguauggaaau

SEQ ID NO: 384702 - RNA, 19 nt, Artificial Sequence
  Description of Artificial Sequence: Synthetic oligonucleotide
  Antisense Strand to SEQ ID NO: 384701
auuuccauacagaaguuag

SEQ ID NO: 384703 - RNA, 19 nt, Artificial Sequence
  Description of Artificial Sequence: Synthetic oligonucleotide
  Sense Strand Starting at position 838 of SEQ ID NO: 319093
aaacuauuacgguaagugu

SEQ ID NO: 384704 - RNA, 19 nt, Artificial Sequence
  Description of Artificial Sequence: Synthetic oligonucleotide
  Antisense Strand to SEQ ID NO: 384703
acacuuaccguaauaguuu

SEQ ID NO: 384705 - RNA, 19 nt, Artificial Sequence
  Description of Artificial Sequence: Synthetic oligonucleotide
  Sense Strand Starting at position 839 of SEQ ID NO: 315246
guuacuauaaugggaguca

SEQ ID NO: 384706 - RNA, 19 nt, Artificial Sequence
  Description of Artificial Sequence: Synthetic oligonucleotide
  Antisense Strand to SEQ ID NO: 384705
ugacucccauuauaguaac

SEQ ID NO: 384707 - RNA, 19 nt, Artificial Sequence
  Description of Artificial Sequence: Synthetic oligonucleotide
  Sense Strand Starting at position 839 of SEQ ID NO: 315298
guuucauuucucggucagu

SEQ ID NO: 384708 - RNA, 19 nt, Artificial Sequence
  Description of Artificial Sequence: Synthetic oligonucleotide
  Antisense Strand to SEQ ID NO: 384707
acugaccgagaaaugaaac

SEQ ID NO: 384709 - RNA, 19 nt, Artificial Sequence
  Description of Artificial Sequence: Synthetic oligonucleotide
  Sense Strand Starting at position 839 of SEQ ID NO: 315301
ucauuucucggucagugua

SEQ ID NO: 384710 - RNA, 19 nt, Artificial Sequence
  Description of Artificial Sequence: Synthetic oligonucleotide
  Antisense Strand to SEQ ID NO: 384709
uacacugaccgagaaauga

SEQ ID NO: 384711 - RNA, 19 nt, Artificial Sequence
  Description of Artificial Sequence: Synthetic oligonucleotide
  Sense Strand Starting at position 839 of SEQ ID NO: 315303
auuucucggucaguguaau

SEQ ID NO: 384712 - RNA, 19 nt, Artificial Sequence
  Description of Artificial Sequence: Synthetic oligonucleotide
  Antisense Strand to SEQ ID NO: 384711
auuacacugaccgagaaau

SEQ ID NO: 384713 - RNA, 19 nt, Artificial Sequence
  Description of Artificial Sequence: Synthetic oligonucleotide
  Sense Strand Starting at position 839 of SEQ ID NO: 315311
gucaguguaaugcagagaa

SEQ ID NO: 384714 - RNA, 19 nt, Artificial Sequence
  Description of Artificial Sequence: Synthetic oligonucleotide
  Antisense Strand to SEQ ID NO: 384713
uucucugcauuacacugac

SEQ ID NO: 384715 - RNA, 19 nt, Artificial Sequence
  Description of Artificial Sequence: Synthetic oligonucleotide
  Sense Strand Starting at position 839 of SEQ ID NO: 315339
uaccgaaggugaguucuaa

SEQ ID NO: 384716 - RNA, 19 nt, Artificial Sequence
  Description of Artificial Sequence: Synthetic oligonucleotide
  Antisense Strand to SEQ ID NO: 384715
uuagaacucaccuucggua

SEQ ID NO: 384717 - RNA, 19 nt, Artificial Sequence
  Description of Artificial Sequence: Synthetic oligonucleotide
  Sense Strand Starting at position 839 of SEQ ID NO: 315359
ugccaaguagguuacauaa

SEQ ID NO: 384718 - RNA, 19 nt, Artificial Sequence
  Description of Artificial Sequence: Synthetic oligonucleotide
  Antisense Strand to SEQ ID NO: 384717
uuauguaaccuacuuggca

SEQ ID NO: 384719 - RNA, 19 nt, Artificial Sequence
  Description of Artificial Sequence: Synthetic oligonucleotide
  Sense Strand Starting at position 839 of SEQ ID NO: 315435
acaguugagagcugacacu

SEQ ID NO: 384720 - RNA, 19 nt, Artificial Sequence
  Description of Artificial Sequence: Synthetic oligonucleotide
  Antisense Strand to SEQ ID NO: 384719
agugucagcucucaacugu

SEQ ID NO: 384721 - RNA, 19 nt, Artificial Sequence
  Description of Artificial Sequence: Synthetic oligonucleotide
  Sense Strand Starting at position 839 of SEQ ID NO: 315515
cugggaaauagguguuuga

SEQ ID NO: 384722 - RNA, 19 nt, Artificial Sequence
  Description of Artificial Sequence: Synthetic oligonucleotide
  Antisense Strand to SEQ ID NO: 384721
ucaaacaccuauuucccag

SEQ ID NO: 384723 - RNA, 19 nt, Artificial Sequence
  Description of Artificial Sequence: Synthetic oligonucleotide
  Sense Strand Starting at position 839 of SEQ ID NO: 315518
ggaaauagguguuugacag

SEQ ID NO: 384724 - RNA, 19 nt, Artificial Sequence
  Description of Artificial Sequence: Synthetic oligonucleotide
  Antisense Strand to SEQ ID NO: 384723
cugucaaacaccuauuucc

SEQ ID NO: 384725 - RNA, 19 nt, Artificial Sequence
  Description of Artificial Sequence: Synthetic oligonucleotide
  Sense Strand Starting at position 839 of SEQ ID NO: 315524
agguguuugacaggcaaag

SEQ ID NO: 384726 - RNA, 19 nt, Artificial Sequence
  Description of Artificial Sequence: Synthetic oligonucleotide
  Antisense Strand to SEQ ID NO: 384725
cuuugccugucaaacaccu

SEQ ID NO: 384727 - RNA, 19 nt, Artificial Sequence
  Description of Artificial Sequence: Synthetic oligonucleotide
  Sense Strand Starting at position 839 of SEQ ID NO: 315526
guguuugacaggcaaagaa

SEQ ID NO: 384728 - RNA, 19 nt, Artificial Sequence
  Description of Artificial Sequence: Synthetic oligonucleotide
  Antisense Strand to SEQ ID NO: 384727
uucuuugccugucaaacac

SEQ ID NO: 384729 - RNA, 19 nt, Artificial Sequence
  Description of Artificial Sequence: Synthetic oligonucleotide
  Sense Strand Starting at position 839 of SEQ ID NO: 315664
guccacucagggcaaauau

SEQ ID NO: 384730 - RNA, 19 nt, Artificial Sequence
  Description of Artificial Sequence: Synthetic oligonucleotide
  Antisense Strand to SEQ ID NO: 384729
auauuugcccugaguggac

SEQ ID NO: 384731 - RNA, 19 nt, Artificial Sequence
  Description of Artificial Sequence: Synthetic oligonucleotide
  Sense Strand Starting at position 839 of SEQ ID NO: 315673
gggcaaauauuagccacaa

SEQ ID NO: 384732 - RNA, 19 nt, Artificial Sequence
  Description of Artificial Sequence: Synthetic oligonucleotide
  Antisense Strand to SEQ ID NO: 384731
uuguggcuaauauuugccc

SEQ ID NO: 384733 - RNA, 19 nt, Artificial Sequence
  Description of Artificial Sequence: Synthetic oligonucleotide
  Sense Strand Starting at position 839 of SEQ ID NO: 315674
ggcaaauauuagccacaau

SEQ ID NO: 384734 - RNA, 19 nt, Artificial Sequence
  Description of Artificial Sequence: Synthetic oligonucleotide
  Antisense Strand to SEQ ID NO: 384733
auuguggcuaauauuugcc

SEQ ID NO: 384735 - RNA, 19 nt, Artificial Sequence
  Description of Artificial Sequence: Synthetic oligonucleotide
  Sense Strand Starting at position 839 of SEQ ID NO: 316016
accgaaauauugccacauc

SEQ ID NO: 384736 - RNA, 19 nt, Artificial Sequence
  Description of Artificial Sequence: Synthetic oligonucleotide
  Antisense Strand to SEQ ID NO: 384735
gauguggcaauauuucggu

SEQ ID NO: 384737 - RNA, 19 nt, Artificial Sequence
  Description of Artificial Sequence: Synthetic oligonucleotide
  Sense Strand Starting at position 839 of SEQ ID NO: 316136
ggcagaaauauccgauagu

SEQ ID NO: 384738 - RNA, 19 nt, Artificial Sequence
  Description of Artificial Sequence: Synthetic oligonucleotide
  Antisense Strand to SEQ ID NO: 384737
acuaucggauauuucugcc

SEQ ID NO: 384739 - RNA, 19 nt, Artificial Sequence
  Description of Artificial Sequence: Synthetic oligonucleotide
  Sense Strand Starting at position 839 of SEQ ID NO: 316139
agaaauauccgauaguguc

SEQ ID NO: 384740 - RNA, 19 nt, Artificial Sequence
  Description of Artificial Sequence: Synthetic oligonucleotide
  Antisense Strand to SEQ ID NO: 384739
gacacuaucggauauuucu

SEQ ID NO: 384741 - RNA, 19 nt, Artificial Sequence
  Description of Artificial Sequence: Synthetic oligonucleotide
  Sense Strand Starting at position 839 of SEQ ID NO: 316595
agaggaaguuaccuuuaac

SEQ ID NO: 384742 - RNA, 19 nt, Artificial Sequence
  Description of Artificial Sequence: Synthetic oligonucleotide
  Antisense Strand to SEQ ID NO: 384741
guuaaagguaacuuccucu

SEQ ID NO: 384743 - RNA, 19 nt, Artificial Sequence
  Description of Artificial Sequence: Synthetic oligonucleotide
  Sense Strand Starting at position 839 of SEQ ID NO: 317002
ugaagaguugcucagcaaa

SEQ ID NO: 384744 - RNA, 19 nt, Artificial Sequence
  Description of Artificial Sequence: Synthetic oligonucleotide
  Antisense Strand to SEQ ID NO: 384743
uuugcugagcaacucuuca

SEQ ID NO: 384745 - RNA, 19 nt, Artificial Sequence
  Description of Artificial Sequence: Synthetic oligonucleotide
  Sense Strand Starting at position 839 of SEQ ID NO: 317037
gcagaacgacuuuaccaga

SEQ ID NO: 384746 - RNA, 19 nt, Artificial Sequence
  Description of Artificial Sequence: Synthetic oligonucleotide
  Antisense Strand to SEQ ID NO: 384745
ucugguaaagucguucugc

SEQ ID NO: 384747 - RNA, 19 nt, Artificial Sequence
  Description of Artificial Sequence: Synthetic oligonucleotide
  Sense Strand Starting at position 839 of SEQ ID NO: 317224
aguugauaacaauaguucu

SEQ ID NO: 384748 - RNA, 19 nt, Artificial Sequence
  Description of Artificial Sequence: Synthetic oligonucleotide
  Antisense Strand to SEQ ID NO: 384747
agaacuauuguuaucaacu

SEQ ID NO: 384749 - RNA, 19 nt, Artificial Sequence
  Description of Artificial Sequence: Synthetic oligonucleotide
  Sense Strand Starting at position 839 of SEQ ID NO: 317331
uuacuuugugaguaaacua

SEQ ID NO: 384750 - RNA, 19 nt, Artificial Sequence
  Description of Artificial Sequence: Synthetic oligonucleotide
  Antisense Strand to SEQ ID NO: 384749
uaguuuacucacaaaguaa

SEQ ID NO: 384751 - RNA, 19 nt, Artificial Sequence
  Description of Artificial Sequence: Synthetic oligonucleotide
  Sense Strand Starting at position 839 of SEQ ID NO: 317498
gaguauuuguaggugagca

SEQ ID NO: 384752 - RNA, 19 nt, Artificial Sequence
  Description of Artificial Sequence: Synthetic oligonucleotide
  Antisense Strand to SEQ ID NO: 384751
ugcucaccuacaaauacuc

SEQ ID NO: 384753 - RNA, 19 nt, Artificial Sequence
  Description of Artificial Sequence: Synthetic oligonucleotide
  Sense Strand Starting at position 839 of SEQ ID NO: 317710
uuuggucgugugagugaua

SEQ ID NO: 384754 - RNA, 19 nt, Artificial Sequence
  Description of Artificial Sequence: Synthetic oligonucleotide
  Antisense Strand to SEQ ID NO: 384753
uaucacucacacgaccaaa

SEQ ID NO: 384755 - RNA, 19 nt, Artificial Sequence
  Description of Artificial Sequence: Synthetic oligonucleotide
  Sense Strand Starting at position 839 of SEQ ID NO: 318205
aguuacuuuccagauugcu

SEQ ID NO: 384756 - RNA, 19 nt, Artificial Sequence
  Description of Artificial Sequence: Synthetic oligonucleotide
  Antisense Strand to SEQ ID NO: 384755
agcaaucuggaaaguaacu

SEQ ID NO: 384757 - RNA, 19 nt, Artificial Sequence
  Description of Artificial Sequence: Synthetic oligonucleotide
  Sense Strand Starting at position 839 of SEQ ID NO: 318287
acgaacaguuugcuaauaa

SEQ ID NO: 384758 - RNA, 19 nt, Artificial Sequence
  Description of Artificial Sequence: Synthetic oligonucleotide
  Antisense Strand to SEQ ID NO: 384757
uuauuagcaaacuguucgu

SEQ ID NO: 384759 - RNA, 19 nt, Artificial Sequence
  Description of Artificial Sequence: Synthetic oligonucleotide
  Sense Strand Starting at position 839 of SEQ ID NO: 318521
cauccagaauggguaagua

SEQ ID NO: 384760 - RNA, 19 nt, Artificial Sequence
  Description of Artificial Sequence: Synthetic oligonucleotide
  Antisense Strand to SEQ ID NO: 384759
uacuuacccauucuggaug

SEQ ID NO: 384761 - RNA, 19 nt, Artificial Sequence
  Description of Artificial Sequence: Synthetic oligonucleotide
  Sense Strand Starting at position 839 of SEQ ID NO: 318577
aguuuaaguggugauguua

SEQ ID NO: 384762 - RNA, 19 nt, Artificial Sequence
  Description of Artificial Sequence: Synthetic oligonucleotide
  Antisense Strand to SEQ ID NO: 384761
uaacaucaccacuuaaacu

SEQ ID NO: 384763 - RNA, 19 nt, Artificial Sequence
  Description of Artificial Sequence: Synthetic oligonucleotide
  Sense Strand Starting at position 839 of SEQ ID NO: 318583
aguggugauguuaguaagu

SEQ ID NO: 384764 - RNA, 19 nt, Artificial Sequence
  Description of Artificial Sequence: Synthetic oligonucleotide
  Antisense Strand to SEQ ID NO: 384763
acuuacuaacaucaccacu

SEQ ID NO: 384765 - RNA, 19 nt, Artificial Sequence
  Description of Artificial Sequence: Synthetic oligonucleotide
  Sense Strand Starting at position 839 of SEQ ID NO: 318619
aguccuuaaaguuggguaa

SEQ ID NO: 384766 - RNA, 19 nt, Artificial Sequence
  Description of Artificial Sequence: Synthetic oligonucleotide
  Antisense Strand to SEQ ID NO: 384765
uuacccaacuuuaaggacu

SEQ ID NO: 384767 - RNA, 19 nt, Artificial Sequence
  Description of Artificial Sequence: Synthetic oligonucleotide
  Sense Strand Starting at position 839 of SEQ ID NO: 318622
ccuuaaaguuggguaauga

SEQ ID NO: 384768 - RNA, 19 nt, Artificial Sequence
  Description of Artificial Sequence: Synthetic oligonucleotide
  Antisense Strand to SEQ ID NO: 384767
ucauuacccaacuuuaagg

SEQ ID NO: 384769 - RNA, 19 nt, Artificial Sequence
  Description of Artificial Sequence: Synthetic oligonucleotide
  Sense Strand Starting at position 839 of SEQ ID NO: 318662
uucuaugugcuagauauca

SEQ ID NO: 384770 - RNA, 19 nt, Artificial Sequence
  Description of Artificial Sequence: Synthetic oligonucleotide
  Antisense Strand to SEQ ID NO: 384769
ugauaucuagcacauagaa

SEQ ID NO: 384771 - RNA, 19 nt, Artificial Sequence
  Description of Artificial Sequence: Synthetic oligonucleotide
  Sense Strand Starting at position 839 of SEQ ID NO: 318719
acaauuccgaaagguguua

SEQ ID NO: 384772 - RNA, 19 nt, Artificial Sequence
  Description of Artificial Sequence: Synthetic oligonucleotide
  Antisense Strand to SEQ ID NO: 384771
uaacaccuuucggaauugu

SEQ ID NO: 384773 - RNA, 19 nt, Artificial Sequence
  Description of Artificial Sequence: Synthetic oligonucleotide
  Sense Strand Starting at position 839 of SEQ ID NO: 318732
guguuauuaccacacucau

SEQ ID NO: 384774 - RNA, 19 nt, Artificial Sequence
  Description of Artificial Sequence: Synthetic oligonucleotide
  Antisense Strand to SEQ ID NO: 384773
augagugugguaauaacac

SEQ ID NO: 384775 - RNA, 19 nt, Artificial Sequence
  Description of Artificial Sequence: Synthetic oligonucleotide
  Sense Strand Starting at position 839 of SEQ ID NO: 319112
agagguaugucacccaacu

SEQ ID NO: 384776 - RNA, 19 nt, Artificial Sequence
  Description of Artificial Sequence: Synthetic oligonucleotide
  Antisense Strand to SEQ ID NO: 384775
aguugggugacauaccucu

SEQ ID NO: 384777 - RNA, 19 nt, Artificial Sequence
  Description of Artificial Sequence: Synthetic oligonucleotide
  Sense Strand Starting at position 839 of SEQ ID NO: 319171
cuucuaaugucagugggaa

SEQ ID NO: 384778 - RNA, 19 nt, Artificial Sequence
  Description of Artificial Sequence: Synthetic oligonucleotide
  Antisense Strand to SEQ ID NO: 384777
uucccacugacauuagaag

SEQ ID NO: 384779 - RNA, 19 nt, Artificial Sequence
  Description of Artificial Sequence: Synthetic oligonucleotide
  Sense Strand Starting at position 839 of SEQ ID NO: 319172
uucuaaugucagugggaac

SEQ ID NO: 384780 - RNA, 19 nt, Artificial Sequence
  Description of Artificial Sequence: Synthetic oligonucleotide
  Antisense Strand to SEQ ID NO: 384779
guucccacugacauuagaa

SEQ ID NO: 384781 - RNA, 19 nt, Artificial Sequence
  Description of Artificial Sequence: Synthetic oligonucleotide
  Sense Strand Starting at position 839 of SEQ ID NO: 319173
ucuaaugucagugggaacu

SEQ ID NO: 384782 - RNA, 19 nt, Artificial Sequence
  Description of Artificial Sequence: Synthetic oligonucleotide
  Antisense Strand to SEQ ID NO: 384781
aguucccacugacauuaga

SEQ ID NO: 384783 - RNA, 19 nt, Artificial Sequence
  Description of Artificial Sequence: Synthetic oligonucleotide
  Sense Strand Starting at position 839 of SEQ ID NO: 319183
gugggaacuacuuaguuag

SEQ ID NO: 384784 - RNA, 19 nt, Artificial Sequence
  Description of Artificial Sequence: Synthetic oligonucleotide
  Antisense Strand to SEQ ID NO: 384783
cuaacuaaguaguucccac

SEQ ID NO: 384785 - RNA, 19 nt, Artificial Sequence
  Description of Artificial Sequence: Synthetic oligonucleotide
  Sense Strand Starting at position 840 of SEQ ID NO: 315562
gagggacccugucuuggaa

SEQ ID NO: 384786 - RNA, 19 nt, Artificial Sequence
  Description of Artificial Sequence: Synthetic oligonucleotide
  Antisense Strand to SEQ ID NO: 384785
uuccaagacagggucccuc

SEQ ID NO: 384787 - RNA, 19 nt, Artificial Sequence
  Description of Artificial Sequence: Synthetic oligonucleotide
  Sense Strand Starting at position 840 of SEQ ID NO: 315619
gugagaggacauggcuaaa

SEQ ID NO: 384788 - RNA, 19 nt, Artificial Sequence
  Description of Artificial Sequence: Synthetic oligonucleotide
  Antisense Strand to SEQ ID NO: 384787
uuuagccauguccucucac

SEQ ID NO: 384789 - RNA, 19 nt, Artificial Sequence
  Description of Artificial Sequence: Synthetic oligonucleotide
  Sense Strand Starting at position 840 of SEQ ID NO: 315946
guguguuugugcuuaucag

SEQ ID NO: 384790 - RNA, 19 nt, Artificial Sequence
  Description of Artificial Sequence: Synthetic oligonucleotide
  Antisense Strand to SEQ ID NO: 384789
cugauaagcacaaacacac

SEQ ID NO: 384791 - RNA, 19 nt, Artificial Sequence
  Description of Artificial Sequence: Synthetic oligonucleotide
  Sense Strand Starting at position 840 of SEQ ID NO: 315947
uguguuugugcuuaucagu

SEQ ID NO: 384792 - RNA, 19 nt, Artificial Sequence
  Description of Artificial Sequence: Synthetic oligonucleotide
  Antisense Strand to SEQ ID NO: 384791
acugauaagcacaaacaca

SEQ ID NO: 384793 - RNA, 19 nt, Artificial Sequence
  Description of Artificial Sequence: Synthetic oligonucleotide
  Sense Strand Starting at position 840 of SEQ ID NO: 316376
agcucuuugucacucagaa

SEQ ID NO: 384794 - RNA, 19 nt, Artificial Sequence
  Description of Artificial Sequence: Synthetic oligonucleotide
  Antisense Strand to SEQ ID NO: 384793
uucugagugacaaagagcu

SEQ ID NO: 384795 - RNA, 19 nt, Artificial Sequence
  Description of Artificial Sequence: Synthetic oligonucleotide
  Sense Strand Starting at position 840 of SEQ ID NO: 316597
ggccgagucaccgagcuau

SEQ ID NO: 384796 - RNA, 19 nt, Artificial Sequence
  Description of Artificial Sequence: Synthetic oligonucleotide
  Antisense Strand to SEQ ID NO: 384795
auagcucggugacucggcc

SEQ ID NO: 384797 - RNA, 19 nt, Artificial Sequence
  Description of Artificial Sequence: Synthetic oligonucleotide
  Sense Strand Starting at position 840 of SEQ ID NO: 316658
gccagauuauccucccgga

SEQ ID NO: 384798 - RNA, 19 nt, Artificial Sequence
  Description of Artificial Sequence: Synthetic oligonucleotide
  Antisense Strand to SEQ ID NO: 384797
uccgggaggauaaucuggc

SEQ ID NO: 384799 - RNA, 19 nt, Artificial Sequence
  Description of Artificial Sequence: Synthetic oligonucleotide
  Sense Strand Starting at position 840 of SEQ ID NO: 316662
gauuauccucccggagcuu

SEQ ID NO: 384800 - RNA, 19 nt, Artificial Sequence
  Description of Artificial Sequence: Synthetic oligonucleotide
  Antisense Strand to SEQ ID NO: 384799
aagcuccgggaggauaauc

SEQ ID NO: 384801 - RNA, 19 nt, Artificial Sequence
  Description of Artificial Sequence: Synthetic oligonucleotide
  Sense Strand Starting at position 840 of SEQ ID NO: 316714
acucaagaguucugaggag

SEQ ID NO: 384802 - RNA, 19 nt, Artificial Sequence
  Description of Artificial Sequence: Synthetic oligonucleotide
  Antisense Strand to SEQ ID NO: 384801
cuccucagaacucuugagu

SEQ ID NO: 384803 - RNA, 19 nt, Artificial Sequence
  Description of Artificial Sequence: Synthetic oligonucleotide
  Sense Strand Starting at position 840 of SEQ ID NO: 316732
gccagaacuccggaucagu

SEQ ID NO: 384804 - RNA, 19 nt, Artificial Sequence
  Description of Artificial Sequence: Synthetic oligonucleotide
  Antisense Strand to SEQ ID NO: 384803
acugauccggaguucuggc

SEQ ID NO: 384805 - RNA, 19 nt, Artificial Sequence
  Description of Artificial Sequence: Synthetic oligonucleotide
  Sense Strand Starting at position 840 of SEQ ID NO: 316749
guggccuugaacugauaga

SEQ ID NO: 384806 - RNA, 19 nt, Artificial Sequence
  Description of Artificial Sequence: Synthetic oligonucleotide
  Antisense Strand to SEQ ID NO: 384805
ucuaucaguucaaggccac

SEQ ID NO: 384807 - RNA, 19 nt, Artificial Sequence
  Description of Artificial Sequence: Synthetic oligonucleotide
  Sense Strand Starting at position 840 of SEQ ID NO: 317910
ccuagaaagccguucgcuu

SEQ ID NO: 384808 - RNA, 19 nt, Artificial Sequence
  Description of Artificial Sequence: Synthetic oligonucleotide
  Antisense Strand to SEQ ID NO: 384807
aagcgaacggcuuucuagg

SEQ ID NO: 384809 - RNA, 19 nt, Artificial Sequence
  Description of Artificial Sequence: Synthetic oligonucleotide
  Sense Strand Starting at position 840 of SEQ ID NO: 317911
cuagaaagccguucgcuua

SEQ ID NO: 384810 - RNA, 19 nt, Artificial Sequence
  Description of Artificial Sequence: Synthetic oligonucleotide
  Antisense Strand to SEQ ID NO: 384809
uaagcgaacggcuuucuag

SEQ ID NO: 384811 - RNA, 19 nt, Artificial Sequence
  Description of Artificial Sequence: Synthetic oligonucleotide
  Sense Strand Starting at position 840 of SEQ ID NO: 317912
uagaaagccguucgcuuaa

SEQ ID NO: 384812 - RNA, 19 nt, Artificial Sequence
  Description of Artificial Sequence: Synthetic oligonucleotide
  Antisense Strand to SEQ ID NO: 384811
uuaagcgaacggcuuucua

SEQ ID NO: 384813 - RNA, 19 nt, Artificial Sequence
  Description of Artificial Sequence: Synthetic oligonucleotide
  Sense Strand Starting at position 840 of SEQ ID NO: 318103
ggagaucuccagcgacucu

SEQ ID NO: 384814 - RNA, 19 nt, Artificial Sequence
  Description of Artificial Sequence: Synthetic oligonucleotide
  Antisense Strand to SEQ ID NO: 384813
agagucgcuggagaucucc

SEQ ID NO: 384815 - RNA, 19 nt, Artificial Sequence
  Description of Artificial Sequence: Synthetic oligonucleotide
  Sense Strand Starting at position 840 of SEQ ID NO: 318192
cugagugaguccgaacaga

SEQ ID NO: 384816 - RNA, 19 nt, Artificial Sequence
  Description of Artificial Sequence: Synthetic oligonucleotide
  Antisense Strand to SEQ ID NO: 384815
ucuguucggacucacucag

SEQ ID NO: 384817 - RNA, 19 nt, Artificial Sequence
  Description of Artificial Sequence: Synthetic oligonucleotide
  Sense Strand Starting at position 840 of SEQ ID NO: 318235
gucccuuggcucugagauc

SEQ ID NO: 384818 - RNA, 19 nt, Artificial Sequence
  Description of Artificial Sequence: Synthetic oligonucleotide
  Antisense Strand to SEQ ID NO: 384817
gaucucagagccaagggac

SEQ ID NO: 384819 - RNA, 19 nt, Artificial Sequence
  Description of Artificial Sequence: Synthetic oligonucleotide
  Sense Strand Starting at position 840 of SEQ ID NO: 318244
cucugagaucguggcuguu

SEQ ID NO: 384820 - RNA, 19 nt, Artificial Sequence
  Description of Artificial Sequence: Synthetic oligonucleotide
  Antisense Strand to SEQ ID NO: 384819
aacagccacgaucucagag

SEQ ID NO: 384821 - RNA, 19 nt, Artificial Sequence
  Description of Artificial Sequence: Synthetic oligonucleotide
  Sense Strand Starting at position 840 of SEQ ID NO: 318254
guggcuguuuccuuuaguu

SEQ ID NO: 384822 - RNA, 19 nt, Artificial Sequence
  Description of Artificial Sequence: Synthetic oligonucleotide
  Antisense Strand to SEQ ID NO: 384821
aacuaaaggaaacagccac

SEQ ID NO: 384823 - RNA, 19 nt, Artificial Sequence
  Description of Artificial Sequence: Synthetic oligonucleotide
  Sense Strand Starting at position 840 of SEQ ID NO: 318286
agucuuguuucugcgaggu

SEQ ID NO: 384824 - RNA, 19 nt, Artificial Sequence
  Description of Artificial Sequence: Synthetic oligonucleotide
  Antisense Strand to SEQ ID NO: 384823
accucgcagaaacaagacu

SEQ ID NO: 384825 - RNA, 19 nt, Artificial Sequence
  Description of Artificial Sequence: Synthetic oligonucleotide
  Sense Strand Starting at position 840 of SEQ ID NO: 318299
cgaggucucugggugggaa

SEQ ID NO: 384826 - RNA, 19 nt, Artificial Sequence
  Description of Artificial Sequence: Synthetic oligonucleotide
  Antisense Strand to SEQ ID NO: 384825
uucccacccagagaccucg

SEQ ID NO: 384827 - RNA, 19 nt, Artificial Sequence
  Description of Artificial Sequence: Synthetic oligonucleotide
  Sense Strand Starting at position 840 of SEQ ID NO: 318344
uugagaccuccuuagguuu

SEQ ID NO: 384828 - RNA, 19 nt, Artificial Sequence
  Description of Artificial Sequence: Synthetic oligonucleotide
  Antisense Strand to SEQ ID NO: 384827
aaaccuaaggaggucucaa

SEQ ID NO: 384829 - RNA, 19 nt, Artificial Sequence
  Description of Artificial Sequence: Synthetic oligonucleotide
  Sense Strand Starting at position 840 of SEQ ID NO: 318373
uggacugauugagaaauug

SEQ ID NO: 384830 - RNA, 19 nt, Artificial Sequence
  Description of Artificial Sequence: Synthetic oligonucleotide
  Antisense Strand to SEQ ID NO: 384829
caauuucucaaucagucca

SEQ ID NO: 384831 - RNA, 19 nt, Artificial Sequence
  Description of Artificial Sequence: Synthetic oligonucleotide
  Sense Strand Starting at position 840 of SEQ ID NO: 318411
ugucaaguauuucuugcau

SEQ ID NO: 384832 - RNA, 19 nt, Artificial Sequence
  Description of Artificial Sequence: Synthetic oligonucleotide
  Antisense Strand to SEQ ID NO: 384831
augcaagaaauacuugaca

SEQ ID NO: 384833 - RNA, 19 nt, Artificial Sequence
  Description of Artificial Sequence: Synthetic oligonucleotide
  Sense Strand Starting at position 840 of SEQ ID NO: 318538
gugaagagaguguguugua

SEQ ID NO: 384834 - RNA, 19 nt, Artificial Sequence
  Description of Artificial Sequence: Synthetic oligonucleotide
  Antisense Strand to SEQ ID NO: 384833
uacaacacacucucuucac

SEQ ID NO: 384835 - RNA, 19 nt, Artificial Sequence
  Description of Artificial Sequence: Synthetic oligonucleotide
  Sense Strand Starting at position 840 of SEQ ID NO: 318547
guguguuguagugaggugu

SEQ ID NO: 384836 - RNA, 19 nt, Artificial Sequence
  Description of Artificial Sequence: Synthetic oligonucleotide
  Antisense Strand to SEQ ID NO: 384835
acaccucacuacaacacac

SEQ ID NO: 384837 - RNA, 19 nt, Artificial Sequence
  Description of Artificial Sequence: Synthetic oligonucleotide
  Sense Strand Starting at position 840 of SEQ ID NO: 318551
guuguagugagguguguau

SEQ ID NO: 384838 - RNA, 19 nt, Artificial Sequence
  Description of Artificial Sequence: Synthetic oligonucleotide
  Antisense Strand to SEQ ID NO: 384837
auacacaccucacuacaac

SEQ ID NO: 384839 - RNA, 19 nt, Artificial Sequence
  Description of Artificial Sequence: Synthetic oligonucleotide
  Sense Strand Starting at position 840 of SEQ ID NO: 318553
uguagugagguguguauuu

SEQ ID NO: 384840 - RNA, 19 nt, Artificial Sequence
  Description of Artificial Sequence: Synthetic oligonucleotide
  Antisense Strand to SEQ ID NO: 384839
aaauacacaccucacuaca

SEQ ID NO: 384841 - RNA, 19 nt, Artificial Sequence
  Description of Artificial Sequence: Synthetic oligonucleotide
  Sense Strand Starting at position 840 of SEQ ID NO: 318573
auaguuguguguucuggga

SEQ ID NO: 384842 - RNA, 19 nt, Artificial Sequence
  Description of Artificial Sequence: Synthetic oligonucleotide
  Antisense Strand to SEQ ID NO: 384841
ucccagaacacacaacuau

SEQ ID NO: 384843 - RNA, 19 nt, Artificial Sequence
  Description of Artificial Sequence: Synthetic oligonucleotide
  Sense Strand Starting at position 840 of SEQ ID NO: 318577
uuguguguucugggaacag

SEQ ID NO: 384844 - RNA, 19 nt, Artificial Sequence
  Description of Artificial Sequence: Synthetic oligonucleotide
  Antisense Strand to SEQ ID NO: 384843
cuguucccagaacacacaa

SEQ ID NO: 384845 - RNA, 19 nt, Artificial Sequence
  Description of Artificial Sequence: Synthetic oligonucleotide
  Sense Strand Starting at position 840 of SEQ ID NO: 318608
uaaauagggucuugagaga

SEQ ID NO: 384846 - RNA, 19 nt, Artificial Sequence
  Description of Artificial Sequence: Synthetic oligonucleotide
  Antisense Strand to SEQ ID NO: 384845
ucucucaagacccuauuua

SEQ ID NO: 384847 - RNA, 19 nt, Artificial Sequence
  Description of Artificial Sequence: Synthetic oligonucleotide
  Sense Strand Starting at position 840 of SEQ ID NO: 318673
agaggaaagucugaggugu

SEQ ID NO: 384848 - RNA, 19 nt, Artificial Sequence
  Description of Artificial Sequence: Synthetic oligonucleotide
  Antisense Strand to SEQ ID NO: 384847
acaccucagacuuuccucu

SEQ ID NO: 384849 - RNA, 19 nt, Artificial Sequence
  Description of Artificial Sequence: Synthetic oligonucleotide
  Sense Strand Starting at position 840 of SEQ ID NO: 318677
gaaagucugagguguaagu

SEQ ID NO: 384850 - RNA, 19 nt, Artificial Sequence
  Description of Artificial Sequence: Synthetic oligonucleotide
  Antisense Strand to SEQ ID NO: 384849
acuuacaccucagacuuuc

SEQ ID NO: 384851 - RNA, 19 nt, Artificial Sequence
  Description of Artificial Sequence: Synthetic oligonucleotide
  Sense Strand Starting at position 840 of SEQ ID NO: 318686
agguguaagugugccagaa

SEQ ID NO: 384852 - RNA, 19 nt, Artificial Sequence
  Description of Artificial Sequence: Synthetic oligonucleotide
  Antisense Strand to SEQ ID NO: 384851
uucuggcacacuuacaccu

SEQ ID NO: 384853 - RNA, 19 nt, Artificial Sequence
  Description of Artificial Sequence: Synthetic oligonucleotide
  Sense Strand Starting at position 840 of SEQ ID NO: 318830
gcgagaucuugucuguaca

SEQ ID NO: 384854 - RNA, 19 nt, Artificial Sequence
  Description of Artificial Sequence: Synthetic oligonucleotide
  Antisense Strand to SEQ ID NO: 384853
uguacagacaagaucucgc

SEQ ID NO: 384855 - RNA, 19 nt, Artificial Sequence
  Description of Artificial Sequence: Synthetic oligonucleotide
  Sense Strand Starting at position 840 of SEQ ID NO: 318831
cgagaucuugucuguacaa

SEQ ID NO: 384856 - RNA, 19 nt, Artificial Sequence
  Description of Artificial Sequence: Synthetic oligonucleotide
  Antisense Strand to SEQ ID NO: 384855
uuguacagacaagaucucg

SEQ ID NO: 384857 - RNA, 19 nt, Artificial Sequence
  Description of Artificial Sequence: Synthetic oligonucleotide
  Sense Strand Starting at position 840 of SEQ ID NO: 319037
gucauaagugcauguagau

SEQ ID NO: 384858 - RNA, 19 nt, Artificial Sequence
  Description of Artificial Sequence: Synthetic oligonucleotide
  Antisense Strand to SEQ ID NO: 384857
aucuacaugcacuuaugac

SEQ ID NO: 384859 - RNA, 19 nt, Artificial Sequence
  Description of Artificial Sequence: Synthetic oligonucleotide
  Sense Strand Starting at position 840 of SEQ ID NO: 319184
uagugccuucccuaugagu

SEQ ID NO: 384860 - RNA, 19 nt, Artificial Sequence
  Description of Artificial Sequence: Synthetic oligonucleotide
  Antisense Strand to SEQ ID NO: 384859
acucauagggaaggcacua

SEQ ID NO: 384861 - RNA, 19 nt, Artificial Sequence
  Description of Artificial Sequence: Synthetic oligonucleotide
  Sense Strand Starting at position 840 of SEQ ID NO: 319186
gugccuucccuaugaguug

SEQ ID NO: 384862 - RNA, 19 nt, Artificial Sequence
  Description of Artificial Sequence: Synthetic oligonucleotide
  Antisense Strand to SEQ ID NO: 384861
caacucauagggaaggcac

SEQ ID NO: 384863 - RNA, 19 nt, Artificial Sequence
  Description of Artificial Sequence: Synthetic oligonucleotide
  Sense Strand Starting at position 840 of SEQ ID NO: 319192
ucccuaugaguugacuuua

SEQ ID NO: 384864 - RNA, 19 nt, Artificial Sequence
  Description of Artificial Sequence: Synthetic oligonucleotide
  Antisense Strand to SEQ ID NO: 384863
uaaagucaacucauaggga

SEQ ID NO: 384865 - RNA, 19 nt, Artificial Sequence
  Description of Artificial Sequence: Synthetic oligonucleotide
  Sense Strand Starting at position 841 of SEQ ID NO: 315418
gcgcccagccaucaauaua

SEQ ID NO: 384866 - RNA, 19 nt, Artificial Sequence
  Description of Artificial Sequence: Synthetic oligonucleotide
  Antisense Strand to SEQ ID NO: 384865
uauauugauggcugggcgc

SEQ ID NO: 384867 - RNA, 19 nt, Artificial Sequence
  Description of Artificial Sequence: Synthetic oligonucleotide
  Sense Strand Starting at position 841 of SEQ ID NO: 315489
guauuacauuuacaugguu

SEQ ID NO: 384868 - RNA, 19 nt, Artificial Sequence
  Description of Artificial Sequence: Synthetic oligonucleotide
  Antisense Strand to SEQ ID NO: 384867
aaccauguaaauguaauac

SEQ ID NO: 384869 - RNA, 19 nt, Artificial Sequence
  Description of Artificial Sequence: Synthetic oligonucleotide
  Sense Strand Starting at position 841 of SEQ ID NO: 315536
ccugucuccgcugcuaaau

SEQ ID NO: 384870 - RNA, 19 nt, Artificial Sequence
  Description of Artificial Sequence: Synthetic oligonucleotide
  Antisense Strand to SEQ ID NO: 384869
auuuagcagcggagacagg

SEQ ID NO: 384871 - RNA, 19 nt, Artificial Sequence
  Description of Artificial Sequence: Synthetic oligonucleotide
  Sense Strand Starting at position 841 of SEQ ID NO: 315537
cugucuccgcugcuaaauu

SEQ ID NO: 384872 - RNA, 19 nt, Artificial Sequence
  Description of Artificial Sequence: Synthetic oligonucleotide
  Antisense Strand to SEQ ID NO: 384871
aauuuagcagcggagacag

SEQ ID NO: 384873 - RNA, 19 nt, Artificial Sequence
  Description of Artificial Sequence: Synthetic oligonucleotide
  Sense Strand Starting at position 841 of SEQ ID NO: 315880
gggacaaauuccuagaaau

SEQ ID NO: 384874 - RNA, 19 nt, Artificial Sequence
  Description of Artificial Sequence: Synthetic oligonucleotide
  Antisense Strand to SEQ ID NO: 384873
auuucuaggaauuuguccc

SEQ ID NO: 384875 - RNA, 19 nt, Artificial Sequence
  Description of Artificial Sequence: Synthetic oligonucleotide
  Sense Strand Starting at position 841 of SEQ ID NO: 315917
aguauaugcaguuguaauu

SEQ ID NO: 384876 - RNA, 19 nt, Artificial Sequence
  Description of Artificial Sequence: Synthetic oligonucleotide
  Antisense Strand to SEQ ID NO: 384875
aauuacaacugcauauacu

SEQ ID NO: 384877 - RNA, 19 nt, Artificial Sequence
  Description of Artificial Sequence: Synthetic oligonucleotide
  Sense Strand Starting at position 841 of SEQ ID NO: 315936
cugacaguauugccaaauu

SEQ ID NO: 384878 - RNA, 19 nt, Artificial Sequence
  Description of Artificial Sequence: Synthetic oligonucleotide
  Antisense Strand to SEQ ID NO: 384877
aauuuggcaauacugucag

SEQ ID NO: 384879 - RNA, 19 nt, Artificial Sequence
  Description of Artificial Sequence: Synthetic oligonucleotide
  Sense Strand Starting at position 841 of SEQ ID NO: 316045
guaaauguguccuccacac

SEQ ID NO: 384880 - RNA, 19 nt, Artificial Sequence
  Description of Artificial Sequence: Synthetic oligonucleotide
  Antisense Strand to SEQ ID NO: 384879
guguggaggacacauuuac

SEQ ID NO: 384881 - RNA, 19 nt, Artificial Sequence
  Description of Artificial Sequence: Synthetic oligonucleotide
  Sense Strand Starting at position 841 of SEQ ID NO: 316061
cacgguugucagcaccaua

SEQ ID NO: 384882 - RNA, 19 nt, Artificial Sequence
  Description of Artificial Sequence: Synthetic oligonucleotide
  Antisense Strand to SEQ ID NO: 384881
uauggugcugacaaccgug

SEQ ID NO: 384883 - RNA, 19 nt, Artificial Sequence
  Description of Artificial Sequence: Synthetic oligonucleotide
  Sense Strand Starting at position 841 of SEQ ID NO: 316238
ucugaaucgagaugugaug

SEQ ID NO: 384884 - RNA, 19 nt, Artificial Sequence
  Description of Artificial Sequence: Synthetic oligonucleotide
  Antisense Strand to SEQ ID NO: 384883
caucacaucucgauucaga

SEQ ID NO: 384885 - RNA, 19 nt, Artificial Sequence
  Description of Artificial Sequence: Synthetic oligonucleotide
  Sense Strand Starting at position 841 of SEQ ID NO: 316240
ugaaucgagaugugaugua

SEQ ID NO: 384886 - RNA, 19 nt, Artificial Sequence
  Description of Artificial Sequence: Synthetic oligonucleotide
  Antisense Strand to SEQ ID NO: 384885
uacaucacaucucgauuca

SEQ ID NO: 384887 - RNA, 19 nt, Artificial Sequence
  Description of Artificial Sequence: Synthetic oligonucleotide
  Sense Strand Starting at position 841 of SEQ ID NO: 316245
cgagaugugauguaaguau

SEQ ID NO: 384888 - RNA, 19 nt, Artificial Sequence
  Description of Artificial Sequence: Synthetic oligonucleotide
  Antisense Strand to SEQ ID NO: 384887
auacuuacaucacaucucg

SEQ ID NO: 384889 - RNA, 19 nt, Artificial Sequence
  Description of Artificial Sequence: Synthetic oligonucleotide
  Sense Strand Starting at position 841 of SEQ ID NO: 316279
uugcaaagacgugguauga

SEQ ID NO: 384890 - RNA, 19 nt, Artificial Sequence
  Description of Artificial Sequence: Synthetic oligonucleotide
  Antisense Strand to SEQ ID NO: 384889
ucauaccacgucuuugcaa

SEQ ID NO: 384891 - RNA, 19 nt, Artificial Sequence
  Description of Artificial Sequence: Synthetic oligonucleotide
  Sense Strand Starting at position 841 of SEQ ID NO: 316283
aaagacgugguaugauaaa

SEQ ID NO: 384892 - RNA, 19 nt, Artificial Sequence
  Description of Artificial Sequence: Synthetic oligonucleotide
  Antisense Strand to SEQ ID NO: 384891
uuuaucauaccacgucuuu

SEQ ID NO: 384893 - RNA, 19 nt, Artificial Sequence
  Description of Artificial Sequence: Synthetic oligonucleotide
  Sense Strand Starting at position 841 of SEQ ID NO: 316490
acuggcucccauuguauuu

SEQ ID NO: 384894 - RNA, 19 nt, Artificial Sequence
  Description of Artificial Sequence: Synthetic oligonucleotide
  Antisense Strand to SEQ ID NO: 384893
aaauacaaugggagccagu

SEQ ID NO: 384895 - RNA, 19 nt, Artificial Sequence
  Description of Artificial Sequence: Synthetic oligonucleotide
  Sense Strand Starting at position 841 of SEQ ID NO: 316502
uguauuucugcuggacagu

SEQ ID NO: 384896 - RNA, 19 nt, Artificial Sequence
  Description of Artificial Sequence: Synthetic oligonucleotide
  Antisense Strand to SEQ ID NO: 384895
acuguccagcagaaauaca

SEQ ID NO: 384897 - RNA, 19 nt, Artificial Sequence
  Description of Artificial Sequence: Synthetic oligonucleotide
  Sense Strand Starting at position 841 of SEQ ID NO: 316679
uuaagauucugcuugaaac

SEQ ID NO: 384898 - RNA, 19 nt, Artificial Sequence
  Description of Artificial Sequence: Synthetic oligonucleotide
  Antisense Strand to SEQ ID NO: 384897
guuucaagcagaaucuuaa

SEQ ID NO: 384899 - RNA, 19 nt, Artificial Sequence
  Description of Artificial Sequence: Synthetic oligonucleotide
  Sense Strand Starting at position 841 of SEQ ID NO: 316706
ggaggccuuggagaaguuu

SEQ ID NO: 384900 - RNA, 19 nt, Artificial Sequence
  Description of Artificial Sequence: Synthetic oligonucleotide
  Antisense Strand to SEQ ID NO: 384899
aaacuucuccaaggccucc

SEQ ID NO: 384901 - RNA, 19 nt, Artificial Sequence
  Description of Artificial Sequence: Synthetic oligonucleotide
  Sense Strand Starting at position 841 of SEQ ID NO: 316786
cucuuugggcagcaagaaa

SEQ ID NO: 384902 - RNA, 19 nt, Artificial Sequence
  Description of Artificial Sequence: Synthetic oligonucleotide
  Antisense Strand to SEQ ID NO: 384901
uuucuugcugcccaaagag

SEQ ID NO: 384903 - RNA, 19 nt, Artificial Sequence
  Description of Artificial Sequence: Synthetic oligonucleotide
  Sense Strand Starting at position 841 of SEQ ID NO: 316811
agugcuguugguuaaauca

SEQ ID NO: 384904 - RNA, 19 nt, Artificial Sequence
  Description of Artificial Sequence: Synthetic oligonucleotide
  Antisense Strand to SEQ ID NO: 384903
ugauuuaaccaacagcacu

SEQ ID NO: 384905 - RNA, 19 nt, Artificial Sequence
  Description of Artificial Sequence: Synthetic oligonucleotide
  Sense Strand Starting at position 841 of SEQ ID NO: 316859
ccgucuaaaggguagaguu

SEQ ID NO: 384906 - RNA, 19 nt, Artificial Sequence
  Description of Artificial Sequence: Synthetic oligonucleotide
  Antisense Strand to SEQ ID NO: 384905
aacucuacccuuuagacgg

SEQ ID NO: 384907 - RNA, 19 nt, Artificial Sequence
  Description of Artificial Sequence: Synthetic oligonucleotide
  Sense Strand Starting at position 841 of SEQ ID NO: 316995
ugguaacagcaguaagagu

SEQ ID NO: 384908 - RNA, 19 nt, Artificial Sequence
  Description of Artificial Sequence: Synthetic oligonucleotide
  Antisense Strand to SEQ ID NO: 384907
acucuuacugcuguuacca

SEQ ID NO: 384909 - RNA, 19 nt, Artificial Sequence
  Description of Artificial Sequence: Synthetic oligonucleotide
  Sense Strand Starting at position 841 of SEQ ID NO: 317004
caguaagaguuacaaagaa

SEQ ID NO: 384910 - RNA, 19 nt, Artificial Sequence
  Description of Artificial Sequence: Synthetic oligonucleotide
  Antisense Strand to SEQ ID NO: 384909
uucuuuguaacucuuacug

SEQ ID NO: 384911 - RNA, 19 nt, Artificial Sequence
  Description of Artificial Sequence: Synthetic oligonucleotide
  Sense Strand Starting at position 841 of SEQ ID NO: 317034
ggagaaacuuacuuucuuu

SEQ ID NO: 384912 - RNA, 19 nt, Artificial Sequence
  Description of Artificial Sequence: Synthetic oligonucleotide
  Antisense Strand to SEQ ID NO: 384911
aaagaaaguaaguuucucc

SEQ ID NO: 384913 - RNA, 19 nt, Artificial Sequence
  Description of Artificial Sequence: Synthetic oligonucleotide
  Sense Strand Starting at position 841 of SEQ ID NO: 317044
acuuucuuugcauagucua

SEQ ID NO: 384914 - RNA, 19 nt, Artificial Sequence
  Description of Artificial Sequence: Synthetic oligonucleotide
  Antisense Strand to SEQ ID NO: 384913
uagacuaugcaaagaaagu

SEQ ID NO: 384915 - RNA, 19 nt, Artificial Sequence
  Description of Artificial Sequence: Synthetic oligonucleotide
  Sense Strand Starting at position 841 of SEQ ID NO: 317052
ugcauagucuacucacaag

SEQ ID NO: 384916 - RNA, 19 nt, Artificial Sequence
  Description of Artificial Sequence: Synthetic oligonucleotide
  Antisense Strand to SEQ ID NO: 384915
cuugugaguagacuaugca

SEQ ID NO: 384917 - RNA, 19 nt, Artificial Sequence
  Description of Artificial Sequence: Synthetic oligonucleotide
  Sense Strand Starting at position 841 of SEQ ID NO: 317780
uguggaugcuuuccauauc

SEQ ID NO: 384918 - RNA, 19 nt, Artificial Sequence
  Description of Artificial Sequence: Synthetic oligonucleotide
  Antisense Strand to SEQ ID NO: 384917
gauauggaaagcauccaca

SEQ ID NO: 384919 - RNA, 19 nt, Artificial Sequence
  Description of Artificial Sequence: Synthetic oligonucleotide
  Sense Strand Starting at position 841 of SEQ ID NO: 318123
uguugucacuuaccuguau

SEQ ID NO: 384920 - RNA, 19 nt, Artificial Sequence
  Description of Artificial Sequence: Synthetic oligonucleotide
  Antisense Strand to SEQ ID NO: 384919
auacagguaagugacaaca

SEQ ID NO: 384921 - RNA, 19 nt, Artificial Sequence
  Description of Artificial Sequence: Synthetic oligonucleotide
  Sense Strand Starting at position 841 of SEQ ID NO: 318124
guugucacuuaccuguaua

SEQ ID NO: 384922 - RNA, 19 nt, Artificial Sequence
  Description of Artificial Sequence: Synthetic oligonucleotide
  Antisense Strand to SEQ ID NO: 384921
uauacagguaagugacaac

SEQ ID NO: 384923 - RNA, 19 nt, Artificial Sequence
  Description of Artificial Sequence: Synthetic oligonucleotide
  Sense Strand Starting at position 841 of SEQ ID NO: 318127
gucacuuaccuguauaaug

SEQ ID NO: 384924 - RNA, 19 nt, Artificial Sequence
  Description of Artificial Sequence: Synthetic oligonucleotide
  Antisense Strand to SEQ ID NO: 384923
cauuauacagguaagugac

SEQ ID NO: 384925 - RNA, 19 nt, Artificial Sequence
  Description of Artificial Sequence: Synthetic oligonucleotide
  Sense Strand Starting at position 841 of SEQ ID NO: 318135
ccuguauaaugaguauuga

SEQ ID NO: 384926 - RNA, 19 nt, Artificial Sequence
  Description of Artificial Sequence: Synthetic oligonucleotide
  Antisense Strand to SEQ ID NO: 384925
ucaauacucauuauacagg

SEQ ID NO: 384927 - RNA, 19 nt, Artificial Sequence
  Description of Artificial Sequence: Synthetic oligonucleotide
  Sense Strand Starting at position 841 of SEQ ID NO: 318543
ugauguuuaaucgguggac

SEQ ID NO: 384928 - RNA, 19 nt, Artificial Sequence
  Description of Artificial Sequence: Synthetic oligonucleotide
  Antisense Strand to SEQ ID NO: 384927
guccaccgauuaaacauca

SEQ ID NO: 384929 - RNA, 19 nt, Artificial Sequence
  Description of Artificial Sequence: Synthetic oligonucleotide
  Sense Strand Starting at position 841 of SEQ ID NO: 318544
gauguuuaaucgguggaca

SEQ ID NO: 384930 - RNA, 19 nt, Artificial Sequence
  Description of Artificial Sequence: Synthetic oligonucleotide
  Antisense Strand to SEQ ID NO: 384929
uguccaccgauuaaacauc

SEQ ID NO: 384931 - RNA, 19 nt, Artificial Sequence
  Description of Artificial Sequence: Synthetic oligonucleotide
  Sense Strand Starting at position 841 of SEQ ID NO: 318545
auguuuaaucgguggacaa

SEQ ID NO: 384932 - RNA, 19 nt, Artificial Sequence
  Description of Artificial Sequence: Synthetic oligonucleotide
  Antisense Strand to SEQ ID NO: 384931
uuguccaccgauuaaacau

SEQ ID NO: 384933 - RNA, 19 nt, Artificial Sequence
  Description of Artificial Sequence: Synthetic oligonucleotide
  Sense Strand Starting at position 841 of SEQ ID NO: 318546
uguuuaaucgguggacaau

SEQ ID NO: 384934 - RNA, 19 nt, Artificial Sequence
  Description of Artificial Sequence: Synthetic oligonucleotide
  Antisense Strand to SEQ ID NO: 384933
auuguccaccgauuaaaca

SEQ ID NO: 384935 - RNA, 19 nt, Artificial Sequence
  Description of Artificial Sequence: Synthetic oligonucleotide
  Sense Strand Starting at position 841 of SEQ ID NO: 318547
guuuaaucgguggacaaug

SEQ ID NO: 384936 - RNA, 19 nt, Artificial Sequence
  Description of Artificial Sequence: Synthetic oligonucleotide
  Antisense Strand to SEQ ID NO: 384935
cauuguccaccgauuaaac

SEQ ID NO: 384937 - RNA, 19 nt, Artificial Sequence
  Description of Artificial Sequence: Synthetic oligonucleotide
  Sense Strand Starting at position 841 of SEQ ID NO: 318565
guuccauugucauuaagcu

SEQ ID NO: 384938 - RNA, 19 nt, Artificial Sequence
  Description of Artificial Sequence: Synthetic oligonucleotide
  Antisense Strand to SEQ ID NO: 384937
agcuuaaugacaauggaac

SEQ ID NO: 384939 - RNA, 19 nt, Artificial Sequence
  Description of Artificial Sequence: Synthetic oligonucleotide
  Sense Strand Starting at position 841 of SEQ ID NO: 318773
uguuuaaugucuccacuga

SEQ ID NO: 384940 - RNA, 19 nt, Artificial Sequence
  Description of Artificial Sequence: Synthetic oligonucleotide
  Antisense Strand to SEQ ID NO: 384939
ucaguggagacauuaaaca

SEQ ID NO: 384941 - RNA, 19 nt, Artificial Sequence
  Description of Artificial Sequence: Synthetic oligonucleotide
  Sense Strand Starting at position 841 of SEQ ID NO: 318774
guuuaaugucuccacugaa

SEQ ID NO: 384942 - RNA, 19 nt, Artificial Sequence
  Description of Artificial Sequence: Synthetic oligonucleotide
  Antisense Strand to SEQ ID NO: 384941
uucaguggagacauuaaac

SEQ ID NO: 384943 - RNA, 19 nt, Artificial Sequence
  Description of Artificial Sequence: Synthetic oligonucleotide
  Sense Strand Starting at position 841 of SEQ ID NO: 319139
agaugaauauaacagacaa

SEQ ID NO: 384944 - RNA, 19 nt, Artificial Sequence
  Description of Artificial Sequence: Synthetic oligonucleotide
  Antisense Strand to SEQ ID NO: 384943
uugucuguuauauucaucu

SEQ ID NO: 384945 - RNA, 19 nt, Artificial Sequence
  Description of Artificial Sequence: Synthetic oligonucleotide
  Sense Strand Starting at position 842 of SEQ ID NO: 315504
gggacaaauuccuagaaau

SEQ ID NO: 384946 - RNA, 19 nt, Artificial Sequence
  Description of Artificial Sequence: Synthetic oligonucleotide
  Antisense Strand to SEQ ID NO: 384945
auuucuaggaauuuguccc

SEQ ID NO: 384947 - RNA, 19 nt, Artificial Sequence
  Description of Artificial Sequence: Synthetic oligonucleotide
  Sense Strand Starting at position 842 of SEQ ID NO: 315541
aguauaugcaguuguaauu

SEQ ID NO: 384948 - RNA, 19 nt, Artificial Sequence
  Description of Artificial Sequence: Synthetic oligonucleotide
  Antisense Strand to SEQ ID NO: 384947
aauuacaacugcauauacu

SEQ ID NO: 384949 - RNA, 19 nt, Artificial Sequence
  Description of Artificial Sequence: Synthetic oligonucleotide
  Sense Strand Starting at position 842 of SEQ ID NO: 315560
cugacaguauugccaaauu

SEQ ID NO: 384950 - RNA, 19 nt, Artificial Sequence
  Description of Artificial Sequence: Synthetic oligonucleotide
  Antisense Strand to SEQ ID NO: 384949
aauuuggcaauacugucag

SEQ ID NO: 384951 - RNA, 19 nt, Artificial Sequence
  Description of Artificial Sequence: Synthetic oligonucleotide
  Sense Strand Starting at position 842 of SEQ ID NO: 315669
guaaauguguccuccacac

SEQ ID NO: 384952 - RNA, 19 nt, Artificial Sequence
  Description of Artificial Sequence: Synthetic oligonucleotide
  Antisense Strand to SEQ ID NO: 384951
guguggaggacacauuuac

SEQ ID NO: 384953 - RNA, 19 nt, Artificial Sequence
  Description of Artificial Sequence: Synthetic oligonucleotide
  Sense Strand Starting at position 842 of SEQ ID NO: 315685
cacgguugucagcaccaua

SEQ ID NO: 384954 - RNA, 19 nt, Artificial Sequence
  Description of Artificial Sequence: Synthetic oligonucleotide
  Antisense Strand to SEQ ID NO: 384953
uauggugcugacaaccgug

SEQ ID NO: 384955 - RNA, 19 nt, Artificial Sequence
  Description of Artificial Sequence: Synthetic oligonucleotide
  Sense Strand Starting at position 842 of SEQ ID NO: 315862
ucugaaucgagaugugaug

SEQ ID NO: 384956 - RNA, 19 nt, Artificial Sequence
  Description of Artificial Sequence: Synthetic oligonucleotide
  Antisense Strand to SEQ ID NO: 384955
caucacaucucgauucaga

SEQ ID NO: 384957 - RNA, 19 nt, Artificial Sequence
  Description of Artificial Sequence: Synthetic oligonucleotide
  Sense Strand Starting at position 842 of SEQ ID NO: 315864
ugaaucgagaugugaugua

SEQ ID NO: 384958 - RNA, 19 nt, Artificial Sequence
  Description of Artificial Sequence: Synthetic oligonucleotide
  Antisense Strand to SEQ ID NO: 384957
uacaucacaucucgauuca

SEQ ID NO: 384959 - RNA, 19 nt, Artificial Sequence
  Description of Artificial Sequence: Synthetic oligonucleotide
  Sense Strand Starting at position 842 of SEQ ID NO: 315869
cgagaugugauguaaguau

SEQ ID NO: 384960 - RNA, 19 nt, Artificial Sequence
  Description of Artificial Sequence: Synthetic oligonucleotide
  Antisense Strand to SEQ ID NO: 384959
auacuuacaucacaucucg

SEQ ID NO: 384961 - RNA, 19 nt, Artificial Sequence
  Description of Artificial Sequence: Synthetic oligonucleotide
  Sense Strand Starting at position 842 of SEQ ID NO: 315903
uugcaaagacgugguauga

SEQ ID NO: 384962 - RNA, 19 nt, Artificial Sequence
  Description of Artificial Sequence: Synthetic oligonucleotide
  Antisense Strand to SEQ ID NO: 384961
ucauaccacgucuuugcaa

SEQ ID NO: 384963 - RNA, 19 nt, Artificial Sequence
  Description of Artificial Sequence: Synthetic oligonucleotide
  Sense Strand Starting at position 842 of SEQ ID NO: 315907
aaagacgugguaugauaaa

SEQ ID NO: 384964 - RNA, 19 nt, Artificial Sequence
  Description of Artificial Sequence: Synthetic oligonucleotide
  Antisense Strand to SEQ ID NO: 384963
uuuaucauaccacgucuuu

SEQ ID NO: 384965 - RNA, 19 nt, Artificial Sequence
  Description of Artificial Sequence: Synthetic oligonucleotide
  Sense Strand Starting at position 842 of SEQ ID NO: 316114
acuggcucccauuguauuu

SEQ ID NO: 384966 - RNA, 19 nt, Artificial Sequence
  Description of Artificial Sequence: Synthetic oligonucleotide
  Antisense Strand to SEQ ID NO: 384965
aaauacaaugggagccagu

SEQ ID NO: 384967 - RNA, 19 nt, Artificial Sequence
  Description of Artificial Sequence: Synthetic oligonucleotide
  Sense Strand Starting at position 842 of SEQ ID NO: 316126
uguauuucugcuggacagu

SEQ ID NO: 384968 - RNA, 19 nt, Artificial Sequence
  Description of Artificial Sequence: Synthetic oligonucleotide
  Antisense Strand to SEQ ID NO: 384967
acuguccagcagaaauaca

SEQ ID NO: 384969 - RNA, 19 nt, Artificial Sequence
  Description of Artificial Sequence: Synthetic oligonucleotide
  Sense Strand Starting at position 842 of SEQ ID NO: 316303
uuaagauucugcuugaaac

SEQ ID NO: 384970 - RNA, 19 nt, Artificial Sequence
  Description of Artificial Sequence: Synthetic oligonucleotide
  Antisense Strand to SEQ ID NO: 384969
guuucaagcagaaucuuaa

SEQ ID NO: 384971 - RNA, 19 nt, Artificial Sequence
  Description of Artificial Sequence: Synthetic oligonucleotide
  Sense Strand Starting at position 842 of SEQ ID NO: 316330
ggaggccuuggagaaguuu

SEQ ID NO: 384972 - RNA, 19 nt, Artificial Sequence
  Description of Artificial Sequence: Synthetic oligonucleotide
  Antisense Strand to SEQ ID NO: 384971
aaacuucuccaaggccucc

SEQ ID NO: 384973 - RNA, 19 nt, Artificial Sequence
  Description of Artificial Sequence: Synthetic oligonucleotide
  Sense Strand Starting at position 842 of SEQ ID NO: 316410
cucuuugggcagcaagaaa

SEQ ID NO: 384974 - RNA, 19 nt, Artificial Sequence
  Description of Artificial Sequence: Synthetic oligonucleotide
  Antisense Strand to SEQ ID NO: 384973
uuucuugcugcccaaagag

SEQ ID NO: 384975 - RNA, 19 nt, Artificial Sequence
  Description of Artificial Sequence: Synthetic oligonucleotide
  Sense Strand Starting at position 842 of SEQ ID NO: 316434
cagugcuguugguuaaauc

SEQ ID NO: 384976 - RNA, 19 nt, Artificial Sequence
  Description of Artificial Sequence: Synthetic oligonucleotide
  Antisense Strand to SEQ ID NO: 384975
gauuuaaccaacagcacug

SEQ ID NO: 384977 - RNA, 19 nt, Artificial Sequence
  Description of Artificial Sequence: Synthetic oligonucleotide
  Sense Strand Starting at position 842 of SEQ ID NO: 316435
agugcuguugguuaaauca

SEQ ID NO: 384978 - RNA, 19 nt, Artificial Sequence
  Description of Artificial Sequence: Synthetic oligonucleotide
  Antisense Strand to SEQ ID NO: 384977
ugauuuaaccaacagcacu

SEQ ID NO: 384979 - RNA, 19 nt, Artificial Sequence
  Description of Artificial Sequence: Synthetic oligonucleotide
  Sense Strand Starting at position 842 of SEQ ID NO: 316483
ccgucuaaaggguagaguu

SEQ ID NO: 384980 - RNA, 19 nt, Artificial Sequence
  Description of Artificial Sequence: Synthetic oligonucleotide
  Antisense Strand to SEQ ID NO: 384979
aacucuacccuuuagacgg

SEQ ID NO: 384981 - RNA, 19 nt, Artificial Sequence
  Description of Artificial Sequence: Synthetic oligonucleotide
  Sense Strand Starting at position 842 of SEQ ID NO: 316523
ggucacaauuaccagauga

SEQ ID NO: 384982 - RNA, 19 nt, Artificial Sequence
  Description of Artificial Sequence: Synthetic oligonucleotide
  Antisense Strand to SEQ ID NO: 384981
ucaucugguaauugugacc

SEQ ID NO: 384983 - RNA, 19 nt, Artificial Sequence
  Description of Artificial Sequence: Synthetic oligonucleotide
  Sense Strand Starting at position 842 of SEQ ID NO: 316619
ugguaacagcaguaagagu

SEQ ID NO: 384984 - RNA, 19 nt, Artificial Sequence
  Description of Artificial Sequence: Synthetic oligonucleotide
  Antisense Strand to SEQ ID NO: 384983
acucuuacugcuguuacca

SEQ ID NO: 384985 - RNA, 19 nt, Artificial Sequence
  Description of Artificial Sequence: Synthetic oligonucleotide
  Sense Strand Starting at position 842 of SEQ ID NO: 316628
caguaagaguuacaaagaa

SEQ ID NO: 384986 - RNA, 19 nt, Artificial Sequence
  Description of Artificial Sequence: Synthetic oligonucleotide
  Antisense Strand to SEQ ID NO: 384985
uucuuuguaacucuuacug

SEQ ID NO: 384987 - RNA, 19 nt, Artificial Sequence
  Description of Artificial Sequence: Synthetic oligonucleotide
  Sense Strand Starting at position 842 of SEQ ID NO: 316658
ggagaaacuuacuuucuuu

SEQ ID NO: 384988 - RNA, 19 nt, Artificial Sequence
  Description of Artificial Sequence: Synthetic oligonucleotide
  Antisense Strand to SEQ ID NO: 384987
aaagaaaguaaguuucucc

SEQ ID NO: 384989 - RNA, 19 nt, Artificial Sequence
  Description of Artificial Sequence: Synthetic oligonucleotide
  Sense Strand Starting at position 842 of SEQ ID NO: 316668
acuuucuuugcauagucua

SEQ ID NO: 384990 - RNA, 19 nt, Artificial Sequence
  Description of Artificial Sequence: Synthetic oligonucleotide
  Antisense Strand to SEQ ID NO: 384989
uagacuaugcaaagaaagu

SEQ ID NO: 384991 - RNA, 19 nt, Artificial Sequence
  Description of Artificial Sequence: Synthetic oligonucleotide
  Sense Strand Starting at position 842 of SEQ ID NO: 316676
ugcauagucuacucacaag

SEQ ID NO: 384992 - RNA, 19 nt, Artificial Sequence
  Description of Artificial Sequence: Synthetic oligonucleotide
  Antisense Strand to SEQ ID NO: 384991
cuugugaguagacuaugca

SEQ ID NO: 384993 - RNA, 19 nt, Artificial Sequence
  Description of Artificial Sequence: Synthetic oligonucleotide
  Sense Strand Starting at position 842 of SEQ ID NO: 317404
uguggaugcuuuccauauc

SEQ ID NO: 384994 - RNA, 19 nt, Artificial Sequence
  Description of Artificial Sequence: Synthetic oligonucleotide
  Antisense Strand to SEQ ID NO: 384993
gauauggaaagcauccaca

SEQ ID NO: 384995 - RNA, 19 nt, Artificial Sequence
  Description of Artificial Sequence: Synthetic oligonucleotide
  Sense Strand Starting at position 842 of SEQ ID NO: 317747
uguugucacuuaccuguau

SEQ ID NO: 384996 - RNA, 19 nt, Artificial Sequence
  Description of Artificial Sequence: Synthetic oligonucleotide
  Antisense Strand to SEQ ID NO: 384995
auacagguaagugacaaca

SEQ ID NO: 384997 - RNA, 19 nt, Artificial Sequence
  Description of Artificial Sequence: Synthetic oligonucleotide
  Sense Strand Starting at position 842 of SEQ ID NO: 317748
guugucacuuaccuguaua

SEQ ID NO: 384998 - RNA, 19 nt, Artificial Sequence
  Description of Artificial Sequence: Synthetic oligonucleotide
  Antisense Strand to SEQ ID NO: 384997
uauacagguaagugacaac

SEQ ID NO: 384999 - RNA, 19 nt, Artificial Sequence
  Description of Artificial Sequence: Synthetic oligonucleotide
  Sense Strand Starting at position 842 of SEQ ID NO: 317751
gucacuuaccuguauaaug

SEQ ID NO: 385000 - RNA, 19 nt, Artificial Sequence
  Description of Artificial Sequence: Synthetic oligonucleotide
  Antisense Strand to SEQ ID NO: 384999
cauuauacagguaagugac

SEQ ID NO: 385001 - RNA, 19 nt, Artificial Sequence
  Description of Artificial Sequence: Synthetic oligonucleotide
  Sense Strand Starting at position 842 of SEQ ID NO: 317759
ccuguauaaugaguauuga

SEQ ID NO: 385002 - RNA, 19 nt, Artificial Sequence
  Description of Artificial Sequence: Synthetic oligonucleotide
  Antisense Strand to SEQ ID NO: 385001
ucaauacucauuauacagg

SEQ ID NO: 385003 - RNA, 19 nt, Artificial Sequence
  Description of Artificial Sequence: Synthetic oligonucleotide
  Sense Strand Starting at position 842 of SEQ ID NO: 318167
ugauguuuaaucgguggac

SEQ ID NO: 385004 - RNA, 19 nt, Artificial Sequence
  Description of Artificial Sequence: Synthetic oligonucleotide
  Antisense Strand to SEQ ID NO: 385003
guccaccgauuaaacauca

SEQ ID NO: 385005 - RNA, 19 nt, Artificial Sequence
  Description of Artificial Sequence: Synthetic oligonucleotide
  Sense Strand Starting at position 842 of SEQ ID NO: 318168
gauguuuaaucgguggaca

SEQ ID NO: 385006 - RNA, 19 nt, Artificial Sequence
  Description of Artificial Sequence: Synthetic oligonucleotide
  Antisense Strand to SEQ ID NO: 385005
uguccaccgauuaaacauc

SEQ ID NO: 385007 - RNA, 19 nt, Artificial Sequence
  Description of Artificial Sequence: Synthetic oligonucleotide
  Sense Strand Starting at position 842 of SEQ ID NO: 318169
auguuuaaucgguggacaa

SEQ ID NO: 385008 - RNA, 19 nt, Artificial Sequence
  Description of Artificial Sequence: Synthetic oligonucleotide
  Antisense Strand to SEQ ID NO: 385007
uuguccaccgauuaaacau

SEQ ID NO: 385009 - RNA, 19 nt, Artificial Sequence
  Description of Artificial Sequence: Synthetic oligonucleotide
  Sense Strand Starting at position 842 of SEQ ID NO: 318170
uguuuaaucgguggacaau

SEQ ID NO: 385010 - RNA, 19 nt, Artificial Sequence
  Description of Artificial Sequence: Synthetic oligonucleotide
  Antisense Strand to SEQ ID NO: 385009
auuguccaccgauuaaaca

SEQ ID NO: 385011 - RNA, 19 nt, Artificial Sequence
  Description of Artificial Sequence: Synthetic oligonucleotide
  Sense Strand Starting at position 842 of SEQ ID NO: 318171
guuuaaucgguggacaaug

SEQ ID NO: 385012 - RNA, 19 nt, Artificial Sequence
  Description of Artificial Sequence: Synthetic oligonucleotide
  Antisense Strand to SEQ ID NO: 385011
cauuguccaccgauuaaac

SEQ ID NO: 385013 - RNA, 19 nt, Artificial Sequence
  Description of Artificial Sequence: Synthetic oligonucleotide
  Sense Strand Starting at position 842 of SEQ ID NO: 318189
guuccauugucauuaagcu

SEQ ID NO: 385014 - RNA, 19 nt, Artificial Sequence
  Description of Artificial Sequence: Synthetic oligonucleotide
  Antisense Strand to SEQ ID NO: 385013
agcuuaaugacaauggaac

SEQ ID NO: 385015 - RNA, 19 nt, Artificial Sequence
  Description of Artificial Sequence: Synthetic oligonucleotide
  Sense Strand Starting at position 842 of SEQ ID NO: 318395
uguguuuaaugucuccacu

SEQ ID NO: 385016 - RNA, 19 nt, Artificial Sequence
  Description of Artificial Sequence: Synthetic oligonucleotide
  Antisense Strand to SEQ ID NO: 385015
aguggagacauuaaacaca

SEQ ID NO: 385017 - RNA, 19 nt, Artificial Sequence
  Description of Artificial Sequence: Synthetic oligonucleotide
  Sense Strand Starting at position 842 of SEQ ID NO: 318397
uguuuaaugucuccacuga

SEQ ID NO: 385018 - RNA, 19 nt, Artificial Sequence
  Description of Artificial Sequence: Synthetic oligonucleotide
  Antisense Strand to SEQ ID NO: 385017
ucaguggagacauuaaaca

SEQ ID NO: 385019 - RNA, 19 nt, Artificial Sequence
  Description of Artificial Sequence: Synthetic oligonucleotide
  Sense Strand Starting at position 842 of SEQ ID NO: 318398
guuuaaugucuccacugaa

SEQ ID NO: 385020 - RNA, 19 nt, Artificial Sequence
  Description of Artificial Sequence: Synthetic oligonucleotide
  Antisense Strand to SEQ ID NO: 385019
uucaguggagacauuaaac

SEQ ID NO: 385021 - RNA, 19 nt, Artificial Sequence
  Description of Artificial Sequence: Synthetic oligonucleotide
  Sense Strand Starting at position 842 of SEQ ID NO: 318626
aaaggugaguauugaaaga

SEQ ID NO: 385022 - RNA, 19 nt, Artificial Sequence
  Description of Artificial Sequence: Synthetic oligonucleotide
  Antisense Strand to SEQ ID NO: 385021
ucuuucaauacucaccuuu

SEQ ID NO: 385023 - RNA, 19 nt, Artificial Sequence
  Description of Artificial Sequence: Synthetic oligonucleotide
  Sense Strand Starting at position 842 of SEQ ID NO: 318763
agaugaauauaacagacaa

SEQ ID NO: 385024 - RNA, 19 nt, Artificial Sequence
  Description of Artificial Sequence: Synthetic oligonucleotide
  Antisense Strand to SEQ ID NO: 385023
uugucuguuauauucaucu

SEQ ID NO: 385025 - RNA, 19 nt, Artificial Sequence
  Description of Artificial Sequence: Synthetic oligonucleotide
  Sense Strand Starting at position 843 of SEQ ID NO: 315371
gcgcccagccaucaauaua

SEQ ID NO: 385026 - RNA, 19 nt, Artificial Sequence
  Description of Artificial Sequence: Synthetic oligonucleotide
  Antisense Strand to SEQ ID NO: 385025
uauauugauggcugggcgc

SEQ ID NO: 385027 - RNA, 19 nt, Artificial Sequence
  Description of Artificial Sequence: Synthetic oligonucleotide
  Sense Strand Starting at position 843 of SEQ ID NO: 315442
guauuacauuuacaugguu

SEQ ID NO: 385028 - RNA, 19 nt, Artificial Sequence
  Description of Artificial Sequence: Synthetic oligonucleotide
  Antisense Strand to SEQ ID NO: 385027
aaccauguaaauguaauac

SEQ ID NO: 385029 - RNA, 19 nt, Artificial Sequence
  Description of Artificial Sequence: Synthetic oligonucleotide
  Sense Strand Starting at position 843 of SEQ ID NO: 315489
ccugucuccgcugcuaaau

SEQ ID NO: 385030 - RNA, 19 nt, Artificial Sequence
  Description of Artificial Sequence: Synthetic oligonucleotide
  Antisense Strand to SEQ ID NO: 385029
auuuagcagcggagacagg

SEQ ID NO: 385031 - RNA, 19 nt, Artificial Sequence
  Description of Artificial Sequence: Synthetic oligonucleotide
  Sense Strand Starting at position 843 of SEQ ID NO: 315490
cugucuccgcugcuaaauu

SEQ ID NO: 385032 - RNA, 19 nt, Artificial Sequence
  Description of Artificial Sequence: Synthetic oligonucleotide
  Antisense Strand to SEQ ID NO: 385031
aauuuagcagcggagacag

SEQ ID NO: 385033 - RNA, 19 nt, Artificial Sequence
  Description of Artificial Sequence: Synthetic oligonucleotide
  Sense Strand Starting at position 843 of SEQ ID NO: 315833
gggacaaauuccuagaaau

SEQ ID NO: 385034 - RNA, 19 nt, Artificial Sequence
  Description of Artificial Sequence: Synthetic oligonucleotide
  Antisense Strand to SEQ ID NO: 385033
auuucuaggaauuuguccc

SEQ ID NO: 385035 - RNA, 19 nt, Artificial Sequence
  Description of Artificial Sequence: Synthetic oligonucleotide
  Sense Strand Starting at position 843 of SEQ ID NO: 315870
aguauaugcaguuguaauu

SEQ ID NO: 385036 - RNA, 19 nt, Artificial Sequence
  Description of Artificial Sequence: Synthetic oligonucleotide
  Antisense Strand to SEQ ID NO: 385035
aauuacaacugcauauacu

SEQ ID NO: 385037 - RNA, 19 nt, Artificial Sequence
  Description of Artificial Sequence: Synthetic oligonucleotide
  Sense Strand Starting at position 843 of SEQ ID NO: 315889
cugacaguauugccaaauu

SEQ ID NO: 385038 - RNA, 19 nt, Artificial Sequence
  Description of Artificial Sequence: Synthetic oligonucleotide
  Antisense Strand to SEQ ID NO: 385037
aauuuggcaauacugucag

SEQ ID NO: 385039 - RNA, 19 nt, Artificial Sequence
  Description of Artificial Sequence: Synthetic oligonucleotide
  Sense Strand Starting at position 843 of SEQ ID NO: 315998
guaaauguguccuccacac

SEQ ID NO: 385040 - RNA, 19 nt, Artificial Sequence
  Description of Artificial Sequence: Synthetic oligonucleotide
  Antisense Strand to SEQ ID NO: 385039
guguggaggacacauuuac

SEQ ID NO: 385041 - RNA, 19 nt, Artificial Sequence
  Description of Artificial Sequence: Synthetic oligonucleotide
  Sense Strand Starting at position 843 of SEQ ID NO: 316014
cacgguugucagcaccaua

SEQ ID NO: 385042 - RNA, 19 nt, Artificial Sequence
  Description of Artificial Sequence: Synthetic oligonucleotide
  Antisense Strand to SEQ ID NO: 385041
uauggugcugacaaccgug

SEQ ID NO: 385043 - RNA, 19 nt, Artificial Sequence
  Description of Artificial Sequence: Synthetic oligonucleotide
  Sense Strand Starting at position 843 of SEQ ID NO: 316191
ucugaaucgagaugugaug

SEQ ID NO: 385044 - RNA, 19 nt, Artificial Sequence
  Description of Artificial Sequence: Synthetic oligonucleotide
  Antisense Strand to SEQ ID NO: 385043
caucacaucucgauucaga

SEQ ID NO: 385045 - RNA, 19 nt, Artificial Sequence
  Description of Artificial Sequence: Synthetic oligonucleotide
  Sense Strand Starting at position 843 of SEQ ID NO: 316193
ugaaucgagaugugaugua

SEQ ID NO: 385046 - RNA, 19 nt, Artificial Sequence
  Description of Artificial Sequence: Synthetic oligonucleotide
  Antisense Strand to SEQ ID NO: 385045
uacaucacaucucgauuca

SEQ ID NO: 385047 - RNA, 19 nt, Artificial Sequence
  Description of Artificial Sequence: Synthetic oligonucleotide
  Sense Strand Starting at position 843 of SEQ ID NO: 316198
cgagaugugauguaaguau

SEQ ID NO: 385048 - RNA, 19 nt, Artificial Sequence
  Description of Artificial Sequence: Synthetic oligonucleotide
  Antisense Strand to SEQ ID NO: 385047
auacuuacaucacaucucg

SEQ ID NO: 385049 - RNA, 19 nt, Artificial Sequence
  Description of Artificial Sequence: Synthetic oligonucleotide
  Sense Strand Starting at position 843 of SEQ ID NO: 316232
uugcaaagacgugguauga

SEQ ID NO: 385050 - RNA, 19 nt, Artificial Sequence
  Description of Artificial Sequence: Synthetic oligonucleotide
  Antisense Strand to SEQ ID NO: 385049
ucauaccacgucuuugcaa

SEQ ID NO: 385051 - RNA, 19 nt, Artificial Sequence
  Description of Artificial Sequence: Synthetic oligonucleotide
  Sense Strand Starting at position 843 of SEQ ID NO: 316236
aaagacgugguaugauaaa

SEQ ID NO: 385052 - RNA, 19 nt, Artificial Sequence
  Description of Artificial Sequence: Synthetic oligonucleotide
  Antisense Strand to SEQ ID NO: 385051
uuuaucauaccacgucuuu

SEQ ID NO: 385053 - RNA, 19 nt, Artificial Sequence
  Description of Artificial Sequence: Synthetic oligonucleotide
  Sense Strand Starting at position 843 of SEQ ID NO: 316443
acuggcucccauuguauuu

SEQ ID NO: 385054 - RNA, 19 nt, Artificial Sequence
  Description of Artificial Sequence: Synthetic oligonucleotide
  Antisense Strand to SEQ ID NO: 385053
aaauacaaugggagccagu

SEQ ID NO: 385055 - RNA, 19 nt, Artificial Sequence
  Description of Artificial Sequence: Synthetic oligonucleotide
  Sense Strand Starting at position 843 of SEQ ID NO: 316455
uguauuucugcuggacagu

SEQ ID NO: 385056 - RNA, 19 nt, Artificial Sequence
  Description of Artificial Sequence: Synthetic oligonucleotide
  Antisense Strand to SEQ ID NO: 385055
acuguccagcagaaauaca

SEQ ID NO: 385057 - RNA, 19 nt, Artificial Sequence
  Description of Artificial Sequence: Synthetic oligonucleotide
  Sense Strand Starting at position 843 of SEQ ID NO: 316632
uuaagauucugcuugaaac

SEQ ID NO: 385058 - RNA, 19 nt, Artificial Sequence
  Description of Artificial Sequence: Synthetic oligonucleotide
  Antisense Strand to SEQ ID NO: 385057
guuucaagcagaaucuuaa

SEQ ID NO: 385059 - RNA, 19 nt, Artificial Sequence
  Description of Artificial Sequence: Synthetic oligonucleotide
  Sense Strand Starting at position 843 of SEQ ID NO: 316659
ggaggccuuggagaaguuu

SEQ ID NO: 385060 - RNA, 19 nt, Artificial Sequence
  Description of Artificial Sequence: Synthetic oligonucleotide
  Antisense Strand to SEQ ID NO: 385059
aaacuucuccaaggccucc

SEQ ID NO: 385061 - RNA, 19 nt, Artificial Sequence
  Description of Artificial Sequence: Synthetic oligonucleotide
  Sense Strand Starting at position 843 of SEQ ID NO: 316739
cucuuugggcagcaagaaa

SEQ ID NO: 385062 - RNA, 19 nt, Artificial Sequence
  Description of Artificial Sequence: Synthetic oligonucleotide
  Antisense Strand to SEQ ID NO: 385061
uuucuugcugcccaaagag

SEQ ID NO: 385063 - RNA, 19 nt, Artificial Sequence
  Description of Artificial Sequence: Synthetic oligonucleotide
  Sense Strand Starting at position 843 of SEQ ID NO: 316764
agugcuguugguuaaauca

SEQ ID NO: 385064 - RNA, 19 nt, Artificial Sequence
  Description of Artificial Sequence: Synthetic oligonucleotide
  Antisense Strand to SEQ ID NO: 385063
ugauuuaaccaacagcacu

SEQ ID NO: 385065 - RNA, 19 nt, Artificial Sequence
  Description of Artificial Sequence: Synthetic oligonucleotide
  Sense Strand Starting at position 843 of SEQ ID NO: 316812
ccgucuaaaggguagaguu

SEQ ID NO: 385066 - RNA, 19 nt, Artificial Sequence
  Description of Artificial Sequence: Synthetic oligonucleotide
  Antisense Strand to SEQ ID NO: 385065
aacucuacccuuuagacgg

SEQ ID NO: 385067 - RNA, 19 nt, Artificial Sequence
  Description of Artificial Sequence: Synthetic oligonucleotide
  Sense Strand Starting at position 843 of SEQ ID NO: 316948
ugguaacagcaguaagagu

SEQ ID NO: 385068 - RNA, 19 nt, Artificial Sequence
  Description of Artificial Sequence: Synthetic oligonucleotide
  Antisense Strand to SEQ ID NO: 385067
acucuuacugcuguuacca

SEQ ID NO: 385069 - RNA, 19 nt, Artificial Sequence
  Description of Artificial Sequence: Synthetic oligonucleotide
  Sense Strand Starting at position 843 of SEQ ID NO: 316957
caguaagaguuacaaagaa

SEQ ID NO: 385070 - RNA, 19 nt, Artificial Sequence
  Description of Artificial Sequence: Synthetic oligonucleotide
  Antisense Strand to SEQ ID NO: 385069
uucuuuguaacucuuacug

SEQ ID NO: 385071 - RNA, 19 nt, Artificial Sequence
  Description of Artificial Sequence: Synthetic oligonucleotide
  Sense Strand Starting at position 843 of SEQ ID NO: 316987
ggagaaacuuacuuucuuu

SEQ ID NO: 385072 - RNA, 19 nt, Artificial Sequence
  Description of Artificial Sequence: Synthetic oligonucleotide
  Antisense Strand to SEQ ID NO: 385071
aaagaaaguaaguuucucc

SEQ ID NO: 385073 - RNA, 19 nt, Artificial Sequence
  Description of Artificial Sequence: Synthetic oligonucleotide
  Sense Strand Starting at position 843 of SEQ ID NO: 316997
acuuucuuugcauagucua

SEQ ID NO: 385074 - RNA, 19 nt, Artificial Sequence
  Description of Artificial Sequence: Synthetic oligonucleotide
  Antisense Strand to SEQ ID NO: 385073
uagacuaugcaaagaaagu

SEQ ID NO: 385075 - RNA, 19 nt, Artificial Sequence
  Description of Artificial Sequence: Synthetic oligonucleotide
  Sense Strand Starting at position 843 of SEQ ID NO: 317005
ugcauagucuacucacaag

SEQ ID NO: 385076 - RNA, 19 nt, Artificial Sequence
  Description of Artificial Sequence: Synthetic oligonucleotide
  Antisense Strand to SEQ ID NO: 385075
cuugugaguagacuaugca

SEQ ID NO: 385077 - RNA, 19 nt, Artificial Sequence
  Description of Artificial Sequence: Synthetic oligonucleotide
  Sense Strand Starting at position 843 of SEQ ID NO: 317733
uguggaugcuuuccauauc

SEQ ID NO: 385078 - RNA, 19 nt, Artificial Sequence
  Description of Artificial Sequence: Synthetic oligonucleotide
  Antisense Strand to SEQ ID NO: 385077
gauauggaaagcauccaca

SEQ ID NO: 385079 - RNA, 19 nt, Artificial Sequence
  Description of Artificial Sequence: Synthetic oligonucleotide
  Sense Strand Starting at position 843 of SEQ ID NO: 318076
uguugucacuuaccuguau

SEQ ID NO: 385080 - RNA, 19 nt, Artificial Sequence
  Description of Artificial Sequence: Synthetic oligonucleotide
  Antisense Strand to SEQ ID NO: 385079
auacagguaagugacaaca

SEQ ID NO: 385081 - RNA, 19 nt, Artificial Sequence
  Description of Artificial Sequence: Synthetic oligonucleotide
  Sense Strand Starting at position 843 of SEQ ID NO: 318077
guugucacuuaccuguaua

SEQ ID NO: 385082 - RNA, 19 nt, Artificial Sequence
  Description of Artificial Sequence: Synthetic oligonucleotide
  Antisense Strand to SEQ ID NO: 385081
uauacagguaagugacaac

SEQ ID NO: 385083 - RNA, 19 nt, Artificial Sequence
  Description of Artificial Sequence: Synthetic oligonucleotide
  Sense Strand Starting at position 843 of SEQ ID NO: 318080
gucacuuaccuguauaaug

SEQ ID NO: 385084 - RNA, 19 nt, Artificial Sequence
  Description of Artificial Sequence: Synthetic oligonucleotide
  Antisense Strand to SEQ ID NO: 385083
cauuauacagguaagugac

SEQ ID NO: 385085 - RNA, 19 nt, Artificial Sequence
  Description of Artificial Sequence: Synthetic oligonucleotide
  Sense Strand Starting at position 843 of SEQ ID NO: 318088
ccuguauaaugaguauuga

SEQ ID NO: 385086 - RNA, 19 nt, Artificial Sequence
  Description of Artificial Sequence: Synthetic oligonucleotide
  Antisense Strand to SEQ ID NO: 385085
ucaauacucauuauacagg

SEQ ID NO: 385087 - RNA, 19 nt, Artificial Sequence
  Description of Artificial Sequence: Synthetic oligonucleotide
  Sense Strand Starting at position 843 of SEQ ID NO: 318496
ugauguuuaaucgguggac

SEQ ID NO: 385088 - RNA, 19 nt, Artificial Sequence
  Description of Artificial Sequence: Synthetic oligonucleotide
  Antisense Strand to SEQ ID NO: 385087
guccaccgauuaaacauca

SEQ ID NO: 385089 - RNA, 19 nt, Artificial Sequence
  Description of Artificial Sequence: Synthetic oligonucleotide
  Sense Strand Starting at position 843 of SEQ ID NO: 318497
gauguuuaaucgguggaca

SEQ ID NO: 385090 - RNA, 19 nt, Artificial Sequence
  Description of Artificial Sequence: Synthetic oligonucleotide
  Antisense Strand to SEQ ID NO: 385089
uguccaccgauuaaacauc

SEQ ID NO: 385091 - RNA, 19 nt, Artificial Sequence
  Description of Artificial Sequence: Synthetic oligonucleotide
  Sense Strand Starting at position 843 of SEQ ID NO: 318498
auguuuaaucgguggacaa

SEQ ID NO: 385092 - RNA, 19 nt, Artificial Sequence
  Description of Artificial Sequence: Synthetic oligonucleotide
  Antisense Strand to SEQ ID NO: 385091
uuguccaccgauuaaacau

SEQ ID NO: 385093 - RNA, 19 nt, Artificial Sequence
  Description of Artificial Sequence: Synthetic oligonucleotide
  Sense Strand Starting at position 843 of SEQ ID NO: 318499
uguuuaaucgguggacaau

SEQ ID NO: 385094 - RNA, 19 nt, Artificial Sequence
  Description of Artificial Sequence: Synthetic oligonucleotide
  Antisense Strand to SEQ ID NO: 385093
auuguccaccgauuaaaca

SEQ ID NO: 385095 - RNA, 19 nt, Artificial Sequence
  Description of Artificial Sequence: Synthetic oligonucleotide
  Sense Strand Starting at position 843 of SEQ ID NO: 318500
guuuaaucgguggacaaug

SEQ ID NO: 385096 - RNA, 19 nt, Artificial Sequence
  Description of Artificial Sequence: Synthetic oligonucleotide
  Antisense Strand to SEQ ID NO: 385095
cauuguccaccgauuaaac

SEQ ID NO: 385097 - RNA, 19 nt, Artificial Sequence
  Description of Artificial Sequence: Synthetic oligonucleotide
  Sense Strand Starting at position 843 of SEQ ID NO: 318518
guuccauugucauuaagcu

SEQ ID NO: 385098 - RNA, 19 nt, Artificial Sequence
  Description of Artificial Sequence: Synthetic oligonucleotide
  Antisense Strand to SEQ ID NO: 385097
agcuuaaugacaauggaac

SEQ ID NO: 385099 - RNA, 19 nt, Artificial Sequence
  Description of Artificial Sequence: Synthetic oligonucleotide
  Sense Strand Starting at position 843 of SEQ ID NO: 318726
uguuuaaugucuccacuga

SEQ ID NO: 385100 - RNA, 19 nt, Artificial Sequence
  Description of Artificial Sequence: Synthetic oligonucleotide
  Antisense Strand to SEQ ID NO: 385099
ucaguggagacauuaaaca

SEQ ID NO: 385101 - RNA, 19 nt, Artificial Sequence
  Description of Artificial Sequence: Synthetic oligonucleotide
  Sense Strand Starting at position 843 of SEQ ID NO: 318727
guuuaaugucuccacugaa

SEQ ID NO: 385102 - RNA, 19 nt, Artificial Sequence
  Description of Artificial Sequence: Synthetic oligonucleotide
  Antisense Strand to SEQ ID NO: 385101
uucaguggagacauuaaac

SEQ ID NO: 385103 - RNA, 19 nt, Artificial Sequence
  Description of Artificial Sequence: Synthetic oligonucleotide
  Sense Strand Starting at position 843 of SEQ ID NO: 319092
agaugaauauaacagacaa

SEQ ID NO: 385104 - RNA, 19 nt, Artificial Sequence
  Description of Artificial Sequence: Synthetic oligonucleotide
  Antisense Strand to SEQ ID NO: 385103
uugucuguuauauucaucu

SEQ ID NO: 385105 - RNA, 19 nt, Artificial Sequence
  Description of Artificial Sequence: Synthetic oligonucleotide
  Sense Strand Starting at position 844 of SEQ ID NO: 315495
gugagccaugaucacuuua

SEQ ID NO: 385106 - RNA, 19 nt, Artificial Sequence
  Description of Artificial Sequence: Synthetic oligonucleotide
  Antisense Strand to SEQ ID NO: 385105
uaaagugaucauggcucac

SEQ ID NO: 385107 - RNA, 19 nt, Artificial Sequence
  Description of Artificial Sequence: Synthetic oligonucleotide
  Sense Strand Starting at position 844 of SEQ ID NO: 315606
uuugucuuuccaugaagag

SEQ ID NO: 385108 - RNA, 19 nt, Artificial Sequence
  Description of Artificial Sequence: Synthetic oligonucleotide
  Antisense Strand to SEQ ID NO: 385107
cucuucauggaaagacaaa

SEQ ID NO: 385109 - RNA, 19 nt, Artificial Sequence
  Description of Artificial Sequence: Synthetic oligonucleotide
  Sense Strand Starting at position 844 of SEQ ID NO: 315928
uaacguugucauucgguuu

SEQ ID NO: 385110 - RNA, 19 nt, Artificial Sequence
  Description of Artificial Sequence: Synthetic oligonucleotide
  Antisense Strand to SEQ ID NO: 385109
aaaccgaaugacaacguua

SEQ ID NO: 385111 - RNA, 19 nt, Artificial Sequence
  Description of Artificial Sequence: Synthetic oligonucleotide
  Sense Strand Starting at position 844 of SEQ ID NO: 315948
ugguauuuaugccuuaguu

SEQ ID NO: 385112 - RNA, 19 nt, Artificial Sequence
  Description of Artificial Sequence: Synthetic oligonucleotide
  Antisense Strand to SEQ ID NO: 385111
aacuaaggcauaaauacca

SEQ ID NO: 385113 - RNA, 19 nt, Artificial Sequence
  Description of Artificial Sequence: Synthetic oligonucleotide
  Sense Strand Starting at position 844 of SEQ ID NO: 316027
uagugaagguucuuccaag

SEQ ID NO: 385114 - RNA, 19 nt, Artificial Sequence
  Description of Artificial Sequence: Synthetic oligonucleotide
  Antisense Strand to SEQ ID NO: 385113
cuuggaagaaccuucacua

SEQ ID NO: 385115 - RNA, 19 nt, Artificial Sequence
  Description of Artificial Sequence: Synthetic oligonucleotide
  Sense Strand Starting at position 844 of SEQ ID NO: 316056
uccucaugauguuugauga

SEQ ID NO: 385116 - RNA, 19 nt, Artificial Sequence
  Description of Artificial Sequence: Synthetic oligonucleotide
  Antisense Strand to SEQ ID NO: 385115
ucaucaaacaucaugagga

SEQ ID NO: 385117 - RNA, 19 nt, Artificial Sequence
  Description of Artificial Sequence: Synthetic oligonucleotide
  Sense Strand Starting at position 844 of SEQ ID NO: 316063
gauguuugaugacuugaua

SEQ ID NO: 385118 - RNA, 19 nt, Artificial Sequence
  Description of Artificial Sequence: Synthetic oligonucleotide
  Antisense Strand to SEQ ID NO: 385117
uaucaagucaucaaacauc

SEQ ID NO: 385119 - RNA, 19 nt, Artificial Sequence
  Description of Artificial Sequence: Synthetic oligonucleotide
  Sense Strand Starting at position 844 of SEQ ID NO: 316066
guuugaugacuugauagua

SEQ ID NO: 385120 - RNA, 19 nt, Artificial Sequence
  Description of Artificial Sequence: Synthetic oligonucleotide
  Antisense Strand to SEQ ID NO: 385119
uacuaucaagucaucaaac

SEQ ID NO: 385121 - RNA, 19 nt, Artificial Sequence
  Description of Artificial Sequence: Synthetic oligonucleotide
  Sense Strand Starting at position 844 of SEQ ID NO: 316109
uuuacuuaucuugggaauu

SEQ ID NO: 385122 - RNA, 19 nt, Artificial Sequence
  Description of Artificial Sequence: Synthetic oligonucleotide
  Antisense Strand to SEQ ID NO: 385121
aauucccaagauaaguaaa

SEQ ID NO: 385123 - RNA, 19 nt, Artificial Sequence
  Description of Artificial Sequence: Synthetic oligonucleotide
  Sense Strand Starting at position 844 of SEQ ID NO: 316131
guaggauauuaacauuuga

SEQ ID NO: 385124 - RNA, 19 nt, Artificial Sequence
  Description of Artificial Sequence: Synthetic oligonucleotide
  Antisense Strand to SEQ ID NO: 385123
ucaaauguuaauauccuac

SEQ ID NO: 385125 - RNA, 19 nt, Artificial Sequence
  Description of Artificial Sequence: Synthetic oligonucleotide
  Sense Strand Starting at position 844 of SEQ ID NO: 316291
augggcgaccuguaaguaa

SEQ ID NO: 385126 - RNA, 19 nt, Artificial Sequence
  Description of Artificial Sequence: Synthetic oligonucleotide
  Antisense Strand to SEQ ID NO: 385125
uuacuuacaggucgcccau

SEQ ID NO: 385127 - RNA, 19 nt, Artificial Sequence
  Description of Artificial Sequence: Synthetic oligonucleotide
  Sense Strand Starting at position 844 of SEQ ID NO: 316295
gcgaccuguaaguaauaaa

SEQ ID NO: 385128 - RNA, 19 nt, Artificial Sequence
  Description of Artificial Sequence: Synthetic oligonucleotide
  Antisense Strand to SEQ ID NO: 385127
uuuauuacuuacaggucgc

SEQ ID NO: 385129 - RNA, 19 nt, Artificial Sequence
  Description of Artificial Sequence: Synthetic oligonucleotide
  Sense Strand Starting at position 844 of SEQ ID NO: 316416
ucaagaauccuguguugga

SEQ ID NO: 385130 - RNA, 19 nt, Artificial Sequence
  Description of Artificial Sequence: Synthetic oligonucleotide
  Antisense Strand to SEQ ID NO: 385129
uccaacacaggauucuuga

SEQ ID NO: 385131 - RNA, 19 nt, Artificial Sequence
  Description of Artificial Sequence: Synthetic oligonucleotide
  Sense Strand Starting at position 844 of SEQ ID NO: 316417
caagaauccuguguuggaa

SEQ ID NO: 385132 - RNA, 19 nt, Artificial Sequence
  Description of Artificial Sequence: Synthetic oligonucleotide
  Antisense Strand to SEQ ID NO: 385131
uuccaacacaggauucuug

SEQ ID NO: 385133 - RNA, 19 nt, Artificial Sequence
  Description of Artificial Sequence: Synthetic oligonucleotide
  Sense Strand Starting at position 844 of SEQ ID NO: 316426
uguguuggaaaguaaguua

SEQ ID NO: 385134 - RNA, 19 nt, Artificial Sequence
  Description of Artificial Sequence: Synthetic oligonucleotide
  Antisense Strand to SEQ ID NO: 385133
uaacuuacuuuccaacaca

SEQ ID NO: 385135 - RNA, 19 nt, Artificial Sequence
  Description of Artificial Sequence: Synthetic oligonucleotide
  Sense Strand Starting at position 844 of SEQ ID NO: 316429
guuggaaaguaaguuaauu

SEQ ID NO: 385136 - RNA, 19 nt, Artificial Sequence
  Description of Artificial Sequence: Synthetic oligonucleotide
  Antisense Strand to SEQ ID NO: 385135
aauuaacuuacuuuccaac

SEQ ID NO: 385137 - RNA, 19 nt, Artificial Sequence
  Description of Artificial Sequence: Synthetic oligonucleotide
  Sense Strand Starting at position 844 of SEQ ID NO: 316662
ugaaauaucuggccucuac

SEQ ID NO: 385138 - RNA, 19 nt, Artificial Sequence
  Description of Artificial Sequence: Synthetic oligonucleotide
  Antisense Strand to SEQ ID NO: 385137
guagaggccagauauuuca

SEQ ID NO: 385139 - RNA, 19 nt, Artificial Sequence
  Description of Artificial Sequence: Synthetic oligonucleotide
  Sense Strand Starting at position 844 of SEQ ID NO: 316743
guuugugucgaaccgucaa

SEQ ID NO: 385140 - RNA, 19 nt, Artificial Sequence
  Description of Artificial Sequence: Synthetic oligonucleotide
  Antisense Strand to SEQ ID NO: 385139
uugacgguucgacacaaac

SEQ ID NO: 385141 - RNA, 19 nt, Artificial Sequence
  Description of Artificial Sequence: Synthetic oligonucleotide
  Sense Strand Starting at position 844 of SEQ ID NO: 317760
agguuugaggcccaauauu

SEQ ID NO: 385142 - RNA, 19 nt, Artificial Sequence
  Description of Artificial Sequence: Synthetic oligonucleotide
  Antisense Strand to SEQ ID NO: 385141
aauauugggccucaaaccu

SEQ ID NO: 385143 - RNA, 19 nt, Artificial Sequence
  Description of Artificial Sequence: Synthetic oligonucleotide
  Sense Strand Starting at position 844 of SEQ ID NO: 317807
ccaggugagagcugagaau

SEQ ID NO: 385144 - RNA, 19 nt, Artificial Sequence
  Description of Artificial Sequence: Synthetic oligonucleotide
  Antisense Strand to SEQ ID NO: 385143
auucucagcucucaccugg

SEQ ID NO: 385145 - RNA, 19 nt, Artificial Sequence
  Description of Artificial Sequence: Synthetic oligonucleotide
  Sense Strand Starting at position 844 of SEQ ID NO: 317900
ucucauacgcuguugugua

SEQ ID NO: 385146 - RNA, 19 nt, Artificial Sequence
  Description of Artificial Sequence: Synthetic oligonucleotide
  Antisense Strand to SEQ ID NO: 385145
uacacaacagcguaugaga

SEQ ID NO: 385147 - RNA, 19 nt, Artificial Sequence
  Description of Artificial Sequence: Synthetic oligonucleotide
  Sense Strand Starting at position 844 of SEQ ID NO: 317930
uaauauugugaggguaagu

SEQ ID NO: 385148 - RNA, 19 nt, Artificial Sequence
  Description of Artificial Sequence: Synthetic oligonucleotide
  Antisense Strand to SEQ ID NO: 385147
acuuacccucacaauauua

SEQ ID NO: 385149 - RNA, 19 nt, Artificial Sequence
  Description of Artificial Sequence: Synthetic oligonucleotide
  Sense Strand Starting at position 844 of SEQ ID NO: 317940
aggguaagugcagggaauu

SEQ ID NO: 385150 - RNA, 19 nt, Artificial Sequence
  Description of Artificial Sequence: Synthetic oligonucleotide
  Antisense Strand to SEQ ID NO: 385149
aauucccugcacuuacccu

SEQ ID NO: 385151 - RNA, 19 nt, Artificial Sequence
  Description of Artificial Sequence: Synthetic oligonucleotide
  Sense Strand Starting at position 844 of SEQ ID NO: 317983
auuuaauucucugggauuu

SEQ ID NO: 385152 - RNA, 19 nt, Artificial Sequence
  Description of Artificial Sequence: Synthetic oligonucleotide
  Antisense Strand to SEQ ID NO: 385151
aaaucccagagaauuaaau

SEQ ID NO: 385153 - RNA, 19 nt, Artificial Sequence
  Description of Artificial Sequence: Synthetic oligonucleotide
  Sense Strand Starting at position 844 of SEQ ID NO: 317985
uuaauucucugggauuuga

SEQ ID NO: 385154 - RNA, 19 nt, Artificial Sequence
  Description of Artificial Sequence: Synthetic oligonucleotide
  Antisense Strand to SEQ ID NO: 385153
ucaaaucccagagaauuaa

SEQ ID NO: 385155 - RNA, 19 nt, Artificial Sequence
  Description of Artificial Sequence: Synthetic oligonucleotide
  Sense Strand Starting at position 844 of SEQ ID NO: 318039
uagacuuaacguuagguuu

SEQ ID NO: 385156 - RNA, 19 nt, Artificial Sequence
  Description of Artificial Sequence: Synthetic oligonucleotide
  Antisense Strand to SEQ ID NO: 385155
aaaccuaacguuaagucua

SEQ ID NO: 385157 - RNA, 19 nt, Artificial Sequence
  Description of Artificial Sequence: Synthetic oligonucleotide
  Sense Strand Starting at position 844 of SEQ ID NO: 318052
agguuugguagccaauaac

SEQ ID NO: 385158 - RNA, 19 nt, Artificial Sequence
  Description of Artificial Sequence: Synthetic oligonucleotide
  Antisense Strand to SEQ ID NO: 385157
guuauuggcuaccaaaccu

SEQ ID NO: 385159 - RNA, 19 nt, Artificial Sequence
  Description of Artificial Sequence: Synthetic oligonucleotide
  Sense Strand Starting at position 844 of SEQ ID NO: 318096
ugcguuaacccagaacuaa

SEQ ID NO: 385160 - RNA, 19 nt, Artificial Sequence
  Description of Artificial Sequence: Synthetic oligonucleotide
  Antisense Strand to SEQ ID NO: 385159
uuaguucuggguuaacgca

SEQ ID NO: 385161 - RNA, 19 nt, Artificial Sequence
  Description of Artificial Sequence: Synthetic oligonucleotide
  Sense Strand Starting at position 844 of SEQ ID NO: 318129
agauuugugauguguuucu

SEQ ID NO: 385162 - RNA, 19 nt, Artificial Sequence
  Description of Artificial Sequence: Synthetic oligonucleotide
  Antisense Strand to SEQ ID NO: 385161
agaaacacaucacaaaucu

SEQ ID NO: 385163 - RNA, 19 nt, Artificial Sequence
  Description of Artificial Sequence: Synthetic oligonucleotide
  Sense Strand Starting at position 844 of SEQ ID NO: 318216
aguguagugcuugagagag

SEQ ID NO: 385164 - RNA, 19 nt, Artificial Sequence
  Description of Artificial Sequence: Synthetic oligonucleotide
  Antisense Strand to SEQ ID NO: 385163
cucucucaagcacuacacu

SEQ ID NO: 385165 - RNA, 19 nt, Artificial Sequence
  Description of Artificial Sequence: Synthetic oligonucleotide
  Sense Strand Starting at position 844 of SEQ ID NO: 318280
gggaaagucuggguuaaug

SEQ ID NO: 385166 - RNA, 19 nt, Artificial Sequence
  Description of Artificial Sequence: Synthetic oligonucleotide
  Antisense Strand to SEQ ID NO: 385165
cauuaacccagacuuuccc

SEQ ID NO: 385167 - RNA, 19 nt, Artificial Sequence
  Description of Artificial Sequence: Synthetic oligonucleotide
  Sense Strand Starting at position 844 of SEQ ID NO: 318282
gaaagucuggguuaaugug

SEQ ID NO: 385168 - RNA, 19 nt, Artificial Sequence
  Description of Artificial Sequence: Synthetic oligonucleotide
  Antisense Strand to SEQ ID NO: 385167
cacauuaacccagacuuuc

SEQ ID NO: 385169 - RNA, 19 nt, Artificial Sequence
  Description of Artificial Sequence: Synthetic oligonucleotide
  Sense Strand Starting at position 844 of SEQ ID NO: 318379
agugcagugauuuggugau

SEQ ID NO: 385170 - RNA, 19 nt, Artificial Sequence
  Description of Artificial Sequence: Synthetic oligonucleotide
  Antisense Strand to SEQ ID NO: 385169
aucaccaaaucacugcacu

SEQ ID NO: 385171 - RNA, 19 nt, Artificial Sequence
  Description of Artificial Sequence: Synthetic oligonucleotide
  Sense Strand Starting at position 844 of SEQ ID NO: 318392
ggugauaagucucuaaauu

SEQ ID NO: 385172 - RNA, 19 nt, Artificial Sequence
  Description of Artificial Sequence: Synthetic oligonucleotide
  Antisense Strand to SEQ ID NO: 385171
aauuuagagacuuaucacc

SEQ ID NO: 385173 - RNA, 19 nt, Artificial Sequence
  Description of Artificial Sequence: Synthetic oligonucleotide
  Sense Strand Starting at position 844 of SEQ ID NO: 318420
uguuaaucucugcauagag

SEQ ID NO: 385174 - RNA, 19 nt, Artificial Sequence
  Description of Artificial Sequence: Synthetic oligonucleotide
  Antisense Strand to SEQ ID NO: 385173
cucuaugcagagauuaaca

SEQ ID NO: 385175 - RNA, 19 nt, Artificial Sequence
  Description of Artificial Sequence: Synthetic oligonucleotide
  Sense Strand Starting at position 844 of SEQ ID NO: 318556
auugguuucucacuugaau

SEQ ID NO: 385176 - RNA, 19 nt, Artificial Sequence
  Description of Artificial Sequence: Synthetic oligonucleotide
  Antisense Strand to SEQ ID NO: 385175
auucaagugagaaaccaau

SEQ ID NO: 385177 - RNA, 19 nt, Artificial Sequence
  Description of Artificial Sequence: Synthetic oligonucleotide
  Sense Strand Starting at position 844 of SEQ ID NO: 318559
gguuucucacuugaauucu

SEQ ID NO: 385178 - RNA, 19 nt, Artificial Sequence
  Description of Artificial Sequence: Synthetic oligonucleotide
  Antisense Strand to SEQ ID NO: 385177
agaauucaagugagaaacc

SEQ ID NO: 385179 - RNA, 19 nt, Artificial Sequence
  Description of Artificial Sequence: Synthetic oligonucleotide
  Sense Strand Starting at position 844 of SEQ ID NO: 318569
uugaauucugcuuaaguau

SEQ ID NO: 385180 - RNA, 19 nt, Artificial Sequence
  Description of Artificial Sequence: Synthetic oligonucleotide
  Antisense Strand to SEQ ID NO: 385179
auacuuaagcagaauucaa

SEQ ID NO: 385181 - RNA, 19 nt, Artificial Sequence
  Description of Artificial Sequence: Synthetic oligonucleotide
  Sense Strand Starting at position 844 of SEQ ID NO: 318575
ucugcuuaaguauaaagau

SEQ ID NO: 385182 - RNA, 19 nt, Artificial Sequence
  Description of Artificial Sequence: Synthetic oligonucleotide
  Antisense Strand to SEQ ID NO: 385181
aucuuuauacuuaagcaga

SEQ ID NO: 385183 - RNA, 19 nt, Artificial Sequence
  Description of Artificial Sequence: Synthetic oligonucleotide
  Sense Strand Starting at position 844 of SEQ ID NO: 319003
augauuaggucucuuuaug

SEQ ID NO: 385184 - RNA, 19 nt, Artificial Sequence
  Description of Artificial Sequence: Synthetic oligonucleotide
  Antisense Strand to SEQ ID NO: 385183
cauaaagagaccuaaucau

SEQ ID NO: 385185 - RNA, 19 nt, Artificial Sequence
  Description of Artificial Sequence: Synthetic oligonucleotide
  Sense Strand Starting at position 845 of SEQ ID NO: 315365
ggucagugugcagggagaa

SEQ ID NO: 385186 - RNA, 19 nt, Artificial Sequence
  Description of Artificial Sequence: Synthetic oligonucleotide
  Antisense Strand to SEQ ID NO: 385185
uucucccugcacacugacc

SEQ ID NO: 385187 - RNA, 19 nt, Artificial Sequence
  Description of Artificial Sequence: Synthetic oligonucleotide
  Sense Strand Starting at position 845 of SEQ ID NO: 315519
caggauuccugguuccuuu

SEQ ID NO: 385188 - RNA, 19 nt, Artificial Sequence
  Description of Artificial Sequence: Synthetic oligonucleotide
  Antisense Strand to SEQ ID NO: 385187
aaaggaaccaggaauccug

SEQ ID NO: 385189 - RNA, 19 nt, Artificial Sequence
  Description of Artificial Sequence: Synthetic oligonucleotide
  Sense Strand Starting at position 845 of SEQ ID NO: 315577
cuaggagcucccuagguau

SEQ ID NO: 385190 - RNA, 19 nt, Artificial Sequence
  Description of Artificial Sequence: Synthetic oligonucleotide
  Antisense Strand to SEQ ID NO: 385189
auaccuagggagcuccuag

SEQ ID NO: 385191 - RNA, 19 nt, Artificial Sequence
  Description of Artificial Sequence: Synthetic oligonucleotide
  Sense Strand Starting at position 845 of SEQ ID NO: 315610
ggauuugggcugugcuuua

SEQ ID NO: 385192 - RNA, 19 nt, Artificial Sequence
  Description of Artificial Sequence: Synthetic oligonucleotide
  Antisense Strand to SEQ ID NO: 385191
uaaagcacagcccaaaucc

SEQ ID NO: 385193 - RNA, 19 nt, Artificial Sequence
  Description of Artificial Sequence: Synthetic oligonucleotide
  Sense Strand Starting at position 845 of SEQ ID NO: 315653
ugggucuccucauggaaga

SEQ ID NO: 385194 - RNA, 19 nt, Artificial Sequence
  Description of Artificial Sequence: Synthetic oligonucleotide
  Antisense Strand to SEQ ID NO: 385193
ucuuccaugaggagaccca

SEQ ID NO: 385195 - RNA, 19 nt, Artificial Sequence
  Description of Artificial Sequence: Synthetic oligonucleotide
  Sense Strand Starting at position 845 of SEQ ID NO: 315742
cuggaaaggucuuaccaau

SEQ ID NO: 385196 - RNA, 19 nt, Artificial Sequence
  Description of Artificial Sequence: Synthetic oligonucleotide
  Antisense Strand to SEQ ID NO: 385195
auugguaagaccuuuccag

SEQ ID NO: 385197 - RNA, 19 nt, Artificial Sequence
  Description of Artificial Sequence: Synthetic oligonucleotide
  Sense Strand Starting at position 845 of SEQ ID NO: 315791
gggaaauguuuguaaggcu

SEQ ID NO: 385198 - RNA, 19 nt, Artificial Sequence
  Description of Artificial Sequence: Synthetic oligonucleotide
  Antisense Strand to SEQ ID NO: 385197
agccuuacaaacauuuccc

SEQ ID NO: 385199 - RNA, 19 nt, Artificial Sequence
  Description of Artificial Sequence: Synthetic oligonucleotide
  Sense Strand Starting at position 845 of SEQ ID NO: 315864
agagcucuuuccucaagau

SEQ ID NO: 385200 - RNA, 19 nt, Artificial Sequence
  Description of Artificial Sequence: Synthetic oligonucleotide
  Antisense Strand to SEQ ID NO: 385199
aucuugaggaaagagcucu

SEQ ID NO: 385201 - RNA, 19 nt, Artificial Sequence
  Description of Artificial Sequence: Synthetic oligonucleotide
  Sense Strand Starting at position 845 of SEQ ID NO: 315876
ucaagaugucagcgccacu

SEQ ID NO: 385202 - RNA, 19 nt, Artificial Sequence
  Description of Artificial Sequence: Synthetic oligonucleotide
  Antisense Strand to SEQ ID NO: 385201
aguggcgcugacaucuuga

SEQ ID NO: 385203 - RNA, 19 nt, Artificial Sequence
  Description of Artificial Sequence: Synthetic oligonucleotide
  Sense Strand Starting at position 845 of SEQ ID NO: 316210
gguacugguccugaggcaa

SEQ ID NO: 385204 - RNA, 19 nt, Artificial Sequence
  Description of Artificial Sequence: Synthetic oligonucleotide
  Antisense Strand to SEQ ID NO: 385203
uugccucaggaccaguacc

SEQ ID NO: 385205 - RNA, 19 nt, Artificial Sequence
  Description of Artificial Sequence: Synthetic oligonucleotide
  Sense Strand Starting at position 845 of SEQ ID NO: 316280
cauggauuguaagagccuu

SEQ ID NO: 385206 - RNA, 19 nt, Artificial Sequence
  Description of Artificial Sequence: Synthetic oligonucleotide
  Antisense Strand to SEQ ID NO: 385205
aaggcucuuacaauccaug

SEQ ID NO: 385207 - RNA, 19 nt, Artificial Sequence
  Description of Artificial Sequence: Synthetic oligonucleotide
  Sense Strand Starting at position 845 of SEQ ID NO: 316335
gcugguucagcacgaacau

SEQ ID NO: 385208 - RNA, 19 nt, Artificial Sequence
  Description of Artificial Sequence: Synthetic oligonucleotide
  Antisense Strand to SEQ ID NO: 385207
auguucgugcugaaccagc

SEQ ID NO: 385209 - RNA, 19 nt, Artificial Sequence
  Description of Artificial Sequence: Synthetic oligonucleotide
  Sense Strand Starting at position 845 of SEQ ID NO: 316402
gcaucaucaccuuggagac

SEQ ID NO: 385210 - RNA, 19 nt, Artificial Sequence
  Description of Artificial Sequence: Synthetic oligonucleotide
  Antisense Strand to SEQ ID NO: 385209
gucuccaaggugaugaugc

SEQ ID NO: 385211 - RNA, 19 nt, Artificial Sequence
  Description of Artificial Sequence: Synthetic oligonucleotide
  Sense Strand Starting at position 845 of SEQ ID NO: 316545
ggcugaagugaguagcaga

SEQ ID NO: 385212 - RNA, 19 nt, Artificial Sequence
  Description of Artificial Sequence: Synthetic oligonucleotide
  Antisense Strand to SEQ ID NO: 385211
ucugcuacucacuucagcc

SEQ ID NO: 385213 - RNA, 19 nt, Artificial Sequence
  Description of Artificial Sequence: Synthetic oligonucleotide
  Sense Strand Starting at position 845 of SEQ ID NO: 316863
gccucaaaucugggaucua

SEQ ID NO: 385214 - RNA, 19 nt, Artificial Sequence
  Description of Artificial Sequence: Synthetic oligonucleotide
  Antisense Strand to SEQ ID NO: 385213
uagaucccagauuugaggc

SEQ ID NO: 385215 - RNA, 19 nt, Artificial Sequence
  Description of Artificial Sequence: Synthetic oligonucleotide
  Sense Strand Starting at position 845 of SEQ ID NO: 316864
ccucaaaucugggaucuaa

SEQ ID NO: 385216 - RNA, 19 nt, Artificial Sequence
  Description of Artificial Sequence: Synthetic oligonucleotide
  Antisense Strand to SEQ ID NO: 385215
uuagaucccagauuugagg

SEQ ID NO: 385217 - RNA, 19 nt, Artificial Sequence
  Description of Artificial Sequence: Synthetic oligonucleotide
  Sense Strand Starting at position 845 of SEQ ID NO: 317195
ugacaucagcugcgaacaa

SEQ ID NO: 385218 - RNA, 19 nt, Artificial Sequence
  Description of Artificial Sequence: Synthetic oligonucleotide
  Antisense Strand to SEQ ID NO: 385217
uuguucgcagcugauguca

SEQ ID NO: 385219 - RNA, 19 nt, Artificial Sequence
  Description of Artificial Sequence: Synthetic oligonucleotide
  Sense Strand Starting at position 845 of SEQ ID NO: 317196
gacaucagcugcgaacaau

SEQ ID NO: 385220 - RNA, 19 nt, Artificial Sequence
  Description of Artificial Sequence: Synthetic oligonucleotide
  Antisense Strand to SEQ ID NO: 385219
auuguucgcagcugauguc

SEQ ID NO: 385221 - RNA, 19 nt, Artificial Sequence
  Description of Artificial Sequence: Synthetic oligonucleotide
  Sense Strand Starting at position 845 of SEQ ID NO: 317912
gggauagggucgcaaggaa

SEQ ID NO: 385222 - RNA, 19 nt, Artificial Sequence
  Description of Artificial Sequence: Synthetic oligonucleotide
  Antisense Strand to SEQ ID NO: 385221
uuccuugcgacccuauccc

SEQ ID NO: 385223 - RNA, 19 nt, Artificial Sequence
  Description of Artificial Sequence: Synthetic oligonucleotide
  Sense Strand Starting at position 845 of SEQ ID NO: 317977
gaugaacuguucucaaguc

SEQ ID NO: 385224 - RNA, 19 nt, Artificial Sequence
  Description of Artificial Sequence: Synthetic oligonucleotide
  Antisense Strand to SEQ ID NO: 385223
gacuugagaacaguucauc

SEQ ID NO: 385225 - RNA, 19 nt, Artificial Sequence
  Description of Artificial Sequence: Synthetic oligonucleotide
  Sense Strand Starting at position 845 of SEQ ID NO: 318349
gaaacaagcuuggcugaga

SEQ ID NO: 385226 - RNA, 19 nt, Artificial Sequence
  Description of Artificial Sequence: Synthetic oligonucleotide
  Antisense Strand to SEQ ID NO: 385225
ucucagccaagcuuguuuc

SEQ ID NO: 385227 - RNA, 19 nt, Artificial Sequence
  Description of Artificial Sequence: Synthetic oligonucleotide
  Sense Strand Starting at position 845 of SEQ ID NO: 318350
aaacaagcuuggcugagau

SEQ ID NO: 385228 - RNA, 19 nt, Artificial Sequence
  Description of Artificial Sequence: Synthetic oligonucleotide
  Antisense Strand to SEQ ID NO: 385227
aucucagccaagcuuguuu

SEQ ID NO: 385229 - RNA, 19 nt, Artificial Sequence
  Description of Artificial Sequence: Synthetic oligonucleotide
  Sense Strand Starting at position 845 of SEQ ID NO: 318475
agcugaaaccuguguccaa

SEQ ID NO: 385230 - RNA, 19 nt, Artificial Sequence
  Description of Artificial Sequence: Synthetic oligonucleotide
  Antisense Strand to SEQ ID NO: 385229
uuggacacagguuucagcu

SEQ ID NO: 385231 - RNA, 19 nt, Artificial Sequence
  Description of Artificial Sequence: Synthetic oligonucleotide
  Sense Strand Starting at position 845 of SEQ ID NO: 318476
gcugaaaccuguguccaag

SEQ ID NO: 385232 - RNA, 19 nt, Artificial Sequence
  Description of Artificial Sequence: Synthetic oligonucleotide
  Antisense Strand to SEQ ID NO: 385231
cuuggacacagguuucagc

SEQ ID NO: 385233 - RNA, 19 nt, Artificial Sequence
  Description of Artificial Sequence: Synthetic oligonucleotide
  Sense Strand Starting at position 845 of SEQ ID NO: 318478
ugaaaccuguguccaagua

SEQ ID NO: 385234 - RNA, 19 nt, Artificial Sequence
  Description of Artificial Sequence: Synthetic oligonucleotide
  Antisense Strand to SEQ ID NO: 385233
uacuuggacacagguuuca

SEQ ID NO: 385235 - RNA, 19 nt, Artificial Sequence
  Description of Artificial Sequence: Synthetic oligonucleotide
  Sense Strand Starting at position 845 of SEQ ID NO: 318598
ggaguccacaugugugcaa

SEQ ID NO: 385236 - RNA, 19 nt, Artificial Sequence
  Description of Artificial Sequence: Synthetic oligonucleotide
  Antisense Strand to SEQ ID NO: 385235
uugcacacauguggacucc

SEQ ID NO: 385237 - RNA, 19 nt, Artificial Sequence
  Description of Artificial Sequence: Synthetic oligonucleotide
  Sense Strand Starting at position 845 of SEQ ID NO: 318668
ugacaaugugcaugccagu

SEQ ID NO: 385238 - RNA, 19 nt, Artificial Sequence
  Description of Artificial Sequence: Synthetic oligonucleotide
  Antisense Strand to SEQ ID NO: 385237
acuggcaugcacauuguca

SEQ ID NO: 385239 - RNA, 19 nt, Artificial Sequence
  Description of Artificial Sequence: Synthetic oligonucleotide
  Sense Strand Starting at position 845 of SEQ ID NO: 318692
guuagauguaccuaugcag

SEQ ID NO: 385240 - RNA, 19 nt, Artificial Sequence
  Description of Artificial Sequence: Synthetic oligonucleotide
  Antisense Strand to SEQ ID NO: 385239
cugcauagguacaucuaac

SEQ ID NO: 385241 - RNA, 19 nt, Artificial Sequence
  Description of Artificial Sequence: Synthetic oligonucleotide
  Sense Strand Starting at position 845 of SEQ ID NO: 318715
ccucaagcgaagggucaua

SEQ ID NO: 385242 - RNA, 19 nt, Artificial Sequence
  Description of Artificial Sequence: Synthetic oligonucleotide
  Antisense Strand to SEQ ID NO: 385241
uaugacccuucgcuugagg

SEQ ID NO: 385243 - RNA, 19 nt, Artificial Sequence
  Description of Artificial Sequence: Synthetic oligonucleotide
  Sense Strand Starting at position 845 of SEQ ID NO: 318725
agggucauauuuggaaaca

SEQ ID NO: 385244 - RNA, 19 nt, Artificial Sequence
  Description of Artificial Sequence: Synthetic oligonucleotide
  Antisense Strand to SEQ ID NO: 385243
uguuuccaaauaugacccu

SEQ ID NO: 385245 - RNA, 19 nt, Artificial Sequence
  Description of Artificial Sequence: Synthetic oligonucleotide
  Sense Strand Starting at position 845 of SEQ ID NO: 318726
gggucauauuuggaaacaa

SEQ ID NO: 385246 - RNA, 19 nt, Artificial Sequence
  Description of Artificial Sequence: Synthetic oligonucleotide
  Antisense Strand to SEQ ID NO: 385245
uuguuuccaaauaugaccc

SEQ ID NO: 385247 - RNA, 19 nt, Artificial Sequence
  Description of Artificial Sequence: Synthetic oligonucleotide
  Sense Strand Starting at position 845 of SEQ ID NO: 318750
gcucuaaacauguaagcgu

SEQ ID NO: 385248 - RNA, 19 nt, Artificial Sequence
  Description of Artificial Sequence: Synthetic oligonucleotide
  Antisense Strand to SEQ ID NO: 385247
acgcuuacauguuuagagc

SEQ ID NO: 385249 - RNA, 19 nt, Artificial Sequence
  Description of Artificial Sequence: Synthetic oligonucleotide
  Sense Strand Starting at position 845 of SEQ ID NO: 318929
aggagaagcucauguaaug

SEQ ID NO: 385250 - RNA, 19 nt, Artificial Sequence
  Description of Artificial Sequence: Synthetic oligonucleotide
  Antisense Strand to SEQ ID NO: 385249
cauuacaugagcuucuccu

SEQ ID NO: 385251 - RNA, 19 nt, Artificial Sequence
  Description of Artificial Sequence: Synthetic oligonucleotide
  Sense Strand Starting at position 845 of SEQ ID NO: 318934
aagcucauguaauggauua

SEQ ID NO: 385252 - RNA, 19 nt, Artificial Sequence
  Description of Artificial Sequence: Synthetic oligonucleotide
  Antisense Strand to SEQ ID NO: 385251
uaauccauuacaugagcuu

SEQ ID NO: 385253 - RNA, 19 nt, Artificial Sequence
  Description of Artificial Sequence: Synthetic oligonucleotide
  Sense Strand Starting at position 845 of SEQ ID NO: 318959
acaggauuauguuccuuga

SEQ ID NO: 385254 - RNA, 19 nt, Artificial Sequence
  Description of Artificial Sequence: Synthetic oligonucleotide
  Antisense Strand to SEQ ID NO: 385253
ucaaggaacauaauccugu

SEQ ID NO: 385255 - RNA, 19 nt, Artificial Sequence
  Description of Artificial Sequence: Synthetic oligonucleotide
  Sense Strand Starting at position 845 of SEQ ID NO: 318961
aggauuauguuccuugauu

SEQ ID NO: 385256 - RNA, 19 nt, Artificial Sequence
  Description of Artificial Sequence: Synthetic oligonucleotide
  Antisense Strand to SEQ ID NO: 385255
aaucaaggaacauaauccu

SEQ ID NO: 385257 - RNA, 19 nt, Artificial Sequence
  Description of Artificial Sequence: Synthetic oligonucleotide
  Sense Strand Starting at position 845 of SEQ ID NO: 318962
ggauuauguuccuugauuc

SEQ ID NO: 385258 - RNA, 19 nt, Artificial Sequence
  Description of Artificial Sequence: Synthetic oligonucleotide
  Antisense Strand to SEQ ID NO: 385257
gaaucaaggaacauaaucc

SEQ ID NO: 385259 - RNA, 19 nt, Artificial Sequence
  Description of Artificial Sequence: Synthetic oligonucleotide
  Sense Strand Starting at position 845 of SEQ ID NO: 318970
uuccuugauuccugagagu

SEQ ID NO: 385260 - RNA, 19 nt, Artificial Sequence
  Description of Artificial Sequence: Synthetic oligonucleotide
  Antisense Strand to SEQ ID NO: 385259
acucucaggaaucaaggaa

SEQ ID NO: 385261 - RNA, 19 nt, Artificial Sequence
  Description of Artificial Sequence: Synthetic oligonucleotide
  Sense Strand Starting at position 845 of SEQ ID NO: 319011
ucagucuaucacugcaaga

SEQ ID NO: 385262 - RNA, 19 nt, Artificial Sequence
  Description of Artificial Sequence: Synthetic oligonucleotide
  Antisense Strand to SEQ ID NO: 385261
ucuugcagugauagacuga

SEQ ID NO: 385263 - RNA, 19 nt, Artificial Sequence
  Description of Artificial Sequence: Synthetic oligonucleotide
  Sense Strand Starting at position 845 of SEQ ID NO: 319013
agucuaucacugcaagaga

SEQ ID NO: 385264 - RNA, 19 nt, Artificial Sequence
  Description of Artificial Sequence: Synthetic oligonucleotide
  Antisense Strand to SEQ ID NO: 385263
ucucuugcagugauagacu

SEQ ID NO: 385265 - RNA, 19 nt, Artificial Sequence
  Description of Artificial Sequence: Synthetic oligonucleotide
  Sense Strand Starting at position 846 of SEQ ID NO: 315260
gucagaugugaucacucag

SEQ ID NO: 385266 - RNA, 19 nt, Artificial Sequence
  Description of Artificial Sequence: Synthetic oligonucleotide
  Antisense Strand to SEQ ID NO: 385265
cugagugaucacaucugac

SEQ ID NO: 385267 - RNA, 19 nt, Artificial Sequence
  Description of Artificial Sequence: Synthetic oligonucleotide
  Sense Strand Starting at position 846 of SEQ ID NO: 315397
ggucagugugcagggagaa

SEQ ID NO: 385268 - RNA, 19 nt, Artificial Sequence
  Description of Artificial Sequence: Synthetic oligonucleotide
  Antisense Strand to SEQ ID NO: 385267
uucucccugcacacugacc

SEQ ID NO: 385269 - RNA, 19 nt, Artificial Sequence
  Description of Artificial Sequence: Synthetic oligonucleotide
  Sense Strand Starting at position 846 of SEQ ID NO: 315551
caggauuccugguuccuuu

SEQ ID NO: 385270 - RNA, 19 nt, Artificial Sequence
  Description of Artificial Sequence: Synthetic oligonucleotide
  Antisense Strand to SEQ ID NO: 385269
aaaggaaccaggaauccug

SEQ ID NO: 385271 - RNA, 19 nt, Artificial Sequence
  Description of Artificial Sequence: Synthetic oligonucleotide
  Sense Strand Starting at position 846 of SEQ ID NO: 315609
cuaggagcucccuagguau

SEQ ID NO: 385272 - RNA, 19 nt, Artificial Sequence
  Description of Artificial Sequence: Synthetic oligonucleotide
  Antisense Strand to SEQ ID NO: 385271
auaccuagggagcuccuag

SEQ ID NO: 385273 - RNA, 19 nt, Artificial Sequence
  Description of Artificial Sequence: Synthetic oligonucleotide
  Sense Strand Starting at position 846 of SEQ ID NO: 315642
ggauuugggcugugcuuua

SEQ ID NO: 385274 - RNA, 19 nt, Artificial Sequence
  Description of Artificial Sequence: Synthetic oligonucleotide
  Antisense Strand to SEQ ID NO: 385273
uaaagcacagcccaaaucc

SEQ ID NO: 385275 - RNA, 19 nt, Artificial Sequence
  Description of Artificial Sequence: Synthetic oligonucleotide
  Sense Strand Starting at position 846 of SEQ ID NO: 315685
ugggucuccucauggaaga

SEQ ID NO: 385276 - RNA, 19 nt, Artificial Sequence
  Description of Artificial Sequence: Synthetic oligonucleotide
  Antisense Strand to SEQ ID NO: 385275
ucuuccaugaggagaccca

SEQ ID NO: 385277 - RNA, 19 nt, Artificial Sequence
  Description of Artificial Sequence: Synthetic oligonucleotide
  Sense Strand Starting at position 846 of SEQ ID NO: 315774
cuggaaaggucuuaccaau

SEQ ID NO: 385278 - RNA, 19 nt, Artificial Sequence
  Description of Artificial Sequence: Synthetic oligonucleotide
  Antisense Strand to SEQ ID NO: 385277
auugguaagaccuuuccag

SEQ ID NO: 385279 - RNA, 19 nt, Artificial Sequence
  Description of Artificial Sequence: Synthetic oligonucleotide
  Sense Strand Starting at position 846 of SEQ ID NO: 315823
gggaaauguuuguaaggcu

SEQ ID NO: 385280 - RNA, 19 nt, Artificial Sequence
  Description of Artificial Sequence: Synthetic oligonucleotide
  Antisense Strand to SEQ ID NO: 385279
agccuuacaaacauuuccc

SEQ ID NO: 385281 - RNA, 19 nt, Artificial Sequence
  Description of Artificial Sequence: Synthetic oligonucleotide
  Sense Strand Starting at position 846 of SEQ ID NO: 315896
agagcucuuuccucaagau

SEQ ID NO: 385282 - RNA, 19 nt, Artificial Sequence
  Description of Artificial Sequence: Synthetic oligonucleotide
  Antisense Strand to SEQ ID NO: 385281
aucuugaggaaagagcucu

SEQ ID NO: 385283 - RNA, 19 nt, Artificial Sequence
  Description of Artificial Sequence: Synthetic oligonucleotide
  Sense Strand Starting at position 846 of SEQ ID NO: 315908
ucaagaugucagcgccacu

SEQ ID NO: 385284 - RNA, 19 nt, Artificial Sequence
  Description of Artificial Sequence: Synthetic oligonucleotide
  Antisense Strand to SEQ ID NO: 385283
aguggcgcugacaucuuga

SEQ ID NO: 385285 - RNA, 19 nt, Artificial Sequence
  Description of Artificial Sequence: Synthetic oligonucleotide
  Sense Strand Starting at position 846 of SEQ ID NO: 316242
gguacugguccugaggcaa

SEQ ID NO: 385286 - RNA, 19 nt, Artificial Sequence
  Description of Artificial Sequence: Synthetic oligonucleotide
  Antisense Strand to SEQ ID NO: 385285
uugccucaggaccaguacc

SEQ ID NO: 385287 - RNA, 19 nt, Artificial Sequence
  Description of Artificial Sequence: Synthetic oligonucleotide
  Sense Strand Starting at position 846 of SEQ ID NO: 316312
cauggauuguaagagccuu

SEQ ID NO: 385288 - RNA, 19 nt, Artificial Sequence
  Description of Artificial Sequence: Synthetic oligonucleotide
  Antisense Strand to SEQ ID NO: 385287
aaggcucuuacaauccaug

SEQ ID NO: 385289 - RNA, 19 nt, Artificial Sequence
  Description of Artificial Sequence: Synthetic oligonucleotide
  Sense Strand Starting at position 846 of SEQ ID NO: 316367
gcugguucagcacgaacau

SEQ ID NO: 385290 - RNA, 19 nt, Artificial Sequence
  Description of Artificial Sequence: Synthetic oligonucleotide
  Antisense Strand to SEQ ID NO: 385289
auguucgugcugaaccagc

SEQ ID NO: 385291 - RNA, 19 nt, Artificial Sequence
  Description of Artificial Sequence: Synthetic oligonucleotide
  Sense Strand Starting at position 846 of SEQ ID NO: 316434
gcaucaucaccuuggagac

SEQ ID NO: 385292 - RNA, 19 nt, Artificial Sequence
  Description of Artificial Sequence: Synthetic oligonucleotide
  Antisense Strand to SEQ ID NO: 385291
gucuccaaggugaugaugc

SEQ ID NO: 385293 - RNA, 19 nt, Artificial Sequence
  Description of Artificial Sequence: Synthetic oligonucleotide
  Sense Strand Starting at position 846 of SEQ ID NO: 316577
ggcugaagugaguagcaga

SEQ ID NO: 385294 - RNA, 19 nt, Artificial Sequence
  Description of Artificial Sequence: Synthetic oligonucleotide
  Antisense Strand to SEQ ID NO: 385293
ucugcuacucacuucagcc

SEQ ID NO: 385295 - RNA, 19 nt, Artificial Sequence
  Description of Artificial Sequence: Synthetic oligonucleotide
  Sense Strand Starting at position 846 of SEQ ID NO: 316895
gccucaaaucugggaucua

SEQ ID NO: 385296 - RNA, 19 nt, Artificial Sequence
  Description of Artificial Sequence: Synthetic oligonucleotide
  Antisense Strand to SEQ ID NO: 385295
uagaucccagauuugaggc

SEQ ID NO: 385297 - RNA, 19 nt, Artificial Sequence
  Description of Artificial Sequence: Synthetic oligonucleotide
  Sense Strand Starting at position 846 of SEQ ID NO: 316896
ccucaaaucugggaucuaa

SEQ ID NO: 385298 - RNA, 19 nt, Artificial Sequence
  Description of Artificial Sequence: Synthetic oligonucleotide
  Antisense Strand to SEQ ID NO: 385297
uuagaucccagauuugagg

SEQ ID NO: 385299 - RNA, 19 nt, Artificial Sequence
  Description of Artificial Sequence: Synthetic oligonucleotide
  Sense Strand Starting at position 846 of SEQ ID NO: 317227
ugacaucagcugcgaacaa

SEQ ID NO: 385300 - RNA, 19 nt, Artificial Sequence
  Description of Artificial Sequence: Synthetic oligonucleotide
  Antisense Strand to SEQ ID NO: 385299
uuguucgcagcugauguca

SEQ ID NO: 385301 - RNA, 19 nt, Artificial Sequence
  Description of Artificial Sequence: Synthetic oligonucleotide
  Sense Strand Starting at position 846 of SEQ ID NO: 317228
gacaucagcugcgaacaau

SEQ ID NO: 385302 - RNA, 19 nt, Artificial Sequence
  Description of Artificial Sequence: Synthetic oligonucleotide
  Antisense Strand to SEQ ID NO: 385301
auuguucgcagcugauguc

SEQ ID NO: 385303 - RNA, 19 nt, Artificial Sequence
  Description of Artificial Sequence: Synthetic oligonucleotide
  Sense Strand Starting at position 846 of SEQ ID NO: 317944
gggauagggucgcaaggaa

SEQ ID NO: 385304 - RNA, 19 nt, Artificial Sequence
  Description of Artificial Sequence: Synthetic oligonucleotide
  Antisense Strand to SEQ ID NO: 385303
uuccuugcgacccuauccc

SEQ ID NO: 385305 - RNA, 19 nt, Artificial Sequence
  Description of Artificial Sequence: Synthetic oligonucleotide
  Sense Strand Starting at position 846 of SEQ ID NO: 318009
gaugaacuguucucaaguc

SEQ ID NO: 385306 - RNA, 19 nt, Artificial Sequence
  Description of Artificial Sequence: Synthetic oligonucleotide
  Antisense Strand to SEQ ID NO: 385305
gacuugagaacaguucauc

SEQ ID NO: 385307 - RNA, 19 nt, Artificial Sequence
  Description of Artificial Sequence: Synthetic oligonucleotide
  Sense Strand Starting at position 846 of SEQ ID NO: 318381
gaaacaagcuuggcugaga

SEQ ID NO: 385308 - RNA, 19 nt, Artificial Sequence
  Description of Artificial Sequence: Synthetic oligonucleotide
  Antisense Strand to SEQ ID NO: 385307
ucucagccaagcuuguuuc

SEQ ID NO: 385309 - RNA, 19 nt, Artificial Sequence
  Description of Artificial Sequence: Synthetic oligonucleotide
  Sense Strand Starting at position 846 of SEQ ID NO: 318382
aaacaagcuuggcugagau

SEQ ID NO: 385310 - RNA, 19 nt, Artificial Sequence
  Description of Artificial Sequence: Synthetic oligonucleotide
  Antisense Strand to SEQ ID NO: 385309
aucucagccaagcuuguuu

SEQ ID NO: 385311 - RNA, 19 nt, Artificial Sequence
  Description of Artificial Sequence: Synthetic oligonucleotide
  Sense Strand Starting at position 846 of SEQ ID NO: 318507
agcugaaaccuguguccaa

SEQ ID NO: 385312 - RNA, 19 nt, Artificial Sequence
  Description of Artificial Sequence: Synthetic oligonucleotide
  Antisense Strand to SEQ ID NO: 385311
uuggacacagguuucagcu

SEQ ID NO: 385313 - RNA, 19 nt, Artificial Sequence
  Description of Artificial Sequence: Synthetic oligonucleotide
  Sense Strand Starting at position 846 of SEQ ID NO: 318508
gcugaaaccuguguccaag

SEQ ID NO: 385314 - RNA, 19 nt, Artificial Sequence
  Description of Artificial Sequence: Synthetic oligonucleotide
  Antisense Strand to SEQ ID NO: 385313
cuuggacacagguuucagc

SEQ ID NO: 385315 - RNA, 19 nt, Artificial Sequence
  Description of Artificial Sequence: Synthetic oligonucleotide
  Sense Strand Starting at position 846 of SEQ ID NO: 318510
ugaaaccuguguccaagua

SEQ ID NO: 385316 - RNA, 19 nt, Artificial Sequence
  Description of Artificial Sequence: Synthetic oligonucleotide
  Antisense Strand to SEQ ID NO: 385315
uacuuggacacagguuuca

SEQ ID NO: 385317 - RNA, 19 nt, Artificial Sequence
  Description of Artificial Sequence: Synthetic oligonucleotide
  Sense Strand Starting at position 846 of SEQ ID NO: 318630
ggaguccacaugugugcaa

SEQ ID NO: 385318 - RNA, 19 nt, Artificial Sequence
  Description of Artificial Sequence: Synthetic oligonucleotide
  Antisense Strand to SEQ ID NO: 385317
uugcacacauguggacucc

SEQ ID NO: 385319 - RNA, 19 nt, Artificial Sequence
  Description of Artificial Sequence: Synthetic oligonucleotide
  Sense Strand Starting at position 846 of SEQ ID NO: 318700
ugacaaugugcaugccagu

SEQ ID NO: 385320 - RNA, 19 nt, Artificial Sequence
  Description of Artificial Sequence: Synthetic oligonucleotide
  Antisense Strand to SEQ ID NO: 385319
acuggcaugcacauuguca

SEQ ID NO: 385321 - RNA, 19 nt, Artificial Sequence
  Description of Artificial Sequence: Synthetic oligonucleotide
  Sense Strand Starting at position 846 of SEQ ID NO: 318724
guuagauguaccuaugcag

SEQ ID NO: 385322 - RNA, 19 nt, Artificial Sequence
  Description of Artificial Sequence: Synthetic oligonucleotide
  Antisense Strand to SEQ ID NO: 385321
cugcauagguacaucuaac

SEQ ID NO: 385323 - RNA, 19 nt, Artificial Sequence
  Description of Artificial Sequence: Synthetic oligonucleotide
  Sense Strand Starting at position 846 of SEQ ID NO: 318747
ccucaagcgaagggucaua

SEQ ID NO: 385324 - RNA, 19 nt, Artificial Sequence
  Description of Artificial Sequence: Synthetic oligonucleotide
  Antisense Strand to SEQ ID NO: 385323
uaugacccuucgcuugagg

SEQ ID NO: 385325 - RNA, 19 nt, Artificial Sequence
  Description of Artificial Sequence: Synthetic oligonucleotide
  Sense Strand Starting at position 846 of SEQ ID NO: 318757
agggucauauuuggaaaca

SEQ ID NO: 385326 - RNA, 19 nt, Artificial Sequence
  Description of Artificial Sequence: Synthetic oligonucleotide
  Antisense Strand to SEQ ID NO: 385325
uguuuccaaauaugacccu

SEQ ID NO: 385327 - RNA, 19 nt, Artificial Sequence
  Description of Artificial Sequence: Synthetic oligonucleotide
  Sense Strand Starting at position 846 of SEQ ID NO: 318758
gggucauauuuggaaacaa

SEQ ID NO: 385328 - RNA, 19 nt, Artificial Sequence
  Description of Artificial Sequence: Synthetic oligonucleotide
  Antisense Strand to SEQ ID NO: 385327
uuguuuccaaauaugaccc

SEQ ID NO: 385329 - RNA, 19 nt, Artificial Sequence
  Description of Artificial Sequence: Synthetic oligonucleotide
  Sense Strand Starting at position 846 of SEQ ID NO: 318782
gcucuaaacauguaagcgu

SEQ ID NO: 385330 - RNA, 19 nt, Artificial Sequence
  Description of Artificial Sequence: Synthetic oligonucleotide
  Antisense Strand to SEQ ID NO: 385329
acgcuuacauguuuagagc

SEQ ID NO: 385331 - RNA, 19 nt, Artificial Sequence
  Description of Artificial Sequence: Synthetic oligonucleotide
  Sense Strand Starting at position 846 of SEQ ID NO: 318961
aggagaagcucauguaaug

SEQ ID NO: 385332 - RNA, 19 nt, Artificial Sequence
  Description of Artificial Sequence: Synthetic oligonucleotide
  Antisense Strand to SEQ ID NO: 385331
cauuacaugagcuucuccu

SEQ ID NO: 385333 - RNA, 19 nt, Artificial Sequence
  Description of Artificial Sequence: Synthetic oligonucleotide
  Sense Strand Starting at position 846 of SEQ ID NO: 318966
aagcucauguaauggauua

SEQ ID NO: 385334 - RNA, 19 nt, Artificial Sequence
  Description of Artificial Sequence: Synthetic oligonucleotide
  Antisense Strand to SEQ ID NO: 385333
uaauccauuacaugagcuu

SEQ ID NO: 385335 - RNA, 19 nt, Artificial Sequence
  Description of Artificial Sequence: Synthetic oligonucleotide
  Sense Strand Starting at position 846 of SEQ ID NO: 318991
acaggauuauguuccuuga

SEQ ID NO: 385336 - RNA, 19 nt, Artificial Sequence
  Description of Artificial Sequence: Synthetic oligonucleotide
  Antisense Strand to SEQ ID NO: 385335
ucaaggaacauaauccugu

SEQ ID NO: 385337 - RNA, 19 nt, Artificial Sequence
  Description of Artificial Sequence: Synthetic oligonucleotide
  Sense Strand Starting at position 846 of SEQ ID NO: 318993
aggauuauguuccuugauu

SEQ ID NO: 385338 - RNA, 19 nt, Artificial Sequence
  Description of Artificial Sequence: Synthetic oligonucleotide
  Antisense Strand to SEQ ID NO: 385337
aaucaaggaacauaauccu

SEQ ID NO: 385339 - RNA, 19 nt, Artificial Sequence
  Description of Artificial Sequence: Synthetic oligonucleotide
  Sense Strand Starting at position 846 of SEQ ID NO: 318994
ggauuauguuccuugauuc

SEQ ID NO: 385340 - RNA, 19 nt, Artificial Sequence
  Description of Artificial Sequence: Synthetic oligonucleotide
  Antisense Strand to SEQ ID NO: 385339
gaaucaaggaacauaaucc

SEQ ID NO: 385341 - RNA, 19 nt, Artificial Sequence
  Description of Artificial Sequence: Synthetic oligonucleotide
  Sense Strand Starting at position 846 of SEQ ID NO: 319043
ucagucuaucacugcaaga

SEQ ID NO: 385342 - RNA, 19 nt, Artificial Sequence
  Description of Artificial Sequence: Synthetic oligonucleotide
  Antisense Strand to SEQ ID NO: 385341
ucuugcagugauagacuga

SEQ ID NO: 385343 - RNA, 19 nt, Artificial Sequence
  Description of Artificial Sequence: Synthetic oligonucleotide
  Sense Strand Starting at position 846 of SEQ ID NO: 319045
agucuaucacugcaagaga

SEQ ID NO: 385344 - RNA, 19 nt, Artificial Sequence
  Description of Artificial Sequence: Synthetic oligonucleotide
  Antisense Strand to SEQ ID NO: 385343
ucucuugcagugauagacu

SEQ ID NO: 385345 - RNA, 19 nt, Artificial Sequence
  Description of Artificial Sequence: Synthetic oligonucleotide
  Sense Strand Starting at position 847 of SEQ ID NO: 315268
acucuuaacuuagagguca

SEQ ID NO: 385346 - RNA, 19 nt, Artificial Sequence
  Description of Artificial Sequence: Synthetic oligonucleotide
  Antisense Strand to SEQ ID NO: 385345
ugaccucuaaguuaagagu

SEQ ID NO: 385347 - RNA, 19 nt, Artificial Sequence
  Description of Artificial Sequence: Synthetic oligonucleotide
  Sense Strand Starting at position 847 of SEQ ID NO: 315618
gaguguguccgcgcugcaa

SEQ ID NO: 385348 - RNA, 19 nt, Artificial Sequence
  Description of Artificial Sequence: Synthetic oligonucleotide
  Antisense Strand to SEQ ID NO: 385347
uugcagcgcggacacacuc

SEQ ID NO: 385349 - RNA, 19 nt, Artificial Sequence
  Description of Artificial Sequence: Synthetic oligonucleotide
  Sense Strand Starting at position 847 of SEQ ID NO: 315805
gugucucacgagcugugua

SEQ ID NO: 385350 - RNA, 19 nt, Artificial Sequence
  Description of Artificial Sequence: Synthetic oligonucleotide
  Antisense Strand to SEQ ID NO: 385349
uacacagcucgugagacac

SEQ ID NO: 385351 - RNA, 19 nt, Artificial Sequence
  Description of Artificial Sequence: Synthetic oligonucleotide
  Sense Strand Starting at position 847 of SEQ ID NO: 315806
ugucucacgagcuguguaa

SEQ ID NO: 385352 - RNA, 19 nt, Artificial Sequence
  Description of Artificial Sequence: Synthetic oligonucleotide
  Antisense Strand to SEQ ID NO: 385351
uuacacagcucgugagaca

SEQ ID NO: 385353 - RNA, 19 nt, Artificial Sequence
  Description of Artificial Sequence: Synthetic oligonucleotide
  Sense Strand Starting at position 847 of SEQ ID NO: 315895
uccaaagagugaugagaau

SEQ ID NO: 385354 - RNA, 19 nt, Artificial Sequence
  Description of Artificial Sequence: Synthetic oligonucleotide
  Antisense Strand to SEQ ID NO: 385353
auucucaucacucuuugga

SEQ ID NO: 385355 - RNA, 19 nt, Artificial Sequence
  Description of Artificial Sequence: Synthetic oligonucleotide
  Sense Strand Starting at position 847 of SEQ ID NO: 315986
cuaggaagccuaugggagu

SEQ ID NO: 385356 - RNA, 19 nt, Artificial Sequence
  Description of Artificial Sequence: Synthetic oligonucleotide
  Antisense Strand to SEQ ID NO: 385355
acucccauaggcuuccuag

SEQ ID NO: 385357 - RNA, 19 nt, Artificial Sequence
  Description of Artificial Sequence: Synthetic oligonucleotide
  Sense Strand Starting at position 847 of SEQ ID NO: 316037
agagguaaccucuguggau

SEQ ID NO: 385358 - RNA, 19 nt, Artificial Sequence
  Description of Artificial Sequence: Synthetic oligonucleotide
  Antisense Strand to SEQ ID NO: 385357
auccacagagguuaccucu

SEQ ID NO: 385359 - RNA, 19 nt, Artificial Sequence
  Description of Artificial Sequence: Synthetic oligonucleotide
  Sense Strand Starting at position 847 of SEQ ID NO: 316038
gagguaaccucuguggaug

SEQ ID NO: 385360 - RNA, 19 nt, Artificial Sequence
  Description of Artificial Sequence: Synthetic oligonucleotide
  Antisense Strand to SEQ ID NO: 385359
cauccacagagguuaccuc

SEQ ID NO: 385361 - RNA, 19 nt, Artificial Sequence
  Description of Artificial Sequence: Synthetic oligonucleotide
  Sense Strand Starting at position 847 of SEQ ID NO: 316070
ggaguucaggcugaaagcu

SEQ ID NO: 385362 - RNA, 19 nt, Artificial Sequence
  Description of Artificial Sequence: Synthetic oligonucleotide
  Antisense Strand to SEQ ID NO: 385361
agcuuucagccugaacucc

SEQ ID NO: 385363 - RNA, 19 nt, Artificial Sequence
  Description of Artificial Sequence: Synthetic oligonucleotide
  Sense Strand Starting at position 847 of SEQ ID NO: 316079
gcugaaagcuuacuccaua

SEQ ID NO: 385364 - RNA, 19 nt, Artificial Sequence
  Description of Artificial Sequence: Synthetic oligonucleotide
  Antisense Strand to SEQ ID NO: 385363
uauggaguaagcuuucagc

SEQ ID NO: 385365 - RNA, 19 nt, Artificial Sequence
  Description of Artificial Sequence: Synthetic oligonucleotide
  Sense Strand Starting at position 847 of SEQ ID NO: 316297
ggcagaagcucacuacaga

SEQ ID NO: 385366 - RNA, 19 nt, Artificial Sequence
  Description of Artificial Sequence: Synthetic oligonucleotide
  Antisense Strand to SEQ ID NO: 385365
ucuguagugagcuucugcc

SEQ ID NO: 385367 - RNA, 19 nt, Artificial Sequence
  Description of Artificial Sequence: Synthetic oligonucleotide
  Sense Strand Starting at position 847 of SEQ ID NO: 316390
gcacguugguuuccaaucu

SEQ ID NO: 385368 - RNA, 19 nt, Artificial Sequence
  Description of Artificial Sequence: Synthetic oligonucleotide
  Antisense Strand to SEQ ID NO: 385367
agauuggaaaccaacgugc

SEQ ID NO: 385369 - RNA, 19 nt, Artificial Sequence
  Description of Artificial Sequence: Synthetic oligonucleotide
  Sense Strand Starting at position 847 of SEQ ID NO: 316411
cuucuaugugcuggaaaug

SEQ ID NO: 385370 - RNA, 19 nt, Artificial Sequence
  Description of Artificial Sequence: Synthetic oligonucleotide
  Antisense Strand to SEQ ID NO: 385369
cauuuccagcacauagaag

SEQ ID NO: 385371 - RNA, 19 nt, Artificial Sequence
  Description of Artificial Sequence: Synthetic oligonucleotide
  Sense Strand Starting at position 847 of SEQ ID NO: 316422
uggaaauggccuugggaac

SEQ ID NO: 385372 - RNA, 19 nt, Artificial Sequence
  Description of Artificial Sequence: Synthetic oligonucleotide
  Antisense Strand to SEQ ID NO: 385371
guucccaaggccauuucca

SEQ ID NO: 385373 - RNA, 19 nt, Artificial Sequence
  Description of Artificial Sequence: Synthetic oligonucleotide
  Sense Strand Starting at position 847 of SEQ ID NO: 316423
ggaaauggccuugggaaca

SEQ ID NO: 385374 - RNA, 19 nt, Artificial Sequence
  Description of Artificial Sequence: Synthetic oligonucleotide
  Antisense Strand to SEQ ID NO: 385373
uguucccaaggccauuucc

SEQ ID NO: 385375 - RNA, 19 nt, Artificial Sequence
  Description of Artificial Sequence: Synthetic oligonucleotide
  Sense Strand Starting at position 847 of SEQ ID NO: 316608
cgggaaugucaaggccauu

SEQ ID NO: 385376 - RNA, 19 nt, Artificial Sequence
  Description of Artificial Sequence: Synthetic oligonucleotide
  Antisense Strand to SEQ ID NO: 385375
aauggccuugacauucccg

SEQ ID NO: 385377 - RNA, 19 nt, Artificial Sequence
  Description of Artificial Sequence: Synthetic oligonucleotide
  Sense Strand Starting at position 847 of SEQ ID NO: 316638
gaagguggagccugagauu

SEQ ID NO: 385378 - RNA, 19 nt, Artificial Sequence
  Description of Artificial Sequence: Synthetic oligonucleotide
  Antisense Strand to SEQ ID NO: 385377
aaucucaggcuccaccuuc

SEQ ID NO: 385379 - RNA, 19 nt, Artificial Sequence
  Description of Artificial Sequence: Synthetic oligonucleotide
  Sense Strand Starting at position 847 of SEQ ID NO: 316652
agauuagcugcugggauua

SEQ ID NO: 385380 - RNA, 19 nt, Artificial Sequence
  Description of Artificial Sequence: Synthetic oligonucleotide
  Antisense Strand to SEQ ID NO: 385379
uaaucccagcagcuaaucu

SEQ ID NO: 385381 - RNA, 19 nt, Artificial Sequence
  Description of Artificial Sequence: Synthetic oligonucleotide
  Sense Strand Starting at position 847 of SEQ ID NO: 316664
gggauuagcucaguggcca

SEQ ID NO: 385382 - RNA, 19 nt, Artificial Sequence
  Description of Artificial Sequence: Synthetic oligonucleotide
  Antisense Strand to SEQ ID NO: 385381
uggccacugagcuaauccc

SEQ ID NO: 385383 - RNA, 19 nt, Artificial Sequence
  Description of Artificial Sequence: Synthetic oligonucleotide
  Sense Strand Starting at position 847 of SEQ ID NO: 316728
ccuuaauccugcuuggaaa

SEQ ID NO: 385384 - RNA, 19 nt, Artificial Sequence
  Description of Artificial Sequence: Synthetic oligonucleotide
  Antisense Strand to SEQ ID NO: 385383
uuuccaagcaggauuaagg

SEQ ID NO: 385385 - RNA, 19 nt, Artificial Sequence
  Description of Artificial Sequence: Synthetic oligonucleotide
  Sense Strand Starting at position 847 of SEQ ID NO: 316729
cuuaauccugcuuggaaau

SEQ ID NO: 385386 - RNA, 19 nt, Artificial Sequence
  Description of Artificial Sequence: Synthetic oligonucleotide
  Antisense Strand to SEQ ID NO: 385385
auuuccaagcaggauuaag

SEQ ID NO: 385387 - RNA, 19 nt, Artificial Sequence
  Description of Artificial Sequence: Synthetic oligonucleotide
  Sense Strand Starting at position 847 of SEQ ID NO: 316730
uuaauccugcuuggaaauc

SEQ ID NO: 385388 - RNA, 19 nt, Artificial Sequence
  Description of Artificial Sequence: Synthetic oligonucleotide
  Antisense Strand to SEQ ID NO: 385387
gauuuccaagcaggauuaa

SEQ ID NO: 385389 - RNA, 19 nt, Artificial Sequence
  Description of Artificial Sequence: Synthetic oligonucleotide
  Sense Strand Starting at position 847 of SEQ ID NO: 316850
ugcuaagucugggccaaga

SEQ ID NO: 385390 - RNA, 19 nt, Artificial Sequence
  Description of Artificial Sequence: Synthetic oligonucleotide
  Antisense Strand to SEQ ID NO: 385389
ucuuggcccagacuuagca

SEQ ID NO: 385391 - RNA, 19 nt, Artificial Sequence
  Description of Artificial Sequence: Synthetic oligonucleotide
  Sense Strand Starting at position 847 of SEQ ID NO: 316926
gugugcugagcuuggaaca

SEQ ID NO: 385392 - RNA, 19 nt, Artificial Sequence
  Description of Artificial Sequence: Synthetic oligonucleotide
  Antisense Strand to SEQ ID NO: 385391
uguuccaagcucagcacac

SEQ ID NO: 385393 - RNA, 19 nt, Artificial Sequence
  Description of Artificial Sequence: Synthetic oligonucleotide
  Sense Strand Starting at position 847 of SEQ ID NO: 317129
ggcauaaggucuuuguuuc

SEQ ID NO: 385394 - RNA, 19 nt, Artificial Sequence
  Description of Artificial Sequence: Synthetic oligonucleotide
  Antisense Strand to SEQ ID NO: 385393
gaaacaaagaccuuaugcc

SEQ ID NO: 385395 - RNA, 19 nt, Artificial Sequence
  Description of Artificial Sequence: Synthetic oligonucleotide
  Sense Strand Starting at position 847 of SEQ ID NO: 317204
ccauuugaguucugccaca

SEQ ID NO: 385396 - RNA, 19 nt, Artificial Sequence
  Description of Artificial Sequence: Synthetic oligonucleotide
  Antisense Strand to SEQ ID NO: 385395
uguggcagaacucaaaugg

SEQ ID NO: 385397 - RNA, 19 nt, Artificial Sequence
  Description of Artificial Sequence: Synthetic oligonucleotide
  Sense Strand Starting at position 847 of SEQ ID NO: 317260
gacugugcucuccgagcau

SEQ ID NO: 385398 - RNA, 19 nt, Artificial Sequence
  Description of Artificial Sequence: Synthetic oligonucleotide
  Antisense Strand to SEQ ID NO: 385397
augcucggagagcacaguc

SEQ ID NO: 385399 - RNA, 19 nt, Artificial Sequence
  Description of Artificial Sequence: Synthetic oligonucleotide
  Sense Strand Starting at position 847 of SEQ ID NO: 317523
guuagcugagcagaugaau

SEQ ID NO: 385400 - RNA, 19 nt, Artificial Sequence
  Description of Artificial Sequence: Synthetic oligonucleotide
  Antisense Strand to SEQ ID NO: 385399
auucaucugcucagcuaac

SEQ ID NO: 385401 - RNA, 19 nt, Artificial Sequence
  Description of Artificial Sequence: Synthetic oligonucleotide
  Sense Strand Starting at position 847 of SEQ ID NO: 317678
ccugucuggaucuguuagu

SEQ ID NO: 385402 - RNA, 19 nt, Artificial Sequence
  Description of Artificial Sequence: Synthetic oligonucleotide
  Antisense Strand to SEQ ID NO: 385401
acuaacagauccagacagg

SEQ ID NO: 385403 - RNA, 19 nt, Artificial Sequence
  Description of Artificial Sequence: Synthetic oligonucleotide
  Sense Strand Starting at position 847 of SEQ ID NO: 317736
gggcuucagucgucucuga

SEQ ID NO: 385404 - RNA, 19 nt, Artificial Sequence
  Description of Artificial Sequence: Synthetic oligonucleotide
  Antisense Strand to SEQ ID NO: 385403
ucagagacgacugaagccc

SEQ ID NO: 385405 - RNA, 19 nt, Artificial Sequence
  Description of Artificial Sequence: Synthetic oligonucleotide
  Sense Strand Starting at position 847 of SEQ ID NO: 317779
ggauccuauuuggaaagga

SEQ ID NO: 385406 - RNA, 19 nt, Artificial Sequence
  Description of Artificial Sequence: Synthetic oligonucleotide
  Antisense Strand to SEQ ID NO: 385405
uccuuuccaaauaggaucc

SEQ ID NO: 385407 - RNA, 19 nt, Artificial Sequence
  Description of Artificial Sequence: Synthetic oligonucleotide
  Sense Strand Starting at position 847 of SEQ ID NO: 317809
uccagagccucggucuuaa

SEQ ID NO: 385408 - RNA, 19 nt, Artificial Sequence
  Description of Artificial Sequence: Synthetic oligonucleotide
  Antisense Strand to SEQ ID NO: 385407
uuaagaccgaggcucugga

SEQ ID NO: 385409 - RNA, 19 nt, Artificial Sequence
  Description of Artificial Sequence: Synthetic oligonucleotide
  Sense Strand Starting at position 847 of SEQ ID NO: 317864
gaugguaaccagugggaga

SEQ ID NO: 385410 - RNA, 19 nt, Artificial Sequence
  Description of Artificial Sequence: Synthetic oligonucleotide
  Antisense Strand to SEQ ID NO: 385409
ucucccacugguuaccauc

SEQ ID NO: 385411 - RNA, 19 nt, Artificial Sequence
  Description of Artificial Sequence: Synthetic oligonucleotide
  Sense Strand Starting at position 847 of SEQ ID NO: 317966
acuagagcuucugccauga

SEQ ID NO: 385412 - RNA, 19 nt, Artificial Sequence
  Description of Artificial Sequence: Synthetic oligonucleotide
  Antisense Strand to SEQ ID NO: 385411
ucauggcagaagcucuagu

SEQ ID NO: 385413 - RNA, 19 nt, Artificial Sequence
  Description of Artificial Sequence: Synthetic oligonucleotide
  Sense Strand Starting at position 847 of SEQ ID NO: 318099
gagagaguugcuggucuau

SEQ ID NO: 385414 - RNA, 19 nt, Artificial Sequence
  Description of Artificial Sequence: Synthetic oligonucleotide
  Antisense Strand to SEQ ID NO: 385413
auagaccagcaacucucuc

SEQ ID NO: 385415 - RNA, 19 nt, Artificial Sequence
  Description of Artificial Sequence: Synthetic oligonucleotide
  Sense Strand Starting at position 847 of SEQ ID NO: 318101
gagaguugcuggucuaucu

SEQ ID NO: 385416 - RNA, 19 nt, Artificial Sequence
  Description of Artificial Sequence: Synthetic oligonucleotide
  Antisense Strand to SEQ ID NO: 385415
agauagaccagcaacucuc

SEQ ID NO: 385417 - RNA, 19 nt, Artificial Sequence
  Description of Artificial Sequence: Synthetic oligonucleotide
  Sense Strand Starting at position 847 of SEQ ID NO: 318123
cccuuccuggucugagaga

SEQ ID NO: 385418 - RNA, 19 nt, Artificial Sequence
  Description of Artificial Sequence: Synthetic oligonucleotide
  Antisense Strand to SEQ ID NO: 385417
ucucucagaccaggaaggg

SEQ ID NO: 385419 - RNA, 19 nt, Artificial Sequence
  Description of Artificial Sequence: Synthetic oligonucleotide
  Sense Strand Starting at position 847 of SEQ ID NO: 318155
ucccaucuuuaggcaagaa

SEQ ID NO: 385420 - RNA, 19 nt, Artificial Sequence
  Description of Artificial Sequence: Synthetic oligonucleotide
  Antisense Strand to SEQ ID NO: 385419
uucuugccuaaagauggga

SEQ ID NO: 385421 - RNA, 19 nt, Artificial Sequence
  Description of Artificial Sequence: Synthetic oligonucleotide
  Sense Strand Starting at position 847 of SEQ ID NO: 318688
gccuuuguucuggagcaag

SEQ ID NO: 385422 - RNA, 19 nt, Artificial Sequence
  Description of Artificial Sequence: Synthetic oligonucleotide
  Antisense Strand to SEQ ID NO: 385421
cuugcuccagaacaaaggc

SEQ ID NO: 385423 - RNA, 19 nt, Artificial Sequence
  Description of Artificial Sequence: Synthetic oligonucleotide
  Sense Strand Starting at position 847 of SEQ ID NO: 318782
ccgcucugcuggccagaau

SEQ ID NO: 385424 - RNA, 19 nt, Artificial Sequence
  Description of Artificial Sequence: Synthetic oligonucleotide
  Antisense Strand to SEQ ID NO: 385423
auucuggccagcagagcgg

SEQ ID NO: 385425 - RNA, 19 nt, Artificial Sequence
  Description of Artificial Sequence: Synthetic oligonucleotide
  Sense Strand Starting at position 848 of SEQ ID NO: 315318
acuaauuccucuucuggga

SEQ ID NO: 385426 - RNA, 19 nt, Artificial Sequence
  Description of Artificial Sequence: Synthetic oligonucleotide
  Antisense Strand to SEQ ID NO: 385425
ucccagaagaggaauuagu

SEQ ID NO: 385427 - RNA, 19 nt, Artificial Sequence
  Description of Artificial Sequence: Synthetic oligonucleotide
  Sense Strand Starting at position 848 of SEQ ID NO: 315720
cuaaguuaacuuuggcaaa

SEQ ID NO: 385428 - RNA, 19 nt, Artificial Sequence
  Description of Artificial Sequence: Synthetic oligonucleotide
  Antisense Strand to SEQ ID NO: 385427
uuugccaaaguuaacuuag

SEQ ID NO: 385429 - RNA, 19 nt, Artificial Sequence
  Description of Artificial Sequence: Synthetic oligonucleotide
  Sense Strand Starting at position 848 of SEQ ID NO: 315799
ggcgauguuccagggaaga

SEQ ID NO: 385430 - RNA, 19 nt, Artificial Sequence
  Description of Artificial Sequence: Synthetic oligonucleotide
  Antisense Strand to SEQ ID NO: 385429
ucuucccuggaacaucgcc

SEQ ID NO: 385431 - RNA, 19 nt, Artificial Sequence
  Description of Artificial Sequence: Synthetic oligonucleotide
  Sense Strand Starting at position 848 of SEQ ID NO: 315864
ggccuuuccagaggaugau

SEQ ID NO: 385432 - RNA, 19 nt, Artificial Sequence
  Description of Artificial Sequence: Synthetic oligonucleotide
  Antisense Strand to SEQ ID NO: 385431
aucauccucuggaaaggcc

SEQ ID NO: 385433 - RNA, 19 nt, Artificial Sequence
  Description of Artificial Sequence: Synthetic oligonucleotide
  Sense Strand Starting at position 848 of SEQ ID NO: 315898
gcccuaacagaguagguua

SEQ ID NO: 385434 - RNA, 19 nt, Artificial Sequence
  Description of Artificial Sequence: Synthetic oligonucleotide
  Antisense Strand to SEQ ID NO: 385433
uaaccuacucuguuagggc

SEQ ID NO: 385435 - RNA, 19 nt, Artificial Sequence
  Description of Artificial Sequence: Synthetic oligonucleotide
  Sense Strand Starting at position 848 of SEQ ID NO: 316009
uuuggacccuugucaaaug

SEQ ID NO: 385436 - RNA, 19 nt, Artificial Sequence
  Description of Artificial Sequence: Synthetic oligonucleotide
  Antisense Strand to SEQ ID NO: 385435
cauuugacaaggguccaaa

SEQ ID NO: 385437 - RNA, 19 nt, Artificial Sequence
  Description of Artificial Sequence: Synthetic oligonucleotide
  Sense Strand Starting at position 848 of SEQ ID NO: 316027
gcgaauuuaugacaucuga

SEQ ID NO: 385438 - RNA, 19 nt, Artificial Sequence
  Description of Artificial Sequence: Synthetic oligonucleotide
  Antisense Strand to SEQ ID NO: 385437
ucagaugucauaaauucgc

SEQ ID NO: 385439 - RNA, 19 nt, Artificial Sequence
  Description of Artificial Sequence: Synthetic oligonucleotide
  Sense Strand Starting at position 848 of SEQ ID NO: 316128
ugaguugugccugaauacu

SEQ ID NO: 385440 - RNA, 19 nt, Artificial Sequence
  Description of Artificial Sequence: Synthetic oligonucleotide
  Antisense Strand to SEQ ID NO: 385439
aguauucaggcacaacuca

SEQ ID NO: 385441 - RNA, 19 nt, Artificial Sequence
  Description of Artificial Sequence: Synthetic oligonucleotide
  Sense Strand Starting at position 848 of SEQ ID NO: 316239
gggcaagccugguuucaag

SEQ ID NO: 385442 - RNA, 19 nt, Artificial Sequence
  Description of Artificial Sequence: Synthetic oligonucleotide
  Antisense Strand to SEQ ID NO: 385441
cuugaaaccaggcuugccc

SEQ ID NO: 385443 - RNA, 19 nt, Artificial Sequence
  Description of Artificial Sequence: Synthetic oligonucleotide
  Sense Strand Starting at position 848 of SEQ ID NO: 316489
gcagaaguuccacaaguuc

SEQ ID NO: 385444 - RNA, 19 nt, Artificial Sequence
  Description of Artificial Sequence: Synthetic oligonucleotide
  Antisense Strand to SEQ ID NO: 385443
gaacuuguggaacuucugc

SEQ ID NO: 385445 - RNA, 19 nt, Artificial Sequence
  Description of Artificial Sequence: Synthetic oligonucleotide
  Sense Strand Starting at position 848 of SEQ ID NO: 316612
cgagaauaagcacaugguu

SEQ ID NO: 385446 - RNA, 19 nt, Artificial Sequence
  Description of Artificial Sequence: Synthetic oligonucleotide
  Antisense Strand to SEQ ID NO: 385445
aaccaugugcuuauucucg

SEQ ID NO: 385447 - RNA, 19 nt, Artificial Sequence
  Description of Artificial Sequence: Synthetic oligonucleotide
  Sense Strand Starting at position 848 of SEQ ID NO: 316654
cuaucuauggucuaacgau

SEQ ID NO: 385448 - RNA, 19 nt, Artificial Sequence
  Description of Artificial Sequence: Synthetic oligonucleotide
  Antisense Strand to SEQ ID NO: 385447
aucguuagaccauagauag

SEQ ID NO: 385449 - RNA, 19 nt, Artificial Sequence
  Description of Artificial Sequence: Synthetic oligonucleotide
  Sense Strand Starting at position 848 of SEQ ID NO: 316660
auggucuaacgauacacuu

SEQ ID NO: 385450 - RNA, 19 nt, Artificial Sequence
  Description of Artificial Sequence: Synthetic oligonucleotide
  Antisense Strand to SEQ ID NO: 385449
aaguguaucguuagaccau

SEQ ID NO: 385451 - RNA, 19 nt, Artificial Sequence
  Description of Artificial Sequence: Synthetic oligonucleotide
  Sense Strand Starting at position 848 of SEQ ID NO: 316768
gccagauccgucuaaaucc

SEQ ID NO: 385452 - RNA, 19 nt, Artificial Sequence
  Description of Artificial Sequence: Synthetic oligonucleotide
  Antisense Strand to SEQ ID NO: 385451
ggauuuagacggaucuggc

SEQ ID NO: 385453 - RNA, 19 nt, Artificial Sequence
  Description of Artificial Sequence: Synthetic oligonucleotide
  Sense Strand Starting at position 848 of SEQ ID NO: 316846
cgagaaacgcuacagguuu

SEQ ID NO: 385454 - RNA, 19 nt, Artificial Sequence
  Description of Artificial Sequence: Synthetic oligonucleotide
  Antisense Strand to SEQ ID NO: 385453
aaaccuguagcguuucucg

SEQ ID NO: 385455 - RNA, 19 nt, Artificial Sequence
  Description of Artificial Sequence: Synthetic oligonucleotide
  Sense Strand Starting at position 848 of SEQ ID NO: 317312
gggaguaaggcgugagagu

SEQ ID NO: 385456 - RNA, 19 nt, Artificial Sequence
  Description of Artificial Sequence: Synthetic oligonucleotide
  Antisense Strand to SEQ ID NO: 385455
acucucacgccuuacuccc

SEQ ID NO: 385457 - RNA, 19 nt, Artificial Sequence
  Description of Artificial Sequence: Synthetic oligonucleotide
  Sense Strand Starting at position 848 of SEQ ID NO: 317313
ggaguaaggcgugagaguu

SEQ ID NO: 385458 - RNA, 19 nt, Artificial Sequence
  Description of Artificial Sequence: Synthetic oligonucleotide
  Antisense Strand to SEQ ID NO: 385457
aacucucacgccuuacucc

SEQ ID NO: 385459 - RNA, 19 nt, Artificial Sequence
  Description of Artificial Sequence: Synthetic oligonucleotide
  Sense Strand Starting at position 848 of SEQ ID NO: 317314
gaguaaggcgugagaguuc

SEQ ID NO: 385460 - RNA, 19 nt, Artificial Sequence
  Description of Artificial Sequence: Synthetic oligonucleotide
  Antisense Strand to SEQ ID NO: 385459
gaacucucacgccuuacuc

SEQ ID NO: 385461 - RNA, 19 nt, Artificial Sequence
  Description of Artificial Sequence: Synthetic oligonucleotide
  Sense Strand Starting at position 848 of SEQ ID NO: 317402
gggacauaguccuugcucu

SEQ ID NO: 385462 - RNA, 19 nt, Artificial Sequence
  Description of Artificial Sequence: Synthetic oligonucleotide
  Antisense Strand to SEQ ID NO: 385461
agagcaaggacuauguccc

SEQ ID NO: 385463 - RNA, 19 nt, Artificial Sequence
  Description of Artificial Sequence: Synthetic oligonucleotide
  Sense Strand Starting at position 848 of SEQ ID NO: 317539
cuagcuuacuaucuggauu

SEQ ID NO: 385464 - RNA, 19 nt, Artificial Sequence
  Description of Artificial Sequence: Synthetic oligonucleotide
  Antisense Strand to SEQ ID NO: 385463
aauccagauaguaagcuag

SEQ ID NO: 385465 - RNA, 19 nt, Artificial Sequence
  Description of Artificial Sequence: Synthetic oligonucleotide
  Sense Strand Starting at position 848 of SEQ ID NO: 317873
gugguuggccaggauucaa

SEQ ID NO: 385466 - RNA, 19 nt, Artificial Sequence
  Description of Artificial Sequence: Synthetic oligonucleotide
  Antisense Strand to SEQ ID NO: 385465
uugaauccuggccaaccac

SEQ ID NO: 385467 - RNA, 19 nt, Artificial Sequence
  Description of Artificial Sequence: Synthetic oligonucleotide
  Sense Strand Starting at position 848 of SEQ ID NO: 317946
ucuaaucaguaguucucaa

SEQ ID NO: 385468 - RNA, 19 nt, Artificial Sequence
  Description of Artificial Sequence: Synthetic oligonucleotide
  Antisense Strand to SEQ ID NO: 385467
uugagaacuacugauuaga

SEQ ID NO: 385469 - RNA, 19 nt, Artificial Sequence
  Description of Artificial Sequence: Synthetic oligonucleotide
  Sense Strand Starting at position 848 of SEQ ID NO: 318012
cauguuuaagaaugguaag

SEQ ID NO: 385470 - RNA, 19 nt, Artificial Sequence
  Description of Artificial Sequence: Synthetic oligonucleotide
  Antisense Strand to SEQ ID NO: 385469
cuuaccauucuuaaacaug

SEQ ID NO: 385471 - RNA, 19 nt, Artificial Sequence
  Description of Artificial Sequence: Synthetic oligonucleotide
  Sense Strand Starting at position 848 of SEQ ID NO: 318089
gagcgauugggcugaauau

SEQ ID NO: 385472 - RNA, 19 nt, Artificial Sequence
  Description of Artificial Sequence: Synthetic oligonucleotide
  Antisense Strand to SEQ ID NO: 385471
auauucagcccaaucgcuc

SEQ ID NO: 385473 - RNA, 19 nt, Artificial Sequence
  Description of Artificial Sequence: Synthetic oligonucleotide
  Sense Strand Starting at position 848 of SEQ ID NO: 318090
agcgauugggcugaauaua

SEQ ID NO: 385474 - RNA, 19 nt, Artificial Sequence
  Description of Artificial Sequence: Synthetic oligonucleotide
  Antisense Strand to SEQ ID NO: 385473
uauauucagcccaaucgcu

SEQ ID NO: 385475 - RNA, 19 nt, Artificial Sequence
  Description of Artificial Sequence: Synthetic oligonucleotide
  Sense Strand Starting at position 848 of SEQ ID NO: 318106
auagcaaagugguaauuua

SEQ ID NO: 385476 - RNA, 19 nt, Artificial Sequence
  Description of Artificial Sequence: Synthetic oligonucleotide
  Antisense Strand to SEQ ID NO: 385475
uaaauuaccacuuugcuau

SEQ ID NO: 385477 - RNA, 19 nt, Artificial Sequence
  Description of Artificial Sequence: Synthetic oligonucleotide
  Sense Strand Starting at position 848 of SEQ ID NO: 318326
uaaacugacuuggcaaguu

SEQ ID NO: 385478 - RNA, 19 nt, Artificial Sequence
  Description of Artificial Sequence: Synthetic oligonucleotide
  Antisense Strand to SEQ ID NO: 385477
aacuugccaagucaguuua

SEQ ID NO: 385479 - RNA, 19 nt, Artificial Sequence
  Description of Artificial Sequence: Synthetic oligonucleotide
  Sense Strand Starting at position 848 of SEQ ID NO: 318420
gagccugaccaauguuuga

SEQ ID NO: 385480 - RNA, 19 nt, Artificial Sequence
  Description of Artificial Sequence: Synthetic oligonucleotide
  Antisense Strand to SEQ ID NO: 385479
ucaaacauuggucaggcuc

SEQ ID NO: 385481 - RNA, 19 nt, Artificial Sequence
  Description of Artificial Sequence: Synthetic oligonucleotide
  Sense Strand Starting at position 848 of SEQ ID NO: 318424
cugaccaauguuugaucaa

SEQ ID NO: 385482 - RNA, 19 nt, Artificial Sequence
  Description of Artificial Sequence: Synthetic oligonucleotide
  Antisense Strand to SEQ ID NO: 385481
uugaucaaacauuggucag

SEQ ID NO: 385483 - RNA, 19 nt, Artificial Sequence
  Description of Artificial Sequence: Synthetic oligonucleotide
  Sense Strand Starting at position 848 of SEQ ID NO: 318427
accaauguuugaucaagga

SEQ ID NO: 385484 - RNA, 19 nt, Artificial Sequence
  Description of Artificial Sequence: Synthetic oligonucleotide
  Antisense Strand to SEQ ID NO: 385483
uccuugaucaaacauuggu

SEQ ID NO: 385485 - RNA, 19 nt, Artificial Sequence
  Description of Artificial Sequence: Synthetic oligonucleotide
  Sense Strand Starting at position 848 of SEQ ID NO: 318444
gagggaaucuugucaaucc

SEQ ID NO: 385486 - RNA, 19 nt, Artificial Sequence
  Description of Artificial Sequence: Synthetic oligonucleotide
  Antisense Strand to SEQ ID NO: 385485
ggauugacaagauucccuc

SEQ ID NO: 385487 - RNA, 19 nt, Artificial Sequence
  Description of Artificial Sequence: Synthetic oligonucleotide
  Sense Strand Starting at position 848 of SEQ ID NO: 318471
caguaucaccugggaguga

SEQ ID NO: 385488 - RNA, 19 nt, Artificial Sequence
  Description of Artificial Sequence: Synthetic oligonucleotide
  Antisense Strand to SEQ ID NO: 385487
ucacucccaggugauacug

SEQ ID NO: 385489 - RNA, 19 nt, Artificial Sequence
  Description of Artificial Sequence: Synthetic oligonucleotide
  Sense Strand Starting at position 848 of SEQ ID NO: 318480
cugggagugaguuggaaau

SEQ ID NO: 385490 - RNA, 19 nt, Artificial Sequence
  Description of Artificial Sequence: Synthetic oligonucleotide
  Antisense Strand to SEQ ID NO: 385489
auuuccaacucacucccag

SEQ ID NO: 385491 - RNA, 19 nt, Artificial Sequence
  Description of Artificial Sequence: Synthetic oligonucleotide
  Sense Strand Starting at position 848 of SEQ ID NO: 318575
gcagaugaccuuuagguga

SEQ ID NO: 385492 - RNA, 19 nt, Artificial Sequence
  Description of Artificial Sequence: Synthetic oligonucleotide
  Antisense Strand to SEQ ID NO: 385491
ucaccuaaaggucaucugc

SEQ ID NO: 385493 - RNA, 19 nt, Artificial Sequence
  Description of Artificial Sequence: Synthetic oligonucleotide
  Sense Strand Starting at position 848 of SEQ ID NO: 319028
ggguccuugcuuuaaagac

SEQ ID NO: 385494 - RNA, 19 nt, Artificial Sequence
  Description of Artificial Sequence: Synthetic oligonucleotide
  Antisense Strand to SEQ ID NO: 385493
gucuuuaaagcaaggaccc

SEQ ID NO: 385495 - RNA, 19 nt, Artificial Sequence
  Description of Artificial Sequence: Synthetic oligonucleotide
  Sense Strand Starting at position 848 of SEQ ID NO: 319116
ugaguaaggcugagugugu

SEQ ID NO: 385496 - RNA, 19 nt, Artificial Sequence
  Description of Artificial Sequence: Synthetic oligonucleotide
  Antisense Strand to SEQ ID NO: 385495
acacacucagccuuacuca

SEQ ID NO: 385497 - RNA, 19 nt, Artificial Sequence
  Description of Artificial Sequence: Synthetic oligonucleotide
  Sense Strand Starting at position 848 of SEQ ID NO: 319124
gcugaguguguugaggaga

SEQ ID NO: 385498 - RNA, 19 nt, Artificial Sequence
  Description of Artificial Sequence: Synthetic oligonucleotide
  Antisense Strand to SEQ ID NO: 385497
ucuccucaacacacucagc

SEQ ID NO: 385499 - RNA, 19 nt, Artificial Sequence
  Description of Artificial Sequence: Synthetic oligonucleotide
  Sense Strand Starting at position 848 of SEQ ID NO: 319127
gaguguguugaggagaguu

SEQ ID NO: 385500 - RNA, 19 nt, Artificial Sequence
  Description of Artificial Sequence: Synthetic oligonucleotide
  Antisense Strand to SEQ ID NO: 385499
aacucuccucaacacacuc

SEQ ID NO: 385501 - RNA, 19 nt, Artificial Sequence
  Description of Artificial Sequence: Synthetic oligonucleotide
  Sense Strand Starting at position 848 of SEQ ID NO: 319141
gaguuucuccaagaaagca

SEQ ID NO: 385502 - RNA, 19 nt, Artificial Sequence
  Description of Artificial Sequence: Synthetic oligonucleotide
  Antisense Strand to SEQ ID NO: 385501
ugcuuucuuggagaaacuc

SEQ ID NO: 385503 - RNA, 19 nt, Artificial Sequence
  Description of Artificial Sequence: Synthetic oligonucleotide
  Sense Strand Starting at position 848 of SEQ ID NO: 319159
auccauaugccagggaaca

SEQ ID NO: 385504 - RNA, 19 nt, Artificial Sequence
  Description of Artificial Sequence: Synthetic oligonucleotide
  Antisense Strand to SEQ ID NO: 385503
uguucccuggcauauggau

SEQ ID NO: 385505 - RNA, 19 nt, Artificial Sequence
  Description of Artificial Sequence: Synthetic oligonucleotide
  Sense Strand Starting at position 849 of SEQ ID NO: 315236
acugcucgacaggaauuaa

SEQ ID NO: 385506 - RNA, 19 nt, Artificial Sequence
  Description of Artificial Sequence: Synthetic oligonucleotide
  Antisense Strand to SEQ ID NO: 385505
uuaauuccugucgagcagu

SEQ ID NO: 385507 - RNA, 19 nt, Artificial Sequence
  Description of Artificial Sequence: Synthetic oligonucleotide
  Sense Strand Starting at position 849 of SEQ ID NO: 315346
auauccaugguaugacaua

SEQ ID NO: 385508 - RNA, 19 nt, Artificial Sequence
  Description of Artificial Sequence: Synthetic oligonucleotide
  Antisense Strand to SEQ ID NO: 385507
uaugucauaccauggauau

SEQ ID NO: 385509 - RNA, 19 nt, Artificial Sequence
  Description of Artificial Sequence: Synthetic oligonucleotide
  Sense Strand Starting at position 849 of SEQ ID NO: 315471
guagaaguuaagggauauu

SEQ ID NO: 385510 - RNA, 19 nt, Artificial Sequence
  Description of Artificial Sequence: Synthetic oligonucleotide
  Antisense Strand to SEQ ID NO: 385509
aauaucccuuaacuucuac

SEQ ID NO: 385511 - RNA, 19 nt, Artificial Sequence
  Description of Artificial Sequence: Synthetic oligonucleotide
  Sense Strand Starting at position 849 of SEQ ID NO: 315885
gaaaguaguagaugguuua

SEQ ID NO: 385512 - RNA, 19 nt, Artificial Sequence
  Description of Artificial Sequence: Synthetic oligonucleotide
  Antisense Strand to SEQ ID NO: 385511
uaaaccaucuacuacuuuc

SEQ ID NO: 385513 - RNA, 19 nt, Artificial Sequence
  Description of Artificial Sequence: Synthetic oligonucleotide
  Sense Strand Starting at position 849 of SEQ ID NO: 315886
aaaguaguagaugguuuaa

SEQ ID NO: 385514 - RNA, 19 nt, Artificial Sequence
  Description of Artificial Sequence: Synthetic oligonucleotide
  Antisense Strand to SEQ ID NO: 385513
uuaaaccaucuacuacuuu

SEQ ID NO: 385515 - RNA, 19 nt, Artificial Sequence
  Description of Artificial Sequence: Synthetic oligonucleotide
  Sense Strand Starting at position 849 of SEQ ID NO: 315888
aguaguagaugguuuaaau

SEQ ID NO: 385516 - RNA, 19 nt, Artificial Sequence
  Description of Artificial Sequence: Synthetic oligonucleotide
  Antisense Strand to SEQ ID NO: 385515
auuuaaaccaucuacuacu

SEQ ID NO: 385517 - RNA, 19 nt, Artificial Sequence
  Description of Artificial Sequence: Synthetic oligonucleotide
  Sense Strand Starting at position 849 of SEQ ID NO: 315985
ggaguuccagcuuaacuaa

SEQ ID NO: 385518 - RNA, 19 nt, Artificial Sequence
  Description of Artificial Sequence: Synthetic oligonucleotide
  Antisense Strand to SEQ ID NO: 385517
uuaguuaagcuggaacucc

SEQ ID NO: 385519 - RNA, 19 nt, Artificial Sequence
  Description of Artificial Sequence: Synthetic oligonucleotide
  Sense Strand Starting at position 849 of SEQ ID NO: 316039
gguccaaaguaauuaacau

SEQ ID NO: 385520 - RNA, 19 nt, Artificial Sequence
  Description of Artificial Sequence: Synthetic oligonucleotide
  Antisense Strand to SEQ ID NO: 385519
auguuaauuacuuuggacc

SEQ ID NO: 385521 - RNA, 19 nt, Artificial Sequence
  Description of Artificial Sequence: Synthetic oligonucleotide
  Sense Strand Starting at position 849 of SEQ ID NO: 316181
cgggaaugauaacuaaggu

SEQ ID NO: 385522 - RNA, 19 nt, Artificial Sequence
  Description of Artificial Sequence: Synthetic oligonucleotide
  Antisense Strand to SEQ ID NO: 385521
accuuaguuaucauucccg

SEQ ID NO: 385523 - RNA, 19 nt, Artificial Sequence
  Description of Artificial Sequence: Synthetic oligonucleotide
  Sense Strand Starting at position 849 of SEQ ID NO: 316188
gauaacuaagguggucaga

SEQ ID NO: 385524 - RNA, 19 nt, Artificial Sequence
  Description of Artificial Sequence: Synthetic oligonucleotide
  Antisense Strand to SEQ ID NO: 385523
ucugaccaccuuaguuauc

SEQ ID NO: 385525 - RNA, 19 nt, Artificial Sequence
  Description of Artificial Sequence: Synthetic oligonucleotide
  Sense Strand Starting at position 849 of SEQ ID NO: 316190
uaacuaagguggucagaau

SEQ ID NO: 385526 - RNA, 19 nt, Artificial Sequence
  Description of Artificial Sequence: Synthetic oligonucleotide
  Antisense Strand to SEQ ID NO: 385525
auucugaccaccuuaguua

SEQ ID NO: 385527 - RNA, 19 nt, Artificial Sequence
  Description of Artificial Sequence: Synthetic oligonucleotide
  Sense Strand Starting at position 849 of SEQ ID NO: 316407
agagucacgcuagacuauu

SEQ ID NO: 385528 - RNA, 19 nt, Artificial Sequence
  Description of Artificial Sequence: Synthetic oligonucleotide
  Antisense Strand to SEQ ID NO: 385527
aauagucuagcgugacucu

SEQ ID NO: 385529 - RNA, 19 nt, Artificial Sequence
  Description of Artificial Sequence: Synthetic oligonucleotide
  Sense Strand Starting at position 849 of SEQ ID NO: 316417
uagacuauuuagucgccua

SEQ ID NO: 385530 - RNA, 19 nt, Artificial Sequence
  Description of Artificial Sequence: Synthetic oligonucleotide
  Antisense Strand to SEQ ID NO: 385529
uaggcgacuaaauagucua

SEQ ID NO: 385531 - RNA, 19 nt, Artificial Sequence
  Description of Artificial Sequence: Synthetic oligonucleotide
  Sense Strand Starting at position 849 of SEQ ID NO: 316420
acuauuuagucgccuaagu

SEQ ID NO: 385532 - RNA, 19 nt, Artificial Sequence
  Description of Artificial Sequence: Synthetic oligonucleotide
  Antisense Strand to SEQ ID NO: 385531
acuuaggcgacuaaauagu

SEQ ID NO: 385533 - RNA, 19 nt, Artificial Sequence
  Description of Artificial Sequence: Synthetic oligonucleotide
  Sense Strand Starting at position 849 of SEQ ID NO: 316422
uauuuagucgccuaaguau

SEQ ID NO: 385534 - RNA, 19 nt, Artificial Sequence
  Description of Artificial Sequence: Synthetic oligonucleotide
  Antisense Strand to SEQ ID NO: 385533
auacuuaggcgacuaaaua

SEQ ID NO: 385535 - RNA, 19 nt, Artificial Sequence
  Description of Artificial Sequence: Synthetic oligonucleotide
  Sense Strand Starting at position 849 of SEQ ID NO: 316578
cugucacagggucaauauu

SEQ ID NO: 385536 - RNA, 19 nt, Artificial Sequence
  Description of Artificial Sequence: Synthetic oligonucleotide
  Antisense Strand to SEQ ID NO: 385535
aauauugacccugugacag

SEQ ID NO: 385537 - RNA, 19 nt, Artificial Sequence
  Description of Artificial Sequence: Synthetic oligonucleotide
  Sense Strand Starting at position 849 of SEQ ID NO: 316665
gcguaauuaacuccugcgu

SEQ ID NO: 385538 - RNA, 19 nt, Artificial Sequence
  Description of Artificial Sequence: Synthetic oligonucleotide
  Antisense Strand to SEQ ID NO: 385537
acgcaggaguuaauuacgc

SEQ ID NO: 385539 - RNA, 19 nt, Artificial Sequence
  Description of Artificial Sequence: Synthetic oligonucleotide
  Sense Strand Starting at position 849 of SEQ ID NO: 317319
agcggucccgaggaaugaa

SEQ ID NO: 385540 - RNA, 19 nt, Artificial Sequence
  Description of Artificial Sequence: Synthetic oligonucleotide
  Antisense Strand to SEQ ID NO: 385539
uucauuccucgggaccgcu

SEQ ID NO: 385541 - RNA, 19 nt, Artificial Sequence
  Description of Artificial Sequence: Synthetic oligonucleotide
  Sense Strand Starting at position 849 of SEQ ID NO: 317503
uggagcaucucccuggaaa

SEQ ID NO: 385542 - RNA, 19 nt, Artificial Sequence
  Description of Artificial Sequence: Synthetic oligonucleotide
  Antisense Strand to SEQ ID NO: 385541
uuuccagggagaugcucca

SEQ ID NO: 385543 - RNA, 19 nt, Artificial Sequence
  Description of Artificial Sequence: Synthetic oligonucleotide
  Sense Strand Starting at position 849 of SEQ ID NO: 317504
ggagcaucucccuggaaac

SEQ ID NO: 385544 - RNA, 19 nt, Artificial Sequence
  Description of Artificial Sequence: Synthetic oligonucleotide
  Antisense Strand to SEQ ID NO: 385543
guuuccagggagaugcucc

SEQ ID NO: 385545 - RNA, 19 nt, Artificial Sequence
  Description of Artificial Sequence: Synthetic oligonucleotide
  Sense Strand Starting at position 849 of SEQ ID NO: 317663
ggaaaucaguguuuaucua

SEQ ID NO: 385546 - RNA, 19 nt, Artificial Sequence
  Description of Artificial Sequence: Synthetic oligonucleotide
  Antisense Strand to SEQ ID NO: 385545
uagauaaacacugauuucc

SEQ ID NO: 385547 - RNA, 19 nt, Artificial Sequence
  Description of Artificial Sequence: Synthetic oligonucleotide
  Sense Strand Starting at position 849 of SEQ ID NO: 317664
gaaaucaguguuuaucuag

SEQ ID NO: 385548 - RNA, 19 nt, Artificial Sequence
  Description of Artificial Sequence: Synthetic oligonucleotide
  Antisense Strand to SEQ ID NO: 385547
cuagauaaacacugauuuc

SEQ ID NO: 385549 - RNA, 19 nt, Artificial Sequence
  Description of Artificial Sequence: Synthetic oligonucleotide
  Sense Strand Starting at position 849 of SEQ ID NO: 317754
cucaauuaccuguaagagu

SEQ ID NO: 385550 - RNA, 19 nt, Artificial Sequence
  Description of Artificial Sequence: Synthetic oligonucleotide
  Antisense Strand to SEQ ID NO: 385549
acucuuacagguaauugag

SEQ ID NO: 385551 - RNA, 19 nt, Artificial Sequence
  Description of Artificial Sequence: Synthetic oligonucleotide
  Sense Strand Starting at position 849 of SEQ ID NO: 317854
agaaacuacuaugucaagu

SEQ ID NO: 385552 - RNA, 19 nt, Artificial Sequence
  Description of Artificial Sequence: Synthetic oligonucleotide
  Antisense Strand to SEQ ID NO: 385551
acuugacauaguaguuucu

SEQ ID NO: 385553 - RNA, 19 nt, Artificial Sequence
  Description of Artificial Sequence: Synthetic oligonucleotide
  Sense Strand Starting at position 849 of SEQ ID NO: 317869
aaguuaagacugcaguaau

SEQ ID NO: 385554 - RNA, 19 nt, Artificial Sequence
  Description of Artificial Sequence: Synthetic oligonucleotide
  Antisense Strand to SEQ ID NO: 385553
auuacugcagucuuaacuu

SEQ ID NO: 385555 - RNA, 19 nt, Artificial Sequence
  Description of Artificial Sequence: Synthetic oligonucleotide
  Sense Strand Starting at position 849 of SEQ ID NO: 317880
gcaguaauuucugccuuaa

SEQ ID NO: 385556 - RNA, 19 nt, Artificial Sequence
  Description of Artificial Sequence: Synthetic oligonucleotide
  Antisense Strand to SEQ ID NO: 385555
uuaaggcagaaauuacugc

SEQ ID NO: 385557 - RNA, 19 nt, Artificial Sequence
  Description of Artificial Sequence: Synthetic oligonucleotide
  Sense Strand Starting at position 849 of SEQ ID NO: 317900
aagaaaccuuuaguggauu

SEQ ID NO: 385558 - RNA, 19 nt, Artificial Sequence
  Description of Artificial Sequence: Synthetic oligonucleotide
  Antisense Strand to SEQ ID NO: 385557
aauccacuaaagguuucuu

SEQ ID NO: 385559 - RNA, 19 nt, Artificial Sequence
  Description of Artificial Sequence: Synthetic oligonucleotide
  Sense Strand Starting at position 849 of SEQ ID NO: 318063
uuugucuuaccauauauag

SEQ ID NO: 385560 - RNA, 19 nt, Artificial Sequence
  Description of Artificial Sequence: Synthetic oligonucleotide
  Antisense Strand to SEQ ID NO: 385559
cuauauaugguaagacaaa

SEQ ID NO: 385561 - RNA, 19 nt, Artificial Sequence
  Description of Artificial Sequence: Synthetic oligonucleotide
  Sense Strand Starting at position 849 of SEQ ID NO: 318126
ugcccuuuccugcuugagu

SEQ ID NO: 385562 - RNA, 19 nt, Artificial Sequence
  Description of Artificial Sequence: Synthetic oligonucleotide
  Antisense Strand to SEQ ID NO: 385561
acucaagcaggaaagggca

SEQ ID NO: 385563 - RNA, 19 nt, Artificial Sequence
  Description of Artificial Sequence: Synthetic oligonucleotide
  Sense Strand Starting at position 849 of SEQ ID NO: 318215
cuccucaaagagugguaau

SEQ ID NO: 385564 - RNA, 19 nt, Artificial Sequence
  Description of Artificial Sequence: Synthetic oligonucleotide
  Antisense Strand to SEQ ID NO: 385563
auuaccacucuuugaggag

SEQ ID NO: 385565 - RNA, 19 nt, Artificial Sequence
  Description of Artificial Sequence: Synthetic oligonucleotide
  Sense Strand Starting at position 849 of SEQ ID NO: 318243
augagaucaucuuuguaua

SEQ ID NO: 385566 - RNA, 19 nt, Artificial Sequence
  Description of Artificial Sequence: Synthetic oligonucleotide
  Antisense Strand to SEQ ID NO: 385565
uauacaaagaugaucucau

SEQ ID NO: 385567 - RNA, 19 nt, Artificial Sequence
  Description of Artificial Sequence: Synthetic oligonucleotide
  Sense Strand Starting at position 849 of SEQ ID NO: 318244
ugagaucaucuuuguauac

SEQ ID NO: 385568 - RNA, 19 nt, Artificial Sequence
  Description of Artificial Sequence: Synthetic oligonucleotide
  Antisense Strand to SEQ ID NO: 385567
guauacaaagaugaucuca

SEQ ID NO: 385569 - RNA, 19 nt, Artificial Sequence
  Description of Artificial Sequence: Synthetic oligonucleotide
  Sense Strand Starting at position 849 of SEQ ID NO: 318387
guguacugugcguuucaua

SEQ ID NO: 385570 - RNA, 19 nt, Artificial Sequence
  Description of Artificial Sequence: Synthetic oligonucleotide
  Antisense Strand to SEQ ID NO: 385569
uaugaaacgcacaguacac

SEQ ID NO: 385571 - RNA, 19 nt, Artificial Sequence
  Description of Artificial Sequence: Synthetic oligonucleotide
  Sense Strand Starting at position 849 of SEQ ID NO: 318388
uguacugugcguuucauau

SEQ ID NO: 385572 - RNA, 19 nt, Artificial Sequence
  Description of Artificial Sequence: Synthetic oligonucleotide
  Antisense Strand to SEQ ID NO: 385571
auaugaaacgcacaguaca

SEQ ID NO: 385573 - RNA, 19 nt, Artificial Sequence
  Description of Artificial Sequence: Synthetic oligonucleotide
  Sense Strand Starting at position 849 of SEQ ID NO: 318498
uguguuucccaugacagaa

SEQ ID NO: 385574 - RNA, 19 nt, Artificial Sequence
  Description of Artificial Sequence: Synthetic oligonucleotide
  Antisense Strand to SEQ ID NO: 385573
uucugucaugggaaacaca

SEQ ID NO: 385575 - RNA, 19 nt, Artificial Sequence
  Description of Artificial Sequence: Synthetic oligonucleotide
  Sense Strand Starting at position 849 of SEQ ID NO: 318550
guugaagucccugauccau

SEQ ID NO: 385576 - RNA, 19 nt, Artificial Sequence
  Description of Artificial Sequence: Synthetic oligonucleotide
  Antisense Strand to SEQ ID NO: 385575
auggaucagggacuucaac

SEQ ID NO: 385577 - RNA, 19 nt, Artificial Sequence
  Description of Artificial Sequence: Synthetic oligonucleotide
  Sense Strand Starting at position 849 of SEQ ID NO: 318552
ugaagucccugauccauca

SEQ ID NO: 385578 - RNA, 19 nt, Artificial Sequence
  Description of Artificial Sequence: Synthetic oligonucleotide
  Antisense Strand to SEQ ID NO: 385577
ugauggaucagggacuuca

SEQ ID NO: 385579 - RNA, 19 nt, Artificial Sequence
  Description of Artificial Sequence: Synthetic oligonucleotide
  Sense Strand Starting at position 849 of SEQ ID NO: 318653
caagguaaucauugagacu

SEQ ID NO: 385580 - RNA, 19 nt, Artificial Sequence
  Description of Artificial Sequence: Synthetic oligonucleotide
  Antisense Strand to SEQ ID NO: 385579
agucucaaugauuaccuug

SEQ ID NO: 385581 - RNA, 19 nt, Artificial Sequence
  Description of Artificial Sequence: Synthetic oligonucleotide
  Sense Strand Starting at position 849 of SEQ ID NO: 319134
gcagaaguuaaggaugcau

SEQ ID NO: 385582 - RNA, 19 nt, Artificial Sequence
  Description of Artificial Sequence: Synthetic oligonucleotide
  Antisense Strand to SEQ ID NO: 385581
augcauccuuaacuucugc

SEQ ID NO: 385583 - RNA, 19 nt, Artificial Sequence
  Description of Artificial Sequence: Synthetic oligonucleotide
  Sense Strand Starting at position 849 of SEQ ID NO: 319198
ugaagauaguaauccauuc

SEQ ID NO: 385584 - RNA, 19 nt, Artificial Sequence
  Description of Artificial Sequence: Synthetic oligonucleotide
  Antisense Strand to SEQ ID NO: 385583
gaauggauuacuaucuuca

SEQ ID NO: 385585 - RNA, 19 nt, Artificial Sequence
  Description of Artificial Sequence: Synthetic oligonucleotide
  Sense Strand Starting at position 850 of SEQ ID NO: 315238
ggaacauuaagugggcuuu

SEQ ID NO: 385586 - RNA, 19 nt, Artificial Sequence
  Description of Artificial Sequence: Synthetic oligonucleotide
  Antisense Strand to SEQ ID NO: 385585
aaagcccacuuaauguucc

SEQ ID NO: 385587 - RNA, 19 nt, Artificial Sequence
  Description of Artificial Sequence: Synthetic oligonucleotide
  Sense Strand Starting at position 850 of SEQ ID NO: 315280
uccuaaugagcauagagua

SEQ ID NO: 385588 - RNA, 19 nt, Artificial Sequence
  Description of Artificial Sequence: Synthetic oligonucleotide
  Antisense Strand to SEQ ID NO: 385587
uacucuaugcucauuagga

SEQ ID NO: 385589 - RNA, 19 nt, Artificial Sequence
  Description of Artificial Sequence: Synthetic oligonucleotide
  Sense Strand Starting at position 850 of SEQ ID NO: 315332
cugggaauuuaugaaggca

SEQ ID NO: 385590 - RNA, 19 nt, Artificial Sequence
  Description of Artificial Sequence: Synthetic oligonucleotide
  Antisense Strand to SEQ ID NO: 385589
ugccuucauaaauucccag

SEQ ID NO: 385591 - RNA, 19 nt, Artificial Sequence
  Description of Artificial Sequence: Synthetic oligonucleotide
  Sense Strand Starting at position 850 of SEQ ID NO: 315366
uuaugaaggucauuacaac

SEQ ID NO: 385592 - RNA, 19 nt, Artificial Sequence
  Description of Artificial Sequence: Synthetic oligonucleotide
  Antisense Strand to SEQ ID NO: 385591
guuguaaugaccuucauaa

SEQ ID NO: 385593 - RNA, 19 nt, Artificial Sequence
  Description of Artificial Sequence: Synthetic oligonucleotide
  Sense Strand Starting at position 850 of SEQ ID NO: 315456
acacaucugcucugagaau

SEQ ID NO: 385594 - RNA, 19 nt, Artificial Sequence
  Description of Artificial Sequence: Synthetic oligonucleotide
  Antisense Strand to SEQ ID NO: 385593
auucucagagcagaugugu

SEQ ID NO: 385595 - RNA, 19 nt, Artificial Sequence
  Description of Artificial Sequence: Synthetic oligonucleotide
  Sense Strand Starting at position 850 of SEQ ID NO: 315842
uuugaaacauggucuaaca

SEQ ID NO: 385596 - RNA, 19 nt, Artificial Sequence
  Description of Artificial Sequence: Synthetic oligonucleotide
  Antisense Strand to SEQ ID NO: 385595
uguuagaccauguuucaaa

SEQ ID NO: 385597 - RNA, 19 nt, Artificial Sequence
  Description of Artificial Sequence: Synthetic oligonucleotide
  Sense Strand Starting at position 850 of SEQ ID NO: 315879
aaagguguagccuauuaau

SEQ ID NO: 385598 - RNA, 19 nt, Artificial Sequence
  Description of Artificial Sequence: Synthetic oligonucleotide
  Antisense Strand to SEQ ID NO: 385597
auuaauaggcuacaccuuu

SEQ ID NO: 385599 - RNA, 19 nt, Artificial Sequence
  Description of Artificial Sequence: Synthetic oligonucleotide
  Sense Strand Starting at position 850 of SEQ ID NO: 316007
gcgccaucugucuccauca

SEQ ID NO: 385600 - RNA, 19 nt, Artificial Sequence
  Description of Artificial Sequence: Synthetic oligonucleotide
  Antisense Strand to SEQ ID NO: 385599
ugauggagacagauggcgc

SEQ ID NO: 385601 - RNA, 19 nt, Artificial Sequence
  Description of Artificial Sequence: Synthetic oligonucleotide
  Sense Strand Starting at position 850 of SEQ ID NO: 316009
gccaucugucuccaucaua

SEQ ID NO: 385602 - RNA, 19 nt, Artificial Sequence
  Description of Artificial Sequence: Synthetic oligonucleotide
  Antisense Strand to SEQ ID NO: 385601
uaugauggagacagauggc

SEQ ID NO: 385603 - RNA, 19 nt, Artificial Sequence
  Description of Artificial Sequence: Synthetic oligonucleotide
  Sense Strand Starting at position 850 of SEQ ID NO: 316176
aggcaagcaauugguuaau

SEQ ID NO: 385604 - RNA, 19 nt, Artificial Sequence
  Description of Artificial Sequence: Synthetic oligonucleotide
  Antisense Strand to SEQ ID NO: 385603
auuaaccaauugcuugccu

SEQ ID NO: 385605 - RNA, 19 nt, Artificial Sequence
  Description of Artificial Sequence: Synthetic oligonucleotide
  Sense Strand Starting at position 850 of SEQ ID NO: 316178
gcaagcaauugguuaauau

SEQ ID NO: 385606 - RNA, 19 nt, Artificial Sequence
  Description of Artificial Sequence: Synthetic oligonucleotide
  Antisense Strand to SEQ ID NO: 385605
auauuaaccaauugcuugc

SEQ ID NO: 385607 - RNA, 19 nt, Artificial Sequence
  Description of Artificial Sequence: Synthetic oligonucleotide
  Sense Strand Starting at position 850 of SEQ ID NO: 316211
guucccauauuuggagaga

SEQ ID NO: 385608 - RNA, 19 nt, Artificial Sequence
  Description of Artificial Sequence: Synthetic oligonucleotide
  Antisense Strand to SEQ ID NO: 385607
ucucuccaaauaugggaac

SEQ ID NO: 385609 - RNA, 19 nt, Artificial Sequence
  Description of Artificial Sequence: Synthetic oligonucleotide
  Sense Strand Starting at position 850 of SEQ ID NO: 316212
uucccauauuuggagagau

SEQ ID NO: 385610 - RNA, 19 nt, Artificial Sequence
  Description of Artificial Sequence: Synthetic oligonucleotide
  Antisense Strand to SEQ ID NO: 385609
aucucuccaaauaugggaa

SEQ ID NO: 385611 - RNA, 19 nt, Artificial Sequence
  Description of Artificial Sequence: Synthetic oligonucleotide
  Sense Strand Starting at position 850 of SEQ ID NO: 316222
uggagagaugcccaguucu

SEQ ID NO: 385612 - RNA, 19 nt, Artificial Sequence
  Description of Artificial Sequence: Synthetic oligonucleotide
  Antisense Strand to SEQ ID NO: 385611
agaacugggcaucucucca

SEQ ID NO: 385613 - RNA, 19 nt, Artificial Sequence
  Description of Artificial Sequence: Synthetic oligonucleotide
  Sense Strand Starting at position 850 of SEQ ID NO: 316378
gagguuggcgaagaguuaa

SEQ ID NO: 385614 - RNA, 19 nt, Artificial Sequence
  Description of Artificial Sequence: Synthetic oligonucleotide
  Antisense Strand to SEQ ID NO: 385613
uuaacucuucgccaaccuc

SEQ ID NO: 385615 - RNA, 19 nt, Artificial Sequence
  Description of Artificial Sequence: Synthetic oligonucleotide
  Sense Strand Starting at position 850 of SEQ ID NO: 316431
aggguuguucccuaguuua

SEQ ID NO: 385616 - RNA, 19 nt, Artificial Sequence
  Description of Artificial Sequence: Synthetic oligonucleotide
  Antisense Strand to SEQ ID NO: 385615
uaaacuagggaacaacccu

SEQ ID NO: 385617 - RNA, 19 nt, Artificial Sequence
  Description of Artificial Sequence: Synthetic oligonucleotide
  Sense Strand Starting at position 850 of SEQ ID NO: 317667
gucucugugccgggauuua

SEQ ID NO: 385618 - RNA, 19 nt, Artificial Sequence
  Description of Artificial Sequence: Synthetic oligonucleotide
  Antisense Strand to SEQ ID NO: 385617
uaaaucccggcacagagac

SEQ ID NO: 385619 - RNA, 19 nt, Artificial Sequence
  Description of Artificial Sequence: Synthetic oligonucleotide
  Sense Strand Starting at position 850 of SEQ ID NO: 317703
gagcgauuucugugugaac

SEQ ID NO: 385620 - RNA, 19 nt, Artificial Sequence
  Description of Artificial Sequence: Synthetic oligonucleotide
  Antisense Strand to SEQ ID NO: 385619
guucacacagaaaucgcuc

SEQ ID NO: 385621 - RNA, 19 nt, Artificial Sequence
  Description of Artificial Sequence: Synthetic oligonucleotide
  Sense Strand Starting at position 850 of SEQ ID NO: 317704
agcgauuucugugugaacu

SEQ ID NO: 385622 - RNA, 19 nt, Artificial Sequence
  Description of Artificial Sequence: Synthetic oligonucleotide
  Antisense Strand to SEQ ID NO: 385621
aguucacacagaaaucgcu

SEQ ID NO: 385623 - RNA, 19 nt, Artificial Sequence
  Description of Artificial Sequence: Synthetic oligonucleotide
  Sense Strand Starting at position 850 of SEQ ID NO: 317705
gcgauuucugugugaacug

SEQ ID NO: 385624 - RNA, 19 nt, Artificial Sequence
  Description of Artificial Sequence: Synthetic oligonucleotide
  Antisense Strand to SEQ ID NO: 385623
caguucacacagaaaucgc

SEQ ID NO: 385625 - RNA, 19 nt, Artificial Sequence
  Description of Artificial Sequence: Synthetic oligonucleotide
  Sense Strand Starting at position 850 of SEQ ID NO: 317715
ugugaacugucauuaaaug

SEQ ID NO: 385626 - RNA, 19 nt, Artificial Sequence
  Description of Artificial Sequence: Synthetic oligonucleotide
  Antisense Strand to SEQ ID NO: 385625
cauuuaaugacaguucaca

SEQ ID NO: 385627 - RNA, 19 nt, Artificial Sequence
  Description of Artificial Sequence: Synthetic oligonucleotide
  Sense Strand Starting at position 850 of SEQ ID NO: 317716
gugaacugucauuaaaugu

SEQ ID NO: 385628 - RNA, 19 nt, Artificial Sequence
  Description of Artificial Sequence: Synthetic oligonucleotide
  Antisense Strand to SEQ ID NO: 385627
acauuuaaugacaguucac

SEQ ID NO: 385629 - RNA, 19 nt, Artificial Sequence
  Description of Artificial Sequence: Synthetic oligonucleotide
  Sense Strand Starting at position 850 of SEQ ID NO: 317796
gguguuucucugcuugcau

SEQ ID NO: 385630 - RNA, 19 nt, Artificial Sequence
  Description of Artificial Sequence: Synthetic oligonucleotide
  Antisense Strand to SEQ ID NO: 385629
augcaagcagagaaacacc

SEQ ID NO: 385631 - RNA, 19 nt, Artificial Sequence
  Description of Artificial Sequence: Synthetic oligonucleotide
  Sense Strand Starting at position 850 of SEQ ID NO: 317850
ugugguauuaacggguuaa

SEQ ID NO: 385632 - RNA, 19 nt, Artificial Sequence
  Description of Artificial Sequence: Synthetic oligonucleotide
  Antisense Strand to SEQ ID NO: 385631
uuaacccguuaauaccaca

SEQ ID NO: 385633 - RNA, 19 nt, Artificial Sequence
  Description of Artificial Sequence: Synthetic oligonucleotide
  Sense Strand Starting at position 850 of SEQ ID NO: 317851
gugguauuaacggguuaaa

SEQ ID NO: 385634 - RNA, 19 nt, Artificial Sequence
  Description of Artificial Sequence: Synthetic oligonucleotide
  Antisense Strand to SEQ ID NO: 385633
uuuaacccguuaauaccac

SEQ ID NO: 385635 - RNA, 19 nt, Artificial Sequence
  Description of Artificial Sequence: Synthetic oligonucleotide
  Sense Strand Starting at position 850 of SEQ ID NO: 317898
gaacaauucuagccuugug

SEQ ID NO: 385636 - RNA, 19 nt, Artificial Sequence
  Description of Artificial Sequence: Synthetic oligonucleotide
  Antisense Strand to SEQ ID NO: 385635
cacaaggcuagaauuguuc

SEQ ID NO: 385637 - RNA, 19 nt, Artificial Sequence
  Description of Artificial Sequence: Synthetic oligonucleotide
  Sense Strand Starting at position 850 of SEQ ID NO: 317901
caauucuagccuuguggaa

SEQ ID NO: 385638 - RNA, 19 nt, Artificial Sequence
  Description of Artificial Sequence: Synthetic oligonucleotide
  Antisense Strand to SEQ ID NO: 385637
uuccacaaggcuagaauug

SEQ ID NO: 385639 - RNA, 19 nt, Artificial Sequence
  Description of Artificial Sequence: Synthetic oligonucleotide
  Sense Strand Starting at position 850 of SEQ ID NO: 318048
ucaccagcuaugggagaua

SEQ ID NO: 385640 - RNA, 19 nt, Artificial Sequence
  Description of Artificial Sequence: Synthetic oligonucleotide
  Antisense Strand to SEQ ID NO: 385639
uaucucccauagcugguga

SEQ ID NO: 385641 - RNA, 19 nt, Artificial Sequence
  Description of Artificial Sequence: Synthetic oligonucleotide
  Sense Strand Starting at position 850 of SEQ ID NO: 318143
guaguucuuaucgagacuu

SEQ ID NO: 385642 - RNA, 19 nt, Artificial Sequence
  Description of Artificial Sequence: Synthetic oligonucleotide
  Antisense Strand to SEQ ID NO: 385641
aagucucgauaagaacuac

SEQ ID NO: 385643 - RNA, 19 nt, Artificial Sequence
  Description of Artificial Sequence: Synthetic oligonucleotide
  Sense Strand Starting at position 850 of SEQ ID NO: 318145
aguucuuaucgagacuuua

SEQ ID NO: 385644 - RNA, 19 nt, Artificial Sequence
  Description of Artificial Sequence: Synthetic oligonucleotide
  Antisense Strand to SEQ ID NO: 385643
uaaagucucgauaagaacu

SEQ ID NO: 385645 - RNA, 19 nt, Artificial Sequence
  Description of Artificial Sequence: Synthetic oligonucleotide
  Sense Strand Starting at position 850 of SEQ ID NO: 318341
ugcggugugcgucuguaau

SEQ ID NO: 385646 - RNA, 19 nt, Artificial Sequence
  Description of Artificial Sequence: Synthetic oligonucleotide
  Antisense Strand to SEQ ID NO: 385645
auuacagacgcacaccgca

SEQ ID NO: 385647 - RNA, 19 nt, Artificial Sequence
  Description of Artificial Sequence: Synthetic oligonucleotide
  Sense Strand Starting at position 850 of SEQ ID NO: 318349
gcgucuguaaucccgggua

SEQ ID NO: 385648 - RNA, 19 nt, Artificial Sequence
  Description of Artificial Sequence: Synthetic oligonucleotide
  Antisense Strand to SEQ ID NO: 385647
uacccgggauuacagacgc

SEQ ID NO: 385649 - RNA, 19 nt, Artificial Sequence
  Description of Artificial Sequence: Synthetic oligonucleotide
  Sense Strand Starting at position 850 of SEQ ID NO: 318728
gacagaauuuggcaaacug

SEQ ID NO: 385650 - RNA, 19 nt, Artificial Sequence
  Description of Artificial Sequence: Synthetic oligonucleotide
  Antisense Strand to SEQ ID NO: 385649
caguuugccaaauucuguc

SEQ ID NO: 385651 - RNA, 19 nt, Artificial Sequence
  Description of Artificial Sequence: Synthetic oligonucleotide
  Sense Strand Starting at position 850 of SEQ ID NO: 318736
uuggcaaacugcuuuauau

SEQ ID NO: 385652 - RNA, 19 nt, Artificial Sequence
  Description of Artificial Sequence: Synthetic oligonucleotide
  Antisense Strand to SEQ ID NO: 385651
auauaaagcaguuugccaa

SEQ ID NO: 385653 - RNA, 19 nt, Artificial Sequence
  Description of Artificial Sequence: Synthetic oligonucleotide
  Sense Strand Starting at position 850 of SEQ ID NO: 318801
aggagaauaaaugguuguu

SEQ ID NO: 385654 - RNA, 19 nt, Artificial Sequence
  Description of Artificial Sequence: Synthetic oligonucleotide
  Antisense Strand to SEQ ID NO: 385653
aacaaccauuuauucuccu

SEQ ID NO: 385655 - RNA, 19 nt, Artificial Sequence
  Description of Artificial Sequence: Synthetic oligonucleotide
  Sense Strand Starting at position 850 of SEQ ID NO: 318803
gagaauaaaugguuguuga

SEQ ID NO: 385656 - RNA, 19 nt, Artificial Sequence
  Description of Artificial Sequence: Synthetic oligonucleotide
  Antisense Strand to SEQ ID NO: 385655
ucaacaaccauuuauucuc

SEQ ID NO: 385657 - RNA, 19 nt, Artificial Sequence
  Description of Artificial Sequence: Synthetic oligonucleotide
  Sense Strand Starting at position 850 of SEQ ID NO: 318838
agaauaugcuaucuaauag

SEQ ID NO: 385658 - RNA, 19 nt, Artificial Sequence
  Description of Artificial Sequence: Synthetic oligonucleotide
  Antisense Strand to SEQ ID NO: 385657
cuauuagauagcauauucu

SEQ ID NO: 385659 - RNA, 19 nt, Artificial Sequence
  Description of Artificial Sequence: Synthetic oligonucleotide
  Sense Strand Starting at position 850 of SEQ ID NO: 318910
agggaaauauugcucaauu

SEQ ID NO: 385660 - RNA, 19 nt, Artificial Sequence
  Description of Artificial Sequence: Synthetic oligonucleotide
  Antisense Strand to SEQ ID NO: 385659
aauugagcaauauuucccu

SEQ ID NO: 385661 - RNA, 19 nt, Artificial Sequence
  Description of Artificial Sequence: Synthetic oligonucleotide
  Sense Strand Starting at position 850 of SEQ ID NO: 318911
gggaaauauugcucaauuc

SEQ ID NO: 385662 - RNA, 19 nt, Artificial Sequence
  Description of Artificial Sequence: Synthetic oligonucleotide
  Antisense Strand to SEQ ID NO: 385661
gaauugagcaauauuuccc

SEQ ID NO: 385663 - RNA, 19 nt, Artificial Sequence
  Description of Artificial Sequence: Synthetic oligonucleotide
  Sense Strand Starting at position 850 of SEQ ID NO: 318944
auuugcaguccucguaaac

SEQ ID NO: 385664 - RNA, 19 nt, Artificial Sequence
  Description of Artificial Sequence: Synthetic oligonucleotide
  Antisense Strand to SEQ ID NO: 385663
guuuacgaggacugcaaau

SEQ ID NO: 385665 - RNA, 19 nt, Artificial Sequence
  Description of Artificial Sequence: Synthetic oligonucleotide
  Sense Strand Starting at position 851 of SEQ ID NO: 315241
cauuauugacacugcgagu

SEQ ID NO: 385666 - RNA, 19 nt, Artificial Sequence
  Description of Artificial Sequence: Synthetic oligonucleotide
  Antisense Strand to SEQ ID NO: 385665
acucgcagugucaauaaug

SEQ ID NO: 385667 - RNA, 19 nt, Artificial Sequence
  Description of Artificial Sequence: Synthetic oligonucleotide
  Sense Strand Starting at position 851 of SEQ ID NO: 315281
cuuucucaucauggucaua

SEQ ID NO: 385668 - RNA, 19 nt, Artificial Sequence
  Description of Artificial Sequence: Synthetic oligonucleotide
  Antisense Strand to SEQ ID NO: 385667
uaugaccaugaugagaaag

SEQ ID NO: 385669 - RNA, 19 nt, Artificial Sequence
  Description of Artificial Sequence: Synthetic oligonucleotide
  Sense Strand Starting at position 851 of SEQ ID NO: 315283
uucucaucauggucauagu

SEQ ID NO: 385670 - RNA, 19 nt, Artificial Sequence
  Description of Artificial Sequence: Synthetic oligonucleotide
  Antisense Strand to SEQ ID NO: 385669
acuaugaccaugaugagaa

SEQ ID NO: 385671 - RNA, 19 nt, Artificial Sequence
  Description of Artificial Sequence: Synthetic oligonucleotide
  Sense Strand Starting at position 851 of SEQ ID NO: 315284
ucucaucauggucauaguu

SEQ ID NO: 385672 - RNA, 19 nt, Artificial Sequence
  Description of Artificial Sequence: Synthetic oligonucleotide
  Antisense Strand to SEQ ID NO: 385671
aacuaugaccaugaugaga

SEQ ID NO: 385673 - RNA, 19 nt, Artificial Sequence
  Description of Artificial Sequence: Synthetic oligonucleotide
  Sense Strand Starting at position 851 of SEQ ID NO: 315293
ggucauaguuuacugcuau

SEQ ID NO: 385674 - RNA, 19 nt, Artificial Sequence
  Description of Artificial Sequence: Synthetic oligonucleotide
  Antisense Strand to SEQ ID NO: 385673
auagcaguaaacuaugacc

SEQ ID NO: 385675 - RNA, 19 nt, Artificial Sequence
  Description of Artificial Sequence: Synthetic oligonucleotide
  Sense Strand Starting at position 851 of SEQ ID NO: 315402
ggucauaucugccuuccua

SEQ ID NO: 385676 - RNA, 19 nt, Artificial Sequence
  Description of Artificial Sequence: Synthetic oligonucleotide
  Antisense Strand to SEQ ID NO: 385675
uaggaaggcagauaugacc

SEQ ID NO: 385677 - RNA, 19 nt, Artificial Sequence
  Description of Artificial Sequence: Synthetic oligonucleotide
  Sense Strand Starting at position 851 of SEQ ID NO: 315776
gguucucccaacugagaug

SEQ ID NO: 385678 - RNA, 19 nt, Artificial Sequence
  Description of Artificial Sequence: Synthetic oligonucleotide
  Antisense Strand to SEQ ID NO: 385677
caucucaguugggagaacc

SEQ ID NO: 385679 - RNA, 19 nt, Artificial Sequence
  Description of Artificial Sequence: Synthetic oligonucleotide
  Sense Strand Starting at position 851 of SEQ ID NO: 315848
ccaguuaggccaggcuaau

SEQ ID NO: 385680 - RNA, 19 nt, Artificial Sequence
  Description of Artificial Sequence: Synthetic oligonucleotide
  Antisense Strand to SEQ ID NO: 385679
auuagccuggccuaacugg

SEQ ID NO: 385681 - RNA, 19 nt, Artificial Sequence
  Description of Artificial Sequence: Synthetic oligonucleotide
  Sense Strand Starting at position 851 of SEQ ID NO: 315999
cuucuuacacuuugagaug

SEQ ID NO: 385682 - RNA, 19 nt, Artificial Sequence
  Description of Artificial Sequence: Synthetic oligonucleotide
  Antisense Strand to SEQ ID NO: 385681
caucucaaaguguaagaag

SEQ ID NO: 385683 - RNA, 19 nt, Artificial Sequence
  Description of Artificial Sequence: Synthetic oligonucleotide
  Sense Strand Starting at position 851 of SEQ ID NO: 316509
cauagugugggaggcauua

SEQ ID NO: 385684 - RNA, 19 nt, Artificial Sequence
  Description of Artificial Sequence: Synthetic oligonucleotide
  Antisense Strand to SEQ ID NO: 385683
uaaugccucccacacuaug

SEQ ID NO: 385685 - RNA, 19 nt, Artificial Sequence
  Description of Artificial Sequence: Synthetic oligonucleotide
  Sense Strand Starting at position 851 of SEQ ID NO: 316511
uagugugggaggcauuaaa

SEQ ID NO: 385686 - RNA, 19 nt, Artificial Sequence
  Description of Artificial Sequence: Synthetic oligonucleotide
  Antisense Strand to SEQ ID NO: 385685
uuuaaugccucccacacua

SEQ ID NO: 385687 - RNA, 19 nt, Artificial Sequence
  Description of Artificial Sequence: Synthetic oligonucleotide
  Sense Strand Starting at position 851 of SEQ ID NO: 316561
aacuguaacucagugguga

SEQ ID NO: 385688 - RNA, 19 nt, Artificial Sequence
  Description of Artificial Sequence: Synthetic oligonucleotide
  Antisense Strand to SEQ ID NO: 385687
ucaccacugaguuacaguu

SEQ ID NO: 385689 - RNA, 19 nt, Artificial Sequence
  Description of Artificial Sequence: Synthetic oligonucleotide
  Sense Strand Starting at position 851 of SEQ ID NO: 316562
acuguaacucaguggugaa

SEQ ID NO: 385690 - RNA, 19 nt, Artificial Sequence
  Description of Artificial Sequence: Synthetic oligonucleotide
  Antisense Strand to SEQ ID NO: 385689
uucaccacugaguuacagu

SEQ ID NO: 385691 - RNA, 19 nt, Artificial Sequence
  Description of Artificial Sequence: Synthetic oligonucleotide
  Sense Strand Starting at position 851 of SEQ ID NO: 316563
cuguaacucaguggugaag

SEQ ID NO: 385692 - RNA, 19 nt, Artificial Sequence
  Description of Artificial Sequence: Synthetic oligonucleotide
  Antisense Strand to SEQ ID NO: 385691
cuucaccacugaguuacag

SEQ ID NO: 385693 - RNA, 19 nt, Artificial Sequence
  Description of Artificial Sequence: Synthetic oligonucleotide
  Sense Strand Starting at position 851 of SEQ ID NO: 316566
uaacucaguggugaaguuu

SEQ ID NO: 385694 - RNA, 19 nt, Artificial Sequence
  Description of Artificial Sequence: Synthetic oligonucleotide
  Antisense Strand to SEQ ID NO: 385693
aaacuucaccacugaguua

SEQ ID NO: 385695 - RNA, 19 nt, Artificial Sequence
  Description of Artificial Sequence: Synthetic oligonucleotide
  Sense Strand Starting at position 851 of SEQ ID NO: 316609
uguuaaguuccagaccagu

SEQ ID NO: 385696 - RNA, 19 nt, Artificial Sequence
  Description of Artificial Sequence: Synthetic oligonucleotide
  Antisense Strand to SEQ ID NO: 385695
acuggucuggaacuuaaca

SEQ ID NO: 385697 - RNA, 19 nt, Artificial Sequence
  Description of Artificial Sequence: Synthetic oligonucleotide
  Sense Strand Starting at position 851 of SEQ ID NO: 316831
cgaucagagucuccuugga

SEQ ID NO: 385698 - RNA, 19 nt, Artificial Sequence
  Description of Artificial Sequence: Synthetic oligonucleotide
  Antisense Strand to SEQ ID NO: 385697
uccaaggagacucugaucg

SEQ ID NO: 385699 - RNA, 19 nt, Artificial Sequence
  Description of Artificial Sequence: Synthetic oligonucleotide
  Sense Strand Starting at position 851 of SEQ ID NO: 316833
aucagagucuccuuggagu

SEQ ID NO: 385700 - RNA, 19 nt, Artificial Sequence
  Description of Artificial Sequence: Synthetic oligonucleotide
  Antisense Strand to SEQ ID NO: 385699
acuccaaggagacucugau

SEQ ID NO: 385701 - RNA, 19 nt, Artificial Sequence
  Description of Artificial Sequence: Synthetic oligonucleotide
  Sense Strand Starting at position 851 of SEQ ID NO: 316889
ucauacuuccucgguccaa

SEQ ID NO: 385702 - RNA, 19 nt, Artificial Sequence
  Description of Artificial Sequence: Synthetic oligonucleotide
  Antisense Strand to SEQ ID NO: 385701
uuggaccgaggaaguauga

SEQ ID NO: 385703 - RNA, 19 nt, Artificial Sequence
  Description of Artificial Sequence: Synthetic oligonucleotide
  Sense Strand Starting at position 851 of SEQ ID NO: 317448
gaagacgucuccuugaagu

SEQ ID NO: 385704 - RNA, 19 nt, Artificial Sequence
  Description of Artificial Sequence: Synthetic oligonucleotide
  Antisense Strand to SEQ ID NO: 385703
acuucaaggagacgucuuc

SEQ ID NO: 385705 - RNA, 19 nt, Artificial Sequence
  Description of Artificial Sequence: Synthetic oligonucleotide
  Sense Strand Starting at position 851 of SEQ ID NO: 317454
gucuccuugaagugggaua

SEQ ID NO: 385706 - RNA, 19 nt, Artificial Sequence
  Description of Artificial Sequence: Synthetic oligonucleotide
  Antisense Strand to SEQ ID NO: 385705
uaucccacuucaaggagac

SEQ ID NO: 385707 - RNA, 19 nt, Artificial Sequence
  Description of Artificial Sequence: Synthetic oligonucleotide
  Sense Strand Starting at position 851 of SEQ ID NO: 317465
gugggauacggaugugaac

SEQ ID NO: 385708 - RNA, 19 nt, Artificial Sequence
  Description of Artificial Sequence: Synthetic oligonucleotide
  Antisense Strand to SEQ ID NO: 385707
guucacauccguaucccac

SEQ ID NO: 385709 - RNA, 19 nt, Artificial Sequence
  Description of Artificial Sequence: Synthetic oligonucleotide
  Sense Strand Starting at position 851 of SEQ ID NO: 317877
aggguguaugguggaaaga

SEQ ID NO: 385710 - RNA, 19 nt, Artificial Sequence
  Description of Artificial Sequence: Synthetic oligonucleotide
  Antisense Strand to SEQ ID NO: 385709
ucuuuccaccauacacccu

SEQ ID NO: 385711 - RNA, 19 nt, Artificial Sequence
  Description of Artificial Sequence: Synthetic oligonucleotide
  Sense Strand Starting at position 851 of SEQ ID NO: 317879
gguguaugguggaaagaaa

SEQ ID NO: 385712 - RNA, 19 nt, Artificial Sequence
  Description of Artificial Sequence: Synthetic oligonucleotide
  Antisense Strand to SEQ ID NO: 385711
uuucuuuccaccauacacc

SEQ ID NO: 385713 - RNA, 19 nt, Artificial Sequence
  Description of Artificial Sequence: Synthetic oligonucleotide
  Sense Strand Starting at position 851 of SEQ ID NO: 317901
uuuccuuugcuagaaugaa

SEQ ID NO: 385714 - RNA, 19 nt, Artificial Sequence
  Description of Artificial Sequence: Synthetic oligonucleotide
  Antisense Strand to SEQ ID NO: 385713
uucauucuagcaaaggaaa

SEQ ID NO: 385715 - RNA, 19 nt, Artificial Sequence
  Description of Artificial Sequence: Synthetic oligonucleotide
  Sense Strand Starting at position 851 of SEQ ID NO: 317913
gaaugaaccuugggaagga

SEQ ID NO: 385716 - RNA, 19 nt, Artificial Sequence
  Description of Artificial Sequence: Synthetic oligonucleotide
  Antisense Strand to SEQ ID NO: 385715
uccuucccaagguucauuc

SEQ ID NO: 385717 - RNA, 19 nt, Artificial Sequence
  Description of Artificial Sequence: Synthetic oligonucleotide
  Sense Strand Starting at position 851 of SEQ ID NO: 317937
uuugauuccguagauguaa

SEQ ID NO: 385718 - RNA, 19 nt, Artificial Sequence
  Description of Artificial Sequence: Synthetic oligonucleotide
  Antisense Strand to SEQ ID NO: 385717
uuacaucuacggaaucaaa

SEQ ID NO: 385719 - RNA, 19 nt, Artificial Sequence
  Description of Artificial Sequence: Synthetic oligonucleotide
  Sense Strand Starting at position 851 of SEQ ID NO: 317939
ugauuccguagauguaaga

SEQ ID NO: 385720 - RNA, 19 nt, Artificial Sequence
  Description of Artificial Sequence: Synthetic oligonucleotide
  Antisense Strand to SEQ ID NO: 385719
ucuuacaucuacggaauca

SEQ ID NO: 385721 - RNA, 19 nt, Artificial Sequence
  Description of Artificial Sequence: Synthetic oligonucleotide
  Sense Strand Starting at position 851 of SEQ ID NO: 317962
acacaauauuauggaagaa

SEQ ID NO: 385722 - RNA, 19 nt, Artificial Sequence
  Description of Artificial Sequence: Synthetic oligonucleotide
  Antisense Strand to SEQ ID NO: 385721
uucuuccauaauauugugu

SEQ ID NO: 385723 - RNA, 19 nt, Artificial Sequence
  Description of Artificial Sequence: Synthetic oligonucleotide
  Sense Strand Starting at position 851 of SEQ ID NO: 318496
guaacaauagcugaugacu

SEQ ID NO: 385724 - RNA, 19 nt, Artificial Sequence
  Description of Artificial Sequence: Synthetic oligonucleotide
  Antisense Strand to SEQ ID NO: 385723
agucaucagcuauuguuac

SEQ ID NO: 385725 - RNA, 19 nt, Artificial Sequence
  Description of Artificial Sequence: Synthetic oligonucleotide
  Sense Strand Starting at position 851 of SEQ ID NO: 318641
gaaaguggcugagaagaaa

SEQ ID NO: 385726 - RNA, 19 nt, Artificial Sequence
  Description of Artificial Sequence: Synthetic oligonucleotide
  Antisense Strand to SEQ ID NO: 385725
uuucuucucagccacuuuc

SEQ ID NO: 385727 - RNA, 19 nt, Artificial Sequence
  Description of Artificial Sequence: Synthetic oligonucleotide
  Sense Strand Starting at position 851 of SEQ ID NO: 318673
acugcaucugcugaggagu

SEQ ID NO: 385728 - RNA, 19 nt, Artificial Sequence
  Description of Artificial Sequence: Synthetic oligonucleotide
  Antisense Strand to SEQ ID NO: 385727
acuccucagcagaugcagu

SEQ ID NO: 385729 - RNA, 19 nt, Artificial Sequence
  Description of Artificial Sequence: Synthetic oligonucleotide
  Sense Strand Starting at position 851 of SEQ ID NO: 318738
gaacauggcgguuagacua

SEQ ID NO: 385730 - RNA, 19 nt, Artificial Sequence
  Description of Artificial Sequence: Synthetic oligonucleotide
  Antisense Strand to SEQ ID NO: 385729
uagucuaaccgccauguuc

SEQ ID NO: 385731 - RNA, 19 nt, Artificial Sequence
  Description of Artificial Sequence: Synthetic oligonucleotide
  Sense Strand Starting at position 851 of SEQ ID NO: 318771
aggacaguuagcuggagaa

SEQ ID NO: 385732 - RNA, 19 nt, Artificial Sequence
  Description of Artificial Sequence: Synthetic oligonucleotide
  Antisense Strand to SEQ ID NO: 385731
uucuccagcuaacuguccu

SEQ ID NO: 385733 - RNA, 19 nt, Artificial Sequence
  Description of Artificial Sequence: Synthetic oligonucleotide
  Sense Strand Starting at position 851 of SEQ ID NO: 318857
cucagucuuaagggaggau

SEQ ID NO: 385734 - RNA, 19 nt, Artificial Sequence
  Description of Artificial Sequence: Synthetic oligonucleotide
  Antisense Strand to SEQ ID NO: 385733
auccucccuuaagacugag

SEQ ID NO: 385735 - RNA, 19 nt, Artificial Sequence
  Description of Artificial Sequence: Synthetic oligonucleotide
  Sense Strand Starting at position 851 of SEQ ID NO: 318916
auggguguuuaggcuaaua

SEQ ID NO: 385736 - RNA, 19 nt, Artificial Sequence
  Description of Artificial Sequence: Synthetic oligonucleotide
  Antisense Strand to SEQ ID NO: 385735
uauuagccuaaacacccau

SEQ ID NO: 385737 - RNA, 19 nt, Artificial Sequence
  Description of Artificial Sequence: Synthetic oligonucleotide
  Sense Strand Starting at position 851 of SEQ ID NO: 318918
ggguguuuaggcuaauaag

SEQ ID NO: 385738 - RNA, 19 nt, Artificial Sequence
  Description of Artificial Sequence: Synthetic oligonucleotide
  Antisense Strand to SEQ ID NO: 385737
cuuauuagccuaaacaccc

SEQ ID NO: 385739 - RNA, 19 nt, Artificial Sequence
  Description of Artificial Sequence: Synthetic oligonucleotide
  Sense Strand Starting at position 851 of SEQ ID NO: 318928
gcuaauaagcuauguaaga

SEQ ID NO: 385740 - RNA, 19 nt, Artificial Sequence
  Description of Artificial Sequence: Synthetic oligonucleotide
  Antisense Strand to SEQ ID NO: 385739
ucuuacauagcuuauuagc

SEQ ID NO: 385741 - RNA, 19 nt, Artificial Sequence
  Description of Artificial Sequence: Synthetic oligonucleotide
  Sense Strand Starting at position 851 of SEQ ID NO: 318929
cuaauaagcuauguaagac

SEQ ID NO: 385742 - RNA, 19 nt, Artificial Sequence
  Description of Artificial Sequence: Synthetic oligonucleotide
  Antisense Strand to SEQ ID NO: 385741
gucuuacauagcuuauuag

SEQ ID NO: 385743 - RNA, 19 nt, Artificial Sequence
  Description of Artificial Sequence: Synthetic oligonucleotide
  Sense Strand Starting at position 851 of SEQ ID NO: 319054
agcauauugggaggcuaaa

SEQ ID NO: 385744 - RNA, 19 nt, Artificial Sequence
  Description of Artificial Sequence: Synthetic oligonucleotide
  Antisense Strand to SEQ ID NO: 385743
uuuagccucccaauaugcu

SEQ ID NO: 385745 - RNA, 19 nt, Artificial Sequence
  Description of Artificial Sequence: Synthetic oligonucleotide
  Sense Strand Starting at position 852 of SEQ ID NO: 315319
agcacaaagucaguuauca

SEQ ID NO: 385746 - RNA, 19 nt, Artificial Sequence
  Description of Artificial Sequence: Synthetic oligonucleotide
  Antisense Strand to SEQ ID NO: 385745
ugauaacugacuuugugcu

SEQ ID NO: 385747 - RNA, 19 nt, Artificial Sequence
  Description of Artificial Sequence: Synthetic oligonucleotide
  Sense Strand Starting at position 852 of SEQ ID NO: 315327
gucaguuaucaccacauaa

SEQ ID NO: 385748 - RNA, 19 nt, Artificial Sequence
  Description of Artificial Sequence: Synthetic oligonucleotide
  Antisense Strand to SEQ ID NO: 385747
uuauguggugauaacugac

SEQ ID NO: 385749 - RNA, 19 nt, Artificial Sequence
  Description of Artificial Sequence: Synthetic oligonucleotide
  Sense Strand Starting at position 852 of SEQ ID NO: 315375
gucuguguacuacauuacu

SEQ ID NO: 385750 - RNA, 19 nt, Artificial Sequence
  Description of Artificial Sequence: Synthetic oligonucleotide
  Antisense Strand to SEQ ID NO: 385749
aguaauguaguacacagac

SEQ ID NO: 385751 - RNA, 19 nt, Artificial Sequence
  Description of Artificial Sequence: Synthetic oligonucleotide
  Sense Strand Starting at position 852 of SEQ ID NO: 315378
uguguacuacauuacuuau

SEQ ID NO: 385752 - RNA, 19 nt, Artificial Sequence
  Description of Artificial Sequence: Synthetic oligonucleotide
  Antisense Strand to SEQ ID NO: 385751
auaaguaauguaguacaca

SEQ ID NO: 385753 - RNA, 19 nt, Artificial Sequence
  Description of Artificial Sequence: Synthetic oligonucleotide
  Sense Strand Starting at position 852 of SEQ ID NO: 315395
augguacauuauuccugau

SEQ ID NO: 385754 - RNA, 19 nt, Artificial Sequence
  Description of Artificial Sequence: Synthetic oligonucleotide
  Antisense Strand to SEQ ID NO: 385753
aucaggaauaauguaccau

SEQ ID NO: 385755 - RNA, 19 nt, Artificial Sequence
  Description of Artificial Sequence: Synthetic oligonucleotide
  Sense Strand Starting at position 852 of SEQ ID NO: 315495
ggaagauaauaccucuguu

SEQ ID NO: 385756 - RNA, 19 nt, Artificial Sequence
  Description of Artificial Sequence: Synthetic oligonucleotide
  Antisense Strand to SEQ ID NO: 385755
aacagagguauuaucuucc

SEQ ID NO: 385757 - RNA, 19 nt, Artificial Sequence
  Description of Artificial Sequence: Synthetic oligonucleotide
  Sense Strand Starting at position 852 of SEQ ID NO: 315499
gauaauaccucuguuccga

SEQ ID NO: 385758 - RNA, 19 nt, Artificial Sequence
  Description of Artificial Sequence: Synthetic oligonucleotide
  Antisense Strand to SEQ ID NO: 385757
ucggaacagagguauuauc

SEQ ID NO: 385759 - RNA, 19 nt, Artificial Sequence
  Description of Artificial Sequence: Synthetic oligonucleotide
  Sense Strand Starting at position 852 of SEQ ID NO: 315539
agugaagcacauuguugau

SEQ ID NO: 385760 - RNA, 19 nt, Artificial Sequence
  Description of Artificial Sequence: Synthetic oligonucleotide
  Antisense Strand to SEQ ID NO: 385759
aucaacaaugugcuucacu

SEQ ID NO: 385761 - RNA, 19 nt, Artificial Sequence
  Description of Artificial Sequence: Synthetic oligonucleotide
  Sense Strand Starting at position 852 of SEQ ID NO: 315541
ugaagcacauuguugauaa

SEQ ID NO: 385762 - RNA, 19 nt, Artificial Sequence
  Description of Artificial Sequence: Synthetic oligonucleotide
  Antisense Strand to SEQ ID NO: 385761
uuaucaacaaugugcuuca

SEQ ID NO: 385763 - RNA, 19 nt, Artificial Sequence
  Description of Artificial Sequence: Synthetic oligonucleotide
  Sense Strand Starting at position 852 of SEQ ID NO: 315593
auagucugaugaucaacuu

SEQ ID NO: 385764 - RNA, 19 nt, Artificial Sequence
  Description of Artificial Sequence: Synthetic oligonucleotide
  Antisense Strand to SEQ ID NO: 385763
aaguugaucaucagacuau

SEQ ID NO: 385765 - RNA, 19 nt, Artificial Sequence
  Description of Artificial Sequence: Synthetic oligonucleotide
  Sense Strand Starting at position 852 of SEQ ID NO: 315641
acauguuaagaguaagcca

SEQ ID NO: 385766 - RNA, 19 nt, Artificial Sequence
  Description of Artificial Sequence: Synthetic oligonucleotide
  Antisense Strand to SEQ ID NO: 385765
uggcuuacucuuaacaugu

SEQ ID NO: 385767 - RNA, 19 nt, Artificial Sequence
  Description of Artificial Sequence: Synthetic oligonucleotide
  Sense Strand Starting at position 852 of SEQ ID NO: 315670
caugcuaaccuguauggau

SEQ ID NO: 385768 - RNA, 19 nt, Artificial Sequence
  Description of Artificial Sequence: Synthetic oligonucleotide
  Antisense Strand to SEQ ID NO: 385767
auccauacagguuagcaug

SEQ ID NO: 385769 - RNA, 19 nt, Artificial Sequence
  Description of Artificial Sequence: Synthetic oligonucleotide
  Sense Strand Starting at position 852 of SEQ ID NO: 315672
ugcuaaccuguauggauau

SEQ ID NO: 385770 - RNA, 19 nt, Artificial Sequence
  Description of Artificial Sequence: Synthetic oligonucleotide
  Antisense Strand to SEQ ID NO: 385769
auauccauacagguuagca

SEQ ID NO: 385771 - RNA, 19 nt, Artificial Sequence
  Description of Artificial Sequence: Synthetic oligonucleotide
  Sense Strand Starting at position 852 of SEQ ID NO: 315773
agcuauaacuggucauaau

SEQ ID NO: 385772 - RNA, 19 nt, Artificial Sequence
  Description of Artificial Sequence: Synthetic oligonucleotide
  Antisense Strand to SEQ ID NO: 385771
auuaugaccaguuauagcu

SEQ ID NO: 385773 - RNA, 19 nt, Artificial Sequence
  Description of Artificial Sequence: Synthetic oligonucleotide
  Sense Strand Starting at position 852 of SEQ ID NO: 315774
gcuauaacuggucauaauc

SEQ ID NO: 385774 - RNA, 19 nt, Artificial Sequence
  Description of Artificial Sequence: Synthetic oligonucleotide
  Antisense Strand to SEQ ID NO: 385773
gauuaugaccaguuauagc

SEQ ID NO: 385775 - RNA, 19 nt, Artificial Sequence
  Description of Artificial Sequence: Synthetic oligonucleotide
  Sense Strand Starting at position 852 of SEQ ID NO: 315782
uggucauaaucauuauaga

SEQ ID NO: 385776 - RNA, 19 nt, Artificial Sequence
  Description of Artificial Sequence: Synthetic oligonucleotide
  Antisense Strand to SEQ ID NO: 385775
ucuauaaugauuaugacca

SEQ ID NO: 385777 - RNA, 19 nt, Artificial Sequence
  Description of Artificial Sequence: Synthetic oligonucleotide
  Sense Strand Starting at position 852 of SEQ ID NO: 316018
cgauguuaccuccaagaaa

SEQ ID NO: 385778 - RNA, 19 nt, Artificial Sequence
  Description of Artificial Sequence: Synthetic oligonucleotide
  Antisense Strand to SEQ ID NO: 385777
uuucuuggagguaacaucg

SEQ ID NO: 385779 - RNA, 19 nt, Artificial Sequence
  Description of Artificial Sequence: Synthetic oligonucleotide
  Sense Strand Starting at position 852 of SEQ ID NO: 316054
ucuaguaaugggcacacua

SEQ ID NO: 385780 - RNA, 19 nt, Artificial Sequence
  Description of Artificial Sequence: Synthetic oligonucleotide
  Antisense Strand to SEQ ID NO: 385779
uagugugcccauuacuaga

SEQ ID NO: 385781 - RNA, 19 nt, Artificial Sequence
  Description of Artificial Sequence: Synthetic oligonucleotide
  Sense Strand Starting at position 852 of SEQ ID NO: 316207
ugggauauauuguuuaacu

SEQ ID NO: 385782 - RNA, 19 nt, Artificial Sequence
  Description of Artificial Sequence: Synthetic oligonucleotide
  Antisense Strand to SEQ ID NO: 385781
aguuaaacaauauauccca

SEQ ID NO: 385783 - RNA, 19 nt, Artificial Sequence
  Description of Artificial Sequence: Synthetic oligonucleotide
  Sense Strand Starting at position 852 of SEQ ID NO: 316208
gggauauauuguuuaacug

SEQ ID NO: 385784 - RNA, 19 nt, Artificial Sequence
  Description of Artificial Sequence: Synthetic oligonucleotide
  Antisense Strand to SEQ ID NO: 385783
caguuaaacaauauauccc

SEQ ID NO: 385785 - RNA, 19 nt, Artificial Sequence
  Description of Artificial Sequence: Synthetic oligonucleotide
  Sense Strand Starting at position 852 of SEQ ID NO: 316209
ggauauauuguuuaacugu

SEQ ID NO: 385786 - RNA, 19 nt, Artificial Sequence
  Description of Artificial Sequence: Synthetic oligonucleotide
  Antisense Strand to SEQ ID NO: 385785
acaguuaaacaauauaucc

SEQ ID NO: 385787 - RNA, 19 nt, Artificial Sequence
  Description of Artificial Sequence: Synthetic oligonucleotide
  Sense Strand Starting at position 852 of SEQ ID NO: 316271
aguagagucuaucauuuaa

SEQ ID NO: 385788 - RNA, 19 nt, Artificial Sequence
  Description of Artificial Sequence: Synthetic oligonucleotide
  Antisense Strand to SEQ ID NO: 385787
uuaaaugauagacucuacu

SEQ ID NO: 385789 - RNA, 19 nt, Artificial Sequence
  Description of Artificial Sequence: Synthetic oligonucleotide
  Sense Strand Starting at position 852 of SEQ ID NO: 316358
aucuuuccuuuauugagga

SEQ ID NO: 385790 - RNA, 19 nt, Artificial Sequence
  Description of Artificial Sequence: Synthetic oligonucleotide
  Antisense Strand to SEQ ID NO: 385789
uccucaauaaaggaaagau

SEQ ID NO: 385791 - RNA, 19 nt, Artificial Sequence
  Description of Artificial Sequence: Synthetic oligonucleotide
  Sense Strand Starting at position 852 of SEQ ID NO: 316669
agucuuucuguuuaaggca

SEQ ID NO: 385792 - RNA, 19 nt, Artificial Sequence
  Description of Artificial Sequence: Synthetic oligonucleotide
  Antisense Strand to SEQ ID NO: 385791
ugccuuaaacagaaagacu

SEQ ID NO: 385793 - RNA, 19 nt, Artificial Sequence
  Description of Artificial Sequence: Synthetic oligonucleotide
  Sense Strand Starting at position 852 of SEQ ID NO: 316698
cuuagagggccacaucauu

SEQ ID NO: 385794 - RNA, 19 nt, Artificial Sequence
  Description of Artificial Sequence: Synthetic oligonucleotide
  Antisense Strand to SEQ ID NO: 385793
aaugauguggcccucuaag

SEQ ID NO: 385795 - RNA, 19 nt, Artificial Sequence
  Description of Artificial Sequence: Synthetic oligonucleotide
  Sense Strand Starting at position 852 of SEQ ID NO: 317359
ggagucgugcagaggcuua

SEQ ID NO: 385796 - RNA, 19 nt, Artificial Sequence
  Description of Artificial Sequence: Synthetic oligonucleotide
  Antisense Strand to SEQ ID NO: 385795
uaagccucugcacgacucc

SEQ ID NO: 385797 - RNA, 19 nt, Artificial Sequence
  Description of Artificial Sequence: Synthetic oligonucleotide
  Sense Strand Starting at position 852 of SEQ ID NO: 317489
uagccaauaguaggagaau

SEQ ID NO: 385798 - RNA, 19 nt, Artificial Sequence
  Description of Artificial Sequence: Synthetic oligonucleotide
  Antisense Strand to SEQ ID NO: 385797
auucuccuacuauuggcua

SEQ ID NO: 385799 - RNA, 19 nt, Artificial Sequence
  Description of Artificial Sequence: Synthetic oligonucleotide
  Sense Strand Starting at position 852 of SEQ ID NO: 317500
aggagaauucccugccuuu

SEQ ID NO: 385800 - RNA, 19 nt, Artificial Sequence
  Description of Artificial Sequence: Synthetic oligonucleotide
  Antisense Strand to SEQ ID NO: 385799
aaaggcagggaauucuccu

SEQ ID NO: 385801 - RNA, 19 nt, Artificial Sequence
  Description of Artificial Sequence: Synthetic oligonucleotide
  Sense Strand Starting at position 852 of SEQ ID NO: 318741
gcaagaaauccguauuaaa

SEQ ID NO: 385802 - RNA, 19 nt, Artificial Sequence
  Description of Artificial Sequence: Synthetic oligonucleotide
  Antisense Strand to SEQ ID NO: 385801
uuuaauacggauuucuugc

SEQ ID NO: 385803 - RNA, 19 nt, Artificial Sequence
  Description of Artificial Sequence: Synthetic oligonucleotide
  Sense Strand Starting at position 852 of SEQ ID NO: 318789
uaggaugggcucugacuua

SEQ ID NO: 385804 - RNA, 19 nt, Artificial Sequence
  Description of Artificial Sequence: Synthetic oligonucleotide
  Antisense Strand to SEQ ID NO: 385803
uaagucagagcccauccua

SEQ ID NO: 385805 - RNA, 19 nt, Artificial Sequence
  Description of Artificial Sequence: Synthetic oligonucleotide
  Sense Strand Starting at position 852 of SEQ ID NO: 318960
guuaguuucucauuugugu

SEQ ID NO: 385806 - RNA, 19 nt, Artificial Sequence
  Description of Artificial Sequence: Synthetic oligonucleotide
  Antisense Strand to SEQ ID NO: 385805
acacaaaugagaaacuaac

SEQ ID NO: 385807 - RNA, 19 nt, Artificial Sequence
  Description of Artificial Sequence: Synthetic oligonucleotide
  Sense Strand Starting at position 852 of SEQ ID NO: 318967
ucucauuuguguccgauaa

SEQ ID NO: 385808 - RNA, 19 nt, Artificial Sequence
  Description of Artificial Sequence: Synthetic oligonucleotide
  Antisense Strand to SEQ ID NO: 385807
uuaucggacacaaaugaga

SEQ ID NO: 385809 - RNA, 19 nt, Artificial Sequence
  Description of Artificial Sequence: Synthetic oligonucleotide
  Sense Strand Starting at position 852 of SEQ ID NO: 318968
cucauuuguguccgauaau

SEQ ID NO: 385810 - RNA, 19 nt, Artificial Sequence
  Description of Artificial Sequence: Synthetic oligonucleotide
  Antisense Strand to SEQ ID NO: 385809
auuaucggacacaaaugag

SEQ ID NO: 385811 - RNA, 19 nt, Artificial Sequence
  Description of Artificial Sequence: Synthetic oligonucleotide
  Sense Strand Starting at position 852 of SEQ ID NO: 319013
uggaaagcugugugggaau

SEQ ID NO: 385812 - RNA, 19 nt, Artificial Sequence
  Description of Artificial Sequence: Synthetic oligonucleotide
  Antisense Strand to SEQ ID NO: 385811
auucccacacagcuuucca

SEQ ID NO: 385813 - RNA, 19 nt, Artificial Sequence
  Description of Artificial Sequence: Synthetic oligonucleotide
  Sense Strand Starting at position 852 of SEQ ID NO: 319015
gaaagcugugugggaaucu

SEQ ID NO: 385814 - RNA, 19 nt, Artificial Sequence
  Description of Artificial Sequence: Synthetic oligonucleotide
  Antisense Strand to SEQ ID NO: 385813
agauucccacacagcuuuc

SEQ ID NO: 385815 - RNA, 19 nt, Artificial Sequence
  Description of Artificial Sequence: Synthetic oligonucleotide
  Sense Strand Starting at position 852 of SEQ ID NO: 319068
cccuuaauauguguuauga

SEQ ID NO: 385816 - RNA, 19 nt, Artificial Sequence
  Description of Artificial Sequence: Synthetic oligonucleotide
  Antisense Strand to SEQ ID NO: 385815
ucauaacacauauuaaggg

SEQ ID NO: 385817 - RNA, 19 nt, Artificial Sequence
  Description of Artificial Sequence: Synthetic oligonucleotide
  Sense Strand Starting at position 852 of SEQ ID NO: 319130
guuuauucucgguauuaaa

SEQ ID NO: 385818 - RNA, 19 nt, Artificial Sequence
  Description of Artificial Sequence: Synthetic oligonucleotide
  Antisense Strand to SEQ ID NO: 385817
uuuaauaccgagaauaaac

SEQ ID NO: 385819 - RNA, 19 nt, Artificial Sequence
  Description of Artificial Sequence: Synthetic oligonucleotide
  Sense Strand Starting at position 852 of SEQ ID NO: 319191
auggaaauaaguuguaaug

SEQ ID NO: 385820 - RNA, 19 nt, Artificial Sequence
  Description of Artificial Sequence: Synthetic oligonucleotide
  Antisense Strand to SEQ ID NO: 385819
cauuacaacuuauuuccau

SEQ ID NO: 385821 - RNA, 19 nt, Artificial Sequence
  Description of Artificial Sequence: Synthetic oligonucleotide
  Sense Strand Starting at position 852 of SEQ ID NO: 319202
uuguaaugcuggguaaaga

SEQ ID NO: 385822 - RNA, 19 nt, Artificial Sequence
  Description of Artificial Sequence: Synthetic oligonucleotide
  Antisense Strand to SEQ ID NO: 385821
ucuuuacccagcauuacaa

SEQ ID NO: 385823 - RNA, 19 nt, Artificial Sequence
  Description of Artificial Sequence: Synthetic oligonucleotide
  Sense Strand Starting at position 852 of SEQ ID NO: 319203
uguaaugcuggguaaagau

SEQ ID NO: 385824 - RNA, 19 nt, Artificial Sequence
  Description of Artificial Sequence: Synthetic oligonucleotide
  Antisense Strand to SEQ ID NO: 385823
aucuuuacccagcauuaca

SEQ ID NO: 385825 - RNA, 19 nt, Artificial Sequence
  Description of Artificial Sequence: Synthetic oligonucleotide
  Sense Strand Starting at position 853 of SEQ ID NO: 315262
agcacaaagucaguuauca

SEQ ID NO: 385826 - RNA, 19 nt, Artificial Sequence
  Description of Artificial Sequence: Synthetic oligonucleotide
  Antisense Strand to SEQ ID NO: 385825
ugauaacugacuuugugcu

SEQ ID NO: 385827 - RNA, 19 nt, Artificial Sequence
  Description of Artificial Sequence: Synthetic oligonucleotide
  Sense Strand Starting at position 853 of SEQ ID NO: 315270
gucaguuaucaccacauaa

SEQ ID NO: 385828 - RNA, 19 nt, Artificial Sequence
  Description of Artificial Sequence: Synthetic oligonucleotide
  Antisense Strand to SEQ ID NO: 385827
uuauguggugauaacugac

SEQ ID NO: 385829 - RNA, 19 nt, Artificial Sequence
  Description of Artificial Sequence: Synthetic oligonucleotide
  Sense Strand Starting at position 853 of SEQ ID NO: 315318
gucuguguacuacauuacu

SEQ ID NO: 385830 - RNA, 19 nt, Artificial Sequence
  Description of Artificial Sequence: Synthetic oligonucleotide
  Antisense Strand to SEQ ID NO: 385829
aguaauguaguacacagac

SEQ ID NO: 385831 - RNA, 19 nt, Artificial Sequence
  Description of Artificial Sequence: Synthetic oligonucleotide
  Sense Strand Starting at position 853 of SEQ ID NO: 315321
uguguacuacauuacuuau

SEQ ID NO: 385832 - RNA, 19 nt, Artificial Sequence
  Description of Artificial Sequence: Synthetic oligonucleotide
  Antisense Strand to SEQ ID NO: 385831
auaaguaauguaguacaca

SEQ ID NO: 385833 - RNA, 19 nt, Artificial Sequence
  Description of Artificial Sequence: Synthetic oligonucleotide
  Sense Strand Starting at position 853 of SEQ ID NO: 315338
augguacauuauuccugau

SEQ ID NO: 385834 - RNA, 19 nt, Artificial Sequence
  Description of Artificial Sequence: Synthetic oligonucleotide
  Antisense Strand to SEQ ID NO: 385833
aucaggaauaauguaccau

SEQ ID NO: 385835 - RNA, 19 nt, Artificial Sequence
  Description of Artificial Sequence: Synthetic oligonucleotide
  Sense Strand Starting at position 853 of SEQ ID NO: 315438
ggaagauaauaccucuguu

SEQ ID NO: 385836 - RNA, 19 nt, Artificial Sequence
  Description of Artificial Sequence: Synthetic oligonucleotide
  Antisense Strand to SEQ ID NO: 385835
aacagagguauuaucuucc

SEQ ID NO: 385837 - RNA, 19 nt, Artificial Sequence
  Description of Artificial Sequence: Synthetic oligonucleotide
  Sense Strand Starting at position 853 of SEQ ID NO: 315442
gauaauaccucuguuccga

SEQ ID NO: 385838 - RNA, 19 nt, Artificial Sequence
  Description of Artificial Sequence: Synthetic oligonucleotide
  Antisense Strand to SEQ ID NO: 385837
ucggaacagagguauuauc

SEQ ID NO: 385839 - RNA, 19 nt, Artificial Sequence
  Description of Artificial Sequence: Synthetic oligonucleotide
  Sense Strand Starting at position 853 of SEQ ID NO: 315484
ugaagcacauuguugauaa

SEQ ID NO: 385840 - RNA, 19 nt, Artificial Sequence
  Description of Artificial Sequence: Synthetic oligonucleotide
  Antisense Strand to SEQ ID NO: 385839
uuaucaacaaugugcuuca

SEQ ID NO: 385841 - RNA, 19 nt, Artificial Sequence
  Description of Artificial Sequence: Synthetic oligonucleotide
  Sense Strand Starting at position 853 of SEQ ID NO: 315536
auagucugaugaucaacuu

SEQ ID NO: 385842 - RNA, 19 nt, Artificial Sequence
  Description of Artificial Sequence: Synthetic oligonucleotide
  Antisense Strand to SEQ ID NO: 385841
aaguugaucaucagacuau

SEQ ID NO: 385843 - RNA, 19 nt, Artificial Sequence
  Description of Artificial Sequence: Synthetic oligonucleotide
  Sense Strand Starting at position 853 of SEQ ID NO: 315584
acauguuaagaguaagcca

SEQ ID NO: 385844 - RNA, 19 nt, Artificial Sequence
  Description of Artificial Sequence: Synthetic oligonucleotide
  Antisense Strand to SEQ ID NO: 385843
uggcuuacucuuaacaugu

SEQ ID NO: 385845 - RNA, 19 nt, Artificial Sequence
  Description of Artificial Sequence: Synthetic oligonucleotide
  Sense Strand Starting at position 853 of SEQ ID NO: 315613
caugcuaaccuguauggau

SEQ ID NO: 385846 - RNA, 19 nt, Artificial Sequence
  Description of Artificial Sequence: Synthetic oligonucleotide
  Antisense Strand to SEQ ID NO: 385845
auccauacagguuagcaug

SEQ ID NO: 385847 - RNA, 19 nt, Artificial Sequence
  Description of Artificial Sequence: Synthetic oligonucleotide
  Sense Strand Starting at position 853 of SEQ ID NO: 315615
ugcuaaccuguauggauau

SEQ ID NO: 385848 - RNA, 19 nt, Artificial Sequence
  Description of Artificial Sequence: Synthetic oligonucleotide
  Antisense Strand to SEQ ID NO: 385847
auauccauacagguuagca

SEQ ID NO: 385849 - RNA, 19 nt, Artificial Sequence
  Description of Artificial Sequence: Synthetic oligonucleotide
  Sense Strand Starting at position 853 of SEQ ID NO: 315716
agcuauaacuggucauaau

SEQ ID NO: 385850 - RNA, 19 nt, Artificial Sequence
  Description of Artificial Sequence: Synthetic oligonucleotide
  Antisense Strand to SEQ ID NO: 385849
auuaugaccaguuauagcu

SEQ ID NO: 385851 - RNA, 19 nt, Artificial Sequence
  Description of Artificial Sequence: Synthetic oligonucleotide
  Sense Strand Starting at position 853 of SEQ ID NO: 315717
gcuauaacuggucauaauc

SEQ ID NO: 385852 - RNA, 19 nt, Artificial Sequence
  Description of Artificial Sequence: Synthetic oligonucleotide
  Antisense Strand to SEQ ID NO: 385851
gauuaugaccaguuauagc

SEQ ID NO: 385853 - RNA, 19 nt, Artificial Sequence
  Description of Artificial Sequence: Synthetic oligonucleotide
  Sense Strand Starting at position 853 of SEQ ID NO: 315725
uggucauaaucauuauaga

SEQ ID NO: 385854 - RNA, 19 nt, Artificial Sequence
  Description of Artificial Sequence: Synthetic oligonucleotide
  Antisense Strand to SEQ ID NO: 385853
ucuauaaugauuaugacca

SEQ ID NO: 385855 - RNA, 19 nt, Artificial Sequence
  Description of Artificial Sequence: Synthetic oligonucleotide
  Sense Strand Starting at position 853 of SEQ ID NO: 315961
cgauguuaccuccaagaaa

SEQ ID NO: 385856 - RNA, 19 nt, Artificial Sequence
  Description of Artificial Sequence: Synthetic oligonucleotide
  Antisense Strand to SEQ ID NO: 385855
uuucuuggagguaacaucg

SEQ ID NO: 385857 - RNA, 19 nt, Artificial Sequence
  Description of Artificial Sequence: Synthetic oligonucleotide
  Sense Strand Starting at position 853 of SEQ ID NO: 315997
ucuaguaaugggcacacua

SEQ ID NO: 385858 - RNA, 19 nt, Artificial Sequence
  Description of Artificial Sequence: Synthetic oligonucleotide
  Antisense Strand to SEQ ID NO: 385857
uagugugcccauuacuaga

SEQ ID NO: 385859 - RNA, 19 nt, Artificial Sequence
  Description of Artificial Sequence: Synthetic oligonucleotide
  Sense Strand Starting at position 853 of SEQ ID NO: 316150
ugggauauauuguuuaacu

SEQ ID NO: 385860 - RNA, 19 nt, Artificial Sequence
  Description of Artificial Sequence: Synthetic oligonucleotide
  Antisense Strand to SEQ ID NO: 385859
aguuaaacaauauauccca

SEQ ID NO: 385861 - RNA, 19 nt, Artificial Sequence
  Description of Artificial Sequence: Synthetic oligonucleotide
  Sense Strand Starting at position 853 of SEQ ID NO: 316151
gggauauauuguuuaacug

SEQ ID NO: 385862 - RNA, 19 nt, Artificial Sequence
  Description of Artificial Sequence: Synthetic oligonucleotide
  Antisense Strand to SEQ ID NO: 385861
caguuaaacaauauauccc

SEQ ID NO: 385863 - RNA, 19 nt, Artificial Sequence
  Description of Artificial Sequence: Synthetic oligonucleotide
  Sense Strand Starting at position 853 of SEQ ID NO: 316152
ggauauauuguuuaacugu

SEQ ID NO: 385864 - RNA, 19 nt, Artificial Sequence
  Description of Artificial Sequence: Synthetic oligonucleotide
  Antisense Strand to SEQ ID NO: 385863
acaguuaaacaauauaucc

SEQ ID NO: 385865 - RNA, 19 nt, Artificial Sequence
  Description of Artificial Sequence: Synthetic oligonucleotide
  Sense Strand Starting at position 853 of SEQ ID NO: 316214
aguagagucuaucauuuaa

SEQ ID NO: 385866 - RNA, 19 nt, Artificial Sequence
  Description of Artificial Sequence: Synthetic oligonucleotide
  Antisense Strand to SEQ ID NO: 385865
uuaaaugauagacucuacu

SEQ ID NO: 385867 - RNA, 19 nt, Artificial Sequence
  Description of Artificial Sequence: Synthetic oligonucleotide
  Sense Strand Starting at position 853 of SEQ ID NO: 316301
aucuuuccuuuauugagga

SEQ ID NO: 385868 - RNA, 19 nt, Artificial Sequence
  Description of Artificial Sequence: Synthetic oligonucleotide
  Antisense Strand to SEQ ID NO: 385867
uccucaauaaaggaaagau

SEQ ID NO: 385869 - RNA, 19 nt, Artificial Sequence
  Description of Artificial Sequence: Synthetic oligonucleotide
  Sense Strand Starting at position 853 of SEQ ID NO: 316641
cuuagagggccacaucauu

SEQ ID NO: 385870 - RNA, 19 nt, Artificial Sequence
  Description of Artificial Sequence: Synthetic oligonucleotide
  Antisense Strand to SEQ ID NO: 385869
aaugauguggcccucuaag

SEQ ID NO: 385871 - RNA, 19 nt, Artificial Sequence
  Description of Artificial Sequence: Synthetic oligonucleotide
  Sense Strand Starting at position 853 of SEQ ID NO: 317302
ggagucgugcagaggcuua

SEQ ID NO: 385872 - RNA, 19 nt, Artificial Sequence
  Description of Artificial Sequence: Synthetic oligonucleotide
  Antisense Strand to SEQ ID NO: 385871
uaagccucugcacgacucc

SEQ ID NO: 385873 - RNA, 19 nt, Artificial Sequence
  Description of Artificial Sequence: Synthetic oligonucleotide
  Sense Strand Starting at position 853 of SEQ ID NO: 317432
uagccaauaguaggagaau

SEQ ID NO: 385874 - RNA, 19 nt, Artificial Sequence
  Description of Artificial Sequence: Synthetic oligonucleotide
  Antisense Strand to SEQ ID NO: 385873
auucuccuacuauuggcua

SEQ ID NO: 385875 - RNA, 19 nt, Artificial Sequence
  Description of Artificial Sequence: Synthetic oligonucleotide
  Sense Strand Starting at position 853 of SEQ ID NO: 317443
aggagaauucccugccuuu

SEQ ID NO: 385876 - RNA, 19 nt, Artificial Sequence
  Description of Artificial Sequence: Synthetic oligonucleotide
  Antisense Strand to SEQ ID NO: 385875
aaaggcagggaauucuccu

SEQ ID NO: 385877 - RNA, 19 nt, Artificial Sequence
  Description of Artificial Sequence: Synthetic oligonucleotide
  Sense Strand Starting at position 853 of SEQ ID NO: 318684
gcaagaaauccguauuaaa

SEQ ID NO: 385878 - RNA, 19 nt, Artificial Sequence
  Description of Artificial Sequence: Synthetic oligonucleotide
  Antisense Strand to SEQ ID NO: 385877
uuuaauacggauuucuugc

SEQ ID NO: 385879 - RNA, 19 nt, Artificial Sequence
  Description of Artificial Sequence: Synthetic oligonucleotide
  Sense Strand Starting at position 853 of SEQ ID NO: 318732
uaggaugggcucugacuua

SEQ ID NO: 385880 - RNA, 19 nt, Artificial Sequence
  Description of Artificial Sequence: Synthetic oligonucleotide
  Antisense Strand to SEQ ID NO: 385879
uaagucagagcccauccua

SEQ ID NO: 385881 - RNA, 19 nt, Artificial Sequence
  Description of Artificial Sequence: Synthetic oligonucleotide
  Sense Strand Starting at position 853 of SEQ ID NO: 318903
guuaguuucucauuugugu

SEQ ID NO: 385882 - RNA, 19 nt, Artificial Sequence
  Description of Artificial Sequence: Synthetic oligonucleotide
  Antisense Strand to SEQ ID NO: 385881
acacaaaugagaaacuaac

SEQ ID NO: 385883 - RNA, 19 nt, Artificial Sequence
  Description of Artificial Sequence: Synthetic oligonucleotide
  Sense Strand Starting at position 853 of SEQ ID NO: 318910
ucucauuuguguccgauaa

SEQ ID NO: 385884 - RNA, 19 nt, Artificial Sequence
  Description of Artificial Sequence: Synthetic oligonucleotide
  Antisense Strand to SEQ ID NO: 385883
uuaucggacacaaaugaga

SEQ ID NO: 385885 - RNA, 19 nt, Artificial Sequence
  Description of Artificial Sequence: Synthetic oligonucleotide
  Sense Strand Starting at position 853 of SEQ ID NO: 318911
cucauuuguguccgauaau

SEQ ID NO: 385886 - RNA, 19 nt, Artificial Sequence
  Description of Artificial Sequence: Synthetic oligonucleotide
  Antisense Strand to SEQ ID NO: 385885
auuaucggacacaaaugag

SEQ ID NO: 385887 - RNA, 19 nt, Artificial Sequence
  Description of Artificial Sequence: Synthetic oligonucleotide
  Sense Strand Starting at position 853 of SEQ ID NO: 318956
uggaaagcugugugggaau

SEQ ID NO: 385888 - RNA, 19 nt, Artificial Sequence
  Description of Artificial Sequence: Synthetic oligonucleotide
  Antisense Strand to SEQ ID NO: 385887
auucccacacagcuuucca

SEQ ID NO: 385889 - RNA, 19 nt, Artificial Sequence
  Description of Artificial Sequence: Synthetic oligonucleotide
  Sense Strand Starting at position 853 of SEQ ID NO: 318958
gaaagcugugugggaaucu

SEQ ID NO: 385890 - RNA, 19 nt, Artificial Sequence
  Description of Artificial Sequence: Synthetic oligonucleotide
  Antisense Strand to SEQ ID NO: 385889
agauucccacacagcuuuc

SEQ ID NO: 385891 - RNA, 19 nt, Artificial Sequence
  Description of Artificial Sequence: Synthetic oligonucleotide
  Sense Strand Starting at position 853 of SEQ ID NO: 319011
cccuuaauauguguuauga

SEQ ID NO: 385892 - RNA, 19 nt, Artificial Sequence
  Description of Artificial Sequence: Synthetic oligonucleotide
  Antisense Strand to SEQ ID NO: 385891
ucauaacacauauuaaggg

SEQ ID NO: 385893 - RNA, 19 nt, Artificial Sequence
  Description of Artificial Sequence: Synthetic oligonucleotide
  Sense Strand Starting at position 853 of SEQ ID NO: 319073
guuuauucucgguauuaaa

SEQ ID NO: 385894 - RNA, 19 nt, Artificial Sequence
  Description of Artificial Sequence: Synthetic oligonucleotide
  Antisense Strand to SEQ ID NO: 385893
uuuaauaccgagaauaaac

SEQ ID NO: 385895 - RNA, 19 nt, Artificial Sequence
  Description of Artificial Sequence: Synthetic oligonucleotide
  Sense Strand Starting at position 853 of SEQ ID NO: 319134
auggaaauaaguuguaaug

SEQ ID NO: 385896 - RNA, 19 nt, Artificial Sequence
  Description of Artificial Sequence: Synthetic oligonucleotide
  Antisense Strand to SEQ ID NO: 385895
cauuacaacuuauuuccau

SEQ ID NO: 385897 - RNA, 19 nt, Artificial Sequence
  Description of Artificial Sequence: Synthetic oligonucleotide
  Sense Strand Starting at position 853 of SEQ ID NO: 319145
uuguaaugcuggguaaaga

SEQ ID NO: 385898 - RNA, 19 nt, Artificial Sequence
  Description of Artificial Sequence: Synthetic oligonucleotide
  Antisense Strand to SEQ ID NO: 385897
ucuuuacccagcauuacaa

SEQ ID NO: 385899 - RNA, 19 nt, Artificial Sequence
  Description of Artificial Sequence: Synthetic oligonucleotide
  Sense Strand Starting at position 853 of SEQ ID NO: 319146
uguaaugcuggguaaagau

SEQ ID NO: 385900 - RNA, 19 nt, Artificial Sequence
  Description of Artificial Sequence: Synthetic oligonucleotide
  Antisense Strand to SEQ ID NO: 385899
aucuuuacccagcauuaca

SEQ ID NO: 385901 - RNA, 19 nt, Artificial Sequence
  Description of Artificial Sequence: Synthetic oligonucleotide
  Sense Strand Starting at position 853 of SEQ ID NO: 319175
ccuaccuuuguguaauuau

SEQ ID NO: 385902 - RNA, 19 nt, Artificial Sequence
  Description of Artificial Sequence: Synthetic oligonucleotide
  Antisense Strand to SEQ ID NO: 385901
auaauuacacaaagguagg

SEQ ID NO: 385903 - RNA, 19 nt, Artificial Sequence
  Description of Artificial Sequence: Synthetic oligonucleotide
  Sense Strand Starting at position 853 of SEQ ID NO: 319178
accuuuguguaauuaugac

SEQ ID NO: 385904 - RNA, 19 nt, Artificial Sequence
  Description of Artificial Sequence: Synthetic oligonucleotide
  Antisense Strand to SEQ ID NO: 385903
gucauaauuacacaaaggu

SEQ ID NO: 385905 - RNA, 19 nt, Artificial Sequence
  Description of Artificial Sequence: Synthetic oligonucleotide
  Sense Strand Starting at position 854 of SEQ ID NO: 315283
agcacaaagucaguuauca

SEQ ID NO: 385906 - RNA, 19 nt, Artificial Sequence
  Description of Artificial Sequence: Synthetic oligonucleotide
  Antisense Strand to SEQ ID NO: 385905
ugauaacugacuuugugcu

SEQ ID NO: 385907 - RNA, 19 nt, Artificial Sequence
  Description of Artificial Sequence: Synthetic oligonucleotide
  Sense Strand Starting at position 854 of SEQ ID NO: 315291
gucaguuaucaccacauaa

SEQ ID NO: 385908 - RNA, 19 nt, Artificial Sequence
  Description of Artificial Sequence: Synthetic oligonucleotide
  Antisense Strand to SEQ ID NO: 385907
uuauguggugauaacugac

SEQ ID NO: 385909 - RNA, 19 nt, Artificial Sequence
  Description of Artificial Sequence: Synthetic oligonucleotide
  Sense Strand Starting at position 854 of SEQ ID NO: 315339
gucuguguacuacauuacu

SEQ ID NO: 385910 - RNA, 19 nt, Artificial Sequence
  Description of Artificial Sequence: Synthetic oligonucleotide
  Antisense Strand to SEQ ID NO: 385909
aguaauguaguacacagac

SEQ ID NO: 385911 - RNA, 19 nt, Artificial Sequence
  Description of Artificial Sequence: Synthetic oligonucleotide
  Sense Strand Starting at position 854 of SEQ ID NO: 315342
uguguacuacauuacuuau

SEQ ID NO: 385912 - RNA, 19 nt, Artificial Sequence
  Description of Artificial Sequence: Synthetic oligonucleotide
  Antisense Strand to SEQ ID NO: 385911
auaaguaauguaguacaca

SEQ ID NO: 385913 - RNA, 19 nt, Artificial Sequence
  Description of Artificial Sequence: Synthetic oligonucleotide
  Sense Strand Starting at position 854 of SEQ ID NO: 315359
augguacauuauuccugau

SEQ ID NO: 385914 - RNA, 19 nt, Artificial Sequence
  Description of Artificial Sequence: Synthetic oligonucleotide
  Antisense Strand to SEQ ID NO: 385913
aucaggaauaauguaccau

SEQ ID NO: 385915 - RNA, 19 nt, Artificial Sequence
  Description of Artificial Sequence: Synthetic oligonucleotide
  Sense Strand Starting at position 854 of SEQ ID NO: 315459
ggaagauaauaccucuguu

SEQ ID NO: 385916 - RNA, 19 nt, Artificial Sequence
  Description of Artificial Sequence: Synthetic oligonucleotide
  Antisense Strand to SEQ ID NO: 385915
aacagagguauuaucuucc

SEQ ID NO: 385917 - RNA, 19 nt, Artificial Sequence
  Description of Artificial Sequence: Synthetic oligonucleotide
  Sense Strand Starting at position 854 of SEQ ID NO: 315463
gauaauaccucuguuccga

SEQ ID NO: 385918 - RNA, 19 nt, Artificial Sequence
  Description of Artificial Sequence: Synthetic oligonucleotide
  Antisense Strand to SEQ ID NO: 385917
ucggaacagagguauuauc

SEQ ID NO: 385919 - RNA, 19 nt, Artificial Sequence
  Description of Artificial Sequence: Synthetic oligonucleotide
  Sense Strand Starting at position 854 of SEQ ID NO: 315505
ugaagcacauuguugauaa

SEQ ID NO: 385920 - RNA, 19 nt, Artificial Sequence
  Description of Artificial Sequence: Synthetic oligonucleotide
  Antisense Strand to SEQ ID NO: 385919
uuaucaacaaugugcuuca

SEQ ID NO: 385921 - RNA, 19 nt, Artificial Sequence
  Description of Artificial Sequence: Synthetic oligonucleotide
  Sense Strand Starting at position 854 of SEQ ID NO: 315557
auagucugaugaucaacuu

SEQ ID NO: 385922 - RNA, 19 nt, Artificial Sequence
  Description of Artificial Sequence: Synthetic oligonucleotide
  Antisense Strand to SEQ ID NO: 385921
aaguugaucaucagacuau

SEQ ID NO: 385923 - RNA, 19 nt, Artificial Sequence
  Description of Artificial Sequence: Synthetic oligonucleotide
  Sense Strand Starting at position 854 of SEQ ID NO: 315605
acauguuaagaguaagcca

SEQ ID NO: 385924 - RNA, 19 nt, Artificial Sequence
  Description of Artificial Sequence: Synthetic oligonucleotide
  Antisense Strand to SEQ ID NO: 385923
uggcuuacucuuaacaugu

SEQ ID NO: 385925 - RNA, 19 nt, Artificial Sequence
  Description of Artificial Sequence: Synthetic oligonucleotide
  Sense Strand Starting at position 854 of SEQ ID NO: 315634
caugcuaaccuguauggau

SEQ ID NO: 385926 - RNA, 19 nt, Artificial Sequence
  Description of Artificial Sequence: Synthetic oligonucleotide
  Antisense Strand to SEQ ID NO: 385925
auccauacagguuagcaug

SEQ ID NO: 385927 - RNA, 19 nt, Artificial Sequence
  Description of Artificial Sequence: Synthetic oligonucleotide
  Sense Strand Starting at position 854 of SEQ ID NO: 315636
ugcuaaccuguauggauau

SEQ ID NO: 385928 - RNA, 19 nt, Artificial Sequence
  Description of Artificial Sequence: Synthetic oligonucleotide
  Antisense Strand to SEQ ID NO: 385927
auauccauacagguuagca

SEQ ID NO: 385929 - RNA, 19 nt, Artificial Sequence
  Description of Artificial Sequence: Synthetic oligonucleotide
  Sense Strand Starting at position 854 of SEQ ID NO: 315737
agcuauaacuggucauaau

SEQ ID NO: 385930 - RNA, 19 nt, Artificial Sequence
  Description of Artificial Sequence: Synthetic oligonucleotide
  Antisense Strand to SEQ ID NO: 385929
auuaugaccaguuauagcu

SEQ ID NO: 385931 - RNA, 19 nt, Artificial Sequence
  Description of Artificial Sequence: Synthetic oligonucleotide
  Sense Strand Starting at position 854 of SEQ ID NO: 315738
gcuauaacuggucauaauc

SEQ ID NO: 385932 - RNA, 19 nt, Artificial Sequence
  Description of Artificial Sequence: Synthetic oligonucleotide
  Antisense Strand to SEQ ID NO: 385931
gauuaugaccaguuauagc

SEQ ID NO: 385933 - RNA, 19 nt, Artificial Sequence
  Description of Artificial Sequence: Synthetic oligonucleotide
  Sense Strand Starting at position 854 of SEQ ID NO: 315746
uggucauaaucauuauaga

SEQ ID NO: 385934 - RNA, 19 nt, Artificial Sequence
  Description of Artificial Sequence: Synthetic oligonucleotide
  Antisense Strand to SEQ ID NO: 385933
ucuauaaugauuaugacca

SEQ ID NO: 385935 - RNA, 19 nt, Artificial Sequence
  Description of Artificial Sequence: Synthetic oligonucleotide
  Sense Strand Starting at position 854 of SEQ ID NO: 315982
cgauguuaccuccaagaaa

SEQ ID NO: 385936 - RNA, 19 nt, Artificial Sequence
  Description of Artificial Sequence: Synthetic oligonucleotide
  Antisense Strand to SEQ ID NO: 385935
uuucuuggagguaacaucg

SEQ ID NO: 385937 - RNA, 19 nt, Artificial Sequence
  Description of Artificial Sequence: Synthetic oligonucleotide
  Sense Strand Starting at position 854 of SEQ ID NO: 316018
ucuaguaaugggcacacua

SEQ ID NO: 385938 - RNA, 19 nt, Artificial Sequence
  Description of Artificial Sequence: Synthetic oligonucleotide
  Antisense Strand to SEQ ID NO: 385937
uagugugcccauuacuaga

SEQ ID NO: 385939 - RNA, 19 nt, Artificial Sequence
  Description of Artificial Sequence: Synthetic oligonucleotide
  Sense Strand Starting at position 854 of SEQ ID NO: 316171
ugggauauauuguuuaacu

SEQ ID NO: 385940 - RNA, 19 nt, Artificial Sequence
  Description of Artificial Sequence: Synthetic oligonucleotide
  Antisense Strand to SEQ ID NO: 385939
aguuaaacaauauauccca

SEQ ID NO: 385941 - RNA, 19 nt, Artificial Sequence
  Description of Artificial Sequence: Synthetic oligonucleotide
  Sense Strand Starting at position 854 of SEQ ID NO: 316172
gggauauauuguuuaacug

SEQ ID NO: 385942 - RNA, 19 nt, Artificial Sequence
  Description of Artificial Sequence: Synthetic oligonucleotide
  Antisense Strand to SEQ ID NO: 385941
caguuaaacaauauauccc

SEQ ID NO: 385943 - RNA, 19 nt, Artificial Sequence
  Description of Artificial Sequence: Synthetic oligonucleotide
  Sense Strand Starting at position 854 of SEQ ID NO: 316173
ggauauauuguuuaacugu

SEQ ID NO: 385944 - RNA, 19 nt, Artificial Sequence
  Description of Artificial Sequence: Synthetic oligonucleotide
  Antisense Strand to SEQ ID NO: 385943
acaguuaaacaauauaucc

SEQ ID NO: 385945 - RNA, 19 nt, Artificial Sequence
  Description of Artificial Sequence: Synthetic oligonucleotide
  Sense Strand Starting at position 854 of SEQ ID NO: 316235
aguagagucuaucauuuaa

SEQ ID NO: 385946 - RNA, 19 nt, Artificial Sequence
  Description of Artificial Sequence: Synthetic oligonucleotide
  Antisense Strand to SEQ ID NO: 385945
uuaaaugauagacucuacu

SEQ ID NO: 385947 - RNA, 19 nt, Artificial Sequence
  Description of Artificial Sequence: Synthetic oligonucleotide
  Sense Strand Starting at position 854 of SEQ ID NO: 316322
aucuuuccuuuauugagga

SEQ ID NO: 385948 - RNA, 19 nt, Artificial Sequence
  Description of Artificial Sequence: Synthetic oligonucleotide
  Antisense Strand to SEQ ID NO: 385947
uccucaauaaaggaaagau

SEQ ID NO: 385949 - RNA, 19 nt, Artificial Sequence
  Description of Artificial Sequence: Synthetic oligonucleotide
  Sense Strand Starting at position 854 of SEQ ID NO: 316662
cuuagagggccacaucauu

SEQ ID NO: 385950 - RNA, 19 nt, Artificial Sequence
  Description of Artificial Sequence: Synthetic oligonucleotide
  Antisense Strand to SEQ ID NO: 385949
aaugauguggcccucuaag

SEQ ID NO: 385951 - RNA, 19 nt, Artificial Sequence
  Description of Artificial Sequence: Synthetic oligonucleotide
  Sense Strand Starting at position 854 of SEQ ID NO: 317323
ggagucgugcagaggcuua

SEQ ID NO: 385952 - RNA, 19 nt, Artificial Sequence
  Description of Artificial Sequence: Synthetic oligonucleotide
  Antisense Strand to SEQ ID NO: 385951
uaagccucugcacgacucc

SEQ ID NO: 385953 - RNA, 19 nt, Artificial Sequence
  Description of Artificial Sequence: Synthetic oligonucleotide
  Sense Strand Starting at position 854 of SEQ ID NO: 317453
uagccaauaguaggagaau

SEQ ID NO: 385954 - RNA, 19 nt, Artificial Sequence
  Description of Artificial Sequence: Synthetic oligonucleotide
  Antisense Strand to SEQ ID NO: 385953
auucuccuacuauuggcua

SEQ ID NO: 385955 - RNA, 19 nt, Artificial Sequence
  Description of Artificial Sequence: Synthetic oligonucleotide
  Sense Strand Starting at position 854 of SEQ ID NO: 317464
aggagaauucccugccuuu

SEQ ID NO: 385956 - RNA, 19 nt, Artificial Sequence
  Description of Artificial Sequence: Synthetic oligonucleotide
  Antisense Strand to SEQ ID NO: 385955
aaaggcagggaauucuccu

SEQ ID NO: 385957 - RNA, 19 nt, Artificial Sequence
  Description of Artificial Sequence: Synthetic oligonucleotide
  Sense Strand Starting at position 854 of SEQ ID NO: 318705
gcaagaaauccguauuaaa

SEQ ID NO: 385958 - RNA, 19 nt, Artificial Sequence
  Description of Artificial Sequence: Synthetic oligonucleotide
  Antisense Strand to SEQ ID NO: 385957
uuuaauacggauuucuugc

SEQ ID NO: 385959 - RNA, 19 nt, Artificial Sequence
  Description of Artificial Sequence: Synthetic oligonucleotide
  Sense Strand Starting at position 854 of SEQ ID NO: 318753
uaggaugggcucugacuua

SEQ ID NO: 385960 - RNA, 19 nt, Artificial Sequence
  Description of Artificial Sequence: Synthetic oligonucleotide
  Antisense Strand to SEQ ID NO: 385959
uaagucagagcccauccua

SEQ ID NO: 385961 - RNA, 19 nt, Artificial Sequence
  Description of Artificial Sequence: Synthetic oligonucleotide
  Sense Strand Starting at position 854 of SEQ ID NO: 318924
guuaguuucucauuugugu

SEQ ID NO: 385962 - RNA, 19 nt, Artificial Sequence
  Description of Artificial Sequence: Synthetic oligonucleotide
  Antisense Strand to SEQ ID NO: 385961
acacaaaugagaaacuaac

SEQ ID NO: 385963 - RNA, 19 nt, Artificial Sequence
  Description of Artificial Sequence: Synthetic oligonucleotide
  Sense Strand Starting at position 854 of SEQ ID NO: 318931
ucucauuuguguccgauaa

SEQ ID NO: 385964 - RNA, 19 nt, Artificial Sequence
  Description of Artificial Sequence: Synthetic oligonucleotide
  Antisense Strand to SEQ ID NO: 385963
uuaucggacacaaaugaga

SEQ ID NO: 385965 - RNA, 19 nt, Artificial Sequence
  Description of Artificial Sequence: Synthetic oligonucleotide
  Sense Strand Starting at position 854 of SEQ ID NO: 318932
cucauuuguguccgauaau

SEQ ID NO: 385966 - RNA, 19 nt, Artificial Sequence
  Description of Artificial Sequence: Synthetic oligonucleotide
  Antisense Strand to SEQ ID NO: 385965
auuaucggacacaaaugag

SEQ ID NO: 385967 - RNA, 19 nt, Artificial Sequence
  Description of Artificial Sequence: Synthetic oligonucleotide
  Sense Strand Starting at position 854 of SEQ ID NO: 318977
uggaaagcugugugggaau

SEQ ID NO: 385968 - RNA, 19 nt, Artificial Sequence
  Description of Artificial Sequence: Synthetic oligonucleotide
  Antisense Strand to SEQ ID NO: 385967
auucccacacagcuuucca

SEQ ID NO: 385969 - RNA, 19 nt, Artificial Sequence
  Description of Artificial Sequence: Synthetic oligonucleotide
  Sense Strand Starting at position 854 of SEQ ID NO: 318979
gaaagcugugugggaaucu

SEQ ID NO: 385970 - RNA, 19 nt, Artificial Sequence
  Description of Artificial Sequence: Synthetic oligonucleotide
  Antisense Strand to SEQ ID NO: 385969
agauucccacacagcuuuc

SEQ ID NO: 385971 - RNA, 19 nt, Artificial Sequence
  Description of Artificial Sequence: Synthetic oligonucleotide
  Sense Strand Starting at position 854 of SEQ ID NO: 319032
cccuuaauauguguuauga

SEQ ID NO: 385972 - RNA, 19 nt, Artificial Sequence
  Description of Artificial Sequence: Synthetic oligonucleotide
  Antisense Strand to SEQ ID NO: 385971
ucauaacacauauuaaggg

SEQ ID NO: 385973 - RNA, 19 nt, Artificial Sequence
  Description of Artificial Sequence: Synthetic oligonucleotide
  Sense Strand Starting at position 854 of SEQ ID NO: 319094
guuuauucucgguauuaaa

SEQ ID NO: 385974 - RNA, 19 nt, Artificial Sequence
  Description of Artificial Sequence: Synthetic oligonucleotide
  Antisense Strand to SEQ ID NO: 385973
uuuaauaccgagaauaaac

SEQ ID NO: 385975 - RNA, 19 nt, Artificial Sequence
  Description of Artificial Sequence: Synthetic oligonucleotide
  Sense Strand Starting at position 854 of SEQ ID NO: 319155
auggaaauaaguuguaaug

SEQ ID NO: 385976 - RNA, 19 nt, Artificial Sequence
  Description of Artificial Sequence: Synthetic oligonucleotide
  Antisense Strand to SEQ ID NO: 385975
cauuacaacuuauuuccau

SEQ ID NO: 385977 - RNA, 19 nt, Artificial Sequence
  Description of Artificial Sequence: Synthetic oligonucleotide
  Sense Strand Starting at position 854 of SEQ ID NO: 319166
uuguaaugcuggguaaaga

SEQ ID NO: 385978 - RNA, 19 nt, Artificial Sequence
  Description of Artificial Sequence: Synthetic oligonucleotide
  Antisense Strand to SEQ ID NO: 385977
ucuuuacccagcauuacaa

SEQ ID NO: 385979 - RNA, 19 nt, Artificial Sequence
  Description of Artificial Sequence: Synthetic oligonucleotide
  Sense Strand Starting at position 854 of SEQ ID NO: 319167
uguaaugcuggguaaagau

SEQ ID NO: 385980 - RNA, 19 nt, Artificial Sequence
  Description of Artificial Sequence: Synthetic oligonucleotide
  Antisense Strand to SEQ ID NO: 385979
aucuuuacccagcauuaca

SEQ ID NO: 385981 - RNA, 19 nt, Artificial Sequence
  Description of Artificial Sequence: Synthetic oligonucleotide
  Sense Strand Starting at position 854 of SEQ ID NO: 319196
ccuaccuuuguguaauuau

SEQ ID NO: 385982 - RNA, 19 nt, Artificial Sequence
  Description of Artificial Sequence: Synthetic oligonucleotide
  Antisense Strand to SEQ ID NO: 385981
auaauuacacaaagguagg

SEQ ID NO: 385983 - RNA, 19 nt, Artificial Sequence
  Description of Artificial Sequence: Synthetic oligonucleotide
  Sense Strand Starting at position 854 of SEQ ID NO: 319199
accuuuguguaauuaugac

SEQ ID NO: 385984 - RNA, 19 nt, Artificial Sequence
  Description of Artificial Sequence: Synthetic oligonucleotide
  Antisense Strand to SEQ ID NO: 385983
gucauaauuacacaaaggu

SEQ ID NO: 385985 - RNA, 19 nt, Artificial Sequence
  Description of Artificial Sequence: Synthetic oligonucleotide
  Sense Strand Starting at position 855 of SEQ ID NO: 315326
ggacucaucuugcuuugau

SEQ ID NO: 385986 - RNA, 19 nt, Artificial Sequence
  Description of Artificial Sequence: Synthetic oligonucleotide
  Antisense Strand to SEQ ID NO: 385985
aucaaagcaagaugagucc

SEQ ID NO: 385987 - RNA, 19 nt, Artificial Sequence
  Description of Artificial Sequence: Synthetic oligonucleotide
  Sense Strand Starting at position 855 of SEQ ID NO: 315416
caucauaaaugggugcaaa

SEQ ID NO: 385988 - RNA, 19 nt, Artificial Sequence
  Description of Artificial Sequence: Synthetic oligonucleotide
  Antisense Strand to SEQ ID NO: 385987
uuugcacccauuuaugaug

SEQ ID NO: 385989 - RNA, 19 nt, Artificial Sequence
  Description of Artificial Sequence: Synthetic oligonucleotide
  Sense Strand Starting at position 855 of SEQ ID NO: 315492
cuguaagauacugaguguu

SEQ ID NO: 385990 - RNA, 19 nt, Artificial Sequence
  Description of Artificial Sequence: Synthetic oligonucleotide
  Antisense Strand to SEQ ID NO: 385989
aacacucaguaucuuacag

SEQ ID NO: 385991 - RNA, 19 nt, Artificial Sequence
  Description of Artificial Sequence: Synthetic oligonucleotide
  Sense Strand Starting at position 855 of SEQ ID NO: 315513
ggacgauuguuauuacacu

SEQ ID NO: 385992 - RNA, 19 nt, Artificial Sequence
  Description of Artificial Sequence: Synthetic oligonucleotide
  Antisense Strand to SEQ ID NO: 385991
aguguaauaacaaucgucc

SEQ ID NO: 385993 - RNA, 19 nt, Artificial Sequence
  Description of Artificial Sequence: Synthetic oligonucleotide
  Sense Strand Starting at position 855 of SEQ ID NO: 315558
aaagcuuucgagggaagca

SEQ ID NO: 385994 - RNA, 19 nt, Artificial Sequence
  Description of Artificial Sequence: Synthetic oligonucleotide
  Antisense Strand to SEQ ID NO: 385993
ugcuucccucgaaagcuuu

SEQ ID NO: 385995 - RNA, 19 nt, Artificial Sequence
  Description of Artificial Sequence: Synthetic oligonucleotide
  Sense Strand Starting at position 855 of SEQ ID NO: 315559
aagcuuucgagggaagcau

SEQ ID NO: 385996 - RNA, 19 nt, Artificial Sequence
  Description of Artificial Sequence: Synthetic oligonucleotide
  Antisense Strand to SEQ ID NO: 385995
augcuucccucgaaagcuu

SEQ ID NO: 385997 - RNA, 19 nt, Artificial Sequence
  Description of Artificial Sequence: Synthetic oligonucleotide
  Sense Strand Starting at position 855 of SEQ ID NO: 315586
caagacgaucuccagugau

SEQ ID NO: 385998 - RNA, 19 nt, Artificial Sequence
  Description of Artificial Sequence: Synthetic oligonucleotide
  Antisense Strand to SEQ ID NO: 385997
aucacuggagaucgucuug

SEQ ID NO: 385999 - RNA, 19 nt, Artificial Sequence
  Description of Artificial Sequence: Synthetic oligonucleotide
  Sense Strand Starting at position 855 of SEQ ID NO: 315589
gacgaucuccagugauacc

SEQ ID NO: 386000 - RNA, 19 nt, Artificial Sequence
  Description of Artificial Sequence: Synthetic oligonucleotide
  Antisense Strand to SEQ ID NO: 385999
gguaucacuggagaucguc

SEQ ID NO: 386001 - RNA, 19 nt, Artificial Sequence
  Description of Artificial Sequence: Synthetic oligonucleotide
  Sense Strand Starting at position 855 of SEQ ID NO: 316012
ugcuacuuggauuggaaua

SEQ ID NO: 386002 - RNA, 19 nt, Artificial Sequence
  Description of Artificial Sequence: Synthetic oligonucleotide
  Antisense Strand to SEQ ID NO: 386001
uauuccaauccaaguagca

SEQ ID NO: 386003 - RNA, 19 nt, Artificial Sequence
  Description of Artificial Sequence: Synthetic oligonucleotide
  Sense Strand Starting at position 855 of SEQ ID NO: 316036
gugauucuccugugaaaca

SEQ ID NO: 386004 - RNA, 19 nt, Artificial Sequence
  Description of Artificial Sequence: Synthetic oligonucleotide
  Antisense Strand to SEQ ID NO: 386003
uguuucacaggagaaucac

SEQ ID NO: 386005 - RNA, 19 nt, Artificial Sequence
  Description of Artificial Sequence: Synthetic oligonucleotide
  Sense Strand Starting at position 855 of SEQ ID NO: 316170
auuaaaucagcaugagcua

SEQ ID NO: 386006 - RNA, 19 nt, Artificial Sequence
  Description of Artificial Sequence: Synthetic oligonucleotide
  Antisense Strand to SEQ ID NO: 386005
uagcucaugcugauuuaau

SEQ ID NO: 386007 - RNA, 19 nt, Artificial Sequence
  Description of Artificial Sequence: Synthetic oligonucleotide
  Sense Strand Starting at position 855 of SEQ ID NO: 316171
uuaaaucagcaugagcuaa

SEQ ID NO: 386008 - RNA, 19 nt, Artificial Sequence
  Description of Artificial Sequence: Synthetic oligonucleotide
  Antisense Strand to SEQ ID NO: 386007
uuagcucaugcugauuuaa

SEQ ID NO: 386009 - RNA, 19 nt, Artificial Sequence
  Description of Artificial Sequence: Synthetic oligonucleotide
  Sense Strand Starting at position 855 of SEQ ID NO: 316215
uuacucuacuguguauaua

SEQ ID NO: 386010 - RNA, 19 nt, Artificial Sequence
  Description of Artificial Sequence: Synthetic oligonucleotide
  Antisense Strand to SEQ ID NO: 386009
uauauacacaguagaguaa

SEQ ID NO: 386011 - RNA, 19 nt, Artificial Sequence
  Description of Artificial Sequence: Synthetic oligonucleotide
  Sense Strand Starting at position 855 of SEQ ID NO: 316229
auauaucuguuugugaaca

SEQ ID NO: 386012 - RNA, 19 nt, Artificial Sequence
  Description of Artificial Sequence: Synthetic oligonucleotide
  Antisense Strand to SEQ ID NO: 386011
uguucacaaacagauauau

SEQ ID NO: 386013 - RNA, 19 nt, Artificial Sequence
  Description of Artificial Sequence: Synthetic oligonucleotide
  Sense Strand Starting at position 855 of SEQ ID NO: 316279
ucaacuauguaacuagagu

SEQ ID NO: 386014 - RNA, 19 nt, Artificial Sequence
  Description of Artificial Sequence: Synthetic oligonucleotide
  Antisense Strand to SEQ ID NO: 386013
acucuaguuacauaguuga

SEQ ID NO: 386015 - RNA, 19 nt, Artificial Sequence
  Description of Artificial Sequence: Synthetic oligonucleotide
  Sense Strand Starting at position 855 of SEQ ID NO: 316398
augagcugaucagacauuu

SEQ ID NO: 386016 - RNA, 19 nt, Artificial Sequence
  Description of Artificial Sequence: Synthetic oligonucleotide
  Antisense Strand to SEQ ID NO: 386015
aaaugucugaucagcucau

SEQ ID NO: 386017 - RNA, 19 nt, Artificial Sequence
  Description of Artificial Sequence: Synthetic oligonucleotide
  Sense Strand Starting at position 855 of SEQ ID NO: 316551
agugaagacuaguucuaag

SEQ ID NO: 386018 - RNA, 19 nt, Artificial Sequence
  Description of Artificial Sequence: Synthetic oligonucleotide
  Antisense Strand to SEQ ID NO: 386017
cuuagaacuagucuucacu

SEQ ID NO: 386019 - RNA, 19 nt, Artificial Sequence
  Description of Artificial Sequence: Synthetic oligonucleotide
  Sense Strand Starting at position 855 of SEQ ID NO: 317413
guaagaguauuccuccacu

SEQ ID NO: 386020 - RNA, 19 nt, Artificial Sequence
  Description of Artificial Sequence: Synthetic oligonucleotide
  Antisense Strand to SEQ ID NO: 386019
aguggaggaauacucuuac

SEQ ID NO: 386021 - RNA, 19 nt, Artificial Sequence
  Description of Artificial Sequence: Synthetic oligonucleotide
  Sense Strand Starting at position 855 of SEQ ID NO: 317416
agaguauuccuccacucga

SEQ ID NO: 386022 - RNA, 19 nt, Artificial Sequence
  Description of Artificial Sequence: Synthetic oligonucleotide
  Antisense Strand to SEQ ID NO: 386021
ucgaguggaggaauacucu

SEQ ID NO: 386023 - RNA, 19 nt, Artificial Sequence
  Description of Artificial Sequence: Synthetic oligonucleotide
  Sense Strand Starting at position 855 of SEQ ID NO: 317510
ggguuauugugaccuauga

SEQ ID NO: 386024 - RNA, 19 nt, Artificial Sequence
  Description of Artificial Sequence: Synthetic oligonucleotide
  Antisense Strand to SEQ ID NO: 386023
ucauaggucacaauaaccc

SEQ ID NO: 386025 - RNA, 19 nt, Artificial Sequence
  Description of Artificial Sequence: Synthetic oligonucleotide
  Sense Strand Starting at position 855 of SEQ ID NO: 317512
guuauugugaccuaugaug

SEQ ID NO: 386026 - RNA, 19 nt, Artificial Sequence
  Description of Artificial Sequence: Synthetic oligonucleotide
  Antisense Strand to SEQ ID NO: 386025
caucauaggucacaauaac

SEQ ID NO: 386027 - RNA, 19 nt, Artificial Sequence
  Description of Artificial Sequence: Synthetic oligonucleotide
  Sense Strand Starting at position 855 of SEQ ID NO: 317514
uauugugaccuaugauguu

SEQ ID NO: 386028 - RNA, 19 nt, Artificial Sequence
  Description of Artificial Sequence: Synthetic oligonucleotide
  Antisense Strand to SEQ ID NO: 386027
aacaucauaggucacaaua

SEQ ID NO: 386029 - RNA, 19 nt, Artificial Sequence
  Description of Artificial Sequence: Synthetic oligonucleotide
  Sense Strand Starting at position 855 of SEQ ID NO: 317663
gugcuugggacuuaggaga

SEQ ID NO: 386030 - RNA, 19 nt, Artificial Sequence
  Description of Artificial Sequence: Synthetic oligonucleotide
  Antisense Strand to SEQ ID NO: 386029
ucuccuaagucccaagcac

SEQ ID NO: 386031 - RNA, 19 nt, Artificial Sequence
  Description of Artificial Sequence: Synthetic oligonucleotide
  Sense Strand Starting at position 855 of SEQ ID NO: 317681
auguuaagaucgcuuggag

SEQ ID NO: 386032 - RNA, 19 nt, Artificial Sequence
  Description of Artificial Sequence: Synthetic oligonucleotide
  Antisense Strand to SEQ ID NO: 386031
cuccaagcgaucuuaacau

SEQ ID NO: 386033 - RNA, 19 nt, Artificial Sequence
  Description of Artificial Sequence: Synthetic oligonucleotide
  Sense Strand Starting at position 855 of SEQ ID NO: 317819
ccuguaauuugagaagaug

SEQ ID NO: 386034 - RNA, 19 nt, Artificial Sequence
  Description of Artificial Sequence: Synthetic oligonucleotide
  Antisense Strand to SEQ ID NO: 386033
caucuucucaaauuacagg

SEQ ID NO: 386035 - RNA, 19 nt, Artificial Sequence
  Description of Artificial Sequence: Synthetic oligonucleotide
  Sense Strand Starting at position 855 of SEQ ID NO: 317828
ugagaagaugcuugauauc

SEQ ID NO: 386036 - RNA, 19 nt, Artificial Sequence
  Description of Artificial Sequence: Synthetic oligonucleotide
  Antisense Strand to SEQ ID NO: 386035
gauaucaagcaucuucuca

SEQ ID NO: 386037 - RNA, 19 nt, Artificial Sequence
  Description of Artificial Sequence: Synthetic oligonucleotide
  Sense Strand Starting at position 855 of SEQ ID NO: 318015
ugaguaagcaggcaucaaa

SEQ ID NO: 386038 - RNA, 19 nt, Artificial Sequence
  Description of Artificial Sequence: Synthetic oligonucleotide
  Antisense Strand to SEQ ID NO: 386037
uuugaugccugcuuacuca

SEQ ID NO: 386039 - RNA, 19 nt, Artificial Sequence
  Description of Artificial Sequence: Synthetic oligonucleotide
  Sense Strand Starting at position 855 of SEQ ID NO: 318040
agaaacuuguuguccaagu

SEQ ID NO: 386040 - RNA, 19 nt, Artificial Sequence
  Description of Artificial Sequence: Synthetic oligonucleotide
  Antisense Strand to SEQ ID NO: 386039
acuuggacaacaaguuucu

SEQ ID NO: 386041 - RNA, 19 nt, Artificial Sequence
  Description of Artificial Sequence: Synthetic oligonucleotide
  Sense Strand Starting at position 855 of SEQ ID NO: 318047
uguuguccaaguugaagaa

SEQ ID NO: 386042 - RNA, 19 nt, Artificial Sequence
  Description of Artificial Sequence: Synthetic oligonucleotide
  Antisense Strand to SEQ ID NO: 386041
uucuucaacuuggacaaca

SEQ ID NO: 386043 - RNA, 19 nt, Artificial Sequence
  Description of Artificial Sequence: Synthetic oligonucleotide
  Sense Strand Starting at position 855 of SEQ ID NO: 318048
guuguccaaguugaagaau

SEQ ID NO: 386044 - RNA, 19 nt, Artificial Sequence
  Description of Artificial Sequence: Synthetic oligonucleotide
  Antisense Strand to SEQ ID NO: 386043
auucuucaacuuggacaac

SEQ ID NO: 386045 - RNA, 19 nt, Artificial Sequence
  Description of Artificial Sequence: Synthetic oligonucleotide
  Sense Strand Starting at position 855 of SEQ ID NO: 318164
uuugaugggauguaguaua

SEQ ID NO: 386046 - RNA, 19 nt, Artificial Sequence
  Description of Artificial Sequence: Synthetic oligonucleotide
  Antisense Strand to SEQ ID NO: 386045
uauacuacaucccaucaaa

SEQ ID NO: 386047 - RNA, 19 nt, Artificial Sequence
  Description of Artificial Sequence: Synthetic oligonucleotide
  Sense Strand Starting at position 855 of SEQ ID NO: 318169
ugggauguaguauacagua

SEQ ID NO: 386048 - RNA, 19 nt, Artificial Sequence
  Description of Artificial Sequence: Synthetic oligonucleotide
  Antisense Strand to SEQ ID NO: 386047
uacuguauacuacauccca

SEQ ID NO: 386049 - RNA, 19 nt, Artificial Sequence
  Description of Artificial Sequence: Synthetic oligonucleotide
  Sense Strand Starting at position 855 of SEQ ID NO: 318326
gugaaacauucugcaggau

SEQ ID NO: 386050 - RNA, 19 nt, Artificial Sequence
  Description of Artificial Sequence: Synthetic oligonucleotide
  Antisense Strand to SEQ ID NO: 386049
auccugcagaauguuucac

SEQ ID NO: 386051 - RNA, 19 nt, Artificial Sequence
  Description of Artificial Sequence: Synthetic oligonucleotide
  Sense Strand Starting at position 855 of SEQ ID NO: 318411
gacauaacaguuugaauug

SEQ ID NO: 386052 - RNA, 19 nt, Artificial Sequence
  Description of Artificial Sequence: Synthetic oligonucleotide
  Antisense Strand to SEQ ID NO: 386051
caauucaaacuguuauguc

SEQ ID NO: 386053 - RNA, 19 nt, Artificial Sequence
  Description of Artificial Sequence: Synthetic oligonucleotide
  Sense Strand Starting at position 855 of SEQ ID NO: 318437
guuugaacagacugucuau

SEQ ID NO: 386054 - RNA, 19 nt, Artificial Sequence
  Description of Artificial Sequence: Synthetic oligonucleotide
  Antisense Strand to SEQ ID NO: 386053
auagacagucuguucaaac

SEQ ID NO: 386055 - RNA, 19 nt, Artificial Sequence
  Description of Artificial Sequence: Synthetic oligonucleotide
  Sense Strand Starting at position 855 of SEQ ID NO: 318491
uguagauggacugaguauu

SEQ ID NO: 386056 - RNA, 19 nt, Artificial Sequence
  Description of Artificial Sequence: Synthetic oligonucleotide
  Antisense Strand to SEQ ID NO: 386055
aauacucaguccaucuaca

SEQ ID NO: 386057 - RNA, 19 nt, Artificial Sequence
  Description of Artificial Sequence: Synthetic oligonucleotide
  Sense Strand Starting at position 855 of SEQ ID NO: 318565
cacgaaauaguauguuaca

SEQ ID NO: 386058 - RNA, 19 nt, Artificial Sequence
  Description of Artificial Sequence: Synthetic oligonucleotide
  Antisense Strand to SEQ ID NO: 386057
uguaacauacuauuucgug

SEQ ID NO: 386059 - RNA, 19 nt, Artificial Sequence
  Description of Artificial Sequence: Synthetic oligonucleotide
  Sense Strand Starting at position 855 of SEQ ID NO: 318668
auugguaaucuuuggaagu

SEQ ID NO: 386060 - RNA, 19 nt, Artificial Sequence
  Description of Artificial Sequence: Synthetic oligonucleotide
  Antisense Strand to SEQ ID NO: 386059
acuuccaaagauuaccaau

SEQ ID NO: 386061 - RNA, 19 nt, Artificial Sequence
  Description of Artificial Sequence: Synthetic oligonucleotide
  Sense Strand Starting at position 855 of SEQ ID NO: 318968
acuggauuucgcgauguug

SEQ ID NO: 386062 - RNA, 19 nt, Artificial Sequence
  Description of Artificial Sequence: Synthetic oligonucleotide
  Antisense Strand to SEQ ID NO: 386061
caacaucgcgaaauccagu

SEQ ID NO: 386063 - RNA, 19 nt, Artificial Sequence
  Description of Artificial Sequence: Synthetic oligonucleotide
  Sense Strand Starting at position 855 of SEQ ID NO: 319154
uuggcugaugcauaaagaa

SEQ ID NO: 386064 - RNA, 19 nt, Artificial Sequence
  Description of Artificial Sequence: Synthetic oligonucleotide
  Antisense Strand to SEQ ID NO: 386063
uucuuuaugcaucagccaa

SEQ ID NO: 386065 - RNA, 19 nt, Artificial Sequence
  Description of Artificial Sequence: Synthetic oligonucleotide
  Sense Strand Starting at position 856 of SEQ ID NO: 315242
ucuuauaaggugcaugaaa

SEQ ID NO: 386066 - RNA, 19 nt, Artificial Sequence
  Description of Artificial Sequence: Synthetic oligonucleotide
  Antisense Strand to SEQ ID NO: 386065
uuucaugcaccuuauaaga

SEQ ID NO: 386067 - RNA, 19 nt, Artificial Sequence
  Description of Artificial Sequence: Synthetic oligonucleotide
  Sense Strand Starting at position 856 of SEQ ID NO: 315244
uuauaaggugcaugaaaca

SEQ ID NO: 386068 - RNA, 19 nt, Artificial Sequence
  Description of Artificial Sequence: Synthetic oligonucleotide
  Antisense Strand to SEQ ID NO: 386067
uguuucaugcaccuuauaa

SEQ ID NO: 386069 - RNA, 19 nt, Artificial Sequence
  Description of Artificial Sequence: Synthetic oligonucleotide
  Sense Strand Starting at position 856 of SEQ ID NO: 315482
gugcuuggcaaguaguaaa

SEQ ID NO: 386070 - RNA, 19 nt, Artificial Sequence
  Description of Artificial Sequence: Synthetic oligonucleotide
  Antisense Strand to SEQ ID NO: 386069
uuuacuacuugccaagcac

SEQ ID NO: 386071 - RNA, 19 nt, Artificial Sequence
  Description of Artificial Sequence: Synthetic oligonucleotide
  Sense Strand Starting at position 856 of SEQ ID NO: 315510
cuacuauuguucuugcauu

SEQ ID NO: 386072 - RNA, 19 nt, Artificial Sequence
  Description of Artificial Sequence: Synthetic oligonucleotide
  Antisense Strand to SEQ ID NO: 386071
aaugcaagaacaauaguag

SEQ ID NO: 386073 - RNA, 19 nt, Artificial Sequence
  Description of Artificial Sequence: Synthetic oligonucleotide
  Sense Strand Starting at position 856 of SEQ ID NO: 315531
gcgugugucccucucgcua

SEQ ID NO: 386074 - RNA, 19 nt, Artificial Sequence
  Description of Artificial Sequence: Synthetic oligonucleotide
  Antisense Strand to SEQ ID NO: 386073
uagcgagagggacacacgc

SEQ ID NO: 386075 - RNA, 19 nt, Artificial Sequence
  Description of Artificial Sequence: Synthetic oligonucleotide
  Sense Strand Starting at position 856 of SEQ ID NO: 315538
ucccucucgcuagauugua

SEQ ID NO: 386076 - RNA, 19 nt, Artificial Sequence
  Description of Artificial Sequence: Synthetic oligonucleotide
  Antisense Strand to SEQ ID NO: 386075
uacaaucuagcgagaggga

SEQ ID NO: 386077 - RNA, 19 nt, Artificial Sequence
  Description of Artificial Sequence: Synthetic oligonucleotide
  Sense Strand Starting at position 856 of SEQ ID NO: 315546
gcuagauuguaagcacugu

SEQ ID NO: 386078 - RNA, 19 nt, Artificial Sequence
  Description of Artificial Sequence: Synthetic oligonucleotide
  Antisense Strand to SEQ ID NO: 386077
acagugcuuacaaucuagc

SEQ ID NO: 386079 - RNA, 19 nt, Artificial Sequence
  Description of Artificial Sequence: Synthetic oligonucleotide
  Sense Strand Starting at position 856 of SEQ ID NO: 315651
agaguaaacuuugugcuga

SEQ ID NO: 386080 - RNA, 19 nt, Artificial Sequence
  Description of Artificial Sequence: Synthetic oligonucleotide
  Antisense Strand to SEQ ID NO: 386079
ucagcacaaaguuuacucu

SEQ ID NO: 386081 - RNA, 19 nt, Artificial Sequence
  Description of Artificial Sequence: Synthetic oligonucleotide
  Sense Strand Starting at position 856 of SEQ ID NO: 315659
cuuugugcugaagauacaa

SEQ ID NO: 386082 - RNA, 19 nt, Artificial Sequence
  Description of Artificial Sequence: Synthetic oligonucleotide
  Antisense Strand to SEQ ID NO: 386081
uuguaucuucagcacaaag

SEQ ID NO: 386083 - RNA, 19 nt, Artificial Sequence
  Description of Artificial Sequence: Synthetic oligonucleotide
  Sense Strand Starting at position 856 of SEQ ID NO: 315766
gggacaguaugugaagaga

SEQ ID NO: 386084 - RNA, 19 nt, Artificial Sequence
  Description of Artificial Sequence: Synthetic oligonucleotide
  Antisense Strand to SEQ ID NO: 386083
ucucuucacauacuguccc

SEQ ID NO: 386085 - RNA, 19 nt, Artificial Sequence
  Description of Artificial Sequence: Synthetic oligonucleotide
  Sense Strand Starting at position 856 of SEQ ID NO: 317282
cacgcaugucuguaauacu

SEQ ID NO: 386086 - RNA, 19 nt, Artificial Sequence
  Description of Artificial Sequence: Synthetic oligonucleotide
  Antisense Strand to SEQ ID NO: 386085
aguauuacagacaugcgug

SEQ ID NO: 386087 - RNA, 19 nt, Artificial Sequence
  Description of Artificial Sequence: Synthetic oligonucleotide
  Sense Strand Starting at position 856 of SEQ ID NO: 317328
aggucagaauuauagggaa

SEQ ID NO: 386088 - RNA, 19 nt, Artificial Sequence
  Description of Artificial Sequence: Synthetic oligonucleotide
  Antisense Strand to SEQ ID NO: 386087
uucccuauaauucugaccu

SEQ ID NO: 386089 - RNA, 19 nt, Artificial Sequence
  Description of Artificial Sequence: Synthetic oligonucleotide
  Sense Strand Starting at position 856 of SEQ ID NO: 317330
gucagaauuauagggaagu

SEQ ID NO: 386090 - RNA, 19 nt, Artificial Sequence
  Description of Artificial Sequence: Synthetic oligonucleotide
  Antisense Strand to SEQ ID NO: 386089
acuucccuauaauucugac

SEQ ID NO: 386091 - RNA, 19 nt, Artificial Sequence
  Description of Artificial Sequence: Synthetic oligonucleotide
  Sense Strand Starting at position 856 of SEQ ID NO: 317356
auauaaaggugucagagga

SEQ ID NO: 386092 - RNA, 19 nt, Artificial Sequence
  Description of Artificial Sequence: Synthetic oligonucleotide
  Antisense Strand to SEQ ID NO: 386091
uccucugacaccuuuauau

SEQ ID NO: 386093 - RNA, 19 nt, Artificial Sequence
  Description of Artificial Sequence: Synthetic oligonucleotide
  Sense Strand Starting at position 856 of SEQ ID NO: 317486
guggacaccugucuuggaa

SEQ ID NO: 386094 - RNA, 19 nt, Artificial Sequence
  Description of Artificial Sequence: Synthetic oligonucleotide
  Antisense Strand to SEQ ID NO: 386093
uuccaagacagguguccac

SEQ ID NO: 386095 - RNA, 19 nt, Artificial Sequence
  Description of Artificial Sequence: Synthetic oligonucleotide
  Sense Strand Starting at position 856 of SEQ ID NO: 317579
cgagcuuuacucgcagugu

SEQ ID NO: 386096 - RNA, 19 nt, Artificial Sequence
  Description of Artificial Sequence: Synthetic oligonucleotide
  Antisense Strand to SEQ ID NO: 386095
acacugcgaguaaagcucg

SEQ ID NO: 386097 - RNA, 19 nt, Artificial Sequence
  Description of Artificial Sequence: Synthetic oligonucleotide
  Sense Strand Starting at position 856 of SEQ ID NO: 317582
gcuuuacucgcagugugga

SEQ ID NO: 386098 - RNA, 19 nt, Artificial Sequence
  Description of Artificial Sequence: Synthetic oligonucleotide
  Antisense Strand to SEQ ID NO: 386097
uccacacugcgaguaaagc

SEQ ID NO: 386099 - RNA, 19 nt, Artificial Sequence
  Description of Artificial Sequence: Synthetic oligonucleotide
  Sense Strand Starting at position 856 of SEQ ID NO: 317717
gguaguuaacaacgaacga

SEQ ID NO: 386100 - RNA, 19 nt, Artificial Sequence
  Description of Artificial Sequence: Synthetic oligonucleotide
  Antisense Strand to SEQ ID NO: 386099
ucguucguuguuaacuacc

SEQ ID NO: 386101 - RNA, 19 nt, Artificial Sequence
  Description of Artificial Sequence: Synthetic oligonucleotide
  Sense Strand Starting at position 856 of SEQ ID NO: 317718
guaguuaacaacgaacgau

SEQ ID NO: 386102 - RNA, 19 nt, Artificial Sequence
  Description of Artificial Sequence: Synthetic oligonucleotide
  Antisense Strand to SEQ ID NO: 386101
aucguucguuguuaacuac

SEQ ID NO: 386103 - RNA, 19 nt, Artificial Sequence
  Description of Artificial Sequence: Synthetic oligonucleotide
  Sense Strand Starting at position 856 of SEQ ID NO: 317721
guuaacaacgaacgauaua

SEQ ID NO: 386104 - RNA, 19 nt, Artificial Sequence
  Description of Artificial Sequence: Synthetic oligonucleotide
  Antisense Strand to SEQ ID NO: 386103
uauaucguucguuguuaac

SEQ ID NO: 386105 - RNA, 19 nt, Artificial Sequence
  Description of Artificial Sequence: Synthetic oligonucleotide
  Sense Strand Starting at position 856 of SEQ ID NO: 317749
cguuuagugagcgcagacu

SEQ ID NO: 386106 - RNA, 19 nt, Artificial Sequence
  Description of Artificial Sequence: Synthetic oligonucleotide
  Antisense Strand to SEQ ID NO: 386105
agucugcgcucacuaaacg

SEQ ID NO: 386107 - RNA, 19 nt, Artificial Sequence
  Description of Artificial Sequence: Synthetic oligonucleotide
  Sense Strand Starting at position 856 of SEQ ID NO: 317802
gccucauaguucuuaugag

SEQ ID NO: 386108 - RNA, 19 nt, Artificial Sequence
  Description of Artificial Sequence: Synthetic oligonucleotide
  Antisense Strand to SEQ ID NO: 386107
cucauaagaacuaugaggc

SEQ ID NO: 386109 - RNA, 19 nt, Artificial Sequence
  Description of Artificial Sequence: Synthetic oligonucleotide
  Sense Strand Starting at position 856 of SEQ ID NO: 317810
guucuuaugagguaggucu

SEQ ID NO: 386110 - RNA, 19 nt, Artificial Sequence
  Description of Artificial Sequence: Synthetic oligonucleotide
  Antisense Strand to SEQ ID NO: 386109
agaccuaccucauaagaac

SEQ ID NO: 386111 - RNA, 19 nt, Artificial Sequence
  Description of Artificial Sequence: Synthetic oligonucleotide
  Sense Strand Starting at position 856 of SEQ ID NO: 317817
ugagguaggucucuuuauc

SEQ ID NO: 386112 - RNA, 19 nt, Artificial Sequence
  Description of Artificial Sequence: Synthetic oligonucleotide
  Antisense Strand to SEQ ID NO: 386111
gauaaagagaccuaccuca

SEQ ID NO: 386113 - RNA, 19 nt, Artificial Sequence
  Description of Artificial Sequence: Synthetic oligonucleotide
  Sense Strand Starting at position 856 of SEQ ID NO: 317859
ccgagauauuaccugcuca

SEQ ID NO: 386114 - RNA, 19 nt, Artificial Sequence
  Description of Artificial Sequence: Synthetic oligonucleotide
  Antisense Strand to SEQ ID NO: 386113
ugagcagguaauaucucgg

SEQ ID NO: 386115 - RNA, 19 nt, Artificial Sequence
  Description of Artificial Sequence: Synthetic oligonucleotide
  Sense Strand Starting at position 856 of SEQ ID NO: 317860
cgagauauuaccugcucag

SEQ ID NO: 386116 - RNA, 19 nt, Artificial Sequence
  Description of Artificial Sequence: Synthetic oligonucleotide
  Antisense Strand to SEQ ID NO: 386115
cugagcagguaauaucucg

SEQ ID NO: 386117 - RNA, 19 nt, Artificial Sequence
  Description of Artificial Sequence: Synthetic oligonucleotide
  Sense Strand Starting at position 856 of SEQ ID NO: 317863
gauauuaccugcucagggu

SEQ ID NO: 386118 - RNA, 19 nt, Artificial Sequence
  Description of Artificial Sequence: Synthetic oligonucleotide
  Antisense Strand to SEQ ID NO: 386117
acccugagcagguaauauc

SEQ ID NO: 386119 - RNA, 19 nt, Artificial Sequence
  Description of Artificial Sequence: Synthetic oligonucleotide
  Sense Strand Starting at position 856 of SEQ ID NO: 318075
agagccacccaguguuuau

SEQ ID NO: 386120 - RNA, 19 nt, Artificial Sequence
  Description of Artificial Sequence: Synthetic oligonucleotide
  Antisense Strand to SEQ ID NO: 386119
auaaacacuggguggcucu

SEQ ID NO: 386121 - RNA, 19 nt, Artificial Sequence
  Description of Artificial Sequence: Synthetic oligonucleotide
  Sense Strand Starting at position 856 of SEQ ID NO: 318195
ggcauauauuaagaaauag

SEQ ID NO: 386122 - RNA, 19 nt, Artificial Sequence
  Description of Artificial Sequence: Synthetic oligonucleotide
  Antisense Strand to SEQ ID NO: 386121
cuauuucuuaauauaugcc

SEQ ID NO: 386123 - RNA, 19 nt, Artificial Sequence
  Description of Artificial Sequence: Synthetic oligonucleotide
  Sense Strand Starting at position 856 of SEQ ID NO: 318207
gaaauaguuguuuaucugu

SEQ ID NO: 386124 - RNA, 19 nt, Artificial Sequence
  Description of Artificial Sequence: Synthetic oligonucleotide
  Antisense Strand to SEQ ID NO: 386123
acagauaaacaacuauuuc

SEQ ID NO: 386125 - RNA, 19 nt, Artificial Sequence
  Description of Artificial Sequence: Synthetic oligonucleotide
  Sense Strand Starting at position 856 of SEQ ID NO: 318527
uaaggaaucgugcacuuua

SEQ ID NO: 386126 - RNA, 19 nt, Artificial Sequence
  Description of Artificial Sequence: Synthetic oligonucleotide
  Antisense Strand to SEQ ID NO: 386125
uaaagugcacgauuccuua

SEQ ID NO: 386127 - RNA, 19 nt, Artificial Sequence
  Description of Artificial Sequence: Synthetic oligonucleotide
  Sense Strand Starting at position 856 of SEQ ID NO: 318789
ggaggucauagugaguuga

SEQ ID NO: 386128 - RNA, 19 nt, Artificial Sequence
  Description of Artificial Sequence: Synthetic oligonucleotide
  Antisense Strand to SEQ ID NO: 386127
ucaacucacuaugaccucc

SEQ ID NO: 386129 - RNA, 19 nt, Artificial Sequence
  Description of Artificial Sequence: Synthetic oligonucleotide
  Sense Strand Starting at position 856 of SEQ ID NO: 318791
aggucauagugaguugaga

SEQ ID NO: 386130 - RNA, 19 nt, Artificial Sequence
  Description of Artificial Sequence: Synthetic oligonucleotide
  Antisense Strand to SEQ ID NO: 386129
ucucaacucacuaugaccu

SEQ ID NO: 386131 - RNA, 19 nt, Artificial Sequence
  Description of Artificial Sequence: Synthetic oligonucleotide
  Sense Strand Starting at position 856 of SEQ ID NO: 318793
gucauagugaguugagauc

SEQ ID NO: 386132 - RNA, 19 nt, Artificial Sequence
  Description of Artificial Sequence: Synthetic oligonucleotide
  Antisense Strand to SEQ ID NO: 386131
gaucucaacucacuaugac

SEQ ID NO: 386133 - RNA, 19 nt, Artificial Sequence
  Description of Artificial Sequence: Synthetic oligonucleotide
  Sense Strand Starting at position 856 of SEQ ID NO: 318875
ggucuugaagaacgaauga

SEQ ID NO: 386134 - RNA, 19 nt, Artificial Sequence
  Description of Artificial Sequence: Synthetic oligonucleotide
  Antisense Strand to SEQ ID NO: 386133
ucauucguucuucaagacc

SEQ ID NO: 386135 - RNA, 19 nt, Artificial Sequence
  Description of Artificial Sequence: Synthetic oligonucleotide
  Sense Strand Starting at position 856 of SEQ ID NO: 318895
uugcuuuaccuguagacca

SEQ ID NO: 386136 - RNA, 19 nt, Artificial Sequence
  Description of Artificial Sequence: Synthetic oligonucleotide
  Antisense Strand to SEQ ID NO: 386135
uggucuacagguaaagcaa

SEQ ID NO: 386137 - RNA, 19 nt, Artificial Sequence
  Description of Artificial Sequence: Synthetic oligonucleotide
  Sense Strand Starting at position 856 of SEQ ID NO: 319022
cuggauuucuucuaagagg

SEQ ID NO: 386138 - RNA, 19 nt, Artificial Sequence
  Description of Artificial Sequence: Synthetic oligonucleotide
  Antisense Strand to SEQ ID NO: 386137
ccucuuagaagaaauccag

SEQ ID NO: 386139 - RNA, 19 nt, Artificial Sequence
  Description of Artificial Sequence: Synthetic oligonucleotide
  Sense Strand Starting at position 856 of SEQ ID NO: 319147
uugauacuguaauugucau

SEQ ID NO: 386140 - RNA, 19 nt, Artificial Sequence
  Description of Artificial Sequence: Synthetic oligonucleotide
  Antisense Strand to SEQ ID NO: 386139
augacaauuacaguaucaa

SEQ ID NO: 386141 - RNA, 19 nt, Artificial Sequence
  Description of Artificial Sequence: Synthetic oligonucleotide
  Sense Strand Starting at position 856 of SEQ ID NO: 319153
cuguaauugucauuggccu

SEQ ID NO: 386142 - RNA, 19 nt, Artificial Sequence
  Description of Artificial Sequence: Synthetic oligonucleotide
  Antisense Strand to SEQ ID NO: 386141
aggccaaugacaauuacag

SEQ ID NO: 386143 - RNA, 19 nt, Artificial Sequence
  Description of Artificial Sequence: Synthetic oligonucleotide
  Sense Strand Starting at position 856 of SEQ ID NO: 319161
gucauuggccuccauguaa

SEQ ID NO: 386144 - RNA, 19 nt, Artificial Sequence
  Description of Artificial Sequence: Synthetic oligonucleotide
  Antisense Strand to SEQ ID NO: 386143
uuacauggaggccaaugac

SEQ ID NO: 386145 - RNA, 19 nt, Artificial Sequence
  Description of Artificial Sequence: Synthetic oligonucleotide
  Sense Strand Starting at position 857 of SEQ ID NO: 315279
ugggcaacuucuucuccaa

SEQ ID NO: 386146 - RNA, 19 nt, Artificial Sequence
  Description of Artificial Sequence: Synthetic oligonucleotide
  Antisense Strand to SEQ ID NO: 386145
uuggagaagaaguugccca

SEQ ID NO: 386147 - RNA, 19 nt, Artificial Sequence
  Description of Artificial Sequence: Synthetic oligonucleotide
  Sense Strand Starting at position 857 of SEQ ID NO: 315395
uacagaauuguuugggauu

SEQ ID NO: 386148 - RNA, 19 nt, Artificial Sequence
  Description of Artificial Sequence: Synthetic oligonucleotide
  Antisense Strand to SEQ ID NO: 386147
aaucccaaacaauucugua

SEQ ID NO: 386149 - RNA, 19 nt, Artificial Sequence
  Description of Artificial Sequence: Synthetic oligonucleotide
  Sense Strand Starting at position 857 of SEQ ID NO: 315608
gaauguaggaguugcucuu

SEQ ID NO: 386150 - RNA, 19 nt, Artificial Sequence
  Description of Artificial Sequence: Synthetic oligonucleotide
  Antisense Strand to SEQ ID NO: 386149
aagagcaacuccuacauuc

SEQ ID NO: 386151 - RNA, 19 nt, Artificial Sequence
  Description of Artificial Sequence: Synthetic oligonucleotide
  Sense Strand Starting at position 857 of SEQ ID NO: 316460
aggacauuacgcugagaua

SEQ ID NO: 386152 - RNA, 19 nt, Artificial Sequence
  Description of Artificial Sequence: Synthetic oligonucleotide
  Antisense Strand to SEQ ID NO: 386151
uaucucagcguaauguccu

SEQ ID NO: 386153 - RNA, 19 nt, Artificial Sequence
  Description of Artificial Sequence: Synthetic oligonucleotide
  Sense Strand Starting at position 857 of SEQ ID NO: 316589
ugaggaguuaccgaguaau

SEQ ID NO: 386154 - RNA, 19 nt, Artificial Sequence
  Description of Artificial Sequence: Synthetic oligonucleotide
  Antisense Strand to SEQ ID NO: 386153
auuacucgguaacuccuca

SEQ ID NO: 386155 - RNA, 19 nt, Artificial Sequence
  Description of Artificial Sequence: Synthetic oligonucleotide
  Sense Strand Starting at position 857 of SEQ ID NO: 316592
ggaguuaccgaguaaugga

SEQ ID NO: 386156 - RNA, 19 nt, Artificial Sequence
  Description of Artificial Sequence: Synthetic oligonucleotide
  Antisense Strand to SEQ ID NO: 386155
uccauuacucgguaacucc

SEQ ID NO: 386157 - RNA, 19 nt, Artificial Sequence
  Description of Artificial Sequence: Synthetic oligonucleotide
  Sense Strand Starting at position 857 of SEQ ID NO: 316609
gacaguuucugcuugggau

SEQ ID NO: 386158 - RNA, 19 nt, Artificial Sequence
  Description of Artificial Sequence: Synthetic oligonucleotide
  Antisense Strand to SEQ ID NO: 386157
aucccaagcagaaacuguc

SEQ ID NO: 386159 - RNA, 19 nt, Artificial Sequence
  Description of Artificial Sequence: Synthetic oligonucleotide
  Sense Strand Starting at position 857 of SEQ ID NO: 316610
acaguuucugcuugggaug

SEQ ID NO: 386160 - RNA, 19 nt, Artificial Sequence
  Description of Artificial Sequence: Synthetic oligonucleotide
  Antisense Strand to SEQ ID NO: 386159
caucccaagcagaaacugu

SEQ ID NO: 386161 - RNA, 19 nt, Artificial Sequence
  Description of Artificial Sequence: Synthetic oligonucleotide
  Sense Strand Starting at position 857 of SEQ ID NO: 316611
caguuucugcuugggauga

SEQ ID NO: 386162 - RNA, 19 nt, Artificial Sequence
  Description of Artificial Sequence: Synthetic oligonucleotide
  Antisense Strand to SEQ ID NO: 386161
ucaucccaagcagaaacug

SEQ ID NO: 386163 - RNA, 19 nt, Artificial Sequence
  Description of Artificial Sequence: Synthetic oligonucleotide
  Sense Strand Starting at position 857 of SEQ ID NO: 316615
uucugcuugggaugauuaa

SEQ ID NO: 386164 - RNA, 19 nt, Artificial Sequence
  Description of Artificial Sequence: Synthetic oligonucleotide
  Antisense Strand to SEQ ID NO: 386163
uuaaucaucccaagcagaa

SEQ ID NO: 386165 - RNA, 19 nt, Artificial Sequence
  Description of Artificial Sequence: Synthetic oligonucleotide
  Sense Strand Starting at position 857 of SEQ ID NO: 316652
ggugguuaaugguuguaca

SEQ ID NO: 386166 - RNA, 19 nt, Artificial Sequence
  Description of Artificial Sequence: Synthetic oligonucleotide
  Antisense Strand to SEQ ID NO: 386165
uguacaaccauuaaccacc

SEQ ID NO: 386167 - RNA, 19 nt, Artificial Sequence
  Description of Artificial Sequence: Synthetic oligonucleotide
  Sense Strand Starting at position 857 of SEQ ID NO: 316653
gugguuaaugguuguacaa

SEQ ID NO: 386168 - RNA, 19 nt, Artificial Sequence
  Description of Artificial Sequence: Synthetic oligonucleotide
  Antisense Strand to SEQ ID NO: 386167
uuguacaaccauuaaccac

SEQ ID NO: 386169 - RNA, 19 nt, Artificial Sequence
  Description of Artificial Sequence: Synthetic oligonucleotide
  Sense Strand Starting at position 857 of SEQ ID NO: 316774
ggaggaaacgccuagucuu

SEQ ID NO: 386170 - RNA, 19 nt, Artificial Sequence
  Description of Artificial Sequence: Synthetic oligonucleotide
  Antisense Strand to SEQ ID NO: 386169
aagacuaggcguuuccucc

SEQ ID NO: 386171 - RNA, 19 nt, Artificial Sequence
  Description of Artificial Sequence: Synthetic oligonucleotide
  Sense Strand Starting at position 857 of SEQ ID NO: 316777
ggaaacgccuagucuuagu

SEQ ID NO: 386172 - RNA, 19 nt, Artificial Sequence
  Description of Artificial Sequence: Synthetic oligonucleotide
  Antisense Strand to SEQ ID NO: 386171
acuaagacuaggcguuucc

SEQ ID NO: 386173 - RNA, 19 nt, Artificial Sequence
  Description of Artificial Sequence: Synthetic oligonucleotide
  Sense Strand Starting at position 857 of SEQ ID NO: 316948
ggccuccuucccgagagaa

SEQ ID NO: 386174 - RNA, 19 nt, Artificial Sequence
  Description of Artificial Sequence: Synthetic oligonucleotide
  Antisense Strand to SEQ ID NO: 386173
uucucucgggaaggaggcc

SEQ ID NO: 386175 - RNA, 19 nt, Artificial Sequence
  Description of Artificial Sequence: Synthetic oligonucleotide
  Sense Strand Starting at position 857 of SEQ ID NO: 317499
ggagcaugaucucuggaag

SEQ ID NO: 386176 - RNA, 19 nt, Artificial Sequence
  Description of Artificial Sequence: Synthetic oligonucleotide
  Antisense Strand to SEQ ID NO: 386175
cuuccagagaucaugcucc

SEQ ID NO: 386177 - RNA, 19 nt, Artificial Sequence
  Description of Artificial Sequence: Synthetic oligonucleotide
  Sense Strand Starting at position 857 of SEQ ID NO: 317502
gcaugaucucuggaagcug

SEQ ID NO: 386178 - RNA, 19 nt, Artificial Sequence
  Description of Artificial Sequence: Synthetic oligonucleotide
  Antisense Strand to SEQ ID NO: 386177
cagcuuccagagaucaugc

SEQ ID NO: 386179 - RNA, 19 nt, Artificial Sequence
  Description of Artificial Sequence: Synthetic oligonucleotide
  Sense Strand Starting at position 857 of SEQ ID NO: 317557
gcuggaauccuuugggcac

SEQ ID NO: 386180 - RNA, 19 nt, Artificial Sequence
  Description of Artificial Sequence: Synthetic oligonucleotide
  Antisense Strand to SEQ ID NO: 386179
gugcccaaaggauuccagc

SEQ ID NO: 386181 - RNA, 19 nt, Artificial Sequence
  Description of Artificial Sequence: Synthetic oligonucleotide
  Sense Strand Starting at position 857 of SEQ ID NO: 317632
cuagucuucccuggacagu

SEQ ID NO: 386182 - RNA, 19 nt, Artificial Sequence
  Description of Artificial Sequence: Synthetic oligonucleotide
  Antisense Strand to SEQ ID NO: 386181
acuguccagggaagacuag

SEQ ID NO: 386183 - RNA, 19 nt, Artificial Sequence
  Description of Artificial Sequence: Synthetic oligonucleotide
  Sense Strand Starting at position 857 of SEQ ID NO: 317645
gacagugcugucuguugau

SEQ ID NO: 386184 - RNA, 19 nt, Artificial Sequence
  Description of Artificial Sequence: Synthetic oligonucleotide
  Antisense Strand to SEQ ID NO: 386183
aucaacagacagcacuguc

SEQ ID NO: 386185 - RNA, 19 nt, Artificial Sequence
  Description of Artificial Sequence: Synthetic oligonucleotide
  Sense Strand Starting at position 857 of SEQ ID NO: 317654
gucuguugauuccuuauaa

SEQ ID NO: 386186 - RNA, 19 nt, Artificial Sequence
  Description of Artificial Sequence: Synthetic oligonucleotide
  Antisense Strand to SEQ ID NO: 386185
uuauaaggaaucaacagac

SEQ ID NO: 386187 - RNA, 19 nt, Artificial Sequence
  Description of Artificial Sequence: Synthetic oligonucleotide
  Sense Strand Starting at position 857 of SEQ ID NO: 317714
ugagccaagcauugagaua

SEQ ID NO: 386188 - RNA, 19 nt, Artificial Sequence
  Description of Artificial Sequence: Synthetic oligonucleotide
  Antisense Strand to SEQ ID NO: 386187
uaucucaaugcuuggcuca

SEQ ID NO: 386189 - RNA, 19 nt, Artificial Sequence
  Description of Artificial Sequence: Synthetic oligonucleotide
  Sense Strand Starting at position 857 of SEQ ID NO: 317728
agauaugugcuguauagcu

SEQ ID NO: 386190 - RNA, 19 nt, Artificial Sequence
  Description of Artificial Sequence: Synthetic oligonucleotide
  Antisense Strand to SEQ ID NO: 386189
agcuauacagcacauaucu

SEQ ID NO: 386191 - RNA, 19 nt, Artificial Sequence
  Description of Artificial Sequence: Synthetic oligonucleotide
  Sense Strand Starting at position 857 of SEQ ID NO: 317824
uugauuaaaugagccgaua

SEQ ID NO: 386192 - RNA, 19 nt, Artificial Sequence
  Description of Artificial Sequence: Synthetic oligonucleotide
  Antisense Strand to SEQ ID NO: 386191
uaucggcucauuuaaucaa

SEQ ID NO: 386193 - RNA, 19 nt, Artificial Sequence
  Description of Artificial Sequence: Synthetic oligonucleotide
  Sense Strand Starting at position 857 of SEQ ID NO: 317856
cugucuugacucuaaagca

SEQ ID NO: 386194 - RNA, 19 nt, Artificial Sequence
  Description of Artificial Sequence: Synthetic oligonucleotide
  Antisense Strand to SEQ ID NO: 386193
ugcuuuagagucaagacag

SEQ ID NO: 386195 - RNA, 19 nt, Artificial Sequence
  Description of Artificial Sequence: Synthetic oligonucleotide
  Sense Strand Starting at position 857 of SEQ ID NO: 317864
acucuaaagcauggucuuu

SEQ ID NO: 386196 - RNA, 19 nt, Artificial Sequence
  Description of Artificial Sequence: Synthetic oligonucleotide
  Antisense Strand to SEQ ID NO: 386195
aaagaccaugcuuuagagu

SEQ ID NO: 386197 - RNA, 19 nt, Artificial Sequence
  Description of Artificial Sequence: Synthetic oligonucleotide
  Sense Strand Starting at position 857 of SEQ ID NO: 318186
cgguaauuagacuggaaca

SEQ ID NO: 386198 - RNA, 19 nt, Artificial Sequence
  Description of Artificial Sequence: Synthetic oligonucleotide
  Antisense Strand to SEQ ID NO: 386197
uguuccagucuaauuaccg

SEQ ID NO: 386199 - RNA, 19 nt, Artificial Sequence
  Description of Artificial Sequence: Synthetic oligonucleotide
  Sense Strand Starting at position 857 of SEQ ID NO: 318452
ucuggaagcucauuagucu

SEQ ID NO: 386200 - RNA, 19 nt, Artificial Sequence
  Description of Artificial Sequence: Synthetic oligonucleotide
  Antisense Strand to SEQ ID NO: 386199
agacuaaugagcuuccaga

SEQ ID NO: 386201 - RNA, 19 nt, Artificial Sequence
  Description of Artificial Sequence: Synthetic oligonucleotide
  Sense Strand Starting at position 857 of SEQ ID NO: 318453
cuggaagcucauuagucuu

SEQ ID NO: 386202 - RNA, 19 nt, Artificial Sequence
  Description of Artificial Sequence: Synthetic oligonucleotide
  Antisense Strand to SEQ ID NO: 386201
aagacuaaugagcuuccag

SEQ ID NO: 386203 - RNA, 19 nt, Artificial Sequence
  Description of Artificial Sequence: Synthetic oligonucleotide
  Sense Strand Starting at position 857 of SEQ ID NO: 318455
ggaagcucauuagucuuaa

SEQ ID NO: 386204 - RNA, 19 nt, Artificial Sequence
  Description of Artificial Sequence: Synthetic oligonucleotide
  Antisense Strand to SEQ ID NO: 386203
uuaagacuaaugagcuucc

SEQ ID NO: 386205 - RNA, 19 nt, Artificial Sequence
  Description of Artificial Sequence: Synthetic oligonucleotide
  Sense Strand Starting at position 857 of SEQ ID NO: 318459
gcucauuagucuuaauuug

SEQ ID NO: 386206 - RNA, 19 nt, Artificial Sequence
  Description of Artificial Sequence: Synthetic oligonucleotide
  Antisense Strand to SEQ ID NO: 386205
caaauuaagacuaaugagc

SEQ ID NO: 386207 - RNA, 19 nt, Artificial Sequence
  Description of Artificial Sequence: Synthetic oligonucleotide
  Sense Strand Starting at position 857 of SEQ ID NO: 318599
guagguugcugacugggaa

SEQ ID NO: 386208 - RNA, 19 nt, Artificial Sequence
  Description of Artificial Sequence: Synthetic oligonucleotide
  Antisense Strand to SEQ ID NO: 386207
uucccagucagcaaccuac

SEQ ID NO: 386209 - RNA, 19 nt, Artificial Sequence
  Description of Artificial Sequence: Synthetic oligonucleotide
  Sense Strand Starting at position 857 of SEQ ID NO: 318600
uagguugcugacugggaau

SEQ ID NO: 386210 - RNA, 19 nt, Artificial Sequence
  Description of Artificial Sequence: Synthetic oligonucleotide
  Antisense Strand to SEQ ID NO: 386209
auucccagucagcaaccua

SEQ ID NO: 386211 - RNA, 19 nt, Artificial Sequence
  Description of Artificial Sequence: Synthetic oligonucleotide
  Sense Strand Starting at position 857 of SEQ ID NO: 318727
gagaucuauuugggcuaga

SEQ ID NO: 386212 - RNA, 19 nt, Artificial Sequence
  Description of Artificial Sequence: Synthetic oligonucleotide
  Antisense Strand to SEQ ID NO: 386211
ucuagcccaaauagaucuc

SEQ ID NO: 386213 - RNA, 19 nt, Artificial Sequence
  Description of Artificial Sequence: Synthetic oligonucleotide
  Sense Strand Starting at position 857 of SEQ ID NO: 318759
cuguaagugcuagggaaga

SEQ ID NO: 386214 - RNA, 19 nt, Artificial Sequence
  Description of Artificial Sequence: Synthetic oligonucleotide
  Antisense Strand to SEQ ID NO: 386213
ucuucccuagcacuuacag

SEQ ID NO: 386215 - RNA, 19 nt, Artificial Sequence
  Description of Artificial Sequence: Synthetic oligonucleotide
  Sense Strand Starting at position 857 of SEQ ID NO: 318798
uuugucauugcuggaugga

SEQ ID NO: 386216 - RNA, 19 nt, Artificial Sequence
  Description of Artificial Sequence: Synthetic oligonucleotide
  Antisense Strand to SEQ ID NO: 386215
uccauccagcaaugacaaa

SEQ ID NO: 386217 - RNA, 19 nt, Artificial Sequence
  Description of Artificial Sequence: Synthetic oligonucleotide
  Sense Strand Starting at position 857 of SEQ ID NO: 318799
uugucauugcuggauggau

SEQ ID NO: 386218 - RNA, 19 nt, Artificial Sequence
  Description of Artificial Sequence: Synthetic oligonucleotide
  Antisense Strand to SEQ ID NO: 386217
auccauccagcaaugacaa

SEQ ID NO: 386219 - RNA, 19 nt, Artificial Sequence
  Description of Artificial Sequence: Synthetic oligonucleotide
  Sense Strand Starting at position 857 of SEQ ID NO: 319167
agccuuuauucuuuagaug

SEQ ID NO: 386220 - RNA, 19 nt, Artificial Sequence
  Description of Artificial Sequence: Synthetic oligonucleotide
  Antisense Strand to SEQ ID NO: 386219
caucuaaagaauaaaggcu

SEQ ID NO: 386221 - RNA, 19 nt, Artificial Sequence
  Description of Artificial Sequence: Synthetic oligonucleotide
  Sense Strand Starting at position 857 of SEQ ID NO: 319168
gccuuuauucuuuagauga

SEQ ID NO: 386222 - RNA, 19 nt, Artificial Sequence
  Description of Artificial Sequence: Synthetic oligonucleotide
  Antisense Strand to SEQ ID NO: 386221
ucaucuaaagaauaaaggc

SEQ ID NO: 386223 - RNA, 19 nt, Artificial Sequence
  Description of Artificial Sequence: Synthetic oligonucleotide
  Sense Strand Starting at position 857 of SEQ ID NO: 319217
gggccuagucagggcuaaa

SEQ ID NO: 386224 - RNA, 19 nt, Artificial Sequence
  Description of Artificial Sequence: Synthetic oligonucleotide
  Antisense Strand to SEQ ID NO: 386223
uuuagcccugacuaggccc

SEQ ID NO: 386225 - RNA, 19 nt, Artificial Sequence
  Description of Artificial Sequence: Synthetic oligonucleotide
  Sense Strand Starting at position 858 of SEQ ID NO: 315374
cgguucagugaaggauacu

SEQ ID NO: 386226 - RNA, 19 nt, Artificial Sequence
  Description of Artificial Sequence: Synthetic oligonucleotide
  Antisense Strand to SEQ ID NO: 386225
aguauccuucacugaaccg

SEQ ID NO: 386227 - RNA, 19 nt, Artificial Sequence
  Description of Artificial Sequence: Synthetic oligonucleotide
  Sense Strand Starting at position 858 of SEQ ID NO: 315383
gaaggauacuaguacuuaa

SEQ ID NO: 386228 - RNA, 19 nt, Artificial Sequence
  Description of Artificial Sequence: Synthetic oligonucleotide
  Antisense Strand to SEQ ID NO: 386227
uuaaguacuaguauccuuc

SEQ ID NO: 386229 - RNA, 19 nt, Artificial Sequence
  Description of Artificial Sequence: Synthetic oligonucleotide
  Sense Strand Starting at position 858 of SEQ ID NO: 315386
ggauacuaguacuuaaggu

SEQ ID NO: 386230 - RNA, 19 nt, Artificial Sequence
  Description of Artificial Sequence: Synthetic oligonucleotide
  Antisense Strand to SEQ ID NO: 386229
accuuaaguacuaguaucc

SEQ ID NO: 386231 - RNA, 19 nt, Artificial Sequence
  Description of Artificial Sequence: Synthetic oligonucleotide
  Sense Strand Starting at position 858 of SEQ ID NO: 315411
acuugcaguucugucauua

SEQ ID NO: 386232 - RNA, 19 nt, Artificial Sequence
  Description of Artificial Sequence: Synthetic oligonucleotide
  Antisense Strand to SEQ ID NO: 386231
uaaugacagaacugcaagu

SEQ ID NO: 386233 - RNA, 19 nt, Artificial Sequence
  Description of Artificial Sequence: Synthetic oligonucleotide
  Sense Strand Starting at position 858 of SEQ ID NO: 315415
gcaguucugucauuauuug

SEQ ID NO: 386234 - RNA, 19 nt, Artificial Sequence
  Description of Artificial Sequence: Synthetic oligonucleotide
  Antisense Strand to SEQ ID NO: 386233
caaauaaugacagaacugc

SEQ ID NO: 386235 - RNA, 19 nt, Artificial Sequence
  Description of Artificial Sequence: Synthetic oligonucleotide
  Sense Strand Starting at position 858 of SEQ ID NO: 315421
cugucauuauuugcucaca

SEQ ID NO: 386236 - RNA, 19 nt, Artificial Sequence
  Description of Artificial Sequence: Synthetic oligonucleotide
  Antisense Strand to SEQ ID NO: 386235
ugugagcaaauaaugacag

SEQ ID NO: 386237 - RNA, 19 nt, Artificial Sequence
  Description of Artificial Sequence: Synthetic oligonucleotide
  Sense Strand Starting at position 858 of SEQ ID NO: 315426
auuauuugcucacaggacu

SEQ ID NO: 386238 - RNA, 19 nt, Artificial Sequence
  Description of Artificial Sequence: Synthetic oligonucleotide
  Antisense Strand to SEQ ID NO: 386237
aguccugugagcaaauaau

SEQ ID NO: 386239 - RNA, 19 nt, Artificial Sequence
  Description of Artificial Sequence: Synthetic oligonucleotide
  Sense Strand Starting at position 858 of SEQ ID NO: 315567
augucugccgaaugaaauu

SEQ ID NO: 386240 - RNA, 19 nt, Artificial Sequence
  Description of Artificial Sequence: Synthetic oligonucleotide
  Antisense Strand to SEQ ID NO: 386239
aauuucauucggcagacau

SEQ ID NO: 386241 - RNA, 19 nt, Artificial Sequence
  Description of Artificial Sequence: Synthetic oligonucleotide
  Sense Strand Starting at position 858 of SEQ ID NO: 315678
ggcguuucaggagauagcu

SEQ ID NO: 386242 - RNA, 19 nt, Artificial Sequence
  Description of Artificial Sequence: Synthetic oligonucleotide
  Antisense Strand to SEQ ID NO: 386241
agcuaucuccugaaacgcc

SEQ ID NO: 386243 - RNA, 19 nt, Artificial Sequence
  Description of Artificial Sequence: Synthetic oligonucleotide
  Sense Strand Starting at position 858 of SEQ ID NO: 316049
caggaaguucccuggaacu

SEQ ID NO: 386244 - RNA, 19 nt, Artificial Sequence
  Description of Artificial Sequence: Synthetic oligonucleotide
  Antisense Strand to SEQ ID NO: 386243
aguuccagggaacuuccug

SEQ ID NO: 386245 - RNA, 19 nt, Artificial Sequence
  Description of Artificial Sequence: Synthetic oligonucleotide
  Sense Strand Starting at position 858 of SEQ ID NO: 316104
gagcgcauaaguuauggaa

SEQ ID NO: 386246 - RNA, 19 nt, Artificial Sequence
  Description of Artificial Sequence: Synthetic oligonucleotide
  Antisense Strand to SEQ ID NO: 386245
uuccauaacuuaugcgcuc

SEQ ID NO: 386247 - RNA, 19 nt, Artificial Sequence
  Description of Artificial Sequence: Synthetic oligonucleotide
  Sense Strand Starting at position 858 of SEQ ID NO: 316254
guagcaaacuacucuugga

SEQ ID NO: 386248 - RNA, 19 nt, Artificial Sequence
  Description of Artificial Sequence: Synthetic oligonucleotide
  Antisense Strand to SEQ ID NO: 386247
uccaagaguaguuugcuac

SEQ ID NO: 386249 - RNA, 19 nt, Artificial Sequence
  Description of Artificial Sequence: Synthetic oligonucleotide
  Sense Strand Starting at position 858 of SEQ ID NO: 316378
cuauaucaugcaugaggaa

SEQ ID NO: 386250 - RNA, 19 nt, Artificial Sequence
  Description of Artificial Sequence: Synthetic oligonucleotide
  Antisense Strand to SEQ ID NO: 386249
uuccucaugcaugauauag

SEQ ID NO: 386251 - RNA, 19 nt, Artificial Sequence
  Description of Artificial Sequence: Synthetic oligonucleotide
  Sense Strand Starting at position 858 of SEQ ID NO: 316390
ugaggaaacuagcucagau

SEQ ID NO: 386252 - RNA, 19 nt, Artificial Sequence
  Description of Artificial Sequence: Synthetic oligonucleotide
  Antisense Strand to SEQ ID NO: 386251
aucugagcuaguuuccuca

SEQ ID NO: 386253 - RNA, 19 nt, Artificial Sequence
  Description of Artificial Sequence: Synthetic oligonucleotide
  Sense Strand Starting at position 858 of SEQ ID NO: 317264
gugcucgcugggaguugua

SEQ ID NO: 386254 - RNA, 19 nt, Artificial Sequence
  Description of Artificial Sequence: Synthetic oligonucleotide
  Antisense Strand to SEQ ID NO: 386253
uacaacucccagcgagcac

SEQ ID NO: 386255 - RNA, 19 nt, Artificial Sequence
  Description of Artificial Sequence: Synthetic oligonucleotide
  Sense Strand Starting at position 858 of SEQ ID NO: 317506
uaaguacguugauccagau

SEQ ID NO: 386256 - RNA, 19 nt, Artificial Sequence
  Description of Artificial Sequence: Synthetic oligonucleotide
  Antisense Strand to SEQ ID NO: 386255
aucuggaucaacguacuua

SEQ ID NO: 386257 - RNA, 19 nt, Artificial Sequence
  Description of Artificial Sequence: Synthetic oligonucleotide
  Sense Strand Starting at position 858 of SEQ ID NO: 317510
uacguugauccagaucaca

SEQ ID NO: 386258 - RNA, 19 nt, Artificial Sequence
  Description of Artificial Sequence: Synthetic oligonucleotide
  Antisense Strand to SEQ ID NO: 386257
ugugaucuggaucaacgua

SEQ ID NO: 386259 - RNA, 19 nt, Artificial Sequence
  Description of Artificial Sequence: Synthetic oligonucleotide
  Sense Strand Starting at position 858 of SEQ ID NO: 317633
acauuauugagcuguugga

SEQ ID NO: 386260 - RNA, 19 nt, Artificial Sequence
  Description of Artificial Sequence: Synthetic oligonucleotide
  Antisense Strand to SEQ ID NO: 386259
uccaacagcucaauaaugu

SEQ ID NO: 386261 - RNA, 19 nt, Artificial Sequence
  Description of Artificial Sequence: Synthetic oligonucleotide
  Sense Strand Starting at position 858 of SEQ ID NO: 317816
acucuaacgucugucaaag

SEQ ID NO: 386262 - RNA, 19 nt, Artificial Sequence
  Description of Artificial Sequence: Synthetic oligonucleotide
  Antisense Strand to SEQ ID NO: 386261
cuuugacagacguuagagu

SEQ ID NO: 386263 - RNA, 19 nt, Artificial Sequence
  Description of Artificial Sequence: Synthetic oligonucleotide
  Sense Strand Starting at position 858 of SEQ ID NO: 317822
acgucugucaaaggaugaa

SEQ ID NO: 386264 - RNA, 19 nt, Artificial Sequence
  Description of Artificial Sequence: Synthetic oligonucleotide
  Antisense Strand to SEQ ID NO: 386263
uucauccuuugacagacgu

SEQ ID NO: 386265 - RNA, 19 nt, Artificial Sequence
  Description of Artificial Sequence: Synthetic oligonucleotide
  Sense Strand Starting at position 858 of SEQ ID NO: 317842
ggguaaacaaagugugaua

SEQ ID NO: 386266 - RNA, 19 nt, Artificial Sequence
  Description of Artificial Sequence: Synthetic oligonucleotide
  Antisense Strand to SEQ ID NO: 386265
uaucacacuuuguuuaccc

SEQ ID NO: 386267 - RNA, 19 nt, Artificial Sequence
  Description of Artificial Sequence: Synthetic oligonucleotide
  Sense Strand Starting at position 858 of SEQ ID NO: 317844
guaaacaaagugugauaca

SEQ ID NO: 386268 - RNA, 19 nt, Artificial Sequence
  Description of Artificial Sequence: Synthetic oligonucleotide
  Antisense Strand to SEQ ID NO: 386267
uguaucacacuuuguuuac

SEQ ID NO: 386269 - RNA, 19 nt, Artificial Sequence
  Description of Artificial Sequence: Synthetic oligonucleotide
  Sense Strand Starting at position 858 of SEQ ID NO: 317959
agcagaaucguguaagacu

SEQ ID NO: 386270 - RNA, 19 nt, Artificial Sequence
  Description of Artificial Sequence: Synthetic oligonucleotide
  Antisense Strand to SEQ ID NO: 386269
agucuuacacgauucugcu

SEQ ID NO: 386271 - RNA, 19 nt, Artificial Sequence
  Description of Artificial Sequence: Synthetic oligonucleotide
  Sense Strand Starting at position 858 of SEQ ID NO: 317967
cguguaagacuaggaguuu

SEQ ID NO: 386272 - RNA, 19 nt, Artificial Sequence
  Description of Artificial Sequence: Synthetic oligonucleotide
  Antisense Strand to SEQ ID NO: 386271
aaacuccuagucuuacacg

SEQ ID NO: 386273 - RNA, 19 nt, Artificial Sequence
  Description of Artificial Sequence: Synthetic oligonucleotide
  Sense Strand Starting at position 858 of SEQ ID NO: 318258
augaaugaaucucagaaau

SEQ ID NO: 386274 - RNA, 19 nt, Artificial Sequence
  Description of Artificial Sequence: Synthetic oligonucleotide
  Antisense Strand to SEQ ID NO: 386273
auuucugagauucauucau

SEQ ID NO: 386275 - RNA, 19 nt, Artificial Sequence
  Description of Artificial Sequence: Synthetic oligonucleotide
  Sense Strand Starting at position 858 of SEQ ID NO: 318268
cucagaaauguaugcuaau

SEQ ID NO: 386276 - RNA, 19 nt, Artificial Sequence
  Description of Artificial Sequence: Synthetic oligonucleotide
  Antisense Strand to SEQ ID NO: 386275
auuagcauacauuucugag

SEQ ID NO: 386277 - RNA, 19 nt, Artificial Sequence
  Description of Artificial Sequence: Synthetic oligonucleotide
  Sense Strand Starting at position 858 of SEQ ID NO: 318269
ucagaaauguaugcuaaug

SEQ ID NO: 386278 - RNA, 19 nt, Artificial Sequence
  Description of Artificial Sequence: Synthetic oligonucleotide
  Antisense Strand to SEQ ID NO: 386277
cauuagcauacauuucuga

SEQ ID NO: 386279 - RNA, 19 nt, Artificial Sequence
  Description of Artificial Sequence: Synthetic oligonucleotide
  Sense Strand Starting at position 858 of SEQ ID NO: 318271
agaaauguaugcuaaugaa

SEQ ID NO: 386280 - RNA, 19 nt, Artificial Sequence
  Description of Artificial Sequence: Synthetic oligonucleotide
  Antisense Strand to SEQ ID NO: 386279
uucauuagcauacauuucu

SEQ ID NO: 386281 - RNA, 19 nt, Artificial Sequence
  Description of Artificial Sequence: Synthetic oligonucleotide
  Sense Strand Starting at position 858 of SEQ ID NO: 318320
gugauuacaucuuaugaaa

SEQ ID NO: 386282 - RNA, 19 nt, Artificial Sequence
  Description of Artificial Sequence: Synthetic oligonucleotide
  Antisense Strand to SEQ ID NO: 386281
uuucauaagauguaaucac

SEQ ID NO: 386283 - RNA, 19 nt, Artificial Sequence
  Description of Artificial Sequence: Synthetic oligonucleotide
  Sense Strand Starting at position 858 of SEQ ID NO: 318425
uagggacuccuuugggagu

SEQ ID NO: 386284 - RNA, 19 nt, Artificial Sequence
  Description of Artificial Sequence: Synthetic oligonucleotide
  Antisense Strand to SEQ ID NO: 386283
acucccaaaggagucccua

SEQ ID NO: 386285 - RNA, 19 nt, Artificial Sequence
  Description of Artificial Sequence: Synthetic oligonucleotide
  Sense Strand Starting at position 858 of SEQ ID NO: 318466
uggagaugaugguuccaca

SEQ ID NO: 386286 - RNA, 19 nt, Artificial Sequence
  Description of Artificial Sequence: Synthetic oligonucleotide
  Antisense Strand to SEQ ID NO: 386285
uguggaaccaucaucucca

SEQ ID NO: 386287 - RNA, 19 nt, Artificial Sequence
  Description of Artificial Sequence: Synthetic oligonucleotide
  Sense Strand Starting at position 858 of SEQ ID NO: 318469
agaugaugguuccacaaca

SEQ ID NO: 386288 - RNA, 19 nt, Artificial Sequence
  Description of Artificial Sequence: Synthetic oligonucleotide
  Antisense Strand to SEQ ID NO: 386287
uguuguggaaccaucaucu

SEQ ID NO: 386289 - RNA, 19 nt, Artificial Sequence
  Description of Artificial Sequence: Synthetic oligonucleotide
  Sense Strand Starting at position 858 of SEQ ID NO: 318643
gacagucuguggccuguua

SEQ ID NO: 386290 - RNA, 19 nt, Artificial Sequence
  Description of Artificial Sequence: Synthetic oligonucleotide
  Antisense Strand to SEQ ID NO: 386289
uaacaggccacagacuguc

SEQ ID NO: 386291 - RNA, 19 nt, Artificial Sequence
  Description of Artificial Sequence: Synthetic oligonucleotide
  Sense Strand Starting at position 858 of SEQ ID NO: 318940
gcuaaagcauucuugcaug

SEQ ID NO: 386292 - RNA, 19 nt, Artificial Sequence
  Description of Artificial Sequence: Synthetic oligonucleotide
  Antisense Strand to SEQ ID NO: 386291
caugcaagaaugcuuuagc

SEQ ID NO: 386293 - RNA, 19 nt, Artificial Sequence
  Description of Artificial Sequence: Synthetic oligonucleotide
  Sense Strand Starting at position 858 of SEQ ID NO: 319002
uguccugaggcucaagaua

SEQ ID NO: 386294 - RNA, 19 nt, Artificial Sequence
  Description of Artificial Sequence: Synthetic oligonucleotide
  Antisense Strand to SEQ ID NO: 386293
uaucuugagccucaggaca

SEQ ID NO: 386295 - RNA, 19 nt, Artificial Sequence
  Description of Artificial Sequence: Synthetic oligonucleotide
  Sense Strand Starting at position 858 of SEQ ID NO: 319022
ccaguagugagaugaacaa

SEQ ID NO: 386296 - RNA, 19 nt, Artificial Sequence
  Description of Artificial Sequence: Synthetic oligonucleotide
  Antisense Strand to SEQ ID NO: 386295
uuguucaucucacuacugg

SEQ ID NO: 386297 - RNA, 19 nt, Artificial Sequence
  Description of Artificial Sequence: Synthetic oligonucleotide
  Sense Strand Starting at position 858 of SEQ ID NO: 319051
cagucagagguugguaagu

SEQ ID NO: 386298 - RNA, 19 nt, Artificial Sequence
  Description of Artificial Sequence: Synthetic oligonucleotide
  Antisense Strand to SEQ ID NO: 386297
acuuaccaaccucugacug

SEQ ID NO: 386299 - RNA, 19 nt, Artificial Sequence
  Description of Artificial Sequence: Synthetic oligonucleotide
  Sense Strand Starting at position 858 of SEQ ID NO: 319064
guaaguuauagcugaaagg

SEQ ID NO: 386300 - RNA, 19 nt, Artificial Sequence
  Description of Artificial Sequence: Synthetic oligonucleotide
  Antisense Strand to SEQ ID NO: 386299
ccuuucagcuauaacuuac

SEQ ID NO: 386301 - RNA, 19 nt, Artificial Sequence
  Description of Artificial Sequence: Synthetic oligonucleotide
  Sense Strand Starting at position 858 of SEQ ID NO: 319065
uaaguuauagcugaaaggu

SEQ ID NO: 386302 - RNA, 19 nt, Artificial Sequence
  Description of Artificial Sequence: Synthetic oligonucleotide
  Antisense Strand to SEQ ID NO: 386301
accuuucagcuauaacuua

SEQ ID NO: 386303 - RNA, 19 nt, Artificial Sequence
  Description of Artificial Sequence: Synthetic oligonucleotide
  Sense Strand Starting at position 858 of SEQ ID NO: 319074
gcugaaagguccuugccuu

SEQ ID NO: 386304 - RNA, 19 nt, Artificial Sequence
  Description of Artificial Sequence: Synthetic oligonucleotide
  Antisense Strand to SEQ ID NO: 386303
aaggcaaggaccuuucagc

SEQ ID NO: 386305 - RNA, 19 nt, Artificial Sequence
  Description of Artificial Sequence: Synthetic oligonucleotide
  Sense Strand Starting at position 859 of SEQ ID NO: 315282
cugugacccaggcaugaaa

SEQ ID NO: 386306 - RNA, 19 nt, Artificial Sequence
  Description of Artificial Sequence: Synthetic oligonucleotide
  Antisense Strand to SEQ ID NO: 386305
uuucaugccugggucacag

SEQ ID NO: 386307 - RNA, 19 nt, Artificial Sequence
  Description of Artificial Sequence: Synthetic oligonucleotide
  Sense Strand Starting at position 859 of SEQ ID NO: 315374
ggaaaugacugggaagaau

SEQ ID NO: 386308 - RNA, 19 nt, Artificial Sequence
  Description of Artificial Sequence: Synthetic oligonucleotide
  Antisense Strand to SEQ ID NO: 386307
auucuucccagucauuucc

SEQ ID NO: 386309 - RNA, 19 nt, Artificial Sequence
  Description of Artificial Sequence: Synthetic oligonucleotide
  Sense Strand Starting at position 859 of SEQ ID NO: 315437
cgcucagguggagauguua

SEQ ID NO: 386310 - RNA, 19 nt, Artificial Sequence
  Description of Artificial Sequence: Synthetic oligonucleotide
  Antisense Strand to SEQ ID NO: 386309
uaacaucuccaccugagcg

SEQ ID NO: 386311 - RNA, 19 nt, Artificial Sequence
  Description of Artificial Sequence: Synthetic oligonucleotide
  Sense Strand Starting at position 859 of SEQ ID NO: 315468
gguaacacuuguugagcau

SEQ ID NO: 386312 - RNA, 19 nt, Artificial Sequence
  Description of Artificial Sequence: Synthetic oligonucleotide
  Antisense Strand to SEQ ID NO: 386311
augcucaacaaguguuacc

SEQ ID NO: 386313 - RNA, 19 nt, Artificial Sequence
  Description of Artificial Sequence: Synthetic oligonucleotide
  Sense Strand Starting at position 859 of SEQ ID NO: 315469
guaacacuuguugagcauu

SEQ ID NO: 386314 - RNA, 19 nt, Artificial Sequence
  Description of Artificial Sequence: Synthetic oligonucleotide
  Antisense Strand to SEQ ID NO: 386313
aaugcucaacaaguguuac

SEQ ID NO: 386315 - RNA, 19 nt, Artificial Sequence
  Description of Artificial Sequence: Synthetic oligonucleotide
  Sense Strand Starting at position 859 of SEQ ID NO: 315535
cucccugaagccugacaaa

SEQ ID NO: 386316 - RNA, 19 nt, Artificial Sequence
  Description of Artificial Sequence: Synthetic oligonucleotide
  Antisense Strand to SEQ ID NO: 386315
uuugucaggcuucagggag

SEQ ID NO: 386317 - RNA, 19 nt, Artificial Sequence
  Description of Artificial Sequence: Synthetic oligonucleotide
  Sense Strand Starting at position 859 of SEQ ID NO: 315554
aaccuuucgcacugaggga

SEQ ID NO: 386318 - RNA, 19 nt, Artificial Sequence
  Description of Artificial Sequence: Synthetic oligonucleotide
  Antisense Strand to SEQ ID NO: 386317
ucccucagugcgaaagguu

SEQ ID NO: 386319 - RNA, 19 nt, Artificial Sequence
  Description of Artificial Sequence: Synthetic oligonucleotide
  Sense Strand Starting at position 859 of SEQ ID NO: 315587
ggaauuaagccagaagcuc

SEQ ID NO: 386320 - RNA, 19 nt, Artificial Sequence
  Description of Artificial Sequence: Synthetic oligonucleotide
  Antisense Strand to SEQ ID NO: 386319
gagcuucuggcuuaauucc

SEQ ID NO: 386321 - RNA, 19 nt, Artificial Sequence
  Description of Artificial Sequence: Synthetic oligonucleotide
  Sense Strand Starting at position 859 of SEQ ID NO: 315715
uucugaaaucccuggauga

SEQ ID NO: 386322 - RNA, 19 nt, Artificial Sequence
  Description of Artificial Sequence: Synthetic oligonucleotide
  Antisense Strand to SEQ ID NO: 386321
ucauccagggauuucagaa

SEQ ID NO: 386323 - RNA, 19 nt, Artificial Sequence
  Description of Artificial Sequence: Synthetic oligonucleotide
  Sense Strand Starting at position 859 of SEQ ID NO: 315785
ggaccauaguuuccaacuu

SEQ ID NO: 386324 - RNA, 19 nt, Artificial Sequence
  Description of Artificial Sequence: Synthetic oligonucleotide
  Antisense Strand to SEQ ID NO: 386323
aaguuggaaacuauggucc

SEQ ID NO: 386325 - RNA, 19 nt, Artificial Sequence
  Description of Artificial Sequence: Synthetic oligonucleotide
  Sense Strand Starting at position 859 of SEQ ID NO: 315810
gguuaagcagcuugcucaa

SEQ ID NO: 386326 - RNA, 19 nt, Artificial Sequence
  Description of Artificial Sequence: Synthetic oligonucleotide
  Antisense Strand to SEQ ID NO: 386325
uugagcaagcugcuuaacc

SEQ ID NO: 386327 - RNA, 19 nt, Artificial Sequence
  Description of Artificial Sequence: Synthetic oligonucleotide
  Sense Strand Starting at position 859 of SEQ ID NO: 316266
uagugauacagcugguaag

SEQ ID NO: 386328 - RNA, 19 nt, Artificial Sequence
  Description of Artificial Sequence: Synthetic oligonucleotide
  Antisense Strand to SEQ ID NO: 386327
cuuaccagcuguaucacua

SEQ ID NO: 386329 - RNA, 19 nt, Artificial Sequence
  Description of Artificial Sequence: Synthetic oligonucleotide
  Sense Strand Starting at position 859 of SEQ ID NO: 316276
gcugguaagcaguggaaga

SEQ ID NO: 386330 - RNA, 19 nt, Artificial Sequence
  Description of Artificial Sequence: Synthetic oligonucleotide
  Antisense Strand to SEQ ID NO: 386329
ucuuccacugcuuaccagc

SEQ ID NO: 386331 - RNA, 19 nt, Artificial Sequence
  Description of Artificial Sequence: Synthetic oligonucleotide
  Sense Strand Starting at position 859 of SEQ ID NO: 316277
cugguaagcaguggaagaa

SEQ ID NO: 386332 - RNA, 19 nt, Artificial Sequence
  Description of Artificial Sequence: Synthetic oligonucleotide
  Antisense Strand to SEQ ID NO: 386331
uucuuccacugcuuaccag

SEQ ID NO: 386333 - RNA, 19 nt, Artificial Sequence
  Description of Artificial Sequence: Synthetic oligonucleotide
  Sense Strand Starting at position 859 of SEQ ID NO: 316307
caaggauguucccgggaag

SEQ ID NO: 386334 - RNA, 19 nt, Artificial Sequence
  Description of Artificial Sequence: Synthetic oligonucleotide
  Antisense Strand to SEQ ID NO: 386333
cuucccgggaacauccuug

SEQ ID NO: 386335 - RNA, 19 nt, Artificial Sequence
  Description of Artificial Sequence: Synthetic oligonucleotide
  Sense Strand Starting at position 859 of SEQ ID NO: 316464
gcgcgcuguauucggugaa

SEQ ID NO: 386336 - RNA, 19 nt, Artificial Sequence
  Description of Artificial Sequence: Synthetic oligonucleotide
  Antisense Strand to SEQ ID NO: 386335
uucaccgaauacagcgcgc

SEQ ID NO: 386337 - RNA, 19 nt, Artificial Sequence
  Description of Artificial Sequence: Synthetic oligonucleotide
  Sense Strand Starting at position 859 of SEQ ID NO: 316465
cgcgcuguauucggugaau

SEQ ID NO: 386338 - RNA, 19 nt, Artificial Sequence
  Description of Artificial Sequence: Synthetic oligonucleotide
  Antisense Strand to SEQ ID NO: 386337
auucaccgaauacagcgcg

SEQ ID NO: 386339 - RNA, 19 nt, Artificial Sequence
  Description of Artificial Sequence: Synthetic oligonucleotide
  Sense Strand Starting at position 859 of SEQ ID NO: 316467
cgcuguauucggugaauuu

SEQ ID NO: 386340 - RNA, 19 nt, Artificial Sequence
  Description of Artificial Sequence: Synthetic oligonucleotide
  Antisense Strand to SEQ ID NO: 386339
aaauucaccgaauacagcg

SEQ ID NO: 386341 - RNA, 19 nt, Artificial Sequence
  Description of Artificial Sequence: Synthetic oligonucleotide
  Sense Strand Starting at position 859 of SEQ ID NO: 316468
gcuguauucggugaauuuc

SEQ ID NO: 386342 - RNA, 19 nt, Artificial Sequence
  Description of Artificial Sequence: Synthetic oligonucleotide
  Antisense Strand to SEQ ID NO: 386341
gaaauucaccgaauacagc

SEQ ID NO: 386343 - RNA, 19 nt, Artificial Sequence
  Description of Artificial Sequence: Synthetic oligonucleotide
  Sense Strand Starting at position 859 of SEQ ID NO: 316476
cggugaauuucuucuggua

SEQ ID NO: 386344 - RNA, 19 nt, Artificial Sequence
  Description of Artificial Sequence: Synthetic oligonucleotide
  Antisense Strand to SEQ ID NO: 386343
uaccagaagaaauucaccg

SEQ ID NO: 386345 - RNA, 19 nt, Artificial Sequence
  Description of Artificial Sequence: Synthetic oligonucleotide
  Sense Strand Starting at position 859 of SEQ ID NO: 316899
ugauguccagcuugaggau

SEQ ID NO: 386346 - RNA, 19 nt, Artificial Sequence
  Description of Artificial Sequence: Synthetic oligonucleotide
  Antisense Strand to SEQ ID NO: 386345
auccucaagcuggacauca

SEQ ID NO: 386347 - RNA, 19 nt, Artificial Sequence
  Description of Artificial Sequence: Synthetic oligonucleotide
  Sense Strand Starting at position 859 of SEQ ID NO: 316900
gauguccagcuugaggaua

SEQ ID NO: 386348 - RNA, 19 nt, Artificial Sequence
  Description of Artificial Sequence: Synthetic oligonucleotide
  Antisense Strand to SEQ ID NO: 386347
uauccucaagcuggacauc

SEQ ID NO: 386349 - RNA, 19 nt, Artificial Sequence
  Description of Artificial Sequence: Synthetic oligonucleotide
  Sense Strand Starting at position 859 of SEQ ID NO: 316941
gguugagcucuuuggccga

SEQ ID NO: 386350 - RNA, 19 nt, Artificial Sequence
  Description of Artificial Sequence: Synthetic oligonucleotide
  Antisense Strand to SEQ ID NO: 386349
ucggccaaagagcucaacc

SEQ ID NO: 386351 - RNA, 19 nt, Artificial Sequence
  Description of Artificial Sequence: Synthetic oligonucleotide
  Sense Strand Starting at position 859 of SEQ ID NO: 317249
ccggacugagccuaauuga

SEQ ID NO: 386352 - RNA, 19 nt, Artificial Sequence
  Description of Artificial Sequence: Synthetic oligonucleotide
  Antisense Strand to SEQ ID NO: 386351
ucaauuaggcucaguccgg

SEQ ID NO: 386353 - RNA, 19 nt, Artificial Sequence
  Description of Artificial Sequence: Synthetic oligonucleotide
  Sense Strand Starting at position 859 of SEQ ID NO: 317266
gauccagacuuccucggaa

SEQ ID NO: 386354 - RNA, 19 nt, Artificial Sequence
  Description of Artificial Sequence: Synthetic oligonucleotide
  Antisense Strand to SEQ ID NO: 386353
uuccgaggaagucuggauc

SEQ ID NO: 386355 - RNA, 19 nt, Artificial Sequence
  Description of Artificial Sequence: Synthetic oligonucleotide
  Sense Strand Starting at position 859 of SEQ ID NO: 317337
cauacaucgugccuuggau

SEQ ID NO: 386356 - RNA, 19 nt, Artificial Sequence
  Description of Artificial Sequence: Synthetic oligonucleotide
  Antisense Strand to SEQ ID NO: 386355
auccaaggcacgauguaug

SEQ ID NO: 386357 - RNA, 19 nt, Artificial Sequence
  Description of Artificial Sequence: Synthetic oligonucleotide
  Sense Strand Starting at position 859 of SEQ ID NO: 317457
gccugaaucuucucgggaa

SEQ ID NO: 386358 - RNA, 19 nt, Artificial Sequence
  Description of Artificial Sequence: Synthetic oligonucleotide
  Antisense Strand to SEQ ID NO: 386357
uucccgagaagauucaggc

SEQ ID NO: 386359 - RNA, 19 nt, Artificial Sequence
  Description of Artificial Sequence: Synthetic oligonucleotide
  Sense Strand Starting at position 859 of SEQ ID NO: 317458
ccugaaucuucucgggaaa

SEQ ID NO: 386360 - RNA, 19 nt, Artificial Sequence
  Description of Artificial Sequence: Synthetic oligonucleotide
  Antisense Strand to SEQ ID NO: 386359
uuucccgagaagauucagg

SEQ ID NO: 386361 - RNA, 19 nt, Artificial Sequence
  Description of Artificial Sequence: Synthetic oligonucleotide
  Sense Strand Starting at position 859 of SEQ ID NO: 317459
cugaaucuucucgggaaac

SEQ ID NO: 386362 - RNA, 19 nt, Artificial Sequence
  Description of Artificial Sequence: Synthetic oligonucleotide
  Antisense Strand to SEQ ID NO: 386361
guuucccgagaagauucag

SEQ ID NO: 386363 - RNA, 19 nt, Artificial Sequence
  Description of Artificial Sequence: Synthetic oligonucleotide
  Sense Strand Starting at position 859 of SEQ ID NO: 317460
ugaaucuucucgggaaacu

SEQ ID NO: 386364 - RNA, 19 nt, Artificial Sequence
  Description of Artificial Sequence: Synthetic oligonucleotide
  Antisense Strand to SEQ ID NO: 386363
aguuucccgagaagauuca

SEQ ID NO: 386365 - RNA, 19 nt, Artificial Sequence
  Description of Artificial Sequence: Synthetic oligonucleotide
  Sense Strand Starting at position 859 of SEQ ID NO: 317469
ucgggaaacuccuuucugu

SEQ ID NO: 386366 - RNA, 19 nt, Artificial Sequence
  Description of Artificial Sequence: Synthetic oligonucleotide
  Antisense Strand to SEQ ID NO: 386365
acagaaaggaguuucccga

SEQ ID NO: 386367 - RNA, 19 nt, Artificial Sequence
  Description of Artificial Sequence: Synthetic oligonucleotide
  Sense Strand Starting at position 859 of SEQ ID NO: 317483
ucuguucucuuacagucua

SEQ ID NO: 386368 - RNA, 19 nt, Artificial Sequence
  Description of Artificial Sequence: Synthetic oligonucleotide
  Antisense Strand to SEQ ID NO: 386367
uagacuguaagagaacaga

SEQ ID NO: 386369 - RNA, 19 nt, Artificial Sequence
  Description of Artificial Sequence: Synthetic oligonucleotide
  Sense Strand Starting at position 859 of SEQ ID NO: 317495
cagucuacgcuauaggaga

SEQ ID NO: 386370 - RNA, 19 nt, Artificial Sequence
  Description of Artificial Sequence: Synthetic oligonucleotide
  Antisense Strand to SEQ ID NO: 386369
ucuccuauagcguagacug

SEQ ID NO: 386371 - RNA, 19 nt, Artificial Sequence
  Description of Artificial Sequence: Synthetic oligonucleotide
  Sense Strand Starting at position 859 of SEQ ID NO: 317647
gcugauugcagaggacuaa

SEQ ID NO: 386372 - RNA, 19 nt, Artificial Sequence
  Description of Artificial Sequence: Synthetic oligonucleotide
  Antisense Strand to SEQ ID NO: 386371
uuaguccucugcaaucagc

SEQ ID NO: 386373 - RNA, 19 nt, Artificial Sequence
  Description of Artificial Sequence: Synthetic oligonucleotide
  Sense Strand Starting at position 859 of SEQ ID NO: 317679
cccgcuaucucagcacuua

SEQ ID NO: 386374 - RNA, 19 nt, Artificial Sequence
  Description of Artificial Sequence: Synthetic oligonucleotide
  Antisense Strand to SEQ ID NO: 386373
uaagugcugagauagcggg

SEQ ID NO: 386375 - RNA, 19 nt, Artificial Sequence
  Description of Artificial Sequence: Synthetic oligonucleotide
  Sense Strand Starting at position 860 of SEQ ID NO: 315381
uaucauucuugggugaaga

SEQ ID NO: 386376 - RNA, 19 nt, Artificial Sequence
  Description of Artificial Sequence: Synthetic oligonucleotide
  Antisense Strand to SEQ ID NO: 386375
ucuucacccaagaaugaua

SEQ ID NO: 386377 - RNA, 19 nt, Artificial Sequence
  Description of Artificial Sequence: Synthetic oligonucleotide
  Sense Strand Starting at position 860 of SEQ ID NO: 315382
aucauucuugggugaagau

SEQ ID NO: 386378 - RNA, 19 nt, Artificial Sequence
  Description of Artificial Sequence: Synthetic oligonucleotide
  Antisense Strand to SEQ ID NO: 386377
aucuucacccaagaaugau

SEQ ID NO: 386379 - RNA, 19 nt, Artificial Sequence
  Description of Artificial Sequence: Synthetic oligonucleotide
  Sense Strand Starting at position 860 of SEQ ID NO: 315509
ugcagaucacauugaucau

SEQ ID NO: 386380 - RNA, 19 nt, Artificial Sequence
  Description of Artificial Sequence: Synthetic oligonucleotide
  Antisense Strand to SEQ ID NO: 386379
augaucaaugugaucugca

SEQ ID NO: 386381 - RNA, 19 nt, Artificial Sequence
  Description of Artificial Sequence: Synthetic oligonucleotide
  Sense Strand Starting at position 860 of SEQ ID NO: 315614
auguuagucauacgggaaa

SEQ ID NO: 386382 - RNA, 19 nt, Artificial Sequence
  Description of Artificial Sequence: Synthetic oligonucleotide
  Antisense Strand to SEQ ID NO: 386381
uuucccguaugacuaacau

SEQ ID NO: 386383 - RNA, 19 nt, Artificial Sequence
  Description of Artificial Sequence: Synthetic oligonucleotide
  Sense Strand Starting at position 860 of SEQ ID NO: 315616
guuagucauacgggaaauc

SEQ ID NO: 386384 - RNA, 19 nt, Artificial Sequence
  Description of Artificial Sequence: Synthetic oligonucleotide
  Antisense Strand to SEQ ID NO: 386383
gauuucccguaugacuaac

SEQ ID NO: 386385 - RNA, 19 nt, Artificial Sequence
  Description of Artificial Sequence: Synthetic oligonucleotide
  Sense Strand Starting at position 860 of SEQ ID NO: 315617
uuagucauacgggaaaucu

SEQ ID NO: 386386 - RNA, 19 nt, Artificial Sequence
  Description of Artificial Sequence: Synthetic oligonucleotide
  Antisense Strand to SEQ ID NO: 386385
agauuucccguaugacuaa

SEQ ID NO: 386387 - RNA, 19 nt, Artificial Sequence
  Description of Artificial Sequence: Synthetic oligonucleotide
  Sense Strand Starting at position 860 of SEQ ID NO: 315750
aaauuaaaucuggguagua

SEQ ID NO: 386388 - RNA, 19 nt, Artificial Sequence
  Description of Artificial Sequence: Synthetic oligonucleotide
  Antisense Strand to SEQ ID NO: 386387
uacuacccagauuuaauuu

SEQ ID NO: 386389 - RNA, 19 nt, Artificial Sequence
  Description of Artificial Sequence: Synthetic oligonucleotide
  Sense Strand Starting at position 860 of SEQ ID NO: 315751
aauuaaaucuggguaguac

SEQ ID NO: 386390 - RNA, 19 nt, Artificial Sequence
  Description of Artificial Sequence: Synthetic oligonucleotide
  Antisense Strand to SEQ ID NO: 386389
guacuacccagauuuaauu

SEQ ID NO: 386391 - RNA, 19 nt, Artificial Sequence
  Description of Artificial Sequence: Synthetic oligonucleotide
  Sense Strand Starting at position 860 of SEQ ID NO: 315752
auuaaaucuggguaguacu

SEQ ID NO: 386392 - RNA, 19 nt, Artificial Sequence
  Description of Artificial Sequence: Synthetic oligonucleotide
  Antisense Strand to SEQ ID NO: 386391
aguacuacccagauuuaau

SEQ ID NO: 386393 - RNA, 19 nt, Artificial Sequence
  Description of Artificial Sequence: Synthetic oligonucleotide
  Sense Strand Starting at position 860 of SEQ ID NO: 315980
uuagaaagcugaguuagua

SEQ ID NO: 386394 - RNA, 19 nt, Artificial Sequence
  Description of Artificial Sequence: Synthetic oligonucleotide
  Antisense Strand to SEQ ID NO: 386393
uacuaacucagcuuucuaa

SEQ ID NO: 386395 - RNA, 19 nt, Artificial Sequence
  Description of Artificial Sequence: Synthetic oligonucleotide
  Sense Strand Starting at position 860 of SEQ ID NO: 316064
uggagucaagguuaaagua

SEQ ID NO: 386396 - RNA, 19 nt, Artificial Sequence
  Description of Artificial Sequence: Synthetic oligonucleotide
  Antisense Strand to SEQ ID NO: 386395
uacuuuaaccuugacucca

SEQ ID NO: 386397 - RNA, 19 nt, Artificial Sequence
  Description of Artificial Sequence: Synthetic oligonucleotide
  Sense Strand Starting at position 860 of SEQ ID NO: 316079
aguaaucuugcccaagaga

SEQ ID NO: 386398 - RNA, 19 nt, Artificial Sequence
  Description of Artificial Sequence: Synthetic oligonucleotide
  Antisense Strand to SEQ ID NO: 386397
ucucuugggcaagauuacu

SEQ ID NO: 386399 - RNA, 19 nt, Artificial Sequence
  Description of Artificial Sequence: Synthetic oligonucleotide
  Sense Strand Starting at position 860 of SEQ ID NO: 316082
aaucuugcccaagagagua

SEQ ID NO: 386400 - RNA, 19 nt, Artificial Sequence
  Description of Artificial Sequence: Synthetic oligonucleotide
  Antisense Strand to SEQ ID NO: 386399
uacucucuugggcaagauu

SEQ ID NO: 386401 - RNA, 19 nt, Artificial Sequence
  Description of Artificial Sequence: Synthetic oligonucleotide
  Sense Strand Starting at position 860 of SEQ ID NO: 316131
cucagcucagaugaauauu

SEQ ID NO: 386402 - RNA, 19 nt, Artificial Sequence
  Description of Artificial Sequence: Synthetic oligonucleotide
  Antisense Strand to SEQ ID NO: 386401
aauauucaucugagcugag

SEQ ID NO: 386403 - RNA, 19 nt, Artificial Sequence
  Description of Artificial Sequence: Synthetic oligonucleotide
  Sense Strand Starting at position 860 of SEQ ID NO: 316185
auuagagcuccuuggacau

SEQ ID NO: 386404 - RNA, 19 nt, Artificial Sequence
  Description of Artificial Sequence: Synthetic oligonucleotide
  Antisense Strand to SEQ ID NO: 386403
auguccaaggagcucuaau

SEQ ID NO: 386405 - RNA, 19 nt, Artificial Sequence
  Description of Artificial Sequence: Synthetic oligonucleotide
  Sense Strand Starting at position 860 of SEQ ID NO: 316196
uuggacauguguuugaaau

SEQ ID NO: 386406 - RNA, 19 nt, Artificial Sequence
  Description of Artificial Sequence: Synthetic oligonucleotide
  Antisense Strand to SEQ ID NO: 386405
auuucaaacacauguccaa

SEQ ID NO: 386407 - RNA, 19 nt, Artificial Sequence
  Description of Artificial Sequence: Synthetic oligonucleotide
  Sense Strand Starting at position 860 of SEQ ID NO: 316197
uggacauguguuugaaauu

SEQ ID NO: 386408 - RNA, 19 nt, Artificial Sequence
  Description of Artificial Sequence: Synthetic oligonucleotide
  Antisense Strand to SEQ ID NO: 386407
aauuucaaacacaugucca

SEQ ID NO: 386409 - RNA, 19 nt, Artificial Sequence
  Description of Artificial Sequence: Synthetic oligonucleotide
  Sense Strand Starting at position 860 of SEQ ID NO: 316253
ggcaaugucccauaaugug

SEQ ID NO: 386410 - RNA, 19 nt, Artificial Sequence
  Description of Artificial Sequence: Synthetic oligonucleotide
  Antisense Strand to SEQ ID NO: 386409
cacauuaugggacauugcc

SEQ ID NO: 386411 - RNA, 19 nt, Artificial Sequence
  Description of Artificial Sequence: Synthetic oligonucleotide
  Sense Strand Starting at position 860 of SEQ ID NO: 316327
acgaaagugacagaguguu

SEQ ID NO: 386412 - RNA, 19 nt, Artificial Sequence
  Description of Artificial Sequence: Synthetic oligonucleotide
  Antisense Strand to SEQ ID NO: 386411
aacacucugucacuuucgu

SEQ ID NO: 386413 - RNA, 19 nt, Artificial Sequence
  Description of Artificial Sequence: Synthetic oligonucleotide
  Sense Strand Starting at position 860 of SEQ ID NO: 316492
ccuugauccuguuuaaaga

SEQ ID NO: 386414 - RNA, 19 nt, Artificial Sequence
  Description of Artificial Sequence: Synthetic oligonucleotide
  Antisense Strand to SEQ ID NO: 386413
ucuuuaaacaggaucaagg

SEQ ID NO: 386415 - RNA, 19 nt, Artificial Sequence
  Description of Artificial Sequence: Synthetic oligonucleotide
  Sense Strand Starting at position 860 of SEQ ID NO: 316748
agaaaugucuuaccugcau

SEQ ID NO: 386416 - RNA, 19 nt, Artificial Sequence
  Description of Artificial Sequence: Synthetic oligonucleotide
  Antisense Strand to SEQ ID NO: 386415
augcagguaagacauuucu

SEQ ID NO: 386417 - RNA, 19 nt, Artificial Sequence
  Description of Artificial Sequence: Synthetic oligonucleotide
  Sense Strand Starting at position 860 of SEQ ID NO: 317542
ccuguuauccuacagacau

SEQ ID NO: 386418 - RNA, 19 nt, Artificial Sequence
  Description of Artificial Sequence: Synthetic oligonucleotide
  Antisense Strand to SEQ ID NO: 386417
augucuguaggauaacagg

SEQ ID NO: 386419 - RNA, 19 nt, Artificial Sequence
  Description of Artificial Sequence: Synthetic oligonucleotide
  Sense Strand Starting at position 860 of SEQ ID NO: 317554
cagacauuauaggcugagu

SEQ ID NO: 386420 - RNA, 19 nt, Artificial Sequence
  Description of Artificial Sequence: Synthetic oligonucleotide
  Antisense Strand to SEQ ID NO: 386419
acucagccuauaaugucug

SEQ ID NO: 386421 - RNA, 19 nt, Artificial Sequence
  Description of Artificial Sequence: Synthetic oligonucleotide
  Sense Strand Starting at position 860 of SEQ ID NO: 317615
ucgaaaguuacguccguau

SEQ ID NO: 386422 - RNA, 19 nt, Artificial Sequence
  Description of Artificial Sequence: Synthetic oligonucleotide
  Antisense Strand to SEQ ID NO: 386421
auacggacguaacuuucga

SEQ ID NO: 386423 - RNA, 19 nt, Artificial Sequence
  Description of Artificial Sequence: Synthetic oligonucleotide
  Sense Strand Starting at position 860 of SEQ ID NO: 317705
aacccuagucccugaggau

SEQ ID NO: 386424 - RNA, 19 nt, Artificial Sequence
  Description of Artificial Sequence: Synthetic oligonucleotide
  Antisense Strand to SEQ ID NO: 386423
auccucagggacuaggguu

SEQ ID NO: 386425 - RNA, 19 nt, Artificial Sequence
  Description of Artificial Sequence: Synthetic oligonucleotide
  Sense Strand Starting at position 860 of SEQ ID NO: 318044
guuugaugugucuacacaa

SEQ ID NO: 386426 - RNA, 19 nt, Artificial Sequence
  Description of Artificial Sequence: Synthetic oligonucleotide
  Antisense Strand to SEQ ID NO: 386425
uuguguagacacaucaaac

SEQ ID NO: 386427 - RNA, 19 nt, Artificial Sequence
  Description of Artificial Sequence: Synthetic oligonucleotide
  Sense Strand Starting at position 860 of SEQ ID NO: 318051
gugucuacacaauaaaugu

SEQ ID NO: 386428 - RNA, 19 nt, Artificial Sequence
  Description of Artificial Sequence: Synthetic oligonucleotide
  Antisense Strand to SEQ ID NO: 386427
acauuuauuguguagacac

SEQ ID NO: 386429 - RNA, 19 nt, Artificial Sequence
  Description of Artificial Sequence: Synthetic oligonucleotide
  Sense Strand Starting at position 860 of SEQ ID NO: 318099
guauacugugauuaccuaa

SEQ ID NO: 386430 - RNA, 19 nt, Artificial Sequence
  Description of Artificial Sequence: Synthetic oligonucleotide
  Antisense Strand to SEQ ID NO: 386429
uuagguaaucacaguauac

SEQ ID NO: 386431 - RNA, 19 nt, Artificial Sequence
  Description of Artificial Sequence: Synthetic oligonucleotide
  Sense Strand Starting at position 860 of SEQ ID NO: 318232
uagaaaugucaauguguau

SEQ ID NO: 386432 - RNA, 19 nt, Artificial Sequence
  Description of Artificial Sequence: Synthetic oligonucleotide
  Antisense Strand to SEQ ID NO: 386431
auacacauugacauuucua

SEQ ID NO: 386433 - RNA, 19 nt, Artificial Sequence
  Description of Artificial Sequence: Synthetic oligonucleotide
  Sense Strand Starting at position 860 of SEQ ID NO: 318404
cggguagugauucauagga

SEQ ID NO: 386434 - RNA, 19 nt, Artificial Sequence
  Description of Artificial Sequence: Synthetic oligonucleotide
  Antisense Strand to SEQ ID NO: 386433
uccuaugaaucacuacccg

SEQ ID NO: 386435 - RNA, 19 nt, Artificial Sequence
  Description of Artificial Sequence: Synthetic oligonucleotide
  Sense Strand Starting at position 860 of SEQ ID NO: 318610
auuagauuccacuaguagu

SEQ ID NO: 386436 - RNA, 19 nt, Artificial Sequence
  Description of Artificial Sequence: Synthetic oligonucleotide
  Antisense Strand to SEQ ID NO: 386435
acuacuaguggaaucuaau

SEQ ID NO: 386437 - RNA, 19 nt, Artificial Sequence
  Description of Artificial Sequence: Synthetic oligonucleotide
  Sense Strand Starting at position 860 of SEQ ID NO: 318623
aguaguuacccuuggacaa

SEQ ID NO: 386438 - RNA, 19 nt, Artificial Sequence
  Description of Artificial Sequence: Synthetic oligonucleotide
  Antisense Strand to SEQ ID NO: 386437
uuguccaaggguaacuacu

SEQ ID NO: 386439 - RNA, 19 nt, Artificial Sequence
  Description of Artificial Sequence: Synthetic oligonucleotide
  Sense Strand Starting at position 860 of SEQ ID NO: 318624
guaguuacccuuggacaau

SEQ ID NO: 386440 - RNA, 19 nt, Artificial Sequence
  Description of Artificial Sequence: Synthetic oligonucleotide
  Antisense Strand to SEQ ID NO: 386439
auuguccaaggguaacuac

SEQ ID NO: 386441 - RNA, 19 nt, Artificial Sequence
  Description of Artificial Sequence: Synthetic oligonucleotide
  Sense Strand Starting at position 860 of SEQ ID NO: 318675
augucuaaacucuguauaa

SEQ ID NO: 386442 - RNA, 19 nt, Artificial Sequence
  Description of Artificial Sequence: Synthetic oligonucleotide
  Antisense Strand to SEQ ID NO: 386441
uuauacagaguuuagacau

SEQ ID NO: 386443 - RNA, 19 nt, Artificial Sequence
  Description of Artificial Sequence: Synthetic oligonucleotide
  Sense Strand Starting at position 860 of SEQ ID NO: 318676
ugucuaaacucuguauaaa

SEQ ID NO: 386444 - RNA, 19 nt, Artificial Sequence
  Description of Artificial Sequence: Synthetic oligonucleotide
  Antisense Strand to SEQ ID NO: 386443
uuuauacagaguuuagaca

SEQ ID NO: 386445 - RNA, 19 nt, Artificial Sequence
  Description of Artificial Sequence: Synthetic oligonucleotide
  Sense Strand Starting at position 860 of SEQ ID NO: 318901
acaaauaucuaccuagugu

SEQ ID NO: 386446 - RNA, 19 nt, Artificial Sequence
  Description of Artificial Sequence: Synthetic oligonucleotide
  Antisense Strand to SEQ ID NO: 386445
acacuagguagauauuugu

SEQ ID NO: 386447 - RNA, 19 nt, Artificial Sequence
  Description of Artificial Sequence: Synthetic oligonucleotide
  Sense Strand Starting at position 860 of SEQ ID NO: 318950
ugcaaaggaaguuguaaau

SEQ ID NO: 386448 - RNA, 19 nt, Artificial Sequence
  Description of Artificial Sequence: Synthetic oligonucleotide
  Antisense Strand to SEQ ID NO: 386447
auuuacaacuuccuuugca

SEQ ID NO: 386449 - RNA, 19 nt, Artificial Sequence
  Description of Artificial Sequence: Synthetic oligonucleotide
  Sense Strand Starting at position 860 of SEQ ID NO: 319119
aguauagugcuuugauuua

SEQ ID NO: 386450 - RNA, 19 nt, Artificial Sequence
  Description of Artificial Sequence: Synthetic oligonucleotide
  Antisense Strand to SEQ ID NO: 386449
uaaaucaaagcacuauacu

SEQ ID NO: 386451 - RNA, 19 nt, Artificial Sequence
  Description of Artificial Sequence: Synthetic oligonucleotide
  Sense Strand Starting at position 860 of SEQ ID NO: 319141
guacuagaaaucugugaag

SEQ ID NO: 386452 - RNA, 19 nt, Artificial Sequence
  Description of Artificial Sequence: Synthetic oligonucleotide
  Antisense Strand to SEQ ID NO: 386451
cuucacagauuucuaguac

SEQ ID NO: 386453 - RNA, 19 nt, Artificial Sequence
  Description of Artificial Sequence: Synthetic oligonucleotide
  Sense Strand Starting at position 860 of SEQ ID NO: 319143
acuagaaaucugugaagua

SEQ ID NO: 386454 - RNA, 19 nt, Artificial Sequence
  Description of Artificial Sequence: Synthetic oligonucleotide
  Antisense Strand to SEQ ID NO: 386453
uacuucacagauuucuagu

SEQ ID NO: 386455 - RNA, 19 nt, Artificial Sequence
  Description of Artificial Sequence: Synthetic oligonucleotide
  Sense Strand Starting at position 861 of SEQ ID NO: 315425
acacuugugcuacagcaga

SEQ ID NO: 386456 - RNA, 19 nt, Artificial Sequence
  Description of Artificial Sequence: Synthetic oligonucleotide
  Antisense Strand to SEQ ID NO: 386455
ucugcuguagcacaagugu

SEQ ID NO: 386457 - RNA, 19 nt, Artificial Sequence
  Description of Artificial Sequence: Synthetic oligonucleotide
  Sense Strand Starting at position 861 of SEQ ID NO: 315430
ugugcuacagcagaaagau

SEQ ID NO: 386458 - RNA, 19 nt, Artificial Sequence
  Description of Artificial Sequence: Synthetic oligonucleotide
  Antisense Strand to SEQ ID NO: 386457
aucuuucugcuguagcaca

SEQ ID NO: 386459 - RNA, 19 nt, Artificial Sequence
  Description of Artificial Sequence: Synthetic oligonucleotide
  Sense Strand Starting at position 861 of SEQ ID NO: 315445
agauaauaugucugagccu

SEQ ID NO: 386460 - RNA, 19 nt, Artificial Sequence
  Description of Artificial Sequence: Synthetic oligonucleotide
  Antisense Strand to SEQ ID NO: 386459
aggcucagacauauuaucu

SEQ ID NO: 386461 - RNA, 19 nt, Artificial Sequence
  Description of Artificial Sequence: Synthetic oligonucleotide
  Sense Strand Starting at position 861 of SEQ ID NO: 315593
agauucuugcuuuaguuau

SEQ ID NO: 386462 - RNA, 19 nt, Artificial Sequence
  Description of Artificial Sequence: Synthetic oligonucleotide
  Antisense Strand to SEQ ID NO: 386461
auaacuaaagcaagaaucu

SEQ ID NO: 386463 - RNA, 19 nt, Artificial Sequence
  Description of Artificial Sequence: Synthetic oligonucleotide
  Sense Strand Starting at position 861 of SEQ ID NO: 315870
caaguauuaggaugcauaa

SEQ ID NO: 386464 - RNA, 19 nt, Artificial Sequence
  Description of Artificial Sequence: Synthetic oligonucleotide
  Antisense Strand to SEQ ID NO: 386463
uuaugcauccuaauacuug

SEQ ID NO: 386465 - RNA, 19 nt, Artificial Sequence
  Description of Artificial Sequence: Synthetic oligonucleotide
  Sense Strand Starting at position 861 of SEQ ID NO: 316138
agaagugccuuuccaaaua

SEQ ID NO: 386466 - RNA, 19 nt, Artificial Sequence
  Description of Artificial Sequence: Synthetic oligonucleotide
  Antisense Strand to SEQ ID NO: 386465
uauuuggaaaggcacuucu

SEQ ID NO: 386467 - RNA, 19 nt, Artificial Sequence
  Description of Artificial Sequence: Synthetic oligonucleotide
  Sense Strand Starting at position 861 of SEQ ID NO: 316153
aauauugaucuguauacgu

SEQ ID NO: 386468 - RNA, 19 nt, Artificial Sequence
  Description of Artificial Sequence: Synthetic oligonucleotide
  Antisense Strand to SEQ ID NO: 386467
acguauacagaucaauauu

SEQ ID NO: 386469 - RNA, 19 nt, Artificial Sequence
  Description of Artificial Sequence: Synthetic oligonucleotide
  Sense Strand Starting at position 861 of SEQ ID NO: 316155
uauugaucuguauacguac

SEQ ID NO: 386470 - RNA, 19 nt, Artificial Sequence
  Description of Artificial Sequence: Synthetic oligonucleotide
  Antisense Strand to SEQ ID NO: 386469
guacguauacagaucaaua

SEQ ID NO: 386471 - RNA, 19 nt, Artificial Sequence
  Description of Artificial Sequence: Synthetic oligonucleotide
  Sense Strand Starting at position 861 of SEQ ID NO: 316173
ccaaguagcucauuugcau

SEQ ID NO: 386472 - RNA, 19 nt, Artificial Sequence
  Description of Artificial Sequence: Synthetic oligonucleotide
  Antisense Strand to SEQ ID NO: 386471
augcaaaugagcuacuugg

SEQ ID NO: 386473 - RNA, 19 nt, Artificial Sequence
  Description of Artificial Sequence: Synthetic oligonucleotide
  Sense Strand Starting at position 861 of SEQ ID NO: 316306
agaacuugcugaccagaga

SEQ ID NO: 386474 - RNA, 19 nt, Artificial Sequence
  Description of Artificial Sequence: Synthetic oligonucleotide
  Antisense Strand to SEQ ID NO: 386473
ucucuggucagcaaguucu

SEQ ID NO: 386475 - RNA, 19 nt, Artificial Sequence
  Description of Artificial Sequence: Synthetic oligonucleotide
  Sense Strand Starting at position 861 of SEQ ID NO: 316370
auugaaguauuccugaauc

SEQ ID NO: 386476 - RNA, 19 nt, Artificial Sequence
  Description of Artificial Sequence: Synthetic oligonucleotide
  Antisense Strand to SEQ ID NO: 386475
gauucaggaauacuucaau

SEQ ID NO: 386477 - RNA, 19 nt, Artificial Sequence
  Description of Artificial Sequence: Synthetic oligonucleotide
  Sense Strand Starting at position 861 of SEQ ID NO: 316381
ccugaaucauugucuugac

SEQ ID NO: 386478 - RNA, 19 nt, Artificial Sequence
  Description of Artificial Sequence: Synthetic oligonucleotide
  Antisense Strand to SEQ ID NO: 386477
gucaagacaaugauucagg

SEQ ID NO: 386479 - RNA, 19 nt, Artificial Sequence
  Description of Artificial Sequence: Synthetic oligonucleotide
  Sense Strand Starting at position 861 of SEQ ID NO: 316382
cugaaucauugucuugacu

SEQ ID NO: 386480 - RNA, 19 nt, Artificial Sequence
  Description of Artificial Sequence: Synthetic oligonucleotide
  Antisense Strand to SEQ ID NO: 386479
agucaagacaaugauucag

SEQ ID NO: 386481 - RNA, 19 nt, Artificial Sequence
  Description of Artificial Sequence: Synthetic oligonucleotide
  Sense Strand Starting at position 861 of SEQ ID NO: 316557
uguauuuacuucucugcau

SEQ ID NO: 386482 - RNA, 19 nt, Artificial Sequence
  Description of Artificial Sequence: Synthetic oligonucleotide
  Antisense Strand to SEQ ID NO: 386481
augcagagaaguaaauaca

SEQ ID NO: 386483 - RNA, 19 nt, Artificial Sequence
  Description of Artificial Sequence: Synthetic oligonucleotide
  Sense Strand Starting at position 861 of SEQ ID NO: 316558
guauuuacuucucugcaua

SEQ ID NO: 386484 - RNA, 19 nt, Artificial Sequence
  Description of Artificial Sequence: Synthetic oligonucleotide
  Antisense Strand to SEQ ID NO: 386483
uaugcagagaaguaaauac

SEQ ID NO: 386485 - RNA, 19 nt, Artificial Sequence
  Description of Artificial Sequence: Synthetic oligonucleotide
  Sense Strand Starting at position 861 of SEQ ID NO: 316665
gauagaaugucagcacuca

SEQ ID NO: 386486 - RNA, 19 nt, Artificial Sequence
  Description of Artificial Sequence: Synthetic oligonucleotide
  Antisense Strand to SEQ ID NO: 386485
ugagugcugacauucuauc

SEQ ID NO: 386487 - RNA, 19 nt, Artificial Sequence
  Description of Artificial Sequence: Synthetic oligonucleotide
  Sense Strand Starting at position 861 of SEQ ID NO: 316781
aggcuaguucagggaagga

SEQ ID NO: 386488 - RNA, 19 nt, Artificial Sequence
  Description of Artificial Sequence: Synthetic oligonucleotide
  Antisense Strand to SEQ ID NO: 386487
uccuucccugaacuagccu

SEQ ID NO: 386489 - RNA, 19 nt, Artificial Sequence
  Description of Artificial Sequence: Synthetic oligonucleotide
  Sense Strand Starting at position 861 of SEQ ID NO: 317140
gggaaucccugucuucuau

SEQ ID NO: 386490 - RNA, 19 nt, Artificial Sequence
  Description of Artificial Sequence: Synthetic oligonucleotide
  Antisense Strand to SEQ ID NO: 386489
auagaagacagggauuccc

SEQ ID NO: 386491 - RNA, 19 nt, Artificial Sequence
  Description of Artificial Sequence: Synthetic oligonucleotide
  Sense Strand Starting at position 861 of SEQ ID NO: 317200
cugcguggucuuucacagu

SEQ ID NO: 386492 - RNA, 19 nt, Artificial Sequence
  Description of Artificial Sequence: Synthetic oligonucleotide
  Antisense Strand to SEQ ID NO: 386491
acugugaaagaccacgcag

SEQ ID NO: 386493 - RNA, 19 nt, Artificial Sequence
  Description of Artificial Sequence: Synthetic oligonucleotide
  Sense Strand Starting at position 861 of SEQ ID NO: 317410
uuagcaugcugcccauuua

SEQ ID NO: 386494 - RNA, 19 nt, Artificial Sequence
  Description of Artificial Sequence: Synthetic oligonucleotide
  Antisense Strand to SEQ ID NO: 386493
uaaaugggcagcaugcuaa

SEQ ID NO: 386495 - RNA, 19 nt, Artificial Sequence
  Description of Artificial Sequence: Synthetic oligonucleotide
  Sense Strand Starting at position 861 of SEQ ID NO: 317531
agcgaaaggacauagucuu

SEQ ID NO: 386496 - RNA, 19 nt, Artificial Sequence
  Description of Artificial Sequence: Synthetic oligonucleotide
  Antisense Strand to SEQ ID NO: 386495
aagacuauguccuuucgcu

SEQ ID NO: 386497 - RNA, 19 nt, Artificial Sequence
  Description of Artificial Sequence: Synthetic oligonucleotide
  Sense Strand Starting at position 861 of SEQ ID NO: 317661
cuuucugaccugcaagaga

SEQ ID NO: 386498 - RNA, 19 nt, Artificial Sequence
  Description of Artificial Sequence: Synthetic oligonucleotide
  Antisense Strand to SEQ ID NO: 386497
ucucuugcaggucagaaag

SEQ ID NO: 386499 - RNA, 19 nt, Artificial Sequence
  Description of Artificial Sequence: Synthetic oligonucleotide
  Sense Strand Starting at position 861 of SEQ ID NO: 317697
uuuguuaaugcugauaacu

SEQ ID NO: 386500 - RNA, 19 nt, Artificial Sequence
  Description of Artificial Sequence: Synthetic oligonucleotide
  Antisense Strand to SEQ ID NO: 386499
aguuaucagcauuaacaaa

SEQ ID NO: 386501 - RNA, 19 nt, Artificial Sequence
  Description of Artificial Sequence: Synthetic oligonucleotide
  Sense Strand Starting at position 861 of SEQ ID NO: 317729
ugcauuagauggguaacuu

SEQ ID NO: 386502 - RNA, 19 nt, Artificial Sequence
  Description of Artificial Sequence: Synthetic oligonucleotide
  Antisense Strand to SEQ ID NO: 386501
aaguuacccaucuaaugca

SEQ ID NO: 386503 - RNA, 19 nt, Artificial Sequence
  Description of Artificial Sequence: Synthetic oligonucleotide
  Sense Strand Starting at position 861 of SEQ ID NO: 317730
gcauuagauggguaacuuu

SEQ ID NO: 386504 - RNA, 19 nt, Artificial Sequence
  Description of Artificial Sequence: Synthetic oligonucleotide
  Antisense Strand to SEQ ID NO: 386503
aaaguuacccaucuaaugc

SEQ ID NO: 386505 - RNA, 19 nt, Artificial Sequence
  Description of Artificial Sequence: Synthetic oligonucleotide
  Sense Strand Starting at position 861 of SEQ ID NO: 317737
auggguaacuuucuuaaga

SEQ ID NO: 386506 - RNA, 19 nt, Artificial Sequence
  Description of Artificial Sequence: Synthetic oligonucleotide
  Antisense Strand to SEQ ID NO: 386505
ucuuaagaaaguuacccau

SEQ ID NO: 386507 - RNA, 19 nt, Artificial Sequence
  Description of Artificial Sequence: Synthetic oligonucleotide
  Sense Strand Starting at position 861 of SEQ ID NO: 317738
uggguaacuuucuuaagaa

SEQ ID NO: 386508 - RNA, 19 nt, Artificial Sequence
  Description of Artificial Sequence: Synthetic oligonucleotide
  Antisense Strand to SEQ ID NO: 386507
uucuuaagaaaguuaccca

SEQ ID NO: 386509 - RNA, 19 nt, Artificial Sequence
  Description of Artificial Sequence: Synthetic oligonucleotide
  Sense Strand Starting at position 861 of SEQ ID NO: 317862
acagaaaggugaguuuauu

SEQ ID NO: 386510 - RNA, 19 nt, Artificial Sequence
  Description of Artificial Sequence: Synthetic oligonucleotide
  Antisense Strand to SEQ ID NO: 386509
aauaaacucaccuuucugu

SEQ ID NO: 386511 - RNA, 19 nt, Artificial Sequence
  Description of Artificial Sequence: Synthetic oligonucleotide
  Sense Strand Starting at position 861 of SEQ ID NO: 318151
ccaugaaugcacuauugca

SEQ ID NO: 386512 - RNA, 19 nt, Artificial Sequence
  Description of Artificial Sequence: Synthetic oligonucleotide
  Antisense Strand to SEQ ID NO: 386511
ugcaauagugcauucaugg

SEQ ID NO: 386513 - RNA, 19 nt, Artificial Sequence
  Description of Artificial Sequence: Synthetic oligonucleotide
  Sense Strand Starting at position 861 of SEQ ID NO: 318244
gccacagauaugggaugua

SEQ ID NO: 386514 - RNA, 19 nt, Artificial Sequence
  Description of Artificial Sequence: Synthetic oligonucleotide
  Antisense Strand to SEQ ID NO: 386513
uacaucccauaucuguggc

SEQ ID NO: 386515 - RNA, 19 nt, Artificial Sequence
  Description of Artificial Sequence: Synthetic oligonucleotide
  Sense Strand Starting at position 861 of SEQ ID NO: 318391
aauacuaguuguguaugaa

SEQ ID NO: 386516 - RNA, 19 nt, Artificial Sequence
  Description of Artificial Sequence: Synthetic oligonucleotide
  Antisense Strand to SEQ ID NO: 386515
uucauacacaacuaguauu

SEQ ID NO: 386517 - RNA, 19 nt, Artificial Sequence
  Description of Artificial Sequence: Synthetic oligonucleotide
  Sense Strand Starting at position 861 of SEQ ID NO: 318392
auacuaguuguguaugaau

SEQ ID NO: 386518 - RNA, 19 nt, Artificial Sequence
  Description of Artificial Sequence: Synthetic oligonucleotide
  Antisense Strand to SEQ ID NO: 386517
auucauacacaacuaguau

SEQ ID NO: 386519 - RNA, 19 nt, Artificial Sequence
  Description of Artificial Sequence: Synthetic oligonucleotide
  Sense Strand Starting at position 861 of SEQ ID NO: 318490
uggcuaauuguacaaauua

SEQ ID NO: 386520 - RNA, 19 nt, Artificial Sequence
  Description of Artificial Sequence: Synthetic oligonucleotide
  Antisense Strand to SEQ ID NO: 386519
uaauuuguacaauuagcca

SEQ ID NO: 386521 - RNA, 19 nt, Artificial Sequence
  Description of Artificial Sequence: Synthetic oligonucleotide
  Sense Strand Starting at position 861 of SEQ ID NO: 318986
aggugucuguaucuaagaa

SEQ ID NO: 386522 - RNA, 19 nt, Artificial Sequence
  Description of Artificial Sequence: Synthetic oligonucleotide
  Antisense Strand to SEQ ID NO: 386521
uucuuagauacagacaccu

SEQ ID NO: 386523 - RNA, 19 nt, Artificial Sequence
  Description of Artificial Sequence: Synthetic oligonucleotide
  Sense Strand Starting at position 861 of SEQ ID NO: 318987
ggugucuguaucuaagaag

SEQ ID NO: 386524 - RNA, 19 nt, Artificial Sequence
  Description of Artificial Sequence: Synthetic oligonucleotide
  Antisense Strand to SEQ ID NO: 386523
cuucuuagauacagacacc

SEQ ID NO: 386525 - RNA, 19 nt, Artificial Sequence
  Description of Artificial Sequence: Synthetic oligonucleotide
  Sense Strand Starting at position 861 of SEQ ID NO: 319021
gcauauagaucacuagggu

SEQ ID NO: 386526 - RNA, 19 nt, Artificial Sequence
  Description of Artificial Sequence: Synthetic oligonucleotide
  Antisense Strand to SEQ ID NO: 386525
acccuagugaucuauaugc

SEQ ID NO: 386527 - RNA, 19 nt, Artificial Sequence
  Description of Artificial Sequence: Synthetic oligonucleotide
  Sense Strand Starting at position 861 of SEQ ID NO: 319024
uauagaucacuaggguuaa

SEQ ID NO: 386528 - RNA, 19 nt, Artificial Sequence
  Description of Artificial Sequence: Synthetic oligonucleotide
  Antisense Strand to SEQ ID NO: 386527
uuaacccuagugaucuaua

SEQ ID NO: 386529 - RNA, 19 nt, Artificial Sequence
  Description of Artificial Sequence: Synthetic oligonucleotide
  Sense Strand Starting at position 861 of SEQ ID NO: 319038
guuaauugaaauugcagga

SEQ ID NO: 386530 - RNA, 19 nt, Artificial Sequence
  Description of Artificial Sequence: Synthetic oligonucleotide
  Antisense Strand to SEQ ID NO: 386529
uccugcaauuucaauuaac

SEQ ID NO: 386531 - RNA, 19 nt, Artificial Sequence
  Description of Artificial Sequence: Synthetic oligonucleotide
  Sense Strand Starting at position 861 of SEQ ID NO: 319122
agagaacaguugcauuuaa

SEQ ID NO: 386532 - RNA, 19 nt, Artificial Sequence
  Description of Artificial Sequence: Synthetic oligonucleotide
  Antisense Strand to SEQ ID NO: 386531
uuaaaugcaacuguucucu

SEQ ID NO: 386533 - RNA, 19 nt, Artificial Sequence
  Description of Artificial Sequence: Synthetic oligonucleotide
  Sense Strand Starting at position 861 of SEQ ID NO: 319203
ggcgaauuaguggaauaca

SEQ ID NO: 386534 - RNA, 19 nt, Artificial Sequence
  Description of Artificial Sequence: Synthetic oligonucleotide
  Antisense Strand to SEQ ID NO: 386533
uguauuccacuaauucgcc

SEQ ID NO: 386535 - RNA, 19 nt, Artificial Sequence
  Description of Artificial Sequence: Synthetic oligonucleotide
  Sense Strand Starting at position 862 of SEQ ID NO: 315265
ggcagaucauuagagauaa

SEQ ID NO: 386536 - RNA, 19 nt, Artificial Sequence
  Description of Artificial Sequence: Synthetic oligonucleotide
  Antisense Strand to SEQ ID NO: 386535
uuaucucuaaugaucugcc

SEQ ID NO: 386537 - RNA, 19 nt, Artificial Sequence
  Description of Artificial Sequence: Synthetic oligonucleotide
  Sense Strand Starting at position 862 of SEQ ID NO: 315615
ccagaagagucucaaagga

SEQ ID NO: 386538 - RNA, 19 nt, Artificial Sequence
  Description of Artificial Sequence: Synthetic oligonucleotide
  Antisense Strand to SEQ ID NO: 386537
uccuuugagacucuucugg

SEQ ID NO: 386539 - RNA, 19 nt, Artificial Sequence
  Description of Artificial Sequence: Synthetic oligonucleotide
  Sense Strand Starting at position 862 of SEQ ID NO: 315651
caggacugagugugcauua

SEQ ID NO: 386540 - RNA, 19 nt, Artificial Sequence
  Description of Artificial Sequence: Synthetic oligonucleotide
  Antisense Strand to SEQ ID NO: 386539
uaaugcacacucaguccug

SEQ ID NO: 386541 - RNA, 19 nt, Artificial Sequence
  Description of Artificial Sequence: Synthetic oligonucleotide
  Sense Strand Starting at position 862 of SEQ ID NO: 315652
aggacugagugugcauuau

SEQ ID NO: 386542 - RNA, 19 nt, Artificial Sequence
  Description of Artificial Sequence: Synthetic oligonucleotide
  Antisense Strand to SEQ ID NO: 386541
auaaugcacacucaguccu

SEQ ID NO: 386543 - RNA, 19 nt, Artificial Sequence
  Description of Artificial Sequence: Synthetic oligonucleotide
  Sense Strand Starting at position 862 of SEQ ID NO: 315656
cugagugugcauuauagac

SEQ ID NO: 386544 - RNA, 19 nt, Artificial Sequence
  Description of Artificial Sequence: Synthetic oligonucleotide
  Antisense Strand to SEQ ID NO: 386543
gucuauaaugcacacucag

SEQ ID NO: 386545 - RNA, 19 nt, Artificial Sequence
  Description of Artificial Sequence: Synthetic oligonucleotide
  Sense Strand Starting at position 862 of SEQ ID NO: 315723
acgacuuggucuggucaga

SEQ ID NO: 386546 - RNA, 19 nt, Artificial Sequence
  Description of Artificial Sequence: Synthetic oligonucleotide
  Antisense Strand to SEQ ID NO: 386545
ucugaccagaccaagucgu

SEQ ID NO: 386547 - RNA, 19 nt, Artificial Sequence
  Description of Artificial Sequence: Synthetic oligonucleotide
  Sense Strand Starting at position 862 of SEQ ID NO: 315728
uuggucuggucagaaacau

SEQ ID NO: 386548 - RNA, 19 nt, Artificial Sequence
  Description of Artificial Sequence: Synthetic oligonucleotide
  Antisense Strand to SEQ ID NO: 386547
auguuucugaccagaccaa

SEQ ID NO: 386549 - RNA, 19 nt, Artificial Sequence
  Description of Artificial Sequence: Synthetic oligonucleotide
  Sense Strand Starting at position 862 of SEQ ID NO: 315803
ggacucauaucaugaucaa

SEQ ID NO: 386550 - RNA, 19 nt, Artificial Sequence
  Description of Artificial Sequence: Synthetic oligonucleotide
  Antisense Strand to SEQ ID NO: 386549
uugaucaugauaugagucc

SEQ ID NO: 386551 - RNA, 19 nt, Artificial Sequence
  Description of Artificial Sequence: Synthetic oligonucleotide
  Sense Strand Starting at position 862 of SEQ ID NO: 315960
acuagauguucucugaggu

SEQ ID NO: 386552 - RNA, 19 nt, Artificial Sequence
  Description of Artificial Sequence: Synthetic oligonucleotide
  Antisense Strand to SEQ ID NO: 386551
accucagagaacaucuagu

SEQ ID NO: 386553 - RNA, 19 nt, Artificial Sequence
  Description of Artificial Sequence: Synthetic oligonucleotide
  Sense Strand Starting at position 862 of SEQ ID NO: 315961
cuagauguucucugaggug

SEQ ID NO: 386554 - RNA, 19 nt, Artificial Sequence
  Description of Artificial Sequence: Synthetic oligonucleotide
  Antisense Strand to SEQ ID NO: 386553
caccucagagaacaucuag

SEQ ID NO: 386555 - RNA, 19 nt, Artificial Sequence
  Description of Artificial Sequence: Synthetic oligonucleotide
  Sense Strand Starting at position 862 of SEQ ID NO: 316332
gagcgagacucaucucuua

SEQ ID NO: 386556 - RNA, 19 nt, Artificial Sequence
  Description of Artificial Sequence: Synthetic oligonucleotide
  Antisense Strand to SEQ ID NO: 386555
uaagagaugagucucgcuc

SEQ ID NO: 386557 - RNA, 19 nt, Artificial Sequence
  Description of Artificial Sequence: Synthetic oligonucleotide
  Sense Strand Starting at position 862 of SEQ ID NO: 316459
ucagcauucuccuagcugu

SEQ ID NO: 386558 - RNA, 19 nt, Artificial Sequence
  Description of Artificial Sequence: Synthetic oligonucleotide
  Antisense Strand to SEQ ID NO: 386557
acagcuaggagaaugcuga

SEQ ID NO: 386559 - RNA, 19 nt, Artificial Sequence
  Description of Artificial Sequence: Synthetic oligonucleotide
  Sense Strand Starting at position 862 of SEQ ID NO: 316523
uuacaugucccgggacaca

SEQ ID NO: 386560 - RNA, 19 nt, Artificial Sequence
  Description of Artificial Sequence: Synthetic oligonucleotide
  Antisense Strand to SEQ ID NO: 386559
ugugucccgggacauguaa

SEQ ID NO: 386561 - RNA, 19 nt, Artificial Sequence
  Description of Artificial Sequence: Synthetic oligonucleotide
  Sense Strand Starting at position 862 of SEQ ID NO: 316569
ugucucuauccugagcaca

SEQ ID NO: 386562 - RNA, 19 nt, Artificial Sequence
  Description of Artificial Sequence: Synthetic oligonucleotide
  Antisense Strand to SEQ ID NO: 386561
ugugcucaggauagagaca

SEQ ID NO: 386563 - RNA, 19 nt, Artificial Sequence
  Description of Artificial Sequence: Synthetic oligonucleotide
  Sense Strand Starting at position 862 of SEQ ID NO: 316580
ugagcacaucucugcugaa

SEQ ID NO: 386564 - RNA, 19 nt, Artificial Sequence
  Description of Artificial Sequence: Synthetic oligonucleotide
  Antisense Strand to SEQ ID NO: 386563
uucagcagagaugugcuca

SEQ ID NO: 386565 - RNA, 19 nt, Artificial Sequence
  Description of Artificial Sequence: Synthetic oligonucleotide
  Sense Strand Starting at position 862 of SEQ ID NO: 316583
gcacaucucugcugaaguu

SEQ ID NO: 386566 - RNA, 19 nt, Artificial Sequence
  Description of Artificial Sequence: Synthetic oligonucleotide
  Antisense Strand to SEQ ID NO: 386565
aacuucagcagagaugugc

SEQ ID NO: 386567 - RNA, 19 nt, Artificial Sequence
  Description of Artificial Sequence: Synthetic oligonucleotide
  Sense Strand Starting at position 862 of SEQ ID NO: 316604
ugcccaagcucagcuuuaa

SEQ ID NO: 386568 - RNA, 19 nt, Artificial Sequence
  Description of Artificial Sequence: Synthetic oligonucleotide
  Antisense Strand to SEQ ID NO: 386567
uuaaagcugagcuugggca

SEQ ID NO: 386569 - RNA, 19 nt, Artificial Sequence
  Description of Artificial Sequence: Synthetic oligonucleotide
  Sense Strand Starting at position 862 of SEQ ID NO: 316665
uuugaaaguucugggcuca

SEQ ID NO: 386570 - RNA, 19 nt, Artificial Sequence
  Description of Artificial Sequence: Synthetic oligonucleotide
  Antisense Strand to SEQ ID NO: 386569
ugagcccagaacuuucaaa

SEQ ID NO: 386571 - RNA, 19 nt, Artificial Sequence
  Description of Artificial Sequence: Synthetic oligonucleotide
  Sense Strand Starting at position 862 of SEQ ID NO: 316746
acuccuuggccaggagaga

SEQ ID NO: 386572 - RNA, 19 nt, Artificial Sequence
  Description of Artificial Sequence: Synthetic oligonucleotide
  Antisense Strand to SEQ ID NO: 386571
ucucuccuggccaaggagu

SEQ ID NO: 386573 - RNA, 19 nt, Artificial Sequence
  Description of Artificial Sequence: Synthetic oligonucleotide
  Sense Strand Starting at position 862 of SEQ ID NO: 317472
cgagaaugcgcaugcucaa

SEQ ID NO: 386574 - RNA, 19 nt, Artificial Sequence
  Description of Artificial Sequence: Synthetic oligonucleotide
  Antisense Strand to SEQ ID NO: 386573
uugagcaugcgcauucucg

SEQ ID NO: 386575 - RNA, 19 nt, Artificial Sequence
  Description of Artificial Sequence: Synthetic oligonucleotide
  Sense Strand Starting at position 862 of SEQ ID NO: 317484
ugcucaacuccggauugua

SEQ ID NO: 386576 - RNA, 19 nt, Artificial Sequence
  Description of Artificial Sequence: Synthetic oligonucleotide
  Antisense Strand to SEQ ID NO: 386575
uacaauccggaguugagca

SEQ ID NO: 386577 - RNA, 19 nt, Artificial Sequence
  Description of Artificial Sequence: Synthetic oligonucleotide
  Sense Strand Starting at position 862 of SEQ ID NO: 317641
gcacgcgugaauucugcua

SEQ ID NO: 386578 - RNA, 19 nt, Artificial Sequence
  Description of Artificial Sequence: Synthetic oligonucleotide
  Antisense Strand to SEQ ID NO: 386577
uagcagaauucacgcgugc

SEQ ID NO: 386579 - RNA, 19 nt, Artificial Sequence
  Description of Artificial Sequence: Synthetic oligonucleotide
  Sense Strand Starting at position 862 of SEQ ID NO: 317645
gcgugaauucugcuaccuc

SEQ ID NO: 386580 - RNA, 19 nt, Artificial Sequence
  Description of Artificial Sequence: Synthetic oligonucleotide
  Antisense Strand to SEQ ID NO: 386579
gagguagcagaauucacgc

SEQ ID NO: 386581 - RNA, 19 nt, Artificial Sequence
  Description of Artificial Sequence: Synthetic oligonucleotide
  Sense Strand Starting at position 862 of SEQ ID NO: 317967
gagcaaaugcgugggacuu

SEQ ID NO: 386582 - RNA, 19 nt, Artificial Sequence
  Description of Artificial Sequence: Synthetic oligonucleotide
  Antisense Strand to SEQ ID NO: 386581
aagucccacgcauuugcuc

SEQ ID NO: 386583 - RNA, 19 nt, Artificial Sequence
  Description of Artificial Sequence: Synthetic oligonucleotide
  Sense Strand Starting at position 862 of SEQ ID NO: 317968
agcaaaugcgugggacuuu

SEQ ID NO: 386584 - RNA, 19 nt, Artificial Sequence
  Description of Artificial Sequence: Synthetic oligonucleotide
  Antisense Strand to SEQ ID NO: 386583
aaagucccacgcauuugcu

SEQ ID NO: 386585 - RNA, 19 nt, Artificial Sequence
  Description of Artificial Sequence: Synthetic oligonucleotide
  Sense Strand Starting at position 862 of SEQ ID NO: 318284
ggcacuuaguaaccaagua

SEQ ID NO: 386586 - RNA, 19 nt, Artificial Sequence
  Description of Artificial Sequence: Synthetic oligonucleotide
  Antisense Strand to SEQ ID NO: 386585
uacuugguuacuaagugcc

SEQ ID NO: 386587 - RNA, 19 nt, Artificial Sequence
  Description of Artificial Sequence: Synthetic oligonucleotide
  Sense Strand Starting at position 862 of SEQ ID NO: 318313
ucacuaagcccugggagua

SEQ ID NO: 386588 - RNA, 19 nt, Artificial Sequence
  Description of Artificial Sequence: Synthetic oligonucleotide
  Antisense Strand to SEQ ID NO: 386587
uacucccagggcuuaguga

SEQ ID NO: 386589 - RNA, 19 nt, Artificial Sequence
  Description of Artificial Sequence: Synthetic oligonucleotide
  Sense Strand Starting at position 862 of SEQ ID NO: 318314
cacuaagcccugggaguau

SEQ ID NO: 386590 - RNA, 19 nt, Artificial Sequence
  Description of Artificial Sequence: Synthetic oligonucleotide
  Antisense Strand to SEQ ID NO: 386589
auacucccagggcuuagug

SEQ ID NO: 386591 - RNA, 19 nt, Artificial Sequence
  Description of Artificial Sequence: Synthetic oligonucleotide
  Sense Strand Starting at position 862 of SEQ ID NO: 318323
cugggaguaucuuaaucgu

SEQ ID NO: 386592 - RNA, 19 nt, Artificial Sequence
  Description of Artificial Sequence: Synthetic oligonucleotide
  Antisense Strand to SEQ ID NO: 386591
acgauuaagauacucccag

SEQ ID NO: 386593 - RNA, 19 nt, Artificial Sequence
  Description of Artificial Sequence: Synthetic oligonucleotide
  Sense Strand Starting at position 862 of SEQ ID NO: 318326
ggaguaucuuaaucgucuu

SEQ ID NO: 386594 - RNA, 19 nt, Artificial Sequence
  Description of Artificial Sequence: Synthetic oligonucleotide
  Antisense Strand to SEQ ID NO: 386593
aagacgauuaagauacucc

SEQ ID NO: 386595 - RNA, 19 nt, Artificial Sequence
  Description of Artificial Sequence: Synthetic oligonucleotide
  Sense Strand Starting at position 862 of SEQ ID NO: 318332
ucuuaaucgucuuuccaga

SEQ ID NO: 386596 - RNA, 19 nt, Artificial Sequence
  Description of Artificial Sequence: Synthetic oligonucleotide
  Antisense Strand to SEQ ID NO: 386595
ucuggaaagacgauuaaga

SEQ ID NO: 386597 - RNA, 19 nt, Artificial Sequence
  Description of Artificial Sequence: Synthetic oligonucleotide
  Sense Strand Starting at position 862 of SEQ ID NO: 318334
uuaaucgucuuuccagaau

SEQ ID NO: 386598 - RNA, 19 nt, Artificial Sequence
  Description of Artificial Sequence: Synthetic oligonucleotide
  Antisense Strand to SEQ ID NO: 386597
auucuggaaagacgauuaa

SEQ ID NO: 386599 - RNA, 19 nt, Artificial Sequence
  Description of Artificial Sequence: Synthetic oligonucleotide
  Sense Strand Starting at position 862 of SEQ ID NO: 318463
ggaugugcacauugucuau

SEQ ID NO: 386600 - RNA, 19 nt, Artificial Sequence
  Description of Artificial Sequence: Synthetic oligonucleotide
  Antisense Strand to SEQ ID NO: 386599
auagacaaugugcacaucc

SEQ ID NO: 386601 - RNA, 19 nt, Artificial Sequence
  Description of Artificial Sequence: Synthetic oligonucleotide
  Sense Strand Starting at position 862 of SEQ ID NO: 318467
gugcacauugucuaucuua

SEQ ID NO: 386602 - RNA, 19 nt, Artificial Sequence
  Description of Artificial Sequence: Synthetic oligonucleotide
  Antisense Strand to SEQ ID NO: 386601
uaagauagacaaugugcac

SEQ ID NO: 386603 - RNA, 19 nt, Artificial Sequence
  Description of Artificial Sequence: Synthetic oligonucleotide
  Sense Strand Starting at position 862 of SEQ ID NO: 318474
uugucuaucuuacaguauu

SEQ ID NO: 386604 - RNA, 19 nt, Artificial Sequence
  Description of Artificial Sequence: Synthetic oligonucleotide
  Antisense Strand to SEQ ID NO: 386603
aauacuguaagauagacaa

SEQ ID NO: 386605 - RNA, 19 nt, Artificial Sequence
  Description of Artificial Sequence: Synthetic oligonucleotide
  Sense Strand Starting at position 862 of SEQ ID NO: 318482
cuuacaguauuacaguaua

SEQ ID NO: 386606 - RNA, 19 nt, Artificial Sequence
  Description of Artificial Sequence: Synthetic oligonucleotide
  Antisense Strand to SEQ ID NO: 386605
uauacuguaauacuguaag

SEQ ID NO: 386607 - RNA, 19 nt, Artificial Sequence
  Description of Artificial Sequence: Synthetic oligonucleotide
  Sense Strand Starting at position 862 of SEQ ID NO: 318507
guaugucaaucucuaagaa

SEQ ID NO: 386608 - RNA, 19 nt, Artificial Sequence
  Description of Artificial Sequence: Synthetic oligonucleotide
  Antisense Strand to SEQ ID NO: 386607
uucuuagagauugacauac

SEQ ID NO: 386609 - RNA, 19 nt, Artificial Sequence
  Description of Artificial Sequence: Synthetic oligonucleotide
  Sense Strand Starting at position 862 of SEQ ID NO: 319018
acagaugucuugcccacuu

SEQ ID NO: 386610 - RNA, 19 nt, Artificial Sequence
  Description of Artificial Sequence: Synthetic oligonucleotide
  Antisense Strand to SEQ ID NO: 386609
aagugggcaagacaucugu

SEQ ID NO: 386611 - RNA, 19 nt, Artificial Sequence
  Description of Artificial Sequence: Synthetic oligonucleotide
  Sense Strand Starting at position 862 of SEQ ID NO: 319174
ugcaguaucuacccgcuua

SEQ ID NO: 386612 - RNA, 19 nt, Artificial Sequence
  Description of Artificial Sequence: Synthetic oligonucleotide
  Antisense Strand to SEQ ID NO: 386611
uaagcggguagauacugca

SEQ ID NO: 386613 - RNA, 19 nt, Artificial Sequence
  Description of Artificial Sequence: Synthetic oligonucleotide
  Sense Strand Starting at position 863 of SEQ ID NO: 315241
gucccauuacaguaaauca

SEQ ID NO: 386614 - RNA, 19 nt, Artificial Sequence
  Description of Artificial Sequence: Synthetic oligonucleotide
  Antisense Strand to SEQ ID NO: 386613
ugauuuacuguaaugggac

SEQ ID NO: 386615 - RNA, 19 nt, Artificial Sequence
  Description of Artificial Sequence: Synthetic oligonucleotide
  Sense Strand Starting at position 863 of SEQ ID NO: 315331
ugcuuagaguaacuagaaa

SEQ ID NO: 386616 - RNA, 19 nt, Artificial Sequence
  Description of Artificial Sequence: Synthetic oligonucleotide
  Antisense Strand to SEQ ID NO: 386615
uuucuaguuacucuaagca

SEQ ID NO: 386617 - RNA, 19 nt, Artificial Sequence
  Description of Artificial Sequence: Synthetic oligonucleotide
  Sense Strand Starting at position 863 of SEQ ID NO: 315342
acuagaaauauacgugaug

SEQ ID NO: 386618 - RNA, 19 nt, Artificial Sequence
  Description of Artificial Sequence: Synthetic oligonucleotide
  Antisense Strand to SEQ ID NO: 386617
caucacguauauuucuagu

SEQ ID NO: 386619 - RNA, 19 nt, Artificial Sequence
  Description of Artificial Sequence: Synthetic oligonucleotide
  Sense Strand Starting at position 863 of SEQ ID NO: 315343
cuagaaauauacgugauga

SEQ ID NO: 386620 - RNA, 19 nt, Artificial Sequence
  Description of Artificial Sequence: Synthetic oligonucleotide
  Antisense Strand to SEQ ID NO: 386619
ucaucacguauauuucuag

SEQ ID NO: 386621 - RNA, 19 nt, Artificial Sequence
  Description of Artificial Sequence: Synthetic oligonucleotide
  Sense Strand Starting at position 863 of SEQ ID NO: 315347
aaauauacgugaugagaug

SEQ ID NO: 386622 - RNA, 19 nt, Artificial Sequence
  Description of Artificial Sequence: Synthetic oligonucleotide
  Antisense Strand to SEQ ID NO: 386621
caucucaucacguauauuu

SEQ ID NO: 386623 - RNA, 19 nt, Artificial Sequence
  Description of Artificial Sequence: Synthetic oligonucleotide
  Sense Strand Starting at position 863 of SEQ ID NO: 315463
ccaucucaguaaucaguuu

SEQ ID NO: 386624 - RNA, 19 nt, Artificial Sequence
  Description of Artificial Sequence: Synthetic oligonucleotide
  Antisense Strand to SEQ ID NO: 386623
aaacugauuacugagaugg

SEQ ID NO: 386625 - RNA, 19 nt, Artificial Sequence
  Description of Artificial Sequence: Synthetic oligonucleotide
  Sense Strand Starting at position 863 of SEQ ID NO: 315502
guggauucugucuacagca

SEQ ID NO: 386626 - RNA, 19 nt, Artificial Sequence
  Description of Artificial Sequence: Synthetic oligonucleotide
  Antisense Strand to SEQ ID NO: 386625
ugcuguagacagaauccac

SEQ ID NO: 386627 - RNA, 19 nt, Artificial Sequence
  Description of Artificial Sequence: Synthetic oligonucleotide
  Sense Strand Starting at position 863 of SEQ ID NO: 315522
ugcgguaggcaauaguaaa

SEQ ID NO: 386628 - RNA, 19 nt, Artificial Sequence
  Description of Artificial Sequence: Synthetic oligonucleotide
  Antisense Strand to SEQ ID NO: 386627
uuuacuauugccuaccgca

SEQ ID NO: 386629 - RNA, 19 nt, Artificial Sequence
  Description of Artificial Sequence: Synthetic oligonucleotide
  Sense Strand Starting at position 863 of SEQ ID NO: 315651
aucagaacugcagagucau

SEQ ID NO: 386630 - RNA, 19 nt, Artificial Sequence
  Description of Artificial Sequence: Synthetic oligonucleotide
  Antisense Strand to SEQ ID NO: 386629
augacucugcaguucugau

SEQ ID NO: 386631 - RNA, 19 nt, Artificial Sequence
  Description of Artificial Sequence: Synthetic oligonucleotide
  Sense Strand Starting at position 863 of SEQ ID NO: 315699
cccgcaaucuuccuaguca

SEQ ID NO: 386632 - RNA, 19 nt, Artificial Sequence
  Description of Artificial Sequence: Synthetic oligonucleotide
  Antisense Strand to SEQ ID NO: 386631
ugacuaggaagauugcggg

SEQ ID NO: 386633 - RNA, 19 nt, Artificial Sequence
  Description of Artificial Sequence: Synthetic oligonucleotide
  Sense Strand Starting at position 863 of SEQ ID NO: 315790
caagaauuguaguccacug

SEQ ID NO: 386634 - RNA, 19 nt, Artificial Sequence
  Description of Artificial Sequence: Synthetic oligonucleotide
  Antisense Strand to SEQ ID NO: 386633
caguggacuacaauucuug

SEQ ID NO: 386635 - RNA, 19 nt, Artificial Sequence
  Description of Artificial Sequence: Synthetic oligonucleotide
  Sense Strand Starting at position 863 of SEQ ID NO: 315808
gcggguauacgagaccuua

SEQ ID NO: 386636 - RNA, 19 nt, Artificial Sequence
  Description of Artificial Sequence: Synthetic oligonucleotide
  Antisense Strand to SEQ ID NO: 386635
uaaggucucguauacccgc

SEQ ID NO: 386637 - RNA, 19 nt, Artificial Sequence
  Description of Artificial Sequence: Synthetic oligonucleotide
  Sense Strand Starting at position 863 of SEQ ID NO: 315841
aggacugaguucuaaaguu

SEQ ID NO: 386638 - RNA, 19 nt, Artificial Sequence
  Description of Artificial Sequence: Synthetic oligonucleotide
  Antisense Strand to SEQ ID NO: 386637
aacuuuagaacucaguccu

SEQ ID NO: 386639 - RNA, 19 nt, Artificial Sequence
  Description of Artificial Sequence: Synthetic oligonucleotide
  Sense Strand Starting at position 863 of SEQ ID NO: 315849
guucuaaaguuagacuuua

SEQ ID NO: 386640 - RNA, 19 nt, Artificial Sequence
  Description of Artificial Sequence: Synthetic oligonucleotide
  Antisense Strand to SEQ ID NO: 386639
uaaagucuaacuuuagaac

SEQ ID NO: 386641 - RNA, 19 nt, Artificial Sequence
  Description of Artificial Sequence: Synthetic oligonucleotide
  Sense Strand Starting at position 863 of SEQ ID NO: 315867
aaaccauguuaagugguaa

SEQ ID NO: 386642 - RNA, 19 nt, Artificial Sequence
  Description of Artificial Sequence: Synthetic oligonucleotide
  Antisense Strand to SEQ ID NO: 386641
uuaccacuuaacaugguuu

SEQ ID NO: 386643 - RNA, 19 nt, Artificial Sequence
  Description of Artificial Sequence: Synthetic oligonucleotide
  Sense Strand Starting at position 863 of SEQ ID NO: 315959
uaaagagaauggucucgua

SEQ ID NO: 386644 - RNA, 19 nt, Artificial Sequence
  Description of Artificial Sequence: Synthetic oligonucleotide
  Antisense Strand to SEQ ID NO: 386643
uacgagaccauucucuuua

SEQ ID NO: 386645 - RNA, 19 nt, Artificial Sequence
  Description of Artificial Sequence: Synthetic oligonucleotide
  Sense Strand Starting at position 863 of SEQ ID NO: 315962
agagaauggucucguauuu

SEQ ID NO: 386646 - RNA, 19 nt, Artificial Sequence
  Description of Artificial Sequence: Synthetic oligonucleotide
  Antisense Strand to SEQ ID NO: 386645
aaauacgagaccauucucu

SEQ ID NO: 386647 - RNA, 19 nt, Artificial Sequence
  Description of Artificial Sequence: Synthetic oligonucleotide
  Sense Strand Starting at position 863 of SEQ ID NO: 315971
ucucguauuuaguacaauu

SEQ ID NO: 386648 - RNA, 19 nt, Artificial Sequence
  Description of Artificial Sequence: Synthetic oligonucleotide
  Antisense Strand to SEQ ID NO: 386647
aauuguacuaaauacgaga

SEQ ID NO: 386649 - RNA, 19 nt, Artificial Sequence
  Description of Artificial Sequence: Synthetic oligonucleotide
  Sense Strand Starting at position 863 of SEQ ID NO: 316130
cugcauuaguuccuuuacu

SEQ ID NO: 386650 - RNA, 19 nt, Artificial Sequence
  Description of Artificial Sequence: Synthetic oligonucleotide
  Antisense Strand to SEQ ID NO: 386649
aguaaaggaacuaaugcag

SEQ ID NO: 386651 - RNA, 19 nt, Artificial Sequence
  Description of Artificial Sequence: Synthetic oligonucleotide
  Sense Strand Starting at position 863 of SEQ ID NO: 316169
gacuuagagaagugaagug

SEQ ID NO: 386652 - RNA, 19 nt, Artificial Sequence
  Description of Artificial Sequence: Synthetic oligonucleotide
  Antisense Strand to SEQ ID NO: 386651
cacuucacuucucuaaguc

SEQ ID NO: 386653 - RNA, 19 nt, Artificial Sequence
  Description of Artificial Sequence: Synthetic oligonucleotide
  Sense Strand Starting at position 863 of SEQ ID NO: 316189
gcuccuggucuucgcagau

SEQ ID NO: 386654 - RNA, 19 nt, Artificial Sequence
  Description of Artificial Sequence: Synthetic oligonucleotide
  Antisense Strand to SEQ ID NO: 386653
aucugcgaagaccaggagc

SEQ ID NO: 386655 - RNA, 19 nt, Artificial Sequence
  Description of Artificial Sequence: Synthetic oligonucleotide
  Sense Strand Starting at position 863 of SEQ ID NO: 316193
cuggucuucgcagauaauu

SEQ ID NO: 386656 - RNA, 19 nt, Artificial Sequence
  Description of Artificial Sequence: Synthetic oligonucleotide
  Antisense Strand to SEQ ID NO: 386655
aauuaucugcgaagaccag

SEQ ID NO: 386657 - RNA, 19 nt, Artificial Sequence
  Description of Artificial Sequence: Synthetic oligonucleotide
  Sense Strand Starting at position 863 of SEQ ID NO: 316195
ggucuucgcagauaauuga

SEQ ID NO: 386658 - RNA, 19 nt, Artificial Sequence
  Description of Artificial Sequence: Synthetic oligonucleotide
  Antisense Strand to SEQ ID NO: 386657
ucaauuaucugcgaagacc

SEQ ID NO: 386659 - RNA, 19 nt, Artificial Sequence
  Description of Artificial Sequence: Synthetic oligonucleotide
  Sense Strand Starting at position 863 of SEQ ID NO: 316259
gggauaaccguauaucgau

SEQ ID NO: 386660 - RNA, 19 nt, Artificial Sequence
  Description of Artificial Sequence: Synthetic oligonucleotide
  Antisense Strand to SEQ ID NO: 386659
aucgauauacgguuauccc

SEQ ID NO: 386661 - RNA, 19 nt, Artificial Sequence
  Description of Artificial Sequence: Synthetic oligonucleotide
  Sense Strand Starting at position 863 of SEQ ID NO: 316265
accguauaucgaugaaucu

SEQ ID NO: 386662 - RNA, 19 nt, Artificial Sequence
  Description of Artificial Sequence: Synthetic oligonucleotide
  Antisense Strand to SEQ ID NO: 386661
agauucaucgauauacggu

SEQ ID NO: 386663 - RNA, 19 nt, Artificial Sequence
  Description of Artificial Sequence: Synthetic oligonucleotide
  Sense Strand Starting at position 863 of SEQ ID NO: 316272
aucgaugaaucuccauaug

SEQ ID NO: 386664 - RNA, 19 nt, Artificial Sequence
  Description of Artificial Sequence: Synthetic oligonucleotide
  Antisense Strand to SEQ ID NO: 386663
cauauggagauucaucgau

SEQ ID NO: 386665 - RNA, 19 nt, Artificial Sequence
  Description of Artificial Sequence: Synthetic oligonucleotide
  Sense Strand Starting at position 863 of SEQ ID NO: 316293
aagagaaaucaauggcagu

SEQ ID NO: 386666 - RNA, 19 nt, Artificial Sequence
  Description of Artificial Sequence: Synthetic oligonucleotide
  Antisense Strand to SEQ ID NO: 386665
acugccauugauuucucuu

SEQ ID NO: 386667 - RNA, 19 nt, Artificial Sequence
  Description of Artificial Sequence: Synthetic oligonucleotide
  Sense Strand Starting at position 863 of SEQ ID NO: 316294
agagaaaucaauggcaguu

SEQ ID NO: 386668 - RNA, 19 nt, Artificial Sequence
  Description of Artificial Sequence: Synthetic oligonucleotide
  Antisense Strand to SEQ ID NO: 386667
aacugccauugauuucucu

SEQ ID NO: 386669 - RNA, 19 nt, Artificial Sequence
  Description of Artificial Sequence: Synthetic oligonucleotide
  Sense Strand Starting at position 863 of SEQ ID NO: 316310
guucgccaucuuggagaau

SEQ ID NO: 386670 - RNA, 19 nt, Artificial Sequence
  Description of Artificial Sequence: Synthetic oligonucleotide
  Antisense Strand to SEQ ID NO: 386669
auucuccaagauggcgaac

SEQ ID NO: 386671 - RNA, 19 nt, Artificial Sequence
  Description of Artificial Sequence: Synthetic oligonucleotide
  Sense Strand Starting at position 863 of SEQ ID NO: 316360
uagagcugaagucgagauu

SEQ ID NO: 386672 - RNA, 19 nt, Artificial Sequence
  Description of Artificial Sequence: Synthetic oligonucleotide
  Antisense Strand to SEQ ID NO: 386671
aaucucgacuucagcucua

SEQ ID NO: 386673 - RNA, 19 nt, Artificial Sequence
  Description of Artificial Sequence: Synthetic oligonucleotide
  Sense Strand Starting at position 863 of SEQ ID NO: 316399
cggcguacaucucucgcaa

SEQ ID NO: 386674 - RNA, 19 nt, Artificial Sequence
  Description of Artificial Sequence: Synthetic oligonucleotide
  Antisense Strand to SEQ ID NO: 386673
uugcgagagauguacgccg

SEQ ID NO: 386675 - RNA, 19 nt, Artificial Sequence
  Description of Artificial Sequence: Synthetic oligonucleotide
  Sense Strand Starting at position 863 of SEQ ID NO: 316425
aggccuggacaucgguaaa

SEQ ID NO: 386676 - RNA, 19 nt, Artificial Sequence
  Description of Artificial Sequence: Synthetic oligonucleotide
  Antisense Strand to SEQ ID NO: 386675
uuuaccgauguccaggccu

SEQ ID NO: 386677 - RNA, 19 nt, Artificial Sequence
  Description of Artificial Sequence: Synthetic oligonucleotide
  Sense Strand Starting at position 863 of SEQ ID NO: 316447
acgcaaagucgcuucgaga

SEQ ID NO: 386678 - RNA, 19 nt, Artificial Sequence
  Description of Artificial Sequence: Synthetic oligonucleotide
  Antisense Strand to SEQ ID NO: 386677
ucucgaagcgacuuugcgu

SEQ ID NO: 386679 - RNA, 19 nt, Artificial Sequence
  Description of Artificial Sequence: Synthetic oligonucleotide
  Sense Strand Starting at position 863 of SEQ ID NO: 316448
cgcaaagucgcuucgagaa

SEQ ID NO: 386680 - RNA, 19 nt, Artificial Sequence
  Description of Artificial Sequence: Synthetic oligonucleotide
  Antisense Strand to SEQ ID NO: 386679
uucucgaagcgacuuugcg

SEQ ID NO: 386681 - RNA, 19 nt, Artificial Sequence
  Description of Artificial Sequence: Synthetic oligonucleotide
  Sense Strand Starting at position 863 of SEQ ID NO: 317004
accguaaugcucugaaaga

SEQ ID NO: 386682 - RNA, 19 nt, Artificial Sequence
  Description of Artificial Sequence: Synthetic oligonucleotide
  Antisense Strand to SEQ ID NO: 386681
ucuuucagagcauuacggu

SEQ ID NO: 386683 - RNA, 19 nt, Artificial Sequence
  Description of Artificial Sequence: Synthetic oligonucleotide
  Sense Strand Starting at position 863 of SEQ ID NO: 317005
ccguaaugcucugaaagac

SEQ ID NO: 386684 - RNA, 19 nt, Artificial Sequence
  Description of Artificial Sequence: Synthetic oligonucleotide
  Antisense Strand to SEQ ID NO: 386683
gucuuucagagcauuacgg

SEQ ID NO: 386685 - RNA, 19 nt, Artificial Sequence
  Description of Artificial Sequence: Synthetic oligonucleotide
  Sense Strand Starting at position 863 of SEQ ID NO: 317046
acguauuuggcgucgcagu

SEQ ID NO: 386686 - RNA, 19 nt, Artificial Sequence
  Description of Artificial Sequence: Synthetic oligonucleotide
  Antisense Strand to SEQ ID NO: 386685
acugcgacgccaaauacgu

SEQ ID NO: 386687 - RNA, 19 nt, Artificial Sequence
  Description of Artificial Sequence: Synthetic oligonucleotide
  Sense Strand Starting at position 863 of SEQ ID NO: 317047
cguauuuggcgucgcagua

SEQ ID NO: 386688 - RNA, 19 nt, Artificial Sequence
  Description of Artificial Sequence: Synthetic oligonucleotide
  Antisense Strand to SEQ ID NO: 386687
uacugcgacgccaaauacg

SEQ ID NO: 386689 - RNA, 19 nt, Artificial Sequence
  Description of Artificial Sequence: Synthetic oligonucleotide
  Sense Strand Starting at position 863 of SEQ ID NO: 317104
ucagguuauccacguagcu

SEQ ID NO: 386690 - RNA, 19 nt, Artificial Sequence
  Description of Artificial Sequence: Synthetic oligonucleotide
  Antisense Strand to SEQ ID NO: 386689
agcuacguggauaaccuga

SEQ ID NO: 386691 - RNA, 19 nt, Artificial Sequence
  Description of Artificial Sequence: Synthetic oligonucleotide
  Sense Strand Starting at position 863 of SEQ ID NO: 317309
cggguucagcgaugaggga

SEQ ID NO: 386692 - RNA, 19 nt, Artificial Sequence
  Description of Artificial Sequence: Synthetic oligonucleotide
  Antisense Strand to SEQ ID NO: 386691
ucccucaucgcugaacccg

SEQ ID NO: 386693 - RNA, 19 nt, Artificial Sequence
  Description of Artificial Sequence: Synthetic oligonucleotide
  Sense Strand Starting at position 864 of SEQ ID NO: 315337
ccagaaauguaccucgaag

SEQ ID NO: 386694 - RNA, 19 nt, Artificial Sequence
  Description of Artificial Sequence: Synthetic oligonucleotide
  Antisense Strand to SEQ ID NO: 386693
cuucgagguacauuucugg

SEQ ID NO: 386695 - RNA, 19 nt, Artificial Sequence
  Description of Artificial Sequence: Synthetic oligonucleotide
  Sense Strand Starting at position 864 of SEQ ID NO: 315339
agaaauguaccucgaaggu

SEQ ID NO: 386696 - RNA, 19 nt, Artificial Sequence
  Description of Artificial Sequence: Synthetic oligonucleotide
  Antisense Strand to SEQ ID NO: 386695
accuucgagguacauuucu

SEQ ID NO: 386697 - RNA, 19 nt, Artificial Sequence
  Description of Artificial Sequence: Synthetic oligonucleotide
  Sense Strand Starting at position 864 of SEQ ID NO: 315524
acacuauuaccauagcguu

SEQ ID NO: 386698 - RNA, 19 nt, Artificial Sequence
  Description of Artificial Sequence: Synthetic oligonucleotide
  Antisense Strand to SEQ ID NO: 386697
aacgcuaugguaauagugu

SEQ ID NO: 386699 - RNA, 19 nt, Artificial Sequence
  Description of Artificial Sequence: Synthetic oligonucleotide
  Sense Strand Starting at position 864 of SEQ ID NO: 315571
cuauauuacguauguaaac

SEQ ID NO: 386700 - RNA, 19 nt, Artificial Sequence
  Description of Artificial Sequence: Synthetic oligonucleotide
  Antisense Strand to SEQ ID NO: 386699
guuuacauacguaauauag

SEQ ID NO: 386701 - RNA, 19 nt, Artificial Sequence
  Description of Artificial Sequence: Synthetic oligonucleotide
  Sense Strand Starting at position 864 of SEQ ID NO: 315929
cgcugucacaaagaaagaa

SEQ ID NO: 386702 - RNA, 19 nt, Artificial Sequence
  Description of Artificial Sequence: Synthetic oligonucleotide
  Antisense Strand to SEQ ID NO: 386701
uucuuucuuugugacagcg

SEQ ID NO: 386703 - RNA, 19 nt, Artificial Sequence
  Description of Artificial Sequence: Synthetic oligonucleotide
  Sense Strand Starting at position 864 of SEQ ID NO: 316126
auuagugguagguaaggua

SEQ ID NO: 386704 - RNA, 19 nt, Artificial Sequence
  Description of Artificial Sequence: Synthetic oligonucleotide
  Antisense Strand to SEQ ID NO: 386703
uaccuuaccuaccacuaau

SEQ ID NO: 386705 - RNA, 19 nt, Artificial Sequence
  Description of Artificial Sequence: Synthetic oligonucleotide
  Sense Strand Starting at position 864 of SEQ ID NO: 316264
auccaaacaguaugguaaa

SEQ ID NO: 386706 - RNA, 19 nt, Artificial Sequence
  Description of Artificial Sequence: Synthetic oligonucleotide
  Antisense Strand to SEQ ID NO: 386705
uuuaccauacuguuuggau

SEQ ID NO: 386707 - RNA, 19 nt, Artificial Sequence
  Description of Artificial Sequence: Synthetic oligonucleotide
  Sense Strand Starting at position 864 of SEQ ID NO: 316318
auccaaauucucggcauaa

SEQ ID NO: 386708 - RNA, 19 nt, Artificial Sequence
  Description of Artificial Sequence: Synthetic oligonucleotide
  Antisense Strand to SEQ ID NO: 386707
uuaugccgagaauuuggau

SEQ ID NO: 386709 - RNA, 19 nt, Artificial Sequence
  Description of Artificial Sequence: Synthetic oligonucleotide
  Sense Strand Starting at position 864 of SEQ ID NO: 316319
uccaaauucucggcauaag

SEQ ID NO: 386710 - RNA, 19 nt, Artificial Sequence
  Description of Artificial Sequence: Synthetic oligonucleotide
  Antisense Strand to SEQ ID NO: 386709
cuuaugccgagaauuugga

SEQ ID NO: 386711 - RNA, 19 nt, Artificial Sequence
  Description of Artificial Sequence: Synthetic oligonucleotide
  Sense Strand Starting at position 864 of SEQ ID NO: 316320
ccaaauucucggcauaagu

SEQ ID NO: 386712 - RNA, 19 nt, Artificial Sequence
  Description of Artificial Sequence: Synthetic oligonucleotide
  Antisense Strand to SEQ ID NO: 386711
acuuaugccgagaauuugg

SEQ ID NO: 386713 - RNA, 19 nt, Artificial Sequence
  Description of Artificial Sequence: Synthetic oligonucleotide
  Sense Strand Starting at position 864 of SEQ ID NO: 316322
aaauucucggcauaagucu

SEQ ID NO: 386714 - RNA, 19 nt, Artificial Sequence
  Description of Artificial Sequence: Synthetic oligonucleotide
  Antisense Strand to SEQ ID NO: 386713
agacuuaugccgagaauuu

SEQ ID NO: 386715 - RNA, 19 nt, Artificial Sequence
  Description of Artificial Sequence: Synthetic oligonucleotide
  Sense Strand Starting at position 864 of SEQ ID NO: 316328
ucggcauaagucuaaacau

SEQ ID NO: 386716 - RNA, 19 nt, Artificial Sequence
  Description of Artificial Sequence: Synthetic oligonucleotide
  Antisense Strand to SEQ ID NO: 386715
auguuuagacuuaugccga

SEQ ID NO: 386717 - RNA, 19 nt, Artificial Sequence
  Description of Artificial Sequence: Synthetic oligonucleotide
  Sense Strand Starting at position 864 of SEQ ID NO: 316421
accgucuaggcauacuaau

SEQ ID NO: 386718 - RNA, 19 nt, Artificial Sequence
  Description of Artificial Sequence: Synthetic oligonucleotide
  Antisense Strand to SEQ ID NO: 386717
auuaguaugccuagacggu

SEQ ID NO: 386719 - RNA, 19 nt, Artificial Sequence
  Description of Artificial Sequence: Synthetic oligonucleotide
  Sense Strand Starting at position 864 of SEQ ID NO: 316458
gcaguucuggugcacaaga

SEQ ID NO: 386720 - RNA, 19 nt, Artificial Sequence
  Description of Artificial Sequence: Synthetic oligonucleotide
  Antisense Strand to SEQ ID NO: 386719
ucuugugcaccagaacugc

SEQ ID NO: 386721 - RNA, 19 nt, Artificial Sequence
  Description of Artificial Sequence: Synthetic oligonucleotide
  Sense Strand Starting at position 864 of SEQ ID NO: 316502
uggagucguuaacuaaaca

SEQ ID NO: 386722 - RNA, 19 nt, Artificial Sequence
  Description of Artificial Sequence: Synthetic oligonucleotide
  Antisense Strand to SEQ ID NO: 386721
uguuuaguuaacgacucca

SEQ ID NO: 386723 - RNA, 19 nt, Artificial Sequence
  Description of Artificial Sequence: Synthetic oligonucleotide
  Sense Strand Starting at position 864 of SEQ ID NO: 316503
ggagucguuaacuaaacau

SEQ ID NO: 386724 - RNA, 19 nt, Artificial Sequence
  Description of Artificial Sequence: Synthetic oligonucleotide
  Antisense Strand to SEQ ID NO: 386723
auguuuaguuaacgacucc

SEQ ID NO: 386725 - RNA, 19 nt, Artificial Sequence
  Description of Artificial Sequence: Synthetic oligonucleotide
  Sense Strand Starting at position 864 of SEQ ID NO: 316996
guaacuggacccuagaguu

SEQ ID NO: 386726 - RNA, 19 nt, Artificial Sequence
  Description of Artificial Sequence: Synthetic oligonucleotide
  Antisense Strand to SEQ ID NO: 386725
aacucuaggguccaguuac

SEQ ID NO: 386727 - RNA, 19 nt, Artificial Sequence
  Description of Artificial Sequence: Synthetic oligonucleotide
  Sense Strand Starting at position 864 of SEQ ID NO: 317160
cgacaucagucaccaucua

SEQ ID NO: 386728 - RNA, 19 nt, Artificial Sequence
  Description of Artificial Sequence: Synthetic oligonucleotide
  Antisense Strand to SEQ ID NO: 386727
uagauggugacugaugucg

SEQ ID NO: 386729 - RNA, 19 nt, Artificial Sequence
  Description of Artificial Sequence: Synthetic oligonucleotide
  Sense Strand Starting at position 864 of SEQ ID NO: 317333
aggaauugcucuuucugga

SEQ ID NO: 386730 - RNA, 19 nt, Artificial Sequence
  Description of Artificial Sequence: Synthetic oligonucleotide
  Antisense Strand to SEQ ID NO: 386729
uccagaaagagcaauuccu

SEQ ID NO: 386731 - RNA, 19 nt, Artificial Sequence
  Description of Artificial Sequence: Synthetic oligonucleotide
  Sense Strand Starting at position 864 of SEQ ID NO: 317346
ucuggaaagugaccagauu

SEQ ID NO: 386732 - RNA, 19 nt, Artificial Sequence
  Description of Artificial Sequence: Synthetic oligonucleotide
  Antisense Strand to SEQ ID NO: 386731
aaucuggucacuuuccaga

SEQ ID NO: 386733 - RNA, 19 nt, Artificial Sequence
  Description of Artificial Sequence: Synthetic oligonucleotide
  Sense Strand Starting at position 864 of SEQ ID NO: 317821
cucucuccagcugaaagau

SEQ ID NO: 386734 - RNA, 19 nt, Artificial Sequence
  Description of Artificial Sequence: Synthetic oligonucleotide
  Antisense Strand to SEQ ID NO: 386733
aucuuucagcuggagagag

SEQ ID NO: 386735 - RNA, 19 nt, Artificial Sequence
  Description of Artificial Sequence: Synthetic oligonucleotide
  Sense Strand Starting at position 864 of SEQ ID NO: 317853
cagugaaugagugguuaag

SEQ ID NO: 386736 - RNA, 19 nt, Artificial Sequence
  Description of Artificial Sequence: Synthetic oligonucleotide
  Antisense Strand to SEQ ID NO: 386735
cuuaaccacucauucacug

SEQ ID NO: 386737 - RNA, 19 nt, Artificial Sequence
  Description of Artificial Sequence: Synthetic oligonucleotide
  Sense Strand Starting at position 864 of SEQ ID NO: 317855
gugaaugagugguuaagga

SEQ ID NO: 386738 - RNA, 19 nt, Artificial Sequence
  Description of Artificial Sequence: Synthetic oligonucleotide
  Antisense Strand to SEQ ID NO: 386737
uccuuaaccacucauucac

SEQ ID NO: 386739 - RNA, 19 nt, Artificial Sequence
  Description of Artificial Sequence: Synthetic oligonucleotide
  Sense Strand Starting at position 864 of SEQ ID NO: 317916
ugaauuugcugagcgcuua

SEQ ID NO: 386740 - RNA, 19 nt, Artificial Sequence
  Description of Artificial Sequence: Synthetic oligonucleotide
  Antisense Strand to SEQ ID NO: 386739
uaagcgcucagcaaauuca

SEQ ID NO: 386741 - RNA, 19 nt, Artificial Sequence
  Description of Artificial Sequence: Synthetic oligonucleotide
  Sense Strand Starting at position 864 of SEQ ID NO: 318014
acaacucaggugugugaga

SEQ ID NO: 386742 - RNA, 19 nt, Artificial Sequence
  Description of Artificial Sequence: Synthetic oligonucleotide
  Antisense Strand to SEQ ID NO: 386741
ucucacacaccugaguugu

SEQ ID NO: 386743 - RNA, 19 nt, Artificial Sequence
  Description of Artificial Sequence: Synthetic oligonucleotide
  Sense Strand Starting at position 864 of SEQ ID NO: 318021
aggugugugagacaaacau

SEQ ID NO: 386744 - RNA, 19 nt, Artificial Sequence
  Description of Artificial Sequence: Synthetic oligonucleotide
  Antisense Strand to SEQ ID NO: 386743
auguuugucucacacaccu

SEQ ID NO: 386745 - RNA, 19 nt, Artificial Sequence
  Description of Artificial Sequence: Synthetic oligonucleotide
  Sense Strand Starting at position 864 of SEQ ID NO: 318086
aaagaugaguccuugucuu

SEQ ID NO: 386746 - RNA, 19 nt, Artificial Sequence
  Description of Artificial Sequence: Synthetic oligonucleotide
  Antisense Strand to SEQ ID NO: 386745
aagacaaggacucaucuuu

SEQ ID NO: 386747 - RNA, 19 nt, Artificial Sequence
  Description of Artificial Sequence: Synthetic oligonucleotide
  Sense Strand Starting at position 864 of SEQ ID NO: 318090
augaguccuugucuuccaa

SEQ ID NO: 386748 - RNA, 19 nt, Artificial Sequence
  Description of Artificial Sequence: Synthetic oligonucleotide
  Antisense Strand to SEQ ID NO: 386747
uuggaagacaaggacucau

SEQ ID NO: 386749 - RNA, 19 nt, Artificial Sequence
  Description of Artificial Sequence: Synthetic oligonucleotide
  Sense Strand Starting at position 864 of SEQ ID NO: 318092
gaguccuugucuuccaaga

SEQ ID NO: 386750 - RNA, 19 nt, Artificial Sequence
  Description of Artificial Sequence: Synthetic oligonucleotide
  Antisense Strand to SEQ ID NO: 386749
ucuuggaagacaaggacuc

SEQ ID NO: 386751 - RNA, 19 nt, Artificial Sequence
  Description of Artificial Sequence: Synthetic oligonucleotide
  Sense Strand Starting at position 864 of SEQ ID NO: 318097
cuugucuuccaagaaguag

SEQ ID NO: 386752 - RNA, 19 nt, Artificial Sequence
  Description of Artificial Sequence: Synthetic oligonucleotide
  Antisense Strand to SEQ ID NO: 386751
cuacuucuuggaagacaag

SEQ ID NO: 386753 - RNA, 19 nt, Artificial Sequence
  Description of Artificial Sequence: Synthetic oligonucleotide
  Sense Strand Starting at position 864 of SEQ ID NO: 318143
acaauauaauguguucuga

SEQ ID NO: 386754 - RNA, 19 nt, Artificial Sequence
  Description of Artificial Sequence: Synthetic oligonucleotide
  Antisense Strand to SEQ ID NO: 386753
ucagaacacauuauauugu

SEQ ID NO: 386755 - RNA, 19 nt, Artificial Sequence
  Description of Artificial Sequence: Synthetic oligonucleotide
  Sense Strand Starting at position 864 of SEQ ID NO: 318145
aauauaauguguucugaag

SEQ ID NO: 386756 - RNA, 19 nt, Artificial Sequence
  Description of Artificial Sequence: Synthetic oligonucleotide
  Antisense Strand to SEQ ID NO: 386755
cuucagaacacauuauauu

SEQ ID NO: 386757 - RNA, 19 nt, Artificial Sequence
  Description of Artificial Sequence: Synthetic oligonucleotide
  Sense Strand Starting at position 864 of SEQ ID NO: 318369
ucuauuaagugcuuuggaa

SEQ ID NO: 386758 - RNA, 19 nt, Artificial Sequence
  Description of Artificial Sequence: Synthetic oligonucleotide
  Antisense Strand to SEQ ID NO: 386757
uuccaaagcacuuaauaga

SEQ ID NO: 386759 - RNA, 19 nt, Artificial Sequence
  Description of Artificial Sequence: Synthetic oligonucleotide
  Sense Strand Starting at position 864 of SEQ ID NO: 318537
uccauccggaaguguaaua

SEQ ID NO: 386760 - RNA, 19 nt, Artificial Sequence
  Description of Artificial Sequence: Synthetic oligonucleotide
  Antisense Strand to SEQ ID NO: 386759
uauuacacuuccggaugga

SEQ ID NO: 386761 - RNA, 19 nt, Artificial Sequence
  Description of Artificial Sequence: Synthetic oligonucleotide
  Sense Strand Starting at position 864 of SEQ ID NO: 318547
aguguaauauggucugaug

SEQ ID NO: 386762 - RNA, 19 nt, Artificial Sequence
  Description of Artificial Sequence: Synthetic oligonucleotide
  Antisense Strand to SEQ ID NO: 386761
caucagaccauauuacacu

SEQ ID NO: 386763 - RNA, 19 nt, Artificial Sequence
  Description of Artificial Sequence: Synthetic oligonucleotide
  Sense Strand Starting at position 864 of SEQ ID NO: 318549
uguaauauggucugaugaa

SEQ ID NO: 386764 - RNA, 19 nt, Artificial Sequence
  Description of Artificial Sequence: Synthetic oligonucleotide
  Antisense Strand to SEQ ID NO: 386763
uucaucagaccauauuaca

SEQ ID NO: 386765 - RNA, 19 nt, Artificial Sequence
  Description of Artificial Sequence: Synthetic oligonucleotide
  Sense Strand Starting at position 864 of SEQ ID NO: 318633
ccaucuaugugagcuuaaa

SEQ ID NO: 386766 - RNA, 19 nt, Artificial Sequence
  Description of Artificial Sequence: Synthetic oligonucleotide
  Antisense Strand to SEQ ID NO: 386765
uuuaagcucacauagaugg

SEQ ID NO: 386767 - RNA, 19 nt, Artificial Sequence
  Description of Artificial Sequence: Synthetic oligonucleotide
  Sense Strand Starting at position 864 of SEQ ID NO: 319152
uuuaaauugagacggagua

SEQ ID NO: 386768 - RNA, 19 nt, Artificial Sequence
  Description of Artificial Sequence: Synthetic oligonucleotide
  Antisense Strand to SEQ ID NO: 386767
uacuccgucucaauuuaaa

SEQ ID NO: 386769 - RNA, 19 nt, Artificial Sequence
  Description of Artificial Sequence: Synthetic oligonucleotide
  Sense Strand Starting at position 864 of SEQ ID NO: 319153
uuaaauugagacggaguau

SEQ ID NO: 386770 - RNA, 19 nt, Artificial Sequence
  Description of Artificial Sequence: Synthetic oligonucleotide
  Antisense Strand to SEQ ID NO: 386769
auacuccgucucaauuuaa

SEQ ID NO: 386771 - RNA, 19 nt, Artificial Sequence
  Description of Artificial Sequence: Synthetic oligonucleotide
  Sense Strand Starting at position 864 of SEQ ID NO: 319184
cggguuggagugcaaugau

SEQ ID NO: 386772 - RNA, 19 nt, Artificial Sequence
  Description of Artificial Sequence: Synthetic oligonucleotide
  Antisense Strand to SEQ ID NO: 386771
aucauugcacuccaacccg

SEQ ID NO: 386773 - RNA, 19 nt, Artificial Sequence
  Description of Artificial Sequence: Synthetic oligonucleotide
  Sense Strand Starting at position 865 of SEQ ID NO: 315385
ggaugaauguaacagagaa

SEQ ID NO: 386774 - RNA, 19 nt, Artificial Sequence
  Description of Artificial Sequence: Synthetic oligonucleotide
  Antisense Strand to SEQ ID NO: 386773
uucucuguuacauucaucc

SEQ ID NO: 386775 - RNA, 19 nt, Artificial Sequence
  Description of Artificial Sequence: Synthetic oligonucleotide
  Sense Strand Starting at position 865 of SEQ ID NO: 315577
ggcucaaauugaccauuaa

SEQ ID NO: 386776 - RNA, 19 nt, Artificial Sequence
  Description of Artificial Sequence: Synthetic oligonucleotide
  Antisense Strand to SEQ ID NO: 386775
uuaauggucaauuugagcc

SEQ ID NO: 386777 - RNA, 19 nt, Artificial Sequence
  Description of Artificial Sequence: Synthetic oligonucleotide
  Sense Strand Starting at position 865 of SEQ ID NO: 315618
uguaaccauuccucuaagu

SEQ ID NO: 386778 - RNA, 19 nt, Artificial Sequence
  Description of Artificial Sequence: Synthetic oligonucleotide
  Antisense Strand to SEQ ID NO: 386777
acuuagaggaaugguuaca

SEQ ID NO: 386779 - RNA, 19 nt, Artificial Sequence
  Description of Artificial Sequence: Synthetic oligonucleotide
  Sense Strand Starting at position 865 of SEQ ID NO: 315643
ggaguagaauacuaggaaa

SEQ ID NO: 386780 - RNA, 19 nt, Artificial Sequence
  Description of Artificial Sequence: Synthetic oligonucleotide
  Antisense Strand to SEQ ID NO: 386779
uuuccuaguauucuacucc

SEQ ID NO: 386781 - RNA, 19 nt, Artificial Sequence
  Description of Artificial Sequence: Synthetic oligonucleotide
  Sense Strand Starting at position 865 of SEQ ID NO: 315709
aucaauuagucugucacau

SEQ ID NO: 386782 - RNA, 19 nt, Artificial Sequence
  Description of Artificial Sequence: Synthetic oligonucleotide
  Antisense Strand to SEQ ID NO: 386781
augugacagacuaauugau

SEQ ID NO: 386783 - RNA, 19 nt, Artificial Sequence
  Description of Artificial Sequence: Synthetic oligonucleotide
  Sense Strand Starting at position 865 of SEQ ID NO: 315792
guucuaaagugacuuuaau

SEQ ID NO: 386784 - RNA, 19 nt, Artificial Sequence
  Description of Artificial Sequence: Synthetic oligonucleotide
  Antisense Strand to SEQ ID NO: 386783
auuaaagucacuuuagaac

SEQ ID NO: 386785 - RNA, 19 nt, Artificial Sequence
  Description of Artificial Sequence: Synthetic oligonucleotide
  Sense Strand Starting at position 865 of SEQ ID NO: 315853
guuccugaguccucaagau

SEQ ID NO: 386786 - RNA, 19 nt, Artificial Sequence
  Description of Artificial Sequence: Synthetic oligonucleotide
  Antisense Strand to SEQ ID NO: 386785
aucuugaggacucaggaac

SEQ ID NO: 386787 - RNA, 19 nt, Artificial Sequence
  Description of Artificial Sequence: Synthetic oligonucleotide
  Sense Strand Starting at position 865 of SEQ ID NO: 315857
cugaguccucaagaucuua

SEQ ID NO: 386788 - RNA, 19 nt, Artificial Sequence
  Description of Artificial Sequence: Synthetic oligonucleotide
  Antisense Strand to SEQ ID NO: 386787
uaagaucuugaggacucag

SEQ ID NO: 386789 - RNA, 19 nt, Artificial Sequence
  Description of Artificial Sequence: Synthetic oligonucleotide
  Sense Strand Starting at position 865 of SEQ ID NO: 315874
uagagaaucuaggaaggaa

SEQ ID NO: 386790 - RNA, 19 nt, Artificial Sequence
  Description of Artificial Sequence: Synthetic oligonucleotide
  Antisense Strand to SEQ ID NO: 386789
uuccuuccuagauucucua

SEQ ID NO: 386791 - RNA, 19 nt, Artificial Sequence
  Description of Artificial Sequence: Synthetic oligonucleotide
  Sense Strand Starting at position 865 of SEQ ID NO: 316553
ccggauuguaagcaucuuu

SEQ ID NO: 386792 - RNA, 19 nt, Artificial Sequence
  Description of Artificial Sequence: Synthetic oligonucleotide
  Antisense Strand to SEQ ID NO: 386791
aaagaugcuuacaauccgg

SEQ ID NO: 386793 - RNA, 19 nt, Artificial Sequence
  Description of Artificial Sequence: Synthetic oligonucleotide
  Sense Strand Starting at position 865 of SEQ ID NO: 316592
gccuauguugacugaauga

SEQ ID NO: 386794 - RNA, 19 nt, Artificial Sequence
  Description of Artificial Sequence: Synthetic oligonucleotide
  Antisense Strand to SEQ ID NO: 386793
ucauucagucaacauaggc

SEQ ID NO: 386795 - RNA, 19 nt, Artificial Sequence
  Description of Artificial Sequence: Synthetic oligonucleotide
  Sense Strand Starting at position 865 of SEQ ID NO: 316757
uuacauguauuggcucaau

SEQ ID NO: 386796 - RNA, 19 nt, Artificial Sequence
  Description of Artificial Sequence: Synthetic oligonucleotide
  Antisense Strand to SEQ ID NO: 386795
auugagccaauacauguaa

SEQ ID NO: 386797 - RNA, 19 nt, Artificial Sequence
  Description of Artificial Sequence: Synthetic oligonucleotide
  Sense Strand Starting at position 865 of SEQ ID NO: 316779
ucuacaguagcucaaugaa

SEQ ID NO: 386798 - RNA, 19 nt, Artificial Sequence
  Description of Artificial Sequence: Synthetic oligonucleotide
  Antisense Strand to SEQ ID NO: 386797
uucauugagcuacuguaga

SEQ ID NO: 386799 - RNA, 19 nt, Artificial Sequence
  Description of Artificial Sequence: Synthetic oligonucleotide
  Sense Strand Starting at position 865 of SEQ ID NO: 316782
acaguagcucaaugaaucu

SEQ ID NO: 386800 - RNA, 19 nt, Artificial Sequence
  Description of Artificial Sequence: Synthetic oligonucleotide
  Antisense Strand to SEQ ID NO: 386799
agauucauugagcuacugu

SEQ ID NO: 386801 - RNA, 19 nt, Artificial Sequence
  Description of Artificial Sequence: Synthetic oligonucleotide
  Sense Strand Starting at position 865 of SEQ ID NO: 316817
aguacaugccauuauuaug

SEQ ID NO: 386802 - RNA, 19 nt, Artificial Sequence
  Description of Artificial Sequence: Synthetic oligonucleotide
  Antisense Strand to SEQ ID NO: 386801
cauaauaauggcauguacu

SEQ ID NO: 386803 - RNA, 19 nt, Artificial Sequence
  Description of Artificial Sequence: Synthetic oligonucleotide
  Sense Strand Starting at position 865 of SEQ ID NO: 316971
acugguaagacagguauga

SEQ ID NO: 386804 - RNA, 19 nt, Artificial Sequence
  Description of Artificial Sequence: Synthetic oligonucleotide
  Antisense Strand to SEQ ID NO: 386803
ucauaccugucuuaccagu

SEQ ID NO: 386805 - RNA, 19 nt, Artificial Sequence
  Description of Artificial Sequence: Synthetic oligonucleotide
  Sense Strand Starting at position 865 of SEQ ID NO: 317002
ccgugugugcuuccacacu

SEQ ID NO: 386806 - RNA, 19 nt, Artificial Sequence
  Description of Artificial Sequence: Synthetic oligonucleotide
  Antisense Strand to SEQ ID NO: 386805
aguguggaagcacacacgg

SEQ ID NO: 386807 - RNA, 19 nt, Artificial Sequence
  Description of Artificial Sequence: Synthetic oligonucleotide
  Sense Strand Starting at position 865 of SEQ ID NO: 317275
uguauuugguuaucaaguu

SEQ ID NO: 386808 - RNA, 19 nt, Artificial Sequence
  Description of Artificial Sequence: Synthetic oligonucleotide
  Antisense Strand to SEQ ID NO: 386807
aacuugauaaccaaauaca

SEQ ID NO: 386809 - RNA, 19 nt, Artificial Sequence
  Description of Artificial Sequence: Synthetic oligonucleotide
  Sense Strand Starting at position 865 of SEQ ID NO: 317350
gggacuguucuagguacuu

SEQ ID NO: 386810 - RNA, 19 nt, Artificial Sequence
  Description of Artificial Sequence: Synthetic oligonucleotide
  Antisense Strand to SEQ ID NO: 386809
aaguaccuagaacaguccc

SEQ ID NO: 386811 - RNA, 19 nt, Artificial Sequence
  Description of Artificial Sequence: Synthetic oligonucleotide
  Sense Strand Starting at position 865 of SEQ ID NO: 317355
uguucuagguacuugacau

SEQ ID NO: 386812 - RNA, 19 nt, Artificial Sequence
  Description of Artificial Sequence: Synthetic oligonucleotide
  Antisense Strand to SEQ ID NO: 386811
augucaaguaccuagaaca

SEQ ID NO: 386813 - RNA, 19 nt, Artificial Sequence
  Description of Artificial Sequence: Synthetic oligonucleotide
  Sense Strand Starting at position 865 of SEQ ID NO: 317356
guucuagguacuugacaug

SEQ ID NO: 386814 - RNA, 19 nt, Artificial Sequence
  Description of Artificial Sequence: Synthetic oligonucleotide
  Antisense Strand to SEQ ID NO: 386813
caugucaaguaccuagaac

SEQ ID NO: 386815 - RNA, 19 nt, Artificial Sequence
  Description of Artificial Sequence: Synthetic oligonucleotide
  Sense Strand Starting at position 865 of SEQ ID NO: 317361
agguacuugacauguguua

SEQ ID NO: 386816 - RNA, 19 nt, Artificial Sequence
  Description of Artificial Sequence: Synthetic oligonucleotide
  Antisense Strand to SEQ ID NO: 386815
uaacacaugucaaguaccu

SEQ ID NO: 386817 - RNA, 19 nt, Artificial Sequence
  Description of Artificial Sequence: Synthetic oligonucleotide
  Sense Strand Starting at position 865 of SEQ ID NO: 317457
aaguauccugcccaaggua

SEQ ID NO: 386818 - RNA, 19 nt, Artificial Sequence
  Description of Artificial Sequence: Synthetic oligonucleotide
  Antisense Strand to SEQ ID NO: 386817
uaccuugggcaggauacuu

SEQ ID NO: 386819 - RNA, 19 nt, Artificial Sequence
  Description of Artificial Sequence: Synthetic oligonucleotide
  Sense Strand Starting at position 865 of SEQ ID NO: 317475
aagaguuaguaagugauau

SEQ ID NO: 386820 - RNA, 19 nt, Artificial Sequence
  Description of Artificial Sequence: Synthetic oligonucleotide
  Antisense Strand to SEQ ID NO: 386819
auaucacuuacuaacucuu

SEQ ID NO: 386821 - RNA, 19 nt, Artificial Sequence
  Description of Artificial Sequence: Synthetic oligonucleotide
  Sense Strand Starting at position 865 of SEQ ID NO: 317476
agaguuaguaagugauaua

SEQ ID NO: 386822 - RNA, 19 nt, Artificial Sequence
  Description of Artificial Sequence: Synthetic oligonucleotide
  Antisense Strand to SEQ ID NO: 386821
uauaucacuuacuaacucu

SEQ ID NO: 386823 - RNA, 19 nt, Artificial Sequence
  Description of Artificial Sequence: Synthetic oligonucleotide
  Sense Strand Starting at position 865 of SEQ ID NO: 317477
gaguuaguaagugauauag

SEQ ID NO: 386824 - RNA, 19 nt, Artificial Sequence
  Description of Artificial Sequence: Synthetic oligonucleotide
  Antisense Strand to SEQ ID NO: 386823
cuauaucacuuacuaacuc

SEQ ID NO: 386825 - RNA, 19 nt, Artificial Sequence
  Description of Artificial Sequence: Synthetic oligonucleotide
  Sense Strand Starting at position 865 of SEQ ID NO: 317737
aaaggagccugugagauuu

SEQ ID NO: 386826 - RNA, 19 nt, Artificial Sequence
  Description of Artificial Sequence: Synthetic oligonucleotide
  Antisense Strand to SEQ ID NO: 386825
aaaucucacaggcuccuuu

SEQ ID NO: 386827 - RNA, 19 nt, Artificial Sequence
  Description of Artificial Sequence: Synthetic oligonucleotide
  Sense Strand Starting at position 865 of SEQ ID NO: 317905
ccacuuuccuaggcucaga

SEQ ID NO: 386828 - RNA, 19 nt, Artificial Sequence
  Description of Artificial Sequence: Synthetic oligonucleotide
  Antisense Strand to SEQ ID NO: 386827
ucugagccuaggaaagugg

SEQ ID NO: 386829 - RNA, 19 nt, Artificial Sequence
  Description of Artificial Sequence: Synthetic oligonucleotide
  Sense Strand Starting at position 865 of SEQ ID NO: 318141
ucagguggccacugagaua

SEQ ID NO: 386830 - RNA, 19 nt, Artificial Sequence
  Description of Artificial Sequence: Synthetic oligonucleotide
  Antisense Strand to SEQ ID NO: 386829
uaucucaguggccaccuga

SEQ ID NO: 386831 - RNA, 19 nt, Artificial Sequence
  Description of Artificial Sequence: Synthetic oligonucleotide
  Sense Strand Starting at position 865 of SEQ ID NO: 318154
gagauauggucuguaccca

SEQ ID NO: 386832 - RNA, 19 nt, Artificial Sequence
  Description of Artificial Sequence: Synthetic oligonucleotide
  Antisense Strand to SEQ ID NO: 386831
uggguacagaccauaucuc

SEQ ID NO: 386833 - RNA, 19 nt, Artificial Sequence
  Description of Artificial Sequence: Synthetic oligonucleotide
  Sense Strand Starting at position 865 of SEQ ID NO: 318155
agauauggucuguacccaa

SEQ ID NO: 386834 - RNA, 19 nt, Artificial Sequence
  Description of Artificial Sequence: Synthetic oligonucleotide
  Antisense Strand to SEQ ID NO: 386833
uuggguacagaccauaucu

SEQ ID NO: 386835 - RNA, 19 nt, Artificial Sequence
  Description of Artificial Sequence: Synthetic oligonucleotide
  Sense Strand Starting at position 865 of SEQ ID NO: 318185
aucugagccgaguacaaua

SEQ ID NO: 386836 - RNA, 19 nt, Artificial Sequence
  Description of Artificial Sequence: Synthetic oligonucleotide
  Antisense Strand to SEQ ID NO: 386835
uauuguacucggcucagau

SEQ ID NO: 386837 - RNA, 19 nt, Artificial Sequence
  Description of Artificial Sequence: Synthetic oligonucleotide
  Sense Strand Starting at position 865 of SEQ ID NO: 318216
gaagguaccuugucuccua

SEQ ID NO: 386838 - RNA, 19 nt, Artificial Sequence
  Description of Artificial Sequence: Synthetic oligonucleotide
  Antisense Strand to SEQ ID NO: 386837
uaggagacaagguaccuuc

SEQ ID NO: 386839 - RNA, 19 nt, Artificial Sequence
  Description of Artificial Sequence: Synthetic oligonucleotide
  Sense Strand Starting at position 865 of SEQ ID NO: 318219
gguaccuugucuccuauuu

SEQ ID NO: 386840 - RNA, 19 nt, Artificial Sequence
  Description of Artificial Sequence: Synthetic oligonucleotide
  Antisense Strand to SEQ ID NO: 386839
aaauaggagacaagguacc

SEQ ID NO: 386841 - RNA, 19 nt, Artificial Sequence
  Description of Artificial Sequence: Synthetic oligonucleotide
  Sense Strand Starting at position 865 of SEQ ID NO: 318404
cagcauuucuuagaaggag

SEQ ID NO: 386842 - RNA, 19 nt, Artificial Sequence
  Description of Artificial Sequence: Synthetic oligonucleotide
  Antisense Strand to SEQ ID NO: 386841
cuccuucuaagaaaugcug

SEQ ID NO: 386843 - RNA, 19 nt, Artificial Sequence
  Description of Artificial Sequence: Synthetic oligonucleotide
  Sense Strand Starting at position 865 of SEQ ID NO: 318480
gcuggagaucgggaauauc

SEQ ID NO: 386844 - RNA, 19 nt, Artificial Sequence
  Description of Artificial Sequence: Synthetic oligonucleotide
  Antisense Strand to SEQ ID NO: 386843
gauauucccgaucuccagc

SEQ ID NO: 386845 - RNA, 19 nt, Artificial Sequence
  Description of Artificial Sequence: Synthetic oligonucleotide
  Sense Strand Starting at position 865 of SEQ ID NO: 318488
ucgggaauaucuucaggga

SEQ ID NO: 386846 - RNA, 19 nt, Artificial Sequence
  Description of Artificial Sequence: Synthetic oligonucleotide
  Antisense Strand to SEQ ID NO: 386845
ucccugaagauauucccga

SEQ ID NO: 386847 - RNA, 19 nt, Artificial Sequence
  Description of Artificial Sequence: Synthetic oligonucleotide
  Sense Strand Starting at position 865 of SEQ ID NO: 318615
ccaggaguugcagaagcaa

SEQ ID NO: 386848 - RNA, 19 nt, Artificial Sequence
  Description of Artificial Sequence: Synthetic oligonucleotide
  Antisense Strand to SEQ ID NO: 386847
uugcuucugcaacuccugg

SEQ ID NO: 386849 - RNA, 19 nt, Artificial Sequence
  Description of Artificial Sequence: Synthetic oligonucleotide
  Sense Strand Starting at position 865 of SEQ ID NO: 318643
auggcuucuuccuuaagga

SEQ ID NO: 386850 - RNA, 19 nt, Artificial Sequence
  Description of Artificial Sequence: Synthetic oligonucleotide
  Antisense Strand to SEQ ID NO: 386849
uccuuaaggaagaagccau

SEQ ID NO: 386851 - RNA, 19 nt, Artificial Sequence
  Description of Artificial Sequence: Synthetic oligonucleotide
  Sense Strand Starting at position 865 of SEQ ID NO: 318644
uggcuucuuccuuaaggaa

SEQ ID NO: 386852 - RNA, 19 nt, Artificial Sequence
  Description of Artificial Sequence: Synthetic oligonucleotide
  Antisense Strand to SEQ ID NO: 386851
uuccuuaaggaagaagcca

SEQ ID NO: 386853 - RNA, 19 nt, Artificial Sequence
  Description of Artificial Sequence: Synthetic oligonucleotide
  Sense Strand Starting at position 866 of SEQ ID NO: 315238
ugauauagaugggaucuga

SEQ ID NO: 386854 - RNA, 19 nt, Artificial Sequence
  Description of Artificial Sequence: Synthetic oligonucleotide
  Antisense Strand to SEQ ID NO: 386853
ucagaucccaucuauauca

SEQ ID NO: 386855 - RNA, 19 nt, Artificial Sequence
  Description of Artificial Sequence: Synthetic oligonucleotide
  Sense Strand Starting at position 866 of SEQ ID NO: 315351
gcuaaaugguuguuucuuu

SEQ ID NO: 386856 - RNA, 19 nt, Artificial Sequence
  Description of Artificial Sequence: Synthetic oligonucleotide
  Antisense Strand to SEQ ID NO: 386855
aaagaaacaaccauuuagc

SEQ ID NO: 386857 - RNA, 19 nt, Artificial Sequence
  Description of Artificial Sequence: Synthetic oligonucleotide
  Sense Strand Starting at position 866 of SEQ ID NO: 315428
aaguaugggugccuuaauu

SEQ ID NO: 386858 - RNA, 19 nt, Artificial Sequence
  Description of Artificial Sequence: Synthetic oligonucleotide
  Antisense Strand to SEQ ID NO: 386857
aauuaaggcacccauacuu

SEQ ID NO: 386859 - RNA, 19 nt, Artificial Sequence
  Description of Artificial Sequence: Synthetic oligonucleotide
  Sense Strand Starting at position 866 of SEQ ID NO: 315487
aaaggagccugugagauuu

SEQ ID NO: 386860 - RNA, 19 nt, Artificial Sequence
  Description of Artificial Sequence: Synthetic oligonucleotide
  Antisense Strand to SEQ ID NO: 386859
aaaucucacaggcuccuuu

SEQ ID NO: 386861 - RNA, 19 nt, Artificial Sequence
  Description of Artificial Sequence: Synthetic oligonucleotide
  Sense Strand Starting at position 866 of SEQ ID NO: 315655
ccacuuuccuaggcucaga

SEQ ID NO: 386862 - RNA, 19 nt, Artificial Sequence
  Description of Artificial Sequence: Synthetic oligonucleotide
  Antisense Strand to SEQ ID NO: 386861
ucugagccuaggaaagugg

SEQ ID NO: 386863 - RNA, 19 nt, Artificial Sequence
  Description of Artificial Sequence: Synthetic oligonucleotide
  Sense Strand Starting at position 866 of SEQ ID NO: 315891
ucagguggccacugagaua

SEQ ID NO: 386864 - RNA, 19 nt, Artificial Sequence
  Description of Artificial Sequence: Synthetic oligonucleotide
  Antisense Strand to SEQ ID NO: 386863
uaucucaguggccaccuga

SEQ ID NO: 386865 - RNA, 19 nt, Artificial Sequence
  Description of Artificial Sequence: Synthetic oligonucleotide
  Sense Strand Starting at position 866 of SEQ ID NO: 315904
gagauauggucuguaccca

SEQ ID NO: 386866 - RNA, 19 nt, Artificial Sequence
  Description of Artificial Sequence: Synthetic oligonucleotide
  Antisense Strand to SEQ ID NO: 386865
uggguacagaccauaucuc

SEQ ID NO: 386867 - RNA, 19 nt, Artificial Sequence
  Description of Artificial Sequence: Synthetic oligonucleotide
  Sense Strand Starting at position 866 of SEQ ID NO: 315905
agauauggucuguacccaa

SEQ ID NO: 386868 - RNA, 19 nt, Artificial Sequence
  Description of Artificial Sequence: Synthetic oligonucleotide
  Antisense Strand to SEQ ID NO: 386867
uuggguacagaccauaucu

SEQ ID NO: 386869 - RNA, 19 nt, Artificial Sequence
  Description of Artificial Sequence: Synthetic oligonucleotide
  Sense Strand Starting at position 866 of SEQ ID NO: 315935
aucugagccgaguacaaua

SEQ ID NO: 386870 - RNA, 19 nt, Artificial Sequence
  Description of Artificial Sequence: Synthetic oligonucleotide
  Antisense Strand to SEQ ID NO: 386869
uauuguacucggcucagau

SEQ ID NO: 386871 - RNA, 19 nt, Artificial Sequence
  Description of Artificial Sequence: Synthetic oligonucleotide
  Sense Strand Starting at position 866 of SEQ ID NO: 315966
gaagguaccuugucuccua

SEQ ID NO: 386872 - RNA, 19 nt, Artificial Sequence
  Description of Artificial Sequence: Synthetic oligonucleotide
  Antisense Strand to SEQ ID NO: 386871
uaggagacaagguaccuuc

SEQ ID NO: 386873 - RNA, 19 nt, Artificial Sequence
  Description of Artificial Sequence: Synthetic oligonucleotide
  Sense Strand Starting at position 866 of SEQ ID NO: 315969
gguaccuugucuccuauuu

SEQ ID NO: 386874 - RNA, 19 nt, Artificial Sequence
  Description of Artificial Sequence: Synthetic oligonucleotide
  Antisense Strand to SEQ ID NO: 386873
aaauaggagacaagguacc

SEQ ID NO: 386875 - RNA, 19 nt, Artificial Sequence
  Description of Artificial Sequence: Synthetic oligonucleotide
  Sense Strand Starting at position 866 of SEQ ID NO: 316154
cagcauuucuuagaaggag

SEQ ID NO: 386876 - RNA, 19 nt, Artificial Sequence
  Description of Artificial Sequence: Synthetic oligonucleotide
  Antisense Strand to SEQ ID NO: 386875
cuccuucuaagaaaugcug

SEQ ID NO: 386877 - RNA, 19 nt, Artificial Sequence
  Description of Artificial Sequence: Synthetic oligonucleotide
  Sense Strand Starting at position 866 of SEQ ID NO: 316230
gcuggagaucgggaauauc

SEQ ID NO: 386878 - RNA, 19 nt, Artificial Sequence
  Description of Artificial Sequence: Synthetic oligonucleotide
  Antisense Strand to SEQ ID NO: 386877
gauauucccgaucuccagc

SEQ ID NO: 386879 - RNA, 19 nt, Artificial Sequence
  Description of Artificial Sequence: Synthetic oligonucleotide
  Sense Strand Starting at position 866 of SEQ ID NO: 316238
ucgggaauaucuucaggga

SEQ ID NO: 386880 - RNA, 19 nt, Artificial Sequence
  Description of Artificial Sequence: Synthetic oligonucleotide
  Antisense Strand to SEQ ID NO: 386879
ucccugaagauauucccga

SEQ ID NO: 386881 - RNA, 19 nt, Artificial Sequence
  Description of Artificial Sequence: Synthetic oligonucleotide
  Sense Strand Starting at position 866 of SEQ ID NO: 316365
ccaggaguugcagaagcaa

SEQ ID NO: 386882 - RNA, 19 nt, Artificial Sequence
  Description of Artificial Sequence: Synthetic oligonucleotide
  Antisense Strand to SEQ ID NO: 386881
uugcuucugcaacuccugg

SEQ ID NO: 386883 - RNA, 19 nt, Artificial Sequence
  Description of Artificial Sequence: Synthetic oligonucleotide
  Sense Strand Starting at position 866 of SEQ ID NO: 316389
ucugauggcuucuuccuua

SEQ ID NO: 386884 - RNA, 19 nt, Artificial Sequence
  Description of Artificial Sequence: Synthetic oligonucleotide
  Antisense Strand to SEQ ID NO: 386883
uaaggaagaagccaucaga

SEQ ID NO: 386885 - RNA, 19 nt, Artificial Sequence
  Description of Artificial Sequence: Synthetic oligonucleotide
  Sense Strand Starting at position 866 of SEQ ID NO: 316393
auggcuucuuccuuaagga

SEQ ID NO: 386886 - RNA, 19 nt, Artificial Sequence
  Description of Artificial Sequence: Synthetic oligonucleotide
  Antisense Strand to SEQ ID NO: 386885
uccuuaaggaagaagccau

SEQ ID NO: 386887 - RNA, 19 nt, Artificial Sequence
  Description of Artificial Sequence: Synthetic oligonucleotide
  Sense Strand Starting at position 866 of SEQ ID NO: 316394
uggcuucuuccuuaaggaa

SEQ ID NO: 386888 - RNA, 19 nt, Artificial Sequence
  Description of Artificial Sequence: Synthetic oligonucleotide
  Antisense Strand to SEQ ID NO: 386887
uuccuuaaggaagaagcca

SEQ ID NO: 386889 - RNA, 19 nt, Artificial Sequence
  Description of Artificial Sequence: Synthetic oligonucleotide
  Sense Strand Starting at position 866 of SEQ ID NO: 318061
cacccugcucguggaagau

SEQ ID NO: 386890 - RNA, 19 nt, Artificial Sequence
  Description of Artificial Sequence: Synthetic oligonucleotide
  Antisense Strand to SEQ ID NO: 386889
aucuuccacgagcagggug

SEQ ID NO: 386891 - RNA, 19 nt, Artificial Sequence
  Description of Artificial Sequence: Synthetic oligonucleotide
  Sense Strand Starting at position 866 of SEQ ID NO: 318071
guggaagauuucgguaaga

SEQ ID NO: 386892 - RNA, 19 nt, Artificial Sequence
  Description of Artificial Sequence: Synthetic oligonucleotide
  Antisense Strand to SEQ ID NO: 386891
ucuuaccgaaaucuuccac

SEQ ID NO: 386893 - RNA, 19 nt, Artificial Sequence
  Description of Artificial Sequence: Synthetic oligonucleotide
  Sense Strand Starting at position 866 of SEQ ID NO: 318208
ggaggagaucuacgaccuu

SEQ ID NO: 386894 - RNA, 19 nt, Artificial Sequence
  Description of Artificial Sequence: Synthetic oligonucleotide
  Antisense Strand to SEQ ID NO: 386893
aaggucguagaucuccucc

SEQ ID NO: 386895 - RNA, 19 nt, Artificial Sequence
  Description of Artificial Sequence: Synthetic oligonucleotide
  Sense Strand Starting at position 866 of SEQ ID NO: 318330
ccaggaacccuacguugua

SEQ ID NO: 386896 - RNA, 19 nt, Artificial Sequence
  Description of Artificial Sequence: Synthetic oligonucleotide
  Antisense Strand to SEQ ID NO: 386895
uacaacguaggguuccugg

SEQ ID NO: 386897 - RNA, 19 nt, Artificial Sequence
  Description of Artificial Sequence: Synthetic oligonucleotide
  Sense Strand Starting at position 866 of SEQ ID NO: 318366
gcagccuugcucucugagu

SEQ ID NO: 386898 - RNA, 19 nt, Artificial Sequence
  Description of Artificial Sequence: Synthetic oligonucleotide
  Antisense Strand to SEQ ID NO: 386897
acucagagagcaaggcugc

SEQ ID NO: 386899 - RNA, 19 nt, Artificial Sequence
  Description of Artificial Sequence: Synthetic oligonucleotide
  Sense Strand Starting at position 866 of SEQ ID NO: 318383
gugcccgcuccugaucaaa

SEQ ID NO: 386900 - RNA, 19 nt, Artificial Sequence
  Description of Artificial Sequence: Synthetic oligonucleotide
  Antisense Strand to SEQ ID NO: 386899
uuugaucaggagcgggcac

SEQ ID NO: 386901 - RNA, 19 nt, Artificial Sequence
  Description of Artificial Sequence: Synthetic oligonucleotide
  Sense Strand Starting at position 866 of SEQ ID NO: 318385
gcccgcuccugaucaaacu

SEQ ID NO: 386902 - RNA, 19 nt, Artificial Sequence
  Description of Artificial Sequence: Synthetic oligonucleotide
  Antisense Strand to SEQ ID NO: 386901
aguuugaucaggagcgggc

SEQ ID NO: 386903 - RNA, 19 nt, Artificial Sequence
  Description of Artificial Sequence: Synthetic oligonucleotide
  Sense Strand Starting at position 866 of SEQ ID NO: 318538
ugugcaguuguguaaugua

SEQ ID NO: 386904 - RNA, 19 nt, Artificial Sequence
  Description of Artificial Sequence: Synthetic oligonucleotide
  Antisense Strand to SEQ ID NO: 386903
uacauuacacaacugcaca

SEQ ID NO: 386905 - RNA, 19 nt, Artificial Sequence
  Description of Artificial Sequence: Synthetic oligonucleotide
  Sense Strand Starting at position 866 of SEQ ID NO: 318572
ccauguguccuuggcuuua

SEQ ID NO: 386906 - RNA, 19 nt, Artificial Sequence
  Description of Artificial Sequence: Synthetic oligonucleotide
  Antisense Strand to SEQ ID NO: 386905
uaaagccaaggacacaugg

SEQ ID NO: 386907 - RNA, 19 nt, Artificial Sequence
  Description of Artificial Sequence: Synthetic oligonucleotide
  Sense Strand Starting at position 866 of SEQ ID NO: 318574
auguguccuuggcuuuaau

SEQ ID NO: 386908 - RNA, 19 nt, Artificial Sequence
  Description of Artificial Sequence: Synthetic oligonucleotide
  Antisense Strand to SEQ ID NO: 386907
auuaaagccaaggacacau

SEQ ID NO: 386909 - RNA, 19 nt, Artificial Sequence
  Description of Artificial Sequence: Synthetic oligonucleotide
  Sense Strand Starting at position 866 of SEQ ID NO: 318584
ggcuuuaauccugacacaa

SEQ ID NO: 386910 - RNA, 19 nt, Artificial Sequence
  Description of Artificial Sequence: Synthetic oligonucleotide
  Antisense Strand to SEQ ID NO: 386909
uugugucaggauuaaagcc

SEQ ID NO: 386911 - RNA, 19 nt, Artificial Sequence
  Description of Artificial Sequence: Synthetic oligonucleotide
  Sense Strand Starting at position 866 of SEQ ID NO: 318672
agugguccugcagaauaga

SEQ ID NO: 386912 - RNA, 19 nt, Artificial Sequence
  Description of Artificial Sequence: Synthetic oligonucleotide
  Antisense Strand to SEQ ID NO: 386911
ucuauucugcaggaccacu

SEQ ID NO: 386913 - RNA, 19 nt, Artificial Sequence
  Description of Artificial Sequence: Synthetic oligonucleotide
  Sense Strand Starting at position 866 of SEQ ID NO: 318681
gcagaauagauguguaaga

SEQ ID NO: 386914 - RNA, 19 nt, Artificial Sequence
  Description of Artificial Sequence: Synthetic oligonucleotide
  Antisense Strand to SEQ ID NO: 386913
ucuuacacaucuauucugc

SEQ ID NO: 386915 - RNA, 19 nt, Artificial Sequence
  Description of Artificial Sequence: Synthetic oligonucleotide
  Sense Strand Starting at position 866 of SEQ ID NO: 318783
uugcuuuccugacugcauu

SEQ ID NO: 386916 - RNA, 19 nt, Artificial Sequence
  Description of Artificial Sequence: Synthetic oligonucleotide
  Antisense Strand to SEQ ID NO: 386915
aaugcagucaggaaagcaa

SEQ ID NO: 386917 - RNA, 19 nt, Artificial Sequence
  Description of Artificial Sequence: Synthetic oligonucleotide
  Sense Strand Starting at position 866 of SEQ ID NO: 318825
gccucaguuccucaucaga

SEQ ID NO: 386918 - RNA, 19 nt, Artificial Sequence
  Description of Artificial Sequence: Synthetic oligonucleotide
  Antisense Strand to SEQ ID NO: 386917
ucugaugaggaacugaggc

SEQ ID NO: 386919 - RNA, 19 nt, Artificial Sequence
  Description of Artificial Sequence: Synthetic oligonucleotide
  Sense Strand Starting at position 866 of SEQ ID NO: 318827
cucaguuccucaucagagu

SEQ ID NO: 386920 - RNA, 19 nt, Artificial Sequence
  Description of Artificial Sequence: Synthetic oligonucleotide
  Antisense Strand to SEQ ID NO: 386919
acucugaugaggaacugag

SEQ ID NO: 386921 - RNA, 19 nt, Artificial Sequence
  Description of Artificial Sequence: Synthetic oligonucleotide
  Sense Strand Starting at position 866 of SEQ ID NO: 318828
ucaguuccucaucagaguu

SEQ ID NO: 386922 - RNA, 19 nt, Artificial Sequence
  Description of Artificial Sequence: Synthetic oligonucleotide
  Antisense Strand to SEQ ID NO: 386921
aacucugaugaggaacuga

SEQ ID NO: 386923 - RNA, 19 nt, Artificial Sequence
  Description of Artificial Sequence: Synthetic oligonucleotide
  Sense Strand Starting at position 866 of SEQ ID NO: 318856
gucuuacuuuguguuccua

SEQ ID NO: 386924 - RNA, 19 nt, Artificial Sequence
  Description of Artificial Sequence: Synthetic oligonucleotide
  Antisense Strand to SEQ ID NO: 386923
uaggaacacaaaguaagac

SEQ ID NO: 386925 - RNA, 19 nt, Artificial Sequence
  Description of Artificial Sequence: Synthetic oligonucleotide
  Sense Strand Starting at position 866 of SEQ ID NO: 318969
cagucagaggcuuaugcuu

SEQ ID NO: 386926 - RNA, 19 nt, Artificial Sequence
  Description of Artificial Sequence: Synthetic oligonucleotide
  Antisense Strand to SEQ ID NO: 386925
aagcauaagccucugacug

SEQ ID NO: 386927 - RNA, 19 nt, Artificial Sequence
  Description of Artificial Sequence: Synthetic oligonucleotide
  Sense Strand Starting at position 866 of SEQ ID NO: 319101
cgcagugcaaaggauuaau

SEQ ID NO: 386928 - RNA, 19 nt, Artificial Sequence
  Description of Artificial Sequence: Synthetic oligonucleotide
  Antisense Strand to SEQ ID NO: 386927
auuaauccuuugcacugcg

SEQ ID NO: 386929 - RNA, 19 nt, Artificial Sequence
  Description of Artificial Sequence: Synthetic oligonucleotide
  Sense Strand Starting at position 866 of SEQ ID NO: 319110
aaggauuaaugggagaaag

SEQ ID NO: 386930 - RNA, 19 nt, Artificial Sequence
  Description of Artificial Sequence: Synthetic oligonucleotide
  Antisense Strand to SEQ ID NO: 386929
cuuucucccauuaauccuu

SEQ ID NO: 386931 - RNA, 19 nt, Artificial Sequence
  Description of Artificial Sequence: Synthetic oligonucleotide
  Sense Strand Starting at position 866 of SEQ ID NO: 319189
agcccuguauauggauuua

SEQ ID NO: 386932 - RNA, 19 nt, Artificial Sequence
  Description of Artificial Sequence: Synthetic oligonucleotide
  Antisense Strand to SEQ ID NO: 386931
uaaauccauauacagggcu

SEQ ID NO: 386933 - RNA, 19 nt, Artificial Sequence
  Description of Artificial Sequence: Synthetic oligonucleotide
  Sense Strand Starting at position 867 of SEQ ID NO: 315487
cuaugaacauccucuggau

SEQ ID NO: 386934 - RNA, 19 nt, Artificial Sequence
  Description of Artificial Sequence: Synthetic oligonucleotide
  Antisense Strand to SEQ ID NO: 386933
auccagaggauguucauag

SEQ ID NO: 386935 - RNA, 19 nt, Artificial Sequence
  Description of Artificial Sequence: Synthetic oligonucleotide
  Sense Strand Starting at position 867 of SEQ ID NO: 315626
aaggguuuaugucuacaau

SEQ ID NO: 386936 - RNA, 19 nt, Artificial Sequence
  Description of Artificial Sequence: Synthetic oligonucleotide
  Antisense Strand to SEQ ID NO: 386935
auuguagacauaaacccuu

SEQ ID NO: 386937 - RNA, 19 nt, Artificial Sequence
  Description of Artificial Sequence: Synthetic oligonucleotide
  Sense Strand Starting at position 867 of SEQ ID NO: 315627
aggguuuaugucuacaaug

SEQ ID NO: 386938 - RNA, 19 nt, Artificial Sequence
  Description of Artificial Sequence: Synthetic oligonucleotide
  Antisense Strand to SEQ ID NO: 386937
cauuguagacauaaacccu

SEQ ID NO: 386939 - RNA, 19 nt, Artificial Sequence
  Description of Artificial Sequence: Synthetic oligonucleotide
  Sense Strand Starting at position 867 of SEQ ID NO: 315827
cuaggcuucuaacuaauga

SEQ ID NO: 386940 - RNA, 19 nt, Artificial Sequence
  Description of Artificial Sequence: Synthetic oligonucleotide
  Antisense Strand to SEQ ID NO: 386939
ucauuaguuagaagccuag

SEQ ID NO: 386941 - RNA, 19 nt, Artificial Sequence
  Description of Artificial Sequence: Synthetic oligonucleotide
  Sense Strand Starting at position 867 of SEQ ID NO: 315881
guuguauguggugaccaua

SEQ ID NO: 386942 - RNA, 19 nt, Artificial Sequence
  Description of Artificial Sequence: Synthetic oligonucleotide
  Antisense Strand to SEQ ID NO: 386941
uauggucaccacauacaac

SEQ ID NO: 386943 - RNA, 19 nt, Artificial Sequence
  Description of Artificial Sequence: Synthetic oligonucleotide
  Sense Strand Starting at position 867 of SEQ ID NO: 315884
guauguggugaccauauga

SEQ ID NO: 386944 - RNA, 19 nt, Artificial Sequence
  Description of Artificial Sequence: Synthetic oligonucleotide
  Antisense Strand to SEQ ID NO: 386943
ucauauggucaccacauac

SEQ ID NO: 386945 - RNA, 19 nt, Artificial Sequence
  Description of Artificial Sequence: Synthetic oligonucleotide
  Sense Strand Starting at position 867 of SEQ ID NO: 315910
ucugcaauuagaggaguua

SEQ ID NO: 386946 - RNA, 19 nt, Artificial Sequence
  Description of Artificial Sequence: Synthetic oligonucleotide
  Antisense Strand to SEQ ID NO: 386945
uaacuccucuaauugcaga

SEQ ID NO: 386947 - RNA, 19 nt, Artificial Sequence
  Description of Artificial Sequence: Synthetic oligonucleotide
  Sense Strand Starting at position 867 of SEQ ID NO: 315911
cugcaauuagaggaguuau

SEQ ID NO: 386948 - RNA, 19 nt, Artificial Sequence
  Description of Artificial Sequence: Synthetic oligonucleotide
  Antisense Strand to SEQ ID NO: 386947
auaacuccucuaauugcag

SEQ ID NO: 386949 - RNA, 19 nt, Artificial Sequence
  Description of Artificial Sequence: Synthetic oligonucleotide
  Sense Strand Starting at position 867 of SEQ ID NO: 315968
auuacauauuucuagagug

SEQ ID NO: 386950 - RNA, 19 nt, Artificial Sequence
  Description of Artificial Sequence: Synthetic oligonucleotide
  Antisense Strand to SEQ ID NO: 386949
cacucuagaaauauguaau

SEQ ID NO: 386951 - RNA, 19 nt, Artificial Sequence
  Description of Artificial Sequence: Synthetic oligonucleotide
  Sense Strand Starting at position 867 of SEQ ID NO: 316017
uuccuuggugauuacuuua

SEQ ID NO: 386952 - RNA, 19 nt, Artificial Sequence
  Description of Artificial Sequence: Synthetic oligonucleotide
  Antisense Strand to SEQ ID NO: 386951
uaaaguaaucaccaaggaa

SEQ ID NO: 386953 - RNA, 19 nt, Artificial Sequence
  Description of Artificial Sequence: Synthetic oligonucleotide
  Sense Strand Starting at position 867 of SEQ ID NO: 316020
cuuggugauuacuuuauaa

SEQ ID NO: 386954 - RNA, 19 nt, Artificial Sequence
  Description of Artificial Sequence: Synthetic oligonucleotide
  Antisense Strand to SEQ ID NO: 386953
uuauaaaguaaucaccaag

SEQ ID NO: 386955 - RNA, 19 nt, Artificial Sequence
  Description of Artificial Sequence: Synthetic oligonucleotide
  Sense Strand Starting at position 867 of SEQ ID NO: 316022
uggugauuacuuuauaacu

SEQ ID NO: 386956 - RNA, 19 nt, Artificial Sequence
  Description of Artificial Sequence: Synthetic oligonucleotide
  Antisense Strand to SEQ ID NO: 386955
aguuauaaaguaaucacca

SEQ ID NO: 386957 - RNA, 19 nt, Artificial Sequence
  Description of Artificial Sequence: Synthetic oligonucleotide
  Sense Strand Starting at position 867 of SEQ ID NO: 316098
cccauagaccuccagugau

SEQ ID NO: 386958 - RNA, 19 nt, Artificial Sequence
  Description of Artificial Sequence: Synthetic oligonucleotide
  Antisense Strand to SEQ ID NO: 386957
aucacuggaggucuauggg

SEQ ID NO: 386959 - RNA, 19 nt, Artificial Sequence
  Description of Artificial Sequence: Synthetic oligonucleotide
  Sense Strand Starting at position 867 of SEQ ID NO: 316153
uagaguggcauugguauca

SEQ ID NO: 386960 - RNA, 19 nt, Artificial Sequence
  Description of Artificial Sequence: Synthetic oligonucleotide
  Antisense Strand to SEQ ID NO: 386959
ugauaccaaugccacucua

SEQ ID NO: 386961 - RNA, 19 nt, Artificial Sequence
  Description of Artificial Sequence: Synthetic oligonucleotide
  Sense Strand Starting at position 867 of SEQ ID NO: 316240
uuuacuauucucggaagga

SEQ ID NO: 386962 - RNA, 19 nt, Artificial Sequence
  Description of Artificial Sequence: Synthetic oligonucleotide
  Antisense Strand to SEQ ID NO: 386961
uccuuccgagaauaguaaa

SEQ ID NO: 386963 - RNA, 19 nt, Artificial Sequence
  Description of Artificial Sequence: Synthetic oligonucleotide
  Sense Strand Starting at position 867 of SEQ ID NO: 316305
aggagcauuucuucugugu

SEQ ID NO: 386964 - RNA, 19 nt, Artificial Sequence
  Description of Artificial Sequence: Synthetic oligonucleotide
  Antisense Strand to SEQ ID NO: 386963
acacagaagaaaugcuccu

SEQ ID NO: 386965 - RNA, 19 nt, Artificial Sequence
  Description of Artificial Sequence: Synthetic oligonucleotide
  Sense Strand Starting at position 867 of SEQ ID NO: 316433
augugauaagcuuagguaa

SEQ ID NO: 386966 - RNA, 19 nt, Artificial Sequence
  Description of Artificial Sequence: Synthetic oligonucleotide
  Antisense Strand to SEQ ID NO: 386965
uuaccuaagcuuaucacau

SEQ ID NO: 386967 - RNA, 19 nt, Artificial Sequence
  Description of Artificial Sequence: Synthetic oligonucleotide
  Sense Strand Starting at position 867 of SEQ ID NO: 316436
ugauaagcuuagguaaaua

SEQ ID NO: 386968 - RNA, 19 nt, Artificial Sequence
  Description of Artificial Sequence: Synthetic oligonucleotide
  Antisense Strand to SEQ ID NO: 386967
uauuuaccuaagcuuauca

SEQ ID NO: 386969 - RNA, 19 nt, Artificial Sequence
  Description of Artificial Sequence: Synthetic oligonucleotide
  Sense Strand Starting at position 867 of SEQ ID NO: 316447
gguaaauaggcuugauucu

SEQ ID NO: 386970 - RNA, 19 nt, Artificial Sequence
  Description of Artificial Sequence: Synthetic oligonucleotide
  Antisense Strand to SEQ ID NO: 386969
agaaucaagccuauuuacc

SEQ ID NO: 386971 - RNA, 19 nt, Artificial Sequence
  Description of Artificial Sequence: Synthetic oligonucleotide
  Sense Strand Starting at position 867 of SEQ ID NO: 316458
uugauucugcuccaguaau

SEQ ID NO: 386972 - RNA, 19 nt, Artificial Sequence
  Description of Artificial Sequence: Synthetic oligonucleotide
  Antisense Strand to SEQ ID NO: 386971
auuacuggagcagaaucaa

SEQ ID NO: 386973 - RNA, 19 nt, Artificial Sequence
  Description of Artificial Sequence: Synthetic oligonucleotide
  Sense Strand Starting at position 867 of SEQ ID NO: 316916
agcagacccuccucagaaa

SEQ ID NO: 386974 - RNA, 19 nt, Artificial Sequence
  Description of Artificial Sequence: Synthetic oligonucleotide
  Antisense Strand to SEQ ID NO: 386973
uuucugaggagggucugcu

SEQ ID NO: 386975 - RNA, 19 nt, Artificial Sequence
  Description of Artificial Sequence: Synthetic oligonucleotide
  Sense Strand Starting at position 867 of SEQ ID NO: 316950
gcuguauaugcugcucauu

SEQ ID NO: 386976 - RNA, 19 nt, Artificial Sequence
  Description of Artificial Sequence: Synthetic oligonucleotide
  Antisense Strand to SEQ ID NO: 386975
aaugagcagcauauacagc

SEQ ID NO: 386977 - RNA, 19 nt, Artificial Sequence
  Description of Artificial Sequence: Synthetic oligonucleotide
  Sense Strand Starting at position 867 of SEQ ID NO: 317409
gccauuggcuauccagaaa

SEQ ID NO: 386978 - RNA, 19 nt, Artificial Sequence
  Description of Artificial Sequence: Synthetic oligonucleotide
  Antisense Strand to SEQ ID NO: 386977
uuucuggauagccaauggc

SEQ ID NO: 386979 - RNA, 19 nt, Artificial Sequence
  Description of Artificial Sequence: Synthetic oligonucleotide
  Sense Strand Starting at position 867 of SEQ ID NO: 317520
gcaaucucagagggaaauc

SEQ ID NO: 386980 - RNA, 19 nt, Artificial Sequence
  Description of Artificial Sequence: Synthetic oligonucleotide
  Antisense Strand to SEQ ID NO: 386979
gauuucccucugagauugc

SEQ ID NO: 386981 - RNA, 19 nt, Artificial Sequence
  Description of Artificial Sequence: Synthetic oligonucleotide
  Sense Strand Starting at position 867 of SEQ ID NO: 317571
aguggaguuucuucuauua

SEQ ID NO: 386982 - RNA, 19 nt, Artificial Sequence
  Description of Artificial Sequence: Synthetic oligonucleotide
  Antisense Strand to SEQ ID NO: 386981
uaauagaagaaacuccacu

SEQ ID NO: 386983 - RNA, 19 nt, Artificial Sequence
  Description of Artificial Sequence: Synthetic oligonucleotide
  Sense Strand Starting at position 867 of SEQ ID NO: 317845
gcacguucugugguagguu

SEQ ID NO: 386984 - RNA, 19 nt, Artificial Sequence
  Description of Artificial Sequence: Synthetic oligonucleotide
  Antisense Strand to SEQ ID NO: 386983
aaccuaccacagaacgugc

SEQ ID NO: 386985 - RNA, 19 nt, Artificial Sequence
  Description of Artificial Sequence: Synthetic oligonucleotide
  Sense Strand Starting at position 867 of SEQ ID NO: 317910
augaguauguuaucuuaca

SEQ ID NO: 386986 - RNA, 19 nt, Artificial Sequence
  Description of Artificial Sequence: Synthetic oligonucleotide
  Antisense Strand to SEQ ID NO: 386985
uguaagauaacauacucau

SEQ ID NO: 386987 - RNA, 19 nt, Artificial Sequence
  Description of Artificial Sequence: Synthetic oligonucleotide
  Sense Strand Starting at position 867 of SEQ ID NO: 318023
guccuuaugaaaggucaga

SEQ ID NO: 386988 - RNA, 19 nt, Artificial Sequence
  Description of Artificial Sequence: Synthetic oligonucleotide
  Antisense Strand to SEQ ID NO: 386987
ucugaccuuucauaaggac

SEQ ID NO: 386989 - RNA, 19 nt, Artificial Sequence
  Description of Artificial Sequence: Synthetic oligonucleotide
  Sense Strand Starting at position 867 of SEQ ID NO: 318050
aagagaugugauggccuau

SEQ ID NO: 386990 - RNA, 19 nt, Artificial Sequence
  Description of Artificial Sequence: Synthetic oligonucleotide
  Antisense Strand to SEQ ID NO: 386989
auaggccaucacaucucuu

SEQ ID NO: 386991 - RNA, 19 nt, Artificial Sequence
  Description of Artificial Sequence: Synthetic oligonucleotide
  Sense Strand Starting at position 867 of SEQ ID NO: 318378
caggguaagugauugauau

SEQ ID NO: 386992 - RNA, 19 nt, Artificial Sequence
  Description of Artificial Sequence: Synthetic oligonucleotide
  Antisense Strand to SEQ ID NO: 386991
auaucaaucacuuacccug

SEQ ID NO: 386993 - RNA, 19 nt, Artificial Sequence
  Description of Artificial Sequence: Synthetic oligonucleotide
  Sense Strand Starting at position 867 of SEQ ID NO: 318379
aggguaagugauugauaug

SEQ ID NO: 386994 - RNA, 19 nt, Artificial Sequence
  Description of Artificial Sequence: Synthetic oligonucleotide
  Antisense Strand to SEQ ID NO: 386993
cauaucaaucacuuacccu

SEQ ID NO: 386995 - RNA, 19 nt, Artificial Sequence
  Description of Artificial Sequence: Synthetic oligonucleotide
  Sense Strand Starting at position 867 of SEQ ID NO: 318540
cuagaccugcaagguaaua

SEQ ID NO: 386996 - RNA, 19 nt, Artificial Sequence
  Description of Artificial Sequence: Synthetic oligonucleotide
  Antisense Strand to SEQ ID NO: 386995
uauuaccuugcaggucuag

SEQ ID NO: 386997 - RNA, 19 nt, Artificial Sequence
  Description of Artificial Sequence: Synthetic oligonucleotide
  Sense Strand Starting at position 867 of SEQ ID NO: 318556
auacauuugcacuguugua

SEQ ID NO: 386998 - RNA, 19 nt, Artificial Sequence
  Description of Artificial Sequence: Synthetic oligonucleotide
  Antisense Strand to SEQ ID NO: 386997
uacaacagugcaaauguau

SEQ ID NO: 386999 - RNA, 19 nt, Artificial Sequence
  Description of Artificial Sequence: Synthetic oligonucleotide
  Sense Strand Starting at position 867 of SEQ ID NO: 318641
acucuuuaugauggugaga

SEQ ID NO: 387000 - RNA, 19 nt, Artificial Sequence
  Description of Artificial Sequence: Synthetic oligonucleotide
  Antisense Strand to SEQ ID NO: 386999
ucucaccaucauaaagagu

SEQ ID NO: 387001 - RNA, 19 nt, Artificial Sequence
  Description of Artificial Sequence: Synthetic oligonucleotide
  Sense Strand Starting at position 867 of SEQ ID NO: 318900
guacaaauguucuuugauc

SEQ ID NO: 387002 - RNA, 19 nt, Artificial Sequence
  Description of Artificial Sequence: Synthetic oligonucleotide
  Antisense Strand to SEQ ID NO: 387001
gaucaaagaacauuuguac

SEQ ID NO: 387003 - RNA, 19 nt, Artificial Sequence
  Description of Artificial Sequence: Synthetic oligonucleotide
  Sense Strand Starting at position 867 of SEQ ID NO: 318979
ugaagauaucucugucacc

SEQ ID NO: 387004 - RNA, 19 nt, Artificial Sequence
  Description of Artificial Sequence: Synthetic oligonucleotide
  Antisense Strand to SEQ ID NO: 387003
ggugacagagauaucuuca

SEQ ID NO: 387005 - RNA, 19 nt, Artificial Sequence
  Description of Artificial Sequence: Synthetic oligonucleotide
  Sense Strand Starting at position 867 of SEQ ID NO: 318992
gucaccuugcuccaaaugu

SEQ ID NO: 387006 - RNA, 19 nt, Artificial Sequence
  Description of Artificial Sequence: Synthetic oligonucleotide
  Antisense Strand to SEQ ID NO: 387005
acauuuggagcaaggugac

SEQ ID NO: 387007 - RNA, 19 nt, Artificial Sequence
  Description of Artificial Sequence: Synthetic oligonucleotide
  Sense Strand Starting at position 867 of SEQ ID NO: 319072
auugcucuucucuaugaag

SEQ ID NO: 387008 - RNA, 19 nt, Artificial Sequence
  Description of Artificial Sequence: Synthetic oligonucleotide
  Antisense Strand to SEQ ID NO: 387007
cuucauagagaagagcaau

SEQ ID NO: 387009 - RNA, 19 nt, Artificial Sequence
  Description of Artificial Sequence: Synthetic oligonucleotide
  Sense Strand Starting at position 867 of SEQ ID NO: 319149
ugccauuucuugucugcua

SEQ ID NO: 387010 - RNA, 19 nt, Artificial Sequence
  Description of Artificial Sequence: Synthetic oligonucleotide
  Antisense Strand to SEQ ID NO: 387009
uagcagacaagaaauggca

SEQ ID NO: 387011 - RNA, 19 nt, Artificial Sequence
  Description of Artificial Sequence: Synthetic oligonucleotide
  Sense Strand Starting at position 867 of SEQ ID NO: 319151
ccauuucuugucugcuagu

SEQ ID NO: 387012 - RNA, 19 nt, Artificial Sequence
  Description of Artificial Sequence: Synthetic oligonucleotide
  Antisense Strand to SEQ ID NO: 387011
acuagcagacaagaaaugg

SEQ ID NO: 387013 - RNA, 19 nt, Artificial Sequence
  Description of Artificial Sequence: Synthetic oligonucleotide
  Sense Strand Starting at position 868 of SEQ ID NO: 315248
ggcaacucuaacgguuuau

SEQ ID NO: 387014 - RNA, 19 nt, Artificial Sequence
  Description of Artificial Sequence: Synthetic oligonucleotide
  Antisense Strand to SEQ ID NO: 387013
auaaaccguuagaguugcc

SEQ ID NO: 387015 - RNA, 19 nt, Artificial Sequence
  Description of Artificial Sequence: Synthetic oligonucleotide
  Sense Strand Starting at position 868 of SEQ ID NO: 315277
uccgacaguucuguugcua

SEQ ID NO: 387016 - RNA, 19 nt, Artificial Sequence
  Description of Artificial Sequence: Synthetic oligonucleotide
  Antisense Strand to SEQ ID NO: 387015
uagcaacagaacugucgga

SEQ ID NO: 387017 - RNA, 19 nt, Artificial Sequence
  Description of Artificial Sequence: Synthetic oligonucleotide
  Sense Strand Starting at position 868 of SEQ ID NO: 315337
guuuaaccuucugaaacug

SEQ ID NO: 387018 - RNA, 19 nt, Artificial Sequence
  Description of Artificial Sequence: Synthetic oligonucleotide
  Antisense Strand to SEQ ID NO: 387017
caguuucagaagguuaaac

SEQ ID NO: 387019 - RNA, 19 nt, Artificial Sequence
  Description of Artificial Sequence: Synthetic oligonucleotide
  Sense Strand Starting at position 868 of SEQ ID NO: 315508
agggaaauguggcugacaa

SEQ ID NO: 387020 - RNA, 19 nt, Artificial Sequence
  Description of Artificial Sequence: Synthetic oligonucleotide
  Antisense Strand to SEQ ID NO: 387019
uugucagccacauuucccu

SEQ ID NO: 387021 - RNA, 19 nt, Artificial Sequence
  Description of Artificial Sequence: Synthetic oligonucleotide
  Sense Strand Starting at position 868 of SEQ ID NO: 315509
gggaaauguggcugacaaa

SEQ ID NO: 387022 - RNA, 19 nt, Artificial Sequence
  Description of Artificial Sequence: Synthetic oligonucleotide
  Antisense Strand to SEQ ID NO: 387021
uuugucagccacauuuccc

SEQ ID NO: 387023 - RNA, 19 nt, Artificial Sequence
  Description of Artificial Sequence: Synthetic oligonucleotide
  Sense Strand Starting at position 868 of SEQ ID NO: 315512
aaauguggcugacaaauau

SEQ ID NO: 387024 - RNA, 19 nt, Artificial Sequence
  Description of Artificial Sequence: Synthetic oligonucleotide
  Antisense Strand to SEQ ID NO: 387023
auauuugucagccacauuu

SEQ ID NO: 387025 - RNA, 19 nt, Artificial Sequence
  Description of Artificial Sequence: Synthetic oligonucleotide
  Sense Strand Starting at position 868 of SEQ ID NO: 315590
ggcuaugacuaguugugca

SEQ ID NO: 387026 - RNA, 19 nt, Artificial Sequence
  Description of Artificial Sequence: Synthetic oligonucleotide
  Antisense Strand to SEQ ID NO: 387025
ugcacaacuagucauagcc

SEQ ID NO: 387027 - RNA, 19 nt, Artificial Sequence
  Description of Artificial Sequence: Synthetic oligonucleotide
  Sense Strand Starting at position 868 of SEQ ID NO: 315595
ugacuaguugugcauucua

SEQ ID NO: 387028 - RNA, 19 nt, Artificial Sequence
  Description of Artificial Sequence: Synthetic oligonucleotide
  Antisense Strand to SEQ ID NO: 387027
uagaaugcacaacuaguca

SEQ ID NO: 387029 - RNA, 19 nt, Artificial Sequence
  Description of Artificial Sequence: Synthetic oligonucleotide
  Sense Strand Starting at position 868 of SEQ ID NO: 315610
ucuagagcucuuuagagcu

SEQ ID NO: 387030 - RNA, 19 nt, Artificial Sequence
  Description of Artificial Sequence: Synthetic oligonucleotide
  Antisense Strand to SEQ ID NO: 387029
agcucuaaagagcucuaga

SEQ ID NO: 387031 - RNA, 19 nt, Artificial Sequence
  Description of Artificial Sequence: Synthetic oligonucleotide
  Sense Strand Starting at position 868 of SEQ ID NO: 315647
aaagauuucuagggaagag

SEQ ID NO: 387032 - RNA, 19 nt, Artificial Sequence
  Description of Artificial Sequence: Synthetic oligonucleotide
  Antisense Strand to SEQ ID NO: 387031
cucuucccuagaaaucuuu

SEQ ID NO: 387033 - RNA, 19 nt, Artificial Sequence
  Description of Artificial Sequence: Synthetic oligonucleotide
  Sense Strand Starting at position 868 of SEQ ID NO: 315769
ccgcgaagcaguuugacuu

SEQ ID NO: 387034 - RNA, 19 nt, Artificial Sequence
  Description of Artificial Sequence: Synthetic oligonucleotide
  Antisense Strand to SEQ ID NO: 387033
aagucaaacugcuucgcgg

SEQ ID NO: 387035 - RNA, 19 nt, Artificial Sequence
  Description of Artificial Sequence: Synthetic oligonucleotide
  Sense Strand Starting at position 868 of SEQ ID NO: 315874
agguccucggcgcuuuaau

SEQ ID NO: 387036 - RNA, 19 nt, Artificial Sequence
  Description of Artificial Sequence: Synthetic oligonucleotide
  Antisense Strand to SEQ ID NO: 387035
auuaaagcgccgaggaccu

SEQ ID NO: 387037 - RNA, 19 nt, Artificial Sequence
  Description of Artificial Sequence: Synthetic oligonucleotide
  Sense Strand Starting at position 868 of SEQ ID NO: 315875
gguccucggcgcuuuaaua

SEQ ID NO: 387038 - RNA, 19 nt, Artificial Sequence
  Description of Artificial Sequence: Synthetic oligonucleotide
  Antisense Strand to SEQ ID NO: 387037
uauuaaagcgccgaggacc

SEQ ID NO: 387039 - RNA, 19 nt, Artificial Sequence
  Description of Artificial Sequence: Synthetic oligonucleotide
  Sense Strand Starting at position 868 of SEQ ID NO: 315876
guccucggcgcuuuaauaa

SEQ ID NO: 387040 - RNA, 19 nt, Artificial Sequence
  Description of Artificial Sequence: Synthetic oligonucleotide
  Antisense Strand to SEQ ID NO: 387039
uuauuaaagcgccgaggac

SEQ ID NO: 387041 - RNA, 19 nt, Artificial Sequence
  Description of Artificial Sequence: Synthetic oligonucleotide
  Sense Strand Starting at position 868 of SEQ ID NO: 315883
gcgcuuuaauaagugauga

SEQ ID NO: 387042 - RNA, 19 nt, Artificial Sequence
  Description of Artificial Sequence: Synthetic oligonucleotide
  Antisense Strand to SEQ ID NO: 387041
ucaucacuuauuaaagcgc

SEQ ID NO: 387043 - RNA, 19 nt, Artificial Sequence
  Description of Artificial Sequence: Synthetic oligonucleotide
  Sense Strand Starting at position 868 of SEQ ID NO: 315884
cgcuuuaauaagugaugac

SEQ ID NO: 387044 - RNA, 19 nt, Artificial Sequence
  Description of Artificial Sequence: Synthetic oligonucleotide
  Antisense Strand to SEQ ID NO: 387043
gucaucacuuauuaaagcg

SEQ ID NO: 387045 - RNA, 19 nt, Artificial Sequence
  Description of Artificial Sequence: Synthetic oligonucleotide
  Sense Strand Starting at position 868 of SEQ ID NO: 315896
ugaugacugcuagggcuaa

SEQ ID NO: 387046 - RNA, 19 nt, Artificial Sequence
  Description of Artificial Sequence: Synthetic oligonucleotide
  Antisense Strand to SEQ ID NO: 387045
uuagcccuagcagucauca

SEQ ID NO: 387047 - RNA, 19 nt, Artificial Sequence
  Description of Artificial Sequence: Synthetic oligonucleotide
  Sense Strand Starting at position 868 of SEQ ID NO: 315900
gacugcuagggcuaaguua

SEQ ID NO: 387048 - RNA, 19 nt, Artificial Sequence
  Description of Artificial Sequence: Synthetic oligonucleotide
  Antisense Strand to SEQ ID NO: 387047
uaacuuagcccuagcaguc

SEQ ID NO: 387049 - RNA, 19 nt, Artificial Sequence
  Description of Artificial Sequence: Synthetic oligonucleotide
  Sense Strand Starting at position 868 of SEQ ID NO: 316093
cgguuaaagcucguagguu

SEQ ID NO: 387050 - RNA, 19 nt, Artificial Sequence
  Description of Artificial Sequence: Synthetic oligonucleotide
  Antisense Strand to SEQ ID NO: 387049
aaccuacgagcuuuaaccg

SEQ ID NO: 387051 - RNA, 19 nt, Artificial Sequence
  Description of Artificial Sequence: Synthetic oligonucleotide
  Sense Strand Starting at position 868 of SEQ ID NO: 316164
gagggagucuucucugaau

SEQ ID NO: 387052 - RNA, 19 nt, Artificial Sequence
  Description of Artificial Sequence: Synthetic oligonucleotide
  Antisense Strand to SEQ ID NO: 387051
auucagagaagacucccuc

SEQ ID NO: 387053 - RNA, 19 nt, Artificial Sequence
  Description of Artificial Sequence: Synthetic oligonucleotide
  Sense Strand Starting at position 868 of SEQ ID NO: 316166
gggagucuucucugaaucc

SEQ ID NO: 387054 - RNA, 19 nt, Artificial Sequence
  Description of Artificial Sequence: Synthetic oligonucleotide
  Antisense Strand to SEQ ID NO: 387053
ggauucagagaagacuccc

SEQ ID NO: 387055 - RNA, 19 nt, Artificial Sequence
  Description of Artificial Sequence: Synthetic oligonucleotide
  Sense Strand Starting at position 868 of SEQ ID NO: 316214
ucucuuucucagggagcua

SEQ ID NO: 387056 - RNA, 19 nt, Artificial Sequence
  Description of Artificial Sequence: Synthetic oligonucleotide
  Antisense Strand to SEQ ID NO: 387055
uagcucccugagaaagaga

SEQ ID NO: 387057 - RNA, 19 nt, Artificial Sequence
  Description of Artificial Sequence: Synthetic oligonucleotide
  Sense Strand Starting at position 868 of SEQ ID NO: 316265
auuccagaguugcuggaaa

SEQ ID NO: 387058 - RNA, 19 nt, Artificial Sequence
  Description of Artificial Sequence: Synthetic oligonucleotide
  Antisense Strand to SEQ ID NO: 387057
uuuccagcaacucuggaau

SEQ ID NO: 387059 - RNA, 19 nt, Artificial Sequence
  Description of Artificial Sequence: Synthetic oligonucleotide
  Sense Strand Starting at position 868 of SEQ ID NO: 316333
ggaagcaucuucccuacca

SEQ ID NO: 387060 - RNA, 19 nt, Artificial Sequence
  Description of Artificial Sequence: Synthetic oligonucleotide
  Antisense Strand to SEQ ID NO: 387059
ugguagggaagaugcuucc

SEQ ID NO: 387061 - RNA, 19 nt, Artificial Sequence
  Description of Artificial Sequence: Synthetic oligonucleotide
  Sense Strand Starting at position 868 of SEQ ID NO: 316485
cccuacagccuguaaagaa

SEQ ID NO: 387062 - RNA, 19 nt, Artificial Sequence
  Description of Artificial Sequence: Synthetic oligonucleotide
  Antisense Strand to SEQ ID NO: 387061
uucuuuacaggcuguaggg

SEQ ID NO: 387063 - RNA, 19 nt, Artificial Sequence
  Description of Artificial Sequence: Synthetic oligonucleotide
  Sense Strand Starting at position 868 of SEQ ID NO: 317507
auuggaagucaacgaauga

SEQ ID NO: 387064 - RNA, 19 nt, Artificial Sequence
  Description of Artificial Sequence: Synthetic oligonucleotide
  Antisense Strand to SEQ ID NO: 387063
ucauucguugacuuccaau

SEQ ID NO: 387065 - RNA, 19 nt, Artificial Sequence
  Description of Artificial Sequence: Synthetic oligonucleotide
  Sense Strand Starting at position 868 of SEQ ID NO: 317595
ccuagaguuacgcagauga

SEQ ID NO: 387066 - RNA, 19 nt, Artificial Sequence
  Description of Artificial Sequence: Synthetic oligonucleotide
  Antisense Strand to SEQ ID NO: 387065
ucaucugcguaacucuagg

SEQ ID NO: 387067 - RNA, 19 nt, Artificial Sequence
  Description of Artificial Sequence: Synthetic oligonucleotide
  Sense Strand Starting at position 868 of SEQ ID NO: 317597
uagaguuacgcagaugaag

SEQ ID NO: 387068 - RNA, 19 nt, Artificial Sequence
  Description of Artificial Sequence: Synthetic oligonucleotide
  Antisense Strand to SEQ ID NO: 387067
cuucaucugcguaacucua

SEQ ID NO: 387069 - RNA, 19 nt, Artificial Sequence
  Description of Artificial Sequence: Synthetic oligonucleotide
  Sense Strand Starting at position 868 of SEQ ID NO: 317616
gacauuggcccucgagaau

SEQ ID NO: 387070 - RNA, 19 nt, Artificial Sequence
  Description of Artificial Sequence: Synthetic oligonucleotide
  Antisense Strand to SEQ ID NO: 387069
auucucgagggccaauguc

SEQ ID NO: 387071 - RNA, 19 nt, Artificial Sequence
  Description of Artificial Sequence: Synthetic oligonucleotide
  Sense Strand Starting at position 868 of SEQ ID NO: 317663
agcgcaaacuacuuaugau

SEQ ID NO: 387072 - RNA, 19 nt, Artificial Sequence
  Description of Artificial Sequence: Synthetic oligonucleotide
  Antisense Strand to SEQ ID NO: 387071
aucauaaguaguuugcgcu

SEQ ID NO: 387073 - RNA, 19 nt, Artificial Sequence
  Description of Artificial Sequence: Synthetic oligonucleotide
  Sense Strand Starting at position 868 of SEQ ID NO: 317705
uguagcucccagcaacaau

SEQ ID NO: 387074 - RNA, 19 nt, Artificial Sequence
  Description of Artificial Sequence: Synthetic oligonucleotide
  Antisense Strand to SEQ ID NO: 387073
auuguugcugggagcuaca

SEQ ID NO: 387075 - RNA, 19 nt, Artificial Sequence
  Description of Artificial Sequence: Synthetic oligonucleotide
  Sense Strand Starting at position 868 of SEQ ID NO: 317731
ccuggagugcagcaauaaa

SEQ ID NO: 387076 - RNA, 19 nt, Artificial Sequence
  Description of Artificial Sequence: Synthetic oligonucleotide
  Antisense Strand to SEQ ID NO: 387075
uuuauugcugcacuccagg

SEQ ID NO: 387077 - RNA, 19 nt, Artificial Sequence
  Description of Artificial Sequence: Synthetic oligonucleotide
  Sense Strand Starting at position 868 of SEQ ID NO: 317824
ucaguauaccgucacugaa

SEQ ID NO: 387078 - RNA, 19 nt, Artificial Sequence
  Description of Artificial Sequence: Synthetic oligonucleotide
  Antisense Strand to SEQ ID NO: 387077
uucagugacgguauacuga

SEQ ID NO: 387079 - RNA, 19 nt, Artificial Sequence
  Description of Artificial Sequence: Synthetic oligonucleotide
  Sense Strand Starting at position 868 of SEQ ID NO: 317826
aguauaccgucacugaaga

SEQ ID NO: 387080 - RNA, 19 nt, Artificial Sequence
  Description of Artificial Sequence: Synthetic oligonucleotide
  Antisense Strand to SEQ ID NO: 387079
ucuucagugacgguauacu

SEQ ID NO: 387081 - RNA, 19 nt, Artificial Sequence
  Description of Artificial Sequence: Synthetic oligonucleotide
  Sense Strand Starting at position 868 of SEQ ID NO: 317827
guauaccgucacugaagaa

SEQ ID NO: 387082 - RNA, 19 nt, Artificial Sequence
  Description of Artificial Sequence: Synthetic oligonucleotide
  Antisense Strand to SEQ ID NO: 387081
uucuucagugacgguauac

SEQ ID NO: 387083 - RNA, 19 nt, Artificial Sequence
  Description of Artificial Sequence: Synthetic oligonucleotide
  Sense Strand Starting at position 868 of SEQ ID NO: 318057
cuccgcaugcauuaguuau

SEQ ID NO: 387084 - RNA, 19 nt, Artificial Sequence
  Description of Artificial Sequence: Synthetic oligonucleotide
  Antisense Strand to SEQ ID NO: 387083
auaacuaaugcaugcggag

SEQ ID NO: 387085 - RNA, 19 nt, Artificial Sequence
  Description of Artificial Sequence: Synthetic oligonucleotide
  Sense Strand Starting at position 868 of SEQ ID NO: 318599
ucugcagcgucuguuauuu

SEQ ID NO: 387086 - RNA, 19 nt, Artificial Sequence
  Description of Artificial Sequence: Synthetic oligonucleotide
  Antisense Strand to SEQ ID NO: 387085
aaauaacagacgcugcaga

SEQ ID NO: 387087 - RNA, 19 nt, Artificial Sequence
  Description of Artificial Sequence: Synthetic oligonucleotide
  Sense Strand Starting at position 868 of SEQ ID NO: 318822
acaguuaagugcuccagca

SEQ ID NO: 387088 - RNA, 19 nt, Artificial Sequence
  Description of Artificial Sequence: Synthetic oligonucleotide
  Antisense Strand to SEQ ID NO: 387087
ugcuggagcacuuaacugu

SEQ ID NO: 387089 - RNA, 19 nt, Artificial Sequence
  Description of Artificial Sequence: Synthetic oligonucleotide
  Sense Strand Starting at position 868 of SEQ ID NO: 318824
aguuaagugcuccagcaau

SEQ ID NO: 387090 - RNA, 19 nt, Artificial Sequence
  Description of Artificial Sequence: Synthetic oligonucleotide
  Antisense Strand to SEQ ID NO: 387089
auugcuggagcacuuaacu

SEQ ID NO: 387091 - RNA, 19 nt, Artificial Sequence
  Description of Artificial Sequence: Synthetic oligonucleotide
  Sense Strand Starting at position 868 of SEQ ID NO: 319203
acccuaaguguugggauga

SEQ ID NO: 387092 - RNA, 19 nt, Artificial Sequence
  Description of Artificial Sequence: Synthetic oligonucleotide
  Antisense Strand to SEQ ID NO: 387091
ucaucccaacacuuagggu

SEQ ID NO: 387093 - RNA, 19 nt, Artificial Sequence
  Description of Artificial Sequence: Synthetic oligonucleotide
  Sense Strand Starting at position 869 of SEQ ID NO: 315239
acaguuauugaacggagga

SEQ ID NO: 387094 - RNA, 19 nt, Artificial Sequence
  Description of Artificial Sequence: Synthetic oligonucleotide
  Antisense Strand to SEQ ID NO: 387093
uccuccguucaauaacugu

SEQ ID NO: 387095 - RNA, 19 nt, Artificial Sequence
  Description of Artificial Sequence: Synthetic oligonucleotide
  Sense Strand Starting at position 869 of SEQ ID NO: 315241
aguuauugaacggaggagu

SEQ ID NO: 387096 - RNA, 19 nt, Artificial Sequence
  Description of Artificial Sequence: Synthetic oligonucleotide
  Antisense Strand to SEQ ID NO: 387095
acuccuccguucaauaacu

SEQ ID NO: 387097 - RNA, 19 nt, Artificial Sequence
  Description of Artificial Sequence: Synthetic oligonucleotide
  Sense Strand Starting at position 869 of SEQ ID NO: 315272
aguccaauuucccaaguau

SEQ ID NO: 387098 - RNA, 19 nt, Artificial Sequence
  Description of Artificial Sequence: Synthetic oligonucleotide
  Antisense Strand to SEQ ID NO: 387097
auacuugggaaauuggacu

SEQ ID NO: 387099 - RNA, 19 nt, Artificial Sequence
  Description of Artificial Sequence: Synthetic oligonucleotide
  Sense Strand Starting at position 869 of SEQ ID NO: 315382
cagauugaggccugcaaau

SEQ ID NO: 387100 - RNA, 19 nt, Artificial Sequence
  Description of Artificial Sequence: Synthetic oligonucleotide
  Antisense Strand to SEQ ID NO: 387099
auuugcaggccucaaucug

SEQ ID NO: 387101 - RNA, 19 nt, Artificial Sequence
  Description of Artificial Sequence: Synthetic oligonucleotide
  Sense Strand Starting at position 869 of SEQ ID NO: 315392
ccugcaaauugacugaaau

SEQ ID NO: 387102 - RNA, 19 nt, Artificial Sequence
  Description of Artificial Sequence: Synthetic oligonucleotide
  Antisense Strand to SEQ ID NO: 387101
auuucagucaauuugcagg

SEQ ID NO: 387103 - RNA, 19 nt, Artificial Sequence
  Description of Artificial Sequence: Synthetic oligonucleotide
  Sense Strand Starting at position 869 of SEQ ID NO: 315393
cugcaaauugacugaaaug

SEQ ID NO: 387104 - RNA, 19 nt, Artificial Sequence
  Description of Artificial Sequence: Synthetic oligonucleotide
  Antisense Strand to SEQ ID NO: 387103
cauuucagucaauuugcag

SEQ ID NO: 387105 - RNA, 19 nt, Artificial Sequence
  Description of Artificial Sequence: Synthetic oligonucleotide
  Sense Strand Starting at position 869 of SEQ ID NO: 315455
ggcugagaucugcaaaccu

SEQ ID NO: 387106 - RNA, 19 nt, Artificial Sequence
  Description of Artificial Sequence: Synthetic oligonucleotide
  Antisense Strand to SEQ ID NO: 387105
agguuugcagaucucagcc

SEQ ID NO: 387107 - RNA, 19 nt, Artificial Sequence
  Description of Artificial Sequence: Synthetic oligonucleotide
  Sense Strand Starting at position 869 of SEQ ID NO: 315553
aguuauaaaugguuuggua

SEQ ID NO: 387108 - RNA, 19 nt, Artificial Sequence
  Description of Artificial Sequence: Synthetic oligonucleotide
  Antisense Strand to SEQ ID NO: 387107
uaccaaaccauuuauaacu

SEQ ID NO: 387109 - RNA, 19 nt, Artificial Sequence
  Description of Artificial Sequence: Synthetic oligonucleotide
  Sense Strand Starting at position 869 of SEQ ID NO: 315555
uuauaaaugguuugguaac

SEQ ID NO: 387110 - RNA, 19 nt, Artificial Sequence
  Description of Artificial Sequence: Synthetic oligonucleotide
  Antisense Strand to SEQ ID NO: 387109
guuaccaaaccauuuauaa

SEQ ID NO: 387111 - RNA, 19 nt, Artificial Sequence
  Description of Artificial Sequence: Synthetic oligonucleotide
  Sense Strand Starting at position 869 of SEQ ID NO: 315557
auaaaugguuugguaacuu

SEQ ID NO: 387112 - RNA, 19 nt, Artificial Sequence
  Description of Artificial Sequence: Synthetic oligonucleotide
  Antisense Strand to SEQ ID NO: 387111
aaguuaccaaaccauuuau

SEQ ID NO: 387113 - RNA, 19 nt, Artificial Sequence
  Description of Artificial Sequence: Synthetic oligonucleotide
  Sense Strand Starting at position 869 of SEQ ID NO: 315561
augguuugguaacuuuaca

SEQ ID NO: 387114 - RNA, 19 nt, Artificial Sequence
  Description of Artificial Sequence: Synthetic oligonucleotide
  Antisense Strand to SEQ ID NO: 387113
uguaaaguuaccaaaccau

SEQ ID NO: 387115 - RNA, 19 nt, Artificial Sequence
  Description of Artificial Sequence: Synthetic oligonucleotide
  Sense Strand Starting at position 869 of SEQ ID NO: 316049
agggaaauguggcugacaa

SEQ ID NO: 387116 - RNA, 19 nt, Artificial Sequence
  Description of Artificial Sequence: Synthetic oligonucleotide
  Antisense Strand to SEQ ID NO: 387115
uugucagccacauuucccu

SEQ ID NO: 387117 - RNA, 19 nt, Artificial Sequence
  Description of Artificial Sequence: Synthetic oligonucleotide
  Sense Strand Starting at position 869 of SEQ ID NO: 316050
gggaaauguggcugacaaa

SEQ ID NO: 387118 - RNA, 19 nt, Artificial Sequence
  Description of Artificial Sequence: Synthetic oligonucleotide
  Antisense Strand to SEQ ID NO: 387117
uuugucagccacauuuccc

SEQ ID NO: 387119 - RNA, 19 nt, Artificial Sequence
  Description of Artificial Sequence: Synthetic oligonucleotide
  Sense Strand Starting at position 869 of SEQ ID NO: 316136
ugacuaguugugcauucua

SEQ ID NO: 387120 - RNA, 19 nt, Artificial Sequence
  Description of Artificial Sequence: Synthetic oligonucleotide
  Antisense Strand to SEQ ID NO: 387119
uagaaugcacaacuaguca

SEQ ID NO: 387121 - RNA, 19 nt, Artificial Sequence
  Description of Artificial Sequence: Synthetic oligonucleotide
  Sense Strand Starting at position 869 of SEQ ID NO: 316151
ucuagagcucuuuagagcu

SEQ ID NO: 387122 - RNA, 19 nt, Artificial Sequence
  Description of Artificial Sequence: Synthetic oligonucleotide
  Antisense Strand to SEQ ID NO: 387121
agcucuaaagagcucuaga

SEQ ID NO: 387123 - RNA, 19 nt, Artificial Sequence
  Description of Artificial Sequence: Synthetic oligonucleotide
  Sense Strand Starting at position 869 of SEQ ID NO: 316188
aaagauuucuagggaagag

SEQ ID NO: 387124 - RNA, 19 nt, Artificial Sequence
  Description of Artificial Sequence: Synthetic oligonucleotide
  Antisense Strand to SEQ ID NO: 387123
cucuucccuagaaaucuuu

SEQ ID NO: 387125 - RNA, 19 nt, Artificial Sequence
  Description of Artificial Sequence: Synthetic oligonucleotide
  Sense Strand Starting at position 869 of SEQ ID NO: 316310
ccgcgaagcaguuugacuu

SEQ ID NO: 387126 - RNA, 19 nt, Artificial Sequence
  Description of Artificial Sequence: Synthetic oligonucleotide
  Antisense Strand to SEQ ID NO: 387125
aagucaaacugcuucgcgg

SEQ ID NO: 387127 - RNA, 19 nt, Artificial Sequence
  Description of Artificial Sequence: Synthetic oligonucleotide
  Sense Strand Starting at position 869 of SEQ ID NO: 316415
agguccucggcgcuuuaau

SEQ ID NO: 387128 - RNA, 19 nt, Artificial Sequence
  Description of Artificial Sequence: Synthetic oligonucleotide
  Antisense Strand to SEQ ID NO: 387127
auuaaagcgccgaggaccu

SEQ ID NO: 387129 - RNA, 19 nt, Artificial Sequence
  Description of Artificial Sequence: Synthetic oligonucleotide
  Sense Strand Starting at position 869 of SEQ ID NO: 316416
gguccucggcgcuuuaaua

SEQ ID NO: 387130 - RNA, 19 nt, Artificial Sequence
  Description of Artificial Sequence: Synthetic oligonucleotide
  Antisense Strand to SEQ ID NO: 387129
uauuaaagcgccgaggacc

SEQ ID NO: 387131 - RNA, 19 nt, Artificial Sequence
  Description of Artificial Sequence: Synthetic oligonucleotide
  Sense Strand Starting at position 869 of SEQ ID NO: 316417
guccucggcgcuuuaauaa

SEQ ID NO: 387132 - RNA, 19 nt, Artificial Sequence
  Description of Artificial Sequence: Synthetic oligonucleotide
  Antisense Strand to SEQ ID NO: 387131
uuauuaaagcgccgaggac

SEQ ID NO: 387133 - RNA, 19 nt, Artificial Sequence
  Description of Artificial Sequence: Synthetic oligonucleotide
  Sense Strand Starting at position 869 of SEQ ID NO: 316425
cgcuuuaauaagugaugac

SEQ ID NO: 387134 - RNA, 19 nt, Artificial Sequence
  Description of Artificial Sequence: Synthetic oligonucleotide
  Antisense Strand to SEQ ID NO: 387133
gucaucacuuauuaaagcg

SEQ ID NO: 387135 - RNA, 19 nt, Artificial Sequence
  Description of Artificial Sequence: Synthetic oligonucleotide
  Sense Strand Starting at position 869 of SEQ ID NO: 316437
ugaugacugcuagggcuaa

SEQ ID NO: 387136 - RNA, 19 nt, Artificial Sequence
  Description of Artificial Sequence: Synthetic oligonucleotide
  Antisense Strand to SEQ ID NO: 387135
uuagcccuagcagucauca

SEQ ID NO: 387137 - RNA, 19 nt, Artificial Sequence
  Description of Artificial Sequence: Synthetic oligonucleotide
  Sense Strand Starting at position 869 of SEQ ID NO: 316441
gacugcuagggcuaaguua

SEQ ID NO: 387138 - RNA, 19 nt, Artificial Sequence
  Description of Artificial Sequence: Synthetic oligonucleotide
  Antisense Strand to SEQ ID NO: 387137
uaacuuagcccuagcaguc

SEQ ID NO: 387139 - RNA, 19 nt, Artificial Sequence
  Description of Artificial Sequence: Synthetic oligonucleotide
  Sense Strand Starting at position 869 of SEQ ID NO: 316634
cgguuaaagcucguagguu

SEQ ID NO: 387140 - RNA, 19 nt, Artificial Sequence
  Description of Artificial Sequence: Synthetic oligonucleotide
  Antisense Strand to SEQ ID NO: 387139
aaccuacgagcuuuaaccg

SEQ ID NO: 387141 - RNA, 19 nt, Artificial Sequence
  Description of Artificial Sequence: Synthetic oligonucleotide
  Sense Strand Starting at position 869 of SEQ ID NO: 316705
gagggagucuucucugaau

SEQ ID NO: 387142 - RNA, 19 nt, Artificial Sequence
  Description of Artificial Sequence: Synthetic oligonucleotide
  Antisense Strand to SEQ ID NO: 387141
auucagagaagacucccuc

SEQ ID NO: 387143 - RNA, 19 nt, Artificial Sequence
  Description of Artificial Sequence: Synthetic oligonucleotide
  Sense Strand Starting at position 869 of SEQ ID NO: 316707
gggagucuucucugaaucc

SEQ ID NO: 387144 - RNA, 19 nt, Artificial Sequence
  Description of Artificial Sequence: Synthetic oligonucleotide
  Antisense Strand to SEQ ID NO: 387143
ggauucagagaagacuccc

SEQ ID NO: 387145 - RNA, 19 nt, Artificial Sequence
  Description of Artificial Sequence: Synthetic oligonucleotide
  Sense Strand Starting at position 869 of SEQ ID NO: 316755
ucucuuucucagggagcua

SEQ ID NO: 387146 - RNA, 19 nt, Artificial Sequence
  Description of Artificial Sequence: Synthetic oligonucleotide
  Antisense Strand to SEQ ID NO: 387145
uagcucccugagaaagaga

SEQ ID NO: 387147 - RNA, 19 nt, Artificial Sequence
  Description of Artificial Sequence: Synthetic oligonucleotide
  Sense Strand Starting at position 869 of SEQ ID NO: 316806
auuccagaguugcuggaaa

SEQ ID NO: 387148 - RNA, 19 nt, Artificial Sequence
  Description of Artificial Sequence: Synthetic oligonucleotide
  Antisense Strand to SEQ ID NO: 387147
uuuccagcaacucuggaau

SEQ ID NO: 387149 - RNA, 19 nt, Artificial Sequence
  Description of Artificial Sequence: Synthetic oligonucleotide
  Sense Strand Starting at position 869 of SEQ ID NO: 316874
ggaagcaucuucccuacca

SEQ ID NO: 387150 - RNA, 19 nt, Artificial Sequence
  Description of Artificial Sequence: Synthetic oligonucleotide
  Antisense Strand to SEQ ID NO: 387149
ugguagggaagaugcuucc

SEQ ID NO: 387151 - RNA, 19 nt, Artificial Sequence
  Description of Artificial Sequence: Synthetic oligonucleotide
  Sense Strand Starting at position 869 of SEQ ID NO: 317026
cccuacagccuguaaagaa

SEQ ID NO: 387152 - RNA, 19 nt, Artificial Sequence
  Description of Artificial Sequence: Synthetic oligonucleotide
  Antisense Strand to SEQ ID NO: 387151
uucuuuacaggcuguaggg

SEQ ID NO: 387153 - RNA, 19 nt, Artificial Sequence
  Description of Artificial Sequence: Synthetic oligonucleotide
  Sense Strand Starting at position 869 of SEQ ID NO: 318048
auuggaagucaacgaauga

SEQ ID NO: 387154 - RNA, 19 nt, Artificial Sequence
  Description of Artificial Sequence: Synthetic oligonucleotide
  Antisense Strand to SEQ ID NO: 387153
ucauucguugacuuccaau

SEQ ID NO: 387155 - RNA, 19 nt, Artificial Sequence
  Description of Artificial Sequence: Synthetic oligonucleotide
  Sense Strand Starting at position 869 of SEQ ID NO: 318136
ccuagaguuacgcagauga

SEQ ID NO: 387156 - RNA, 19 nt, Artificial Sequence
  Description of Artificial Sequence: Synthetic oligonucleotide
  Antisense Strand to SEQ ID NO: 387155
ucaucugcguaacucuagg

SEQ ID NO: 387157 - RNA, 19 nt, Artificial Sequence
  Description of Artificial Sequence: Synthetic oligonucleotide
  Sense Strand Starting at position 869 of SEQ ID NO: 318138
uagaguuacgcagaugaag

SEQ ID NO: 387158 - RNA, 19 nt, Artificial Sequence
  Description of Artificial Sequence: Synthetic oligonucleotide
  Antisense Strand to SEQ ID NO: 387157
cuucaucugcguaacucua

SEQ ID NO: 387159 - RNA, 19 nt, Artificial Sequence
  Description of Artificial Sequence: Synthetic oligonucleotide
  Sense Strand Starting at position 869 of SEQ ID NO: 318157
gacauuggcccucgagaau

SEQ ID NO: 387160 - RNA, 19 nt, Artificial Sequence
  Description of Artificial Sequence: Synthetic oligonucleotide
  Antisense Strand to SEQ ID NO: 387159
auucucgagggccaauguc

SEQ ID NO: 387161 - RNA, 19 nt, Artificial Sequence
  Description of Artificial Sequence: Synthetic oligonucleotide
  Sense Strand Starting at position 869 of SEQ ID NO: 318204
agcgcaaacuacuuaugau

SEQ ID NO: 387162 - RNA, 19 nt, Artificial Sequence
  Description of Artificial Sequence: Synthetic oligonucleotide
  Antisense Strand to SEQ ID NO: 387161
aucauaaguaguuugcgcu

SEQ ID NO: 387163 - RNA, 19 nt, Artificial Sequence
  Description of Artificial Sequence: Synthetic oligonucleotide
  Sense Strand Starting at position 869 of SEQ ID NO: 318246
uguagcucccagcaacaau

SEQ ID NO: 387164 - RNA, 19 nt, Artificial Sequence
  Description of Artificial Sequence: Synthetic oligonucleotide
  Antisense Strand to SEQ ID NO: 387163
auuguugcugggagcuaca

SEQ ID NO: 387165 - RNA, 19 nt, Artificial Sequence
  Description of Artificial Sequence: Synthetic oligonucleotide
  Sense Strand Starting at position 869 of SEQ ID NO: 318272
ccuggagugcagcaauaaa

SEQ ID NO: 387166 - RNA, 19 nt, Artificial Sequence
  Description of Artificial Sequence: Synthetic oligonucleotide
  Antisense Strand to SEQ ID NO: 387165
uuuauugcugcacuccagg

SEQ ID NO: 387167 - RNA, 19 nt, Artificial Sequence
  Description of Artificial Sequence: Synthetic oligonucleotide
  Sense Strand Starting at position 869 of SEQ ID NO: 318365
ucaguauaccgucacugaa

SEQ ID NO: 387168 - RNA, 19 nt, Artificial Sequence
  Description of Artificial Sequence: Synthetic oligonucleotide
  Antisense Strand to SEQ ID NO: 387167
uucagugacgguauacuga

SEQ ID NO: 387169 - RNA, 19 nt, Artificial Sequence
  Description of Artificial Sequence: Synthetic oligonucleotide
  Sense Strand Starting at position 869 of SEQ ID NO: 318367
aguauaccgucacugaaga

SEQ ID NO: 387170 - RNA, 19 nt, Artificial Sequence
  Description of Artificial Sequence: Synthetic oligonucleotide
  Antisense Strand to SEQ ID NO: 387169
ucuucagugacgguauacu

SEQ ID NO: 387171 - RNA, 19 nt, Artificial Sequence
  Description of Artificial Sequence: Synthetic oligonucleotide
  Sense Strand Starting at position 869 of SEQ ID NO: 318368
guauaccgucacugaagaa

SEQ ID NO: 387172 - RNA, 19 nt, Artificial Sequence
  Description of Artificial Sequence: Synthetic oligonucleotide
  Antisense Strand to SEQ ID NO: 387171
uucuucagugacgguauac

SEQ ID NO: 387173 - RNA, 19 nt, Artificial Sequence
  Description of Artificial Sequence: Synthetic oligonucleotide
  Sense Strand Starting at position 870 of SEQ ID NO: 315616
auacuagaaugucaugauu

SEQ ID NO: 387174 - RNA, 19 nt, Artificial Sequence
  Description of Artificial Sequence: Synthetic oligonucleotide
  Antisense Strand to SEQ ID NO: 387173
aaucaugacauucuaguau

SEQ ID NO: 387175 - RNA, 19 nt, Artificial Sequence
  Description of Artificial Sequence: Synthetic oligonucleotide
  Sense Strand Starting at position 870 of SEQ ID NO: 315659
aaacgaauuuguugaaugu

SEQ ID NO: 387176 - RNA, 19 nt, Artificial Sequence
  Description of Artificial Sequence: Synthetic oligonucleotide
  Antisense Strand to SEQ ID NO: 387175
acauucaacaaauucguuu

SEQ ID NO: 387177 - RNA, 19 nt, Artificial Sequence
  Description of Artificial Sequence: Synthetic oligonucleotide
  Sense Strand Starting at position 870 of SEQ ID NO: 315724
gugaacuggcucuggaaau

SEQ ID NO: 387178 - RNA, 19 nt, Artificial Sequence
  Description of Artificial Sequence: Synthetic oligonucleotide
  Antisense Strand to SEQ ID NO: 387177
auuuccagagccaguucac

SEQ ID NO: 387179 - RNA, 19 nt, Artificial Sequence
  Description of Artificial Sequence: Synthetic oligonucleotide
  Sense Strand Starting at position 870 of SEQ ID NO: 315734
ucuggaaauugacuucuuu

SEQ ID NO: 387180 - RNA, 19 nt, Artificial Sequence
  Description of Artificial Sequence: Synthetic oligonucleotide
  Antisense Strand to SEQ ID NO: 387179
aaagaagucaauuuccaga

SEQ ID NO: 387181 - RNA, 19 nt, Artificial Sequence
  Description of Artificial Sequence: Synthetic oligonucleotide
  Sense Strand Starting at position 870 of SEQ ID NO: 315955
guuggaagccucuacagau

SEQ ID NO: 387182 - RNA, 19 nt, Artificial Sequence
  Description of Artificial Sequence: Synthetic oligonucleotide
  Antisense Strand to SEQ ID NO: 387181
aucuguagaggcuuccaac

SEQ ID NO: 387183 - RNA, 19 nt, Artificial Sequence
  Description of Artificial Sequence: Synthetic oligonucleotide
  Sense Strand Starting at position 870 of SEQ ID NO: 315995
aauucuucuggccgagcau

SEQ ID NO: 387184 - RNA, 19 nt, Artificial Sequence
  Description of Artificial Sequence: Synthetic oligonucleotide
  Antisense Strand to SEQ ID NO: 387183
augcucggccagaagaauu

SEQ ID NO: 387185 - RNA, 19 nt, Artificial Sequence
  Description of Artificial Sequence: Synthetic oligonucleotide
  Sense Strand Starting at position 870 of SEQ ID NO: 316363
gcagaacugcacugauuga

SEQ ID NO: 387186 - RNA, 19 nt, Artificial Sequence
  Description of Artificial Sequence: Synthetic oligonucleotide
  Antisense Strand to SEQ ID NO: 387185
ucaaucagugcaguucugc

SEQ ID NO: 387187 - RNA, 19 nt, Artificial Sequence
  Description of Artificial Sequence: Synthetic oligonucleotide
  Sense Strand Starting at position 870 of SEQ ID NO: 316397
ucuaaaugauaccaaggau

SEQ ID NO: 387188 - RNA, 19 nt, Artificial Sequence
  Description of Artificial Sequence: Synthetic oligonucleotide
  Antisense Strand to SEQ ID NO: 387187
auccuugguaucauuuaga

SEQ ID NO: 387189 - RNA, 19 nt, Artificial Sequence
  Description of Artificial Sequence: Synthetic oligonucleotide
  Sense Strand Starting at position 870 of SEQ ID NO: 316492
uuguaauuauucccgcacu

SEQ ID NO: 387190 - RNA, 19 nt, Artificial Sequence
  Description of Artificial Sequence: Synthetic oligonucleotide
  Antisense Strand to SEQ ID NO: 387189
agugcgggaauaauuacaa

SEQ ID NO: 387191 - RNA, 19 nt, Artificial Sequence
  Description of Artificial Sequence: Synthetic oligonucleotide
  Sense Strand Starting at position 870 of SEQ ID NO: 316506
gcacuugcccgucucagua

SEQ ID NO: 387192 - RNA, 19 nt, Artificial Sequence
  Description of Artificial Sequence: Synthetic oligonucleotide
  Antisense Strand to SEQ ID NO: 387191
uacugagacgggcaagugc

SEQ ID NO: 387193 - RNA, 19 nt, Artificial Sequence
  Description of Artificial Sequence: Synthetic oligonucleotide
  Sense Strand Starting at position 870 of SEQ ID NO: 316543
cuacuacuugcacgaacaa

SEQ ID NO: 387194 - RNA, 19 nt, Artificial Sequence
  Description of Artificial Sequence: Synthetic oligonucleotide
  Antisense Strand to SEQ ID NO: 387193
uuguucgugcaaguaguag

SEQ ID NO: 387195 - RNA, 19 nt, Artificial Sequence
  Description of Artificial Sequence: Synthetic oligonucleotide
  Sense Strand Starting at position 870 of SEQ ID NO: 317356
cggccugucgcuguggaaa

SEQ ID NO: 387196 - RNA, 19 nt, Artificial Sequence
  Description of Artificial Sequence: Synthetic oligonucleotide
  Antisense Strand to SEQ ID NO: 387195
uuuccacagcgacaggccg

SEQ ID NO: 387197 - RNA, 19 nt, Artificial Sequence
  Description of Artificial Sequence: Synthetic oligonucleotide
  Sense Strand Starting at position 870 of SEQ ID NO: 317665
ucuguauuccucuaagggu

SEQ ID NO: 387198 - RNA, 19 nt, Artificial Sequence
  Description of Artificial Sequence: Synthetic oligonucleotide
  Antisense Strand to SEQ ID NO: 387197
acccuuagaggaauacaga

SEQ ID NO: 387199 - RNA, 19 nt, Artificial Sequence
  Description of Artificial Sequence: Synthetic oligonucleotide
  Sense Strand Starting at position 870 of SEQ ID NO: 317720
gggagagaaucgucuacuc

SEQ ID NO: 387200 - RNA, 19 nt, Artificial Sequence
  Description of Artificial Sequence: Synthetic oligonucleotide
  Antisense Strand to SEQ ID NO: 387199
gaguagacgauucucuccc

SEQ ID NO: 387201 - RNA, 19 nt, Artificial Sequence
  Description of Artificial Sequence: Synthetic oligonucleotide
  Sense Strand Starting at position 870 of SEQ ID NO: 317722
gagagaaucgucuacucuu

SEQ ID NO: 387202 - RNA, 19 nt, Artificial Sequence
  Description of Artificial Sequence: Synthetic oligonucleotide
  Antisense Strand to SEQ ID NO: 387201
aagaguagacgauucucuc

SEQ ID NO: 387203 - RNA, 19 nt, Artificial Sequence
  Description of Artificial Sequence: Synthetic oligonucleotide
  Sense Strand Starting at position 870 of SEQ ID NO: 317780
acaagauugugggcaguua

SEQ ID NO: 387204 - RNA, 19 nt, Artificial Sequence
  Description of Artificial Sequence: Synthetic oligonucleotide
  Antisense Strand to SEQ ID NO: 387203
uaacugcccacaaucuugu

SEQ ID NO: 387205 - RNA, 19 nt, Artificial Sequence
  Description of Artificial Sequence: Synthetic oligonucleotide
  Sense Strand Starting at position 870 of SEQ ID NO: 317812
agaggaguauucgugucca

SEQ ID NO: 387206 - RNA, 19 nt, Artificial Sequence
  Description of Artificial Sequence: Synthetic oligonucleotide
  Antisense Strand to SEQ ID NO: 387205
uggacacgaauacuccucu

SEQ ID NO: 387207 - RNA, 19 nt, Artificial Sequence
  Description of Artificial Sequence: Synthetic oligonucleotide
  Sense Strand Starting at position 870 of SEQ ID NO: 317816
gaguauucguguccaggaa

SEQ ID NO: 387208 - RNA, 19 nt, Artificial Sequence
  Description of Artificial Sequence: Synthetic oligonucleotide
  Antisense Strand to SEQ ID NO: 387207
uuccuggacacgaauacuc

SEQ ID NO: 387209 - RNA, 19 nt, Artificial Sequence
  Description of Artificial Sequence: Synthetic oligonucleotide
  Sense Strand Starting at position 870 of SEQ ID NO: 317820
auucguguccaggaagaau

SEQ ID NO: 387210 - RNA, 19 nt, Artificial Sequence
  Description of Artificial Sequence: Synthetic oligonucleotide
  Antisense Strand to SEQ ID NO: 387209
auucuuccuggacacgaau

SEQ ID NO: 387211 - RNA, 19 nt, Artificial Sequence
  Description of Artificial Sequence: Synthetic oligonucleotide
  Sense Strand Starting at position 870 of SEQ ID NO: 317823
cguguccaggaagaauaau

SEQ ID NO: 387212 - RNA, 19 nt, Artificial Sequence
  Description of Artificial Sequence: Synthetic oligonucleotide
  Antisense Strand to SEQ ID NO: 387211
auuauucuuccuggacacg

SEQ ID NO: 387213 - RNA, 19 nt, Artificial Sequence
  Description of Artificial Sequence: Synthetic oligonucleotide
  Sense Strand Starting at position 870 of SEQ ID NO: 317908
ggcggcuuggaguggaaua

SEQ ID NO: 387214 - RNA, 19 nt, Artificial Sequence
  Description of Artificial Sequence: Synthetic oligonucleotide
  Antisense Strand to SEQ ID NO: 387213
uauuccacuccaagccgcc

SEQ ID NO: 387215 - RNA, 19 nt, Artificial Sequence
  Description of Artificial Sequence: Synthetic oligonucleotide
  Sense Strand Starting at position 870 of SEQ ID NO: 317939
gcgggugucucaaagagga

SEQ ID NO: 387216 - RNA, 19 nt, Artificial Sequence
  Description of Artificial Sequence: Synthetic oligonucleotide
  Antisense Strand to SEQ ID NO: 387215
uccucuuugagacacccgc

SEQ ID NO: 387217 - RNA, 19 nt, Artificial Sequence
  Description of Artificial Sequence: Synthetic oligonucleotide
  Sense Strand Starting at position 870 of SEQ ID NO: 318295
guauaagcauguuucuuaa

SEQ ID NO: 387218 - RNA, 19 nt, Artificial Sequence
  Description of Artificial Sequence: Synthetic oligonucleotide
  Antisense Strand to SEQ ID NO: 387217
uuaagaaacaugcuuauac

SEQ ID NO: 387219 - RNA, 19 nt, Artificial Sequence
  Description of Artificial Sequence: Synthetic oligonucleotide
  Sense Strand Starting at position 870 of SEQ ID NO: 318297
auaagcauguuucuuaaga

SEQ ID NO: 387220 - RNA, 19 nt, Artificial Sequence
  Description of Artificial Sequence: Synthetic oligonucleotide
  Antisense Strand to SEQ ID NO: 387219
ucuuaagaaacaugcuuau

SEQ ID NO: 387221 - RNA, 19 nt, Artificial Sequence
  Description of Artificial Sequence: Synthetic oligonucleotide
  Sense Strand Starting at position 870 of SEQ ID NO: 318356
cagucuggcucccuaugaa

SEQ ID NO: 387222 - RNA, 19 nt, Artificial Sequence
  Description of Artificial Sequence: Synthetic oligonucleotide
  Antisense Strand to SEQ ID NO: 387221
uucauagggagccagacug

SEQ ID NO: 387223 - RNA, 19 nt, Artificial Sequence
  Description of Artificial Sequence: Synthetic oligonucleotide
  Sense Strand Starting at position 870 of SEQ ID NO: 318390
ggacgauaguuuguuguua

SEQ ID NO: 387224 - RNA, 19 nt, Artificial Sequence
  Description of Artificial Sequence: Synthetic oligonucleotide
  Antisense Strand to SEQ ID NO: 387223
uaacaacaaacuaucgucc

SEQ ID NO: 387225 - RNA, 19 nt, Artificial Sequence
  Description of Artificial Sequence: Synthetic oligonucleotide
  Sense Strand Starting at position 870 of SEQ ID NO: 318391
gacgauaguuuguuguuau

SEQ ID NO: 387226 - RNA, 19 nt, Artificial Sequence
  Description of Artificial Sequence: Synthetic oligonucleotide
  Antisense Strand to SEQ ID NO: 387225
auaacaacaaacuaucguc

SEQ ID NO: 387227 - RNA, 19 nt, Artificial Sequence
  Description of Artificial Sequence: Synthetic oligonucleotide
  Sense Strand Starting at position 870 of SEQ ID NO: 318394
gauaguuuguuguuauaag

SEQ ID NO: 387228 - RNA, 19 nt, Artificial Sequence
  Description of Artificial Sequence: Synthetic oligonucleotide
  Antisense Strand to SEQ ID NO: 387227
cuuauaacaacaaacuauc

SEQ ID NO: 387229 - RNA, 19 nt, Artificial Sequence
  Description of Artificial Sequence: Synthetic oligonucleotide
  Sense Strand Starting at position 870 of SEQ ID NO: 318404
uguuauaagccucauagaa

SEQ ID NO: 387230 - RNA, 19 nt, Artificial Sequence
  Description of Artificial Sequence: Synthetic oligonucleotide
  Antisense Strand to SEQ ID NO: 387229
uucuaugaggcuuauaaca

SEQ ID NO: 387231 - RNA, 19 nt, Artificial Sequence
  Description of Artificial Sequence: Synthetic oligonucleotide
  Sense Strand Starting at position 870 of SEQ ID NO: 318522
cugcauacaucuuugacga

SEQ ID NO: 387232 - RNA, 19 nt, Artificial Sequence
  Description of Artificial Sequence: Synthetic oligonucleotide
  Antisense Strand to SEQ ID NO: 387231
ucgucaaagauguaugcag

SEQ ID NO: 387233 - RNA, 19 nt, Artificial Sequence
  Description of Artificial Sequence: Synthetic oligonucleotide
  Sense Strand Starting at position 870 of SEQ ID NO: 318527
uacaucuuugacgaguaca

SEQ ID NO: 387234 - RNA, 19 nt, Artificial Sequence
  Description of Artificial Sequence: Synthetic oligonucleotide
  Antisense Strand to SEQ ID NO: 387233
uguacucgucaaagaugua

SEQ ID NO: 387235 - RNA, 19 nt, Artificial Sequence
  Description of Artificial Sequence: Synthetic oligonucleotide
  Sense Strand Starting at position 870 of SEQ ID NO: 318558
guguguggaguuuauaugu

SEQ ID NO: 387236 - RNA, 19 nt, Artificial Sequence
  Description of Artificial Sequence: Synthetic oligonucleotide
  Antisense Strand to SEQ ID NO: 387235
acauauaaacuccacacac

SEQ ID NO: 387237 - RNA, 19 nt, Artificial Sequence
  Description of Artificial Sequence: Synthetic oligonucleotide
  Sense Strand Starting at position 870 of SEQ ID NO: 318585
gguuguaguuuacuaacau

SEQ ID NO: 387238 - RNA, 19 nt, Artificial Sequence
  Description of Artificial Sequence: Synthetic oligonucleotide
  Antisense Strand to SEQ ID NO: 387237
auguuaguaaacuacaacc

SEQ ID NO: 387239 - RNA, 19 nt, Artificial Sequence
  Description of Artificial Sequence: Synthetic oligonucleotide
  Sense Strand Starting at position 870 of SEQ ID NO: 318624
ugggaauaguauucguuaa

SEQ ID NO: 387240 - RNA, 19 nt, Artificial Sequence
  Description of Artificial Sequence: Synthetic oligonucleotide
  Antisense Strand to SEQ ID NO: 387239
uuaacgaauacuauuccca

SEQ ID NO: 387241 - RNA, 19 nt, Artificial Sequence
  Description of Artificial Sequence: Synthetic oligonucleotide
  Sense Strand Starting at position 870 of SEQ ID NO: 318625
gggaauaguauucguuaaa

SEQ ID NO: 387242 - RNA, 19 nt, Artificial Sequence
  Description of Artificial Sequence: Synthetic oligonucleotide
  Antisense Strand to SEQ ID NO: 387241
uuuaacgaauacuauuccc

SEQ ID NO: 387243 - RNA, 19 nt, Artificial Sequence
  Description of Artificial Sequence: Synthetic oligonucleotide
  Sense Strand Starting at position 870 of SEQ ID NO: 318679
ggagaaauggugugagcuc

SEQ ID NO: 387244 - RNA, 19 nt, Artificial Sequence
  Description of Artificial Sequence: Synthetic oligonucleotide
  Antisense Strand to SEQ ID NO: 387243
gagcucacaccauuucucc

SEQ ID NO: 387245 - RNA, 19 nt, Artificial Sequence
  Description of Artificial Sequence: Synthetic oligonucleotide
  Sense Strand Starting at position 870 of SEQ ID NO: 318693
agcucauugcaucagauua

SEQ ID NO: 387246 - RNA, 19 nt, Artificial Sequence
  Description of Artificial Sequence: Synthetic oligonucleotide
  Antisense Strand to SEQ ID NO: 387245
uaaucugaugcaaugagcu

SEQ ID NO: 387247 - RNA, 19 nt, Artificial Sequence
  Description of Artificial Sequence: Synthetic oligonucleotide
  Sense Strand Starting at position 870 of SEQ ID NO: 318767
uaagaauaggcguaucaug

SEQ ID NO: 387248 - RNA, 19 nt, Artificial Sequence
  Description of Artificial Sequence: Synthetic oligonucleotide
  Antisense Strand to SEQ ID NO: 387247
caugauacgccuauucuua

SEQ ID NO: 387249 - RNA, 19 nt, Artificial Sequence
  Description of Artificial Sequence: Synthetic oligonucleotide
  Sense Strand Starting at position 870 of SEQ ID NO: 318775
ggcguaucaugcuuuggag

SEQ ID NO: 387250 - RNA, 19 nt, Artificial Sequence
  Description of Artificial Sequence: Synthetic oligonucleotide
  Antisense Strand to SEQ ID NO: 387249
cuccaaagcaugauacgcc

SEQ ID NO: 387251 - RNA, 19 nt, Artificial Sequence
  Description of Artificial Sequence: Synthetic oligonucleotide
  Sense Strand Starting at position 870 of SEQ ID NO: 318777
cguaucaugcuuuggagag

SEQ ID NO: 387252 - RNA, 19 nt, Artificial Sequence
  Description of Artificial Sequence: Synthetic oligonucleotide
  Antisense Strand to SEQ ID NO: 387251
cucuccaaagcaugauacg

SEQ ID NO: 387253 - RNA, 19 nt, Artificial Sequence
  Description of Artificial Sequence: Synthetic oligonucleotide
  Sense Strand Starting at position 871 of SEQ ID NO: 315308
ggcccagagucguggagau

SEQ ID NO: 387254 - RNA, 19 nt, Artificial Sequence
  Description of Artificial Sequence: Synthetic oligonucleotide
  Antisense Strand to SEQ ID NO: 387253
aucuccacgacucugggcc

SEQ ID NO: 387255 - RNA, 19 nt, Artificial Sequence
  Description of Artificial Sequence: Synthetic oligonucleotide
  Sense Strand Starting at position 871 of SEQ ID NO: 315393
gggagaauguguagggcaa

SEQ ID NO: 387256 - RNA, 19 nt, Artificial Sequence
  Description of Artificial Sequence: Synthetic oligonucleotide
  Antisense Strand to SEQ ID NO: 387255
uugcccuacacauucuccc

SEQ ID NO: 387257 - RNA, 19 nt, Artificial Sequence
  Description of Artificial Sequence: Synthetic oligonucleotide
  Sense Strand Starting at position 871 of SEQ ID NO: 315713
uguggcucauuccaagaaa

SEQ ID NO: 387258 - RNA, 19 nt, Artificial Sequence
  Description of Artificial Sequence: Synthetic oligonucleotide
  Antisense Strand to SEQ ID NO: 387257
uuucuuggaaugagccaca

SEQ ID NO: 387259 - RNA, 19 nt, Artificial Sequence
  Description of Artificial Sequence: Synthetic oligonucleotide
  Sense Strand Starting at position 871 of SEQ ID NO: 315716
ggcucauuccaagaaaggu

SEQ ID NO: 387260 - RNA, 19 nt, Artificial Sequence
  Description of Artificial Sequence: Synthetic oligonucleotide
  Antisense Strand to SEQ ID NO: 387259
accuuucuuggaaugagcc

SEQ ID NO: 387261 - RNA, 19 nt, Artificial Sequence
  Description of Artificial Sequence: Synthetic oligonucleotide
  Sense Strand Starting at position 871 of SEQ ID NO: 315725
caagaaagguccguaccuu

SEQ ID NO: 387262 - RNA, 19 nt, Artificial Sequence
  Description of Artificial Sequence: Synthetic oligonucleotide
  Antisense Strand to SEQ ID NO: 387261
aagguacggaccuuucuug

SEQ ID NO: 387263 - RNA, 19 nt, Artificial Sequence
  Description of Artificial Sequence: Synthetic oligonucleotide
  Sense Strand Starting at position 871 of SEQ ID NO: 315747
auguaaacuuccuggcaaa

SEQ ID NO: 387264 - RNA, 19 nt, Artificial Sequence
  Description of Artificial Sequence: Synthetic oligonucleotide
  Antisense Strand to SEQ ID NO: 387263
uuugccaggaaguuuacau

SEQ ID NO: 387265 - RNA, 19 nt, Artificial Sequence
  Description of Artificial Sequence: Synthetic oligonucleotide
  Sense Strand Starting at position 871 of SEQ ID NO: 315748
uguaaacuuccuggcaaag

SEQ ID NO: 387266 - RNA, 19 nt, Artificial Sequence
  Description of Artificial Sequence: Synthetic oligonucleotide
  Antisense Strand to SEQ ID NO: 387265
cuuugccaggaaguuuaca

SEQ ID NO: 387267 - RNA, 19 nt, Artificial Sequence
  Description of Artificial Sequence: Synthetic oligonucleotide
  Sense Strand Starting at position 871 of SEQ ID NO: 315837
uggagcaggcuuuaagacu

SEQ ID NO: 387268 - RNA, 19 nt, Artificial Sequence
  Description of Artificial Sequence: Synthetic oligonucleotide
  Antisense Strand to SEQ ID NO: 387267
agucuuaaagccugcucca

SEQ ID NO: 387269 - RNA, 19 nt, Artificial Sequence
  Description of Artificial Sequence: Synthetic oligonucleotide
  Sense Strand Starting at position 871 of SEQ ID NO: 315845
gcuuuaagacuucgggaaa

SEQ ID NO: 387270 - RNA, 19 nt, Artificial Sequence
  Description of Artificial Sequence: Synthetic oligonucleotide
  Antisense Strand to SEQ ID NO: 387269
uuucccgaagucuuaaagc

SEQ ID NO: 387271 - RNA, 19 nt, Artificial Sequence
  Description of Artificial Sequence: Synthetic oligonucleotide
  Sense Strand Starting at position 871 of SEQ ID NO: 315910
ggacuaagaucuuguucca

SEQ ID NO: 387272 - RNA, 19 nt, Artificial Sequence
  Description of Artificial Sequence: Synthetic oligonucleotide
  Antisense Strand to SEQ ID NO: 387271
uggaacaagaucuuagucc

SEQ ID NO: 387273 - RNA, 19 nt, Artificial Sequence
  Description of Artificial Sequence: Synthetic oligonucleotide
  Sense Strand Starting at position 871 of SEQ ID NO: 315913
cuaagaucuuguuccaguc

SEQ ID NO: 387274 - RNA, 19 nt, Artificial Sequence
  Description of Artificial Sequence: Synthetic oligonucleotide
  Antisense Strand to SEQ ID NO: 387273
gacuggaacaagaucuuag

SEQ ID NO: 387275 - RNA, 19 nt, Artificial Sequence
  Description of Artificial Sequence: Synthetic oligonucleotide
  Sense Strand Starting at position 871 of SEQ ID NO: 315968
gagaguggcucuccagagu

SEQ ID NO: 387276 - RNA, 19 nt, Artificial Sequence
  Description of Artificial Sequence: Synthetic oligonucleotide
  Antisense Strand to SEQ ID NO: 387275
acucuggagagccacucuc

SEQ ID NO: 387277 - RNA, 19 nt, Artificial Sequence
  Description of Artificial Sequence: Synthetic oligonucleotide
  Sense Strand Starting at position 871 of SEQ ID NO: 316099
uuccuucgguugccugaaa

SEQ ID NO: 387278 - RNA, 19 nt, Artificial Sequence
  Description of Artificial Sequence: Synthetic oligonucleotide
  Antisense Strand to SEQ ID NO: 387277
uuucaggcaaccgaaggaa

SEQ ID NO: 387279 - RNA, 19 nt, Artificial Sequence
  Description of Artificial Sequence: Synthetic oligonucleotide
  Sense Strand Starting at position 871 of SEQ ID NO: 316122
ccguguuuauccuucgcuu

SEQ ID NO: 387280 - RNA, 19 nt, Artificial Sequence
  Description of Artificial Sequence: Synthetic oligonucleotide
  Antisense Strand to SEQ ID NO: 387279
aagcgaaggauaaacacgg

SEQ ID NO: 387281 - RNA, 19 nt, Artificial Sequence
  Description of Artificial Sequence: Synthetic oligonucleotide
  Sense Strand Starting at position 871 of SEQ ID NO: 316376
ugagaaauguccucauuac

SEQ ID NO: 387282 - RNA, 19 nt, Artificial Sequence
  Description of Artificial Sequence: Synthetic oligonucleotide
  Antisense Strand to SEQ ID NO: 387281
guaaugaggacauuucuca

SEQ ID NO: 387283 - RNA, 19 nt, Artificial Sequence
  Description of Artificial Sequence: Synthetic oligonucleotide
  Sense Strand Starting at position 871 of SEQ ID NO: 316525
auccucuuauccugggagu

SEQ ID NO: 387284 - RNA, 19 nt, Artificial Sequence
  Description of Artificial Sequence: Synthetic oligonucleotide
  Antisense Strand to SEQ ID NO: 387283
acucccaggauaagaggau

SEQ ID NO: 387285 - RNA, 19 nt, Artificial Sequence
  Description of Artificial Sequence: Synthetic oligonucleotide
  Sense Strand Starting at position 871 of SEQ ID NO: 316582
ccgagauucuucucggcuu

SEQ ID NO: 387286 - RNA, 19 nt, Artificial Sequence
  Description of Artificial Sequence: Synthetic oligonucleotide
  Antisense Strand to SEQ ID NO: 387285
aagccgagaagaaucucgg

SEQ ID NO: 387287 - RNA, 19 nt, Artificial Sequence
  Description of Artificial Sequence: Synthetic oligonucleotide
  Sense Strand Starting at position 871 of SEQ ID NO: 317479
acacuccucucguucgaaa

SEQ ID NO: 387288 - RNA, 19 nt, Artificial Sequence
  Description of Artificial Sequence: Synthetic oligonucleotide
  Antisense Strand to SEQ ID NO: 387287
uuucgaacgagaggagugu

SEQ ID NO: 387289 - RNA, 19 nt, Artificial Sequence
  Description of Artificial Sequence: Synthetic oligonucleotide
  Sense Strand Starting at position 871 of SEQ ID NO: 317481
acuccucucguucgaaaug

SEQ ID NO: 387290 - RNA, 19 nt, Artificial Sequence
  Description of Artificial Sequence: Synthetic oligonucleotide
  Antisense Strand to SEQ ID NO: 387289
cauuucgaacgagaggagu

SEQ ID NO: 387291 - RNA, 19 nt, Artificial Sequence
  Description of Artificial Sequence: Synthetic oligonucleotide
  Sense Strand Starting at position 871 of SEQ ID NO: 317482
cuccucucguucgaaauga

SEQ ID NO: 387292 - RNA, 19 nt, Artificial Sequence
  Description of Artificial Sequence: Synthetic oligonucleotide
  Antisense Strand to SEQ ID NO: 387291
ucauuucgaacgagaggag

SEQ ID NO: 387293 - RNA, 19 nt, Artificial Sequence
  Description of Artificial Sequence: Synthetic oligonucleotide
  Sense Strand Starting at position 871 of SEQ ID NO: 317486
ucucguucgaaaugaccau

SEQ ID NO: 387294 - RNA, 19 nt, Artificial Sequence
  Description of Artificial Sequence: Synthetic oligonucleotide
  Antisense Strand to SEQ ID NO: 387293
auggucauuucgaacgaga

SEQ ID NO: 387295 - RNA, 19 nt, Artificial Sequence
  Description of Artificial Sequence: Synthetic oligonucleotide
  Sense Strand Starting at position 871 of SEQ ID NO: 317606
ccugcuucguggcccgaaa

SEQ ID NO: 387296 - RNA, 19 nt, Artificial Sequence
  Description of Artificial Sequence: Synthetic oligonucleotide
  Antisense Strand to SEQ ID NO: 387295
uuucgggccacgaagcagg

SEQ ID NO: 387297 - RNA, 19 nt, Artificial Sequence
  Description of Artificial Sequence: Synthetic oligonucleotide
  Sense Strand Starting at position 871 of SEQ ID NO: 317617
gcccgaaacgccucgcaau

SEQ ID NO: 387298 - RNA, 19 nt, Artificial Sequence
  Description of Artificial Sequence: Synthetic oligonucleotide
  Antisense Strand to SEQ ID NO: 387297
auugcgaggcguuucgggc

SEQ ID NO: 387299 - RNA, 19 nt, Artificial Sequence
  Description of Artificial Sequence: Synthetic oligonucleotide
  Sense Strand Starting at position 871 of SEQ ID NO: 317629
ucgcaauggagucacucau

SEQ ID NO: 387300 - RNA, 19 nt, Artificial Sequence
  Description of Artificial Sequence: Synthetic oligonucleotide
  Antisense Strand to SEQ ID NO: 387299
augagugacuccauugcga

SEQ ID NO: 387301 - RNA, 19 nt, Artificial Sequence
  Description of Artificial Sequence: Synthetic oligonucleotide
  Sense Strand Starting at position 871 of SEQ ID NO: 318554
cgacgacuuuauuaagaug

SEQ ID NO: 387302 - RNA, 19 nt, Artificial Sequence
  Description of Artificial Sequence: Synthetic oligonucleotide
  Antisense Strand to SEQ ID NO: 387301
caucuuaauaaagucgucg

SEQ ID NO: 387303 - RNA, 19 nt, Artificial Sequence
  Description of Artificial Sequence: Synthetic oligonucleotide
  Sense Strand Starting at position 871 of SEQ ID NO: 318557
cgacuuuauuaagauguga

SEQ ID NO: 387304 - RNA, 19 nt, Artificial Sequence
  Description of Artificial Sequence: Synthetic oligonucleotide
  Antisense Strand to SEQ ID NO: 387303
ucacaucuuaauaaagucg

SEQ ID NO: 387305 - RNA, 19 nt, Artificial Sequence
  Description of Artificial Sequence: Synthetic oligonucleotide
  Sense Strand Starting at position 871 of SEQ ID NO: 318559
acuuuauuaagaugugagg

SEQ ID NO: 387306 - RNA, 19 nt, Artificial Sequence
  Description of Artificial Sequence: Synthetic oligonucleotide
  Antisense Strand to SEQ ID NO: 387305
ccucacaucuuaauaaagu

SEQ ID NO: 387307 - RNA, 19 nt, Artificial Sequence
  Description of Artificial Sequence: Synthetic oligonucleotide
  Sense Strand Starting at position 871 of SEQ ID NO: 318561
uuuauuaagaugugaggua

SEQ ID NO: 387308 - RNA, 19 nt, Artificial Sequence
  Description of Artificial Sequence: Synthetic oligonucleotide
  Antisense Strand to SEQ ID NO: 387307
uaccucacaucuuaauaaa

SEQ ID NO: 387309 - RNA, 19 nt, Artificial Sequence
  Description of Artificial Sequence: Synthetic oligonucleotide
  Sense Strand Starting at position 871 of SEQ ID NO: 318562
uuauuaagaugugagguau

SEQ ID NO: 387310 - RNA, 19 nt, Artificial Sequence
  Description of Artificial Sequence: Synthetic oligonucleotide
  Antisense Strand to SEQ ID NO: 387309
auaccucacaucuuaauaa

SEQ ID NO: 387311 - RNA, 19 nt, Artificial Sequence
  Description of Artificial Sequence: Synthetic oligonucleotide
  Sense Strand Starting at position 871 of SEQ ID NO: 318627
aguauacaguuccaugaau

SEQ ID NO: 387312 - RNA, 19 nt, Artificial Sequence
  Description of Artificial Sequence: Synthetic oligonucleotide
  Antisense Strand to SEQ ID NO: 387311
auucauggaacuguauacu

SEQ ID NO: 387313 - RNA, 19 nt, Artificial Sequence
  Description of Artificial Sequence: Synthetic oligonucleotide
  Sense Strand Starting at position 871 of SEQ ID NO: 318802
ggcucaguuccaugacuuc

SEQ ID NO: 387314 - RNA, 19 nt, Artificial Sequence
  Description of Artificial Sequence: Synthetic oligonucleotide
  Antisense Strand to SEQ ID NO: 387313
gaagucauggaacugagcc

SEQ ID NO: 387315 - RNA, 19 nt, Artificial Sequence
  Description of Artificial Sequence: Synthetic oligonucleotide
  Sense Strand Starting at position 871 of SEQ ID NO: 318814
ugacuucugacacgcgaaa

SEQ ID NO: 387316 - RNA, 19 nt, Artificial Sequence
  Description of Artificial Sequence: Synthetic oligonucleotide
  Antisense Strand to SEQ ID NO: 387315
uuucgcgugucagaaguca

SEQ ID NO: 387317 - RNA, 19 nt, Artificial Sequence
  Description of Artificial Sequence: Synthetic oligonucleotide
  Sense Strand Starting at position 871 of SEQ ID NO: 318946
uccucugauuucugucacu

SEQ ID NO: 387318 - RNA, 19 nt, Artificial Sequence
  Description of Artificial Sequence: Synthetic oligonucleotide
  Antisense Strand to SEQ ID NO: 387317
agugacagaaaucagagga

SEQ ID NO: 387319 - RNA, 19 nt, Artificial Sequence
  Description of Artificial Sequence: Synthetic oligonucleotide
  Sense Strand Starting at position 871 of SEQ ID NO: 319027
uggcuuucuucgcuuggca

SEQ ID NO: 387320 - RNA, 19 nt, Artificial Sequence
  Description of Artificial Sequence: Synthetic oligonucleotide
  Antisense Strand to SEQ ID NO: 387319
ugccaagcgaagaaagcca

SEQ ID NO: 387321 - RNA, 19 nt, Artificial Sequence
  Description of Artificial Sequence: Synthetic oligonucleotide
  Sense Strand Starting at position 872 of SEQ ID NO: 315401
cuauuauuacgauaugcua

SEQ ID NO: 387322 - RNA, 19 nt, Artificial Sequence
  Description of Artificial Sequence: Synthetic oligonucleotide
  Antisense Strand to SEQ ID NO: 387321
uagcauaucguaauaauag

SEQ ID NO: 387323 - RNA, 19 nt, Artificial Sequence
  Description of Artificial Sequence: Synthetic oligonucleotide
  Sense Strand Starting at position 872 of SEQ ID NO: 315451
auaggaaaguacucuaguu

SEQ ID NO: 387324 - RNA, 19 nt, Artificial Sequence
  Description of Artificial Sequence: Synthetic oligonucleotide
  Antisense Strand to SEQ ID NO: 387323
aacuagaguacuuuccuau

SEQ ID NO: 387325 - RNA, 19 nt, Artificial Sequence
  Description of Artificial Sequence: Synthetic oligonucleotide
  Sense Strand Starting at position 872 of SEQ ID NO: 315675
ugauguuuagauggagauc

SEQ ID NO: 387326 - RNA, 19 nt, Artificial Sequence
  Description of Artificial Sequence: Synthetic oligonucleotide
  Antisense Strand to SEQ ID NO: 387325
gaucuccaucuaaacauca

SEQ ID NO: 387327 - RNA, 19 nt, Artificial Sequence
  Description of Artificial Sequence: Synthetic oligonucleotide
  Sense Strand Starting at position 872 of SEQ ID NO: 315684
gauggagaucuaugcuguc

SEQ ID NO: 387328 - RNA, 19 nt, Artificial Sequence
  Description of Artificial Sequence: Synthetic oligonucleotide
  Antisense Strand to SEQ ID NO: 387327
gacagcauagaucuccauc

SEQ ID NO: 387329 - RNA, 19 nt, Artificial Sequence
  Description of Artificial Sequence: Synthetic oligonucleotide
  Sense Strand Starting at position 872 of SEQ ID NO: 315774
cacguuaaauuguuaagac

SEQ ID NO: 387330 - RNA, 19 nt, Artificial Sequence
  Description of Artificial Sequence: Synthetic oligonucleotide
  Antisense Strand to SEQ ID NO: 387329
gucuuaacaauuuaacgug

SEQ ID NO: 387331 - RNA, 19 nt, Artificial Sequence
  Description of Artificial Sequence: Synthetic oligonucleotide
  Sense Strand Starting at position 872 of SEQ ID NO: 315781
aauuguuaagacuguaguu

SEQ ID NO: 387332 - RNA, 19 nt, Artificial Sequence
  Description of Artificial Sequence: Synthetic oligonucleotide
  Antisense Strand to SEQ ID NO: 387331
aacuacagucuuaacaauu

SEQ ID NO: 387333 - RNA, 19 nt, Artificial Sequence
  Description of Artificial Sequence: Synthetic oligonucleotide
  Sense Strand Starting at position 872 of SEQ ID NO: 315790
gacuguaguugcuuugaaa

SEQ ID NO: 387334 - RNA, 19 nt, Artificial Sequence
  Description of Artificial Sequence: Synthetic oligonucleotide
  Antisense Strand to SEQ ID NO: 387333
uuucaaagcaacuacaguc

SEQ ID NO: 387335 - RNA, 19 nt, Artificial Sequence
  Description of Artificial Sequence: Synthetic oligonucleotide
  Sense Strand Starting at position 872 of SEQ ID NO: 315915
ggugcaauguaagcaaaua

SEQ ID NO: 387336 - RNA, 19 nt, Artificial Sequence
  Description of Artificial Sequence: Synthetic oligonucleotide
  Antisense Strand to SEQ ID NO: 387335
uauuugcuuacauugcacc

SEQ ID NO: 387337 - RNA, 19 nt, Artificial Sequence
  Description of Artificial Sequence: Synthetic oligonucleotide
  Sense Strand Starting at position 872 of SEQ ID NO: 315923
guaagcaaauacucagaaa

SEQ ID NO: 387338 - RNA, 19 nt, Artificial Sequence
  Description of Artificial Sequence: Synthetic oligonucleotide
  Antisense Strand to SEQ ID NO: 387337
uuucugaguauuugcuuac

SEQ ID NO: 387339 - RNA, 19 nt, Artificial Sequence
  Description of Artificial Sequence: Synthetic oligonucleotide
  Sense Strand Starting at position 872 of SEQ ID NO: 315958
aggauaacauaugaccaau

SEQ ID NO: 387340 - RNA, 19 nt, Artificial Sequence
  Description of Artificial Sequence: Synthetic oligonucleotide
  Antisense Strand to SEQ ID NO: 387339
auuggucauauguuauccu

SEQ ID NO: 387341 - RNA, 19 nt, Artificial Sequence
  Description of Artificial Sequence: Synthetic oligonucleotide
  Sense Strand Starting at position 872 of SEQ ID NO: 315973
caauauugcccucaguggu

SEQ ID NO: 387342 - RNA, 19 nt, Artificial Sequence
  Description of Artificial Sequence: Synthetic oligonucleotide
  Antisense Strand to SEQ ID NO: 387341
accacugagggcaauauug

SEQ ID NO: 387343 - RNA, 19 nt, Artificial Sequence
  Description of Artificial Sequence: Synthetic oligonucleotide
  Sense Strand Starting at position 872 of SEQ ID NO: 316447
acuuaagagccauggaaca

SEQ ID NO: 387344 - RNA, 19 nt, Artificial Sequence
  Description of Artificial Sequence: Synthetic oligonucleotide
  Antisense Strand to SEQ ID NO: 387343
uguuccauggcucuuaagu

SEQ ID NO: 387345 - RNA, 19 nt, Artificial Sequence
  Description of Artificial Sequence: Synthetic oligonucleotide
  Sense Strand Starting at position 872 of SEQ ID NO: 316511
gugucucaggucuaugaau

SEQ ID NO: 387346 - RNA, 19 nt, Artificial Sequence
  Description of Artificial Sequence: Synthetic oligonucleotide
  Antisense Strand to SEQ ID NO: 387345
auucauagaccugagacac

SEQ ID NO: 387347 - RNA, 19 nt, Artificial Sequence
  Description of Artificial Sequence: Synthetic oligonucleotide
  Sense Strand Starting at position 872 of SEQ ID NO: 316513
gucucaggucuaugaauga

SEQ ID NO: 387348 - RNA, 19 nt, Artificial Sequence
  Description of Artificial Sequence: Synthetic oligonucleotide
  Antisense Strand to SEQ ID NO: 387347
ucauucauagaccugagac

SEQ ID NO: 387349 - RNA, 19 nt, Artificial Sequence
  Description of Artificial Sequence: Synthetic oligonucleotide
  Sense Strand Starting at position 872 of SEQ ID NO: 317534
gcucacaucguguaaacaa

SEQ ID NO: 387350 - RNA, 19 nt, Artificial Sequence
  Description of Artificial Sequence: Synthetic oligonucleotide
  Antisense Strand to SEQ ID NO: 387349
uuguuuacacgaugugagc

SEQ ID NO: 387351 - RNA, 19 nt, Artificial Sequence
  Description of Artificial Sequence: Synthetic oligonucleotide
  Sense Strand Starting at position 872 of SEQ ID NO: 317706
aggguaacaauaugugcua

SEQ ID NO: 387352 - RNA, 19 nt, Artificial Sequence
  Description of Artificial Sequence: Synthetic oligonucleotide
  Antisense Strand to SEQ ID NO: 387351
uagcacauauuguuacccu

SEQ ID NO: 387353 - RNA, 19 nt, Artificial Sequence
  Description of Artificial Sequence: Synthetic oligonucleotide
  Sense Strand Starting at position 872 of SEQ ID NO: 317775
gcucuucugacguuuguuu

SEQ ID NO: 387354 - RNA, 19 nt, Artificial Sequence
  Description of Artificial Sequence: Synthetic oligonucleotide
  Antisense Strand to SEQ ID NO: 387353
aaacaaacgucagaagagc

SEQ ID NO: 387355 - RNA, 19 nt, Artificial Sequence
  Description of Artificial Sequence: Synthetic oligonucleotide
  Sense Strand Starting at position 872 of SEQ ID NO: 317800
ccgucuucugcaguaguga

SEQ ID NO: 387356 - RNA, 19 nt, Artificial Sequence
  Description of Artificial Sequence: Synthetic oligonucleotide
  Antisense Strand to SEQ ID NO: 387355
ucacuacugcagaagacgg

SEQ ID NO: 387357 - RNA, 19 nt, Artificial Sequence
  Description of Artificial Sequence: Synthetic oligonucleotide
  Sense Strand Starting at position 872 of SEQ ID NO: 317841
agcguacguguaguauauu

SEQ ID NO: 387358 - RNA, 19 nt, Artificial Sequence
  Description of Artificial Sequence: Synthetic oligonucleotide
  Antisense Strand to SEQ ID NO: 387357
aauauacuacacguacgcu

SEQ ID NO: 387359 - RNA, 19 nt, Artificial Sequence
  Description of Artificial Sequence: Synthetic oligonucleotide
  Sense Strand Starting at position 872 of SEQ ID NO: 317850
guaguauauuuguuucuac

SEQ ID NO: 387360 - RNA, 19 nt, Artificial Sequence
  Description of Artificial Sequence: Synthetic oligonucleotide
  Antisense Strand to SEQ ID NO: 387359
guagaaacaaauauacuac

SEQ ID NO: 387361 - RNA, 19 nt, Artificial Sequence
  Description of Artificial Sequence: Synthetic oligonucleotide
  Sense Strand Starting at position 872 of SEQ ID NO: 317853
guauauuuguuucuacgag

SEQ ID NO: 387362 - RNA, 19 nt, Artificial Sequence
  Description of Artificial Sequence: Synthetic oligonucleotide
  Antisense Strand to SEQ ID NO: 387361
cucguagaaacaaauauac

SEQ ID NO: 387363 - RNA, 19 nt, Artificial Sequence
  Description of Artificial Sequence: Synthetic oligonucleotide
  Sense Strand Starting at position 872 of SEQ ID NO: 318024
uggauucuauaauagaaag

SEQ ID NO: 387364 - RNA, 19 nt, Artificial Sequence
  Description of Artificial Sequence: Synthetic oligonucleotide
  Antisense Strand to SEQ ID NO: 387363
cuuucuauuauagaaucca

SEQ ID NO: 387365 - RNA, 19 nt, Artificial Sequence
  Description of Artificial Sequence: Synthetic oligonucleotide
  Sense Strand Starting at position 872 of SEQ ID NO: 318067
ugcguucuucugccgacau

SEQ ID NO: 387366 - RNA, 19 nt, Artificial Sequence
  Description of Artificial Sequence: Synthetic oligonucleotide
  Antisense Strand to SEQ ID NO: 387365
augucggcagaagaacgca

SEQ ID NO: 387367 - RNA, 19 nt, Artificial Sequence
  Description of Artificial Sequence: Synthetic oligonucleotide
  Sense Strand Starting at position 872 of SEQ ID NO: 318087
guuuaaguuguauaccauc

SEQ ID NO: 387368 - RNA, 19 nt, Artificial Sequence
  Description of Artificial Sequence: Synthetic oligonucleotide
  Antisense Strand to SEQ ID NO: 387367
gaugguauacaacuuaaac

SEQ ID NO: 387369 - RNA, 19 nt, Artificial Sequence
  Description of Artificial Sequence: Synthetic oligonucleotide
  Sense Strand Starting at position 872 of SEQ ID NO: 318195
aucgaauucugauucgaag

SEQ ID NO: 387370 - RNA, 19 nt, Artificial Sequence
  Description of Artificial Sequence: Synthetic oligonucleotide
  Antisense Strand to SEQ ID NO: 387369
cuucgaaucagaauucgau

SEQ ID NO: 387371 - RNA, 19 nt, Artificial Sequence
  Description of Artificial Sequence: Synthetic oligonucleotide
  Sense Strand Starting at position 872 of SEQ ID NO: 318197
cgaauucugauucgaagca

SEQ ID NO: 387372 - RNA, 19 nt, Artificial Sequence
  Description of Artificial Sequence: Synthetic oligonucleotide
  Antisense Strand to SEQ ID NO: 387371
ugcuucgaaucagaauucg

SEQ ID NO: 387373 - RNA, 19 nt, Artificial Sequence
  Description of Artificial Sequence: Synthetic oligonucleotide
  Sense Strand Starting at position 872 of SEQ ID NO: 318291
ugucauauaggcuauagau

SEQ ID NO: 387374 - RNA, 19 nt, Artificial Sequence
  Description of Artificial Sequence: Synthetic oligonucleotide
  Antisense Strand to SEQ ID NO: 387373
aucuauagccuauaugaca

SEQ ID NO: 387375 - RNA, 19 nt, Artificial Sequence
  Description of Artificial Sequence: Synthetic oligonucleotide
  Sense Strand Starting at position 872 of SEQ ID NO: 318346
gaagucuguuugcuugaga

SEQ ID NO: 387376 - RNA, 19 nt, Artificial Sequence
  Description of Artificial Sequence: Synthetic oligonucleotide
  Antisense Strand to SEQ ID NO: 387375
ucucaagcaaacagacuuc

SEQ ID NO: 387377 - RNA, 19 nt, Artificial Sequence
  Description of Artificial Sequence: Synthetic oligonucleotide
  Sense Strand Starting at position 872 of SEQ ID NO: 318354
uuugcuugagaguaaauca

SEQ ID NO: 387378 - RNA, 19 nt, Artificial Sequence
  Description of Artificial Sequence: Synthetic oligonucleotide
  Antisense Strand to SEQ ID NO: 387377
ugauuuacucucaagcaaa

SEQ ID NO: 387379 - RNA, 19 nt, Artificial Sequence
  Description of Artificial Sequence: Synthetic oligonucleotide
  Sense Strand Starting at position 872 of SEQ ID NO: 318365
guaaaucaaucuguugacu

SEQ ID NO: 387380 - RNA, 19 nt, Artificial Sequence
  Description of Artificial Sequence: Synthetic oligonucleotide
  Antisense Strand to SEQ ID NO: 387379
agucaacagauugauuuac

SEQ ID NO: 387381 - RNA, 19 nt, Artificial Sequence
  Description of Artificial Sequence: Synthetic oligonucleotide
  Sense Strand Starting at position 872 of SEQ ID NO: 318397
cugauaaggguucgguacu

SEQ ID NO: 387382 - RNA, 19 nt, Artificial Sequence
  Description of Artificial Sequence: Synthetic oligonucleotide
  Antisense Strand to SEQ ID NO: 387381
aguaccgaacccuuaucag

SEQ ID NO: 387383 - RNA, 19 nt, Artificial Sequence
  Description of Artificial Sequence: Synthetic oligonucleotide
  Sense Strand Starting at position 872 of SEQ ID NO: 318466
aggagcagugauuagaagu

SEQ ID NO: 387384 - RNA, 19 nt, Artificial Sequence
  Description of Artificial Sequence: Synthetic oligonucleotide
  Antisense Strand to SEQ ID NO: 387383
acuucuaaucacugcuccu

SEQ ID NO: 387385 - RNA, 19 nt, Artificial Sequence
  Description of Artificial Sequence: Synthetic oligonucleotide
  Sense Strand Starting at position 872 of SEQ ID NO: 318507
ucgguuccuccuugaauuu

SEQ ID NO: 387386 - RNA, 19 nt, Artificial Sequence
  Description of Artificial Sequence: Synthetic oligonucleotide
  Antisense Strand to SEQ ID NO: 387385
aaauucaaggaggaaccga

SEQ ID NO: 387387 - RNA, 19 nt, Artificial Sequence
  Description of Artificial Sequence: Synthetic oligonucleotide
  Sense Strand Starting at position 872 of SEQ ID NO: 318576
cuacuuguccucuagagca

SEQ ID NO: 387388 - RNA, 19 nt, Artificial Sequence
  Description of Artificial Sequence: Synthetic oligonucleotide
  Antisense Strand to SEQ ID NO: 387387
ugcucuagaggacaaguag

SEQ ID NO: 387389 - RNA, 19 nt, Artificial Sequence
  Description of Artificial Sequence: Synthetic oligonucleotide
  Sense Strand Starting at position 872 of SEQ ID NO: 318578
acuuguccucuagagcaaa

SEQ ID NO: 387390 - RNA, 19 nt, Artificial Sequence
  Description of Artificial Sequence: Synthetic oligonucleotide
  Antisense Strand to SEQ ID NO: 387389
uuugcucuagaggacaagu

SEQ ID NO: 387391 - RNA, 19 nt, Artificial Sequence
  Description of Artificial Sequence: Synthetic oligonucleotide
  Sense Strand Starting at position 872 of SEQ ID NO: 318607
auaacagucuucucgaaca

SEQ ID NO: 387392 - RNA, 19 nt, Artificial Sequence
  Description of Artificial Sequence: Synthetic oligonucleotide
  Antisense Strand to SEQ ID NO: 387391
uguucgagaagacuguuau

SEQ ID NO: 387393 - RNA, 19 nt, Artificial Sequence
  Description of Artificial Sequence: Synthetic oligonucleotide
  Sense Strand Starting at position 872 of SEQ ID NO: 318655
augagauggaucuguuccu

SEQ ID NO: 387394 - RNA, 19 nt, Artificial Sequence
  Description of Artificial Sequence: Synthetic oligonucleotide
  Antisense Strand to SEQ ID NO: 387393
aggaacagauccaucucau

SEQ ID NO: 387395 - RNA, 19 nt, Artificial Sequence
  Description of Artificial Sequence: Synthetic oligonucleotide
  Sense Strand Starting at position 872 of SEQ ID NO: 318833
acuguuacuccagaguaca

SEQ ID NO: 387396 - RNA, 19 nt, Artificial Sequence
  Description of Artificial Sequence: Synthetic oligonucleotide
  Antisense Strand to SEQ ID NO: 387395
uguacucuggaguaacagu

SEQ ID NO: 387397 - RNA, 19 nt, Artificial Sequence
  Description of Artificial Sequence: Synthetic oligonucleotide
  Sense Strand Starting at position 872 of SEQ ID NO: 318836
guuacuccagaguacagau

SEQ ID NO: 387398 - RNA, 19 nt, Artificial Sequence
  Description of Artificial Sequence: Synthetic oligonucleotide
  Antisense Strand to SEQ ID NO: 387397
aucuguacucuggaguaac

SEQ ID NO: 387399 - RNA, 19 nt, Artificial Sequence
  Description of Artificial Sequence: Synthetic oligonucleotide
  Sense Strand Starting at position 872 of SEQ ID NO: 318873
cugaauugcuagucaaagu

SEQ ID NO: 387400 - RNA, 19 nt, Artificial Sequence
  Description of Artificial Sequence: Synthetic oligonucleotide
  Antisense Strand to SEQ ID NO: 387399
acuuugacuagcaauucag

SEQ ID NO: 387401 - RNA, 19 nt, Artificial Sequence
  Description of Artificial Sequence: Synthetic oligonucleotide
  Sense Strand Starting at position 873 of SEQ ID NO: 315261
acagguagauuaucuuaag

SEQ ID NO: 387402 - RNA, 19 nt, Artificial Sequence
  Description of Artificial Sequence: Synthetic oligonucleotide
  Antisense Strand to SEQ ID NO: 387401
cuuaagauaaucuaccugu

SEQ ID NO: 387403 - RNA, 19 nt, Artificial Sequence
  Description of Artificial Sequence: Synthetic oligonucleotide
  Sense Strand Starting at position 873 of SEQ ID NO: 315262
cagguagauuaucuuaagu

SEQ ID NO: 387404 - RNA, 19 nt, Artificial Sequence
  Description of Artificial Sequence: Synthetic oligonucleotide
  Antisense Strand to SEQ ID NO: 387403
acuuaagauaaucuaccug

SEQ ID NO: 387405 - RNA, 19 nt, Artificial Sequence
  Description of Artificial Sequence: Synthetic oligonucleotide
  Sense Strand Starting at position 873 of SEQ ID NO: 315448
ucugaaauuccugggcuaa

SEQ ID NO: 387406 - RNA, 19 nt, Artificial Sequence
  Description of Artificial Sequence: Synthetic oligonucleotide
  Antisense Strand to SEQ ID NO: 387405
uuagcccaggaauuucaga

SEQ ID NO: 387407 - RNA, 19 nt, Artificial Sequence
  Description of Artificial Sequence: Synthetic oligonucleotide
  Sense Strand Starting at position 873 of SEQ ID NO: 315449
cugaaauuccugggcuaaa

SEQ ID NO: 387408 - RNA, 19 nt, Artificial Sequence
  Description of Artificial Sequence: Synthetic oligonucleotide
  Antisense Strand to SEQ ID NO: 387407
uuuagcccaggaauuucag

SEQ ID NO: 387409 - RNA, 19 nt, Artificial Sequence
  Description of Artificial Sequence: Synthetic oligonucleotide
  Sense Strand Starting at position 873 of SEQ ID NO: 315450
ugaaauuccugggcuaaag

SEQ ID NO: 387410 - RNA, 19 nt, Artificial Sequence
  Description of Artificial Sequence: Synthetic oligonucleotide
  Antisense Strand to SEQ ID NO: 387409
cuuuagcccaggaauuuca

SEQ ID NO: 387411 - RNA, 19 nt, Artificial Sequence
  Description of Artificial Sequence: Synthetic oligonucleotide
  Sense Strand Starting at position 873 of SEQ ID NO: 315452
aaauuccugggcuaaagua

SEQ ID NO: 387412 - RNA, 19 nt, Artificial Sequence
  Description of Artificial Sequence: Synthetic oligonucleotide
  Antisense Strand to SEQ ID NO: 387411
uacuuuagcccaggaauuu

SEQ ID NO: 387413 - RNA, 19 nt, Artificial Sequence
  Description of Artificial Sequence: Synthetic oligonucleotide
  Sense Strand Starting at position 873 of SEQ ID NO: 315666
ccuaaauucugagaauuug

SEQ ID NO: 387414 - RNA, 19 nt, Artificial Sequence
  Description of Artificial Sequence: Synthetic oligonucleotide
  Antisense Strand to SEQ ID NO: 387413
caaauucucagaauuuagg

SEQ ID NO: 387415 - RNA, 19 nt, Artificial Sequence
  Description of Artificial Sequence: Synthetic oligonucleotide
  Sense Strand Starting at position 873 of SEQ ID NO: 315771
aguugcuugaggcaaguaa

SEQ ID NO: 387416 - RNA, 19 nt, Artificial Sequence
  Description of Artificial Sequence: Synthetic oligonucleotide
  Antisense Strand to SEQ ID NO: 387415
uuacuugccucaagcaacu

SEQ ID NO: 387417 - RNA, 19 nt, Artificial Sequence
  Description of Artificial Sequence: Synthetic oligonucleotide
  Sense Strand Starting at position 873 of SEQ ID NO: 315973
acaugcaguguguauauua

SEQ ID NO: 387418 - RNA, 19 nt, Artificial Sequence
  Description of Artificial Sequence: Synthetic oligonucleotide
  Antisense Strand to SEQ ID NO: 387417
uaauauacacacugcaugu

SEQ ID NO: 387419 - RNA, 19 nt, Artificial Sequence
  Description of Artificial Sequence: Synthetic oligonucleotide
  Sense Strand Starting at position 873 of SEQ ID NO: 316081
aucaauuguucuuugagua

SEQ ID NO: 387420 - RNA, 19 nt, Artificial Sequence
  Description of Artificial Sequence: Synthetic oligonucleotide
  Antisense Strand to SEQ ID NO: 387419
uacucaaagaacaauugau

SEQ ID NO: 387421 - RNA, 19 nt, Artificial Sequence
  Description of Artificial Sequence: Synthetic oligonucleotide
  Sense Strand Starting at position 873 of SEQ ID NO: 316085
auuguucuuugaguaucaa

SEQ ID NO: 387422 - RNA, 19 nt, Artificial Sequence
  Description of Artificial Sequence: Synthetic oligonucleotide
  Antisense Strand to SEQ ID NO: 387421
uugauacucaaagaacaau

SEQ ID NO: 387423 - RNA, 19 nt, Artificial Sequence
  Description of Artificial Sequence: Synthetic oligonucleotide
  Sense Strand Starting at position 873 of SEQ ID NO: 316086
uuguucuuugaguaucaau

SEQ ID NO: 387424 - RNA, 19 nt, Artificial Sequence
  Description of Artificial Sequence: Synthetic oligonucleotide
  Antisense Strand to SEQ ID NO: 387423
auugauacucaaagaacaa

SEQ ID NO: 387425 - RNA, 19 nt, Artificial Sequence
  Description of Artificial Sequence: Synthetic oligonucleotide
  Sense Strand Starting at position 873 of SEQ ID NO: 316106
cuaauacagcagugacuau

SEQ ID NO: 387426 - RNA, 19 nt, Artificial Sequence
  Description of Artificial Sequence: Synthetic oligonucleotide
  Antisense Strand to SEQ ID NO: 387425
auagucacugcuguauuag

SEQ ID NO: 387427 - RNA, 19 nt, Artificial Sequence
  Description of Artificial Sequence: Synthetic oligonucleotide
  Sense Strand Starting at position 873 of SEQ ID NO: 316185
cuuuaagggcgugagauau

SEQ ID NO: 387428 - RNA, 19 nt, Artificial Sequence
  Description of Artificial Sequence: Synthetic oligonucleotide
  Antisense Strand to SEQ ID NO: 387427
auaucucacgcccuuaaag

SEQ ID NO: 387429 - RNA, 19 nt, Artificial Sequence
  Description of Artificial Sequence: Synthetic oligonucleotide
  Sense Strand Starting at position 873 of SEQ ID NO: 316584
cuuacuuagucagugauaa

SEQ ID NO: 387430 - RNA, 19 nt, Artificial Sequence
  Description of Artificial Sequence: Synthetic oligonucleotide
  Antisense Strand to SEQ ID NO: 387429
uuaucacugacuaaguaag

SEQ ID NO: 387431 - RNA, 19 nt, Artificial Sequence
  Description of Artificial Sequence: Synthetic oligonucleotide
  Sense Strand Starting at position 873 of SEQ ID NO: 316585
uuacuuagucagugauaaa

SEQ ID NO: 387432 - RNA, 19 nt, Artificial Sequence
  Description of Artificial Sequence: Synthetic oligonucleotide
  Antisense Strand to SEQ ID NO: 387431
uuuaucacugacuaaguaa

SEQ ID NO: 387433 - RNA, 19 nt, Artificial Sequence
  Description of Artificial Sequence: Synthetic oligonucleotide
  Sense Strand Starting at position 873 of SEQ ID NO: 316763
auuagcuuaccuuaucgaa

SEQ ID NO: 387434 - RNA, 19 nt, Artificial Sequence
  Description of Artificial Sequence: Synthetic oligonucleotide
  Antisense Strand to SEQ ID NO: 387433
uucgauaagguaagcuaau

SEQ ID NO: 387435 - RNA, 19 nt, Artificial Sequence
  Description of Artificial Sequence: Synthetic oligonucleotide
  Sense Strand Starting at position 873 of SEQ ID NO: 316814
cuggaaauuuaacaugcaa

SEQ ID NO: 387436 - RNA, 19 nt, Artificial Sequence
  Description of Artificial Sequence: Synthetic oligonucleotide
  Antisense Strand to SEQ ID NO: 387435
uugcauguuaaauuuccag

SEQ ID NO: 387437 - RNA, 19 nt, Artificial Sequence
  Description of Artificial Sequence: Synthetic oligonucleotide
  Sense Strand Starting at position 873 of SEQ ID NO: 316883
ucaacauuucuucgaguuc

SEQ ID NO: 387438 - RNA, 19 nt, Artificial Sequence
  Description of Artificial Sequence: Synthetic oligonucleotide
  Antisense Strand to SEQ ID NO: 387437
gaacucgaagaaauguuga

SEQ ID NO: 387439 - RNA, 19 nt, Artificial Sequence
  Description of Artificial Sequence: Synthetic oligonucleotide
  Sense Strand Starting at position 873 of SEQ ID NO: 316993
accuuagaaguaugucaac

SEQ ID NO: 387440 - RNA, 19 nt, Artificial Sequence
  Description of Artificial Sequence: Synthetic oligonucleotide
  Antisense Strand to SEQ ID NO: 387439
guugacauacuucuaaggu

SEQ ID NO: 387441 - RNA, 19 nt, Artificial Sequence
  Description of Artificial Sequence: Synthetic oligonucleotide
  Sense Strand Starting at position 873 of SEQ ID NO: 317002
guaugucaacuacagaagu

SEQ ID NO: 387442 - RNA, 19 nt, Artificial Sequence
  Description of Artificial Sequence: Synthetic oligonucleotide
  Antisense Strand to SEQ ID NO: 387441
acuucuguaguugacauac

SEQ ID NO: 387443 - RNA, 19 nt, Artificial Sequence
  Description of Artificial Sequence: Synthetic oligonucleotide
  Sense Strand Starting at position 873 of SEQ ID NO: 317055
ucuguuaaugcuuggaaca

SEQ ID NO: 387444 - RNA, 19 nt, Artificial Sequence
  Description of Artificial Sequence: Synthetic oligonucleotide
  Antisense Strand to SEQ ID NO: 387443
uguuccaagcauuaacaga

SEQ ID NO: 387445 - RNA, 19 nt, Artificial Sequence
  Description of Artificial Sequence: Synthetic oligonucleotide
  Sense Strand Starting at position 873 of SEQ ID NO: 317056
cuguuaaugcuuggaacaa

SEQ ID NO: 387446 - RNA, 19 nt, Artificial Sequence
  Description of Artificial Sequence: Synthetic oligonucleotide
  Antisense Strand to SEQ ID NO: 387445
uuguuccaagcauuaacag

SEQ ID NO: 387447 - RNA, 19 nt, Artificial Sequence
  Description of Artificial Sequence: Synthetic oligonucleotide
  Sense Strand Starting at position 873 of SEQ ID NO: 317251
uggacuucuuaaucacaug

SEQ ID NO: 387448 - RNA, 19 nt, Artificial Sequence
  Description of Artificial Sequence: Synthetic oligonucleotide
  Antisense Strand to SEQ ID NO: 387447
caugugauuaagaagucca

SEQ ID NO: 387449 - RNA, 19 nt, Artificial Sequence
  Description of Artificial Sequence: Synthetic oligonucleotide
  Sense Strand Starting at position 873 of SEQ ID NO: 317558
uggaguucgcaucauauaa

SEQ ID NO: 387450 - RNA, 19 nt, Artificial Sequence
  Description of Artificial Sequence: Synthetic oligonucleotide
  Antisense Strand to SEQ ID NO: 387449
uuauaugaugcgaacucca

SEQ ID NO: 387451 - RNA, 19 nt, Artificial Sequence
  Description of Artificial Sequence: Synthetic oligonucleotide
  Sense Strand Starting at position 873 of SEQ ID NO: 317616
uagaguuagguguacaauc

SEQ ID NO: 387452 - RNA, 19 nt, Artificial Sequence
  Description of Artificial Sequence: Synthetic oligonucleotide
  Antisense Strand to SEQ ID NO: 387451
gauuguacaccuaacucua

SEQ ID NO: 387453 - RNA, 19 nt, Artificial Sequence
  Description of Artificial Sequence: Synthetic oligonucleotide
  Sense Strand Starting at position 873 of SEQ ID NO: 317618
gaguuagguguacaaucua

SEQ ID NO: 387454 - RNA, 19 nt, Artificial Sequence
  Description of Artificial Sequence: Synthetic oligonucleotide
  Antisense Strand to SEQ ID NO: 387453
uagauuguacaccuaacuc

SEQ ID NO: 387455 - RNA, 19 nt, Artificial Sequence
  Description of Artificial Sequence: Synthetic oligonucleotide
  Sense Strand Starting at position 873 of SEQ ID NO: 317668
ucuuauacugacuguagua

SEQ ID NO: 387456 - RNA, 19 nt, Artificial Sequence
  Description of Artificial Sequence: Synthetic oligonucleotide
  Antisense Strand to SEQ ID NO: 387455
uacuacagucaguauaaga

SEQ ID NO: 387457 - RNA, 19 nt, Artificial Sequence
  Description of Artificial Sequence: Synthetic oligonucleotide
  Sense Strand Starting at position 873 of SEQ ID NO: 317743
gucuaauguccauaaagua

SEQ ID NO: 387458 - RNA, 19 nt, Artificial Sequence
  Description of Artificial Sequence: Synthetic oligonucleotide
  Antisense Strand to SEQ ID NO: 387457
uacuuuauggacauuagac

SEQ ID NO: 387459 - RNA, 19 nt, Artificial Sequence
  Description of Artificial Sequence: Synthetic oligonucleotide
  Sense Strand Starting at position 873 of SEQ ID NO: 318514
gagguaauccuuuagccuu

SEQ ID NO: 387460 - RNA, 19 nt, Artificial Sequence
  Description of Artificial Sequence: Synthetic oligonucleotide
  Antisense Strand to SEQ ID NO: 387459
aaggcuaaaggauuaccuc

SEQ ID NO: 387461 - RNA, 19 nt, Artificial Sequence
  Description of Artificial Sequence: Synthetic oligonucleotide
  Sense Strand Starting at position 873 of SEQ ID NO: 318746
cacgcuauugaggaacaau

SEQ ID NO: 387462 - RNA, 19 nt, Artificial Sequence
  Description of Artificial Sequence: Synthetic oligonucleotide
  Antisense Strand to SEQ ID NO: 387461
auuguuccucaauagcgug

SEQ ID NO: 387463 - RNA, 19 nt, Artificial Sequence
  Description of Artificial Sequence: Synthetic oligonucleotide
  Sense Strand Starting at position 873 of SEQ ID NO: 318822
aggaauuuaucucagauau

SEQ ID NO: 387464 - RNA, 19 nt, Artificial Sequence
  Description of Artificial Sequence: Synthetic oligonucleotide
  Antisense Strand to SEQ ID NO: 387463
auaucugagauaaauuccu

SEQ ID NO: 387465 - RNA, 19 nt, Artificial Sequence
  Description of Artificial Sequence: Synthetic oligonucleotide
  Sense Strand Starting at position 873 of SEQ ID NO: 318833
ucagauauacacuguacau

SEQ ID NO: 387466 - RNA, 19 nt, Artificial Sequence
  Description of Artificial Sequence: Synthetic oligonucleotide
  Antisense Strand to SEQ ID NO: 387465
auguacaguguauaucuga

SEQ ID NO: 387467 - RNA, 19 nt, Artificial Sequence
  Description of Artificial Sequence: Synthetic oligonucleotide
  Sense Strand Starting at position 873 of SEQ ID NO: 318955
cuacauagauacguagaga

SEQ ID NO: 387468 - RNA, 19 nt, Artificial Sequence
  Description of Artificial Sequence: Synthetic oligonucleotide
  Antisense Strand to SEQ ID NO: 387467
ucucuacguaucuauguag

SEQ ID NO: 387469 - RNA, 19 nt, Artificial Sequence
  Description of Artificial Sequence: Synthetic oligonucleotide
  Sense Strand Starting at position 873 of SEQ ID NO: 318979
uggugauauguagauaugu

SEQ ID NO: 387470 - RNA, 19 nt, Artificial Sequence
  Description of Artificial Sequence: Synthetic oligonucleotide
  Antisense Strand to SEQ ID NO: 387469
acauaucuacauaucacca

SEQ ID NO: 387471 - RNA, 19 nt, Artificial Sequence
  Description of Artificial Sequence: Synthetic oligonucleotide
  Sense Strand Starting at position 873 of SEQ ID NO: 318981
gugauauguagauauguag

SEQ ID NO: 387472 - RNA, 19 nt, Artificial Sequence
  Description of Artificial Sequence: Synthetic oligonucleotide
  Antisense Strand to SEQ ID NO: 387471
cuacauaucuacauaucac

SEQ ID NO: 387473 - RNA, 19 nt, Artificial Sequence
  Description of Artificial Sequence: Synthetic oligonucleotide
  Sense Strand Starting at position 873 of SEQ ID NO: 319082
auuuguauuuccuagucca

SEQ ID NO: 387474 - RNA, 19 nt, Artificial Sequence
  Description of Artificial Sequence: Synthetic oligonucleotide
  Antisense Strand to SEQ ID NO: 387473
uggacuaggaaauacaaau

SEQ ID NO: 387475 - RNA, 19 nt, Artificial Sequence
  Description of Artificial Sequence: Synthetic oligonucleotide
  Sense Strand Starting at position 873 of SEQ ID NO: 319135
aauaaacgugauuguauac

SEQ ID NO: 387476 - RNA, 19 nt, Artificial Sequence
  Description of Artificial Sequence: Synthetic oligonucleotide
  Antisense Strand to SEQ ID NO: 387475
guauacaaucacguuuauu

SEQ ID NO: 387477 - RNA, 19 nt, Artificial Sequence
  Description of Artificial Sequence: Synthetic oligonucleotide
  Sense Strand Starting at position 873 of SEQ ID NO: 319144
gauuguauaccuuguaaug

SEQ ID NO: 387478 - RNA, 19 nt, Artificial Sequence
  Description of Artificial Sequence: Synthetic oligonucleotide
  Antisense Strand to SEQ ID NO: 387477
cauuacaagguauacaauc

SEQ ID NO: 387479 - RNA, 19 nt, Artificial Sequence
  Description of Artificial Sequence: Synthetic oligonucleotide
  Sense Strand Starting at position 873 of SEQ ID NO: 319171
gggacucuggaugguagau

SEQ ID NO: 387480 - RNA, 19 nt, Artificial Sequence
  Description of Artificial Sequence: Synthetic oligonucleotide
  Antisense Strand to SEQ ID NO: 387479
aucuaccauccagaguccc

SEQ ID NO: 387481 - RNA, 19 nt, Artificial Sequence
  Description of Artificial Sequence: Synthetic oligonucleotide
  Sense Strand Starting at position 874 of SEQ ID NO: 315634
gcauguguuggccaguaug

SEQ ID NO: 387482 - RNA, 19 nt, Artificial Sequence
  Description of Artificial Sequence: Synthetic oligonucleotide
  Antisense Strand to SEQ ID NO: 387481
cauacuggccaacacaugc

SEQ ID NO: 387483 - RNA, 19 nt, Artificial Sequence
  Description of Artificial Sequence: Synthetic oligonucleotide
  Sense Strand Starting at position 874 of SEQ ID NO: 315748
uggaauuaccacugugaac

SEQ ID NO: 387484 - RNA, 19 nt, Artificial Sequence
  Description of Artificial Sequence: Synthetic oligonucleotide
  Antisense Strand to SEQ ID NO: 387483
guucacagugguaauucca

SEQ ID NO: 387485 - RNA, 19 nt, Artificial Sequence
  Description of Artificial Sequence: Synthetic oligonucleotide
  Sense Strand Starting at position 874 of SEQ ID NO: 315836
caaugcucagaguagcaua

SEQ ID NO: 387486 - RNA, 19 nt, Artificial Sequence
  Description of Artificial Sequence: Synthetic oligonucleotide
  Antisense Strand to SEQ ID NO: 387485
uaugcuacucugagcauug

SEQ ID NO: 387487 - RNA, 19 nt, Artificial Sequence
  Description of Artificial Sequence: Synthetic oligonucleotide
  Sense Strand Starting at position 874 of SEQ ID NO: 315841
cucagaguagcauaauauu

SEQ ID NO: 387488 - RNA, 19 nt, Artificial Sequence
  Description of Artificial Sequence: Synthetic oligonucleotide
  Antisense Strand to SEQ ID NO: 387487
aauauuaugcuacucugag

SEQ ID NO: 387489 - RNA, 19 nt, Artificial Sequence
  Description of Artificial Sequence: Synthetic oligonucleotide
  Sense Strand Starting at position 874 of SEQ ID NO: 316138
ggcaguuauggguaugaag

SEQ ID NO: 387490 - RNA, 19 nt, Artificial Sequence
  Description of Artificial Sequence: Synthetic oligonucleotide
  Antisense Strand to SEQ ID NO: 387489
cuucauacccauaacugcc

SEQ ID NO: 387491 - RNA, 19 nt, Artificial Sequence
  Description of Artificial Sequence: Synthetic oligonucleotide
  Sense Strand Starting at position 874 of SEQ ID NO: 316140
caguuauggguaugaaguu

SEQ ID NO: 387492 - RNA, 19 nt, Artificial Sequence
  Description of Artificial Sequence: Synthetic oligonucleotide
  Antisense Strand to SEQ ID NO: 387491
aacuucauacccauaacug

SEQ ID NO: 387493 - RNA, 19 nt, Artificial Sequence
  Description of Artificial Sequence: Synthetic oligonucleotide
  Sense Strand Starting at position 874 of SEQ ID NO: 316158
uucuguuugggaugauggu

SEQ ID NO: 387494 - RNA, 19 nt, Artificial Sequence
  Description of Artificial Sequence: Synthetic oligonucleotide
  Antisense Strand to SEQ ID NO: 387493
accaucaucccaaacagaa

SEQ ID NO: 387495 - RNA, 19 nt, Artificial Sequence
  Description of Artificial Sequence: Synthetic oligonucleotide
  Sense Strand Starting at position 874 of SEQ ID NO: 316173
ugguuaagugcuggaaaug

SEQ ID NO: 387496 - RNA, 19 nt, Artificial Sequence
  Description of Artificial Sequence: Synthetic oligonucleotide
  Antisense Strand to SEQ ID NO: 387495
cauuuccagcacuuaacca

SEQ ID NO: 387497 - RNA, 19 nt, Artificial Sequence
  Description of Artificial Sequence: Synthetic oligonucleotide
  Sense Strand Starting at position 874 of SEQ ID NO: 316245
uaguaaauuccagguuaug

SEQ ID NO: 387498 - RNA, 19 nt, Artificial Sequence
  Description of Artificial Sequence: Synthetic oligonucleotide
  Antisense Strand to SEQ ID NO: 387497
cauaaccuggaauuuacua

SEQ ID NO: 387499 - RNA, 19 nt, Artificial Sequence
  Description of Artificial Sequence: Synthetic oligonucleotide
  Sense Strand Starting at position 874 of SEQ ID NO: 316325
ccauacuugucacugguga

SEQ ID NO: 387500 - RNA, 19 nt, Artificial Sequence
  Description of Artificial Sequence: Synthetic oligonucleotide
  Antisense Strand to SEQ ID NO: 387499
ucaccagugacaaguaugg

SEQ ID NO: 387501 - RNA, 19 nt, Artificial Sequence
  Description of Artificial Sequence: Synthetic oligonucleotide
  Sense Strand Starting at position 874 of SEQ ID NO: 316330
cuugucacuggugacuaua

SEQ ID NO: 387502 - RNA, 19 nt, Artificial Sequence
  Description of Artificial Sequence: Synthetic oligonucleotide
  Antisense Strand to SEQ ID NO: 387501
uauagucaccagugacaag

SEQ ID NO: 387503 - RNA, 19 nt, Artificial Sequence
  Description of Artificial Sequence: Synthetic oligonucleotide
  Sense Strand Starting at position 874 of SEQ ID NO: 316332
ugucacuggugacuauaaa

SEQ ID NO: 387504 - RNA, 19 nt, Artificial Sequence
  Description of Artificial Sequence: Synthetic oligonucleotide
  Antisense Strand to SEQ ID NO: 387503
uuuauagucaccagugaca

SEQ ID NO: 387505 - RNA, 19 nt, Artificial Sequence
  Description of Artificial Sequence: Synthetic oligonucleotide
  Sense Strand Starting at position 874 of SEQ ID NO: 316362
caugcaugagcguaugaga

SEQ ID NO: 387506 - RNA, 19 nt, Artificial Sequence
  Description of Artificial Sequence: Synthetic oligonucleotide
  Antisense Strand to SEQ ID NO: 387505
ucucauacgcucaugcaug

SEQ ID NO: 387507 - RNA, 19 nt, Artificial Sequence
  Description of Artificial Sequence: Synthetic oligonucleotide
  Sense Strand Starting at position 874 of SEQ ID NO: 316369
gagcguaugagaugcuuaa

SEQ ID NO: 387508 - RNA, 19 nt, Artificial Sequence
  Description of Artificial Sequence: Synthetic oligonucleotide
  Antisense Strand to SEQ ID NO: 387507
uuaagcaucucauacgcuc

SEQ ID NO: 387509 - RNA, 19 nt, Artificial Sequence
  Description of Artificial Sequence: Synthetic oligonucleotide
  Sense Strand Starting at position 874 of SEQ ID NO: 316373
guaugagaugcuuaaguca

SEQ ID NO: 387510 - RNA, 19 nt, Artificial Sequence
  Description of Artificial Sequence: Synthetic oligonucleotide
  Antisense Strand to SEQ ID NO: 387509
ugacuuaagcaucucauac

SEQ ID NO: 387511 - RNA, 19 nt, Artificial Sequence
  Description of Artificial Sequence: Synthetic oligonucleotide
  Sense Strand Starting at position 874 of SEQ ID NO: 316376
ugagaugcuuaagucaauu

SEQ ID NO: 387512 - RNA, 19 nt, Artificial Sequence
  Description of Artificial Sequence: Synthetic oligonucleotide
  Antisense Strand to SEQ ID NO: 387511
aauugacuuaagcaucuca

SEQ ID NO: 387513 - RNA, 19 nt, Artificial Sequence
  Description of Artificial Sequence: Synthetic oligonucleotide
  Sense Strand Starting at position 874 of SEQ ID NO: 316451
ugaagaagcuuggaaagga

SEQ ID NO: 387514 - RNA, 19 nt, Artificial Sequence
  Description of Artificial Sequence: Synthetic oligonucleotide
  Antisense Strand to SEQ ID NO: 387513
uccuuuccaagcuucuuca

SEQ ID NO: 387515 - RNA, 19 nt, Artificial Sequence
  Description of Artificial Sequence: Synthetic oligonucleotide
  Sense Strand Starting at position 874 of SEQ ID NO: 316455
gaagcuuggaaaggaguua

SEQ ID NO: 387516 - RNA, 19 nt, Artificial Sequence
  Description of Artificial Sequence: Synthetic oligonucleotide
  Antisense Strand to SEQ ID NO: 387515
uaacuccuuuccaagcuuc

SEQ ID NO: 387517 - RNA, 19 nt, Artificial Sequence
  Description of Artificial Sequence: Synthetic oligonucleotide
  Sense Strand Starting at position 874 of SEQ ID NO: 316469
aguuaagaggcuuguccaa

SEQ ID NO: 387518 - RNA, 19 nt, Artificial Sequence
  Description of Artificial Sequence: Synthetic oligonucleotide
  Antisense Strand to SEQ ID NO: 387517
uuggacaagccucuuaacu

SEQ ID NO: 387519 - RNA, 19 nt, Artificial Sequence
  Description of Artificial Sequence: Synthetic oligonucleotide
  Sense Strand Starting at position 874 of SEQ ID NO: 316471
uuaagaggcuuguccaaag

SEQ ID NO: 387520 - RNA, 19 nt, Artificial Sequence
  Description of Artificial Sequence: Synthetic oligonucleotide
  Antisense Strand to SEQ ID NO: 387519
cuuuggacaagccucuuaa

SEQ ID NO: 387521 - RNA, 19 nt, Artificial Sequence
  Description of Artificial Sequence: Synthetic oligonucleotide
  Sense Strand Starting at position 874 of SEQ ID NO: 316535
accguaacuccugauauuc

SEQ ID NO: 387522 - RNA, 19 nt, Artificial Sequence
  Description of Artificial Sequence: Synthetic oligonucleotide
  Antisense Strand to SEQ ID NO: 387521
gaauaucaggaguuacggu

SEQ ID NO: 387523 - RNA, 19 nt, Artificial Sequence
  Description of Artificial Sequence: Synthetic oligonucleotide
  Sense Strand Starting at position 874 of SEQ ID NO: 317096
uauaaaucccagugggcaa

SEQ ID NO: 387524 - RNA, 19 nt, Artificial Sequence
  Description of Artificial Sequence: Synthetic oligonucleotide
  Antisense Strand to SEQ ID NO: 387523
uugcccacugggauuuaua

SEQ ID NO: 387525 - RNA, 19 nt, Artificial Sequence
  Description of Artificial Sequence: Synthetic oligonucleotide
  Sense Strand Starting at position 874 of SEQ ID NO: 317139
aucagaugcuaucugugaa

SEQ ID NO: 387526 - RNA, 19 nt, Artificial Sequence
  Description of Artificial Sequence: Synthetic oligonucleotide
  Antisense Strand to SEQ ID NO: 387525
uucacagauagcaucugau

SEQ ID NO: 387527 - RNA, 19 nt, Artificial Sequence
  Description of Artificial Sequence: Synthetic oligonucleotide
  Sense Strand Starting at position 874 of SEQ ID NO: 317389
ccaagaguaagucagcaga

SEQ ID NO: 387528 - RNA, 19 nt, Artificial Sequence
  Description of Artificial Sequence: Synthetic oligonucleotide
  Antisense Strand to SEQ ID NO: 387527
ucugcugacuuacucuugg

SEQ ID NO: 387529 - RNA, 19 nt, Artificial Sequence
  Description of Artificial Sequence: Synthetic oligonucleotide
  Sense Strand Starting at position 874 of SEQ ID NO: 317391
aagaguaagucagcagaaa

SEQ ID NO: 387530 - RNA, 19 nt, Artificial Sequence
  Description of Artificial Sequence: Synthetic oligonucleotide
  Antisense Strand to SEQ ID NO: 387529
uuucugcugacuuacucuu

SEQ ID NO: 387531 - RNA, 19 nt, Artificial Sequence
  Description of Artificial Sequence: Synthetic oligonucleotide
  Sense Strand Starting at position 874 of SEQ ID NO: 317575
auagauauuugacaucuga

SEQ ID NO: 387532 - RNA, 19 nt, Artificial Sequence
  Description of Artificial Sequence: Synthetic oligonucleotide
  Antisense Strand to SEQ ID NO: 387531
ucagaugucaaauaucuau

SEQ ID NO: 387533 - RNA, 19 nt, Artificial Sequence
  Description of Artificial Sequence: Synthetic oligonucleotide
  Sense Strand Starting at position 874 of SEQ ID NO: 317608
uaaggauuacaggguccua

SEQ ID NO: 387534 - RNA, 19 nt, Artificial Sequence
  Description of Artificial Sequence: Synthetic oligonucleotide
  Antisense Strand to SEQ ID NO: 387533
uaggacccuguaauccuua

SEQ ID NO: 387535 - RNA, 19 nt, Artificial Sequence
  Description of Artificial Sequence: Synthetic oligonucleotide
  Sense Strand Starting at position 874 of SEQ ID NO: 317613
auuacaggguccuaagaaa

SEQ ID NO: 387536 - RNA, 19 nt, Artificial Sequence
  Description of Artificial Sequence: Synthetic oligonucleotide
  Antisense Strand to SEQ ID NO: 387535
uuucuuaggacccuguaau

SEQ ID NO: 387537 - RNA, 19 nt, Artificial Sequence
  Description of Artificial Sequence: Synthetic oligonucleotide
  Sense Strand Starting at position 874 of SEQ ID NO: 317633
uuaguuaaccagcacuuga

SEQ ID NO: 387538 - RNA, 19 nt, Artificial Sequence
  Description of Artificial Sequence: Synthetic oligonucleotide
  Antisense Strand to SEQ ID NO: 387537
ucaagugcugguuaacuaa

SEQ ID NO: 387539 - RNA, 19 nt, Artificial Sequence
  Description of Artificial Sequence: Synthetic oligonucleotide
  Sense Strand Starting at position 874 of SEQ ID NO: 318186
gugcuauuucucuggccua

SEQ ID NO: 387540 - RNA, 19 nt, Artificial Sequence
  Description of Artificial Sequence: Synthetic oligonucleotide
  Antisense Strand to SEQ ID NO: 387539
uaggccagagaaauagcac

SEQ ID NO: 387541 - RNA, 19 nt, Artificial Sequence
  Description of Artificial Sequence: Synthetic oligonucleotide
  Sense Strand Starting at position 874 of SEQ ID NO: 318414
gaagaacaugagcgcuaaa

SEQ ID NO: 387542 - RNA, 19 nt, Artificial Sequence
  Description of Artificial Sequence: Synthetic oligonucleotide
  Antisense Strand to SEQ ID NO: 387541
uuuagcgcucauguucuuc

SEQ ID NO: 387543 - RNA, 19 nt, Artificial Sequence
  Description of Artificial Sequence: Synthetic oligonucleotide
  Sense Strand Starting at position 874 of SEQ ID NO: 318417
gaacaugagcgcuaaaguu

SEQ ID NO: 387544 - RNA, 19 nt, Artificial Sequence
  Description of Artificial Sequence: Synthetic oligonucleotide
  Antisense Strand to SEQ ID NO: 387543
aacuuuagcgcucauguuc

SEQ ID NO: 387545 - RNA, 19 nt, Artificial Sequence
  Description of Artificial Sequence: Synthetic oligonucleotide
  Sense Strand Starting at position 874 of SEQ ID NO: 318698
gcuugaguccaagaaucua

SEQ ID NO: 387546 - RNA, 19 nt, Artificial Sequence
  Description of Artificial Sequence: Synthetic oligonucleotide
  Antisense Strand to SEQ ID NO: 387545
uagauucuuggacucaagc

SEQ ID NO: 387547 - RNA, 19 nt, Artificial Sequence
  Description of Artificial Sequence: Synthetic oligonucleotide
  Sense Strand Starting at position 874 of SEQ ID NO: 318889
agaucuaggcaaugaucau

SEQ ID NO: 387548 - RNA, 19 nt, Artificial Sequence
  Description of Artificial Sequence: Synthetic oligonucleotide
  Antisense Strand to SEQ ID NO: 387547
augaucauugccuagaucu

SEQ ID NO: 387549 - RNA, 19 nt, Artificial Sequence
  Description of Artificial Sequence: Synthetic oligonucleotide
  Sense Strand Starting at position 874 of SEQ ID NO: 318969
cgugucugucuuguugaca

SEQ ID NO: 387550 - RNA, 19 nt, Artificial Sequence
  Description of Artificial Sequence: Synthetic oligonucleotide
  Antisense Strand to SEQ ID NO: 387549
ugucaacaagacagacacg

SEQ ID NO: 387551 - RNA, 19 nt, Artificial Sequence
  Description of Artificial Sequence: Synthetic oligonucleotide
  Sense Strand Starting at position 874 of SEQ ID NO: 318972
gucugucuuguugacacua

SEQ ID NO: 387552 - RNA, 19 nt, Artificial Sequence
  Description of Artificial Sequence: Synthetic oligonucleotide
  Antisense Strand to SEQ ID NO: 387551
uagugucaacaagacagac

SEQ ID NO: 387553 - RNA, 19 nt, Artificial Sequence
  Description of Artificial Sequence: Synthetic oligonucleotide
  Sense Strand Starting at position 874 of SEQ ID NO: 319038
uuaugugucuccucaugaa

SEQ ID NO: 387554 - RNA, 19 nt, Artificial Sequence
  Description of Artificial Sequence: Synthetic oligonucleotide
  Antisense Strand to SEQ ID NO: 387553
uucaugaggagacacauaa

SEQ ID NO: 387555 - RNA, 19 nt, Artificial Sequence
  Description of Artificial Sequence: Synthetic oligonucleotide
  Sense Strand Starting at position 874 of SEQ ID NO: 319057
augcaauagucaguacuua

SEQ ID NO: 387556 - RNA, 19 nt, Artificial Sequence
  Description of Artificial Sequence: Synthetic oligonucleotide
  Antisense Strand to SEQ ID NO: 387555
uaaguacugacuauugcau

SEQ ID NO: 387557 - RNA, 19 nt, Artificial Sequence
  Description of Artificial Sequence: Synthetic oligonucleotide
  Sense Strand Starting at position 874 of SEQ ID NO: 319121
agaucugaucuaugugcua

SEQ ID NO: 387558 - RNA, 19 nt, Artificial Sequence
  Description of Artificial Sequence: Synthetic oligonucleotide
  Antisense Strand to SEQ ID NO: 387557
uagcacauagaucagaucu

SEQ ID NO: 387559 - RNA, 19 nt, Artificial Sequence
  Description of Artificial Sequence: Synthetic oligonucleotide
  Sense Strand Starting at position 874 of SEQ ID NO: 319124
ucugaucuaugugcuaguu

SEQ ID NO: 387560 - RNA, 19 nt, Artificial Sequence
  Description of Artificial Sequence: Synthetic oligonucleotide
  Antisense Strand to SEQ ID NO: 387559
aacuagcacauagaucaga

SEQ ID NO: 387561 - RNA, 19 nt, Artificial Sequence
  Description of Artificial Sequence: Synthetic oligonucleotide
  Sense Strand Starting at position 875 of SEQ ID NO: 315256
uacugaugcgaucauagag

SEQ ID NO: 387562 - RNA, 19 nt, Artificial Sequence
  Description of Artificial Sequence: Synthetic oligonucleotide
  Antisense Strand to SEQ ID NO: 387561
cucuaugaucgcaucagua

SEQ ID NO: 387563 - RNA, 19 nt, Artificial Sequence
  Description of Artificial Sequence: Synthetic oligonucleotide
  Sense Strand Starting at position 875 of SEQ ID NO: 315282
cgcacauacugccuaaaga

SEQ ID NO: 387564 - RNA, 19 nt, Artificial Sequence
  Description of Artificial Sequence: Synthetic oligonucleotide
  Antisense Strand to SEQ ID NO: 387563
ucuuuaggcaguaugugcg

SEQ ID NO: 387565 - RNA, 19 nt, Artificial Sequence
  Description of Artificial Sequence: Synthetic oligonucleotide
  Sense Strand Starting at position 875 of SEQ ID NO: 315326
uucugaugcuuucuggaaa

SEQ ID NO: 387566 - RNA, 19 nt, Artificial Sequence
  Description of Artificial Sequence: Synthetic oligonucleotide
  Antisense Strand to SEQ ID NO: 387565
uuuccagaaagcaucagaa

SEQ ID NO: 387567 - RNA, 19 nt, Artificial Sequence
  Description of Artificial Sequence: Synthetic oligonucleotide
  Sense Strand Starting at position 875 of SEQ ID NO: 315329
ugaugcuuucuggaaaggu

SEQ ID NO: 387568 - RNA, 19 nt, Artificial Sequence
  Description of Artificial Sequence: Synthetic oligonucleotide
  Antisense Strand to SEQ ID NO: 387567
accuuuccagaaagcauca

SEQ ID NO: 387569 - RNA, 19 nt, Artificial Sequence
  Description of Artificial Sequence: Synthetic oligonucleotide
  Sense Strand Starting at position 875 of SEQ ID NO: 315346
guagacaauucugugcaga

SEQ ID NO: 387570 - RNA, 19 nt, Artificial Sequence
  Description of Artificial Sequence: Synthetic oligonucleotide
  Antisense Strand to SEQ ID NO: 387569
ucugcacagaauugucuac

SEQ ID NO: 387571 - RNA, 19 nt, Artificial Sequence
  Description of Artificial Sequence: Synthetic oligonucleotide
  Sense Strand Starting at position 875 of SEQ ID NO: 315347
uagacaauucugugcagaa

SEQ ID NO: 387572 - RNA, 19 nt, Artificial Sequence
  Description of Artificial Sequence: Synthetic oligonucleotide
  Antisense Strand to SEQ ID NO: 387571
uucugcacagaauugucua

SEQ ID NO: 387573 - RNA, 19 nt, Artificial Sequence
  Description of Artificial Sequence: Synthetic oligonucleotide
  Sense Strand Starting at position 875 of SEQ ID NO: 315348
agacaauucugugcagaau

SEQ ID NO: 387574 - RNA, 19 nt, Artificial Sequence
  Description of Artificial Sequence: Synthetic oligonucleotide
  Antisense Strand to SEQ ID NO: 387573
auucugcacagaauugucu

SEQ ID NO: 387575 - RNA, 19 nt, Artificial Sequence
  Description of Artificial Sequence: Synthetic oligonucleotide
  Sense Strand Starting at position 875 of SEQ ID NO: 315349
gacaauucugugcagaauu

SEQ ID NO: 387576 - RNA, 19 nt, Artificial Sequence
  Description of Artificial Sequence: Synthetic oligonucleotide
  Antisense Strand to SEQ ID NO: 387575
aauucugcacagaauuguc

SEQ ID NO: 387577 - RNA, 19 nt, Artificial Sequence
  Description of Artificial Sequence: Synthetic oligonucleotide
  Sense Strand Starting at position 875 of SEQ ID NO: 315395
uuguuuauagcugguuaaa

SEQ ID NO: 387578 - RNA, 19 nt, Artificial Sequence
  Description of Artificial Sequence: Synthetic oligonucleotide
  Antisense Strand to SEQ ID NO: 387577
uuuaaccagcuauaaacaa

SEQ ID NO: 387579 - RNA, 19 nt, Artificial Sequence
  Description of Artificial Sequence: Synthetic oligonucleotide
  Sense Strand Starting at position 875 of SEQ ID NO: 315397
guuuauagcugguuaaagg

SEQ ID NO: 387580 - RNA, 19 nt, Artificial Sequence
  Description of Artificial Sequence: Synthetic oligonucleotide
  Antisense Strand to SEQ ID NO: 387579
ccuuuaaccagcuauaaac

SEQ ID NO: 387581 - RNA, 19 nt, Artificial Sequence
  Description of Artificial Sequence: Synthetic oligonucleotide
  Sense Strand Starting at position 875 of SEQ ID NO: 315614
cucuguggucuuuaguaag

SEQ ID NO: 387582 - RNA, 19 nt, Artificial Sequence
  Description of Artificial Sequence: Synthetic oligonucleotide
  Antisense Strand to SEQ ID NO: 387581
cuuacuaaagaccacagag

SEQ ID NO: 387583 - RNA, 19 nt, Artificial Sequence
  Description of Artificial Sequence: Synthetic oligonucleotide
  Sense Strand Starting at position 875 of SEQ ID NO: 315636
aggauauaauaccuguuua

SEQ ID NO: 387584 - RNA, 19 nt, Artificial Sequence
  Description of Artificial Sequence: Synthetic oligonucleotide
  Antisense Strand to SEQ ID NO: 387583
uaaacagguauuauauccu

SEQ ID NO: 387585 - RNA, 19 nt, Artificial Sequence
  Description of Artificial Sequence: Synthetic oligonucleotide
  Sense Strand Starting at position 875 of SEQ ID NO: 315843
ccaagaagaccuuguuauu

SEQ ID NO: 387586 - RNA, 19 nt, Artificial Sequence
  Description of Artificial Sequence: Synthetic oligonucleotide
  Antisense Strand to SEQ ID NO: 387585
aauaacaaggucuucuugg

SEQ ID NO: 387587 - RNA, 19 nt, Artificial Sequence
  Description of Artificial Sequence: Synthetic oligonucleotide
  Sense Strand Starting at position 875 of SEQ ID NO: 316053
augacauaguucuugucca

SEQ ID NO: 387588 - RNA, 19 nt, Artificial Sequence
  Description of Artificial Sequence: Synthetic oligonucleotide
  Antisense Strand to SEQ ID NO: 387587
uggacaagaacuaugucau

SEQ ID NO: 387589 - RNA, 19 nt, Artificial Sequence
  Description of Artificial Sequence: Synthetic oligonucleotide
  Sense Strand Starting at position 875 of SEQ ID NO: 316058
auaguucuuguccaagaau

SEQ ID NO: 387590 - RNA, 19 nt, Artificial Sequence
  Description of Artificial Sequence: Synthetic oligonucleotide
  Antisense Strand to SEQ ID NO: 387589
auucuuggacaagaacuau

SEQ ID NO: 387591 - RNA, 19 nt, Artificial Sequence
  Description of Artificial Sequence: Synthetic oligonucleotide
  Sense Strand Starting at position 875 of SEQ ID NO: 316061
guucuuguccaagaaucug

SEQ ID NO: 387592 - RNA, 19 nt, Artificial Sequence
  Description of Artificial Sequence: Synthetic oligonucleotide
  Antisense Strand to SEQ ID NO: 387591
cagauucuuggacaagaac

SEQ ID NO: 387593 - RNA, 19 nt, Artificial Sequence
  Description of Artificial Sequence: Synthetic oligonucleotide
  Sense Strand Starting at position 875 of SEQ ID NO: 316067
guccaagaaucuguaguuu

SEQ ID NO: 387594 - RNA, 19 nt, Artificial Sequence
  Description of Artificial Sequence: Synthetic oligonucleotide
  Antisense Strand to SEQ ID NO: 387593
aaacuacagauucuuggac

SEQ ID NO: 387595 - RNA, 19 nt, Artificial Sequence
  Description of Artificial Sequence: Synthetic oligonucleotide
  Sense Strand Starting at position 875 of SEQ ID NO: 316446
aggucaaacuaagaucuaa

SEQ ID NO: 387596 - RNA, 19 nt, Artificial Sequence
  Description of Artificial Sequence: Synthetic oligonucleotide
  Antisense Strand to SEQ ID NO: 387595
uuagaucuuaguuugaccu

SEQ ID NO: 387597 - RNA, 19 nt, Artificial Sequence
  Description of Artificial Sequence: Synthetic oligonucleotide
  Sense Strand Starting at position 875 of SEQ ID NO: 316471
aguuaacuccuggacacuu

SEQ ID NO: 387598 - RNA, 19 nt, Artificial Sequence
  Description of Artificial Sequence: Synthetic oligonucleotide
  Antisense Strand to SEQ ID NO: 387597
aaguguccaggaguuaacu

SEQ ID NO: 387599 - RNA, 19 nt, Artificial Sequence
  Description of Artificial Sequence: Synthetic oligonucleotide
  Sense Strand Starting at position 875 of SEQ ID NO: 316543
gcuggucugcaacaagaaa

SEQ ID NO: 387600 - RNA, 19 nt, Artificial Sequence
  Description of Artificial Sequence: Synthetic oligonucleotide
  Antisense Strand to SEQ ID NO: 387599
uuucuuguugcagaccagc

SEQ ID NO: 387601 - RNA, 19 nt, Artificial Sequence
  Description of Artificial Sequence: Synthetic oligonucleotide
  Sense Strand Starting at position 875 of SEQ ID NO: 316674
cgaccuugagcacacauaa

SEQ ID NO: 387602 - RNA, 19 nt, Artificial Sequence
  Description of Artificial Sequence: Synthetic oligonucleotide
  Antisense Strand to SEQ ID NO: 387601
uuaugugugcucaaggucg

SEQ ID NO: 387603 - RNA, 19 nt, Artificial Sequence
  Description of Artificial Sequence: Synthetic oligonucleotide
  Sense Strand Starting at position 875 of SEQ ID NO: 316698
uacccuaggccucgggaaa

SEQ ID NO: 387604 - RNA, 19 nt, Artificial Sequence
  Description of Artificial Sequence: Synthetic oligonucleotide
  Antisense Strand to SEQ ID NO: 387603
uuucccgaggccuagggua

SEQ ID NO: 387605 - RNA, 19 nt, Artificial Sequence
  Description of Artificial Sequence: Synthetic oligonucleotide
  Sense Strand Starting at position 875 of SEQ ID NO: 316735
ggcucacaacgaggucaua

SEQ ID NO: 387606 - RNA, 19 nt, Artificial Sequence
  Description of Artificial Sequence: Synthetic oligonucleotide
  Antisense Strand to SEQ ID NO: 387605
uaugaccucguugugagcc

SEQ ID NO: 387607 - RNA, 19 nt, Artificial Sequence
  Description of Artificial Sequence: Synthetic oligonucleotide
  Sense Strand Starting at position 875 of SEQ ID NO: 316949
gcuaaagagucuccacaag

SEQ ID NO: 387608 - RNA, 19 nt, Artificial Sequence
  Description of Artificial Sequence: Synthetic oligonucleotide
  Antisense Strand to SEQ ID NO: 387607
cuuguggagacucuuuagc

SEQ ID NO: 387609 - RNA, 19 nt, Artificial Sequence
  Description of Artificial Sequence: Synthetic oligonucleotide
  Sense Strand Starting at position 875 of SEQ ID NO: 317243
aagagugagccuugaggaa

SEQ ID NO: 387610 - RNA, 19 nt, Artificial Sequence
  Description of Artificial Sequence: Synthetic oligonucleotide
  Antisense Strand to SEQ ID NO: 387609
uuccucaaggcucacucuu

SEQ ID NO: 387611 - RNA, 19 nt, Artificial Sequence
  Description of Artificial Sequence: Synthetic oligonucleotide
  Sense Strand Starting at position 875 of SEQ ID NO: 317257
aggaauugccaggguagga

SEQ ID NO: 387612 - RNA, 19 nt, Artificial Sequence
  Description of Artificial Sequence: Synthetic oligonucleotide
  Antisense Strand to SEQ ID NO: 387611
uccuacccuggcaauuccu

SEQ ID NO: 387613 - RNA, 19 nt, Artificial Sequence
  Description of Artificial Sequence: Synthetic oligonucleotide
  Sense Strand Starting at position 875 of SEQ ID NO: 317294
uagggaaggcguggucuua

SEQ ID NO: 387614 - RNA, 19 nt, Artificial Sequence
  Description of Artificial Sequence: Synthetic oligonucleotide
  Antisense Strand to SEQ ID NO: 387613
uaagaccacgccuucccua

SEQ ID NO: 387615 - RNA, 19 nt, Artificial Sequence
  Description of Artificial Sequence: Synthetic oligonucleotide
  Sense Strand Starting at position 875 of SEQ ID NO: 317319
gcgagucuacagggagaaa

SEQ ID NO: 387616 - RNA, 19 nt, Artificial Sequence
  Description of Artificial Sequence: Synthetic oligonucleotide
  Antisense Strand to SEQ ID NO: 387615
uuucucccuguagacucgc

SEQ ID NO: 387617 - RNA, 19 nt, Artificial Sequence
  Description of Artificial Sequence: Synthetic oligonucleotide
  Sense Strand Starting at position 875 of SEQ ID NO: 317415
ccuagaaucugcucagaca

SEQ ID NO: 387618 - RNA, 19 nt, Artificial Sequence
  Description of Artificial Sequence: Synthetic oligonucleotide
  Antisense Strand to SEQ ID NO: 387617
ugucugagcagauucuagg

SEQ ID NO: 387619 - RNA, 19 nt, Artificial Sequence
  Description of Artificial Sequence: Synthetic oligonucleotide
  Sense Strand Starting at position 875 of SEQ ID NO: 317517
uagaguucuggugagauau

SEQ ID NO: 387620 - RNA, 19 nt, Artificial Sequence
  Description of Artificial Sequence: Synthetic oligonucleotide
  Antisense Strand to SEQ ID NO: 387619
auaucucaccagaacucua

SEQ ID NO: 387621 - RNA, 19 nt, Artificial Sequence
  Description of Artificial Sequence: Synthetic oligonucleotide
  Sense Strand Starting at position 875 of SEQ ID NO: 317597
uaucgaguugugcaaucau

SEQ ID NO: 387622 - RNA, 19 nt, Artificial Sequence
  Description of Artificial Sequence: Synthetic oligonucleotide
  Antisense Strand to SEQ ID NO: 387621
augauugcacaacucgaua

SEQ ID NO: 387623 - RNA, 19 nt, Artificial Sequence
  Description of Artificial Sequence: Synthetic oligonucleotide
  Sense Strand Starting at position 875 of SEQ ID NO: 318723
ggucuuugugacugacuuu

SEQ ID NO: 387624 - RNA, 19 nt, Artificial Sequence
  Description of Artificial Sequence: Synthetic oligonucleotide
  Antisense Strand to SEQ ID NO: 387623
aaagucagucacaaagacc

SEQ ID NO: 387625 - RNA, 19 nt, Artificial Sequence
  Description of Artificial Sequence: Synthetic oligonucleotide
  Sense Strand Starting at position 875 of SEQ ID NO: 318760
ugaggauuaucccuauugu

SEQ ID NO: 387626 - RNA, 19 nt, Artificial Sequence
  Description of Artificial Sequence: Synthetic oligonucleotide
  Antisense Strand to SEQ ID NO: 387625
acaauagggauaauccuca

SEQ ID NO: 387627 - RNA, 19 nt, Artificial Sequence
  Description of Artificial Sequence: Synthetic oligonucleotide
  Sense Strand Starting at position 875 of SEQ ID NO: 318878
ugaauaauguuccuauguu

SEQ ID NO: 387628 - RNA, 19 nt, Artificial Sequence
  Description of Artificial Sequence: Synthetic oligonucleotide
  Antisense Strand to SEQ ID NO: 387627
aacauaggaacauuauuca

SEQ ID NO: 387629 - RNA, 19 nt, Artificial Sequence
  Description of Artificial Sequence: Synthetic oligonucleotide
  Sense Strand Starting at position 875 of SEQ ID NO: 318898
auagcauuagucuauaagu

SEQ ID NO: 387630 - RNA, 19 nt, Artificial Sequence
  Description of Artificial Sequence: Synthetic oligonucleotide
  Antisense Strand to SEQ ID NO: 387629
acuuauagacuaaugcuau

SEQ ID NO: 387631 - RNA, 19 nt, Artificial Sequence
  Description of Artificial Sequence: Synthetic oligonucleotide
  Sense Strand Starting at position 875 of SEQ ID NO: 318900
agcauuagucuauaagucu

SEQ ID NO: 387632 - RNA, 19 nt, Artificial Sequence
  Description of Artificial Sequence: Synthetic oligonucleotide
  Antisense Strand to SEQ ID NO: 387631
agacuuauagacuaaugcu

SEQ ID NO: 387633 - RNA, 19 nt, Artificial Sequence
  Description of Artificial Sequence: Synthetic oligonucleotide
  Sense Strand Starting at position 875 of SEQ ID NO: 318937
ucauuucuguuggauagau

SEQ ID NO: 387634 - RNA, 19 nt, Artificial Sequence
  Description of Artificial Sequence: Synthetic oligonucleotide
  Antisense Strand to SEQ ID NO: 387633
aucuauccaacagaaauga

SEQ ID NO: 387635 - RNA, 19 nt, Artificial Sequence
  Description of Artificial Sequence: Synthetic oligonucleotide
  Sense Strand Starting at position 875 of SEQ ID NO: 318963
aacgaaauugugggcucau

SEQ ID NO: 387636 - RNA, 19 nt, Artificial Sequence
  Description of Artificial Sequence: Synthetic oligonucleotide
  Antisense Strand to SEQ ID NO: 387635
augagcccacaauuucguu

SEQ ID NO: 387637 - RNA, 19 nt, Artificial Sequence
  Description of Artificial Sequence: Synthetic oligonucleotide
  Sense Strand Starting at position 875 of SEQ ID NO: 318964
acgaaauugugggcucaua

SEQ ID NO: 387638 - RNA, 19 nt, Artificial Sequence
  Description of Artificial Sequence: Synthetic oligonucleotide
  Antisense Strand to SEQ ID NO: 387637
uaugagcccacaauuucgu

SEQ ID NO: 387639 - RNA, 19 nt, Artificial Sequence
  Description of Artificial Sequence: Synthetic oligonucleotide
  Sense Strand Starting at position 875 of SEQ ID NO: 319060
gcaauauaugagggcucua

SEQ ID NO: 387640 - RNA, 19 nt, Artificial Sequence
  Description of Artificial Sequence: Synthetic oligonucleotide
  Antisense Strand to SEQ ID NO: 387639
uagagcccucauauauugc

SEQ ID NO: 387641 - RNA, 19 nt, Artificial Sequence
  Description of Artificial Sequence: Synthetic oligonucleotide
  Sense Strand Starting at position 876 of SEQ ID NO: 315271
gagaaugccucacugggua

SEQ ID NO: 387642 - RNA, 19 nt, Artificial Sequence
  Description of Artificial Sequence: Synthetic oligonucleotide
  Antisense Strand to SEQ ID NO: 387641
uacccagugaggcauucuc

SEQ ID NO: 387643 - RNA, 19 nt, Artificial Sequence
  Description of Artificial Sequence: Synthetic oligonucleotide
  Sense Strand Starting at position 876 of SEQ ID NO: 315358
gcuaacauguuauuauaag

SEQ ID NO: 387644 - RNA, 19 nt, Artificial Sequence
  Description of Artificial Sequence: Synthetic oligonucleotide
  Antisense Strand to SEQ ID NO: 387643
cuuauaauaacauguuagc

SEQ ID NO: 387645 - RNA, 19 nt, Artificial Sequence
  Description of Artificial Sequence: Synthetic oligonucleotide
  Sense Strand Starting at position 876 of SEQ ID NO: 315510
caggcuuaccgacagauga

SEQ ID NO: 387646 - RNA, 19 nt, Artificial Sequence
  Description of Artificial Sequence: Synthetic oligonucleotide
  Antisense Strand to SEQ ID NO: 387645
ucaucugucgguaagccug

SEQ ID NO: 387647 - RNA, 19 nt, Artificial Sequence
  Description of Artificial Sequence: Synthetic oligonucleotide
  Sense Strand Starting at position 876 of SEQ ID NO: 315945
aggauuccagucuggguua

SEQ ID NO: 387648 - RNA, 19 nt, Artificial Sequence
  Description of Artificial Sequence: Synthetic oligonucleotide
  Antisense Strand to SEQ ID NO: 387647
uaacccagacuggaauccu

SEQ ID NO: 387649 - RNA, 19 nt, Artificial Sequence
  Description of Artificial Sequence: Synthetic oligonucleotide
  Sense Strand Starting at position 876 of SEQ ID NO: 316042
ggacaucugcucuauacag

SEQ ID NO: 387650 - RNA, 19 nt, Artificial Sequence
  Description of Artificial Sequence: Synthetic oligonucleotide
  Antisense Strand to SEQ ID NO: 387649
cuguauagagcagaugucc

SEQ ID NO: 387651 - RNA, 19 nt, Artificial Sequence
  Description of Artificial Sequence: Synthetic oligonucleotide
  Sense Strand Starting at position 876 of SEQ ID NO: 316375
gaauuaaauguccagcgga

SEQ ID NO: 387652 - RNA, 19 nt, Artificial Sequence
  Description of Artificial Sequence: Synthetic oligonucleotide
  Antisense Strand to SEQ ID NO: 387651
uccgcuggacauuuaauuc

SEQ ID NO: 387653 - RNA, 19 nt, Artificial Sequence
  Description of Artificial Sequence: Synthetic oligonucleotide
  Sense Strand Starting at position 876 of SEQ ID NO: 316496
caaaguagagcagguuaau

SEQ ID NO: 387654 - RNA, 19 nt, Artificial Sequence
  Description of Artificial Sequence: Synthetic oligonucleotide
  Antisense Strand to SEQ ID NO: 387653
auuaaccugcucuacuuug

SEQ ID NO: 387655 - RNA, 19 nt, Artificial Sequence
  Description of Artificial Sequence: Synthetic oligonucleotide
  Sense Strand Starting at position 876 of SEQ ID NO: 316529
gagggaucagugggucagu

SEQ ID NO: 387656 - RNA, 19 nt, Artificial Sequence
  Description of Artificial Sequence: Synthetic oligonucleotide
  Antisense Strand to SEQ ID NO: 387655
acugacccacugaucccuc

SEQ ID NO: 387657 - RNA, 19 nt, Artificial Sequence
  Description of Artificial Sequence: Synthetic oligonucleotide
  Sense Strand Starting at position 876 of SEQ ID NO: 316576
uuggcaucugagggaaguu

SEQ ID NO: 387658 - RNA, 19 nt, Artificial Sequence
  Description of Artificial Sequence: Synthetic oligonucleotide
  Antisense Strand to SEQ ID NO: 387657
aacuucccucagaugccaa

SEQ ID NO: 387659 - RNA, 19 nt, Artificial Sequence
  Description of Artificial Sequence: Synthetic oligonucleotide
  Sense Strand Starting at position 876 of SEQ ID NO: 316577
uggcaucugagggaaguuu

SEQ ID NO: 387660 - RNA, 19 nt, Artificial Sequence
  Description of Artificial Sequence: Synthetic oligonucleotide
  Antisense Strand to SEQ ID NO: 387659
aaacuucccucagaugcca

SEQ ID NO: 387661 - RNA, 19 nt, Artificial Sequence
  Description of Artificial Sequence: Synthetic oligonucleotide
  Sense Strand Starting at position 876 of SEQ ID NO: 316885
ucggauaaccagggaaagu

SEQ ID NO: 387662 - RNA, 19 nt, Artificial Sequence
  Description of Artificial Sequence: Synthetic oligonucleotide
  Antisense Strand to SEQ ID NO: 387661
acuuucccugguuauccga

SEQ ID NO: 387663 - RNA, 19 nt, Artificial Sequence
  Description of Artificial Sequence: Synthetic oligonucleotide
  Sense Strand Starting at position 876 of SEQ ID NO: 317017
aaguuaguacugcauaagu

SEQ ID NO: 387664 - RNA, 19 nt, Artificial Sequence
  Description of Artificial Sequence: Synthetic oligonucleotide
  Antisense Strand to SEQ ID NO: 387663
acuuaugcaguacuaacuu

SEQ ID NO: 387665 - RNA, 19 nt, Artificial Sequence
  Description of Artificial Sequence: Synthetic oligonucleotide
  Sense Strand Starting at position 876 of SEQ ID NO: 317027
ugcauaaguaguuggagaa

SEQ ID NO: 387666 - RNA, 19 nt, Artificial Sequence
  Description of Artificial Sequence: Synthetic oligonucleotide
  Antisense Strand to SEQ ID NO: 387665
uucuccaacuacuuaugca

SEQ ID NO: 387667 - RNA, 19 nt, Artificial Sequence
  Description of Artificial Sequence: Synthetic oligonucleotide
  Sense Strand Starting at position 876 of SEQ ID NO: 317028
gcauaaguaguuggagaaa

SEQ ID NO: 387668 - RNA, 19 nt, Artificial Sequence
  Description of Artificial Sequence: Synthetic oligonucleotide
  Antisense Strand to SEQ ID NO: 387667
uuucuccaacuacuuaugc

SEQ ID NO: 387669 - RNA, 19 nt, Artificial Sequence
  Description of Artificial Sequence: Synthetic oligonucleotide
  Sense Strand Starting at position 876 of SEQ ID NO: 317388
accagagugcauugaaaca

SEQ ID NO: 387670 - RNA, 19 nt, Artificial Sequence
  Description of Artificial Sequence: Synthetic oligonucleotide
  Antisense Strand to SEQ ID NO: 387669
uguuucaaugcacucuggu

SEQ ID NO: 387671 - RNA, 19 nt, Artificial Sequence
  Description of Artificial Sequence: Synthetic oligonucleotide
  Sense Strand Starting at position 876 of SEQ ID NO: 317459
cccacuucccgugauagga

SEQ ID NO: 387672 - RNA, 19 nt, Artificial Sequence
  Description of Artificial Sequence: Synthetic oligonucleotide
  Antisense Strand to SEQ ID NO: 387671
uccuaucacgggaaguggg

SEQ ID NO: 387673 - RNA, 19 nt, Artificial Sequence
  Description of Artificial Sequence: Synthetic oligonucleotide
  Sense Strand Starting at position 876 of SEQ ID NO: 317482
aguaauaaccaaggcagaa

SEQ ID NO: 387674 - RNA, 19 nt, Artificial Sequence
  Description of Artificial Sequence: Synthetic oligonucleotide
  Antisense Strand to SEQ ID NO: 387673
uucugccuugguuauuacu

SEQ ID NO: 387675 - RNA, 19 nt, Artificial Sequence
  Description of Artificial Sequence: Synthetic oligonucleotide
  Sense Strand Starting at position 876 of SEQ ID NO: 317538
guuggaauuaucuguggac

SEQ ID NO: 387676 - RNA, 19 nt, Artificial Sequence
  Description of Artificial Sequence: Synthetic oligonucleotide
  Antisense Strand to SEQ ID NO: 387675
guccacagauaauuccaac

SEQ ID NO: 387677 - RNA, 19 nt, Artificial Sequence
  Description of Artificial Sequence: Synthetic oligonucleotide
  Sense Strand Starting at position 876 of SEQ ID NO: 317539
uuggaauuaucuguggaca

SEQ ID NO: 387678 - RNA, 19 nt, Artificial Sequence
  Description of Artificial Sequence: Synthetic oligonucleotide
  Antisense Strand to SEQ ID NO: 387677
uguccacagauaauuccaa

SEQ ID NO: 387679 - RNA, 19 nt, Artificial Sequence
  Description of Artificial Sequence: Synthetic oligonucleotide
  Sense Strand Starting at position 876 of SEQ ID NO: 317540
uggaauuaucuguggacau

SEQ ID NO: 387680 - RNA, 19 nt, Artificial Sequence
  Description of Artificial Sequence: Synthetic oligonucleotide
  Antisense Strand to SEQ ID NO: 387679
auguccacagauaauucca

SEQ ID NO: 387681 - RNA, 19 nt, Artificial Sequence
  Description of Artificial Sequence: Synthetic oligonucleotide
  Sense Strand Starting at position 876 of SEQ ID NO: 317542
gaauuaucuguggacaugu

SEQ ID NO: 387682 - RNA, 19 nt, Artificial Sequence
  Description of Artificial Sequence: Synthetic oligonucleotide
  Antisense Strand to SEQ ID NO: 387681
acauguccacagauaauuc

SEQ ID NO: 387683 - RNA, 19 nt, Artificial Sequence
  Description of Artificial Sequence: Synthetic oligonucleotide
  Sense Strand Starting at position 876 of SEQ ID NO: 317560
ugugucucccuagaagauu

SEQ ID NO: 387684 - RNA, 19 nt, Artificial Sequence
  Description of Artificial Sequence: Synthetic oligonucleotide
  Antisense Strand to SEQ ID NO: 387683
aaucuucuagggagacaca

SEQ ID NO: 387685 - RNA, 19 nt, Artificial Sequence
  Description of Artificial Sequence: Synthetic oligonucleotide
  Sense Strand Starting at position 876 of SEQ ID NO: 317571
agaagauucugagugacuu

SEQ ID NO: 387686 - RNA, 19 nt, Artificial Sequence
  Description of Artificial Sequence: Synthetic oligonucleotide
  Antisense Strand to SEQ ID NO: 387685
aagucacucagaaucuucu

SEQ ID NO: 387687 - RNA, 19 nt, Artificial Sequence
  Description of Artificial Sequence: Synthetic oligonucleotide
  Sense Strand Starting at position 876 of SEQ ID NO: 317572
gaagauucugagugacuug

SEQ ID NO: 387688 - RNA, 19 nt, Artificial Sequence
  Description of Artificial Sequence: Synthetic oligonucleotide
  Antisense Strand to SEQ ID NO: 387687
caagucacucagaaucuuc

SEQ ID NO: 387689 - RNA, 19 nt, Artificial Sequence
  Description of Artificial Sequence: Synthetic oligonucleotide
  Sense Strand Starting at position 876 of SEQ ID NO: 317575
gauucugagugacuugaga

SEQ ID NO: 387690 - RNA, 19 nt, Artificial Sequence
  Description of Artificial Sequence: Synthetic oligonucleotide
  Antisense Strand to SEQ ID NO: 387689
ucucaagucacucagaauc

SEQ ID NO: 387691 - RNA, 19 nt, Artificial Sequence
  Description of Artificial Sequence: Synthetic oligonucleotide
  Sense Strand Starting at position 876 of SEQ ID NO: 317632
cuagcacaagacugagaua

SEQ ID NO: 387692 - RNA, 19 nt, Artificial Sequence
  Description of Artificial Sequence: Synthetic oligonucleotide
  Antisense Strand to SEQ ID NO: 387691
uaucucagucuugugcuag

SEQ ID NO: 387693 - RNA, 19 nt, Artificial Sequence
  Description of Artificial Sequence: Synthetic oligonucleotide
  Sense Strand Starting at position 876 of SEQ ID NO: 317695
aaguuuccucuggagagua

SEQ ID NO: 387694 - RNA, 19 nt, Artificial Sequence
  Description of Artificial Sequence: Synthetic oligonucleotide
  Antisense Strand to SEQ ID NO: 387693
uacucuccagaggaaacuu

SEQ ID NO: 387695 - RNA, 19 nt, Artificial Sequence
  Description of Artificial Sequence: Synthetic oligonucleotide
  Sense Strand Starting at position 876 of SEQ ID NO: 317697
guuuccucuggagaguacu

SEQ ID NO: 387696 - RNA, 19 nt, Artificial Sequence
  Description of Artificial Sequence: Synthetic oligonucleotide
  Antisense Strand to SEQ ID NO: 387695
aguacucuccagaggaaac

SEQ ID NO: 387697 - RNA, 19 nt, Artificial Sequence
  Description of Artificial Sequence: Synthetic oligonucleotide
  Sense Strand Starting at position 876 of SEQ ID NO: 317740
aggagucaaguccaacuuu

SEQ ID NO: 387698 - RNA, 19 nt, Artificial Sequence
  Description of Artificial Sequence: Synthetic oligonucleotide
  Antisense Strand to SEQ ID NO: 387697
aaaguuggacuugacuccu

SEQ ID NO: 387699 - RNA, 19 nt, Artificial Sequence
  Description of Artificial Sequence: Synthetic oligonucleotide
  Sense Strand Starting at position 876 of SEQ ID NO: 317821
agagaucccguugguggaa

SEQ ID NO: 387700 - RNA, 19 nt, Artificial Sequence
  Description of Artificial Sequence: Synthetic oligonucleotide
  Antisense Strand to SEQ ID NO: 387699
uuccaccaacgggaucucu

SEQ ID NO: 387701 - RNA, 19 nt, Artificial Sequence
  Description of Artificial Sequence: Synthetic oligonucleotide
  Sense Strand Starting at position 876 of SEQ ID NO: 317920
gagcuauuucuaggcaagu

SEQ ID NO: 387702 - RNA, 19 nt, Artificial Sequence
  Description of Artificial Sequence: Synthetic oligonucleotide
  Antisense Strand to SEQ ID NO: 387701
acuugccuagaaauagcuc

SEQ ID NO: 387703 - RNA, 19 nt, Artificial Sequence
  Description of Artificial Sequence: Synthetic oligonucleotide
  Sense Strand Starting at position 876 of SEQ ID NO: 317921
agcuauuucuaggcaaguc

SEQ ID NO: 387704 - RNA, 19 nt, Artificial Sequence
  Description of Artificial Sequence: Synthetic oligonucleotide
  Antisense Strand to SEQ ID NO: 387703
gacuugccuagaaauagcu

SEQ ID NO: 387705 - RNA, 19 nt, Artificial Sequence
  Description of Artificial Sequence: Synthetic oligonucleotide
  Sense Strand Starting at position 876 of SEQ ID NO: 318047
acaauaacucucugaggug

SEQ ID NO: 387706 - RNA, 19 nt, Artificial Sequence
  Description of Artificial Sequence: Synthetic oligonucleotide
  Antisense Strand to SEQ ID NO: 387705
caccucagagaguuauugu

SEQ ID NO: 387707 - RNA, 19 nt, Artificial Sequence
  Description of Artificial Sequence: Synthetic oligonucleotide
  Sense Strand Starting at position 876 of SEQ ID NO: 318056
cucugaggugaguauuauc

SEQ ID NO: 387708 - RNA, 19 nt, Artificial Sequence
  Description of Artificial Sequence: Synthetic oligonucleotide
  Antisense Strand to SEQ ID NO: 387707
gauaauacucaccucagag

SEQ ID NO: 387709 - RNA, 19 nt, Artificial Sequence
  Description of Artificial Sequence: Synthetic oligonucleotide
  Sense Strand Starting at position 876 of SEQ ID NO: 318061
aggugaguauuaucacaga

SEQ ID NO: 387710 - RNA, 19 nt, Artificial Sequence
  Description of Artificial Sequence: Synthetic oligonucleotide
  Antisense Strand to SEQ ID NO: 387709
ucugugauaauacucaccu

SEQ ID NO: 387711 - RNA, 19 nt, Artificial Sequence
  Description of Artificial Sequence: Synthetic oligonucleotide
  Sense Strand Starting at position 876 of SEQ ID NO: 318183
auuacuucucugugauaga

SEQ ID NO: 387712 - RNA, 19 nt, Artificial Sequence
  Description of Artificial Sequence: Synthetic oligonucleotide
  Antisense Strand to SEQ ID NO: 387711
ucuaucacagagaaguaau

SEQ ID NO: 387713 - RNA, 19 nt, Artificial Sequence
  Description of Artificial Sequence: Synthetic oligonucleotide
  Sense Strand Starting at position 876 of SEQ ID NO: 318525
gaaagcugucuugauauua

SEQ ID NO: 387714 - RNA, 19 nt, Artificial Sequence
  Description of Artificial Sequence: Synthetic oligonucleotide
  Antisense Strand to SEQ ID NO: 387713
uaauaucaagacagcuuuc

SEQ ID NO: 387715 - RNA, 19 nt, Artificial Sequence
  Description of Artificial Sequence: Synthetic oligonucleotide
  Sense Strand Starting at position 876 of SEQ ID NO: 318870
uagucauuagcugagguca

SEQ ID NO: 387716 - RNA, 19 nt, Artificial Sequence
  Description of Artificial Sequence: Synthetic oligonucleotide
  Antisense Strand to SEQ ID NO: 387715
ugaccucagcuaaugacua

SEQ ID NO: 387717 - RNA, 19 nt, Artificial Sequence
  Description of Artificial Sequence: Synthetic oligonucleotide
  Sense Strand Starting at position 876 of SEQ ID NO: 319030
ugugcauggcaugaauaca

SEQ ID NO: 387718 - RNA, 19 nt, Artificial Sequence
  Description of Artificial Sequence: Synthetic oligonucleotide
  Antisense Strand to SEQ ID NO: 387717
uguauucaugccaugcaca

SEQ ID NO: 387719 - RNA, 19 nt, Artificial Sequence
  Description of Artificial Sequence: Synthetic oligonucleotide
  Sense Strand Starting at position 876 of SEQ ID NO: 319045
uacagcugacauugagaga

SEQ ID NO: 387720 - RNA, 19 nt, Artificial Sequence
  Description of Artificial Sequence: Synthetic oligonucleotide
  Antisense Strand to SEQ ID NO: 387719
ucucucaaugucagcugua

SEQ ID NO: 387721 - RNA, 19 nt, Artificial Sequence
  Description of Artificial Sequence: Synthetic oligonucleotide
  Sense Strand Starting at position 877 of SEQ ID NO: 315282
caugcuguuccaggaauag

SEQ ID NO: 387722 - RNA, 19 nt, Artificial Sequence
  Description of Artificial Sequence: Synthetic oligonucleotide
  Antisense Strand to SEQ ID NO: 387721
cuauuccuggaacagcaug

SEQ ID NO: 387723 - RNA, 19 nt, Artificial Sequence
  Description of Artificial Sequence: Synthetic oligonucleotide
  Sense Strand Starting at position 877 of SEQ ID NO: 315329
cuaugagaauauccgaagu

SEQ ID NO: 387724 - RNA, 19 nt, Artificial Sequence
  Description of Artificial Sequence: Synthetic oligonucleotide
  Antisense Strand to SEQ ID NO: 387723
acuucggauauucucauag

SEQ ID NO: 387725 - RNA, 19 nt, Artificial Sequence
  Description of Artificial Sequence: Synthetic oligonucleotide
  Sense Strand Starting at position 877 of SEQ ID NO: 315500
ggccaauucuuugcaaaga

SEQ ID NO: 387726 - RNA, 19 nt, Artificial Sequence
  Description of Artificial Sequence: Synthetic oligonucleotide
  Antisense Strand to SEQ ID NO: 387725
ucuuugcaaagaauuggcc

SEQ ID NO: 387727 - RNA, 19 nt, Artificial Sequence
  Description of Artificial Sequence: Synthetic oligonucleotide
  Sense Strand Starting at position 877 of SEQ ID NO: 315594
ugcucaucucaacggauga

SEQ ID NO: 387728 - RNA, 19 nt, Artificial Sequence
  Description of Artificial Sequence: Synthetic oligonucleotide
  Antisense Strand to SEQ ID NO: 387727
ucauccguugagaugagca

SEQ ID NO: 387729 - RNA, 19 nt, Artificial Sequence
  Description of Artificial Sequence: Synthetic oligonucleotide
  Sense Strand Starting at position 877 of SEQ ID NO: 315711
uuagaaguauuccauuuag

SEQ ID NO: 387730 - RNA, 19 nt, Artificial Sequence
  Description of Artificial Sequence: Synthetic oligonucleotide
  Antisense Strand to SEQ ID NO: 387729
cuaaauggaauacuucuaa

SEQ ID NO: 387731 - RNA, 19 nt, Artificial Sequence
  Description of Artificial Sequence: Synthetic oligonucleotide
  Sense Strand Starting at position 877 of SEQ ID NO: 315742
auaagaaaugucugcuauc

SEQ ID NO: 387732 - RNA, 19 nt, Artificial Sequence
  Description of Artificial Sequence: Synthetic oligonucleotide
  Antisense Strand to SEQ ID NO: 387731
gauagcagacauuucuuau

SEQ ID NO: 387733 - RNA, 19 nt, Artificial Sequence
  Description of Artificial Sequence: Synthetic oligonucleotide
  Sense Strand Starting at position 877 of SEQ ID NO: 315770
auuaaauauugugcuagag

SEQ ID NO: 387734 - RNA, 19 nt, Artificial Sequence
  Description of Artificial Sequence: Synthetic oligonucleotide
  Antisense Strand to SEQ ID NO: 387733
cucuagcacaauauuuaau

SEQ ID NO: 387735 - RNA, 19 nt, Artificial Sequence
  Description of Artificial Sequence: Synthetic oligonucleotide
  Sense Strand Starting at position 877 of SEQ ID NO: 315873
auuugaagcugauaaauag

SEQ ID NO: 387736 - RNA, 19 nt, Artificial Sequence
  Description of Artificial Sequence: Synthetic oligonucleotide
  Antisense Strand to SEQ ID NO: 387735
cuauuuaucagcuucaaau

SEQ ID NO: 387737 - RNA, 19 nt, Artificial Sequence
  Description of Artificial Sequence: Synthetic oligonucleotide
  Sense Strand Starting at position 877 of SEQ ID NO: 316012
gaaauacuggcuugucuga

SEQ ID NO: 387738 - RNA, 19 nt, Artificial Sequence
  Description of Artificial Sequence: Synthetic oligonucleotide
  Antisense Strand to SEQ ID NO: 387737
ucagacaagccaguauuuc

SEQ ID NO: 387739 - RNA, 19 nt, Artificial Sequence
  Description of Artificial Sequence: Synthetic oligonucleotide
  Sense Strand Starting at position 877 of SEQ ID NO: 316056
auucuugagucuuugacac

SEQ ID NO: 387740 - RNA, 19 nt, Artificial Sequence
  Description of Artificial Sequence: Synthetic oligonucleotide
  Antisense Strand to SEQ ID NO: 387739
gugucaaagacucaagaau

SEQ ID NO: 387741 - RNA, 19 nt, Artificial Sequence
  Description of Artificial Sequence: Synthetic oligonucleotide
  Sense Strand Starting at position 877 of SEQ ID NO: 316063
agucuuugacacugaagaa

SEQ ID NO: 387742 - RNA, 19 nt, Artificial Sequence
  Description of Artificial Sequence: Synthetic oligonucleotide
  Antisense Strand to SEQ ID NO: 387741
uucuucagugucaaagacu

SEQ ID NO: 387743 - RNA, 19 nt, Artificial Sequence
  Description of Artificial Sequence: Synthetic oligonucleotide
  Sense Strand Starting at position 877 of SEQ ID NO: 316082
guguuagagaagggugagu

SEQ ID NO: 387744 - RNA, 19 nt, Artificial Sequence
  Description of Artificial Sequence: Synthetic oligonucleotide
  Antisense Strand to SEQ ID NO: 387743
acucacccuucucuaacac

SEQ ID NO: 387745 - RNA, 19 nt, Artificial Sequence
  Description of Artificial Sequence: Synthetic oligonucleotide
  Sense Strand Starting at position 877 of SEQ ID NO: 316084
guuagagaagggugaguaa

SEQ ID NO: 387746 - RNA, 19 nt, Artificial Sequence
  Description of Artificial Sequence: Synthetic oligonucleotide
  Antisense Strand to SEQ ID NO: 387745
uuacucacccuucucuaac

SEQ ID NO: 387747 - RNA, 19 nt, Artificial Sequence
  Description of Artificial Sequence: Synthetic oligonucleotide
  Sense Strand Starting at position 877 of SEQ ID NO: 316096
ugaguaaggccugguaaca

SEQ ID NO: 387748 - RNA, 19 nt, Artificial Sequence
  Description of Artificial Sequence: Synthetic oligonucleotide
  Antisense Strand to SEQ ID NO: 387747
uguuaccaggccuuacuca

SEQ ID NO: 387749 - RNA, 19 nt, Artificial Sequence
  Description of Artificial Sequence: Synthetic oligonucleotide
  Sense Strand Starting at position 877 of SEQ ID NO: 316214
cugcaaaugcuggaaaugu

SEQ ID NO: 387750 - RNA, 19 nt, Artificial Sequence
  Description of Artificial Sequence: Synthetic oligonucleotide
  Antisense Strand to SEQ ID NO: 387749
acauuuccagcauuugcag

SEQ ID NO: 387751 - RNA, 19 nt, Artificial Sequence
  Description of Artificial Sequence: Synthetic oligonucleotide
  Sense Strand Starting at position 877 of SEQ ID NO: 316259
gucucagguguguucugua

SEQ ID NO: 387752 - RNA, 19 nt, Artificial Sequence
  Description of Artificial Sequence: Synthetic oligonucleotide
  Antisense Strand to SEQ ID NO: 387751
uacagaacacaccugagac

SEQ ID NO: 387753 - RNA, 19 nt, Artificial Sequence
  Description of Artificial Sequence: Synthetic oligonucleotide
  Sense Strand Starting at position 877 of SEQ ID NO: 316267
uguguucuguagaucggua

SEQ ID NO: 387754 - RNA, 19 nt, Artificial Sequence
  Description of Artificial Sequence: Synthetic oligonucleotide
  Antisense Strand to SEQ ID NO: 387753
uaccgaucuacagaacaca

SEQ ID NO: 387755 - RNA, 19 nt, Artificial Sequence
  Description of Artificial Sequence: Synthetic oligonucleotide
  Sense Strand Starting at position 877 of SEQ ID NO: 316365
ggguguucuggcagugaca

SEQ ID NO: 387756 - RNA, 19 nt, Artificial Sequence
  Description of Artificial Sequence: Synthetic oligonucleotide
  Antisense Strand to SEQ ID NO: 387755
ugucacugccagaacaccc

SEQ ID NO: 387757 - RNA, 19 nt, Artificial Sequence
  Description of Artificial Sequence: Synthetic oligonucleotide
  Sense Strand Starting at position 877 of SEQ ID NO: 316378
gugacagaguuggcacaaa

SEQ ID NO: 387758 - RNA, 19 nt, Artificial Sequence
  Description of Artificial Sequence: Synthetic oligonucleotide
  Antisense Strand to SEQ ID NO: 387757
uuugugccaacucugucac

SEQ ID NO: 387759 - RNA, 19 nt, Artificial Sequence
  Description of Artificial Sequence: Synthetic oligonucleotide
  Sense Strand Starting at position 877 of SEQ ID NO: 316402
aucagacacuuuguuauca

SEQ ID NO: 387760 - RNA, 19 nt, Artificial Sequence
  Description of Artificial Sequence: Synthetic oligonucleotide
  Antisense Strand to SEQ ID NO: 387759
ugauaacaaagugucugau

SEQ ID NO: 387761 - RNA, 19 nt, Artificial Sequence
  Description of Artificial Sequence: Synthetic oligonucleotide
  Sense Strand Starting at position 877 of SEQ ID NO: 316411
uuuguuaucaaauguggag

SEQ ID NO: 387762 - RNA, 19 nt, Artificial Sequence
  Description of Artificial Sequence: Synthetic oligonucleotide
  Antisense Strand to SEQ ID NO: 387761
cuccacauuugauaacaaa

SEQ ID NO: 387763 - RNA, 19 nt, Artificial Sequence
  Description of Artificial Sequence: Synthetic oligonucleotide
  Sense Strand Starting at position 877 of SEQ ID NO: 316413
uguuaucaaauguggagau

SEQ ID NO: 387764 - RNA, 19 nt, Artificial Sequence
  Description of Artificial Sequence: Synthetic oligonucleotide
  Antisense Strand to SEQ ID NO: 387763
aucuccacauuugauaaca

SEQ ID NO: 387765 - RNA, 19 nt, Artificial Sequence
  Description of Artificial Sequence: Synthetic oligonucleotide
  Sense Strand Starting at position 877 of SEQ ID NO: 316800
caggaugagugucauuuaa

SEQ ID NO: 387766 - RNA, 19 nt, Artificial Sequence
  Description of Artificial Sequence: Synthetic oligonucleotide
  Antisense Strand to SEQ ID NO: 387765
uuaaaugacacucauccug

SEQ ID NO: 387767 - RNA, 19 nt, Artificial Sequence
  Description of Artificial Sequence: Synthetic oligonucleotide
  Sense Strand Starting at position 877 of SEQ ID NO: 317042
gauguaagaucugugacca

SEQ ID NO: 387768 - RNA, 19 nt, Artificial Sequence
  Description of Artificial Sequence: Synthetic oligonucleotide
  Antisense Strand to SEQ ID NO: 387767
uggucacagaucuuacauc

SEQ ID NO: 387769 - RNA, 19 nt, Artificial Sequence
  Description of Artificial Sequence: Synthetic oligonucleotide
  Sense Strand Starting at position 877 of SEQ ID NO: 317043
auguaagaucugugaccag

SEQ ID NO: 387770 - RNA, 19 nt, Artificial Sequence
  Description of Artificial Sequence: Synthetic oligonucleotide
  Antisense Strand to SEQ ID NO: 387769
cuggucacagaucuuacau

SEQ ID NO: 387771 - RNA, 19 nt, Artificial Sequence
  Description of Artificial Sequence: Synthetic oligonucleotide
  Sense Strand Starting at position 877 of SEQ ID NO: 317246
augaaagauugugugggua

SEQ ID NO: 387772 - RNA, 19 nt, Artificial Sequence
  Description of Artificial Sequence: Synthetic oligonucleotide
  Antisense Strand to SEQ ID NO: 387771
uacccacacaaucuuucau

SEQ ID NO: 387773 - RNA, 19 nt, Artificial Sequence
  Description of Artificial Sequence: Synthetic oligonucleotide
  Sense Strand Starting at position 877 of SEQ ID NO: 317250
aagauuguguggguacaca

SEQ ID NO: 387774 - RNA, 19 nt, Artificial Sequence
  Description of Artificial Sequence: Synthetic oligonucleotide
  Antisense Strand to SEQ ID NO: 387773
uguguacccacacaaucuu

SEQ ID NO: 387775 - RNA, 19 nt, Artificial Sequence
  Description of Artificial Sequence: Synthetic oligonucleotide
  Sense Strand Starting at position 877 of SEQ ID NO: 317571
cuuaauuucugagacagca

SEQ ID NO: 387776 - RNA, 19 nt, Artificial Sequence
  Description of Artificial Sequence: Synthetic oligonucleotide
  Antisense Strand to SEQ ID NO: 387775
ugcugucucagaaauuaag

SEQ ID NO: 387777 - RNA, 19 nt, Artificial Sequence
  Description of Artificial Sequence: Synthetic oligonucleotide
  Sense Strand Starting at position 877 of SEQ ID NO: 317694
gagaaugccucacugggua

SEQ ID NO: 387778 - RNA, 19 nt, Artificial Sequence
  Description of Artificial Sequence: Synthetic oligonucleotide
  Antisense Strand to SEQ ID NO: 387777
uacccagugaggcauucuc

SEQ ID NO: 387779 - RNA, 19 nt, Artificial Sequence
  Description of Artificial Sequence: Synthetic oligonucleotide
  Sense Strand Starting at position 877 of SEQ ID NO: 317781
gcuaacauguuauuauaag

SEQ ID NO: 387780 - RNA, 19 nt, Artificial Sequence
  Description of Artificial Sequence: Synthetic oligonucleotide
  Antisense Strand to SEQ ID NO: 387779
cuuauaauaacauguuagc

SEQ ID NO: 387781 - RNA, 19 nt, Artificial Sequence
  Description of Artificial Sequence: Synthetic oligonucleotide
  Sense Strand Starting at position 877 of SEQ ID NO: 317933
caggcuuaccgacagauga

SEQ ID NO: 387782 - RNA, 19 nt, Artificial Sequence
  Description of Artificial Sequence: Synthetic oligonucleotide
  Antisense Strand to SEQ ID NO: 387781
ucaucugucgguaagccug

SEQ ID NO: 387783 - RNA, 19 nt, Artificial Sequence
  Description of Artificial Sequence: Synthetic oligonucleotide
  Sense Strand Starting at position 877 of SEQ ID NO: 318111
acagcucuccuaggugaua

SEQ ID NO: 387784 - RNA, 19 nt, Artificial Sequence
  Description of Artificial Sequence: Synthetic oligonucleotide
  Antisense Strand to SEQ ID NO: 387783
uaucaccuaggagagcugu

SEQ ID NO: 387785 - RNA, 19 nt, Artificial Sequence
  Description of Artificial Sequence: Synthetic oligonucleotide
  Sense Strand Starting at position 877 of SEQ ID NO: 318368
aggauuccagucuggguua

SEQ ID NO: 387786 - RNA, 19 nt, Artificial Sequence
  Description of Artificial Sequence: Synthetic oligonucleotide
  Antisense Strand to SEQ ID NO: 387785
uaacccagacuggaauccu

SEQ ID NO: 387787 - RNA, 19 nt, Artificial Sequence
  Description of Artificial Sequence: Synthetic oligonucleotide
  Sense Strand Starting at position 877 of SEQ ID NO: 318465
ggacaucugcucuauacag

SEQ ID NO: 387788 - RNA, 19 nt, Artificial Sequence
  Description of Artificial Sequence: Synthetic oligonucleotide
  Antisense Strand to SEQ ID NO: 387787
cuguauagagcagaugucc

SEQ ID NO: 387789 - RNA, 19 nt, Artificial Sequence
  Description of Artificial Sequence: Synthetic oligonucleotide
  Sense Strand Starting at position 877 of SEQ ID NO: 318798
gaauuaaauguccagcgga

SEQ ID NO: 387790 - RNA, 19 nt, Artificial Sequence
  Description of Artificial Sequence: Synthetic oligonucleotide
  Antisense Strand to SEQ ID NO: 387789
uccgcuggacauuuaauuc

SEQ ID NO: 387791 - RNA, 19 nt, Artificial Sequence
  Description of Artificial Sequence: Synthetic oligonucleotide
  Sense Strand Starting at position 877 of SEQ ID NO: 318801
uuaaauguccagcggagaa

SEQ ID NO: 387792 - RNA, 19 nt, Artificial Sequence
  Description of Artificial Sequence: Synthetic oligonucleotide
  Antisense Strand to SEQ ID NO: 387791
uucuccgcuggacauuuaa

SEQ ID NO: 387793 - RNA, 19 nt, Artificial Sequence
  Description of Artificial Sequence: Synthetic oligonucleotide
  Sense Strand Starting at position 877 of SEQ ID NO: 318919
caaaguagagcagguuaau

SEQ ID NO: 387794 - RNA, 19 nt, Artificial Sequence
  Description of Artificial Sequence: Synthetic oligonucleotide
  Antisense Strand to SEQ ID NO: 387793
auuaaccugcucuacuuug

SEQ ID NO: 387795 - RNA, 19 nt, Artificial Sequence
  Description of Artificial Sequence: Synthetic oligonucleotide
  Sense Strand Starting at position 877 of SEQ ID NO: 318952
gagggaucagugggucagu

SEQ ID NO: 387796 - RNA, 19 nt, Artificial Sequence
  Description of Artificial Sequence: Synthetic oligonucleotide
  Antisense Strand to SEQ ID NO: 387795
acugacccacugaucccuc

SEQ ID NO: 387797 - RNA, 19 nt, Artificial Sequence
  Description of Artificial Sequence: Synthetic oligonucleotide
  Sense Strand Starting at position 877 of SEQ ID NO: 318999
uuggcaucugagggaaguu

SEQ ID NO: 387798 - RNA, 19 nt, Artificial Sequence
  Description of Artificial Sequence: Synthetic oligonucleotide
  Antisense Strand to SEQ ID NO: 387797
aacuucccucagaugccaa

SEQ ID NO: 387799 - RNA, 19 nt, Artificial Sequence
  Description of Artificial Sequence: Synthetic oligonucleotide
  Sense Strand Starting at position 877 of SEQ ID NO: 319000
uggcaucugagggaaguuu

SEQ ID NO: 387800 - RNA, 19 nt, Artificial Sequence
  Description of Artificial Sequence: Synthetic oligonucleotide
  Antisense Strand to SEQ ID NO: 387799
aaacuucccucagaugcca

SEQ ID NO: 387801 - RNA, 19 nt, Artificial Sequence
  Description of Artificial Sequence: Synthetic oligonucleotide
  Sense Strand Starting at position 878 of SEQ ID NO: 315592
uuccuauaccaagggugau

SEQ ID NO: 387802 - RNA, 19 nt, Artificial Sequence
  Description of Artificial Sequence: Synthetic oligonucleotide
  Antisense Strand to SEQ ID NO: 387801
aucacccuugguauaggaa

SEQ ID NO: 387803 - RNA, 19 nt, Artificial Sequence
  Description of Artificial Sequence: Synthetic oligonucleotide
  Sense Strand Starting at position 878 of SEQ ID NO: 315777
ggaguugcacagugucaca

SEQ ID NO: 387804 - RNA, 19 nt, Artificial Sequence
  Description of Artificial Sequence: Synthetic oligonucleotide
  Antisense Strand to SEQ ID NO: 387803
ugugacacugugcaacucc

SEQ ID NO: 387805 - RNA, 19 nt, Artificial Sequence
  Description of Artificial Sequence: Synthetic oligonucleotide
  Sense Strand Starting at position 878 of SEQ ID NO: 315883
auaagauacuguucuuagc

SEQ ID NO: 387806 - RNA, 19 nt, Artificial Sequence
  Description of Artificial Sequence: Synthetic oligonucleotide
  Antisense Strand to SEQ ID NO: 387805
gcuaagaacaguaucuuau

SEQ ID NO: 387807 - RNA, 19 nt, Artificial Sequence
  Description of Artificial Sequence: Synthetic oligonucleotide
  Sense Strand Starting at position 878 of SEQ ID NO: 315931
ugaggaaggcacugucauu

SEQ ID NO: 387808 - RNA, 19 nt, Artificial Sequence
  Description of Artificial Sequence: Synthetic oligonucleotide
  Antisense Strand to SEQ ID NO: 387807
aaugacagugccuuccuca

SEQ ID NO: 387809 - RNA, 19 nt, Artificial Sequence
  Description of Artificial Sequence: Synthetic oligonucleotide
  Sense Strand Starting at position 878 of SEQ ID NO: 316032
cagggucagcgguaugaaa

SEQ ID NO: 387810 - RNA, 19 nt, Artificial Sequence
  Description of Artificial Sequence: Synthetic oligonucleotide
  Antisense Strand to SEQ ID NO: 387809
uuucauaccgcugacccug

SEQ ID NO: 387811 - RNA, 19 nt, Artificial Sequence
  Description of Artificial Sequence: Synthetic oligonucleotide
  Sense Strand Starting at position 878 of SEQ ID NO: 316034
gggucagcgguaugaaacu

SEQ ID NO: 387812 - RNA, 19 nt, Artificial Sequence
  Description of Artificial Sequence: Synthetic oligonucleotide
  Antisense Strand to SEQ ID NO: 387811
aguuucauaccgcugaccc

SEQ ID NO: 387813 - RNA, 19 nt, Artificial Sequence
  Description of Artificial Sequence: Synthetic oligonucleotide
  Sense Strand Starting at position 878 of SEQ ID NO: 316167
cugucacauugguuauaca

SEQ ID NO: 387814 - RNA, 19 nt, Artificial Sequence
  Description of Artificial Sequence: Synthetic oligonucleotide
  Antisense Strand to SEQ ID NO: 387813
uguauaaccaaugugacag

SEQ ID NO: 387815 - RNA, 19 nt, Artificial Sequence
  Description of Artificial Sequence: Synthetic oligonucleotide
  Sense Strand Starting at position 878 of SEQ ID NO: 316193
ucaguugaacaguaucaca

SEQ ID NO: 387816 - RNA, 19 nt, Artificial Sequence
  Description of Artificial Sequence: Synthetic oligonucleotide
  Antisense Strand to SEQ ID NO: 387815
ugugauacuguucaacuga

SEQ ID NO: 387817 - RNA, 19 nt, Artificial Sequence
  Description of Artificial Sequence: Synthetic oligonucleotide
  Sense Strand Starting at position 878 of SEQ ID NO: 316198
ugaacaguaucacaacaga

SEQ ID NO: 387818 - RNA, 19 nt, Artificial Sequence
  Description of Artificial Sequence: Synthetic oligonucleotide
  Antisense Strand to SEQ ID NO: 387817
ucuguugugauacuguuca

SEQ ID NO: 387819 - RNA, 19 nt, Artificial Sequence
  Description of Artificial Sequence: Synthetic oligonucleotide
  Sense Strand Starting at position 878 of SEQ ID NO: 316380
cuagaucaccacugucaca

SEQ ID NO: 387820 - RNA, 19 nt, Artificial Sequence
  Description of Artificial Sequence: Synthetic oligonucleotide
  Antisense Strand to SEQ ID NO: 387819
ugugacaguggugaucuag

SEQ ID NO: 387821 - RNA, 19 nt, Artificial Sequence
  Description of Artificial Sequence: Synthetic oligonucleotide
  Sense Strand Starting at position 878 of SEQ ID NO: 316422
ugcacaggaucauauugaa

SEQ ID NO: 387822 - RNA, 19 nt, Artificial Sequence
  Description of Artificial Sequence: Synthetic oligonucleotide
  Antisense Strand to SEQ ID NO: 387821
uucaauaugauccugugca

SEQ ID NO: 387823 - RNA, 19 nt, Artificial Sequence
  Description of Artificial Sequence: Synthetic oligonucleotide
  Sense Strand Starting at position 878 of SEQ ID NO: 316491
cacggugccucagaaauuu

SEQ ID NO: 387824 - RNA, 19 nt, Artificial Sequence
  Description of Artificial Sequence: Synthetic oligonucleotide
  Antisense Strand to SEQ ID NO: 387823
aaauuucugaggcaccgug

SEQ ID NO: 387825 - RNA, 19 nt, Artificial Sequence
  Description of Artificial Sequence: Synthetic oligonucleotide
  Sense Strand Starting at position 878 of SEQ ID NO: 316499
cucagaaauuuguaaacag

SEQ ID NO: 387826 - RNA, 19 nt, Artificial Sequence
  Description of Artificial Sequence: Synthetic oligonucleotide
  Antisense Strand to SEQ ID NO: 387825
cuguuuacaaauuucugag

SEQ ID NO: 387827 - RNA, 19 nt, Artificial Sequence
  Description of Artificial Sequence: Synthetic oligonucleotide
  Sense Strand Starting at position 878 of SEQ ID NO: 316547
cguuggaagggcugaguua

SEQ ID NO: 387828 - RNA, 19 nt, Artificial Sequence
  Description of Artificial Sequence: Synthetic oligonucleotide
  Antisense Strand to SEQ ID NO: 387827
uaacucagcccuuccaacg

SEQ ID NO: 387829 - RNA, 19 nt, Artificial Sequence
  Description of Artificial Sequence: Synthetic oligonucleotide
  Sense Strand Starting at position 878 of SEQ ID NO: 316548
guuggaagggcugaguuaa

SEQ ID NO: 387830 - RNA, 19 nt, Artificial Sequence
  Description of Artificial Sequence: Synthetic oligonucleotide
  Antisense Strand to SEQ ID NO: 387829
uuaacucagcccuuccaac

SEQ ID NO: 387831 - RNA, 19 nt, Artificial Sequence
  Description of Artificial Sequence: Synthetic oligonucleotide
  Sense Strand Starting at position 878 of SEQ ID NO: 316559
ugaguuaaauaaugagaag

SEQ ID NO: 387832 - RNA, 19 nt, Artificial Sequence
  Description of Artificial Sequence: Synthetic oligonucleotide
  Antisense Strand to SEQ ID NO: 387831
cuucucauuauuuaacuca

SEQ ID NO: 387833 - RNA, 19 nt, Artificial Sequence
  Description of Artificial Sequence: Synthetic oligonucleotide
  Sense Strand Starting at position 878 of SEQ ID NO: 317433
gaagcaaaucugugucgaa

SEQ ID NO: 387834 - RNA, 19 nt, Artificial Sequence
  Description of Artificial Sequence: Synthetic oligonucleotide
  Antisense Strand to SEQ ID NO: 387833
uucgacacagauuugcuuc

SEQ ID NO: 387835 - RNA, 19 nt, Artificial Sequence
  Description of Artificial Sequence: Synthetic oligonucleotide
  Sense Strand Starting at position 878 of SEQ ID NO: 317434
aagcaaaucugugucgaag

SEQ ID NO: 387836 - RNA, 19 nt, Artificial Sequence
  Description of Artificial Sequence: Synthetic oligonucleotide
  Antisense Strand to SEQ ID NO: 387835
cuucgacacagauuugcuu

SEQ ID NO: 387837 - RNA, 19 nt, Artificial Sequence
  Description of Artificial Sequence: Synthetic oligonucleotide
  Sense Strand Starting at position 878 of SEQ ID NO: 317958
gcuguugccucauuuguga

SEQ ID NO: 387838 - RNA, 19 nt, Artificial Sequence
  Description of Artificial Sequence: Synthetic oligonucleotide
  Antisense Strand to SEQ ID NO: 387837
ucacaaaugaggcaacagc

SEQ ID NO: 387839 - RNA, 19 nt, Artificial Sequence
  Description of Artificial Sequence: Synthetic oligonucleotide
  Sense Strand Starting at position 878 of SEQ ID NO: 318037
gacggaugcaaacgaaauu

SEQ ID NO: 387840 - RNA, 19 nt, Artificial Sequence
  Description of Artificial Sequence: Synthetic oligonucleotide
  Antisense Strand to SEQ ID NO: 387839
aauuucguuugcauccguc

SEQ ID NO: 387841 - RNA, 19 nt, Artificial Sequence
  Description of Artificial Sequence: Synthetic oligonucleotide
  Sense Strand Starting at position 878 of SEQ ID NO: 318116
ugagaacgacuguaacuuu

SEQ ID NO: 387842 - RNA, 19 nt, Artificial Sequence
  Description of Artificial Sequence: Synthetic oligonucleotide
  Antisense Strand to SEQ ID NO: 387841
aaaguuacagucguucuca

SEQ ID NO: 387843 - RNA, 19 nt, Artificial Sequence
  Description of Artificial Sequence: Synthetic oligonucleotide
  Sense Strand Starting at position 878 of SEQ ID NO: 318148
cugccaauaugcucgggaa

SEQ ID NO: 387844 - RNA, 19 nt, Artificial Sequence
  Description of Artificial Sequence: Synthetic oligonucleotide
  Antisense Strand to SEQ ID NO: 387843
uucccgagcauauuggcag

SEQ ID NO: 387845 - RNA, 19 nt, Artificial Sequence
  Description of Artificial Sequence: Synthetic oligonucleotide
  Sense Strand Starting at position 878 of SEQ ID NO: 318149
ugccaauaugcucgggaac

SEQ ID NO: 387846 - RNA, 19 nt, Artificial Sequence
  Description of Artificial Sequence: Synthetic oligonucleotide
  Antisense Strand to SEQ ID NO: 387845
guucccgagcauauuggca

SEQ ID NO: 387847 - RNA, 19 nt, Artificial Sequence
  Description of Artificial Sequence: Synthetic oligonucleotide
  Sense Strand Starting at position 878 of SEQ ID NO: 318150
gccaauaugcucgggaaca

SEQ ID NO: 387848 - RNA, 19 nt, Artificial Sequence
  Description of Artificial Sequence: Synthetic oligonucleotide
  Antisense Strand to SEQ ID NO: 387847
uguucccgagcauauuggc

SEQ ID NO: 387849 - RNA, 19 nt, Artificial Sequence
  Description of Artificial Sequence: Synthetic oligonucleotide
  Sense Strand Starting at position 878 of SEQ ID NO: 318152
caauaugcucgggaacagu

SEQ ID NO: 387850 - RNA, 19 nt, Artificial Sequence
  Description of Artificial Sequence: Synthetic oligonucleotide
  Antisense Strand to SEQ ID NO: 387849
acuguucccgagcauauug

SEQ ID NO: 387851 - RNA, 19 nt, Artificial Sequence
  Description of Artificial Sequence: Synthetic oligonucleotide
  Sense Strand Starting at position 878 of SEQ ID NO: 318330
cagcauugacagugaguca

SEQ ID NO: 387852 - RNA, 19 nt, Artificial Sequence
  Description of Artificial Sequence: Synthetic oligonucleotide
  Antisense Strand to SEQ ID NO: 387851
ugacucacugucaaugcug

SEQ ID NO: 387853 - RNA, 19 nt, Artificial Sequence
  Description of Artificial Sequence: Synthetic oligonucleotide
  Sense Strand Starting at position 878 of SEQ ID NO: 318339
cagugagucacuggcaaag

SEQ ID NO: 387854 - RNA, 19 nt, Artificial Sequence
  Description of Artificial Sequence: Synthetic oligonucleotide
  Antisense Strand to SEQ ID NO: 387853
cuuugccagugacucacug

SEQ ID NO: 387855 - RNA, 19 nt, Artificial Sequence
  Description of Artificial Sequence: Synthetic oligonucleotide
  Sense Strand Starting at position 878 of SEQ ID NO: 318359
caguuauuggcacagacaa

SEQ ID NO: 387856 - RNA, 19 nt, Artificial Sequence
  Description of Artificial Sequence: Synthetic oligonucleotide
  Antisense Strand to SEQ ID NO: 387855
uugucugugccaauaacug

SEQ ID NO: 387857 - RNA, 19 nt, Artificial Sequence
  Description of Artificial Sequence: Synthetic oligonucleotide
  Sense Strand Starting at position 878 of SEQ ID NO: 318406
cgcagaguaacuugccuaa

SEQ ID NO: 387858 - RNA, 19 nt, Artificial Sequence
  Description of Artificial Sequence: Synthetic oligonucleotide
  Antisense Strand to SEQ ID NO: 387857
uuaggcaaguuacucugcg

SEQ ID NO: 387859 - RNA, 19 nt, Artificial Sequence
  Description of Artificial Sequence: Synthetic oligonucleotide
  Sense Strand Starting at position 878 of SEQ ID NO: 318423
aaggucauaucagagagaa

SEQ ID NO: 387860 - RNA, 19 nt, Artificial Sequence
  Description of Artificial Sequence: Synthetic oligonucleotide
  Antisense Strand to SEQ ID NO: 387859
uucucucugauaugaccuu

SEQ ID NO: 387861 - RNA, 19 nt, Artificial Sequence
  Description of Artificial Sequence: Synthetic oligonucleotide
  Sense Strand Starting at position 878 of SEQ ID NO: 318501
aaagcuauucuuuggagag

SEQ ID NO: 387862 - RNA, 19 nt, Artificial Sequence
  Description of Artificial Sequence: Synthetic oligonucleotide
  Antisense Strand to SEQ ID NO: 387861
cucuccaaagaauagcuuu

SEQ ID NO: 387863 - RNA, 19 nt, Artificial Sequence
  Description of Artificial Sequence: Synthetic oligonucleotide
  Sense Strand Starting at position 878 of SEQ ID NO: 318541
gccuguguuauggagaaac

SEQ ID NO: 387864 - RNA, 19 nt, Artificial Sequence
  Description of Artificial Sequence: Synthetic oligonucleotide
  Antisense Strand to SEQ ID NO: 387863
guuucuccauaacacaggc

SEQ ID NO: 387865 - RNA, 19 nt, Artificial Sequence
  Description of Artificial Sequence: Synthetic oligonucleotide
  Sense Strand Starting at position 878 of SEQ ID NO: 318543
cuguguuauggagaaacug

SEQ ID NO: 387866 - RNA, 19 nt, Artificial Sequence
  Description of Artificial Sequence: Synthetic oligonucleotide
  Antisense Strand to SEQ ID NO: 387865
caguuucuccauaacacag

SEQ ID NO: 387867 - RNA, 19 nt, Artificial Sequence
  Description of Artificial Sequence: Synthetic oligonucleotide
  Sense Strand Starting at position 878 of SEQ ID NO: 318625
auaauuggcuuccuuugaa

SEQ ID NO: 387868 - RNA, 19 nt, Artificial Sequence
  Description of Artificial Sequence: Synthetic oligonucleotide
  Antisense Strand to SEQ ID NO: 387867
uucaaaggaagccaauuau

SEQ ID NO: 387869 - RNA, 19 nt, Artificial Sequence
  Description of Artificial Sequence: Synthetic oligonucleotide
  Sense Strand Starting at position 878 of SEQ ID NO: 318949
cagugagauucugucucau

SEQ ID NO: 387870 - RNA, 19 nt, Artificial Sequence
  Description of Artificial Sequence: Synthetic oligonucleotide
  Antisense Strand to SEQ ID NO: 387869
augagacagaaucucacug

SEQ ID NO: 387871 - RNA, 19 nt, Artificial Sequence
  Description of Artificial Sequence: Synthetic oligonucleotide
  Sense Strand Starting at position 878 of SEQ ID NO: 319037
caaaguggucuguggcaca

SEQ ID NO: 387872 - RNA, 19 nt, Artificial Sequence
  Description of Artificial Sequence: Synthetic oligonucleotide
  Antisense Strand to SEQ ID NO: 387871
ugugccacagaccacuuug

SEQ ID NO: 387873 - RNA, 19 nt, Artificial Sequence
  Description of Artificial Sequence: Synthetic oligonucleotide
  Sense Strand Starting at position 878 of SEQ ID NO: 319061
uuaagauugguguggauca

SEQ ID NO: 387874 - RNA, 19 nt, Artificial Sequence
  Description of Artificial Sequence: Synthetic oligonucleotide
  Antisense Strand to SEQ ID NO: 387873
ugauccacaccaaucuuaa

SEQ ID NO: 387875 - RNA, 19 nt, Artificial Sequence
  Description of Artificial Sequence: Synthetic oligonucleotide
  Sense Strand Starting at position 878 of SEQ ID NO: 319116
ggcagacugcuuuggaaca

SEQ ID NO: 387876 - RNA, 19 nt, Artificial Sequence
  Description of Artificial Sequence: Synthetic oligonucleotide
  Antisense Strand to SEQ ID NO: 387875
uguuccaaagcagucugcc

SEQ ID NO: 387877 - RNA, 19 nt, Artificial Sequence
  Description of Artificial Sequence: Synthetic oligonucleotide
  Sense Strand Starting at position 878 of SEQ ID NO: 319165
ugcuaagagcucuggaauc

SEQ ID NO: 387878 - RNA, 19 nt, Artificial Sequence
  Description of Artificial Sequence: Synthetic oligonucleotide
  Antisense Strand to SEQ ID NO: 387877
gauuccagagcucuuagca

SEQ ID NO: 387879 - RNA, 19 nt, Artificial Sequence
  Description of Artificial Sequence: Synthetic oligonucleotide
  Sense Strand Starting at position 878 of SEQ ID NO: 319183
caucaucucuuggaggacu

SEQ ID NO: 387880 - RNA, 19 nt, Artificial Sequence
  Description of Artificial Sequence: Synthetic oligonucleotide
  Antisense Strand to SEQ ID NO: 387879
aguccuccaagagaugaug

SEQ ID NO: 387881 - RNA, 19 nt, Artificial Sequence
  Description of Artificial Sequence: Synthetic oligonucleotide
  Sense Strand Starting at position 879 of SEQ ID NO: 315359
acaauucuccuugacaggu

SEQ ID NO: 387882 - RNA, 19 nt, Artificial Sequence
  Description of Artificial Sequence: Synthetic oligonucleotide
  Antisense Strand to SEQ ID NO: 387881
accugucaaggagaauugu

SEQ ID NO: 387883 - RNA, 19 nt, Artificial Sequence
  Description of Artificial Sequence: Synthetic oligonucleotide
  Sense Strand Starting at position 879 of SEQ ID NO: 315411
gaaggcaguugagguaauu

SEQ ID NO: 387884 - RNA, 19 nt, Artificial Sequence
  Description of Artificial Sequence: Synthetic oligonucleotide
  Antisense Strand to SEQ ID NO: 387883
aauuaccucaacugccuuc

SEQ ID NO: 387885 - RNA, 19 nt, Artificial Sequence
  Description of Artificial Sequence: Synthetic oligonucleotide
  Sense Strand Starting at position 879 of SEQ ID NO: 315511
gcuggacugaguuaggcau

SEQ ID NO: 387886 - RNA, 19 nt, Artificial Sequence
  Description of Artificial Sequence: Synthetic oligonucleotide
  Antisense Strand to SEQ ID NO: 387885
augccuaacucaguccagc

SEQ ID NO: 387887 - RNA, 19 nt, Artificial Sequence
  Description of Artificial Sequence: Synthetic oligonucleotide
  Sense Strand Starting at position 879 of SEQ ID NO: 315680
gaggaugaagccuguucca

SEQ ID NO: 387888 - RNA, 19 nt, Artificial Sequence
  Description of Artificial Sequence: Synthetic oligonucleotide
  Antisense Strand to SEQ ID NO: 387887
uggaacaggcuucauccuc

SEQ ID NO: 387889 - RNA, 19 nt, Artificial Sequence
  Description of Artificial Sequence: Synthetic oligonucleotide
  Sense Strand Starting at position 879 of SEQ ID NO: 315683
gaugaagccuguuccaaca

SEQ ID NO: 387890 - RNA, 19 nt, Artificial Sequence
  Description of Artificial Sequence: Synthetic oligonucleotide
  Antisense Strand to SEQ ID NO: 387889
uguuggaacaggcuucauc

SEQ ID NO: 387891 - RNA, 19 nt, Artificial Sequence
  Description of Artificial Sequence: Synthetic oligonucleotide
  Sense Strand Starting at position 879 of SEQ ID NO: 315708
aaggaaugacgcuguguca

SEQ ID NO: 387892 - RNA, 19 nt, Artificial Sequence
  Description of Artificial Sequence: Synthetic oligonucleotide
  Antisense Strand to SEQ ID NO: 387891
ugacacagcgucauuccuu

SEQ ID NO: 387893 - RNA, 19 nt, Artificial Sequence
  Description of Artificial Sequence: Synthetic oligonucleotide
  Sense Strand Starting at position 879 of SEQ ID NO: 315715
gacgcugugucagagagaa

SEQ ID NO: 387894 - RNA, 19 nt, Artificial Sequence
  Description of Artificial Sequence: Synthetic oligonucleotide
  Antisense Strand to SEQ ID NO: 387893
uucucucugacacagcguc

SEQ ID NO: 387895 - RNA, 19 nt, Artificial Sequence
  Description of Artificial Sequence: Synthetic oligonucleotide
  Sense Strand Starting at position 879 of SEQ ID NO: 315717
cgcugugucagagagaaag

SEQ ID NO: 387896 - RNA, 19 nt, Artificial Sequence
  Description of Artificial Sequence: Synthetic oligonucleotide
  Antisense Strand to SEQ ID NO: 387895
cuuucucucugacacagcg

SEQ ID NO: 387897 - RNA, 19 nt, Artificial Sequence
  Description of Artificial Sequence: Synthetic oligonucleotide
  Sense Strand Starting at position 879 of SEQ ID NO: 315805
acaccucuggccugaagaa

SEQ ID NO: 387898 - RNA, 19 nt, Artificial Sequence
  Description of Artificial Sequence: Synthetic oligonucleotide
  Antisense Strand to SEQ ID NO: 387897
uucuucaggccagaggugu

SEQ ID NO: 387899 - RNA, 19 nt, Artificial Sequence
  Description of Artificial Sequence: Synthetic oligonucleotide
  Sense Strand Starting at position 879 of SEQ ID NO: 316002
augggaacaucucuaaguc

SEQ ID NO: 387900 - RNA, 19 nt, Artificial Sequence
  Description of Artificial Sequence: Synthetic oligonucleotide
  Antisense Strand to SEQ ID NO: 387899
gacuuagagauguucccau

SEQ ID NO: 387901 - RNA, 19 nt, Artificial Sequence
  Description of Artificial Sequence: Synthetic oligonucleotide
  Sense Strand Starting at position 879 of SEQ ID NO: 316082
cuauuauguccaugaacag

SEQ ID NO: 387902 - RNA, 19 nt, Artificial Sequence
  Description of Artificial Sequence: Synthetic oligonucleotide
  Antisense Strand to SEQ ID NO: 387901
cuguucauggacauaauag

SEQ ID NO: 387903 - RNA, 19 nt, Artificial Sequence
  Description of Artificial Sequence: Synthetic oligonucleotide
  Sense Strand Starting at position 879 of SEQ ID NO: 316172
aaagcagugauugguauga

SEQ ID NO: 387904 - RNA, 19 nt, Artificial Sequence
  Description of Artificial Sequence: Synthetic oligonucleotide
  Antisense Strand to SEQ ID NO: 387903
ucauaccaaucacugcuuu

SEQ ID NO: 387905 - RNA, 19 nt, Artificial Sequence
  Description of Artificial Sequence: Synthetic oligonucleotide
  Sense Strand Starting at position 879 of SEQ ID NO: 316174
agcagugauugguaugaaa

SEQ ID NO: 387906 - RNA, 19 nt, Artificial Sequence
  Description of Artificial Sequence: Synthetic oligonucleotide
  Antisense Strand to SEQ ID NO: 387905
uuucauaccaaucacugcu

SEQ ID NO: 387907 - RNA, 19 nt, Artificial Sequence
  Description of Artificial Sequence: Synthetic oligonucleotide
  Sense Strand Starting at position 879 of SEQ ID NO: 316176
cagugauugguaugaaagg

SEQ ID NO: 387908 - RNA, 19 nt, Artificial Sequence
  Description of Artificial Sequence: Synthetic oligonucleotide
  Antisense Strand to SEQ ID NO: 387907
ccuuucauaccaaucacug

SEQ ID NO: 387909 - RNA, 19 nt, Artificial Sequence
  Description of Artificial Sequence: Synthetic oligonucleotide
  Sense Strand Starting at position 879 of SEQ ID NO: 316177
agugauugguaugaaagga

SEQ ID NO: 387910 - RNA, 19 nt, Artificial Sequence
  Description of Artificial Sequence: Synthetic oligonucleotide
  Antisense Strand to SEQ ID NO: 387909
uccuuucauaccaaucacu

SEQ ID NO: 387911 - RNA, 19 nt, Artificial Sequence
  Description of Artificial Sequence: Synthetic oligonucleotide
  Sense Strand Starting at position 879 of SEQ ID NO: 316198
aggguuugcugagauggca

SEQ ID NO: 387912 - RNA, 19 nt, Artificial Sequence
  Description of Artificial Sequence: Synthetic oligonucleotide
  Antisense Strand to SEQ ID NO: 387911
ugccaucucagcaaacccu

SEQ ID NO: 387913 - RNA, 19 nt, Artificial Sequence
  Description of Artificial Sequence: Synthetic oligonucleotide
  Sense Strand Starting at position 879 of SEQ ID NO: 316264
gugccuguccuggagcaaa

SEQ ID NO: 387914 - RNA, 19 nt, Artificial Sequence
  Description of Artificial Sequence: Synthetic oligonucleotide
  Antisense Strand to SEQ ID NO: 387913
uuugcuccaggacaggcac

SEQ ID NO: 387915 - RNA, 19 nt, Artificial Sequence
  Description of Artificial Sequence: Synthetic oligonucleotide
  Sense Strand Starting at position 879 of SEQ ID NO: 316391
agagcuggcucauauugga

SEQ ID NO: 387916 - RNA, 19 nt, Artificial Sequence
  Description of Artificial Sequence: Synthetic oligonucleotide
  Antisense Strand to SEQ ID NO: 387915
uccaauaugagccagcucu

SEQ ID NO: 387917 - RNA, 19 nt, Artificial Sequence
  Description of Artificial Sequence: Synthetic oligonucleotide
  Sense Strand Starting at position 879 of SEQ ID NO: 316396
uggcucauauuggaggaaa

SEQ ID NO: 387918 - RNA, 19 nt, Artificial Sequence
  Description of Artificial Sequence: Synthetic oligonucleotide
  Antisense Strand to SEQ ID NO: 387917
uuuccuccaauaugagcca

SEQ ID NO: 387919 - RNA, 19 nt, Artificial Sequence
  Description of Artificial Sequence: Synthetic oligonucleotide
  Sense Strand Starting at position 879 of SEQ ID NO: 316398
gcucauauuggaggaaaca

SEQ ID NO: 387920 - RNA, 19 nt, Artificial Sequence
  Description of Artificial Sequence: Synthetic oligonucleotide
  Antisense Strand to SEQ ID NO: 387919
uguuuccuccaauaugagc

SEQ ID NO: 387921 - RNA, 19 nt, Artificial Sequence
  Description of Artificial Sequence: Synthetic oligonucleotide
  Sense Strand Starting at position 879 of SEQ ID NO: 316519
cugagcaucgcugacuauu

SEQ ID NO: 387922 - RNA, 19 nt, Artificial Sequence
  Description of Artificial Sequence: Synthetic oligonucleotide
  Antisense Strand to SEQ ID NO: 387921
aauagucagcgaugcucag

SEQ ID NO: 387923 - RNA, 19 nt, Artificial Sequence
  Description of Artificial Sequence: Synthetic oligonucleotide
  Sense Strand Starting at position 879 of SEQ ID NO: 316851
cgggcuagaucucggacaa

SEQ ID NO: 387924 - RNA, 19 nt, Artificial Sequence
  Description of Artificial Sequence: Synthetic oligonucleotide
  Antisense Strand to SEQ ID NO: 387923
uuguccgagaucuagcccg

SEQ ID NO: 387925 - RNA, 19 nt, Artificial Sequence
  Description of Artificial Sequence: Synthetic oligonucleotide
  Sense Strand Starting at position 879 of SEQ ID NO: 316852
gggcuagaucucggacaag

SEQ ID NO: 387926 - RNA, 19 nt, Artificial Sequence
  Description of Artificial Sequence: Synthetic oligonucleotide
  Antisense Strand to SEQ ID NO: 387925
cuuguccgagaucuagccc

SEQ ID NO: 387927 - RNA, 19 nt, Artificial Sequence
  Description of Artificial Sequence: Synthetic oligonucleotide
  Sense Strand Starting at position 879 of SEQ ID NO: 317143
gcgggacucacuugaguag

SEQ ID NO: 387928 - RNA, 19 nt, Artificial Sequence
  Description of Artificial Sequence: Synthetic oligonucleotide
  Antisense Strand to SEQ ID NO: 387927
cuacucaagugagucccgc

SEQ ID NO: 387929 - RNA, 19 nt, Artificial Sequence
  Description of Artificial Sequence: Synthetic oligonucleotide
  Sense Strand Starting at position 879 of SEQ ID NO: 317413
gccagauuccuccagcuuc

SEQ ID NO: 387930 - RNA, 19 nt, Artificial Sequence
  Description of Artificial Sequence: Synthetic oligonucleotide
  Antisense Strand to SEQ ID NO: 387929
gaagcuggaggaaucuggc

SEQ ID NO: 387931 - RNA, 19 nt, Artificial Sequence
  Description of Artificial Sequence: Synthetic oligonucleotide
  Sense Strand Starting at position 879 of SEQ ID NO: 317533
gaaagaauccggcgucauc

SEQ ID NO: 387932 - RNA, 19 nt, Artificial Sequence
  Description of Artificial Sequence: Synthetic oligonucleotide
  Antisense Strand to SEQ ID NO: 387931
gaugacgccggauucuuuc

SEQ ID NO: 387933 - RNA, 19 nt, Artificial Sequence
  Description of Artificial Sequence: Synthetic oligonucleotide
  Sense Strand Starting at position 879 of SEQ ID NO: 317646
gcauucccuucugcgaaau

SEQ ID NO: 387934 - RNA, 19 nt, Artificial Sequence
  Description of Artificial Sequence: Synthetic oligonucleotide
  Antisense Strand to SEQ ID NO: 387933
auuucgcagaagggaaugc

SEQ ID NO: 387935 - RNA, 19 nt, Artificial Sequence
  Description of Artificial Sequence: Synthetic oligonucleotide
  Sense Strand Starting at position 879 of SEQ ID NO: 317696
agagcaauaccuggaccuu

SEQ ID NO: 387936 - RNA, 19 nt, Artificial Sequence
  Description of Artificial Sequence: Synthetic oligonucleotide
  Antisense Strand to SEQ ID NO: 387935
aagguccagguauugcucu

SEQ ID NO: 387937 - RNA, 19 nt, Artificial Sequence
  Description of Artificial Sequence: Synthetic oligonucleotide
  Sense Strand Starting at position 879 of SEQ ID NO: 317980
uuuauagguugcccagaga

SEQ ID NO: 387938 - RNA, 19 nt, Artificial Sequence
  Description of Artificial Sequence: Synthetic oligonucleotide
  Antisense Strand to SEQ ID NO: 387937
ucucugggcaaccuauaaa

SEQ ID NO: 387939 - RNA, 19 nt, Artificial Sequence
  Description of Artificial Sequence: Synthetic oligonucleotide
  Sense Strand Starting at position 879 of SEQ ID NO: 318055
uggagagucccuugggaaa

SEQ ID NO: 387940 - RNA, 19 nt, Artificial Sequence
  Description of Artificial Sequence: Synthetic oligonucleotide
  Antisense Strand to SEQ ID NO: 387939
uuucccaagggacucucca

SEQ ID NO: 387941 - RNA, 19 nt, Artificial Sequence
  Description of Artificial Sequence: Synthetic oligonucleotide
  Sense Strand Starting at position 879 of SEQ ID NO: 318139
ugauaaggccaaugugaga

SEQ ID NO: 387942 - RNA, 19 nt, Artificial Sequence
  Description of Artificial Sequence: Synthetic oligonucleotide
  Antisense Strand to SEQ ID NO: 387941
ucucacauuggccuuauca

SEQ ID NO: 387943 - RNA, 19 nt, Artificial Sequence
  Description of Artificial Sequence: Synthetic oligonucleotide
  Sense Strand Starting at position 879 of SEQ ID NO: 318231
cuagguggccuugaauaag

SEQ ID NO: 387944 - RNA, 19 nt, Artificial Sequence
  Description of Artificial Sequence: Synthetic oligonucleotide
  Antisense Strand to SEQ ID NO: 387943
cuuauucaaggccaccuag

SEQ ID NO: 387945 - RNA, 19 nt, Artificial Sequence
  Description of Artificial Sequence: Synthetic oligonucleotide
  Sense Strand Starting at position 879 of SEQ ID NO: 318265
gaaggacagucuucugguu

SEQ ID NO: 387946 - RNA, 19 nt, Artificial Sequence
  Description of Artificial Sequence: Synthetic oligonucleotide
  Antisense Strand to SEQ ID NO: 387945
aaccagaagacuguccuuc

SEQ ID NO: 387947 - RNA, 19 nt, Artificial Sequence
  Description of Artificial Sequence: Synthetic oligonucleotide
  Sense Strand Starting at position 879 of SEQ ID NO: 318473
cuccauguuugcugaggga

SEQ ID NO: 387948 - RNA, 19 nt, Artificial Sequence
  Description of Artificial Sequence: Synthetic oligonucleotide
  Antisense Strand to SEQ ID NO: 387947
ucccucagcaaacauggag

SEQ ID NO: 387949 - RNA, 19 nt, Artificial Sequence
  Description of Artificial Sequence: Synthetic oligonucleotide
  Sense Strand Starting at position 879 of SEQ ID NO: 318476
cauguuugcugagggauga

SEQ ID NO: 387950 - RNA, 19 nt, Artificial Sequence
  Description of Artificial Sequence: Synthetic oligonucleotide
  Antisense Strand to SEQ ID NO: 387949
ucaucccucagcaaacaug

SEQ ID NO: 387951 - RNA, 19 nt, Artificial Sequence
  Description of Artificial Sequence: Synthetic oligonucleotide
  Sense Strand Starting at position 879 of SEQ ID NO: 319001
cagguucugccagacauga

SEQ ID NO: 387952 - RNA, 19 nt, Artificial Sequence
  Description of Artificial Sequence: Synthetic oligonucleotide
  Antisense Strand to SEQ ID NO: 387951
ucaugucuggcagaaccug

SEQ ID NO: 387953 - RNA, 19 nt, Artificial Sequence
  Description of Artificial Sequence: Synthetic oligonucleotide
  Sense Strand Starting at position 879 of SEQ ID NO: 319030
ccgcccugcucauagagaa

SEQ ID NO: 387954 - RNA, 19 nt, Artificial Sequence
  Description of Artificial Sequence: Synthetic oligonucleotide
  Antisense Strand to SEQ ID NO: 387953
uucucuaugagcagggcgg

SEQ ID NO: 387955 - RNA, 19 nt, Artificial Sequence
  Description of Artificial Sequence: Synthetic oligonucleotide
  Sense Strand Starting at position 879 of SEQ ID NO: 319168
ggguaagccugugugguau

SEQ ID NO: 387956 - RNA, 19 nt, Artificial Sequence
  Description of Artificial Sequence: Synthetic oligonucleotide
  Antisense Strand to SEQ ID NO: 387955
auaccacacaggcuuaccc

SEQ ID NO: 387957 - RNA, 19 nt, Artificial Sequence
  Description of Artificial Sequence: Synthetic oligonucleotide
  Sense Strand Starting at position 879 of SEQ ID NO: 319172
aagccugugugguaugagu

SEQ ID NO: 387958 - RNA, 19 nt, Artificial Sequence
  Description of Artificial Sequence: Synthetic oligonucleotide
  Antisense Strand to SEQ ID NO: 387957
acucauaccacacaggcuu

SEQ ID NO: 387959 - RNA, 19 nt, Artificial Sequence
  Description of Artificial Sequence: Synthetic oligonucleotide
  Sense Strand Starting at position 879 of SEQ ID NO: 319174
gccugugugguaugaguga

SEQ ID NO: 387960 - RNA, 19 nt, Artificial Sequence
  Description of Artificial Sequence: Synthetic oligonucleotide
  Antisense Strand to SEQ ID NO: 387959
ucacucauaccacacaggc

SEQ ID NO: 387961 - RNA, 19 nt, Artificial Sequence
  Description of Artificial Sequence: Synthetic oligonucleotide
  Sense Strand Starting at position 880 of SEQ ID NO: 315243
ccugccuccgaauaaacau

SEQ ID NO: 387962 - RNA, 19 nt, Artificial Sequence
  Description of Artificial Sequence: Synthetic oligonucleotide
  Antisense Strand to SEQ ID NO: 387961
auguuuauucggaggcagg

SEQ ID NO: 387963 - RNA, 19 nt, Artificial Sequence
  Description of Artificial Sequence: Synthetic oligonucleotide
  Sense Strand Starting at position 880 of SEQ ID NO: 315374
uagaguugaucugcauaau

SEQ ID NO: 387964 - RNA, 19 nt, Artificial Sequence
  Description of Artificial Sequence: Synthetic oligonucleotide
  Antisense Strand to SEQ ID NO: 387963
auuaugcagaucaacucua

SEQ ID NO: 387965 - RNA, 19 nt, Artificial Sequence
  Description of Artificial Sequence: Synthetic oligonucleotide
  Sense Strand Starting at position 880 of SEQ ID NO: 315375
agaguugaucugcauaauu

SEQ ID NO: 387966 - RNA, 19 nt, Artificial Sequence
  Description of Artificial Sequence: Synthetic oligonucleotide
  Antisense Strand to SEQ ID NO: 387965
aauuaugcagaucaacucu

SEQ ID NO: 387967 - RNA, 19 nt, Artificial Sequence
  Description of Artificial Sequence: Synthetic oligonucleotide
  Sense Strand Starting at position 880 of SEQ ID NO: 315482
caagauggcuagucaguaa

SEQ ID NO: 387968 - RNA, 19 nt, Artificial Sequence
  Description of Artificial Sequence: Synthetic oligonucleotide
  Antisense Strand to SEQ ID NO: 387967
uuacugacuagccaucuug

SEQ ID NO: 387969 - RNA, 19 nt, Artificial Sequence
  Description of Artificial Sequence: Synthetic oligonucleotide
  Sense Strand Starting at position 880 of SEQ ID NO: 315486
auggcuagucaguaaugaa

SEQ ID NO: 387970 - RNA, 19 nt, Artificial Sequence
  Description of Artificial Sequence: Synthetic oligonucleotide
  Antisense Strand to SEQ ID NO: 387969
uucauuacugacuagccau

SEQ ID NO: 387971 - RNA, 19 nt, Artificial Sequence
  Description of Artificial Sequence: Synthetic oligonucleotide
  Sense Strand Starting at position 880 of SEQ ID NO: 315597
guaagacaucuguauguga

SEQ ID NO: 387972 - RNA, 19 nt, Artificial Sequence
  Description of Artificial Sequence: Synthetic oligonucleotide
  Antisense Strand to SEQ ID NO: 387971
ucacauacagaugucuuac

SEQ ID NO: 387973 - RNA, 19 nt, Artificial Sequence
  Description of Artificial Sequence: Synthetic oligonucleotide
  Sense Strand Starting at position 880 of SEQ ID NO: 315599
aagacaucuguaugugaaa

SEQ ID NO: 387974 - RNA, 19 nt, Artificial Sequence
  Description of Artificial Sequence: Synthetic oligonucleotide
  Antisense Strand to SEQ ID NO: 387973
uuucacauacagaugucuu

SEQ ID NO: 387975 - RNA, 19 nt, Artificial Sequence
  Description of Artificial Sequence: Synthetic oligonucleotide
  Sense Strand Starting at position 880 of SEQ ID NO: 315661
aagcuuauaugaguaggaa

SEQ ID NO: 387976 - RNA, 19 nt, Artificial Sequence
  Description of Artificial Sequence: Synthetic oligonucleotide
  Antisense Strand to SEQ ID NO: 387975
uuccuacucauauaagcuu

SEQ ID NO: 387977 - RNA, 19 nt, Artificial Sequence
  Description of Artificial Sequence: Synthetic oligonucleotide
  Sense Strand Starting at position 880 of SEQ ID NO: 315734
agaucaucuuaugugguaa

SEQ ID NO: 387978 - RNA, 19 nt, Artificial Sequence
  Description of Artificial Sequence: Synthetic oligonucleotide
  Antisense Strand to SEQ ID NO: 387977
uuaccacauaagaugaucu

SEQ ID NO: 387979 - RNA, 19 nt, Artificial Sequence
  Description of Artificial Sequence: Synthetic oligonucleotide
  Sense Strand Starting at position 880 of SEQ ID NO: 315742
uuaugugguaaagguaaua

SEQ ID NO: 387980 - RNA, 19 nt, Artificial Sequence
  Description of Artificial Sequence: Synthetic oligonucleotide
  Antisense Strand to SEQ ID NO: 387979
uauuaccuuuaccacauaa

SEQ ID NO: 387981 - RNA, 19 nt, Artificial Sequence
  Description of Artificial Sequence: Synthetic oligonucleotide
  Sense Strand Starting at position 880 of SEQ ID NO: 315781
uuccauaauguguaaagca

SEQ ID NO: 387982 - RNA, 19 nt, Artificial Sequence
  Description of Artificial Sequence: Synthetic oligonucleotide
  Antisense Strand to SEQ ID NO: 387981
ugcuuuacacauuauggaa

SEQ ID NO: 387983 - RNA, 19 nt, Artificial Sequence
  Description of Artificial Sequence: Synthetic oligonucleotide
  Sense Strand Starting at position 880 of SEQ ID NO: 315905
ugacaaacugcauguuaag

SEQ ID NO: 387984 - RNA, 19 nt, Artificial Sequence
  Description of Artificial Sequence: Synthetic oligonucleotide
  Antisense Strand to SEQ ID NO: 387983
cuuaacaugcaguuuguca

SEQ ID NO: 387985 - RNA, 19 nt, Artificial Sequence
  Description of Artificial Sequence: Synthetic oligonucleotide
  Sense Strand Starting at position 880 of SEQ ID NO: 316117
aucagcauugaugggauaa

SEQ ID NO: 387986 - RNA, 19 nt, Artificial Sequence
  Description of Artificial Sequence: Synthetic oligonucleotide
  Antisense Strand to SEQ ID NO: 387985
uuaucccaucaaugcugau

SEQ ID NO: 387987 - RNA, 19 nt, Artificial Sequence
  Description of Artificial Sequence: Synthetic oligonucleotide
  Sense Strand Starting at position 880 of SEQ ID NO: 316129
gggauaaaguuacauuuga

SEQ ID NO: 387988 - RNA, 19 nt, Artificial Sequence
  Description of Artificial Sequence: Synthetic oligonucleotide
  Antisense Strand to SEQ ID NO: 387987
ucaaauguaacuuuauccc

SEQ ID NO: 387989 - RNA, 19 nt, Artificial Sequence
  Description of Artificial Sequence: Synthetic oligonucleotide
  Sense Strand Starting at position 880 of SEQ ID NO: 316134
aaaguuacauuugaguaga

SEQ ID NO: 387990 - RNA, 19 nt, Artificial Sequence
  Description of Artificial Sequence: Synthetic oligonucleotide
  Antisense Strand to SEQ ID NO: 387989
ucuacucaaauguaacuuu

SEQ ID NO: 387991 - RNA, 19 nt, Artificial Sequence
  Description of Artificial Sequence: Synthetic oligonucleotide
  Sense Strand Starting at position 880 of SEQ ID NO: 316145
ugaguagacgcauaugaau

SEQ ID NO: 387992 - RNA, 19 nt, Artificial Sequence
  Description of Artificial Sequence: Synthetic oligonucleotide
  Antisense Strand to SEQ ID NO: 387991
auucauaugcgucuacuca

SEQ ID NO: 387993 - RNA, 19 nt, Artificial Sequence
  Description of Artificial Sequence: Synthetic oligonucleotide
  Sense Strand Starting at position 880 of SEQ ID NO: 316147
aguagacgcauaugaauaa

SEQ ID NO: 387994 - RNA, 19 nt, Artificial Sequence
  Description of Artificial Sequence: Synthetic oligonucleotide
  Antisense Strand to SEQ ID NO: 387993
uuauucauaugcgucuacu

SEQ ID NO: 387995 - RNA, 19 nt, Artificial Sequence
  Description of Artificial Sequence: Synthetic oligonucleotide
  Sense Strand Starting at position 880 of SEQ ID NO: 316189
guuugaagguaacuuuaga

SEQ ID NO: 387996 - RNA, 19 nt, Artificial Sequence
  Description of Artificial Sequence: Synthetic oligonucleotide
  Antisense Strand to SEQ ID NO: 387995
ucuaaaguuaccuucaaac

SEQ ID NO: 387997 - RNA, 19 nt, Artificial Sequence
  Description of Artificial Sequence: Synthetic oligonucleotide
  Sense Strand Starting at position 880 of SEQ ID NO: 316224
gucauuuauucugucugac

SEQ ID NO: 387998 - RNA, 19 nt, Artificial Sequence
  Description of Artificial Sequence: Synthetic oligonucleotide
  Antisense Strand to SEQ ID NO: 387997
gucagacagaauaaaugac

SEQ ID NO: 387999 - RNA, 19 nt, Artificial Sequence
  Description of Artificial Sequence: Synthetic oligonucleotide
  Sense Strand Starting at position 880 of SEQ ID NO: 316230
uauucugucugaccaggaa

SEQ ID NO: 388000 - RNA, 19 nt, Artificial Sequence
  Description of Artificial Sequence: Synthetic oligonucleotide
  Antisense Strand to SEQ ID NO: 387999
uuccuggucagacagaaua

SEQ ID NO: 388001 - RNA, 19 nt, Artificial Sequence
  Description of Artificial Sequence: Synthetic oligonucleotide
  Sense Strand Starting at position 880 of SEQ ID NO: 316436
uuuacuaucccugacuagu

SEQ ID NO: 388002 - RNA, 19 nt, Artificial Sequence
  Description of Artificial Sequence: Synthetic oligonucleotide
  Antisense Strand to SEQ ID NO: 388001
acuagucagggauaguaaa

SEQ ID NO: 388003 - RNA, 19 nt, Artificial Sequence
  Description of Artificial Sequence: Synthetic oligonucleotide
  Sense Strand Starting at position 880 of SEQ ID NO: 316472
gggaaucauucucuccaga

SEQ ID NO: 388004 - RNA, 19 nt, Artificial Sequence
  Description of Artificial Sequence: Synthetic oligonucleotide
  Antisense Strand to SEQ ID NO: 388003
ucuggagagaaugauuccc

SEQ ID NO: 388005 - RNA, 19 nt, Artificial Sequence
  Description of Artificial Sequence: Synthetic oligonucleotide
  Sense Strand Starting at position 880 of SEQ ID NO: 316480
uucucuccagauuauugua

SEQ ID NO: 388006 - RNA, 19 nt, Artificial Sequence
  Description of Artificial Sequence: Synthetic oligonucleotide
  Antisense Strand to SEQ ID NO: 388005
uacaauaaucuggagagaa

SEQ ID NO: 388007 - RNA, 19 nt, Artificial Sequence
  Description of Artificial Sequence: Synthetic oligonucleotide
  Sense Strand Starting at position 880 of SEQ ID NO: 316978
cauuauuggcaagagcagu

SEQ ID NO: 388008 - RNA, 19 nt, Artificial Sequence
  Description of Artificial Sequence: Synthetic oligonucleotide
  Antisense Strand to SEQ ID NO: 388007
acugcucuugccaauaaug

SEQ ID NO: 388009 - RNA, 19 nt, Artificial Sequence
  Description of Artificial Sequence: Synthetic oligonucleotide
  Sense Strand Starting at position 880 of SEQ ID NO: 316984
uggcaagagcaguacaauu

SEQ ID NO: 388010 - RNA, 19 nt, Artificial Sequence
  Description of Artificial Sequence: Synthetic oligonucleotide
  Antisense Strand to SEQ ID NO: 388009
aauuguacugcucuugcca

SEQ ID NO: 388011 - RNA, 19 nt, Artificial Sequence
  Description of Artificial Sequence: Synthetic oligonucleotide
  Sense Strand Starting at position 880 of SEQ ID NO: 317106
cccuuuauggcaugaugag

SEQ ID NO: 388012 - RNA, 19 nt, Artificial Sequence
  Description of Artificial Sequence: Synthetic oligonucleotide
  Antisense Strand to SEQ ID NO: 388011
cucaucaugccauaaaggg

SEQ ID NO: 388013 - RNA, 19 nt, Artificial Sequence
  Description of Artificial Sequence: Synthetic oligonucleotide
  Sense Strand Starting at position 880 of SEQ ID NO: 317180
auagaacuuugucccaaag

SEQ ID NO: 388014 - RNA, 19 nt, Artificial Sequence
  Description of Artificial Sequence: Synthetic oligonucleotide
  Antisense Strand to SEQ ID NO: 388013
cuuugggacaaaguucuau

SEQ ID NO: 388015 - RNA, 19 nt, Artificial Sequence
  Description of Artificial Sequence: Synthetic oligonucleotide
  Sense Strand Starting at position 880 of SEQ ID NO: 317274
ggcuacuuuggguaugaga

SEQ ID NO: 388016 - RNA, 19 nt, Artificial Sequence
  Description of Artificial Sequence: Synthetic oligonucleotide
  Antisense Strand to SEQ ID NO: 388015
ucucauacccaaaguagcc

SEQ ID NO: 388017 - RNA, 19 nt, Artificial Sequence
  Description of Artificial Sequence: Synthetic oligonucleotide
  Sense Strand Starting at position 880 of SEQ ID NO: 317276
cuacuuuggguaugagaca

SEQ ID NO: 388018 - RNA, 19 nt, Artificial Sequence
  Description of Artificial Sequence: Synthetic oligonucleotide
  Antisense Strand to SEQ ID NO: 388017
ugucucauacccaaaguag

SEQ ID NO: 388019 - RNA, 19 nt, Artificial Sequence
  Description of Artificial Sequence: Synthetic oligonucleotide
  Sense Strand Starting at position 880 of SEQ ID NO: 317281
uuggguaugagacaugcau

SEQ ID NO: 388020 - RNA, 19 nt, Artificial Sequence
  Description of Artificial Sequence: Synthetic oligonucleotide
  Antisense Strand to SEQ ID NO: 388019
augcaugucucauacccaa

SEQ ID NO: 388021 - RNA, 19 nt, Artificial Sequence
  Description of Artificial Sequence: Synthetic oligonucleotide
  Sense Strand Starting at position 880 of SEQ ID NO: 317682
acuggaauguuuccaacuu

SEQ ID NO: 388022 - RNA, 19 nt, Artificial Sequence
  Description of Artificial Sequence: Synthetic oligonucleotide
  Antisense Strand to SEQ ID NO: 388021
aaguuggaaacauuccagu

SEQ ID NO: 388023 - RNA, 19 nt, Artificial Sequence
  Description of Artificial Sequence: Synthetic oligonucleotide
  Sense Strand Starting at position 880 of SEQ ID NO: 317799
acagcaugaaugggucuaa

SEQ ID NO: 388024 - RNA, 19 nt, Artificial Sequence
  Description of Artificial Sequence: Synthetic oligonucleotide
  Antisense Strand to SEQ ID NO: 388023
uuagacccauucaugcugu

SEQ ID NO: 388025 - RNA, 19 nt, Artificial Sequence
  Description of Artificial Sequence: Synthetic oligonucleotide
  Sense Strand Starting at position 880 of SEQ ID NO: 317800
cagcaugaaugggucuaaa

SEQ ID NO: 388026 - RNA, 19 nt, Artificial Sequence
  Description of Artificial Sequence: Synthetic oligonucleotide
  Antisense Strand to SEQ ID NO: 388025
uuuagacccauucaugcug

SEQ ID NO: 388027 - RNA, 19 nt, Artificial Sequence
  Description of Artificial Sequence: Synthetic oligonucleotide
  Sense Strand Starting at position 880 of SEQ ID NO: 317866
uucccuaaagucuauguaa

SEQ ID NO: 388028 - RNA, 19 nt, Artificial Sequence
  Description of Artificial Sequence: Synthetic oligonucleotide
  Antisense Strand to SEQ ID NO: 388027
uuacauagacuuuagggaa

SEQ ID NO: 388029 - RNA, 19 nt, Artificial Sequence
  Description of Artificial Sequence: Synthetic oligonucleotide
  Sense Strand Starting at position 880 of SEQ ID NO: 317868
cccuaaagucuauguaaac

SEQ ID NO: 388030 - RNA, 19 nt, Artificial Sequence
  Description of Artificial Sequence: Synthetic oligonucleotide
  Antisense Strand to SEQ ID NO: 388029
guuuacauagacuuuaggg

SEQ ID NO: 388031 - RNA, 19 nt, Artificial Sequence
  Description of Artificial Sequence: Synthetic oligonucleotide
  Sense Strand Starting at position 880 of SEQ ID NO: 317869
ccuaaagucuauguaaaca

SEQ ID NO: 388032 - RNA, 19 nt, Artificial Sequence
  Description of Artificial Sequence: Synthetic oligonucleotide
  Antisense Strand to SEQ ID NO: 388031
uguuuacauagacuuuagg

SEQ ID NO: 388033 - RNA, 19 nt, Artificial Sequence
  Description of Artificial Sequence: Synthetic oligonucleotide
  Sense Strand Starting at position 880 of SEQ ID NO: 318476
accaacuagcugugagacu

SEQ ID NO: 388034 - RNA, 19 nt, Artificial Sequence
  Description of Artificial Sequence: Synthetic oligonucleotide
  Antisense Strand to SEQ ID NO: 388033
agucucacagcuaguuggu

SEQ ID NO: 388035 - RNA, 19 nt, Artificial Sequence
  Description of Artificial Sequence: Synthetic oligonucleotide
  Sense Strand Starting at position 880 of SEQ ID NO: 318977
cccagcucccaagaaguuu

SEQ ID NO: 388036 - RNA, 19 nt, Artificial Sequence
  Description of Artificial Sequence: Synthetic oligonucleotide
  Antisense Strand to SEQ ID NO: 388035
aaacuucuugggagcuggg

SEQ ID NO: 388037 - RNA, 19 nt, Artificial Sequence
  Description of Artificial Sequence: Synthetic oligonucleotide
  Sense Strand Starting at position 880 of SEQ ID NO: 318996
uggaaaggcuuccuuccaa

SEQ ID NO: 388038 - RNA, 19 nt, Artificial Sequence
  Description of Artificial Sequence: Synthetic oligonucleotide
  Antisense Strand to SEQ ID NO: 388037
uuggaaggaagccuuucca

SEQ ID NO: 388039 - RNA, 19 nt, Artificial Sequence
  Description of Artificial Sequence: Synthetic oligonucleotide
  Sense Strand Starting at position 880 of SEQ ID NO: 319092
gggagucuugcucauaaua

SEQ ID NO: 388040 - RNA, 19 nt, Artificial Sequence
  Description of Artificial Sequence: Synthetic oligonucleotide
  Antisense Strand to SEQ ID NO: 388039
uauuaugagcaagacuccc

SEQ ID NO: 388041 - RNA, 19 nt, Artificial Sequence
  Description of Artificial Sequence: Synthetic oligonucleotide
  Sense Strand Starting at position 881 of SEQ ID NO: 315272
cugaaagauuacguaacuu

SEQ ID NO: 388042 - RNA, 19 nt, Artificial Sequence
  Description of Artificial Sequence: Synthetic oligonucleotide
  Antisense Strand to SEQ ID NO: 388041
aaguuacguaaucuuucag

SEQ ID NO: 388043 - RNA, 19 nt, Artificial Sequence
  Description of Artificial Sequence: Synthetic oligonucleotide
  Sense Strand Starting at position 881 of SEQ ID NO: 315285
uaacuuguccaagaccgua

SEQ ID NO: 388044 - RNA, 19 nt, Artificial Sequence
  Description of Artificial Sequence: Synthetic oligonucleotide
  Antisense Strand to SEQ ID NO: 388043
uacggucuuggacaaguua

SEQ ID NO: 388045 - RNA, 19 nt, Artificial Sequence
  Description of Artificial Sequence: Synthetic oligonucleotide
  Sense Strand Starting at position 881 of SEQ ID NO: 315535
aaggauuccguaugacaau

SEQ ID NO: 388046 - RNA, 19 nt, Artificial Sequence
  Description of Artificial Sequence: Synthetic oligonucleotide
  Antisense Strand to SEQ ID NO: 388045
auugucauacggaauccuu

SEQ ID NO: 388047 - RNA, 19 nt, Artificial Sequence
  Description of Artificial Sequence: Synthetic oligonucleotide
  Sense Strand Starting at position 881 of SEQ ID NO: 315650
gauuauagccuuugagauc

SEQ ID NO: 388048 - RNA, 19 nt, Artificial Sequence
  Description of Artificial Sequence: Synthetic oligonucleotide
  Antisense Strand to SEQ ID NO: 388047
gaucucaaaggcuauaauc

SEQ ID NO: 388049 - RNA, 19 nt, Artificial Sequence
  Description of Artificial Sequence: Synthetic oligonucleotide
  Sense Strand Starting at position 881 of SEQ ID NO: 315659
cuuugagaucucugaauaa

SEQ ID NO: 388050 - RNA, 19 nt, Artificial Sequence
  Description of Artificial Sequence: Synthetic oligonucleotide
  Antisense Strand to SEQ ID NO: 388049
uuauucagagaucucaaag

SEQ ID NO: 388051 - RNA, 19 nt, Artificial Sequence
  Description of Artificial Sequence: Synthetic oligonucleotide
  Sense Strand Starting at position 881 of SEQ ID NO: 316306
gugaaagcagcuuagauua

SEQ ID NO: 388052 - RNA, 19 nt, Artificial Sequence
  Description of Artificial Sequence: Synthetic oligonucleotide
  Antisense Strand to SEQ ID NO: 388051
uaaucuaagcugcuuucac

SEQ ID NO: 388053 - RNA, 19 nt, Artificial Sequence
  Description of Artificial Sequence: Synthetic oligonucleotide
  Sense Strand Starting at position 881 of SEQ ID NO: 316383
uccacaggccucugauaga

SEQ ID NO: 388054 - RNA, 19 nt, Artificial Sequence
  Description of Artificial Sequence: Synthetic oligonucleotide
  Antisense Strand to SEQ ID NO: 388053
ucuaucagaggccugugga

SEQ ID NO: 388055 - RNA, 19 nt, Artificial Sequence
  Description of Artificial Sequence: Synthetic oligonucleotide
  Sense Strand Starting at position 881 of SEQ ID NO: 316464
guaucuugacagcaggauu

SEQ ID NO: 388056 - RNA, 19 nt, Artificial Sequence
  Description of Artificial Sequence: Synthetic oligonucleotide
  Antisense Strand to SEQ ID NO: 388055
aauccugcugucaagauac

SEQ ID NO: 388057 - RNA, 19 nt, Artificial Sequence
  Description of Artificial Sequence: Synthetic oligonucleotide
  Sense Strand Starting at position 881 of SEQ ID NO: 316475
gcaggauugacagagcuua

SEQ ID NO: 388058 - RNA, 19 nt, Artificial Sequence
  Description of Artificial Sequence: Synthetic oligonucleotide
  Antisense Strand to SEQ ID NO: 388057
uaagcucugucaauccugc

SEQ ID NO: 388059 - RNA, 19 nt, Artificial Sequence
  Description of Artificial Sequence: Synthetic oligonucleotide
  Sense Strand Starting at position 881 of SEQ ID NO: 316487
gagcuuaucccugacugua

SEQ ID NO: 388060 - RNA, 19 nt, Artificial Sequence
  Description of Artificial Sequence: Synthetic oligonucleotide
  Antisense Strand to SEQ ID NO: 388059
uacagucagggauaagcuc

SEQ ID NO: 388061 - RNA, 19 nt, Artificial Sequence
  Description of Artificial Sequence: Synthetic oligonucleotide
  Sense Strand Starting at position 881 of SEQ ID NO: 316537
aaggcaauuugucuuaguu

SEQ ID NO: 388062 - RNA, 19 nt, Artificial Sequence
  Description of Artificial Sequence: Synthetic oligonucleotide
  Antisense Strand to SEQ ID NO: 388061
aacuaagacaaauugccuu

SEQ ID NO: 388063 - RNA, 19 nt, Artificial Sequence
  Description of Artificial Sequence: Synthetic oligonucleotide
  Sense Strand Starting at position 881 of SEQ ID NO: 316603
guccuccacccugauagua

SEQ ID NO: 388064 - RNA, 19 nt, Artificial Sequence
  Description of Artificial Sequence: Synthetic oligonucleotide
  Antisense Strand to SEQ ID NO: 388063
uacuaucaggguggaggac

SEQ ID NO: 388065 - RNA, 19 nt, Artificial Sequence
  Description of Artificial Sequence: Synthetic oligonucleotide
  Sense Strand Starting at position 881 of SEQ ID NO: 316623
cgguuuagugcugcaaacu

SEQ ID NO: 388066 - RNA, 19 nt, Artificial Sequence
  Description of Artificial Sequence: Synthetic oligonucleotide
  Antisense Strand to SEQ ID NO: 388065
aguuugcagcacuaaaccg

SEQ ID NO: 388067 - RNA, 19 nt, Artificial Sequence
  Description of Artificial Sequence: Synthetic oligonucleotide
  Sense Strand Starting at position 881 of SEQ ID NO: 316651
uguuguuauaugggacaua

SEQ ID NO: 388068 - RNA, 19 nt, Artificial Sequence
  Description of Artificial Sequence: Synthetic oligonucleotide
  Antisense Strand to SEQ ID NO: 388067
uaugucccauauaacaaca

SEQ ID NO: 388069 - RNA, 19 nt, Artificial Sequence
  Description of Artificial Sequence: Synthetic oligonucleotide
  Sense Strand Starting at position 881 of SEQ ID NO: 316673
uauagauaagucugaaagc

SEQ ID NO: 388070 - RNA, 19 nt, Artificial Sequence
  Description of Artificial Sequence: Synthetic oligonucleotide
  Antisense Strand to SEQ ID NO: 388069
gcuuucagacuuaucuaua

SEQ ID NO: 388071 - RNA, 19 nt, Artificial Sequence
  Description of Artificial Sequence: Synthetic oligonucleotide
  Sense Strand Starting at position 881 of SEQ ID NO: 316728
ucaauaagugucuaaagca

SEQ ID NO: 388072 - RNA, 19 nt, Artificial Sequence
  Description of Artificial Sequence: Synthetic oligonucleotide
  Antisense Strand to SEQ ID NO: 388071
ugcuuuagacacuuauuga

SEQ ID NO: 388073 - RNA, 19 nt, Artificial Sequence
  Description of Artificial Sequence: Synthetic oligonucleotide
  Sense Strand Starting at position 881 of SEQ ID NO: 316802
auaagcauugacuggugau

SEQ ID NO: 388074 - RNA, 19 nt, Artificial Sequence
  Description of Artificial Sequence: Synthetic oligonucleotide
  Antisense Strand to SEQ ID NO: 388073
aucaccagucaaugcuuau

SEQ ID NO: 388075 - RNA, 19 nt, Artificial Sequence
  Description of Artificial Sequence: Synthetic oligonucleotide
  Sense Strand Starting at position 881 of SEQ ID NO: 316808
auugacuggugauccacaa

SEQ ID NO: 388076 - RNA, 19 nt, Artificial Sequence
  Description of Artificial Sequence: Synthetic oligonucleotide
  Antisense Strand to SEQ ID NO: 388075
uuguggaucaccagucaau

SEQ ID NO: 388077 - RNA, 19 nt, Artificial Sequence
  Description of Artificial Sequence: Synthetic oligonucleotide
  Sense Strand Starting at position 881 of SEQ ID NO: 316881
agggauauuacuggaguug

SEQ ID NO: 388078 - RNA, 19 nt, Artificial Sequence
  Description of Artificial Sequence: Synthetic oligonucleotide
  Antisense Strand to SEQ ID NO: 388077
caacuccaguaauaucccu

SEQ ID NO: 388079 - RNA, 19 nt, Artificial Sequence
  Description of Artificial Sequence: Synthetic oligonucleotide
  Sense Strand Starting at position 881 of SEQ ID NO: 316983
gggcccauuccuuacaagu

SEQ ID NO: 388080 - RNA, 19 nt, Artificial Sequence
  Description of Artificial Sequence: Synthetic oligonucleotide
  Antisense Strand to SEQ ID NO: 388079
acuuguaaggaaugggccc

SEQ ID NO: 388081 - RNA, 19 nt, Artificial Sequence
  Description of Artificial Sequence: Synthetic oligonucleotide
  Sense Strand Starting at position 881 of SEQ ID NO: 317001
uggagauaguaagugcaau

SEQ ID NO: 388082 - RNA, 19 nt, Artificial Sequence
  Description of Artificial Sequence: Synthetic oligonucleotide
  Antisense Strand to SEQ ID NO: 388081
auugcacuuacuaucucca

SEQ ID NO: 388083 - RNA, 19 nt, Artificial Sequence
  Description of Artificial Sequence: Synthetic oligonucleotide
  Sense Strand Starting at position 881 of SEQ ID NO: 317018
augggacuucuuggguaau

SEQ ID NO: 388084 - RNA, 19 nt, Artificial Sequence
  Description of Artificial Sequence: Synthetic oligonucleotide
  Antisense Strand to SEQ ID NO: 388083
auuacccaagaagucccau

SEQ ID NO: 388085 - RNA, 19 nt, Artificial Sequence
  Description of Artificial Sequence: Synthetic oligonucleotide
  Sense Strand Starting at position 881 of SEQ ID NO: 317020
gggacuucuuggguaauua

SEQ ID NO: 388086 - RNA, 19 nt, Artificial Sequence
  Description of Artificial Sequence: Synthetic oligonucleotide
  Antisense Strand to SEQ ID NO: 388085
uaauuacccaagaaguccc

SEQ ID NO: 388087 - RNA, 19 nt, Artificial Sequence
  Description of Artificial Sequence: Synthetic oligonucleotide
  Sense Strand Starting at position 881 of SEQ ID NO: 317242
aguaacucauugucagaag

SEQ ID NO: 388088 - RNA, 19 nt, Artificial Sequence
  Description of Artificial Sequence: Synthetic oligonucleotide
  Antisense Strand to SEQ ID NO: 388087
cuucugacaaugaguuacu

SEQ ID NO: 388089 - RNA, 19 nt, Artificial Sequence
  Description of Artificial Sequence: Synthetic oligonucleotide
  Sense Strand Starting at position 881 of SEQ ID NO: 317466
cagggucuagaaugacauu

SEQ ID NO: 388090 - RNA, 19 nt, Artificial Sequence
  Description of Artificial Sequence: Synthetic oligonucleotide
  Antisense Strand to SEQ ID NO: 388089
aaugucauucuagacccug

SEQ ID NO: 388091 - RNA, 19 nt, Artificial Sequence
  Description of Artificial Sequence: Synthetic oligonucleotide
  Sense Strand Starting at position 881 of SEQ ID NO: 317469
ggucuagaaugacauuuag

SEQ ID NO: 388092 - RNA, 19 nt, Artificial Sequence
  Description of Artificial Sequence: Synthetic oligonucleotide
  Antisense Strand to SEQ ID NO: 388091
cuaaaugucauucuagacc

SEQ ID NO: 388093 - RNA, 19 nt, Artificial Sequence
  Description of Artificial Sequence: Synthetic oligonucleotide
  Sense Strand Starting at position 881 of SEQ ID NO: 317609
cuccuaguaguccaagauc

SEQ ID NO: 388094 - RNA, 19 nt, Artificial Sequence
  Description of Artificial Sequence: Synthetic oligonucleotide
  Antisense Strand to SEQ ID NO: 388093
gaucuuggacuacuaggag

SEQ ID NO: 388095 - RNA, 19 nt, Artificial Sequence
  Description of Artificial Sequence: Synthetic oligonucleotide
  Sense Strand Starting at position 881 of SEQ ID NO: 317612
cuaguaguccaagauccaa

SEQ ID NO: 388096 - RNA, 19 nt, Artificial Sequence
  Description of Artificial Sequence: Synthetic oligonucleotide
  Antisense Strand to SEQ ID NO: 388095
uuggaucuuggacuacuag

SEQ ID NO: 388097 - RNA, 19 nt, Artificial Sequence
  Description of Artificial Sequence: Synthetic oligonucleotide
  Sense Strand Starting at position 881 of SEQ ID NO: 317798
cauugcugguguccauuua

SEQ ID NO: 388098 - RNA, 19 nt, Artificial Sequence
  Description of Artificial Sequence: Synthetic oligonucleotide
  Antisense Strand to SEQ ID NO: 388097
uaaauggacaccagcaaug

SEQ ID NO: 388099 - RNA, 19 nt, Artificial Sequence
  Description of Artificial Sequence: Synthetic oligonucleotide
  Sense Strand Starting at position 881 of SEQ ID NO: 317980
agagaucugagucgaugaa

SEQ ID NO: 388100 - RNA, 19 nt, Artificial Sequence
  Description of Artificial Sequence: Synthetic oligonucleotide
  Antisense Strand to SEQ ID NO: 388099
uucaucgacucagaucucu

SEQ ID NO: 388101 - RNA, 19 nt, Artificial Sequence
  Description of Artificial Sequence: Synthetic oligonucleotide
  Sense Strand Starting at position 881 of SEQ ID NO: 318206
aaacguaucccaggauaaa

SEQ ID NO: 388102 - RNA, 19 nt, Artificial Sequence
  Description of Artificial Sequence: Synthetic oligonucleotide
  Antisense Strand to SEQ ID NO: 388101
uuuauccugggauacguuu

SEQ ID NO: 388103 - RNA, 19 nt, Artificial Sequence
  Description of Artificial Sequence: Synthetic oligonucleotide
  Sense Strand Starting at position 881 of SEQ ID NO: 318481
gagggagucuuacuacugu

SEQ ID NO: 388104 - RNA, 19 nt, Artificial Sequence
  Description of Artificial Sequence: Synthetic oligonucleotide
  Antisense Strand to SEQ ID NO: 388103
acaguaguaagacucccuc

SEQ ID NO: 388105 - RNA, 19 nt, Artificial Sequence
  Description of Artificial Sequence: Synthetic oligonucleotide
  Sense Strand Starting at position 881 of SEQ ID NO: 318487
gucuuacuacuguauggaa

SEQ ID NO: 388106 - RNA, 19 nt, Artificial Sequence
  Description of Artificial Sequence: Synthetic oligonucleotide
  Antisense Strand to SEQ ID NO: 388105
uuccauacaguaguaagac

SEQ ID NO: 388107 - RNA, 19 nt, Artificial Sequence
  Description of Artificial Sequence: Synthetic oligonucleotide
  Sense Strand Starting at position 881 of SEQ ID NO: 318591
aguucucuucuuuagaaag

SEQ ID NO: 388108 - RNA, 19 nt, Artificial Sequence
  Description of Artificial Sequence: Synthetic oligonucleotide
  Antisense Strand to SEQ ID NO: 388107
cuuucuaaagaagagaacu

SEQ ID NO: 388109 - RNA, 19 nt, Artificial Sequence
  Description of Artificial Sequence: Synthetic oligonucleotide
  Sense Strand Starting at position 881 of SEQ ID NO: 318661
augugcauuuguuuauagu

SEQ ID NO: 388110 - RNA, 19 nt, Artificial Sequence
  Description of Artificial Sequence: Synthetic oligonucleotide
  Antisense Strand to SEQ ID NO: 388109
acuauaaacaaaugcacau

SEQ ID NO: 388111 - RNA, 19 nt, Artificial Sequence
  Description of Artificial Sequence: Synthetic oligonucleotide
  Sense Strand Starting at position 881 of SEQ ID NO: 318662
ugugcauuuguuuauaguu

SEQ ID NO: 388112 - RNA, 19 nt, Artificial Sequence
  Description of Artificial Sequence: Synthetic oligonucleotide
  Antisense Strand to SEQ ID NO: 388111
aacuauaaacaaaugcaca

SEQ ID NO: 388113 - RNA, 19 nt, Artificial Sequence
  Description of Artificial Sequence: Synthetic oligonucleotide
  Sense Strand Starting at position 881 of SEQ ID NO: 318706
gcucauuugucccuuauua

SEQ ID NO: 388114 - RNA, 19 nt, Artificial Sequence
  Description of Artificial Sequence: Synthetic oligonucleotide
  Antisense Strand to SEQ ID NO: 388113
uaauaagggacaaaugagc

SEQ ID NO: 388115 - RNA, 19 nt, Artificial Sequence
  Description of Artificial Sequence: Synthetic oligonucleotide
  Sense Strand Starting at position 881 of SEQ ID NO: 318782
guuagagauuaacugauuc

SEQ ID NO: 388116 - RNA, 19 nt, Artificial Sequence
  Description of Artificial Sequence: Synthetic oligonucleotide
  Antisense Strand to SEQ ID NO: 388115
gaaucaguuaaucucuaac

SEQ ID NO: 388117 - RNA, 19 nt, Artificial Sequence
  Description of Artificial Sequence: Synthetic oligonucleotide
  Sense Strand Starting at position 881 of SEQ ID NO: 318824
aguaaugagacuugaaguc

SEQ ID NO: 388118 - RNA, 19 nt, Artificial Sequence
  Description of Artificial Sequence: Synthetic oligonucleotide
  Antisense Strand to SEQ ID NO: 388117
gacuucaagucucauuacu

SEQ ID NO: 388119 - RNA, 19 nt, Artificial Sequence
  Description of Artificial Sequence: Synthetic oligonucleotide
  Sense Strand Starting at position 881 of SEQ ID NO: 318883
gacuuuaugaagugagguc

SEQ ID NO: 388120 - RNA, 19 nt, Artificial Sequence
  Description of Artificial Sequence: Synthetic oligonucleotide
  Antisense Strand to SEQ ID NO: 388119
gaccucacuucauaaaguc

SEQ ID NO: 388121 - RNA, 19 nt, Artificial Sequence
  Description of Artificial Sequence: Synthetic oligonucleotide
  Sense Strand Starting at position 882 of SEQ ID NO: 315286
gcugguaucuucuuuggaa

SEQ ID NO: 388122 - RNA, 19 nt, Artificial Sequence
  Description of Artificial Sequence: Synthetic oligonucleotide
  Antisense Strand to SEQ ID NO: 388121
uuccaaagaagauaccagc

SEQ ID NO: 388123 - RNA, 19 nt, Artificial Sequence
  Description of Artificial Sequence: Synthetic oligonucleotide
  Sense Strand Starting at position 882 of SEQ ID NO: 315287
cugguaucuucuuuggaau

SEQ ID NO: 388124 - RNA, 19 nt, Artificial Sequence
  Description of Artificial Sequence: Synthetic oligonucleotide
  Antisense Strand to SEQ ID NO: 388123
auuccaaagaagauaccag

SEQ ID NO: 388125 - RNA, 19 nt, Artificial Sequence
  Description of Artificial Sequence: Synthetic oligonucleotide
  Sense Strand Starting at position 882 of SEQ ID NO: 315288
ugguaucuucuuuggaauu

SEQ ID NO: 388126 - RNA, 19 nt, Artificial Sequence
  Description of Artificial Sequence: Synthetic oligonucleotide
  Antisense Strand to SEQ ID NO: 388125
aauuccaaagaagauacca

SEQ ID NO: 388127 - RNA, 19 nt, Artificial Sequence
  Description of Artificial Sequence: Synthetic oligonucleotide
  Sense Strand Starting at position 882 of SEQ ID NO: 315289
gguaucuucuuuggaauuu

SEQ ID NO: 388128 - RNA, 19 nt, Artificial Sequence
  Description of Artificial Sequence: Synthetic oligonucleotide
  Antisense Strand to SEQ ID NO: 388127
aaauuccaaagaagauacc

SEQ ID NO: 388129 - RNA, 19 nt, Artificial Sequence
  Description of Artificial Sequence: Synthetic oligonucleotide
  Sense Strand Starting at position 882 of SEQ ID NO: 315379
gucaccuaacucugucaau

SEQ ID NO: 388130 - RNA, 19 nt, Artificial Sequence
  Description of Artificial Sequence: Synthetic oligonucleotide
  Antisense Strand to SEQ ID NO: 388129
auugacagaguuaggugac

SEQ ID NO: 388131 - RNA, 19 nt, Artificial Sequence
  Description of Artificial Sequence: Synthetic oligonucleotide
  Sense Strand Starting at position 882 of SEQ ID NO: 315391
ugucaauaggauugauuau

SEQ ID NO: 388132 - RNA, 19 nt, Artificial Sequence
  Description of Artificial Sequence: Synthetic oligonucleotide
  Antisense Strand to SEQ ID NO: 388131
auaaucaauccuauugaca

SEQ ID NO: 388133 - RNA, 19 nt, Artificial Sequence
  Description of Artificial Sequence: Synthetic oligonucleotide
  Sense Strand Starting at position 882 of SEQ ID NO: 315397
uaggauugauuaucaugca

SEQ ID NO: 388134 - RNA, 19 nt, Artificial Sequence
  Description of Artificial Sequence: Synthetic oligonucleotide
  Antisense Strand to SEQ ID NO: 388133
ugcaugauaaucaauccua

SEQ ID NO: 388135 - RNA, 19 nt, Artificial Sequence
  Description of Artificial Sequence: Synthetic oligonucleotide
  Sense Strand Starting at position 882 of SEQ ID NO: 315404
gauuaucaugcacaguuga

SEQ ID NO: 388136 - RNA, 19 nt, Artificial Sequence
  Description of Artificial Sequence: Synthetic oligonucleotide
  Antisense Strand to SEQ ID NO: 388135
ucaacugugcaugauaauc

SEQ ID NO: 388137 - RNA, 19 nt, Artificial Sequence
  Description of Artificial Sequence: Synthetic oligonucleotide
  Sense Strand Starting at position 882 of SEQ ID NO: 315424
agcaacuuccauggaaaca

SEQ ID NO: 388138 - RNA, 19 nt, Artificial Sequence
  Description of Artificial Sequence: Synthetic oligonucleotide
  Antisense Strand to SEQ ID NO: 388137
uguuuccauggaaguugcu

SEQ ID NO: 388139 - RNA, 19 nt, Artificial Sequence
  Description of Artificial Sequence: Synthetic oligonucleotide
  Sense Strand Starting at position 882 of SEQ ID NO: 315514
uuaguuuaucucuacgugu

SEQ ID NO: 388140 - RNA, 19 nt, Artificial Sequence
  Description of Artificial Sequence: Synthetic oligonucleotide
  Antisense Strand to SEQ ID NO: 388139
acacguagagauaaacuaa

SEQ ID NO: 388141 - RNA, 19 nt, Artificial Sequence
  Description of Artificial Sequence: Synthetic oligonucleotide
  Sense Strand Starting at position 882 of SEQ ID NO: 315576
uuguguccuugcccagaca

SEQ ID NO: 388142 - RNA, 19 nt, Artificial Sequence
  Description of Artificial Sequence: Synthetic oligonucleotide
  Antisense Strand to SEQ ID NO: 388141
ugucugggcaaggacacaa

SEQ ID NO: 388143 - RNA, 19 nt, Artificial Sequence
  Description of Artificial Sequence: Synthetic oligonucleotide
  Sense Strand Starting at position 882 of SEQ ID NO: 315577
uguguccuugcccagacau

SEQ ID NO: 388144 - RNA, 19 nt, Artificial Sequence
  Description of Artificial Sequence: Synthetic oligonucleotide
  Antisense Strand to SEQ ID NO: 388143
augucugggcaaggacaca

SEQ ID NO: 388145 - RNA, 19 nt, Artificial Sequence
  Description of Artificial Sequence: Synthetic oligonucleotide
  Sense Strand Starting at position 882 of SEQ ID NO: 315579
uguccuugcccagacauaa

SEQ ID NO: 388146 - RNA, 19 nt, Artificial Sequence
  Description of Artificial Sequence: Synthetic oligonucleotide
  Antisense Strand to SEQ ID NO: 388145
uuaugucugggcaaggaca

SEQ ID NO: 388147 - RNA, 19 nt, Artificial Sequence
  Description of Artificial Sequence: Synthetic oligonucleotide
  Sense Strand Starting at position 882 of SEQ ID NO: 315651
agaguagcaagaugguaua

SEQ ID NO: 388148 - RNA, 19 nt, Artificial Sequence
  Description of Artificial Sequence: Synthetic oligonucleotide
  Antisense Strand to SEQ ID NO: 388147
uauaccaucuugcuacucu

SEQ ID NO: 388149 - RNA, 19 nt, Artificial Sequence
  Description of Artificial Sequence: Synthetic oligonucleotide
  Sense Strand Starting at position 882 of SEQ ID NO: 315654
guagcaagaugguauauuu

SEQ ID NO: 388150 - RNA, 19 nt, Artificial Sequence
  Description of Artificial Sequence: Synthetic oligonucleotide
  Antisense Strand to SEQ ID NO: 388149
aaauauaccaucuugcuac

SEQ ID NO: 388151 - RNA, 19 nt, Artificial Sequence
  Description of Artificial Sequence: Synthetic oligonucleotide
  Sense Strand Starting at position 882 of SEQ ID NO: 315674
acuagauuacugcauaagu

SEQ ID NO: 388152 - RNA, 19 nt, Artificial Sequence
  Description of Artificial Sequence: Synthetic oligonucleotide
  Antisense Strand to SEQ ID NO: 388151
acuuaugcaguaaucuagu

SEQ ID NO: 388153 - RNA, 19 nt, Artificial Sequence
  Description of Artificial Sequence: Synthetic oligonucleotide
  Sense Strand Starting at position 882 of SEQ ID NO: 315682
acugcauaaguugauaaca

SEQ ID NO: 388154 - RNA, 19 nt, Artificial Sequence
  Description of Artificial Sequence: Synthetic oligonucleotide
  Antisense Strand to SEQ ID NO: 388153
uguuaucaacuuaugcagu

SEQ ID NO: 388155 - RNA, 19 nt, Artificial Sequence
  Description of Artificial Sequence: Synthetic oligonucleotide
  Sense Strand Starting at position 882 of SEQ ID NO: 315723
uuggaagauuucuguaggu

SEQ ID NO: 388156 - RNA, 19 nt, Artificial Sequence
  Description of Artificial Sequence: Synthetic oligonucleotide
  Antisense Strand to SEQ ID NO: 388155
accuacagaaaucuuccaa

SEQ ID NO: 388157 - RNA, 19 nt, Artificial Sequence
  Description of Artificial Sequence: Synthetic oligonucleotide
  Sense Strand Starting at position 882 of SEQ ID NO: 315856
gcucccuguccugauaacu

SEQ ID NO: 388158 - RNA, 19 nt, Artificial Sequence
  Description of Artificial Sequence: Synthetic oligonucleotide
  Antisense Strand to SEQ ID NO: 388157
aguuaucaggacagggagc

SEQ ID NO: 388159 - RNA, 19 nt, Artificial Sequence
  Description of Artificial Sequence: Synthetic oligonucleotide
  Sense Strand Starting at position 882 of SEQ ID NO: 315922
agccgaaugagcuggucuu

SEQ ID NO: 388160 - RNA, 19 nt, Artificial Sequence
  Description of Artificial Sequence: Synthetic oligonucleotide
  Antisense Strand to SEQ ID NO: 388159
aagaccagcucauucggcu

SEQ ID NO: 388161 - RNA, 19 nt, Artificial Sequence
  Description of Artificial Sequence: Synthetic oligonucleotide
  Sense Strand Starting at position 882 of SEQ ID NO: 316105
gcuggcuuucuuccgcuaa

SEQ ID NO: 388162 - RNA, 19 nt, Artificial Sequence
  Description of Artificial Sequence: Synthetic oligonucleotide
  Antisense Strand to SEQ ID NO: 388161
uuagcggaagaaagccagc

SEQ ID NO: 388163 - RNA, 19 nt, Artificial Sequence
  Description of Artificial Sequence: Synthetic oligonucleotide
  Sense Strand Starting at position 882 of SEQ ID NO: 316109
gcuuucuuccgcuaacacu

SEQ ID NO: 388164 - RNA, 19 nt, Artificial Sequence
  Description of Artificial Sequence: Synthetic oligonucleotide
  Antisense Strand to SEQ ID NO: 388163
aguguuagcggaagaaagc

SEQ ID NO: 388165 - RNA, 19 nt, Artificial Sequence
  Description of Artificial Sequence: Synthetic oligonucleotide
  Sense Strand Starting at position 882 of SEQ ID NO: 316204
gauuaaaucguguggaacu

SEQ ID NO: 388166 - RNA, 19 nt, Artificial Sequence
  Description of Artificial Sequence: Synthetic oligonucleotide
  Antisense Strand to SEQ ID NO: 388165
aguuccacacgauuuaauc

SEQ ID NO: 388167 - RNA, 19 nt, Artificial Sequence
  Description of Artificial Sequence: Synthetic oligonucleotide
  Sense Strand Starting at position 882 of SEQ ID NO: 316215
guggaacuguaaucucuga

SEQ ID NO: 388168 - RNA, 19 nt, Artificial Sequence
  Description of Artificial Sequence: Synthetic oligonucleotide
  Antisense Strand to SEQ ID NO: 388167
ucagagauuacaguuccac

SEQ ID NO: 388169 - RNA, 19 nt, Artificial Sequence
  Description of Artificial Sequence: Synthetic oligonucleotide
  Sense Strand Starting at position 882 of SEQ ID NO: 316290
uuucuuugugacugaguga

SEQ ID NO: 388170 - RNA, 19 nt, Artificial Sequence
  Description of Artificial Sequence: Synthetic oligonucleotide
  Antisense Strand to SEQ ID NO: 388169
ucacucagucacaaagaaa

SEQ ID NO: 388171 - RNA, 19 nt, Artificial Sequence
  Description of Artificial Sequence: Synthetic oligonucleotide
  Sense Strand Starting at position 882 of SEQ ID NO: 316297
gugacugagugaccggaua

SEQ ID NO: 388172 - RNA, 19 nt, Artificial Sequence
  Description of Artificial Sequence: Synthetic oligonucleotide
  Antisense Strand to SEQ ID NO: 388171
uauccggucacucagucac

SEQ ID NO: 388173 - RNA, 19 nt, Artificial Sequence
  Description of Artificial Sequence: Synthetic oligonucleotide
  Sense Strand Starting at position 882 of SEQ ID NO: 316299
gacugagugaccggauauu

SEQ ID NO: 388174 - RNA, 19 nt, Artificial Sequence
  Description of Artificial Sequence: Synthetic oligonucleotide
  Antisense Strand to SEQ ID NO: 388173
aauauccggucacucaguc

SEQ ID NO: 388175 - RNA, 19 nt, Artificial Sequence
  Description of Artificial Sequence: Synthetic oligonucleotide
  Sense Strand Starting at position 882 of SEQ ID NO: 316308
accggauauuaggagauuu

SEQ ID NO: 388176 - RNA, 19 nt, Artificial Sequence
  Description of Artificial Sequence: Synthetic oligonucleotide
  Antisense Strand to SEQ ID NO: 388175
aaaucuccuaauauccggu

SEQ ID NO: 388177 - RNA, 19 nt, Artificial Sequence
  Description of Artificial Sequence: Synthetic oligonucleotide
  Sense Strand Starting at position 882 of SEQ ID NO: 316461
aucccuaucuguguuuaag

SEQ ID NO: 388178 - RNA, 19 nt, Artificial Sequence
  Description of Artificial Sequence: Synthetic oligonucleotide
  Antisense Strand to SEQ ID NO: 388177
cuuaaacacagauagggau

SEQ ID NO: 388179 - RNA, 19 nt, Artificial Sequence
  Description of Artificial Sequence: Synthetic oligonucleotide
  Sense Strand Starting at position 882 of SEQ ID NO: 316463
cccuaucuguguuuaagau

SEQ ID NO: 388180 - RNA, 19 nt, Artificial Sequence
  Description of Artificial Sequence: Synthetic oligonucleotide
  Antisense Strand to SEQ ID NO: 388179
aucuuaaacacagauaggg

SEQ ID NO: 388181 - RNA, 19 nt, Artificial Sequence
  Description of Artificial Sequence: Synthetic oligonucleotide
  Sense Strand Starting at position 882 of SEQ ID NO: 316464
ccuaucuguguuuaagaua

SEQ ID NO: 388182 - RNA, 19 nt, Artificial Sequence
  Description of Artificial Sequence: Synthetic oligonucleotide
  Antisense Strand to SEQ ID NO: 388181
uaucuuaaacacagauagg

SEQ ID NO: 388183 - RNA, 19 nt, Artificial Sequence
  Description of Artificial Sequence: Synthetic oligonucleotide
  Sense Strand Starting at position 882 of SEQ ID NO: 316488
gaaaucuuacagggagucu

SEQ ID NO: 388184 - RNA, 19 nt, Artificial Sequence
  Description of Artificial Sequence: Synthetic oligonucleotide
  Antisense Strand to SEQ ID NO: 388183
agacucccuguaagauuuc

SEQ ID NO: 388185 - RNA, 19 nt, Artificial Sequence
  Description of Artificial Sequence: Synthetic oligonucleotide
  Sense Strand Starting at position 882 of SEQ ID NO: 316500
ggagucuguuaaccagacu

SEQ ID NO: 388186 - RNA, 19 nt, Artificial Sequence
  Description of Artificial Sequence: Synthetic oligonucleotide
  Antisense Strand to SEQ ID NO: 388185
agucugguuaacagacucc

SEQ ID NO: 388187 - RNA, 19 nt, Artificial Sequence
  Description of Artificial Sequence: Synthetic oligonucleotide
  Sense Strand Starting at position 882 of SEQ ID NO: 316560
gcccuaaugccagaccaau

SEQ ID NO: 388188 - RNA, 19 nt, Artificial Sequence
  Description of Artificial Sequence: Synthetic oligonucleotide
  Antisense Strand to SEQ ID NO: 388187
auuggucuggcauuagggc

SEQ ID NO: 388189 - RNA, 19 nt, Artificial Sequence
  Description of Artificial Sequence: Synthetic oligonucleotide
  Sense Strand Starting at position 882 of SEQ ID NO: 316569
ccagaccaauccuggaaga

SEQ ID NO: 388190 - RNA, 19 nt, Artificial Sequence
  Description of Artificial Sequence: Synthetic oligonucleotide
  Antisense Strand to SEQ ID NO: 388189
ucuuccaggauuggucugg

SEQ ID NO: 388191 - RNA, 19 nt, Artificial Sequence
  Description of Artificial Sequence: Synthetic oligonucleotide
  Sense Strand Starting at position 882 of SEQ ID NO: 317303
augugauguuuguuucgag

SEQ ID NO: 388192 - RNA, 19 nt, Artificial Sequence
  Description of Artificial Sequence: Synthetic oligonucleotide
  Antisense Strand to SEQ ID NO: 388191
cucgaaacaaacaucacau

SEQ ID NO: 388193 - RNA, 19 nt, Artificial Sequence
  Description of Artificial Sequence: Synthetic oligonucleotide
  Sense Strand Starting at position 882 of SEQ ID NO: 317353
ggcagaauuaucggaagau

SEQ ID NO: 388194 - RNA, 19 nt, Artificial Sequence
  Description of Artificial Sequence: Synthetic oligonucleotide
  Antisense Strand to SEQ ID NO: 388193
aucuuccgauaauucugcc

SEQ ID NO: 388195 - RNA, 19 nt, Artificial Sequence
  Description of Artificial Sequence: Synthetic oligonucleotide
  Sense Strand Starting at position 882 of SEQ ID NO: 318327
ggacacuccucucugacuu

SEQ ID NO: 388196 - RNA, 19 nt, Artificial Sequence
  Description of Artificial Sequence: Synthetic oligonucleotide
  Antisense Strand to SEQ ID NO: 388195
aagucagagaggagugucc

SEQ ID NO: 388197 - RNA, 19 nt, Artificial Sequence
  Description of Artificial Sequence: Synthetic oligonucleotide
  Sense Strand Starting at position 882 of SEQ ID NO: 318717
uguggcuuccguucguaaa

SEQ ID NO: 388198 - RNA, 19 nt, Artificial Sequence
  Description of Artificial Sequence: Synthetic oligonucleotide
  Antisense Strand to SEQ ID NO: 388197
uuuacgaacggaagccaca

SEQ ID NO: 388199 - RNA, 19 nt, Artificial Sequence
  Description of Artificial Sequence: Synthetic oligonucleotide
  Sense Strand Starting at position 882 of SEQ ID NO: 319031
caaggagccucugaggaaa

SEQ ID NO: 388200 - RNA, 19 nt, Artificial Sequence
  Description of Artificial Sequence: Synthetic oligonucleotide
  Antisense Strand to SEQ ID NO: 388199
uuuccucagaggcuccuug

SEQ ID NO: 388201 - RNA, 19 nt, Artificial Sequence
  Description of Artificial Sequence: Synthetic oligonucleotide
  Sense Strand Starting at position 883 of SEQ ID NO: 315242
aagcgauaauacucaguga

SEQ ID NO: 388202 - RNA, 19 nt, Artificial Sequence
  Description of Artificial Sequence: Synthetic oligonucleotide
  Antisense Strand to SEQ ID NO: 388201
ucacugaguauuaucgcuu

SEQ ID NO: 388203 - RNA, 19 nt, Artificial Sequence
  Description of Artificial Sequence: Synthetic oligonucleotide
  Sense Strand Starting at position 883 of SEQ ID NO: 315246
gauaauacucagugaggcu

SEQ ID NO: 388204 - RNA, 19 nt, Artificial Sequence
  Description of Artificial Sequence: Synthetic oligonucleotide
  Antisense Strand to SEQ ID NO: 388203
agccucacugaguauuauc

SEQ ID NO: 388205 - RNA, 19 nt, Artificial Sequence
  Description of Artificial Sequence: Synthetic oligonucleotide
  Sense Strand Starting at position 883 of SEQ ID NO: 315536
ugauuccacugucugaaga

SEQ ID NO: 388206 - RNA, 19 nt, Artificial Sequence
  Description of Artificial Sequence: Synthetic oligonucleotide
  Antisense Strand to SEQ ID NO: 388205
ucuucagacaguggaauca

SEQ ID NO: 388207 - RNA, 19 nt, Artificial Sequence
  Description of Artificial Sequence: Synthetic oligonucleotide
  Sense Strand Starting at position 883 of SEQ ID NO: 315802
ugauuccaaugccugauua

SEQ ID NO: 388208 - RNA, 19 nt, Artificial Sequence
  Description of Artificial Sequence: Synthetic oligonucleotide
  Antisense Strand to SEQ ID NO: 388207
uaaucaggcauuggaauca

SEQ ID NO: 388209 - RNA, 19 nt, Artificial Sequence
  Description of Artificial Sequence: Synthetic oligonucleotide
  Sense Strand Starting at position 883 of SEQ ID NO: 315877
ccaugaugaucucugggca

SEQ ID NO: 388210 - RNA, 19 nt, Artificial Sequence
  Description of Artificial Sequence: Synthetic oligonucleotide
  Antisense Strand to SEQ ID NO: 388209
ugcccagagaucaucaugg

SEQ ID NO: 388211 - RNA, 19 nt, Artificial Sequence
  Description of Artificial Sequence: Synthetic oligonucleotide
  Sense Strand Starting at position 883 of SEQ ID NO: 315986
gcaggaacuuccuuagggu

SEQ ID NO: 388212 - RNA, 19 nt, Artificial Sequence
  Description of Artificial Sequence: Synthetic oligonucleotide
  Antisense Strand to SEQ ID NO: 388211
acccuaaggaaguuccugc

SEQ ID NO: 388213 - RNA, 19 nt, Artificial Sequence
  Description of Artificial Sequence: Synthetic oligonucleotide
  Sense Strand Starting at position 883 of SEQ ID NO: 316021
uccagcacuugagugaaau

SEQ ID NO: 388214 - RNA, 19 nt, Artificial Sequence
  Description of Artificial Sequence: Synthetic oligonucleotide
  Antisense Strand to SEQ ID NO: 388213
auuucacucaagugcugga

SEQ ID NO: 388215 - RNA, 19 nt, Artificial Sequence
  Description of Artificial Sequence: Synthetic oligonucleotide
  Sense Strand Starting at position 883 of SEQ ID NO: 316022
ccagcacuugagugaaaug

SEQ ID NO: 388216 - RNA, 19 nt, Artificial Sequence
  Description of Artificial Sequence: Synthetic oligonucleotide
  Antisense Strand to SEQ ID NO: 388215
cauuucacucaagugcugg

SEQ ID NO: 388217 - RNA, 19 nt, Artificial Sequence
  Description of Artificial Sequence: Synthetic oligonucleotide
  Sense Strand Starting at position 883 of SEQ ID NO: 316032
agugaaauguagcucuuag

SEQ ID NO: 388218 - RNA, 19 nt, Artificial Sequence
  Description of Artificial Sequence: Synthetic oligonucleotide
  Antisense Strand to SEQ ID NO: 388217
cuaagagcuacauuucacu

SEQ ID NO: 388219 - RNA, 19 nt, Artificial Sequence
  Description of Artificial Sequence: Synthetic oligonucleotide
  Sense Strand Starting at position 883 of SEQ ID NO: 316123
gggucaucaguuuacaggu

SEQ ID NO: 388220 - RNA, 19 nt, Artificial Sequence
  Description of Artificial Sequence: Synthetic oligonucleotide
  Antisense Strand to SEQ ID NO: 388219
accuguaaacugaugaccc

SEQ ID NO: 388221 - RNA, 19 nt, Artificial Sequence
  Description of Artificial Sequence: Synthetic oligonucleotide
  Sense Strand Starting at position 883 of SEQ ID NO: 316496
cuccaagagagcugggauu

SEQ ID NO: 388222 - RNA, 19 nt, Artificial Sequence
  Description of Artificial Sequence: Synthetic oligonucleotide
  Antisense Strand to SEQ ID NO: 388221
aaucccagcucucuuggag

SEQ ID NO: 388223 - RNA, 19 nt, Artificial Sequence
  Description of Artificial Sequence: Synthetic oligonucleotide
  Sense Strand Starting at position 883 of SEQ ID NO: 316584
ggauguguacuuuacacau

SEQ ID NO: 388224 - RNA, 19 nt, Artificial Sequence
  Description of Artificial Sequence: Synthetic oligonucleotide
  Antisense Strand to SEQ ID NO: 388223
auguguaaaguacacaucc

SEQ ID NO: 388225 - RNA, 19 nt, Artificial Sequence
  Description of Artificial Sequence: Synthetic oligonucleotide
  Sense Strand Starting at position 883 of SEQ ID NO: 316671
caggaaauaguguaagguu

SEQ ID NO: 388226 - RNA, 19 nt, Artificial Sequence
  Description of Artificial Sequence: Synthetic oligonucleotide
  Antisense Strand to SEQ ID NO: 388225
aaccuuacacuauuuccug

SEQ ID NO: 388227 - RNA, 19 nt, Artificial Sequence
  Description of Artificial Sequence: Synthetic oligonucleotide
  Sense Strand Starting at position 883 of SEQ ID NO: 316711
gcugaacaauauucuagua

SEQ ID NO: 388228 - RNA, 19 nt, Artificial Sequence
  Description of Artificial Sequence: Synthetic oligonucleotide
  Antisense Strand to SEQ ID NO: 388227
uacuagaauauuguucagc

SEQ ID NO: 388229 - RNA, 19 nt, Artificial Sequence
  Description of Artificial Sequence: Synthetic oligonucleotide
  Sense Strand Starting at position 883 of SEQ ID NO: 316731
gcugcuacaguguaugaaa

SEQ ID NO: 388230 - RNA, 19 nt, Artificial Sequence
  Description of Artificial Sequence: Synthetic oligonucleotide
  Antisense Strand to SEQ ID NO: 388229
uuucauacacuguagcagc

SEQ ID NO: 388231 - RNA, 19 nt, Artificial Sequence
  Description of Artificial Sequence: Synthetic oligonucleotide
  Sense Strand Starting at position 883 of SEQ ID NO: 316758
auaugaauauaugugcuga

SEQ ID NO: 388232 - RNA, 19 nt, Artificial Sequence
  Description of Artificial Sequence: Synthetic oligonucleotide
  Antisense Strand to SEQ ID NO: 388231
ucagcacauauauucauau

SEQ ID NO: 388233 - RNA, 19 nt, Artificial Sequence
  Description of Artificial Sequence: Synthetic oligonucleotide
  Sense Strand Starting at position 883 of SEQ ID NO: 316760
augaauauaugugcugauu

SEQ ID NO: 388234 - RNA, 19 nt, Artificial Sequence
  Description of Artificial Sequence: Synthetic oligonucleotide
  Antisense Strand to SEQ ID NO: 388233
aaucagcacauauauucau

SEQ ID NO: 388235 - RNA, 19 nt, Artificial Sequence
  Description of Artificial Sequence: Synthetic oligonucleotide
  Sense Strand Starting at position 883 of SEQ ID NO: 316783
agucaaauaucucucugga

SEQ ID NO: 388236 - RNA, 19 nt, Artificial Sequence
  Description of Artificial Sequence: Synthetic oligonucleotide
  Antisense Strand to SEQ ID NO: 388235
uccagagagauauuugacu

SEQ ID NO: 388237 - RNA, 19 nt, Artificial Sequence
  Description of Artificial Sequence: Synthetic oligonucleotide
  Sense Strand Starting at position 883 of SEQ ID NO: 316851
ggacuuucccuguauaauc

SEQ ID NO: 388238 - RNA, 19 nt, Artificial Sequence
  Description of Artificial Sequence: Synthetic oligonucleotide
  Antisense Strand to SEQ ID NO: 388237
gauuauacagggaaagucc

SEQ ID NO: 388239 - RNA, 19 nt, Artificial Sequence
  Description of Artificial Sequence: Synthetic oligonucleotide
  Sense Strand Starting at position 883 of SEQ ID NO: 316908
augauagcuuacuuuggau

SEQ ID NO: 388240 - RNA, 19 nt, Artificial Sequence
  Description of Artificial Sequence: Synthetic oligonucleotide
  Antisense Strand to SEQ ID NO: 388239
auccaaaguaagcuaucau

SEQ ID NO: 388241 - RNA, 19 nt, Artificial Sequence
  Description of Artificial Sequence: Synthetic oligonucleotide
  Sense Strand Starting at position 883 of SEQ ID NO: 316937
cuaaguagucguaagcguu

SEQ ID NO: 388242 - RNA, 19 nt, Artificial Sequence
  Description of Artificial Sequence: Synthetic oligonucleotide
  Antisense Strand to SEQ ID NO: 388241
aacgcuuacgacuacuuag

SEQ ID NO: 388243 - RNA, 19 nt, Artificial Sequence
  Description of Artificial Sequence: Synthetic oligonucleotide
  Sense Strand Starting at position 883 of SEQ ID NO: 317260
cuaugacaguuucuucuca

SEQ ID NO: 388244 - RNA, 19 nt, Artificial Sequence
  Description of Artificial Sequence: Synthetic oligonucleotide
  Antisense Strand to SEQ ID NO: 388243
ugagaagaaacugucauag

SEQ ID NO: 388245 - RNA, 19 nt, Artificial Sequence
  Description of Artificial Sequence: Synthetic oligonucleotide
  Sense Strand Starting at position 883 of SEQ ID NO: 317262
augacaguuucuucucaca

SEQ ID NO: 388246 - RNA, 19 nt, Artificial Sequence
  Description of Artificial Sequence: Synthetic oligonucleotide
  Antisense Strand to SEQ ID NO: 388245
ugugagaagaaacugucau

SEQ ID NO: 388247 - RNA, 19 nt, Artificial Sequence
  Description of Artificial Sequence: Synthetic oligonucleotide
  Sense Strand Starting at position 883 of SEQ ID NO: 317279
caaaguggugcuggaauca

SEQ ID NO: 388248 - RNA, 19 nt, Artificial Sequence
  Description of Artificial Sequence: Synthetic oligonucleotide
  Antisense Strand to SEQ ID NO: 388247
ugauuccagcaccacuuug

SEQ ID NO: 388249 - RNA, 19 nt, Artificial Sequence
  Description of Artificial Sequence: Synthetic oligonucleotide
  Sense Strand Starting at position 883 of SEQ ID NO: 317595
agauacguucaagggagua

SEQ ID NO: 388250 - RNA, 19 nt, Artificial Sequence
  Description of Artificial Sequence: Synthetic oligonucleotide
  Antisense Strand to SEQ ID NO: 388249
uacucccuugaacguaucu

SEQ ID NO: 388251 - RNA, 19 nt, Artificial Sequence
  Description of Artificial Sequence: Synthetic oligonucleotide
  Sense Strand Starting at position 883 of SEQ ID NO: 317600
cguucaagggaguaauaug

SEQ ID NO: 388252 - RNA, 19 nt, Artificial Sequence
  Description of Artificial Sequence: Synthetic oligonucleotide
  Antisense Strand to SEQ ID NO: 388251
cauauuacucccuugaacg

SEQ ID NO: 388253 - RNA, 19 nt, Artificial Sequence
  Description of Artificial Sequence: Synthetic oligonucleotide
  Sense Strand Starting at position 883 of SEQ ID NO: 317608
ggaguaauaugcucuggau

SEQ ID NO: 388254 - RNA, 19 nt, Artificial Sequence
  Description of Artificial Sequence: Synthetic oligonucleotide
  Antisense Strand to SEQ ID NO: 388253
auccagagcauauuacucc

SEQ ID NO: 388255 - RNA, 19 nt, Artificial Sequence
  Description of Artificial Sequence: Synthetic oligonucleotide
  Sense Strand Starting at position 883 of SEQ ID NO: 317610
aguaauaugcucuggaucu

SEQ ID NO: 388256 - RNA, 19 nt, Artificial Sequence
  Description of Artificial Sequence: Synthetic oligonucleotide
  Antisense Strand to SEQ ID NO: 388255
agauccagagcauauuacu

SEQ ID NO: 388257 - RNA, 19 nt, Artificial Sequence
  Description of Artificial Sequence: Synthetic oligonucleotide
  Sense Strand Starting at position 883 of SEQ ID NO: 317999
ggauguuacuaaccugaaa

SEQ ID NO: 388258 - RNA, 19 nt, Artificial Sequence
  Description of Artificial Sequence: Synthetic oligonucleotide
  Antisense Strand to SEQ ID NO: 388257
uuucagguuaguaacaucc

SEQ ID NO: 388259 - RNA, 19 nt, Artificial Sequence
  Description of Artificial Sequence: Synthetic oligonucleotide
  Sense Strand Starting at position 883 of SEQ ID NO: 318034
aaaguuaguccuugagaca

SEQ ID NO: 388260 - RNA, 19 nt, Artificial Sequence
  Description of Artificial Sequence: Synthetic oligonucleotide
  Antisense Strand to SEQ ID NO: 388259
ugucucaaggacuaacuuu

SEQ ID NO: 388261 - RNA, 19 nt, Artificial Sequence
  Description of Artificial Sequence: Synthetic oligonucleotide
  Sense Strand Starting at position 883 of SEQ ID NO: 318046
ugagacaaugcguaugcua

SEQ ID NO: 388262 - RNA, 19 nt, Artificial Sequence
  Description of Artificial Sequence: Synthetic oligonucleotide
  Antisense Strand to SEQ ID NO: 388261
uagcauacgcauugucuca

SEQ ID NO: 388263 - RNA, 19 nt, Artificial Sequence
  Description of Artificial Sequence: Synthetic oligonucleotide
  Sense Strand Starting at position 883 of SEQ ID NO: 318445
auuguaucucaauguauga

SEQ ID NO: 388264 - RNA, 19 nt, Artificial Sequence
  Description of Artificial Sequence: Synthetic oligonucleotide
  Antisense Strand to SEQ ID NO: 388263
ucauacauugagauacaau

SEQ ID NO: 388265 - RNA, 19 nt, Artificial Sequence
  Description of Artificial Sequence: Synthetic oligonucleotide
  Sense Strand Starting at position 883 of SEQ ID NO: 318494
aguuuauucuaugucagaa

SEQ ID NO: 388266 - RNA, 19 nt, Artificial Sequence
  Description of Artificial Sequence: Synthetic oligonucleotide
  Antisense Strand to SEQ ID NO: 388265
uucugacauagaauaaacu

SEQ ID NO: 388267 - RNA, 19 nt, Artificial Sequence
  Description of Artificial Sequence: Synthetic oligonucleotide
  Sense Strand Starting at position 883 of SEQ ID NO: 318517
gugucuuaccuauacaaga

SEQ ID NO: 388268 - RNA, 19 nt, Artificial Sequence
  Description of Artificial Sequence: Synthetic oligonucleotide
  Antisense Strand to SEQ ID NO: 388267
ucuuguauagguaagacac

SEQ ID NO: 388269 - RNA, 19 nt, Artificial Sequence
  Description of Artificial Sequence: Synthetic oligonucleotide
  Sense Strand Starting at position 883 of SEQ ID NO: 318594
uucucauugcaagggagaa

SEQ ID NO: 388270 - RNA, 19 nt, Artificial Sequence
  Description of Artificial Sequence: Synthetic oligonucleotide
  Antisense Strand to SEQ ID NO: 388269
uucucccuugcaaugagaa

SEQ ID NO: 388271 - RNA, 19 nt, Artificial Sequence
  Description of Artificial Sequence: Synthetic oligonucleotide
  Sense Strand Starting at position 883 of SEQ ID NO: 319040
gugccagacacggaucuaa

SEQ ID NO: 388272 - RNA, 19 nt, Artificial Sequence
  Description of Artificial Sequence: Synthetic oligonucleotide
  Antisense Strand to SEQ ID NO: 388271
uuagauccgugucuggcac

SEQ ID NO: 388273 - RNA, 19 nt, Artificial Sequence
  Description of Artificial Sequence: Synthetic oligonucleotide
  Sense Strand Starting at position 883 of SEQ ID NO: 319058
aguacaaucuggguuccua

SEQ ID NO: 388274 - RNA, 19 nt, Artificial Sequence
  Description of Artificial Sequence: Synthetic oligonucleotide
  Antisense Strand to SEQ ID NO: 388273
uaggaacccagauuguacu

SEQ ID NO: 388275 - RNA, 19 nt, Artificial Sequence
  Description of Artificial Sequence: Synthetic oligonucleotide
  Sense Strand Starting at position 883 of SEQ ID NO: 319066
cuggguuccuacucucaaa

SEQ ID NO: 388276 - RNA, 19 nt, Artificial Sequence
  Description of Artificial Sequence: Synthetic oligonucleotide
  Antisense Strand to SEQ ID NO: 388275
uuugagaguaggaacccag

SEQ ID NO: 388277 - RNA, 19 nt, Artificial Sequence
  Description of Artificial Sequence: Synthetic oligonucleotide
  Sense Strand Starting at position 883 of SEQ ID NO: 319185
ggaagaagugaaugcaucu

SEQ ID NO: 388278 - RNA, 19 nt, Artificial Sequence
  Description of Artificial Sequence: Synthetic oligonucleotide
  Antisense Strand to SEQ ID NO: 388277
agaugcauucacuucuucc

SEQ ID NO: 388279 - RNA, 19 nt, Artificial Sequence
  Description of Artificial Sequence: Synthetic oligonucleotide
  Sense Strand Starting at position 883 of SEQ ID NO: 319197
ugcaucuuccugggaagga

SEQ ID NO: 388280 - RNA, 19 nt, Artificial Sequence
  Description of Artificial Sequence: Synthetic oligonucleotide
  Antisense Strand to SEQ ID NO: 388279
uccuucccaggaagaugca

SEQ ID NO: 388281 - RNA, 19 nt, Artificial Sequence
  Description of Artificial Sequence: Synthetic oligonucleotide
  Sense Strand Starting at position 884 of SEQ ID NO: 315262
ucuggcauuucccaaggaa

SEQ ID NO: 388282 - RNA, 19 nt, Artificial Sequence
  Description of Artificial Sequence: Synthetic oligonucleotide
  Antisense Strand to SEQ ID NO: 388281
uuccuugggaaaugccaga

SEQ ID NO: 388283 - RNA, 19 nt, Artificial Sequence
  Description of Artificial Sequence: Synthetic oligonucleotide
  Sense Strand Starting at position 884 of SEQ ID NO: 315279
aacuguagucaauggcuga

SEQ ID NO: 388284 - RNA, 19 nt, Artificial Sequence
  Description of Artificial Sequence: Synthetic oligonucleotide
  Antisense Strand to SEQ ID NO: 388283
ucagccauugacuacaguu

SEQ ID NO: 388285 - RNA, 19 nt, Artificial Sequence
  Description of Artificial Sequence: Synthetic oligonucleotide
  Sense Strand Starting at position 884 of SEQ ID NO: 315282
uguagucaauggcugauaa

SEQ ID NO: 388286 - RNA, 19 nt, Artificial Sequence
  Description of Artificial Sequence: Synthetic oligonucleotide
  Antisense Strand to SEQ ID NO: 388285
uuaucagccauugacuaca

SEQ ID NO: 388287 - RNA, 19 nt, Artificial Sequence
  Description of Artificial Sequence: Synthetic oligonucleotide
  Sense Strand Starting at position 884 of SEQ ID NO: 315283
guagucaauggcugauaaa

SEQ ID NO: 388288 - RNA, 19 nt, Artificial Sequence
  Description of Artificial Sequence: Synthetic oligonucleotide
  Antisense Strand to SEQ ID NO: 388287
uuuaucagccauugacuac

SEQ ID NO: 388289 - RNA, 19 nt, Artificial Sequence
  Description of Artificial Sequence: Synthetic oligonucleotide
  Sense Strand Starting at position 884 of SEQ ID NO: 315558
uagggaauacuugggaguu

SEQ ID NO: 388290 - RNA, 19 nt, Artificial Sequence
  Description of Artificial Sequence: Synthetic oligonucleotide
  Antisense Strand to SEQ ID NO: 388289
aacucccaaguauucccua

SEQ ID NO: 388291 - RNA, 19 nt, Artificial Sequence
  Description of Artificial Sequence: Synthetic oligonucleotide
  Sense Strand Starting at position 884 of SEQ ID NO: 315590
gugggugaacuucaauugu

SEQ ID NO: 388292 - RNA, 19 nt, Artificial Sequence
  Description of Artificial Sequence: Synthetic oligonucleotide
  Antisense Strand to SEQ ID NO: 388291
acaauugaaguucacccac

SEQ ID NO: 388293 - RNA, 19 nt, Artificial Sequence
  Description of Artificial Sequence: Synthetic oligonucleotide
  Sense Strand Starting at position 884 of SEQ ID NO: 315609
uaugucuccgagugaaaua

SEQ ID NO: 388294 - RNA, 19 nt, Artificial Sequence
  Description of Artificial Sequence: Synthetic oligonucleotide
  Antisense Strand to SEQ ID NO: 388293
uauuucacucggagacaua

SEQ ID NO: 388295 - RNA, 19 nt, Artificial Sequence
  Description of Artificial Sequence: Synthetic oligonucleotide
  Sense Strand Starting at position 884 of SEQ ID NO: 315610
augucuccgagugaaauaa

SEQ ID NO: 388296 - RNA, 19 nt, Artificial Sequence
  Description of Artificial Sequence: Synthetic oligonucleotide
  Antisense Strand to SEQ ID NO: 388295
uuauuucacucggagacau

SEQ ID NO: 388297 - RNA, 19 nt, Artificial Sequence
  Description of Artificial Sequence: Synthetic oligonucleotide
  Sense Strand Starting at position 884 of SEQ ID NO: 315622
gaaauaaaggauuggcagu

SEQ ID NO: 388298 - RNA, 19 nt, Artificial Sequence
  Description of Artificial Sequence: Synthetic oligonucleotide
  Antisense Strand to SEQ ID NO: 388297
acugccaauccuuuauuuc

SEQ ID NO: 388299 - RNA, 19 nt, Artificial Sequence
  Description of Artificial Sequence: Synthetic oligonucleotide
  Sense Strand Starting at position 884 of SEQ ID NO: 315685
guaggacuugcucagcaca

SEQ ID NO: 388300 - RNA, 19 nt, Artificial Sequence
  Description of Artificial Sequence: Synthetic oligonucleotide
  Antisense Strand to SEQ ID NO: 388299
ugugcugagcaaguccuac

SEQ ID NO: 388301 - RNA, 19 nt, Artificial Sequence
  Description of Artificial Sequence: Synthetic oligonucleotide
  Sense Strand Starting at position 884 of SEQ ID NO: 315707
ggccaaacucacuguccaa

SEQ ID NO: 388302 - RNA, 19 nt, Artificial Sequence
  Description of Artificial Sequence: Synthetic oligonucleotide
  Antisense Strand to SEQ ID NO: 388301
uuggacagugaguuuggcc

SEQ ID NO: 388303 - RNA, 19 nt, Artificial Sequence
  Description of Artificial Sequence: Synthetic oligonucleotide
  Sense Strand Starting at position 884 of SEQ ID NO: 315876
ggcagacaccuguauacau

SEQ ID NO: 388304 - RNA, 19 nt, Artificial Sequence
  Description of Artificial Sequence: Synthetic oligonucleotide
  Antisense Strand to SEQ ID NO: 388303
auguauacaggugucugcc

SEQ ID NO: 388305 - RNA, 19 nt, Artificial Sequence
  Description of Artificial Sequence: Synthetic oligonucleotide
  Sense Strand Starting at position 884 of SEQ ID NO: 315940
ccuaaugacugccugugau

SEQ ID NO: 388306 - RNA, 19 nt, Artificial Sequence
  Description of Artificial Sequence: Synthetic oligonucleotide
  Antisense Strand to SEQ ID NO: 388305
aucacaggcagucauuagg

SEQ ID NO: 388307 - RNA, 19 nt, Artificial Sequence
  Description of Artificial Sequence: Synthetic oligonucleotide
  Sense Strand Starting at position 884 of SEQ ID NO: 315955
ugaugagagucugcauucu

SEQ ID NO: 388308 - RNA, 19 nt, Artificial Sequence
  Description of Artificial Sequence: Synthetic oligonucleotide
  Antisense Strand to SEQ ID NO: 388307
agaaugcagacucucauca

SEQ ID NO: 388309 - RNA, 19 nt, Artificial Sequence
  Description of Artificial Sequence: Synthetic oligonucleotide
  Sense Strand Starting at position 884 of SEQ ID NO: 316004
ucuuuauacucaguucuga

SEQ ID NO: 388310 - RNA, 19 nt, Artificial Sequence
  Description of Artificial Sequence: Synthetic oligonucleotide
  Antisense Strand to SEQ ID NO: 388309
ucagaacugaguauaaaga

SEQ ID NO: 388311 - RNA, 19 nt, Artificial Sequence
  Description of Artificial Sequence: Synthetic oligonucleotide
  Sense Strand Starting at position 884 of SEQ ID NO: 316123
agaucuaaauuguuuguga

SEQ ID NO: 388312 - RNA, 19 nt, Artificial Sequence
  Description of Artificial Sequence: Synthetic oligonucleotide
  Antisense Strand to SEQ ID NO: 388311
ucacaaacaauuuagaucu

SEQ ID NO: 388313 - RNA, 19 nt, Artificial Sequence
  Description of Artificial Sequence: Synthetic oligonucleotide
  Sense Strand Starting at position 884 of SEQ ID NO: 316124
gaucuaaauuguuugugac

SEQ ID NO: 388314 - RNA, 19 nt, Artificial Sequence
  Description of Artificial Sequence: Synthetic oligonucleotide
  Antisense Strand to SEQ ID NO: 388313
gucacaaacaauuuagauc

SEQ ID NO: 388315 - RNA, 19 nt, Artificial Sequence
  Description of Artificial Sequence: Synthetic oligonucleotide
  Sense Strand Starting at position 884 of SEQ ID NO: 316125
aucuaaauuguuugugacu

SEQ ID NO: 388316 - RNA, 19 nt, Artificial Sequence
  Description of Artificial Sequence: Synthetic oligonucleotide
  Antisense Strand to SEQ ID NO: 388315
agucacaaacaauuuagau

SEQ ID NO: 388317 - RNA, 19 nt, Artificial Sequence
  Description of Artificial Sequence: Synthetic oligonucleotide
  Sense Strand Starting at position 884 of SEQ ID NO: 316126
ucuaaauuguuugugacuu

SEQ ID NO: 388318 - RNA, 19 nt, Artificial Sequence
  Description of Artificial Sequence: Synthetic oligonucleotide
  Antisense Strand to SEQ ID NO: 388317
aagucacaaacaauuuaga

SEQ ID NO: 388319 - RNA, 19 nt, Artificial Sequence
  Description of Artificial Sequence: Synthetic oligonucleotide
  Sense Strand Starting at position 884 of SEQ ID NO: 317429
gcgacugcauuuguggaaa

SEQ ID NO: 388320 - RNA, 19 nt, Artificial Sequence
  Description of Artificial Sequence: Synthetic oligonucleotide
  Antisense Strand to SEQ ID NO: 388319
uuuccacaaaugcagucgc

SEQ ID NO: 388321 - RNA, 19 nt, Artificial Sequence
  Description of Artificial Sequence: Synthetic oligonucleotide
  Sense Strand Starting at position 884 of SEQ ID NO: 317664
aucucauauuuggaugaca

SEQ ID NO: 388322 - RNA, 19 nt, Artificial Sequence
  Description of Artificial Sequence: Synthetic oligonucleotide
  Antisense Strand to SEQ ID NO: 388321
ugucauccaaauaugagau

SEQ ID NO: 388323 - RNA, 19 nt, Artificial Sequence
  Description of Artificial Sequence: Synthetic oligonucleotide
  Sense Strand Starting at position 884 of SEQ ID NO: 317800
uuguauuguccuguuguuu

SEQ ID NO: 388324 - RNA, 19 nt, Artificial Sequence
  Description of Artificial Sequence: Synthetic oligonucleotide
  Antisense Strand to SEQ ID NO: 388323
aaacaacaggacaauacaa

SEQ ID NO: 388325 - RNA, 19 nt, Artificial Sequence
  Description of Artificial Sequence: Synthetic oligonucleotide
  Sense Strand Starting at position 884 of SEQ ID NO: 318057
guacuucuccgugacggaa

SEQ ID NO: 388326 - RNA, 19 nt, Artificial Sequence
  Description of Artificial Sequence: Synthetic oligonucleotide
  Antisense Strand to SEQ ID NO: 388325
uuccgucacggagaaguac

SEQ ID NO: 388327 - RNA, 19 nt, Artificial Sequence
  Description of Artificial Sequence: Synthetic oligonucleotide
  Sense Strand Starting at position 884 of SEQ ID NO: 318095
aucugaggacuuugcacau

SEQ ID NO: 388328 - RNA, 19 nt, Artificial Sequence
  Description of Artificial Sequence: Synthetic oligonucleotide
  Antisense Strand to SEQ ID NO: 388327
augugcaaaguccucagau

SEQ ID NO: 388329 - RNA, 19 nt, Artificial Sequence
  Description of Artificial Sequence: Synthetic oligonucleotide
  Sense Strand Starting at position 884 of SEQ ID NO: 318220
ucaggcagguccucaguaa

SEQ ID NO: 388330 - RNA, 19 nt, Artificial Sequence
  Description of Artificial Sequence: Synthetic oligonucleotide
  Antisense Strand to SEQ ID NO: 388329
uuacugaggaccugccuga

SEQ ID NO: 388331 - RNA, 19 nt, Artificial Sequence
  Description of Artificial Sequence: Synthetic oligonucleotide
  Sense Strand Starting at position 884 of SEQ ID NO: 318224
gcagguccucaguaacuca

SEQ ID NO: 388332 - RNA, 19 nt, Artificial Sequence
  Description of Artificial Sequence: Synthetic oligonucleotide
  Antisense Strand to SEQ ID NO: 388331
ugaguuacugaggaccugc

SEQ ID NO: 388333 - RNA, 19 nt, Artificial Sequence
  Description of Artificial Sequence: Synthetic oligonucleotide
  Sense Strand Starting at position 884 of SEQ ID NO: 318268
gguugccugagcuaagaca

SEQ ID NO: 388334 - RNA, 19 nt, Artificial Sequence
  Description of Artificial Sequence: Synthetic oligonucleotide
  Antisense Strand to SEQ ID NO: 388333
ugucuuagcucaggcaacc

SEQ ID NO: 388335 - RNA, 19 nt, Artificial Sequence
  Description of Artificial Sequence: Synthetic oligonucleotide
  Sense Strand Starting at position 884 of SEQ ID NO: 318301
uauauagaucuguagguca

SEQ ID NO: 388336 - RNA, 19 nt, Artificial Sequence
  Description of Artificial Sequence: Synthetic oligonucleotide
  Antisense Strand to SEQ ID NO: 388335
ugaccuacagaucuauaua

SEQ ID NO: 388337 - RNA, 19 nt, Artificial Sequence
  Description of Artificial Sequence: Synthetic oligonucleotide
  Sense Strand Starting at position 884 of SEQ ID NO: 318306
agaucuguaggucagcuaa

SEQ ID NO: 388338 - RNA, 19 nt, Artificial Sequence
  Description of Artificial Sequence: Synthetic oligonucleotide
  Antisense Strand to SEQ ID NO: 388337
uuagcugaccuacagaucu

SEQ ID NO: 388339 - RNA, 19 nt, Artificial Sequence
  Description of Artificial Sequence: Synthetic oligonucleotide
  Sense Strand Starting at position 884 of SEQ ID NO: 318505
uuugguuuggucuggagga

SEQ ID NO: 388340 - RNA, 19 nt, Artificial Sequence
  Description of Artificial Sequence: Synthetic oligonucleotide
  Antisense Strand to SEQ ID NO: 388339
uccuccagaccaaaccaaa

SEQ ID NO: 388341 - RNA, 19 nt, Artificial Sequence
  Description of Artificial Sequence: Synthetic oligonucleotide
  Sense Strand Starting at position 884 of SEQ ID NO: 318507
ugguuuggucuggaggauu

SEQ ID NO: 388342 - RNA, 19 nt, Artificial Sequence
  Description of Artificial Sequence: Synthetic oligonucleotide
  Antisense Strand to SEQ ID NO: 388341
aauccuccagaccaaacca

SEQ ID NO: 388343 - RNA, 19 nt, Artificial Sequence
  Description of Artificial Sequence: Synthetic oligonucleotide
  Sense Strand Starting at position 884 of SEQ ID NO: 318518
ggaggauuaucacuuguau

SEQ ID NO: 388344 - RNA, 19 nt, Artificial Sequence
  Description of Artificial Sequence: Synthetic oligonucleotide
  Antisense Strand to SEQ ID NO: 388343
auacaagugauaauccucc

SEQ ID NO: 388345 - RNA, 19 nt, Artificial Sequence
  Description of Artificial Sequence: Synthetic oligonucleotide
  Sense Strand Starting at position 884 of SEQ ID NO: 318524
uuaucacuuguauguuaag

SEQ ID NO: 388346 - RNA, 19 nt, Artificial Sequence
  Description of Artificial Sequence: Synthetic oligonucleotide
  Antisense Strand to SEQ ID NO: 388345
cuuaacauacaagugauaa

SEQ ID NO: 388347 - RNA, 19 nt, Artificial Sequence
  Description of Artificial Sequence: Synthetic oligonucleotide
  Sense Strand Starting at position 884 of SEQ ID NO: 318535
auguuaagaaaguguguaa

SEQ ID NO: 388348 - RNA, 19 nt, Artificial Sequence
  Description of Artificial Sequence: Synthetic oligonucleotide
  Antisense Strand to SEQ ID NO: 388347
uuacacacuuucuuaacau

SEQ ID NO: 388349 - RNA, 19 nt, Artificial Sequence
  Description of Artificial Sequence: Synthetic oligonucleotide
  Sense Strand Starting at position 884 of SEQ ID NO: 318638
gguaauaugucaccuaccu

SEQ ID NO: 388350 - RNA, 19 nt, Artificial Sequence
  Description of Artificial Sequence: Synthetic oligonucleotide
  Antisense Strand to SEQ ID NO: 388349
agguaggugacauauuacc

SEQ ID NO: 388351 - RNA, 19 nt, Artificial Sequence
  Description of Artificial Sequence: Synthetic oligonucleotide
  Sense Strand Starting at position 884 of SEQ ID NO: 318798
acuuuauggaagcgguaua

SEQ ID NO: 388352 - RNA, 19 nt, Artificial Sequence
  Description of Artificial Sequence: Synthetic oligonucleotide
  Antisense Strand to SEQ ID NO: 388351
uauaccgcuuccauaaagu

SEQ ID NO: 388353 - RNA, 19 nt, Artificial Sequence
  Description of Artificial Sequence: Synthetic oligonucleotide
  Sense Strand Starting at position 884 of SEQ ID NO: 318799
cuuuauggaagcgguauaa

SEQ ID NO: 388354 - RNA, 19 nt, Artificial Sequence
  Description of Artificial Sequence: Synthetic oligonucleotide
  Antisense Strand to SEQ ID NO: 388353
uuauaccgcuuccauaaag

SEQ ID NO: 388355 - RNA, 19 nt, Artificial Sequence
  Description of Artificial Sequence: Synthetic oligonucleotide
  Sense Strand Starting at position 884 of SEQ ID NO: 318838
uagucucuacugugaaaug

SEQ ID NO: 388356 - RNA, 19 nt, Artificial Sequence
  Description of Artificial Sequence: Synthetic oligonucleotide
  Antisense Strand to SEQ ID NO: 388355
cauuucacaguagagacua

SEQ ID NO: 388357 - RNA, 19 nt, Artificial Sequence
  Description of Artificial Sequence: Synthetic oligonucleotide
  Sense Strand Starting at position 884 of SEQ ID NO: 318903
aggaaugagugauauuuag

SEQ ID NO: 388358 - RNA, 19 nt, Artificial Sequence
  Description of Artificial Sequence: Synthetic oligonucleotide
  Antisense Strand to SEQ ID NO: 388357
cuaaauaucacucauuccu

SEQ ID NO: 388359 - RNA, 19 nt, Artificial Sequence
  Description of Artificial Sequence: Synthetic oligonucleotide
  Sense Strand Starting at position 884 of SEQ ID NO: 318909
gagugauauuuagaaagca

SEQ ID NO: 388360 - RNA, 19 nt, Artificial Sequence
  Description of Artificial Sequence: Synthetic oligonucleotide
  Antisense Strand to SEQ ID NO: 388359
ugcuuucuaaauaucacuc

SEQ ID NO: 388361 - RNA, 19 nt, Artificial Sequence
  Description of Artificial Sequence: Synthetic oligonucleotide
  Sense Strand Starting at position 885 of SEQ ID NO: 315425
cccacuaccugguuauaag

SEQ ID NO: 388362 - RNA, 19 nt, Artificial Sequence
  Description of Artificial Sequence: Synthetic oligonucleotide
  Antisense Strand to SEQ ID NO: 388361
cuuauaaccagguaguggg

SEQ ID NO: 388363 - RNA, 19 nt, Artificial Sequence
  Description of Artificial Sequence: Synthetic oligonucleotide
  Sense Strand Starting at position 885 of SEQ ID NO: 315426
ccacuaccugguuauaagu

SEQ ID NO: 388364 - RNA, 19 nt, Artificial Sequence
  Description of Artificial Sequence: Synthetic oligonucleotide
  Antisense Strand to SEQ ID NO: 388363
acuuauaaccagguagugg

SEQ ID NO: 388365 - RNA, 19 nt, Artificial Sequence
  Description of Artificial Sequence: Synthetic oligonucleotide
  Sense Strand Starting at position 885 of SEQ ID NO: 315435
gguuauaaguaagucuaca

SEQ ID NO: 388366 - RNA, 19 nt, Artificial Sequence
  Description of Artificial Sequence: Synthetic oligonucleotide
  Antisense Strand to SEQ ID NO: 388365
uguagacuuacuuauaacc

SEQ ID NO: 388367 - RNA, 19 nt, Artificial Sequence
  Description of Artificial Sequence: Synthetic oligonucleotide
  Sense Strand Starting at position 885 of SEQ ID NO: 315494
auuauucugucaucaggga

SEQ ID NO: 388368 - RNA, 19 nt, Artificial Sequence
  Description of Artificial Sequence: Synthetic oligonucleotide
  Antisense Strand to SEQ ID NO: 388367
ucccugaugacagaauaau

SEQ ID NO: 388369 - RNA, 19 nt, Artificial Sequence
  Description of Artificial Sequence: Synthetic oligonucleotide
  Sense Strand Starting at position 885 of SEQ ID NO: 315498
uucugucaucagggacaaa

SEQ ID NO: 388370 - RNA, 19 nt, Artificial Sequence
  Description of Artificial Sequence: Synthetic oligonucleotide
  Antisense Strand to SEQ ID NO: 388369
uuugucccugaugacagaa

SEQ ID NO: 388371 - RNA, 19 nt, Artificial Sequence
  Description of Artificial Sequence: Synthetic oligonucleotide
  Sense Strand Starting at position 885 of SEQ ID NO: 315887
gauuguuaacuguacuggu

SEQ ID NO: 388372 - RNA, 19 nt, Artificial Sequence
  Description of Artificial Sequence: Synthetic oligonucleotide
  Antisense Strand to SEQ ID NO: 388371
accaguacaguuaacaauc

SEQ ID NO: 388373 - RNA, 19 nt, Artificial Sequence
  Description of Artificial Sequence: Synthetic oligonucleotide
  Sense Strand Starting at position 885 of SEQ ID NO: 315896
cuguacugguucuugagaa

SEQ ID NO: 388374 - RNA, 19 nt, Artificial Sequence
  Description of Artificial Sequence: Synthetic oligonucleotide
  Antisense Strand to SEQ ID NO: 388373
uucucaagaaccaguacag

SEQ ID NO: 388375 - RNA, 19 nt, Artificial Sequence
  Description of Artificial Sequence: Synthetic oligonucleotide
  Sense Strand Starting at position 885 of SEQ ID NO: 315962
uuuaaaggcugucuacaaa

SEQ ID NO: 388376 - RNA, 19 nt, Artificial Sequence
  Description of Artificial Sequence: Synthetic oligonucleotide
  Antisense Strand to SEQ ID NO: 388375
uuuguagacagccuuuaaa

SEQ ID NO: 388377 - RNA, 19 nt, Artificial Sequence
  Description of Artificial Sequence: Synthetic oligonucleotide
  Sense Strand Starting at position 885 of SEQ ID NO: 316163
agaggucucuggguaccua

SEQ ID NO: 388378 - RNA, 19 nt, Artificial Sequence
  Description of Artificial Sequence: Synthetic oligonucleotide
  Antisense Strand to SEQ ID NO: 388377
uagguacccagagaccucu

SEQ ID NO: 388379 - RNA, 19 nt, Artificial Sequence
  Description of Artificial Sequence: Synthetic oligonucleotide
  Sense Strand Starting at position 885 of SEQ ID NO: 316241
ggcugauaaaguuaacgga

SEQ ID NO: 388380 - RNA, 19 nt, Artificial Sequence
  Description of Artificial Sequence: Synthetic oligonucleotide
  Antisense Strand to SEQ ID NO: 388379
uccguuaacuuuaucagcc

SEQ ID NO: 388381 - RNA, 19 nt, Artificial Sequence
  Description of Artificial Sequence: Synthetic oligonucleotide
  Sense Strand Starting at position 885 of SEQ ID NO: 316281
cuuaguaauggucaaacga

SEQ ID NO: 388382 - RNA, 19 nt, Artificial Sequence
  Description of Artificial Sequence: Synthetic oligonucleotide
  Antisense Strand to SEQ ID NO: 388381
ucguuugaccauuacuaag

SEQ ID NO: 388383 - RNA, 19 nt, Artificial Sequence
  Description of Artificial Sequence: Synthetic oligonucleotide
  Sense Strand Starting at position 885 of SEQ ID NO: 316520
ucguauugugaggaagaag

SEQ ID NO: 388384 - RNA, 19 nt, Artificial Sequence
  Description of Artificial Sequence: Synthetic oligonucleotide
  Antisense Strand to SEQ ID NO: 388383
cuucuuccucacaauacga

SEQ ID NO: 388385 - RNA, 19 nt, Artificial Sequence
  Description of Artificial Sequence: Synthetic oligonucleotide
  Sense Strand Starting at position 885 of SEQ ID NO: 316905
gugcgugccagaguuguca

SEQ ID NO: 388386 - RNA, 19 nt, Artificial Sequence
  Description of Artificial Sequence: Synthetic oligonucleotide
  Antisense Strand to SEQ ID NO: 388385
ugacaacucuggcacgcac

SEQ ID NO: 388387 - RNA, 19 nt, Artificial Sequence
  Description of Artificial Sequence: Synthetic oligonucleotide
  Sense Strand Starting at position 885 of SEQ ID NO: 317459
gggaaugcucgcuauuagg

SEQ ID NO: 388388 - RNA, 19 nt, Artificial Sequence
  Description of Artificial Sequence: Synthetic oligonucleotide
  Antisense Strand to SEQ ID NO: 388387
ccuaauagcgagcauuccc

SEQ ID NO: 388389 - RNA, 19 nt, Artificial Sequence
  Description of Artificial Sequence: Synthetic oligonucleotide
  Sense Strand Starting at position 885 of SEQ ID NO: 317538
ugauaucuauucuucgacu

SEQ ID NO: 388390 - RNA, 19 nt, Artificial Sequence
  Description of Artificial Sequence: Synthetic oligonucleotide
  Antisense Strand to SEQ ID NO: 388389
agucgaagaauagauauca

SEQ ID NO: 388391 - RNA, 19 nt, Artificial Sequence
  Description of Artificial Sequence: Synthetic oligonucleotide
  Sense Strand Starting at position 885 of SEQ ID NO: 317624
acuugccugaggugacaua

SEQ ID NO: 388392 - RNA, 19 nt, Artificial Sequence
  Description of Artificial Sequence: Synthetic oligonucleotide
  Antisense Strand to SEQ ID NO: 388391
uaugucaccucaggcaagu

SEQ ID NO: 388393 - RNA, 19 nt, Artificial Sequence
  Description of Artificial Sequence: Synthetic oligonucleotide
  Sense Strand Starting at position 885 of SEQ ID NO: 317691
uccuuagggaaguguuauc

SEQ ID NO: 388394 - RNA, 19 nt, Artificial Sequence
  Description of Artificial Sequence: Synthetic oligonucleotide
  Antisense Strand to SEQ ID NO: 388393
gauaacacuucccuaagga

SEQ ID NO: 388395 - RNA, 19 nt, Artificial Sequence
  Description of Artificial Sequence: Synthetic oligonucleotide
  Sense Strand Starting at position 885 of SEQ ID NO: 317778
acgggaauuugugucccga

SEQ ID NO: 388396 - RNA, 19 nt, Artificial Sequence
  Description of Artificial Sequence: Synthetic oligonucleotide
  Antisense Strand to SEQ ID NO: 388395
ucgggacacaaauucccgu

SEQ ID NO: 388397 - RNA, 19 nt, Artificial Sequence
  Description of Artificial Sequence: Synthetic oligonucleotide
  Sense Strand Starting at position 885 of SEQ ID NO: 317972
auagcagcccuuugggaau

SEQ ID NO: 388398 - RNA, 19 nt, Artificial Sequence
  Description of Artificial Sequence: Synthetic oligonucleotide
  Antisense Strand to SEQ ID NO: 388397
auucccaaagggcugcuau

SEQ ID NO: 388399 - RNA, 19 nt, Artificial Sequence
  Description of Artificial Sequence: Synthetic oligonucleotide
  Sense Strand Starting at position 885 of SEQ ID NO: 317978
gcccuuugggaauguaauu

SEQ ID NO: 388400 - RNA, 19 nt, Artificial Sequence
  Description of Artificial Sequence: Synthetic oligonucleotide
  Antisense Strand to SEQ ID NO: 388399
aauuacauucccaaagggc

SEQ ID NO: 388401 - RNA, 19 nt, Artificial Sequence
  Description of Artificial Sequence: Synthetic oligonucleotide
  Sense Strand Starting at position 885 of SEQ ID NO: 318019
cucauuacacgauauugca

SEQ ID NO: 388402 - RNA, 19 nt, Artificial Sequence
  Description of Artificial Sequence: Synthetic oligonucleotide
  Antisense Strand to SEQ ID NO: 388401
ugcaauaucguguaaugag

SEQ ID NO: 388403 - RNA, 19 nt, Artificial Sequence
  Description of Artificial Sequence: Synthetic oligonucleotide
  Sense Strand Starting at position 885 of SEQ ID NO: 318167
cauggcauugcaugaaaug

SEQ ID NO: 388404 - RNA, 19 nt, Artificial Sequence
  Description of Artificial Sequence: Synthetic oligonucleotide
  Antisense Strand to SEQ ID NO: 388403
cauuucaugcaaugccaug

SEQ ID NO: 388405 - RNA, 19 nt, Artificial Sequence
  Description of Artificial Sequence: Synthetic oligonucleotide
  Sense Strand Starting at position 885 of SEQ ID NO: 318168
auggcauugcaugaaauga

SEQ ID NO: 388406 - RNA, 19 nt, Artificial Sequence
  Description of Artificial Sequence: Synthetic oligonucleotide
  Antisense Strand to SEQ ID NO: 388405
ucauuucaugcaaugccau

SEQ ID NO: 388407 - RNA, 19 nt, Artificial Sequence
  Description of Artificial Sequence: Synthetic oligonucleotide
  Sense Strand Starting at position 885 of SEQ ID NO: 318223
gccaaauuauagucuggaa

SEQ ID NO: 388408 - RNA, 19 nt, Artificial Sequence
  Description of Artificial Sequence: Synthetic oligonucleotide
  Antisense Strand to SEQ ID NO: 388407
uuccagacuauaauuuggc

SEQ ID NO: 388409 - RNA, 19 nt, Artificial Sequence
  Description of Artificial Sequence: Synthetic oligonucleotide
  Sense Strand Starting at position 885 of SEQ ID NO: 318356
ugacauaaaugauugaugu

SEQ ID NO: 388410 - RNA, 19 nt, Artificial Sequence
  Description of Artificial Sequence: Synthetic oligonucleotide
  Antisense Strand to SEQ ID NO: 388409
acaucaaucauuuauguca

SEQ ID NO: 388411 - RNA, 19 nt, Artificial Sequence
  Description of Artificial Sequence: Synthetic oligonucleotide
  Sense Strand Starting at position 885 of SEQ ID NO: 318357
gacauaaaugauugauguc

SEQ ID NO: 388412 - RNA, 19 nt, Artificial Sequence
  Description of Artificial Sequence: Synthetic oligonucleotide
  Antisense Strand to SEQ ID NO: 388411
gacaucaaucauuuauguc

SEQ ID NO: 388413 - RNA, 19 nt, Artificial Sequence
  Description of Artificial Sequence: Synthetic oligonucleotide
  Sense Strand Starting at position 885 of SEQ ID NO: 318385
cuaugauacugacagauuu

SEQ ID NO: 388414 - RNA, 19 nt, Artificial Sequence
  Description of Artificial Sequence: Synthetic oligonucleotide
  Antisense Strand to SEQ ID NO: 388413
aaaucugucaguaucauag

SEQ ID NO: 388415 - RNA, 19 nt, Artificial Sequence
  Description of Artificial Sequence: Synthetic oligonucleotide
  Sense Strand Starting at position 885 of SEQ ID NO: 318419
ugacucucugagcagagua

SEQ ID NO: 388416 - RNA, 19 nt, Artificial Sequence
  Description of Artificial Sequence: Synthetic oligonucleotide
  Antisense Strand to SEQ ID NO: 388415
uacucugcucagagaguca

SEQ ID NO: 388417 - RNA, 19 nt, Artificial Sequence
  Description of Artificial Sequence: Synthetic oligonucleotide
  Sense Strand Starting at position 885 of SEQ ID NO: 318421
acucucugagcagaguauu

SEQ ID NO: 388418 - RNA, 19 nt, Artificial Sequence
  Description of Artificial Sequence: Synthetic oligonucleotide
  Antisense Strand to SEQ ID NO: 388417
aauacucugcucagagagu

SEQ ID NO: 388419 - RNA, 19 nt, Artificial Sequence
  Description of Artificial Sequence: Synthetic oligonucleotide
  Sense Strand Starting at position 885 of SEQ ID NO: 318429
agcagaguauugccuaaga

SEQ ID NO: 388420 - RNA, 19 nt, Artificial Sequence
  Description of Artificial Sequence: Synthetic oligonucleotide
  Antisense Strand to SEQ ID NO: 388419
ucuuaggcaauacucugcu

SEQ ID NO: 388421 - RNA, 19 nt, Artificial Sequence
  Description of Artificial Sequence: Synthetic oligonucleotide
  Sense Strand Starting at position 885 of SEQ ID NO: 318527
agucacagauggucugaua

SEQ ID NO: 388422 - RNA, 19 nt, Artificial Sequence
  Description of Artificial Sequence: Synthetic oligonucleotide
  Antisense Strand to SEQ ID NO: 388421
uaucagaccaucugugacu

SEQ ID NO: 388423 - RNA, 19 nt, Artificial Sequence
  Description of Artificial Sequence: Synthetic oligonucleotide
  Sense Strand Starting at position 885 of SEQ ID NO: 318562
guaacugcauucuuacaag

SEQ ID NO: 388424 - RNA, 19 nt, Artificial Sequence
  Description of Artificial Sequence: Synthetic oligonucleotide
  Antisense Strand to SEQ ID NO: 388423
cuuguaagaaugcaguuac

SEQ ID NO: 388425 - RNA, 19 nt, Artificial Sequence
  Description of Artificial Sequence: Synthetic oligonucleotide
  Sense Strand Starting at position 885 of SEQ ID NO: 318576
acaagcuugucuuuagaaa

SEQ ID NO: 388426 - RNA, 19 nt, Artificial Sequence
  Description of Artificial Sequence: Synthetic oligonucleotide
  Antisense Strand to SEQ ID NO: 388425
uuucuaaagacaagcuugu

SEQ ID NO: 388427 - RNA, 19 nt, Artificial Sequence
  Description of Artificial Sequence: Synthetic oligonucleotide
  Sense Strand Starting at position 885 of SEQ ID NO: 318646
ucuuaagugucacuaugaa

SEQ ID NO: 388428 - RNA, 19 nt, Artificial Sequence
  Description of Artificial Sequence: Synthetic oligonucleotide
  Antisense Strand to SEQ ID NO: 388427
uucauagugacacuuaaga

SEQ ID NO: 388429 - RNA, 19 nt, Artificial Sequence
  Description of Artificial Sequence: Synthetic oligonucleotide
  Sense Strand Starting at position 885 of SEQ ID NO: 318672
ggcacuugccuccaacaau

SEQ ID NO: 388430 - RNA, 19 nt, Artificial Sequence
  Description of Artificial Sequence: Synthetic oligonucleotide
  Antisense Strand to SEQ ID NO: 388429
auuguuggaggcaagugcc

SEQ ID NO: 388431 - RNA, 19 nt, Artificial Sequence
  Description of Artificial Sequence: Synthetic oligonucleotide
  Sense Strand Starting at position 885 of SEQ ID NO: 318775
ggccgaagcgcguugauua

SEQ ID NO: 388432 - RNA, 19 nt, Artificial Sequence
  Description of Artificial Sequence: Synthetic oligonucleotide
  Antisense Strand to SEQ ID NO: 388431
uaaucaacgcgcuucggcc

SEQ ID NO: 388433 - RNA, 19 nt, Artificial Sequence
  Description of Artificial Sequence: Synthetic oligonucleotide
  Sense Strand Starting at position 885 of SEQ ID NO: 318785
cguugauuaccugagguca

SEQ ID NO: 388434 - RNA, 19 nt, Artificial Sequence
  Description of Artificial Sequence: Synthetic oligonucleotide
  Antisense Strand to SEQ ID NO: 388433
ugaccucagguaaucaacg

SEQ ID NO: 388435 - RNA, 19 nt, Artificial Sequence
  Description of Artificial Sequence: Synthetic oligonucleotide
  Sense Strand Starting at position 885 of SEQ ID NO: 319103
uaggaaaugccauauguug

SEQ ID NO: 388436 - RNA, 19 nt, Artificial Sequence
  Description of Artificial Sequence: Synthetic oligonucleotide
  Antisense Strand to SEQ ID NO: 388435
caacauauggcauuuccua

SEQ ID NO: 388437 - RNA, 19 nt, Artificial Sequence
  Description of Artificial Sequence: Synthetic oligonucleotide
  Sense Strand Starting at position 885 of SEQ ID NO: 319112
ccauauguuguuuagagau

SEQ ID NO: 388438 - RNA, 19 nt, Artificial Sequence
  Description of Artificial Sequence: Synthetic oligonucleotide
  Antisense Strand to SEQ ID NO: 388437
aucucuaaacaacauaugg

SEQ ID NO: 388439 - RNA, 19 nt, Artificial Sequence
  Description of Artificial Sequence: Synthetic oligonucleotide
  Sense Strand Starting at position 885 of SEQ ID NO: 319118
guuguuuagagaugaacug

SEQ ID NO: 388440 - RNA, 19 nt, Artificial Sequence
  Description of Artificial Sequence: Synthetic oligonucleotide
  Antisense Strand to SEQ ID NO: 388439
caguucaucucuaaacaac

SEQ ID NO: 388441 - RNA, 19 nt, Artificial Sequence
  Description of Artificial Sequence: Synthetic oligonucleotide
  Sense Strand Starting at position 886 of SEQ ID NO: 315241
guuaaagucuccuugggug

SEQ ID NO: 388442 - RNA, 19 nt, Artificial Sequence
  Description of Artificial Sequence: Synthetic oligonucleotide
  Antisense Strand to SEQ ID NO: 388441
cacccaaggagacuuuaac

SEQ ID NO: 388443 - RNA, 19 nt, Artificial Sequence
  Description of Artificial Sequence: Synthetic oligonucleotide
  Sense Strand Starting at position 886 of SEQ ID NO: 315363
uccagauauuauguuagaa

SEQ ID NO: 388444 - RNA, 19 nt, Artificial Sequence
  Description of Artificial Sequence: Synthetic oligonucleotide
  Antisense Strand to SEQ ID NO: 388443
uucuaacauaauaucugga

SEQ ID NO: 388445 - RNA, 19 nt, Artificial Sequence
  Description of Artificial Sequence: Synthetic oligonucleotide
  Sense Strand Starting at position 886 of SEQ ID NO: 315660
uucugaauguaacucugaa

SEQ ID NO: 388446 - RNA, 19 nt, Artificial Sequence
  Description of Artificial Sequence: Synthetic oligonucleotide
  Antisense Strand to SEQ ID NO: 388445
uucagaguuacauucagaa

SEQ ID NO: 388447 - RNA, 19 nt, Artificial Sequence
  Description of Artificial Sequence: Synthetic oligonucleotide
  Sense Strand Starting at position 886 of SEQ ID NO: 315690
uguccuuaggcuuaagaaa

SEQ ID NO: 388448 - RNA, 19 nt, Artificial Sequence
  Description of Artificial Sequence: Synthetic oligonucleotide
  Antisense Strand to SEQ ID NO: 388447
uuucuuaagccuaaggaca

SEQ ID NO: 388449 - RNA, 19 nt, Artificial Sequence
  Description of Artificial Sequence: Synthetic oligonucleotide
  Sense Strand Starting at position 886 of SEQ ID NO: 315755
gugccaagaugacuuaaca

SEQ ID NO: 388450 - RNA, 19 nt, Artificial Sequence
  Description of Artificial Sequence: Synthetic oligonucleotide
  Antisense Strand to SEQ ID NO: 388449
uguuaagucaucuuggcac

SEQ ID NO: 388451 - RNA, 19 nt, Artificial Sequence
  Description of Artificial Sequence: Synthetic oligonucleotide
  Sense Strand Starting at position 886 of SEQ ID NO: 315899
agcaaagcauguuuagaca

SEQ ID NO: 388452 - RNA, 19 nt, Artificial Sequence
  Description of Artificial Sequence: Synthetic oligonucleotide
  Antisense Strand to SEQ ID NO: 388451
ugucuaaacaugcuuugcu

SEQ ID NO: 388453 - RNA, 19 nt, Artificial Sequence
  Description of Artificial Sequence: Synthetic oligonucleotide
  Sense Strand Starting at position 886 of SEQ ID NO: 315911
uuagacagacguggugaaa

SEQ ID NO: 388454 - RNA, 19 nt, Artificial Sequence
  Description of Artificial Sequence: Synthetic oligonucleotide
  Antisense Strand to SEQ ID NO: 388453
uuucaccacgucugucuaa

SEQ ID NO: 388455 - RNA, 19 nt, Artificial Sequence
  Description of Artificial Sequence: Synthetic oligonucleotide
  Sense Strand Starting at position 886 of SEQ ID NO: 315922
uggugaaacucucuuuaau

SEQ ID NO: 388456 - RNA, 19 nt, Artificial Sequence
  Description of Artificial Sequence: Synthetic oligonucleotide
  Antisense Strand to SEQ ID NO: 388455
auuaaagagaguuucacca

SEQ ID NO: 388457 - RNA, 19 nt, Artificial Sequence
  Description of Artificial Sequence: Synthetic oligonucleotide
  Sense Strand Starting at position 886 of SEQ ID NO: 316190
aggaaugugucaccaucaa

SEQ ID NO: 388458 - RNA, 19 nt, Artificial Sequence
  Description of Artificial Sequence: Synthetic oligonucleotide
  Antisense Strand to SEQ ID NO: 388457
uugauggugacacauuccu

SEQ ID NO: 388459 - RNA, 19 nt, Artificial Sequence
  Description of Artificial Sequence: Synthetic oligonucleotide
  Sense Strand Starting at position 886 of SEQ ID NO: 316228
ccguguuuaggucacagaa

SEQ ID NO: 388460 - RNA, 19 nt, Artificial Sequence
  Description of Artificial Sequence: Synthetic oligonucleotide
  Antisense Strand to SEQ ID NO: 388459
uucugugaccuaaacacgg

SEQ ID NO: 388461 - RNA, 19 nt, Artificial Sequence
  Description of Artificial Sequence: Synthetic oligonucleotide
  Sense Strand Starting at position 886 of SEQ ID NO: 316254
ugccucguccaucaaggau

SEQ ID NO: 388462 - RNA, 19 nt, Artificial Sequence
  Description of Artificial Sequence: Synthetic oligonucleotide
  Antisense Strand to SEQ ID NO: 388461
auccuugauggacgaggca

SEQ ID NO: 388463 - RNA, 19 nt, Artificial Sequence
  Description of Artificial Sequence: Synthetic oligonucleotide
  Sense Strand Starting at position 886 of SEQ ID NO: 316257
cucguccaucaaggauaaa

SEQ ID NO: 388464 - RNA, 19 nt, Artificial Sequence
  Description of Artificial Sequence: Synthetic oligonucleotide
  Antisense Strand to SEQ ID NO: 388463
uuuauccuugauggacgag

SEQ ID NO: 388465 - RNA, 19 nt, Artificial Sequence
  Description of Artificial Sequence: Synthetic oligonucleotide
  Sense Strand Starting at position 886 of SEQ ID NO: 316268
aggauaaauccaugccaac

SEQ ID NO: 388466 - RNA, 19 nt, Artificial Sequence
  Description of Artificial Sequence: Synthetic oligonucleotide
  Antisense Strand to SEQ ID NO: 388465
guuggcauggauuuauccu

SEQ ID NO: 388467 - RNA, 19 nt, Artificial Sequence
  Description of Artificial Sequence: Synthetic oligonucleotide
  Sense Strand Starting at position 886 of SEQ ID NO: 316361
ccaacuuguucugcaggga

SEQ ID NO: 388468 - RNA, 19 nt, Artificial Sequence
  Description of Artificial Sequence: Synthetic oligonucleotide
  Antisense Strand to SEQ ID NO: 388467
ucccugcagaacaaguugg

SEQ ID NO: 388469 - RNA, 19 nt, Artificial Sequence
  Description of Artificial Sequence: Synthetic oligonucleotide
  Sense Strand Starting at position 886 of SEQ ID NO: 316362
caacuuguucugcagggaa

SEQ ID NO: 388470 - RNA, 19 nt, Artificial Sequence
  Description of Artificial Sequence: Synthetic oligonucleotide
  Antisense Strand to SEQ ID NO: 388469
uucccugcagaacaaguug

SEQ ID NO: 388471 - RNA, 19 nt, Artificial Sequence
  Description of Artificial Sequence: Synthetic oligonucleotide
  Sense Strand Starting at position 886 of SEQ ID NO: 316402
cgagaacuccaaggaguca

SEQ ID NO: 388472 - RNA, 19 nt, Artificial Sequence
  Description of Artificial Sequence: Synthetic oligonucleotide
  Antisense Strand to SEQ ID NO: 388471
ugacuccuuggaguucucg

SEQ ID NO: 388473 - RNA, 19 nt, Artificial Sequence
  Description of Artificial Sequence: Synthetic oligonucleotide
  Sense Strand Starting at position 886 of SEQ ID NO: 317336
gucugaagugacugcaaau

SEQ ID NO: 388474 - RNA, 19 nt, Artificial Sequence
  Description of Artificial Sequence: Synthetic oligonucleotide
  Antisense Strand to SEQ ID NO: 388473
auuugcagucacuucagac

SEQ ID NO: 388475 - RNA, 19 nt, Artificial Sequence
  Description of Artificial Sequence: Synthetic oligonucleotide
  Sense Strand Starting at position 886 of SEQ ID NO: 317389
acucuuaagccauggaaau

SEQ ID NO: 388476 - RNA, 19 nt, Artificial Sequence
  Description of Artificial Sequence: Synthetic oligonucleotide
  Antisense Strand to SEQ ID NO: 388475
auuuccauggcuuaagagu

SEQ ID NO: 388477 - RNA, 19 nt, Artificial Sequence
  Description of Artificial Sequence: Synthetic oligonucleotide
  Sense Strand Starting at position 886 of SEQ ID NO: 317390
cucuuaagccauggaaaug

SEQ ID NO: 388478 - RNA, 19 nt, Artificial Sequence
  Description of Artificial Sequence: Synthetic oligonucleotide
  Antisense Strand to SEQ ID NO: 388477
cauuuccauggcuuaagag

SEQ ID NO: 388479 - RNA, 19 nt, Artificial Sequence
  Description of Artificial Sequence: Synthetic oligonucleotide
  Sense Strand Starting at position 886 of SEQ ID NO: 317493
uuuauuguccagugaacau

SEQ ID NO: 388480 - RNA, 19 nt, Artificial Sequence
  Description of Artificial Sequence: Synthetic oligonucleotide
  Antisense Strand to SEQ ID NO: 388479
auguucacuggacaauaaa

SEQ ID NO: 388481 - RNA, 19 nt, Artificial Sequence
  Description of Artificial Sequence: Synthetic oligonucleotide
  Sense Strand Starting at position 886 of SEQ ID NO: 317556
aguaaugaggcuuguaaau

SEQ ID NO: 388482 - RNA, 19 nt, Artificial Sequence
  Description of Artificial Sequence: Synthetic oligonucleotide
  Antisense Strand to SEQ ID NO: 388481
auuuacaagccucauuacu

SEQ ID NO: 388483 - RNA, 19 nt, Artificial Sequence
  Description of Artificial Sequence: Synthetic oligonucleotide
  Sense Strand Starting at position 886 of SEQ ID NO: 317567
uuguaaauccugcggaauc

SEQ ID NO: 388484 - RNA, 19 nt, Artificial Sequence
  Description of Artificial Sequence: Synthetic oligonucleotide
  Antisense Strand to SEQ ID NO: 388483
gauuccgcaggauuuacaa

SEQ ID NO: 388485 - RNA, 19 nt, Artificial Sequence
  Description of Artificial Sequence: Synthetic oligonucleotide
  Sense Strand Starting at position 886 of SEQ ID NO: 317714
uuugacugaugucuaagaa

SEQ ID NO: 388486 - RNA, 19 nt, Artificial Sequence
  Description of Artificial Sequence: Synthetic oligonucleotide
  Antisense Strand to SEQ ID NO: 388485
uucuuagacaucagucaaa

SEQ ID NO: 388487 - RNA, 19 nt, Artificial Sequence
  Description of Artificial Sequence: Synthetic oligonucleotide
  Sense Strand Starting at position 886 of SEQ ID NO: 317771
ggguuuaacuuguuggaau

SEQ ID NO: 388488 - RNA, 19 nt, Artificial Sequence
  Description of Artificial Sequence: Synthetic oligonucleotide
  Antisense Strand to SEQ ID NO: 388487
auuccaacaaguuaaaccc

SEQ ID NO: 388489 - RNA, 19 nt, Artificial Sequence
  Description of Artificial Sequence: Synthetic oligonucleotide
  Sense Strand Starting at position 886 of SEQ ID NO: 317773
guuuaacuuguuggaauga

SEQ ID NO: 388490 - RNA, 19 nt, Artificial Sequence
  Description of Artificial Sequence: Synthetic oligonucleotide
  Antisense Strand to SEQ ID NO: 388489
ucauuccaacaaguuaaac

SEQ ID NO: 388491 - RNA, 19 nt, Artificial Sequence
  Description of Artificial Sequence: Synthetic oligonucleotide
  Sense Strand Starting at position 886 of SEQ ID NO: 317898
ggaaucuccugccuaaauu

SEQ ID NO: 388492 - RNA, 19 nt, Artificial Sequence
  Description of Artificial Sequence: Synthetic oligonucleotide
  Antisense Strand to SEQ ID NO: 388491
aauuuaggcaggagauucc

SEQ ID NO: 388493 - RNA, 19 nt, Artificial Sequence
  Description of Artificial Sequence: Synthetic oligonucleotide
  Sense Strand Starting at position 886 of SEQ ID NO: 317943
cgagacaacacccguuaua

SEQ ID NO: 388494 - RNA, 19 nt, Artificial Sequence
  Description of Artificial Sequence: Synthetic oligonucleotide
  Antisense Strand to SEQ ID NO: 388493
uauaacggguguugucucg

SEQ ID NO: 388495 - RNA, 19 nt, Artificial Sequence
  Description of Artificial Sequence: Synthetic oligonucleotide
  Sense Strand Starting at position 886 of SEQ ID NO: 317971
cuuugaaauuaagacagaa

SEQ ID NO: 388496 - RNA, 19 nt, Artificial Sequence
  Description of Artificial Sequence: Synthetic oligonucleotide
  Antisense Strand to SEQ ID NO: 388495
uucugucuuaauuucaaag

SEQ ID NO: 388497 - RNA, 19 nt, Artificial Sequence
  Description of Artificial Sequence: Synthetic oligonucleotide
  Sense Strand Starting at position 886 of SEQ ID NO: 318007
uuccauuaugaucacguuu

SEQ ID NO: 388498 - RNA, 19 nt, Artificial Sequence
  Description of Artificial Sequence: Synthetic oligonucleotide
  Antisense Strand to SEQ ID NO: 388497
aaacgugaucauaauggaa

SEQ ID NO: 388499 - RNA, 19 nt, Artificial Sequence
  Description of Artificial Sequence: Synthetic oligonucleotide
  Sense Strand Starting at position 886 of SEQ ID NO: 318106
aaagaaaucuugccuggga

SEQ ID NO: 388500 - RNA, 19 nt, Artificial Sequence
  Description of Artificial Sequence: Synthetic oligonucleotide
  Antisense Strand to SEQ ID NO: 388499
ucccaggcaagauuucuuu

SEQ ID NO: 388501 - RNA, 19 nt, Artificial Sequence
  Description of Artificial Sequence: Synthetic oligonucleotide
  Sense Strand Starting at position 886 of SEQ ID NO: 318109
gaaaucuugccugggaugu

SEQ ID NO: 388502 - RNA, 19 nt, Artificial Sequence
  Description of Artificial Sequence: Synthetic oligonucleotide
  Antisense Strand to SEQ ID NO: 388501
acaucccaggcaagauuuc

SEQ ID NO: 388503 - RNA, 19 nt, Artificial Sequence
  Description of Artificial Sequence: Synthetic oligonucleotide
  Sense Strand Starting at position 886 of SEQ ID NO: 318143
aucauuuccugugcccaga

SEQ ID NO: 388504 - RNA, 19 nt, Artificial Sequence
  Description of Artificial Sequence: Synthetic oligonucleotide
  Antisense Strand to SEQ ID NO: 388503
ucugggcacaggaaaugau

SEQ ID NO: 388505 - RNA, 19 nt, Artificial Sequence
  Description of Artificial Sequence: Synthetic oligonucleotide
  Sense Strand Starting at position 886 of SEQ ID NO: 318226
ggagaaaguucugagaaga

SEQ ID NO: 388506 - RNA, 19 nt, Artificial Sequence
  Description of Artificial Sequence: Synthetic oligonucleotide
  Antisense Strand to SEQ ID NO: 388505
ucuucucagaacuuucucc

SEQ ID NO: 388507 - RNA, 19 nt, Artificial Sequence
  Description of Artificial Sequence: Synthetic oligonucleotide
  Sense Strand Starting at position 886 of SEQ ID NO: 318237
ugagaagaguaacaaauaa

SEQ ID NO: 388508 - RNA, 19 nt, Artificial Sequence
  Description of Artificial Sequence: Synthetic oligonucleotide
  Antisense Strand to SEQ ID NO: 388507
uuauuuguuacucuucuca

SEQ ID NO: 388509 - RNA, 19 nt, Artificial Sequence
  Description of Artificial Sequence: Synthetic oligonucleotide
  Sense Strand Starting at position 886 of SEQ ID NO: 318435
cuaggaauggcugguguuu

SEQ ID NO: 388510 - RNA, 19 nt, Artificial Sequence
  Description of Artificial Sequence: Synthetic oligonucleotide
  Antisense Strand to SEQ ID NO: 388509
aaacaccagccauuccuag

SEQ ID NO: 388511 - RNA, 19 nt, Artificial Sequence
  Description of Artificial Sequence: Synthetic oligonucleotide
  Sense Strand Starting at position 886 of SEQ ID NO: 318457
ccagaucugucuccagaaa

SEQ ID NO: 388512 - RNA, 19 nt, Artificial Sequence
  Description of Artificial Sequence: Synthetic oligonucleotide
  Antisense Strand to SEQ ID NO: 388511
uuucuggagacagaucugg

SEQ ID NO: 388513 - RNA, 19 nt, Artificial Sequence
  Description of Artificial Sequence: Synthetic oligonucleotide
  Sense Strand Starting at position 886 of SEQ ID NO: 318523
uugguucuccaguaucuuu

SEQ ID NO: 388514 - RNA, 19 nt, Artificial Sequence
  Description of Artificial Sequence: Synthetic oligonucleotide
  Antisense Strand to SEQ ID NO: 388513
aaagauacuggagaaccaa

SEQ ID NO: 388515 - RNA, 19 nt, Artificial Sequence
  Description of Artificial Sequence: Synthetic oligonucleotide
  Sense Strand Starting at position 886 of SEQ ID NO: 318712
acaucugugcugugagacu

SEQ ID NO: 388516 - RNA, 19 nt, Artificial Sequence
  Description of Artificial Sequence: Synthetic oligonucleotide
  Antisense Strand to SEQ ID NO: 388515
agucucacagcacagaugu

SEQ ID NO: 388517 - RNA, 19 nt, Artificial Sequence
  Description of Artificial Sequence: Synthetic oligonucleotide
  Sense Strand Starting at position 886 of SEQ ID NO: 318723
gugagacucguauaaagca

SEQ ID NO: 388518 - RNA, 19 nt, Artificial Sequence
  Description of Artificial Sequence: Synthetic oligonucleotide
  Antisense Strand to SEQ ID NO: 388517
ugcuuuauacgagucucac

SEQ ID NO: 388519 - RNA, 19 nt, Artificial Sequence
  Description of Artificial Sequence: Synthetic oligonucleotide
  Sense Strand Starting at position 886 of SEQ ID NO: 318770
uuucuaacagucugaaaga

SEQ ID NO: 388520 - RNA, 19 nt, Artificial Sequence
  Description of Artificial Sequence: Synthetic oligonucleotide
  Antisense Strand to SEQ ID NO: 388519
ucuuucagacuguuagaaa

SEQ ID NO: 388521 - RNA, 19 nt, Artificial Sequence
  Description of Artificial Sequence: Synthetic oligonucleotide
  Sense Strand Starting at position 887 of SEQ ID NO: 315313
agaauauacuuugugcuua

SEQ ID NO: 388522 - RNA, 19 nt, Artificial Sequence
  Description of Artificial Sequence: Synthetic oligonucleotide
  Antisense Strand to SEQ ID NO: 388521
uaagcacaaaguauauucu

SEQ ID NO: 388523 - RNA, 19 nt, Artificial Sequence
  Description of Artificial Sequence: Synthetic oligonucleotide
  Sense Strand Starting at position 887 of SEQ ID NO: 315340
ugggauguuuaagucauag

SEQ ID NO: 388524 - RNA, 19 nt, Artificial Sequence
  Description of Artificial Sequence: Synthetic oligonucleotide
  Antisense Strand to SEQ ID NO: 388523
cuaugacuuaaacauccca

SEQ ID NO: 388525 - RNA, 19 nt, Artificial Sequence
  Description of Artificial Sequence: Synthetic oligonucleotide
  Sense Strand Starting at position 887 of SEQ ID NO: 315405
gaaguugggaggugcuaaa

SEQ ID NO: 388526 - RNA, 19 nt, Artificial Sequence
  Description of Artificial Sequence: Synthetic oligonucleotide
  Antisense Strand to SEQ ID NO: 388525
uuuagcaccucccaacuuc

SEQ ID NO: 388527 - RNA, 19 nt, Artificial Sequence
  Description of Artificial Sequence: Synthetic oligonucleotide
  Sense Strand Starting at position 887 of SEQ ID NO: 315544
agaggucacaccugagcua

SEQ ID NO: 388528 - RNA, 19 nt, Artificial Sequence
  Description of Artificial Sequence: Synthetic oligonucleotide
  Antisense Strand to SEQ ID NO: 388527
uagcucaggugugaccucu

SEQ ID NO: 388529 - RNA, 19 nt, Artificial Sequence
  Description of Artificial Sequence: Synthetic oligonucleotide
  Sense Strand Starting at position 887 of SEQ ID NO: 315715
aggaauuuaugagguacua

SEQ ID NO: 388530 - RNA, 19 nt, Artificial Sequence
  Description of Artificial Sequence: Synthetic oligonucleotide
  Antisense Strand to SEQ ID NO: 388529
uaguaccucauaaauuccu

SEQ ID NO: 388531 - RNA, 19 nt, Artificial Sequence
  Description of Artificial Sequence: Synthetic oligonucleotide
  Sense Strand Starting at position 887 of SEQ ID NO: 316014
cuagaccagcuguauauua

SEQ ID NO: 388532 - RNA, 19 nt, Artificial Sequence
  Description of Artificial Sequence: Synthetic oligonucleotide
  Antisense Strand to SEQ ID NO: 388531
uaauauacagcuggucuag

SEQ ID NO: 388533 - RNA, 19 nt, Artificial Sequence
  Description of Artificial Sequence: Synthetic oligonucleotide
  Sense Strand Starting at position 887 of SEQ ID NO: 316016
agaccagcuguauauuauu

SEQ ID NO: 388534 - RNA, 19 nt, Artificial Sequence
  Description of Artificial Sequence: Synthetic oligonucleotide
  Antisense Strand to SEQ ID NO: 388533
aauaauauacagcuggucu

SEQ ID NO: 388535 - RNA, 19 nt, Artificial Sequence
  Description of Artificial Sequence: Synthetic oligonucleotide
  Sense Strand Starting at position 887 of SEQ ID NO: 316024
uguauauuauuucugccau

SEQ ID NO: 388536 - RNA, 19 nt, Artificial Sequence
  Description of Artificial Sequence: Synthetic oligonucleotide
  Antisense Strand to SEQ ID NO: 388535
auggcagaaauaauauaca

SEQ ID NO: 388537 - RNA, 19 nt, Artificial Sequence
  Description of Artificial Sequence: Synthetic oligonucleotide
  Sense Strand Starting at position 887 of SEQ ID NO: 316048
cauuuaucaugggaggaau

SEQ ID NO: 388538 - RNA, 19 nt, Artificial Sequence
  Description of Artificial Sequence: Synthetic oligonucleotide
  Antisense Strand to SEQ ID NO: 388537
auuccucccaugauaaaug

SEQ ID NO: 388539 - RNA, 19 nt, Artificial Sequence
  Description of Artificial Sequence: Synthetic oligonucleotide
  Sense Strand Starting at position 887 of SEQ ID NO: 316101
auagguuucucuuccugaa

SEQ ID NO: 388540 - RNA, 19 nt, Artificial Sequence
  Description of Artificial Sequence: Synthetic oligonucleotide
  Antisense Strand to SEQ ID NO: 388539
uucaggaagagaaaccuau

SEQ ID NO: 388541 - RNA, 19 nt, Artificial Sequence
  Description of Artificial Sequence: Synthetic oligonucleotide
  Sense Strand Starting at position 887 of SEQ ID NO: 316103
agguuucucuuccugaacu

SEQ ID NO: 388542 - RNA, 19 nt, Artificial Sequence
  Description of Artificial Sequence: Synthetic oligonucleotide
  Antisense Strand to SEQ ID NO: 388541
aguucaggaagagaaaccu

SEQ ID NO: 388543 - RNA, 19 nt, Artificial Sequence
  Description of Artificial Sequence: Synthetic oligonucleotide
  Sense Strand Starting at position 887 of SEQ ID NO: 316394
gaaagauaucacgguauaa

SEQ ID NO: 388544 - RNA, 19 nt, Artificial Sequence
  Description of Artificial Sequence: Synthetic oligonucleotide
  Antisense Strand to SEQ ID NO: 388543
uuauaccgugauaucuuuc

SEQ ID NO: 388545 - RNA, 19 nt, Artificial Sequence
  Description of Artificial Sequence: Synthetic oligonucleotide
  Sense Strand Starting at position 887 of SEQ ID NO: 316396
aagauaucacgguauaagc

SEQ ID NO: 388546 - RNA, 19 nt, Artificial Sequence
  Description of Artificial Sequence: Synthetic oligonucleotide
  Antisense Strand to SEQ ID NO: 388545
gcuuauaccgugauaucuu

SEQ ID NO: 388547 - RNA, 19 nt, Artificial Sequence
  Description of Artificial Sequence: Synthetic oligonucleotide
  Sense Strand Starting at position 887 of SEQ ID NO: 316423
gugacauaguaaguaagua

SEQ ID NO: 388548 - RNA, 19 nt, Artificial Sequence
  Description of Artificial Sequence: Synthetic oligonucleotide
  Antisense Strand to SEQ ID NO: 388547
uacuuacuuacuaugucac

SEQ ID NO: 388549 - RNA, 19 nt, Artificial Sequence
  Description of Artificial Sequence: Synthetic oligonucleotide
  Sense Strand Starting at position 887 of SEQ ID NO: 316581
agcugaaacacggaaaguu

SEQ ID NO: 388550 - RNA, 19 nt, Artificial Sequence
  Description of Artificial Sequence: Synthetic oligonucleotide
  Antisense Strand to SEQ ID NO: 388549
aacuuuccguguuucagcu

SEQ ID NO: 388551 - RNA, 19 nt, Artificial Sequence
  Description of Artificial Sequence: Synthetic oligonucleotide
  Sense Strand Starting at position 887 of SEQ ID NO: 316651
gucccuaugcuccaggaaa

SEQ ID NO: 388552 - RNA, 19 nt, Artificial Sequence
  Description of Artificial Sequence: Synthetic oligonucleotide
  Antisense Strand to SEQ ID NO: 388551
uuuccuggagcauagggac

SEQ ID NO: 388553 - RNA, 19 nt, Artificial Sequence
  Description of Artificial Sequence: Synthetic oligonucleotide
  Sense Strand Starting at position 887 of SEQ ID NO: 316864
aguuaacaggcuuauuguu

SEQ ID NO: 388554 - RNA, 19 nt, Artificial Sequence
  Description of Artificial Sequence: Synthetic oligonucleotide
  Antisense Strand to SEQ ID NO: 388553
aacaauaagccuguuaacu

SEQ ID NO: 388555 - RNA, 19 nt, Artificial Sequence
  Description of Artificial Sequence: Synthetic oligonucleotide
  Sense Strand Starting at position 887 of SEQ ID NO: 316880
guuuaagcaguguaaauac

SEQ ID NO: 388556 - RNA, 19 nt, Artificial Sequence
  Description of Artificial Sequence: Synthetic oligonucleotide
  Antisense Strand to SEQ ID NO: 388555
guauuuacacugcuuaaac

SEQ ID NO: 388557 - RNA, 19 nt, Artificial Sequence
  Description of Artificial Sequence: Synthetic oligonucleotide
  Sense Strand Starting at position 887 of SEQ ID NO: 316887
caguguaaauacgcgauuu

SEQ ID NO: 388558 - RNA, 19 nt, Artificial Sequence
  Description of Artificial Sequence: Synthetic oligonucleotide
  Antisense Strand to SEQ ID NO: 388557
aaaucgcguauuuacacug

SEQ ID NO: 388559 - RNA, 19 nt, Artificial Sequence
  Description of Artificial Sequence: Synthetic oligonucleotide
  Sense Strand Starting at position 887 of SEQ ID NO: 316888
aguguaaauacgcgauuua

SEQ ID NO: 388560 - RNA, 19 nt, Artificial Sequence
  Description of Artificial Sequence: Synthetic oligonucleotide
  Antisense Strand to SEQ ID NO: 388559
uaaaucgcguauuuacacu

SEQ ID NO: 388561 - RNA, 19 nt, Artificial Sequence
  Description of Artificial Sequence: Synthetic oligonucleotide
  Sense Strand Starting at position 887 of SEQ ID NO: 317044
aggaguaacgcuucgcuuu

SEQ ID NO: 388562 - RNA, 19 nt, Artificial Sequence
  Description of Artificial Sequence: Synthetic oligonucleotide
  Antisense Strand to SEQ ID NO: 388561
aaagcgaagcguuacuccu

SEQ ID NO: 388563 - RNA, 19 nt, Artificial Sequence
  Description of Artificial Sequence: Synthetic oligonucleotide
  Sense Strand Starting at position 887 of SEQ ID NO: 317426
guuacccaagucuaaagau

SEQ ID NO: 388564 - RNA, 19 nt, Artificial Sequence
  Description of Artificial Sequence: Synthetic oligonucleotide
  Antisense Strand to SEQ ID NO: 388563
aucuuuagacuuggguaac

SEQ ID NO: 388565 - RNA, 19 nt, Artificial Sequence
  Description of Artificial Sequence: Synthetic oligonucleotide
  Sense Strand Starting at position 887 of SEQ ID NO: 317464
augaguuuagcacagcagu

SEQ ID NO: 388566 - RNA, 19 nt, Artificial Sequence
  Description of Artificial Sequence: Synthetic oligonucleotide
  Antisense Strand to SEQ ID NO: 388565
acugcugugcuaaacucau

SEQ ID NO: 388567 - RNA, 19 nt, Artificial Sequence
  Description of Artificial Sequence: Synthetic oligonucleotide
  Sense Strand Starting at position 887 of SEQ ID NO: 317486
caaacuugagcguggauca

SEQ ID NO: 388568 - RNA, 19 nt, Artificial Sequence
  Description of Artificial Sequence: Synthetic oligonucleotide
  Antisense Strand to SEQ ID NO: 388567
ugauccacgcucaaguuug

SEQ ID NO: 388569 - RNA, 19 nt, Artificial Sequence
  Description of Artificial Sequence: Synthetic oligonucleotide
  Sense Strand Starting at position 887 of SEQ ID NO: 317651
uugggaccugcuggucaaa

SEQ ID NO: 388570 - RNA, 19 nt, Artificial Sequence
  Description of Artificial Sequence: Synthetic oligonucleotide
  Antisense Strand to SEQ ID NO: 388569
uuugaccagcaggucccaa

SEQ ID NO: 388571 - RNA, 19 nt, Artificial Sequence
  Description of Artificial Sequence: Synthetic oligonucleotide
  Sense Strand Starting at position 887 of SEQ ID NO: 317670
aggaaagguauacguuauu

SEQ ID NO: 388572 - RNA, 19 nt, Artificial Sequence
  Description of Artificial Sequence: Synthetic oligonucleotide
  Antisense Strand to SEQ ID NO: 388571
aauaacguauaccuuuccu

SEQ ID NO: 388573 - RNA, 19 nt, Artificial Sequence
  Description of Artificial Sequence: Synthetic oligonucleotide
  Sense Strand Starting at position 887 of SEQ ID NO: 317690
aaggaagacuuguuucucu

SEQ ID NO: 388574 - RNA, 19 nt, Artificial Sequence
  Description of Artificial Sequence: Synthetic oligonucleotide
  Antisense Strand to SEQ ID NO: 388573
agagaaacaagucuuccuu

SEQ ID NO: 388575 - RNA, 19 nt, Artificial Sequence
  Description of Artificial Sequence: Synthetic oligonucleotide
  Sense Strand Starting at position 887 of SEQ ID NO: 317849
auggaaugcugccucaaga

SEQ ID NO: 388576 - RNA, 19 nt, Artificial Sequence
  Description of Artificial Sequence: Synthetic oligonucleotide
  Antisense Strand to SEQ ID NO: 388575
ucuugaggcagcauuccau

SEQ ID NO: 388577 - RNA, 19 nt, Artificial Sequence
  Description of Artificial Sequence: Synthetic oligonucleotide
  Sense Strand Starting at position 887 of SEQ ID NO: 317874
acauacuuugccugaagca

SEQ ID NO: 388578 - RNA, 19 nt, Artificial Sequence
  Description of Artificial Sequence: Synthetic oligonucleotide
  Antisense Strand to SEQ ID NO: 388577
ugcuucaggcaaaguaugu

SEQ ID NO: 388579 - RNA, 19 nt, Artificial Sequence
  Description of Artificial Sequence: Synthetic oligonucleotide
  Sense Strand Starting at position 887 of SEQ ID NO: 317898
cguaguuguggucugucca

SEQ ID NO: 388580 - RNA, 19 nt, Artificial Sequence
  Description of Artificial Sequence: Synthetic oligonucleotide
  Antisense Strand to SEQ ID NO: 388579
uggacagaccacaacuacg

SEQ ID NO: 388581 - RNA, 19 nt, Artificial Sequence
  Description of Artificial Sequence: Synthetic oligonucleotide
  Sense Strand Starting at position 887 of SEQ ID NO: 318099
agcaaugaacuaugaaagu

SEQ ID NO: 388582 - RNA, 19 nt, Artificial Sequence
  Description of Artificial Sequence: Synthetic oligonucleotide
  Antisense Strand to SEQ ID NO: 388581
acuuucauaguucauugcu

SEQ ID NO: 388583 - RNA, 19 nt, Artificial Sequence
  Description of Artificial Sequence: Synthetic oligonucleotide
  Sense Strand Starting at position 887 of SEQ ID NO: 318132
gagggaagauaaggaauuu

SEQ ID NO: 388584 - RNA, 19 nt, Artificial Sequence
  Description of Artificial Sequence: Synthetic oligonucleotide
  Antisense Strand to SEQ ID NO: 388583
aaauuccuuaucuucccuc

SEQ ID NO: 388585 - RNA, 19 nt, Artificial Sequence
  Description of Artificial Sequence: Synthetic oligonucleotide
  Sense Strand Starting at position 887 of SEQ ID NO: 318218
uagagaaucugguaaauuu

SEQ ID NO: 388586 - RNA, 19 nt, Artificial Sequence
  Description of Artificial Sequence: Synthetic oligonucleotide
  Antisense Strand to SEQ ID NO: 388585
aaauuuaccagauucucua

SEQ ID NO: 388587 - RNA, 19 nt, Artificial Sequence
  Description of Artificial Sequence: Synthetic oligonucleotide
  Sense Strand Starting at position 887 of SEQ ID NO: 318235
uuaguauccuuaucugaua

SEQ ID NO: 388588 - RNA, 19 nt, Artificial Sequence
  Description of Artificial Sequence: Synthetic oligonucleotide
  Antisense Strand to SEQ ID NO: 388587
uaucagauaaggauacuaa

SEQ ID NO: 388589 - RNA, 19 nt, Artificial Sequence
  Description of Artificial Sequence: Synthetic oligonucleotide
  Sense Strand Starting at position 887 of SEQ ID NO: 318363
ccuagauguuauccaagag

SEQ ID NO: 388590 - RNA, 19 nt, Artificial Sequence
  Description of Artificial Sequence: Synthetic oligonucleotide
  Antisense Strand to SEQ ID NO: 388589
cucuuggauaacaucuagg

SEQ ID NO: 388591 - RNA, 19 nt, Artificial Sequence
  Description of Artificial Sequence: Synthetic oligonucleotide
  Sense Strand Starting at position 887 of SEQ ID NO: 318597
ugcugaguugaagaagcua

SEQ ID NO: 388592 - RNA, 19 nt, Artificial Sequence
  Description of Artificial Sequence: Synthetic oligonucleotide
  Antisense Strand to SEQ ID NO: 388591
uagcuucuucaacucagca

SEQ ID NO: 388593 - RNA, 19 nt, Artificial Sequence
  Description of Artificial Sequence: Synthetic oligonucleotide
  Sense Strand Starting at position 887 of SEQ ID NO: 318803
gguguauacaacugucauc

SEQ ID NO: 388594 - RNA, 19 nt, Artificial Sequence
  Description of Artificial Sequence: Synthetic oligonucleotide
  Antisense Strand to SEQ ID NO: 388593
gaugacaguuguauacacc

SEQ ID NO: 388595 - RNA, 19 nt, Artificial Sequence
  Description of Artificial Sequence: Synthetic oligonucleotide
  Sense Strand Starting at position 887 of SEQ ID NO: 318808
auacaacugucaucgcuaa

SEQ ID NO: 388596 - RNA, 19 nt, Artificial Sequence
  Description of Artificial Sequence: Synthetic oligonucleotide
  Antisense Strand to SEQ ID NO: 388595
uuagcgaugacaguuguau

SEQ ID NO: 388597 - RNA, 19 nt, Artificial Sequence
  Description of Artificial Sequence: Synthetic oligonucleotide
  Sense Strand Starting at position 887 of SEQ ID NO: 318903
auacucuuaugaucuguuu

SEQ ID NO: 388598 - RNA, 19 nt, Artificial Sequence
  Description of Artificial Sequence: Synthetic oligonucleotide
  Antisense Strand to SEQ ID NO: 388597
aaacagaucauaagaguau

SEQ ID NO: 388599 - RNA, 19 nt, Artificial Sequence
  Description of Artificial Sequence: Synthetic oligonucleotide
  Sense Strand Starting at position 887 of SEQ ID NO: 319013
agucauccucuguaaauga

SEQ ID NO: 388600 - RNA, 19 nt, Artificial Sequence
  Description of Artificial Sequence: Synthetic oligonucleotide
  Antisense Strand to SEQ ID NO: 388599
ucauuuacagaggaugacu

SEQ ID NO: 388601 - RNA, 19 nt, Artificial Sequence
  Description of Artificial Sequence: Synthetic oligonucleotide
  Sense Strand Starting at position 888 of SEQ ID NO: 315329
aguguuaauucuuccaacu

SEQ ID NO: 388602 - RNA, 19 nt, Artificial Sequence
  Description of Artificial Sequence: Synthetic oligonucleotide
  Antisense Strand to SEQ ID NO: 388601
aguuggaagaauuaacacu

SEQ ID NO: 388603 - RNA, 19 nt, Artificial Sequence
  Description of Artificial Sequence: Synthetic oligonucleotide
  Sense Strand Starting at position 888 of SEQ ID NO: 315497
cuauauauguugcuuauga

SEQ ID NO: 388604 - RNA, 19 nt, Artificial Sequence
  Description of Artificial Sequence: Synthetic oligonucleotide
  Antisense Strand to SEQ ID NO: 388603
ucauaagcaacauauauag

SEQ ID NO: 388605 - RNA, 19 nt, Artificial Sequence
  Description of Artificial Sequence: Synthetic oligonucleotide
  Sense Strand Starting at position 888 of SEQ ID NO: 315499
auauauguugcuuaugauc

SEQ ID NO: 388606 - RNA, 19 nt, Artificial Sequence
  Description of Artificial Sequence: Synthetic oligonucleotide
  Antisense Strand to SEQ ID NO: 388605
gaucauaagcaacauauau

SEQ ID NO: 388607 - RNA, 19 nt, Artificial Sequence
  Description of Artificial Sequence: Synthetic oligonucleotide
  Sense Strand Starting at position 888 of SEQ ID NO: 315504
uguugcuuaugaucccaua

SEQ ID NO: 388608 - RNA, 19 nt, Artificial Sequence
  Description of Artificial Sequence: Synthetic oligonucleotide
  Antisense Strand to SEQ ID NO: 388607
uaugggaucauaagcaaca

SEQ ID NO: 388609 - RNA, 19 nt, Artificial Sequence
  Description of Artificial Sequence: Synthetic oligonucleotide
  Sense Strand Starting at position 888 of SEQ ID NO: 315515
aucccauaccuauguagua

SEQ ID NO: 388610 - RNA, 19 nt, Artificial Sequence
  Description of Artificial Sequence: Synthetic oligonucleotide
  Antisense Strand to SEQ ID NO: 388609
uacuacauagguaugggau

SEQ ID NO: 388611 - RNA, 19 nt, Artificial Sequence
  Description of Artificial Sequence: Synthetic oligonucleotide
  Sense Strand Starting at position 888 of SEQ ID NO: 315516
ucccauaccuauguaguaa

SEQ ID NO: 388612 - RNA, 19 nt, Artificial Sequence
  Description of Artificial Sequence: Synthetic oligonucleotide
  Antisense Strand to SEQ ID NO: 388611
uuacuacauagguauggga

SEQ ID NO: 388613 - RNA, 19 nt, Artificial Sequence
  Description of Artificial Sequence: Synthetic oligonucleotide
  Sense Strand Starting at position 888 of SEQ ID NO: 315569
cagaauagugguggucuau

SEQ ID NO: 388614 - RNA, 19 nt, Artificial Sequence
  Description of Artificial Sequence: Synthetic oligonucleotide
  Antisense Strand to SEQ ID NO: 388613
auagaccaccacuauucug

SEQ ID NO: 388615 - RNA, 19 nt, Artificial Sequence
  Description of Artificial Sequence: Synthetic oligonucleotide
  Sense Strand Starting at position 888 of SEQ ID NO: 315575
agugguggucuauguagag

SEQ ID NO: 388616 - RNA, 19 nt, Artificial Sequence
  Description of Artificial Sequence: Synthetic oligonucleotide
  Antisense Strand to SEQ ID NO: 388615
cucuacauagaccaccacu

SEQ ID NO: 388617 - RNA, 19 nt, Artificial Sequence
  Description of Artificial Sequence: Synthetic oligonucleotide
  Sense Strand Starting at position 888 of SEQ ID NO: 315621
agggcugaaucuguuacau

SEQ ID NO: 388618 - RNA, 19 nt, Artificial Sequence
  Description of Artificial Sequence: Synthetic oligonucleotide
  Antisense Strand to SEQ ID NO: 388617
auguaacagauucagcccu

SEQ ID NO: 388619 - RNA, 19 nt, Artificial Sequence
  Description of Artificial Sequence: Synthetic oligonucleotide
  Sense Strand Starting at position 888 of SEQ ID NO: 315931
auguccucagccuguuaca

SEQ ID NO: 388620 - RNA, 19 nt, Artificial Sequence
  Description of Artificial Sequence: Synthetic oligonucleotide
  Antisense Strand to SEQ ID NO: 388619
uguaacaggcugaggacau

SEQ ID NO: 388621 - RNA, 19 nt, Artificial Sequence
  Description of Artificial Sequence: Synthetic oligonucleotide
  Sense Strand Starting at position 888 of SEQ ID NO: 315966
aguugaagcaguuauggca

SEQ ID NO: 388622 - RNA, 19 nt, Artificial Sequence
  Description of Artificial Sequence: Synthetic oligonucleotide
  Antisense Strand to SEQ ID NO: 388621
ugccauaacugcuucaacu

SEQ ID NO: 388623 - RNA, 19 nt, Artificial Sequence
  Description of Artificial Sequence: Synthetic oligonucleotide
  Sense Strand Starting at position 888 of SEQ ID NO: 315987
augcuaaugucugcucaau

SEQ ID NO: 388624 - RNA, 19 nt, Artificial Sequence
  Description of Artificial Sequence: Synthetic oligonucleotide
  Antisense Strand to SEQ ID NO: 388623
auugagcagacauuagcau

SEQ ID NO: 388625 - RNA, 19 nt, Artificial Sequence
  Description of Artificial Sequence: Synthetic oligonucleotide
  Sense Strand Starting at position 888 of SEQ ID NO: 315989
gcuaaugucugcucaaucu

SEQ ID NO: 388626 - RNA, 19 nt, Artificial Sequence
  Description of Artificial Sequence: Synthetic oligonucleotide
  Antisense Strand to SEQ ID NO: 388625
agauugagcagacauuagc

SEQ ID NO: 388627 - RNA, 19 nt, Artificial Sequence
  Description of Artificial Sequence: Synthetic oligonucleotide
  Sense Strand Starting at position 888 of SEQ ID NO: 316011
aagugaguacauggacaua

SEQ ID NO: 388628 - RNA, 19 nt, Artificial Sequence
  Description of Artificial Sequence: Synthetic oligonucleotide
  Antisense Strand to SEQ ID NO: 388627
uauguccauguacucacuu

SEQ ID NO: 388629 - RNA, 19 nt, Artificial Sequence
  Description of Artificial Sequence: Synthetic oligonucleotide
  Sense Strand Starting at position 888 of SEQ ID NO: 316023
ggacauagguuauauugau

SEQ ID NO: 388630 - RNA, 19 nt, Artificial Sequence
  Description of Artificial Sequence: Synthetic oligonucleotide
  Antisense Strand to SEQ ID NO: 388629
aucaauauaaccuaugucc

SEQ ID NO: 388631 - RNA, 19 nt, Artificial Sequence
  Description of Artificial Sequence: Synthetic oligonucleotide
  Sense Strand Starting at position 888 of SEQ ID NO: 316029
agguuauauugauucugua

SEQ ID NO: 388632 - RNA, 19 nt, Artificial Sequence
  Description of Artificial Sequence: Synthetic oligonucleotide
  Antisense Strand to SEQ ID NO: 388631
uacagaaucaauauaaccu

SEQ ID NO: 388633 - RNA, 19 nt, Artificial Sequence
  Description of Artificial Sequence: Synthetic oligonucleotide
  Sense Strand Starting at position 888 of SEQ ID NO: 316269
auauuauugugggagaaua

SEQ ID NO: 388634 - RNA, 19 nt, Artificial Sequence
  Description of Artificial Sequence: Synthetic oligonucleotide
  Antisense Strand to SEQ ID NO: 388633
uauucucccacaauaauau

SEQ ID NO: 388635 - RNA, 19 nt, Artificial Sequence
  Description of Artificial Sequence: Synthetic oligonucleotide
  Sense Strand Starting at position 888 of SEQ ID NO: 316671
uucuuaucugagggacucu

SEQ ID NO: 388636 - RNA, 19 nt, Artificial Sequence
  Description of Artificial Sequence: Synthetic oligonucleotide
  Antisense Strand to SEQ ID NO: 388635
agagucccucagauaagaa

SEQ ID NO: 388637 - RNA, 19 nt, Artificial Sequence
  Description of Artificial Sequence: Synthetic oligonucleotide
  Sense Strand Starting at position 888 of SEQ ID NO: 316710
caggcuagaaucugugguu

SEQ ID NO: 388638 - RNA, 19 nt, Artificial Sequence
  Description of Artificial Sequence: Synthetic oligonucleotide
  Antisense Strand to SEQ ID NO: 388637
aaccacagauucuagccug

SEQ ID NO: 388639 - RNA, 19 nt, Artificial Sequence
  Description of Artificial Sequence: Synthetic oligonucleotide
  Sense Strand Starting at position 888 of SEQ ID NO: 316727
uucccucagucuuugggaa

SEQ ID NO: 388640 - RNA, 19 nt, Artificial Sequence
  Description of Artificial Sequence: Synthetic oligonucleotide
  Antisense Strand to SEQ ID NO: 388639
uucccaaagacugagggaa

SEQ ID NO: 388641 - RNA, 19 nt, Artificial Sequence
  Description of Artificial Sequence: Synthetic oligonucleotide
  Sense Strand Starting at position 888 of SEQ ID NO: 316765
gggcuuacuuagguuggau

SEQ ID NO: 388642 - RNA, 19 nt, Artificial Sequence
  Description of Artificial Sequence: Synthetic oligonucleotide
  Antisense Strand to SEQ ID NO: 388641
auccaaccuaaguaagccc

SEQ ID NO: 388643 - RNA, 19 nt, Artificial Sequence
  Description of Artificial Sequence: Synthetic oligonucleotide
  Sense Strand Starting at position 888 of SEQ ID NO: 316777
guuggauguccuggcaauc

SEQ ID NO: 388644 - RNA, 19 nt, Artificial Sequence
  Description of Artificial Sequence: Synthetic oligonucleotide
  Antisense Strand to SEQ ID NO: 388643
gauugccaggacauccaac

SEQ ID NO: 388645 - RNA, 19 nt, Artificial Sequence
  Description of Artificial Sequence: Synthetic oligonucleotide
  Sense Strand Starting at position 888 of SEQ ID NO: 316808
agaggccaccucugagaaa

SEQ ID NO: 388646 - RNA, 19 nt, Artificial Sequence
  Description of Artificial Sequence: Synthetic oligonucleotide
  Antisense Strand to SEQ ID NO: 388645
uuucucagagguggccucu

SEQ ID NO: 388647 - RNA, 19 nt, Artificial Sequence
  Description of Artificial Sequence: Synthetic oligonucleotide
  Sense Strand Starting at position 888 of SEQ ID NO: 316879
gggaaaucucuaggugcca

SEQ ID NO: 388648 - RNA, 19 nt, Artificial Sequence
  Description of Artificial Sequence: Synthetic oligonucleotide
  Antisense Strand to SEQ ID NO: 388647
uggcaccuagagauuuccc

SEQ ID NO: 388649 - RNA, 19 nt, Artificial Sequence
  Description of Artificial Sequence: Synthetic oligonucleotide
  Sense Strand Starting at position 888 of SEQ ID NO: 317231
agaauugacugagaucaga

SEQ ID NO: 388650 - RNA, 19 nt, Artificial Sequence
  Description of Artificial Sequence: Synthetic oligonucleotide
  Antisense Strand to SEQ ID NO: 388649
ucugaucucagucaauucu

SEQ ID NO: 388651 - RNA, 19 nt, Artificial Sequence
  Description of Artificial Sequence: Synthetic oligonucleotide
  Sense Strand Starting at position 888 of SEQ ID NO: 317266
aguaucucuggugaguaga

SEQ ID NO: 388652 - RNA, 19 nt, Artificial Sequence
  Description of Artificial Sequence: Synthetic oligonucleotide
  Antisense Strand to SEQ ID NO: 388651
ucuacucaccagagauacu

SEQ ID NO: 388653 - RNA, 19 nt, Artificial Sequence
  Description of Artificial Sequence: Synthetic oligonucleotide
  Sense Strand Starting at position 888 of SEQ ID NO: 317269
aucucuggugaguagaagu

SEQ ID NO: 388654 - RNA, 19 nt, Artificial Sequence
  Description of Artificial Sequence: Synthetic oligonucleotide
  Antisense Strand to SEQ ID NO: 388653
acuucuacucaccagagau

SEQ ID NO: 388655 - RNA, 19 nt, Artificial Sequence
  Description of Artificial Sequence: Synthetic oligonucleotide
  Sense Strand Starting at position 888 of SEQ ID NO: 317465
uuccuucuaguuuaaagga

SEQ ID NO: 388656 - RNA, 19 nt, Artificial Sequence
  Description of Artificial Sequence: Synthetic oligonucleotide
  Antisense Strand to SEQ ID NO: 388655
uccuuuaaacuagaaggaa

SEQ ID NO: 388657 - RNA, 19 nt, Artificial Sequence
  Description of Artificial Sequence: Synthetic oligonucleotide
  Sense Strand Starting at position 888 of SEQ ID NO: 317635
augucuacugacuguugaa

SEQ ID NO: 388658 - RNA, 19 nt, Artificial Sequence
  Description of Artificial Sequence: Synthetic oligonucleotide
  Antisense Strand to SEQ ID NO: 388657
uucaacagucaguagacau

SEQ ID NO: 388659 - RNA, 19 nt, Artificial Sequence
  Description of Artificial Sequence: Synthetic oligonucleotide
  Sense Strand Starting at position 888 of SEQ ID NO: 317685
guuaaauauuagucuccua

SEQ ID NO: 388660 - RNA, 19 nt, Artificial Sequence
  Description of Artificial Sequence: Synthetic oligonucleotide
  Antisense Strand to SEQ ID NO: 388659
uaggagacuaauauuuaac

SEQ ID NO: 388661 - RNA, 19 nt, Artificial Sequence
  Description of Artificial Sequence: Synthetic oligonucleotide
  Sense Strand Starting at position 888 of SEQ ID NO: 317719
uugacuguccuuuggacaa

SEQ ID NO: 388662 - RNA, 19 nt, Artificial Sequence
  Description of Artificial Sequence: Synthetic oligonucleotide
  Antisense Strand to SEQ ID NO: 388661
uuguccaaaggacagucaa

SEQ ID NO: 388663 - RNA, 19 nt, Artificial Sequence
  Description of Artificial Sequence: Synthetic oligonucleotide
  Sense Strand Starting at position 888 of SEQ ID NO: 317836
agggacagcuaugauagaa

SEQ ID NO: 388664 - RNA, 19 nt, Artificial Sequence
  Description of Artificial Sequence: Synthetic oligonucleotide
  Antisense Strand to SEQ ID NO: 388663
uucuaucauagcugucccu

SEQ ID NO: 388665 - RNA, 19 nt, Artificial Sequence
  Description of Artificial Sequence: Synthetic oligonucleotide
  Sense Strand Starting at position 888 of SEQ ID NO: 318060
acaaguauugcuugaacca

SEQ ID NO: 388666 - RNA, 19 nt, Artificial Sequence
  Description of Artificial Sequence: Synthetic oligonucleotide
  Antisense Strand to SEQ ID NO: 388665
ugguucaagcaauacuugu

SEQ ID NO: 388667 - RNA, 19 nt, Artificial Sequence
  Description of Artificial Sequence: Synthetic oligonucleotide
  Sense Strand Starting at position 888 of SEQ ID NO: 318061
caaguauugcuugaaccag

SEQ ID NO: 388668 - RNA, 19 nt, Artificial Sequence
  Description of Artificial Sequence: Synthetic oligonucleotide
  Antisense Strand to SEQ ID NO: 388667
cugguucaagcaauacuug

SEQ ID NO: 388669 - RNA, 19 nt, Artificial Sequence
  Description of Artificial Sequence: Synthetic oligonucleotide
  Sense Strand Starting at position 888 of SEQ ID NO: 318202
uugccaaauccugggcuau

SEQ ID NO: 388670 - RNA, 19 nt, Artificial Sequence
  Description of Artificial Sequence: Synthetic oligonucleotide
  Antisense Strand to SEQ ID NO: 388669
auagcccaggauuuggcaa

SEQ ID NO: 388671 - RNA, 19 nt, Artificial Sequence
  Description of Artificial Sequence: Synthetic oligonucleotide
  Sense Strand Starting at position 888 of SEQ ID NO: 318203
ugccaaauccugggcuauu

SEQ ID NO: 388672 - RNA, 19 nt, Artificial Sequence
  Description of Artificial Sequence: Synthetic oligonucleotide
  Antisense Strand to SEQ ID NO: 388671
aauagcccaggauuuggca

SEQ ID NO: 388673 - RNA, 19 nt, Artificial Sequence
  Description of Artificial Sequence: Synthetic oligonucleotide
  Sense Strand Starting at position 888 of SEQ ID NO: 318204
gccaaauccugggcuauuu

SEQ ID NO: 388674 - RNA, 19 nt, Artificial Sequence
  Description of Artificial Sequence: Synthetic oligonucleotide
  Antisense Strand to SEQ ID NO: 388673
aaauagcccaggauuuggc

SEQ ID NO: 388675 - RNA, 19 nt, Artificial Sequence
  Description of Artificial Sequence: Synthetic oligonucleotide
  Sense Strand Starting at position 888 of SEQ ID NO: 318351
aagugacacugguuccaaa

SEQ ID NO: 388676 - RNA, 19 nt, Artificial Sequence
  Description of Artificial Sequence: Synthetic oligonucleotide
  Antisense Strand to SEQ ID NO: 388675
uuuggaaccagugucacuu

SEQ ID NO: 388677 - RNA, 19 nt, Artificial Sequence
  Description of Artificial Sequence: Synthetic oligonucleotide
  Sense Strand Starting at position 888 of SEQ ID NO: 318904
uucccauuggcauaagacu

SEQ ID NO: 388678 - RNA, 19 nt, Artificial Sequence
  Description of Artificial Sequence: Synthetic oligonucleotide
  Antisense Strand to SEQ ID NO: 388677
agucuuaugccaaugggaa

SEQ ID NO: 388679 - RNA, 19 nt, Artificial Sequence
  Description of Artificial Sequence: Synthetic oligonucleotide
  Sense Strand Starting at position 888 of SEQ ID NO: 319071
gcuccuugcagguaaagga

SEQ ID NO: 388680 - RNA, 19 nt, Artificial Sequence
  Description of Artificial Sequence: Synthetic oligonucleotide
  Antisense Strand to SEQ ID NO: 388679
uccuuuaccugcaaggagc

SEQ ID NO: 388681 - RNA, 19 nt, Artificial Sequence
  Description of Artificial Sequence: Synthetic oligonucleotide
  Sense Strand Starting at position 889 of SEQ ID NO: 315244
cgagaacugaguuggaaac

SEQ ID NO: 388682 - RNA, 19 nt, Artificial Sequence
  Description of Artificial Sequence: Synthetic oligonucleotide
  Antisense Strand to SEQ ID NO: 388681
guuuccaacucaguucucg

SEQ ID NO: 388683 - RNA, 19 nt, Artificial Sequence
  Description of Artificial Sequence: Synthetic oligonucleotide
  Sense Strand Starting at position 889 of SEQ ID NO: 315324
cagaaaugguagcuaaacu

SEQ ID NO: 388684 - RNA, 19 nt, Artificial Sequence
  Description of Artificial Sequence: Synthetic oligonucleotide
  Antisense Strand to SEQ ID NO: 388683
aguuuagcuaccauuucug

SEQ ID NO: 388685 - RNA, 19 nt, Artificial Sequence
  Description of Artificial Sequence: Synthetic oligonucleotide
  Sense Strand Starting at position 889 of SEQ ID NO: 315420
ucaggcacucagugacaua

SEQ ID NO: 388686 - RNA, 19 nt, Artificial Sequence
  Description of Artificial Sequence: Synthetic oligonucleotide
  Antisense Strand to SEQ ID NO: 388685
uaugucacugagugccuga

SEQ ID NO: 388687 - RNA, 19 nt, Artificial Sequence
  Description of Artificial Sequence: Synthetic oligonucleotide
  Sense Strand Starting at position 889 of SEQ ID NO: 315432
ugacauauucgggaguuua

SEQ ID NO: 388688 - RNA, 19 nt, Artificial Sequence
  Description of Artificial Sequence: Synthetic oligonucleotide
  Antisense Strand to SEQ ID NO: 388687
uaaacucccgaauauguca

SEQ ID NO: 388689 - RNA, 19 nt, Artificial Sequence
  Description of Artificial Sequence: Synthetic oligonucleotide
  Sense Strand Starting at position 889 of SEQ ID NO: 315442
gggaguuuaagagguuugu

SEQ ID NO: 388690 - RNA, 19 nt, Artificial Sequence
  Description of Artificial Sequence: Synthetic oligonucleotide
  Antisense Strand to SEQ ID NO: 388689
acaaaccucuuaaacuccc

SEQ ID NO: 388691 - RNA, 19 nt, Artificial Sequence
  Description of Artificial Sequence: Synthetic oligonucleotide
  Sense Strand Starting at position 889 of SEQ ID NO: 315499
ucucuuugagcucguauuu

SEQ ID NO: 388692 - RNA, 19 nt, Artificial Sequence
  Description of Artificial Sequence: Synthetic oligonucleotide
  Antisense Strand to SEQ ID NO: 388691
aaauacgagcucaaagaga

SEQ ID NO: 388693 - RNA, 19 nt, Artificial Sequence
  Description of Artificial Sequence: Synthetic oligonucleotide
  Sense Strand Starting at position 889 of SEQ ID NO: 315504
uugagcucguauuuccaga

SEQ ID NO: 388694 - RNA, 19 nt, Artificial Sequence
  Description of Artificial Sequence: Synthetic oligonucleotide
  Antisense Strand to SEQ ID NO: 388693
ucuggaaauacgagcucaa

SEQ ID NO: 388695 - RNA, 19 nt, Artificial Sequence
  Description of Artificial Sequence: Synthetic oligonucleotide
  Sense Strand Starting at position 889 of SEQ ID NO: 315554
acuguuaagucaucacaga

SEQ ID NO: 388696 - RNA, 19 nt, Artificial Sequence
  Description of Artificial Sequence: Synthetic oligonucleotide
  Antisense Strand to SEQ ID NO: 388695
ucugugaugacuuaacagu

SEQ ID NO: 388697 - RNA, 19 nt, Artificial Sequence
  Description of Artificial Sequence: Synthetic oligonucleotide
  Sense Strand Starting at position 889 of SEQ ID NO: 315555
cuguuaagucaucacagag

SEQ ID NO: 388698 - RNA, 19 nt, Artificial Sequence
  Description of Artificial Sequence: Synthetic oligonucleotide
  Antisense Strand to SEQ ID NO: 388697
cucugugaugacuuaacag

SEQ ID NO: 388699 - RNA, 19 nt, Artificial Sequence
  Description of Artificial Sequence: Synthetic oligonucleotide
  Sense Strand Starting at position 889 of SEQ ID NO: 315672
gugguaaacugaucuaaac

SEQ ID NO: 388700 - RNA, 19 nt, Artificial Sequence
  Description of Artificial Sequence: Synthetic oligonucleotide
  Antisense Strand to SEQ ID NO: 388699
guuuagaucaguuuaccac

SEQ ID NO: 388701 - RNA, 19 nt, Artificial Sequence
  Description of Artificial Sequence: Synthetic oligonucleotide
  Sense Strand Starting at position 889 of SEQ ID NO: 315889
caugguuaauuggucauaa

SEQ ID NO: 388702 - RNA, 19 nt, Artificial Sequence
  Description of Artificial Sequence: Synthetic oligonucleotide
  Antisense Strand to SEQ ID NO: 388701
uuaugaccaauuaaccaug

SEQ ID NO: 388703 - RNA, 19 nt, Artificial Sequence
  Description of Artificial Sequence: Synthetic oligonucleotide
  Sense Strand Starting at position 889 of SEQ ID NO: 315890
augguuaauuggucauaau

SEQ ID NO: 388704 - RNA, 19 nt, Artificial Sequence
  Description of Artificial Sequence: Synthetic oligonucleotide
  Antisense Strand to SEQ ID NO: 388703
auuaugaccaauuaaccau

SEQ ID NO: 388705 - RNA, 19 nt, Artificial Sequence
  Description of Artificial Sequence: Synthetic oligonucleotide
  Sense Strand Starting at position 889 of SEQ ID NO: 315891
ugguuaauuggucauaaug

SEQ ID NO: 388706 - RNA, 19 nt, Artificial Sequence
  Description of Artificial Sequence: Synthetic oligonucleotide
  Antisense Strand to SEQ ID NO: 388705
cauuaugaccaauuaacca

SEQ ID NO: 388707 - RNA, 19 nt, Artificial Sequence
  Description of Artificial Sequence: Synthetic oligonucleotide
  Sense Strand Starting at position 889 of SEQ ID NO: 315998
gguuuaagagcucagguca

SEQ ID NO: 388708 - RNA, 19 nt, Artificial Sequence
  Description of Artificial Sequence: Synthetic oligonucleotide
  Antisense Strand to SEQ ID NO: 388707
ugaccugagcucuuaaacc

SEQ ID NO: 388709 - RNA, 19 nt, Artificial Sequence
  Description of Artificial Sequence: Synthetic oligonucleotide
  Sense Strand Starting at position 889 of SEQ ID NO: 316246
ggcugcauaggguaaagau

SEQ ID NO: 388710 - RNA, 19 nt, Artificial Sequence
  Description of Artificial Sequence: Synthetic oligonucleotide
  Antisense Strand to SEQ ID NO: 388709
aucuuuacccuaugcagcc

SEQ ID NO: 388711 - RNA, 19 nt, Artificial Sequence
  Description of Artificial Sequence: Synthetic oligonucleotide
  Sense Strand Starting at position 889 of SEQ ID NO: 316548
uggagauauucuguauuac

SEQ ID NO: 388712 - RNA, 19 nt, Artificial Sequence
  Description of Artificial Sequence: Synthetic oligonucleotide
  Antisense Strand to SEQ ID NO: 388711
guaauacagaauaucucca

SEQ ID NO: 388713 - RNA, 19 nt, Artificial Sequence
  Description of Artificial Sequence: Synthetic oligonucleotide
  Sense Strand Starting at position 889 of SEQ ID NO: 316642
agcuguuuccaucagacug

SEQ ID NO: 388714 - RNA, 19 nt, Artificial Sequence
  Description of Artificial Sequence: Synthetic oligonucleotide
  Antisense Strand to SEQ ID NO: 388713
cagucugauggaaacagcu

SEQ ID NO: 388715 - RNA, 19 nt, Artificial Sequence
  Description of Artificial Sequence: Synthetic oligonucleotide
  Sense Strand Starting at position 889 of SEQ ID NO: 316656
gacugaaagcaucaaguuu

SEQ ID NO: 388716 - RNA, 19 nt, Artificial Sequence
  Description of Artificial Sequence: Synthetic oligonucleotide
  Antisense Strand to SEQ ID NO: 388715
aaacuugaugcuuucaguc

SEQ ID NO: 388717 - RNA, 19 nt, Artificial Sequence
  Description of Artificial Sequence: Synthetic oligonucleotide
  Sense Strand Starting at position 889 of SEQ ID NO: 316752
auauccauuucugaaagga

SEQ ID NO: 388718 - RNA, 19 nt, Artificial Sequence
  Description of Artificial Sequence: Synthetic oligonucleotide
  Antisense Strand to SEQ ID NO: 388717
uccuuucagaaauggauau

SEQ ID NO: 388719 - RNA, 19 nt, Artificial Sequence
  Description of Artificial Sequence: Synthetic oligonucleotide
  Sense Strand Starting at position 889 of SEQ ID NO: 316851
accaguggugcuuacagaa

SEQ ID NO: 388720 - RNA, 19 nt, Artificial Sequence
  Description of Artificial Sequence: Synthetic oligonucleotide
  Antisense Strand to SEQ ID NO: 388719
uucuguaagcaccacuggu

SEQ ID NO: 388721 - RNA, 19 nt, Artificial Sequence
  Description of Artificial Sequence: Synthetic oligonucleotide
  Sense Strand Starting at position 889 of SEQ ID NO: 316858
gugcuuacagaagaaaguu

SEQ ID NO: 388722 - RNA, 19 nt, Artificial Sequence
  Description of Artificial Sequence: Synthetic oligonucleotide
  Antisense Strand to SEQ ID NO: 388721
aacuuucuucuguaagcac

SEQ ID NO: 388723 - RNA, 19 nt, Artificial Sequence
  Description of Artificial Sequence: Synthetic oligonucleotide
  Sense Strand Starting at position 889 of SEQ ID NO: 316997
auacuaugaggguguuuau

SEQ ID NO: 388724 - RNA, 19 nt, Artificial Sequence
  Description of Artificial Sequence: Synthetic oligonucleotide
  Antisense Strand to SEQ ID NO: 388723
auaaacacccucauaguau

SEQ ID NO: 388725 - RNA, 19 nt, Artificial Sequence
  Description of Artificial Sequence: Synthetic oligonucleotide
  Sense Strand Starting at position 889 of SEQ ID NO: 317004
gaggguguuuaucucaauu

SEQ ID NO: 388726 - RNA, 19 nt, Artificial Sequence
  Description of Artificial Sequence: Synthetic oligonucleotide
  Antisense Strand to SEQ ID NO: 388725
aauugagauaaacacccuc

SEQ ID NO: 388727 - RNA, 19 nt, Artificial Sequence
  Description of Artificial Sequence: Synthetic oligonucleotide
  Sense Strand Starting at position 889 of SEQ ID NO: 317263
auuaaucuugauggaacuu

SEQ ID NO: 388728 - RNA, 19 nt, Artificial Sequence
  Description of Artificial Sequence: Synthetic oligonucleotide
  Antisense Strand to SEQ ID NO: 388727
aaguuccaucaagauuaau

SEQ ID NO: 388729 - RNA, 19 nt, Artificial Sequence
  Description of Artificial Sequence: Synthetic oligonucleotide
  Sense Strand Starting at position 889 of SEQ ID NO: 317272
gauggaacuuacucucagu

SEQ ID NO: 388730 - RNA, 19 nt, Artificial Sequence
  Description of Artificial Sequence: Synthetic oligonucleotide
  Antisense Strand to SEQ ID NO: 388729
acugagaguaaguuccauc

SEQ ID NO: 388731 - RNA, 19 nt, Artificial Sequence
  Description of Artificial Sequence: Synthetic oligonucleotide
  Sense Strand Starting at position 889 of SEQ ID NO: 317355
ggaugucaucaucauucua

SEQ ID NO: 388732 - RNA, 19 nt, Artificial Sequence
  Description of Artificial Sequence: Synthetic oligonucleotide
  Antisense Strand to SEQ ID NO: 388731
uagaaugaugaugacaucc

SEQ ID NO: 388733 - RNA, 19 nt, Artificial Sequence
  Description of Artificial Sequence: Synthetic oligonucleotide
  Sense Strand Starting at position 889 of SEQ ID NO: 317462
gggacuacccuaugagcuu

SEQ ID NO: 388734 - RNA, 19 nt, Artificial Sequence
  Description of Artificial Sequence: Synthetic oligonucleotide
  Antisense Strand to SEQ ID NO: 388733
aagcucauaggguaguccc

SEQ ID NO: 388735 - RNA, 19 nt, Artificial Sequence
  Description of Artificial Sequence: Synthetic oligonucleotide
  Sense Strand Starting at position 889 of SEQ ID NO: 317825
caauuagagucacuggacu

SEQ ID NO: 388736 - RNA, 19 nt, Artificial Sequence
  Description of Artificial Sequence: Synthetic oligonucleotide
  Antisense Strand to SEQ ID NO: 388735
aguccagugacucuaauug

SEQ ID NO: 388737 - RNA, 19 nt, Artificial Sequence
  Description of Artificial Sequence: Synthetic oligonucleotide
  Sense Strand Starting at position 889 of SEQ ID NO: 317933
cggguuauaguccaauacu

SEQ ID NO: 388738 - RNA, 19 nt, Artificial Sequence
  Description of Artificial Sequence: Synthetic oligonucleotide
  Antisense Strand to SEQ ID NO: 388737
aguauuggacuauaacccg

SEQ ID NO: 388739 - RNA, 19 nt, Artificial Sequence
  Description of Artificial Sequence: Synthetic oligonucleotide
  Sense Strand Starting at position 889 of SEQ ID NO: 318155
aguacuguaugaucccauu

SEQ ID NO: 388740 - RNA, 19 nt, Artificial Sequence
  Description of Artificial Sequence: Synthetic oligonucleotide
  Antisense Strand to SEQ ID NO: 388739
aaugggaucauacaguacu

SEQ ID NO: 388741 - RNA, 19 nt, Artificial Sequence
  Description of Artificial Sequence: Synthetic oligonucleotide
  Sense Strand Starting at position 889 of SEQ ID NO: 318326
ggauguauauaccugucaa

SEQ ID NO: 388742 - RNA, 19 nt, Artificial Sequence
  Description of Artificial Sequence: Synthetic oligonucleotide
  Antisense Strand to SEQ ID NO: 388741
uugacagguauauacaucc

SEQ ID NO: 388743 - RNA, 19 nt, Artificial Sequence
  Description of Artificial Sequence: Synthetic oligonucleotide
  Sense Strand Starting at position 889 of SEQ ID NO: 318369
auggguacagucuagcaua

SEQ ID NO: 388744 - RNA, 19 nt, Artificial Sequence
  Description of Artificial Sequence: Synthetic oligonucleotide
  Antisense Strand to SEQ ID NO: 388743
uaugcuagacuguacccau

SEQ ID NO: 388745 - RNA, 19 nt, Artificial Sequence
  Description of Artificial Sequence: Synthetic oligonucleotide
  Sense Strand Starting at position 889 of SEQ ID NO: 318530
gagacaaauucugcacgaa

SEQ ID NO: 388746 - RNA, 19 nt, Artificial Sequence
  Description of Artificial Sequence: Synthetic oligonucleotide
  Antisense Strand to SEQ ID NO: 388745
uucgugcagaauuugucuc

SEQ ID NO: 388747 - RNA, 19 nt, Artificial Sequence
  Description of Artificial Sequence: Synthetic oligonucleotide
  Sense Strand Starting at position 889 of SEQ ID NO: 318531
agacaaauucugcacgaau

SEQ ID NO: 388748 - RNA, 19 nt, Artificial Sequence
  Description of Artificial Sequence: Synthetic oligonucleotide
  Antisense Strand to SEQ ID NO: 388747
auucgugcagaauuugucu

SEQ ID NO: 388749 - RNA, 19 nt, Artificial Sequence
  Description of Artificial Sequence: Synthetic oligonucleotide
  Sense Strand Starting at position 889 of SEQ ID NO: 318534
caaauucugcacgaaugua

SEQ ID NO: 388750 - RNA, 19 nt, Artificial Sequence
  Description of Artificial Sequence: Synthetic oligonucleotide
  Antisense Strand to SEQ ID NO: 388749
uacauucgugcagaauuug

SEQ ID NO: 388751 - RNA, 19 nt, Artificial Sequence
  Description of Artificial Sequence: Synthetic oligonucleotide
  Sense Strand Starting at position 889 of SEQ ID NO: 318567
ccacgugguccagagacaa

SEQ ID NO: 388752 - RNA, 19 nt, Artificial Sequence
  Description of Artificial Sequence: Synthetic oligonucleotide
  Antisense Strand to SEQ ID NO: 388751
uugucucuggaccacgugg

SEQ ID NO: 388753 - RNA, 19 nt, Artificial Sequence
  Description of Artificial Sequence: Synthetic oligonucleotide
  Sense Strand Starting at position 889 of SEQ ID NO: 318936
agcaauaugcagcauuaaa

SEQ ID NO: 388754 - RNA, 19 nt, Artificial Sequence
  Description of Artificial Sequence: Synthetic oligonucleotide
  Antisense Strand to SEQ ID NO: 388753
uuuaaugcugcauauugcu

SEQ ID NO: 388755 - RNA, 19 nt, Artificial Sequence
  Description of Artificial Sequence: Synthetic oligonucleotide
  Sense Strand Starting at position 889 of SEQ ID NO: 319048
uaugcacauguguaugaau

SEQ ID NO: 388756 - RNA, 19 nt, Artificial Sequence
  Description of Artificial Sequence: Synthetic oligonucleotide
  Antisense Strand to SEQ ID NO: 388755
auucauacacaugugcaua

SEQ ID NO: 388757 - RNA, 19 nt, Artificial Sequence
  Description of Artificial Sequence: Synthetic oligonucleotide
  Sense Strand Starting at position 889 of SEQ ID NO: 319205
ucauauugcuaacuaaggu

SEQ ID NO: 388758 - RNA, 19 nt, Artificial Sequence
  Description of Artificial Sequence: Synthetic oligonucleotide
  Antisense Strand to SEQ ID NO: 388757
accuuaguuagcaauauga

SEQ ID NO: 388759 - RNA, 19 nt, Artificial Sequence
  Description of Artificial Sequence: Synthetic oligonucleotide
  Sense Strand Starting at position 889 of SEQ ID NO: 319214
uaacuaaggugguuuccua

SEQ ID NO: 388760 - RNA, 19 nt, Artificial Sequence
  Description of Artificial Sequence: Synthetic oligonucleotide
  Antisense Strand to SEQ ID NO: 388759
uaggaaaccaccuuaguua

SEQ ID NO: 388761 - RNA, 19 nt, Artificial Sequence
  Description of Artificial Sequence: Synthetic oligonucleotide
  Sense Strand Starting at position 890 of SEQ ID NO: 315357
ugcuauaagaaaggguuau

SEQ ID NO: 388762 - RNA, 19 nt, Artificial Sequence
  Description of Artificial Sequence: Synthetic oligonucleotide
  Antisense Strand to SEQ ID NO: 388761
auaacccuuucuuauagca

SEQ ID NO: 388763 - RNA, 19 nt, Artificial Sequence
  Description of Artificial Sequence: Synthetic oligonucleotide
  Sense Strand Starting at position 890 of SEQ ID NO: 315358
gcuauaagaaaggguuaug

SEQ ID NO: 388764 - RNA, 19 nt, Artificial Sequence
  Description of Artificial Sequence: Synthetic oligonucleotide
  Antisense Strand to SEQ ID NO: 388763
cauaacccuuucuuauagc

SEQ ID NO: 388765 - RNA, 19 nt, Artificial Sequence
  Description of Artificial Sequence: Synthetic oligonucleotide
  Sense Strand Starting at position 890 of SEQ ID NO: 315475
gguguuggagggcaucaua

SEQ ID NO: 388766 - RNA, 19 nt, Artificial Sequence
  Description of Artificial Sequence: Synthetic oligonucleotide
  Antisense Strand to SEQ ID NO: 388765
uaugaugcccuccaacacc

SEQ ID NO: 388767 - RNA, 19 nt, Artificial Sequence
  Description of Artificial Sequence: Synthetic oligonucleotide
  Sense Strand Starting at position 890 of SEQ ID NO: 315478
guuggagggcaucauagau

SEQ ID NO: 388768 - RNA, 19 nt, Artificial Sequence
  Description of Artificial Sequence: Synthetic oligonucleotide
  Antisense Strand to SEQ ID NO: 388767
aucuaugaugcccuccaac

SEQ ID NO: 388769 - RNA, 19 nt, Artificial Sequence
  Description of Artificial Sequence: Synthetic oligonucleotide
  Sense Strand Starting at position 890 of SEQ ID NO: 315585
gggagacauucuuagagau

SEQ ID NO: 388770 - RNA, 19 nt, Artificial Sequence
  Description of Artificial Sequence: Synthetic oligonucleotide
  Antisense Strand to SEQ ID NO: 388769
aucucuaagaaugucuccc

SEQ ID NO: 388771 - RNA, 19 nt, Artificial Sequence
  Description of Artificial Sequence: Synthetic oligonucleotide
  Sense Strand Starting at position 890 of SEQ ID NO: 315587
gagacauucuuagagauga

SEQ ID NO: 388772 - RNA, 19 nt, Artificial Sequence
  Description of Artificial Sequence: Synthetic oligonucleotide
  Antisense Strand to SEQ ID NO: 388771
ucaucucuaagaaugucuc

SEQ ID NO: 388773 - RNA, 19 nt, Artificial Sequence
  Description of Artificial Sequence: Synthetic oligonucleotide
  Sense Strand Starting at position 890 of SEQ ID NO: 315689
aaggcaguuugaucuauaa

SEQ ID NO: 388774 - RNA, 19 nt, Artificial Sequence
  Description of Artificial Sequence: Synthetic oligonucleotide
  Antisense Strand to SEQ ID NO: 388773
uuauagaucaaacugccuu

SEQ ID NO: 388775 - RNA, 19 nt, Artificial Sequence
  Description of Artificial Sequence: Synthetic oligonucleotide
  Sense Strand Starting at position 890 of SEQ ID NO: 315807
gcccuacuauuguuguaaa

SEQ ID NO: 388776 - RNA, 19 nt, Artificial Sequence
  Description of Artificial Sequence: Synthetic oligonucleotide
  Antisense Strand to SEQ ID NO: 388775
uuuacaacaauaguagggc

SEQ ID NO: 388777 - RNA, 19 nt, Artificial Sequence
  Description of Artificial Sequence: Synthetic oligonucleotide
  Sense Strand Starting at position 890 of SEQ ID NO: 315830
guggcauuaagacaaaggu

SEQ ID NO: 388778 - RNA, 19 nt, Artificial Sequence
  Description of Artificial Sequence: Synthetic oligonucleotide
  Antisense Strand to SEQ ID NO: 388777
accuuugucuuaaugccac

SEQ ID NO: 388779 - RNA, 19 nt, Artificial Sequence
  Description of Artificial Sequence: Synthetic oligonucleotide
  Sense Strand Starting at position 890 of SEQ ID NO: 315839
agacaaagguuugcucuua

SEQ ID NO: 388780 - RNA, 19 nt, Artificial Sequence
  Description of Artificial Sequence: Synthetic oligonucleotide
  Antisense Strand to SEQ ID NO: 388779
uaagagcaaaccuuugucu

SEQ ID NO: 388781 - RNA, 19 nt, Artificial Sequence
  Description of Artificial Sequence: Synthetic oligonucleotide
  Sense Strand Starting at position 890 of SEQ ID NO: 315888
gucugacacguuuaagugu

SEQ ID NO: 388782 - RNA, 19 nt, Artificial Sequence
  Description of Artificial Sequence: Synthetic oligonucleotide
  Antisense Strand to SEQ ID NO: 388781
acacuuaaacgugucagac

SEQ ID NO: 388783 - RNA, 19 nt, Artificial Sequence
  Description of Artificial Sequence: Synthetic oligonucleotide
  Sense Strand Starting at position 890 of SEQ ID NO: 315897
guuuaagugucacuuguag

SEQ ID NO: 388784 - RNA, 19 nt, Artificial Sequence
  Description of Artificial Sequence: Synthetic oligonucleotide
  Antisense Strand to SEQ ID NO: 388783
cuacaagugacacuuaaac

SEQ ID NO: 388785 - RNA, 19 nt, Artificial Sequence
  Description of Artificial Sequence: Synthetic oligonucleotide
  Sense Strand Starting at position 890 of SEQ ID NO: 315899
uuaagugucacuuguagua

SEQ ID NO: 388786 - RNA, 19 nt, Artificial Sequence
  Description of Artificial Sequence: Synthetic oligonucleotide
  Antisense Strand to SEQ ID NO: 388785
uacuacaagugacacuuaa

SEQ ID NO: 388787 - RNA, 19 nt, Artificial Sequence
  Description of Artificial Sequence: Synthetic oligonucleotide
  Sense Strand Starting at position 890 of SEQ ID NO: 315999
caggaauaacagugcauga

SEQ ID NO: 388788 - RNA, 19 nt, Artificial Sequence
  Description of Artificial Sequence: Synthetic oligonucleotide
  Antisense Strand to SEQ ID NO: 388787
ucaugcacuguuauuccug

SEQ ID NO: 388789 - RNA, 19 nt, Artificial Sequence
  Description of Artificial Sequence: Synthetic oligonucleotide
  Sense Strand Starting at position 890 of SEQ ID NO: 316056
gcaggaacuuugucaaaua

SEQ ID NO: 388790 - RNA, 19 nt, Artificial Sequence
  Description of Artificial Sequence: Synthetic oligonucleotide
  Antisense Strand to SEQ ID NO: 388789
uauuugacaaaguuccugc

SEQ ID NO: 388791 - RNA, 19 nt, Artificial Sequence
  Description of Artificial Sequence: Synthetic oligonucleotide
  Sense Strand Starting at position 890 of SEQ ID NO: 316293
ggucuuaggaaccgugcua

SEQ ID NO: 388792 - RNA, 19 nt, Artificial Sequence
  Description of Artificial Sequence: Synthetic oligonucleotide
  Antisense Strand to SEQ ID NO: 388791
uagcacgguuccuaagacc

SEQ ID NO: 388793 - RNA, 19 nt, Artificial Sequence
  Description of Artificial Sequence: Synthetic oligonucleotide
  Sense Strand Starting at position 890 of SEQ ID NO: 316569
uugucauucgaaugguucu

SEQ ID NO: 388794 - RNA, 19 nt, Artificial Sequence
  Description of Artificial Sequence: Synthetic oligonucleotide
  Antisense Strand to SEQ ID NO: 388793
agaaccauucgaaugacaa

SEQ ID NO: 388795 - RNA, 19 nt, Artificial Sequence
  Description of Artificial Sequence: Synthetic oligonucleotide
  Sense Strand Starting at position 890 of SEQ ID NO: 317046
ccugaaucuuacguacaca

SEQ ID NO: 388796 - RNA, 19 nt, Artificial Sequence
  Description of Artificial Sequence: Synthetic oligonucleotide
  Antisense Strand to SEQ ID NO: 388795
uguguacguaagauucagg

SEQ ID NO: 388797 - RNA, 19 nt, Artificial Sequence
  Description of Artificial Sequence: Synthetic oligonucleotide
  Sense Strand Starting at position 890 of SEQ ID NO: 317193
cuuucuugcucauuggaga

SEQ ID NO: 388798 - RNA, 19 nt, Artificial Sequence
  Description of Artificial Sequence: Synthetic oligonucleotide
  Antisense Strand to SEQ ID NO: 388797
ucuccaaugagcaagaaag

SEQ ID NO: 388799 - RNA, 19 nt, Artificial Sequence
  Description of Artificial Sequence: Synthetic oligonucleotide
  Sense Strand Starting at position 890 of SEQ ID NO: 317221
gacguuuguccggugguua

SEQ ID NO: 388800 - RNA, 19 nt, Artificial Sequence
  Description of Artificial Sequence: Synthetic oligonucleotide
  Antisense Strand to SEQ ID NO: 388799
uaaccaccggacaaacguc

SEQ ID NO: 388801 - RNA, 19 nt, Artificial Sequence
  Description of Artificial Sequence: Synthetic oligonucleotide
  Sense Strand Starting at position 890 of SEQ ID NO: 317307
cgggaacuuucuuuacucu

SEQ ID NO: 388802 - RNA, 19 nt, Artificial Sequence
  Description of Artificial Sequence: Synthetic oligonucleotide
  Antisense Strand to SEQ ID NO: 388801
agaguaaagaaaguucccg

SEQ ID NO: 388803 - RNA, 19 nt, Artificial Sequence
  Description of Artificial Sequence: Synthetic oligonucleotide
  Sense Strand Starting at position 890 of SEQ ID NO: 317381
gcagcuuaagacuacaaau

SEQ ID NO: 388804 - RNA, 19 nt, Artificial Sequence
  Description of Artificial Sequence: Synthetic oligonucleotide
  Antisense Strand to SEQ ID NO: 388803
auuuguagucuuaagcugc

SEQ ID NO: 388805 - RNA, 19 nt, Artificial Sequence
  Description of Artificial Sequence: Synthetic oligonucleotide
  Sense Strand Starting at position 890 of SEQ ID NO: 317754
cguguuuguaacuuuguau

SEQ ID NO: 388806 - RNA, 19 nt, Artificial Sequence
  Description of Artificial Sequence: Synthetic oligonucleotide
  Antisense Strand to SEQ ID NO: 388805
auacaaaguuacaaacacg

SEQ ID NO: 388807 - RNA, 19 nt, Artificial Sequence
  Description of Artificial Sequence: Synthetic oligonucleotide
  Sense Strand Starting at position 890 of SEQ ID NO: 317757
guuuguaacuuuguauacu

SEQ ID NO: 388808 - RNA, 19 nt, Artificial Sequence
  Description of Artificial Sequence: Synthetic oligonucleotide
  Antisense Strand to SEQ ID NO: 388807
aguauacaaaguuacaaac

SEQ ID NO: 388809 - RNA, 19 nt, Artificial Sequence
  Description of Artificial Sequence: Synthetic oligonucleotide
  Sense Strand Starting at position 890 of SEQ ID NO: 317944
guguauugcgcacuuuacu

SEQ ID NO: 388810 - RNA, 19 nt, Artificial Sequence
  Description of Artificial Sequence: Synthetic oligonucleotide
  Antisense Strand to SEQ ID NO: 388809
aguaaagugcgcaauacac

SEQ ID NO: 388811 - RNA, 19 nt, Artificial Sequence
  Description of Artificial Sequence: Synthetic oligonucleotide
  Sense Strand Starting at position 890 of SEQ ID NO: 318239
ccuugaguuuaauccagaa

SEQ ID NO: 388812 - RNA, 19 nt, Artificial Sequence
  Description of Artificial Sequence: Synthetic oligonucleotide
  Antisense Strand to SEQ ID NO: 388811
uucuggauuaaacucaagg

SEQ ID NO: 388813 - RNA, 19 nt, Artificial Sequence
  Description of Artificial Sequence: Synthetic oligonucleotide
  Sense Strand Starting at position 890 of SEQ ID NO: 318419
gguaguaaugcucgaacuc

SEQ ID NO: 388814 - RNA, 19 nt, Artificial Sequence
  Description of Artificial Sequence: Synthetic oligonucleotide
  Antisense Strand to SEQ ID NO: 388813
gaguucgagcauuacuacc

SEQ ID NO: 388815 - RNA, 19 nt, Artificial Sequence
  Description of Artificial Sequence: Synthetic oligonucleotide
  Sense Strand Starting at position 890 of SEQ ID NO: 318420
guaguaaugcucgaacucu

SEQ ID NO: 388816 - RNA, 19 nt, Artificial Sequence
  Description of Artificial Sequence: Synthetic oligonucleotide
  Antisense Strand to SEQ ID NO: 388815
agaguucgagcauuacuac

SEQ ID NO: 388817 - RNA, 19 nt, Artificial Sequence
  Description of Artificial Sequence: Synthetic oligonucleotide
  Sense Strand Starting at position 890 of SEQ ID NO: 318458
gaucaugcaucagcugaga

SEQ ID NO: 388818 - RNA, 19 nt, Artificial Sequence
  Description of Artificial Sequence: Synthetic oligonucleotide
  Antisense Strand to SEQ ID NO: 388817
ucucagcugaugcaugauc

SEQ ID NO: 388819 - RNA, 19 nt, Artificial Sequence
  Description of Artificial Sequence: Synthetic oligonucleotide
  Sense Strand Starting at position 890 of SEQ ID NO: 318460
ucaugcaucagcugagaga

SEQ ID NO: 388820 - RNA, 19 nt, Artificial Sequence
  Description of Artificial Sequence: Synthetic oligonucleotide
  Antisense Strand to SEQ ID NO: 388819
ucucucagcugaugcauga

SEQ ID NO: 388821 - RNA, 19 nt, Artificial Sequence
  Description of Artificial Sequence: Synthetic oligonucleotide
  Sense Strand Starting at position 890 of SEQ ID NO: 318461
caugcaucagcugagagaa

SEQ ID NO: 388822 - RNA, 19 nt, Artificial Sequence
  Description of Artificial Sequence: Synthetic oligonucleotide
  Antisense Strand to SEQ ID NO: 388821
uucucucagcugaugcaug

SEQ ID NO: 388823 - RNA, 19 nt, Artificial Sequence
  Description of Artificial Sequence: Synthetic oligonucleotide
  Sense Strand Starting at position 890 of SEQ ID NO: 318635
gcgacaaguugaguucaua

SEQ ID NO: 388824 - RNA, 19 nt, Artificial Sequence
  Description of Artificial Sequence: Synthetic oligonucleotide
  Antisense Strand to SEQ ID NO: 388823
uaugaacucaacuugucgc

SEQ ID NO: 388825 - RNA, 19 nt, Artificial Sequence
  Description of Artificial Sequence: Synthetic oligonucleotide
  Sense Strand Starting at position 890 of SEQ ID NO: 318697
cuuucugugucacugaaau

SEQ ID NO: 388826 - RNA, 19 nt, Artificial Sequence
  Description of Artificial Sequence: Synthetic oligonucleotide
  Antisense Strand to SEQ ID NO: 388825
auuucagugacacagaaag

SEQ ID NO: 388827 - RNA, 19 nt, Artificial Sequence
  Description of Artificial Sequence: Synthetic oligonucleotide
  Sense Strand Starting at position 890 of SEQ ID NO: 318720
cgccaauggugacugauuu

SEQ ID NO: 388828 - RNA, 19 nt, Artificial Sequence
  Description of Artificial Sequence: Synthetic oligonucleotide
  Antisense Strand to SEQ ID NO: 388827
aaaucagucaccauuggcg

SEQ ID NO: 388829 - RNA, 19 nt, Artificial Sequence
  Description of Artificial Sequence: Synthetic oligonucleotide
  Sense Strand Starting at position 890 of SEQ ID NO: 318806
gccaucucauuucugugua

SEQ ID NO: 388830 - RNA, 19 nt, Artificial Sequence
  Description of Artificial Sequence: Synthetic oligonucleotide
  Antisense Strand to SEQ ID NO: 388829
uacacagaaaugagauggc

SEQ ID NO: 388831 - RNA, 19 nt, Artificial Sequence
  Description of Artificial Sequence: Synthetic oligonucleotide
  Sense Strand Starting at position 890 of SEQ ID NO: 318898
acuuuaaugugguugauua

SEQ ID NO: 388832 - RNA, 19 nt, Artificial Sequence
  Description of Artificial Sequence: Synthetic oligonucleotide
  Antisense Strand to SEQ ID NO: 388831
uaaucaaccacauuaaagu

SEQ ID NO: 388833 - RNA, 19 nt, Artificial Sequence
  Description of Artificial Sequence: Synthetic oligonucleotide
  Sense Strand Starting at position 890 of SEQ ID NO: 318899
cuuuaaugugguugauuau

SEQ ID NO: 388834 - RNA, 19 nt, Artificial Sequence
  Description of Artificial Sequence: Synthetic oligonucleotide
  Antisense Strand to SEQ ID NO: 388833
auaaucaaccacauuaaag

SEQ ID NO: 388835 - RNA, 19 nt, Artificial Sequence
  Description of Artificial Sequence: Synthetic oligonucleotide
  Sense Strand Starting at position 890 of SEQ ID NO: 319014
uggucucuuugaccagagu

SEQ ID NO: 388836 - RNA, 19 nt, Artificial Sequence
  Description of Artificial Sequence: Synthetic oligonucleotide
  Antisense Strand to SEQ ID NO: 388835
acucuggucaaagagacca

SEQ ID NO: 388837 - RNA, 19 nt, Artificial Sequence
  Description of Artificial Sequence: Synthetic oligonucleotide
  Sense Strand Starting at position 890 of SEQ ID NO: 319015
ggucucuuugaccagagua

SEQ ID NO: 388838 - RNA, 19 nt, Artificial Sequence
  Description of Artificial Sequence: Synthetic oligonucleotide
  Antisense Strand to SEQ ID NO: 388837
uacucuggucaaagagacc

SEQ ID NO: 388839 - RNA, 19 nt, Artificial Sequence
  Description of Artificial Sequence: Synthetic oligonucleotide
  Sense Strand Starting at position 890 of SEQ ID NO: 319017
ucucuuugaccagaguagu

SEQ ID NO: 388840 - RNA, 19 nt, Artificial Sequence
  Description of Artificial Sequence: Synthetic oligonucleotide
  Antisense Strand to SEQ ID NO: 388839
acuacucuggucaaagaga

SEQ ID NO: 388841 - RNA, 19 nt, Artificial Sequence
  Description of Artificial Sequence: Synthetic oligonucleotide
  Sense Strand Starting at position 891 of SEQ ID NO: 315381
agauuugguuaccaucuaa

SEQ ID NO: 388842 - RNA, 19 nt, Artificial Sequence
  Description of Artificial Sequence: Synthetic oligonucleotide
  Antisense Strand to SEQ ID NO: 388841
uuagaugguaaccaaaucu

SEQ ID NO: 388843 - RNA, 19 nt, Artificial Sequence
  Description of Artificial Sequence: Synthetic oligonucleotide
  Sense Strand Starting at position 891 of SEQ ID NO: 315480
ggaggagucaggcaguuaa

SEQ ID NO: 388844 - RNA, 19 nt, Artificial Sequence
  Description of Artificial Sequence: Synthetic oligonucleotide
  Antisense Strand to SEQ ID NO: 388843
uuaacugccugacuccucc

SEQ ID NO: 388845 - RNA, 19 nt, Artificial Sequence
  Description of Artificial Sequence: Synthetic oligonucleotide
  Sense Strand Starting at position 891 of SEQ ID NO: 315677
uggcauugucaggaaaguc

SEQ ID NO: 388846 - RNA, 19 nt, Artificial Sequence
  Description of Artificial Sequence: Synthetic oligonucleotide
  Antisense Strand to SEQ ID NO: 388845
gacuuuccugacaaugcca

SEQ ID NO: 388847 - RNA, 19 nt, Artificial Sequence
  Description of Artificial Sequence: Synthetic oligonucleotide
  Sense Strand Starting at position 891 of SEQ ID NO: 315730
aggccauagggauguauga

SEQ ID NO: 388848 - RNA, 19 nt, Artificial Sequence
  Description of Artificial Sequence: Synthetic oligonucleotide
  Antisense Strand to SEQ ID NO: 388847
ucauacaucccuauggccu

SEQ ID NO: 388849 - RNA, 19 nt, Artificial Sequence
  Description of Artificial Sequence: Synthetic oligonucleotide
  Sense Strand Starting at position 891 of SEQ ID NO: 315754
gugguagggcauuauagac

SEQ ID NO: 388850 - RNA, 19 nt, Artificial Sequence
  Description of Artificial Sequence: Synthetic oligonucleotide
  Antisense Strand to SEQ ID NO: 388849
gucuauaaugcccuaccac

SEQ ID NO: 388851 - RNA, 19 nt, Artificial Sequence
  Description of Artificial Sequence: Synthetic oligonucleotide
  Sense Strand Starting at position 891 of SEQ ID NO: 315774
gagggaagcucacuaguag

SEQ ID NO: 388852 - RNA, 19 nt, Artificial Sequence
  Description of Artificial Sequence: Synthetic oligonucleotide
  Antisense Strand to SEQ ID NO: 388851
cuacuagugagcuucccuc

SEQ ID NO: 388853 - RNA, 19 nt, Artificial Sequence
  Description of Artificial Sequence: Synthetic oligonucleotide
  Sense Strand Starting at position 891 of SEQ ID NO: 315794
aguccuaagcugcaggaaa

SEQ ID NO: 388854 - RNA, 19 nt, Artificial Sequence
  Description of Artificial Sequence: Synthetic oligonucleotide
  Antisense Strand to SEQ ID NO: 388853
uuuccugcagcuuaggacu

SEQ ID NO: 388855 - RNA, 19 nt, Artificial Sequence
  Description of Artificial Sequence: Synthetic oligonucleotide
  Sense Strand Starting at position 891 of SEQ ID NO: 315805
gcaggaaacugggcuuauu

SEQ ID NO: 388856 - RNA, 19 nt, Artificial Sequence
  Description of Artificial Sequence: Synthetic oligonucleotide
  Antisense Strand to SEQ ID NO: 388855
aauaagcccaguuuccugc

SEQ ID NO: 388857 - RNA, 19 nt, Artificial Sequence
  Description of Artificial Sequence: Synthetic oligonucleotide
  Sense Strand Starting at position 891 of SEQ ID NO: 315815
gggcuuauucgggaaauga

SEQ ID NO: 388858 - RNA, 19 nt, Artificial Sequence
  Description of Artificial Sequence: Synthetic oligonucleotide
  Antisense Strand to SEQ ID NO: 388857
ucauuucccgaauaagccc

SEQ ID NO: 388859 - RNA, 19 nt, Artificial Sequence
  Description of Artificial Sequence: Synthetic oligonucleotide
  Sense Strand Starting at position 891 of SEQ ID NO: 315963
ugguuugucuuauccaaga

SEQ ID NO: 388860 - RNA, 19 nt, Artificial Sequence
  Description of Artificial Sequence: Synthetic oligonucleotide
  Antisense Strand to SEQ ID NO: 388859
ucuuggauaagacaaacca

SEQ ID NO: 388861 - RNA, 19 nt, Artificial Sequence
  Description of Artificial Sequence: Synthetic oligonucleotide
  Sense Strand Starting at position 891 of SEQ ID NO: 315968
ugucuuauccaagacaagc

SEQ ID NO: 388862 - RNA, 19 nt, Artificial Sequence
  Description of Artificial Sequence: Synthetic oligonucleotide
  Antisense Strand to SEQ ID NO: 388861
gcuugucuuggauaagaca

SEQ ID NO: 388863 - RNA, 19 nt, Artificial Sequence
  Description of Artificial Sequence: Synthetic oligonucleotide
  Sense Strand Starting at position 891 of SEQ ID NO: 316010
caacaaugaguguacagua

SEQ ID NO: 388864 - RNA, 19 nt, Artificial Sequence
  Description of Artificial Sequence: Synthetic oligonucleotide
  Antisense Strand to SEQ ID NO: 388863
uacuguacacucauuguug

SEQ ID NO: 388865 - RNA, 19 nt, Artificial Sequence
  Description of Artificial Sequence: Synthetic oligonucleotide
  Sense Strand Starting at position 891 of SEQ ID NO: 316015
augaguguacaguauuauu

SEQ ID NO: 388866 - RNA, 19 nt, Artificial Sequence
  Description of Artificial Sequence: Synthetic oligonucleotide
  Antisense Strand to SEQ ID NO: 388865
aauaauacuguacacucau

SEQ ID NO: 388867 - RNA, 19 nt, Artificial Sequence
  Description of Artificial Sequence: Synthetic oligonucleotide
  Sense Strand Starting at position 891 of SEQ ID NO: 316207
uaaacaucaggguggcaau

SEQ ID NO: 388868 - RNA, 19 nt, Artificial Sequence
  Description of Artificial Sequence: Synthetic oligonucleotide
  Antisense Strand to SEQ ID NO: 388867
auugccacccugauguuua

SEQ ID NO: 388869 - RNA, 19 nt, Artificial Sequence
  Description of Artificial Sequence: Synthetic oligonucleotide
  Sense Strand Starting at position 891 of SEQ ID NO: 316226
aagagaaagguuugcucuu

SEQ ID NO: 388870 - RNA, 19 nt, Artificial Sequence
  Description of Artificial Sequence: Synthetic oligonucleotide
  Antisense Strand to SEQ ID NO: 388869
aagagcaaaccuuucucuu

SEQ ID NO: 388871 - RNA, 19 nt, Artificial Sequence
  Description of Artificial Sequence: Synthetic oligonucleotide
  Sense Strand Starting at position 891 of SEQ ID NO: 316228
gagaaagguuugcucuuag

SEQ ID NO: 388872 - RNA, 19 nt, Artificial Sequence
  Description of Artificial Sequence: Synthetic oligonucleotide
  Antisense Strand to SEQ ID NO: 388871
cuaagagcaaaccuuucuc

SEQ ID NO: 388873 - RNA, 19 nt, Artificial Sequence
  Description of Artificial Sequence: Synthetic oligonucleotide
  Sense Strand Starting at position 891 of SEQ ID NO: 316302
ugguacuaaccauguaucu

SEQ ID NO: 388874 - RNA, 19 nt, Artificial Sequence
  Description of Artificial Sequence: Synthetic oligonucleotide
  Antisense Strand to SEQ ID NO: 388873
agauacaugguuaguacca

SEQ ID NO: 388875 - RNA, 19 nt, Artificial Sequence
  Description of Artificial Sequence: Synthetic oligonucleotide
  Sense Strand Starting at position 891 of SEQ ID NO: 316323
gugucauaagcgggaagaa

SEQ ID NO: 388876 - RNA, 19 nt, Artificial Sequence
  Description of Artificial Sequence: Synthetic oligonucleotide
  Antisense Strand to SEQ ID NO: 388875
uucuucccgcuuaugacac

SEQ ID NO: 388877 - RNA, 19 nt, Artificial Sequence
  Description of Artificial Sequence: Synthetic oligonucleotide
  Sense Strand Starting at position 891 of SEQ ID NO: 316674
cucaguaacuagcugaauu

SEQ ID NO: 388878 - RNA, 19 nt, Artificial Sequence
  Description of Artificial Sequence: Synthetic oligonucleotide
  Antisense Strand to SEQ ID NO: 388877
aauucagcuaguuacugag

SEQ ID NO: 388879 - RNA, 19 nt, Artificial Sequence
  Description of Artificial Sequence: Synthetic oligonucleotide
  Sense Strand Starting at position 891 of SEQ ID NO: 316715
cguugcauuuauguuccua

SEQ ID NO: 388880 - RNA, 19 nt, Artificial Sequence
  Description of Artificial Sequence: Synthetic oligonucleotide
  Antisense Strand to SEQ ID NO: 388879
uaggaacauaaaugcaacg

SEQ ID NO: 388881 - RNA, 19 nt, Artificial Sequence
  Description of Artificial Sequence: Synthetic oligonucleotide
  Sense Strand Starting at position 891 of SEQ ID NO: 316717
uugcauuuauguuccuauu

SEQ ID NO: 388882 - RNA, 19 nt, Artificial Sequence
  Description of Artificial Sequence: Synthetic oligonucleotide
  Antisense Strand to SEQ ID NO: 388881
aauaggaacauaaaugcaa

SEQ ID NO: 388883 - RNA, 19 nt, Artificial Sequence
  Description of Artificial Sequence: Synthetic oligonucleotide
  Sense Strand Starting at position 891 of SEQ ID NO: 316726
uguuccuauuucguugaaa

SEQ ID NO: 388884 - RNA, 19 nt, Artificial Sequence
  Description of Artificial Sequence: Synthetic oligonucleotide
  Antisense Strand to SEQ ID NO: 388883
uuucaacgaaauaggaaca

SEQ ID NO: 388885 - RNA, 19 nt, Artificial Sequence
  Description of Artificial Sequence: Synthetic oligonucleotide
  Sense Strand Starting at position 891 of SEQ ID NO: 316789
uguaauacucuguagcuca

SEQ ID NO: 388886 - RNA, 19 nt, Artificial Sequence
  Description of Artificial Sequence: Synthetic oligonucleotide
  Antisense Strand to SEQ ID NO: 388885
ugagcuacagaguauuaca

SEQ ID NO: 388887 - RNA, 19 nt, Artificial Sequence
  Description of Artificial Sequence: Synthetic oligonucleotide
  Sense Strand Starting at position 891 of SEQ ID NO: 317272
ccgaguuuccguuccacuu

SEQ ID NO: 388888 - RNA, 19 nt, Artificial Sequence
  Description of Artificial Sequence: Synthetic oligonucleotide
  Antisense Strand to SEQ ID NO: 388887
aaguggaacggaaacucgg

SEQ ID NO: 388889 - RNA, 19 nt, Artificial Sequence
  Description of Artificial Sequence: Synthetic oligonucleotide
  Sense Strand Starting at position 891 of SEQ ID NO: 317904
cgggaacuuccuuaacucu

SEQ ID NO: 388890 - RNA, 19 nt, Artificial Sequence
  Description of Artificial Sequence: Synthetic oligonucleotide
  Antisense Strand to SEQ ID NO: 388889
agaguuaaggaaguucccg

SEQ ID NO: 388891 - RNA, 19 nt, Artificial Sequence
  Description of Artificial Sequence: Synthetic oligonucleotide
  Sense Strand Starting at position 891 of SEQ ID NO: 317940
cuuagaagccuguagcuuu

SEQ ID NO: 388892 - RNA, 19 nt, Artificial Sequence
  Description of Artificial Sequence: Synthetic oligonucleotide
  Antisense Strand to SEQ ID NO: 388891
aaagcuacaggcuucuaag

SEQ ID NO: 388893 - RNA, 19 nt, Artificial Sequence
  Description of Artificial Sequence: Synthetic oligonucleotide
  Sense Strand Starting at position 891 of SEQ ID NO: 317986
agaggagcggucgagauua

SEQ ID NO: 388894 - RNA, 19 nt, Artificial Sequence
  Description of Artificial Sequence: Synthetic oligonucleotide
  Antisense Strand to SEQ ID NO: 388893
uaaucucgaccgcuccucu

SEQ ID NO: 388895 - RNA, 19 nt, Artificial Sequence
  Description of Artificial Sequence: Synthetic oligonucleotide
  Sense Strand Starting at position 891 of SEQ ID NO: 317988
aggagcggucgagauuauu

SEQ ID NO: 388896 - RNA, 19 nt, Artificial Sequence
  Description of Artificial Sequence: Synthetic oligonucleotide
  Antisense Strand to SEQ ID NO: 388895
aauaaucucgaccgcuccu

SEQ ID NO: 388897 - RNA, 19 nt, Artificial Sequence
  Description of Artificial Sequence: Synthetic oligonucleotide
  Sense Strand Starting at position 891 of SEQ ID NO: 318073
aaugaugaggcguguagaa

SEQ ID NO: 388898 - RNA, 19 nt, Artificial Sequence
  Description of Artificial Sequence: Synthetic oligonucleotide
  Antisense Strand to SEQ ID NO: 388897
uucuacacgccucaucauu

SEQ ID NO: 388899 - RNA, 19 nt, Artificial Sequence
  Description of Artificial Sequence: Synthetic oligonucleotide
  Sense Strand Starting at position 891 of SEQ ID NO: 318075
ugaugaggcguguagaaug

SEQ ID NO: 388900 - RNA, 19 nt, Artificial Sequence
  Description of Artificial Sequence: Synthetic oligonucleotide
  Antisense Strand to SEQ ID NO: 388899
cauucuacacgccucauca

SEQ ID NO: 388901 - RNA, 19 nt, Artificial Sequence
  Description of Artificial Sequence: Synthetic oligonucleotide
  Sense Strand Starting at position 891 of SEQ ID NO: 318719
cgagcuaccugaguuugaa

SEQ ID NO: 388902 - RNA, 19 nt, Artificial Sequence
  Description of Artificial Sequence: Synthetic oligonucleotide
  Antisense Strand to SEQ ID NO: 388901
uucaaacucagguagcucg

SEQ ID NO: 388903 - RNA, 19 nt, Artificial Sequence
  Description of Artificial Sequence: Synthetic oligonucleotide
  Sense Strand Starting at position 891 of SEQ ID NO: 318819
gagaguaguaaugguaucu

SEQ ID NO: 388904 - RNA, 19 nt, Artificial Sequence
  Description of Artificial Sequence: Synthetic oligonucleotide
  Antisense Strand to SEQ ID NO: 388903
agauaccauuacuacucuc

SEQ ID NO: 388905 - RNA, 19 nt, Artificial Sequence
  Description of Artificial Sequence: Synthetic oligonucleotide
  Sense Strand Starting at position 891 of SEQ ID NO: 318888
uuagaaugauguuugccau

SEQ ID NO: 388906 - RNA, 19 nt, Artificial Sequence
  Description of Artificial Sequence: Synthetic oligonucleotide
  Antisense Strand to SEQ ID NO: 388905
auggcaaacaucauucuaa

SEQ ID NO: 388907 - RNA, 19 nt, Artificial Sequence
  Description of Artificial Sequence: Synthetic oligonucleotide
  Sense Strand Starting at position 891 of SEQ ID NO: 318889
uagaaugauguuugccaua

SEQ ID NO: 388908 - RNA, 19 nt, Artificial Sequence
  Description of Artificial Sequence: Synthetic oligonucleotide
  Antisense Strand to SEQ ID NO: 388907
uauggcaaacaucauucua

SEQ ID NO: 388909 - RNA, 19 nt, Artificial Sequence
  Description of Artificial Sequence: Synthetic oligonucleotide
  Sense Strand Starting at position 891 of SEQ ID NO: 318891
gaaugauguuugccauaga

SEQ ID NO: 388910 - RNA, 19 nt, Artificial Sequence
  Description of Artificial Sequence: Synthetic oligonucleotide
  Antisense Strand to SEQ ID NO: 388909
ucuauggcaaacaucauuc

SEQ ID NO: 388911 - RNA, 19 nt, Artificial Sequence
  Description of Artificial Sequence: Synthetic oligonucleotide
  Sense Strand Starting at position 891 of SEQ ID NO: 318894
ugauguuugccauagagua

SEQ ID NO: 388912 - RNA, 19 nt, Artificial Sequence
  Description of Artificial Sequence: Synthetic oligonucleotide
  Antisense Strand to SEQ ID NO: 388911
uacucuauggcaaacauca

SEQ ID NO: 388913 - RNA, 19 nt, Artificial Sequence
  Description of Artificial Sequence: Synthetic oligonucleotide
  Sense Strand Starting at position 891 of SEQ ID NO: 318896
auguuugccauagaguaag

SEQ ID NO: 388914 - RNA, 19 nt, Artificial Sequence
  Description of Artificial Sequence: Synthetic oligonucleotide
  Antisense Strand to SEQ ID NO: 388913
cuuacucuauggcaaacau

SEQ ID NO: 388915 - RNA, 19 nt, Artificial Sequence
  Description of Artificial Sequence: Synthetic oligonucleotide
  Sense Strand Starting at position 891 of SEQ ID NO: 319078
agaacugugucauugaucu

SEQ ID NO: 388916 - RNA, 19 nt, Artificial Sequence
  Description of Artificial Sequence: Synthetic oligonucleotide
  Antisense Strand to SEQ ID NO: 388915
agaucaaugacacaguucu

SEQ ID NO: 388917 - RNA, 19 nt, Artificial Sequence
  Description of Artificial Sequence: Synthetic oligonucleotide
  Sense Strand Starting at position 891 of SEQ ID NO: 319082
cugugucauugaucuaaua

SEQ ID NO: 388918 - RNA, 19 nt, Artificial Sequence
  Description of Artificial Sequence: Synthetic oligonucleotide
  Antisense Strand to SEQ ID NO: 388917
uauuagaucaaugacacag

SEQ ID NO: 388919 - RNA, 19 nt, Artificial Sequence
  Description of Artificial Sequence: Synthetic oligonucleotide
  Sense Strand Starting at position 891 of SEQ ID NO: 319095
cuaauaaucuagguacugu

SEQ ID NO: 388920 - RNA, 19 nt, Artificial Sequence
  Description of Artificial Sequence: Synthetic oligonucleotide
  Antisense Strand to SEQ ID NO: 388919
acaguaccuagauuauuag

SEQ ID NO: 388921 - RNA, 19 nt, Artificial Sequence
  Description of Artificial Sequence: Synthetic oligonucleotide
  Sense Strand Starting at position 892 of SEQ ID NO: 315292
guugaaauuccacagcuca

SEQ ID NO: 388922 - RNA, 19 nt, Artificial Sequence
  Description of Artificial Sequence: Synthetic oligonucleotide
  Antisense Strand to SEQ ID NO: 388921
ugagcuguggaauuucaac

SEQ ID NO: 388923 - RNA, 19 nt, Artificial Sequence
  Description of Artificial Sequence: Synthetic oligonucleotide
  Sense Strand Starting at position 892 of SEQ ID NO: 315351
gauugaggucauugguuaa

SEQ ID NO: 388924 - RNA, 19 nt, Artificial Sequence
  Description of Artificial Sequence: Synthetic oligonucleotide
  Antisense Strand to SEQ ID NO: 388923
uuaaccaaugaccucaauc

SEQ ID NO: 388925 - RNA, 19 nt, Artificial Sequence
  Description of Artificial Sequence: Synthetic oligonucleotide
  Sense Strand Starting at position 892 of SEQ ID NO: 315355
gaggucauugguuaauguu

SEQ ID NO: 388926 - RNA, 19 nt, Artificial Sequence
  Description of Artificial Sequence: Synthetic oligonucleotide
  Antisense Strand to SEQ ID NO: 388925
aacauuaaccaaugaccuc

SEQ ID NO: 388927 - RNA, 19 nt, Artificial Sequence
  Description of Artificial Sequence: Synthetic oligonucleotide
  Sense Strand Starting at position 892 of SEQ ID NO: 315526
augucacaucuauguauaa

SEQ ID NO: 388928 - RNA, 19 nt, Artificial Sequence
  Description of Artificial Sequence: Synthetic oligonucleotide
  Antisense Strand to SEQ ID NO: 388927
uuauacauagaugugacau

SEQ ID NO: 388929 - RNA, 19 nt, Artificial Sequence
  Description of Artificial Sequence: Synthetic oligonucleotide
  Sense Strand Starting at position 892 of SEQ ID NO: 315539
guauaaugguaaguacaua

SEQ ID NO: 388930 - RNA, 19 nt, Artificial Sequence
  Description of Artificial Sequence: Synthetic oligonucleotide
  Antisense Strand to SEQ ID NO: 388929
uauguacuuaccauuauac

SEQ ID NO: 388931 - RNA, 19 nt, Artificial Sequence
  Description of Artificial Sequence: Synthetic oligonucleotide
  Sense Strand Starting at position 892 of SEQ ID NO: 315745
acauacaugucaccagaca

SEQ ID NO: 388932 - RNA, 19 nt, Artificial Sequence
  Description of Artificial Sequence: Synthetic oligonucleotide
  Antisense Strand to SEQ ID NO: 388931
ugucuggugacauguaugu

SEQ ID NO: 388933 - RNA, 19 nt, Artificial Sequence
  Description of Artificial Sequence: Synthetic oligonucleotide
  Sense Strand Starting at position 892 of SEQ ID NO: 315984
guuggaaaguucuccugaa

SEQ ID NO: 388934 - RNA, 19 nt, Artificial Sequence
  Description of Artificial Sequence: Synthetic oligonucleotide
  Antisense Strand to SEQ ID NO: 388933
uucaggagaacuuuccaac

SEQ ID NO: 388935 - RNA, 19 nt, Artificial Sequence
  Description of Artificial Sequence: Synthetic oligonucleotide
  Sense Strand Starting at position 892 of SEQ ID NO: 315988
gaaaguucuccugaagucu

SEQ ID NO: 388936 - RNA, 19 nt, Artificial Sequence
  Description of Artificial Sequence: Synthetic oligonucleotide
  Antisense Strand to SEQ ID NO: 388935
agacuucaggagaacuuuc

SEQ ID NO: 388937 - RNA, 19 nt, Artificial Sequence
  Description of Artificial Sequence: Synthetic oligonucleotide
  Sense Strand Starting at position 892 of SEQ ID NO: 316090
gaggucucauacuuaugaa

SEQ ID NO: 388938 - RNA, 19 nt, Artificial Sequence
  Description of Artificial Sequence: Synthetic oligonucleotide
  Antisense Strand to SEQ ID NO: 388937
uucauaaguaugagaccuc

SEQ ID NO: 388939 - RNA, 19 nt, Artificial Sequence
  Description of Artificial Sequence: Synthetic oligonucleotide
  Sense Strand Starting at position 892 of SEQ ID NO: 316112
cucuuaucucuagaagugu

SEQ ID NO: 388940 - RNA, 19 nt, Artificial Sequence
  Description of Artificial Sequence: Synthetic oligonucleotide
  Antisense Strand to SEQ ID NO: 388939
acacuucuagagauaagag

SEQ ID NO: 388941 - RNA, 19 nt, Artificial Sequence
  Description of Artificial Sequence: Synthetic oligonucleotide
  Sense Strand Starting at position 892 of SEQ ID NO: 316137
guggguucacuguagaaac

SEQ ID NO: 388942 - RNA, 19 nt, Artificial Sequence
  Description of Artificial Sequence: Synthetic oligonucleotide
  Antisense Strand to SEQ ID NO: 388941
guuucuacagugaacccac

SEQ ID NO: 388943 - RNA, 19 nt, Artificial Sequence
  Description of Artificial Sequence: Synthetic oligonucleotide
  Sense Strand Starting at position 892 of SEQ ID NO: 316506
acacuuuguacugagugga

SEQ ID NO: 388944 - RNA, 19 nt, Artificial Sequence
  Description of Artificial Sequence: Synthetic oligonucleotide
  Antisense Strand to SEQ ID NO: 388943
uccacucaguacaaagugu

SEQ ID NO: 388945 - RNA, 19 nt, Artificial Sequence
  Description of Artificial Sequence: Synthetic oligonucleotide
  Sense Strand Starting at position 892 of SEQ ID NO: 316546
ccuggaauccuaggcaaug

SEQ ID NO: 388946 - RNA, 19 nt, Artificial Sequence
  Description of Artificial Sequence: Synthetic oligonucleotide
  Antisense Strand to SEQ ID NO: 388945
cauugccuaggauuccagg

SEQ ID NO: 388947 - RNA, 19 nt, Artificial Sequence
  Description of Artificial Sequence: Synthetic oligonucleotide
  Sense Strand Starting at position 892 of SEQ ID NO: 316656
aguccaauggacugaauau

SEQ ID NO: 388948 - RNA, 19 nt, Artificial Sequence
  Description of Artificial Sequence: Synthetic oligonucleotide
  Antisense Strand to SEQ ID NO: 388947
auauucaguccauuggacu

SEQ ID NO: 388949 - RNA, 19 nt, Artificial Sequence
  Description of Artificial Sequence: Synthetic oligonucleotide
  Sense Strand Starting at position 892 of SEQ ID NO: 316701
uccuaacucccagagguuu

SEQ ID NO: 388950 - RNA, 19 nt, Artificial Sequence
  Description of Artificial Sequence: Synthetic oligonucleotide
  Antisense Strand to SEQ ID NO: 388949
aaaccucugggaguuagga

SEQ ID NO: 388951 - RNA, 19 nt, Artificial Sequence
  Description of Artificial Sequence: Synthetic oligonucleotide
  Sense Strand Starting at position 892 of SEQ ID NO: 316845
ugagaaguuggucaucugu

SEQ ID NO: 388952 - RNA, 19 nt, Artificial Sequence
  Description of Artificial Sequence: Synthetic oligonucleotide
  Antisense Strand to SEQ ID NO: 388951
acagaugaccaacuucuca

SEQ ID NO: 388953 - RNA, 19 nt, Artificial Sequence
  Description of Artificial Sequence: Synthetic oligonucleotide
  Sense Strand Starting at position 892 of SEQ ID NO: 316855
gucaucugugaggaaguga

SEQ ID NO: 388954 - RNA, 19 nt, Artificial Sequence
  Description of Artificial Sequence: Synthetic oligonucleotide
  Antisense Strand to SEQ ID NO: 388953
ucacuuccucacagaugac

SEQ ID NO: 388955 - RNA, 19 nt, Artificial Sequence
  Description of Artificial Sequence: Synthetic oligonucleotide
  Sense Strand Starting at position 892 of SEQ ID NO: 316992
uguuuaagauaccuaguau

SEQ ID NO: 388956 - RNA, 19 nt, Artificial Sequence
  Description of Artificial Sequence: Synthetic oligonucleotide
  Antisense Strand to SEQ ID NO: 388955
auacuagguaucuuaaaca

SEQ ID NO: 388957 - RNA, 19 nt, Artificial Sequence
  Description of Artificial Sequence: Synthetic oligonucleotide
  Sense Strand Starting at position 892 of SEQ ID NO: 316998
agauaccuaguaugaguuu

SEQ ID NO: 388958 - RNA, 19 nt, Artificial Sequence
  Description of Artificial Sequence: Synthetic oligonucleotide
  Antisense Strand to SEQ ID NO: 388957
aaacucauacuagguaucu

SEQ ID NO: 388959 - RNA, 19 nt, Artificial Sequence
  Description of Artificial Sequence: Synthetic oligonucleotide
  Sense Strand Starting at position 892 of SEQ ID NO: 317001
uaccuaguaugaguuuaag

SEQ ID NO: 388960 - RNA, 19 nt, Artificial Sequence
  Description of Artificial Sequence: Synthetic oligonucleotide
  Antisense Strand to SEQ ID NO: 388959
cuuaaacucauacuaggua

SEQ ID NO: 388961 - RNA, 19 nt, Artificial Sequence
  Description of Artificial Sequence: Synthetic oligonucleotide
  Sense Strand Starting at position 892 of SEQ ID NO: 317004
cuaguaugaguuuaagguc

SEQ ID NO: 388962 - RNA, 19 nt, Artificial Sequence
  Description of Artificial Sequence: Synthetic oligonucleotide
  Antisense Strand to SEQ ID NO: 388961
gaccuuaaacucauacuag

SEQ ID NO: 388963 - RNA, 19 nt, Artificial Sequence
  Description of Artificial Sequence: Synthetic oligonucleotide
  Sense Strand Starting at position 892 of SEQ ID NO: 317031
guaguucgugaauaggaac

SEQ ID NO: 388964 - RNA, 19 nt, Artificial Sequence
  Description of Artificial Sequence: Synthetic oligonucleotide
  Antisense Strand to SEQ ID NO: 388963
guuccuauucacgaacuac

SEQ ID NO: 388965 - RNA, 19 nt, Artificial Sequence
  Description of Artificial Sequence: Synthetic oligonucleotide
  Sense Strand Starting at position 892 of SEQ ID NO: 317070
guauguaguaguuauagag

SEQ ID NO: 388966 - RNA, 19 nt, Artificial Sequence
  Description of Artificial Sequence: Synthetic oligonucleotide
  Antisense Strand to SEQ ID NO: 388965
cucuauaacuacuacauac

SEQ ID NO: 388967 - RNA, 19 nt, Artificial Sequence
  Description of Artificial Sequence: Synthetic oligonucleotide
  Sense Strand Starting at position 892 of SEQ ID NO: 317074
guaguaguuauagagauca

SEQ ID NO: 388968 - RNA, 19 nt, Artificial Sequence
  Description of Artificial Sequence: Synthetic oligonucleotide
  Antisense Strand to SEQ ID NO: 388967
ugaucucuauaacuacuac

SEQ ID NO: 388969 - RNA, 19 nt, Artificial Sequence
  Description of Artificial Sequence: Synthetic oligonucleotide
  Sense Strand Starting at position 892 of SEQ ID NO: 317196
ucagaauuauugcuaggaa

SEQ ID NO: 388970 - RNA, 19 nt, Artificial Sequence
  Description of Artificial Sequence: Synthetic oligonucleotide
  Antisense Strand to SEQ ID NO: 388969
uuccuagcaauaauucuga

SEQ ID NO: 388971 - RNA, 19 nt, Artificial Sequence
  Description of Artificial Sequence: Synthetic oligonucleotide
  Sense Strand Starting at position 892 of SEQ ID NO: 317278
ugacuaguucuaugaauaa

SEQ ID NO: 388972 - RNA, 19 nt, Artificial Sequence
  Description of Artificial Sequence: Synthetic oligonucleotide
  Antisense Strand to SEQ ID NO: 388971
uuauucauagaacuaguca

SEQ ID NO: 388973 - RNA, 19 nt, Artificial Sequence
  Description of Artificial Sequence: Synthetic oligonucleotide
  Sense Strand Starting at position 892 of SEQ ID NO: 317311
ggauauaaagcuuguaauu

SEQ ID NO: 388974 - RNA, 19 nt, Artificial Sequence
  Description of Artificial Sequence: Synthetic oligonucleotide
  Antisense Strand to SEQ ID NO: 388973
aauuacaagcuuuauaucc

SEQ ID NO: 388975 - RNA, 19 nt, Artificial Sequence
  Description of Artificial Sequence: Synthetic oligonucleotide
  Sense Strand Starting at position 892 of SEQ ID NO: 317447
uccaauaauugaucaagug

SEQ ID NO: 388976 - RNA, 19 nt, Artificial Sequence
  Description of Artificial Sequence: Synthetic oligonucleotide
  Antisense Strand to SEQ ID NO: 388975
cacuugaucaauuauugga

SEQ ID NO: 388977 - RNA, 19 nt, Artificial Sequence
  Description of Artificial Sequence: Synthetic oligonucleotide
  Sense Strand Starting at position 892 of SEQ ID NO: 317469
ccaguuccacaugaaguuu

SEQ ID NO: 388978 - RNA, 19 nt, Artificial Sequence
  Description of Artificial Sequence: Synthetic oligonucleotide
  Antisense Strand to SEQ ID NO: 388977
aaacuucauguggaacugg

SEQ ID NO: 388979 - RNA, 19 nt, Artificial Sequence
  Description of Artificial Sequence: Synthetic oligonucleotide
  Sense Strand Starting at position 892 of SEQ ID NO: 317500
gcuuuaccacuacauguua

SEQ ID NO: 388980 - RNA, 19 nt, Artificial Sequence
  Description of Artificial Sequence: Synthetic oligonucleotide
  Antisense Strand to SEQ ID NO: 388979
uaacauguagugguaaagc

SEQ ID NO: 388981 - RNA, 19 nt, Artificial Sequence
  Description of Artificial Sequence: Synthetic oligonucleotide
  Sense Strand Starting at position 892 of SEQ ID NO: 317636
cuguuauugggagaucuuc

SEQ ID NO: 388982 - RNA, 19 nt, Artificial Sequence
  Description of Artificial Sequence: Synthetic oligonucleotide
  Antisense Strand to SEQ ID NO: 388981
gaagaucucccaauaacag

SEQ ID NO: 388983 - RNA, 19 nt, Artificial Sequence
  Description of Artificial Sequence: Synthetic oligonucleotide
  Sense Strand Starting at position 892 of SEQ ID NO: 317672
gagaaagccuaaguggaau

SEQ ID NO: 388984 - RNA, 19 nt, Artificial Sequence
  Description of Artificial Sequence: Synthetic oligonucleotide
  Antisense Strand to SEQ ID NO: 388983
auuccacuuaggcuuucuc

SEQ ID NO: 388985 - RNA, 19 nt, Artificial Sequence
  Description of Artificial Sequence: Synthetic oligonucleotide
  Sense Strand Starting at position 892 of SEQ ID NO: 317742
ucucuuugguaucucagaa

SEQ ID NO: 388986 - RNA, 19 nt, Artificial Sequence
  Description of Artificial Sequence: Synthetic oligonucleotide
  Antisense Strand to SEQ ID NO: 388985
uucugagauaccaaagaga

SEQ ID NO: 388987 - RNA, 19 nt, Artificial Sequence
  Description of Artificial Sequence: Synthetic oligonucleotide
  Sense Strand Starting at position 892 of SEQ ID NO: 317959
gacucuugugaagguacau

SEQ ID NO: 388988 - RNA, 19 nt, Artificial Sequence
  Description of Artificial Sequence: Synthetic oligonucleotide
  Antisense Strand to SEQ ID NO: 388987
auguaccuucacaagaguc

SEQ ID NO: 388989 - RNA, 19 nt, Artificial Sequence
  Description of Artificial Sequence: Synthetic oligonucleotide
  Sense Strand Starting at position 892 of SEQ ID NO: 317972
guacaugggcaugaaguua

SEQ ID NO: 388990 - RNA, 19 nt, Artificial Sequence
  Description of Artificial Sequence: Synthetic oligonucleotide
  Antisense Strand to SEQ ID NO: 388989
uaacuucaugcccauguac

SEQ ID NO: 388991 - RNA, 19 nt, Artificial Sequence
  Description of Artificial Sequence: Synthetic oligonucleotide
  Sense Strand Starting at position 892 of SEQ ID NO: 318004
cuaugaugucaaugaaucc

SEQ ID NO: 388992 - RNA, 19 nt, Artificial Sequence
  Description of Artificial Sequence: Synthetic oligonucleotide
  Antisense Strand to SEQ ID NO: 388991
ggauucauugacaucauag

SEQ ID NO: 388993 - RNA, 19 nt, Artificial Sequence
  Description of Artificial Sequence: Synthetic oligonucleotide
  Sense Strand Starting at position 892 of SEQ ID NO: 318013
caaugaaucccaggguggu

SEQ ID NO: 388994 - RNA, 19 nt, Artificial Sequence
  Description of Artificial Sequence: Synthetic oligonucleotide
  Antisense Strand to SEQ ID NO: 388993
accacccugggauucauug

SEQ ID NO: 388995 - RNA, 19 nt, Artificial Sequence
  Description of Artificial Sequence: Synthetic oligonucleotide
  Sense Strand Starting at position 892 of SEQ ID NO: 318090
gcaucuggucaagacagau

SEQ ID NO: 388996 - RNA, 19 nt, Artificial Sequence
  Description of Artificial Sequence: Synthetic oligonucleotide
  Antisense Strand to SEQ ID NO: 388995
aucugucuugaccagaugc

SEQ ID NO: 388997 - RNA, 19 nt, Artificial Sequence
  Description of Artificial Sequence: Synthetic oligonucleotide
  Sense Strand Starting at position 892 of SEQ ID NO: 318119
uggcauuaaucaguggaaa

SEQ ID NO: 388998 - RNA, 19 nt, Artificial Sequence
  Description of Artificial Sequence: Synthetic oligonucleotide
  Antisense Strand to SEQ ID NO: 388997
uuuccacugauuaaugcca

SEQ ID NO: 388999 - RNA, 19 nt, Artificial Sequence
  Description of Artificial Sequence: Synthetic oligonucleotide
  Sense Strand Starting at position 892 of SEQ ID NO: 318120
ggcauuaaucaguggaaac

SEQ ID NO: 389000 - RNA, 19 nt, Artificial Sequence
  Description of Artificial Sequence: Synthetic oligonucleotide
  Antisense Strand to SEQ ID NO: 388999
guuuccacugauuaaugcc

SEQ ID NO: 389001 - RNA, 19 nt, Artificial Sequence
  Description of Artificial Sequence: Synthetic oligonucleotide
  Sense Strand Starting at position 893 of SEQ ID NO: 315350
guaagccaucuagacuaca

SEQ ID NO: 389002 - RNA, 19 nt, Artificial Sequence
  Description of Artificial Sequence: Synthetic oligonucleotide
  Antisense Strand to SEQ ID NO: 389001
uguagucuagauggcuuac

SEQ ID NO: 389003 - RNA, 19 nt, Artificial Sequence
  Description of Artificial Sequence: Synthetic oligonucleotide
  Sense Strand Starting at position 893 of SEQ ID NO: 315372
gucuauuaacagugaggaa

SEQ ID NO: 389004 - RNA, 19 nt, Artificial Sequence
  Description of Artificial Sequence: Synthetic oligonucleotide
  Antisense Strand to SEQ ID NO: 389003
uuccucacuguuaauagac

SEQ ID NO: 389005 - RNA, 19 nt, Artificial Sequence
  Description of Artificial Sequence: Synthetic oligonucleotide
  Sense Strand Starting at position 893 of SEQ ID NO: 315808
uuaggauucuacuuauacg

SEQ ID NO: 389006 - RNA, 19 nt, Artificial Sequence
  Description of Artificial Sequence: Synthetic oligonucleotide
  Antisense Strand to SEQ ID NO: 389005
cguauaaguagaauccuaa

SEQ ID NO: 389007 - RNA, 19 nt, Artificial Sequence
  Description of Artificial Sequence: Synthetic oligonucleotide
  Sense Strand Starting at position 893 of SEQ ID NO: 315920
ucucaauuguguguuauuu

SEQ ID NO: 389008 - RNA, 19 nt, Artificial Sequence
  Description of Artificial Sequence: Synthetic oligonucleotide
  Antisense Strand to SEQ ID NO: 389007
aaauaacacacaauugaga

SEQ ID NO: 389009 - RNA, 19 nt, Artificial Sequence
  Description of Artificial Sequence: Synthetic oligonucleotide
  Sense Strand Starting at position 893 of SEQ ID NO: 316017
guaugaugcaauuggaaac

SEQ ID NO: 389010 - RNA, 19 nt, Artificial Sequence
  Description of Artificial Sequence: Synthetic oligonucleotide
  Antisense Strand to SEQ ID NO: 389009
guuuccaauugcaucauac

SEQ ID NO: 389011 - RNA, 19 nt, Artificial Sequence
  Description of Artificial Sequence: Synthetic oligonucleotide
  Sense Strand Starting at position 893 of SEQ ID NO: 316070
caguguuuccuauggacau

SEQ ID NO: 389012 - RNA, 19 nt, Artificial Sequence
  Description of Artificial Sequence: Synthetic oligonucleotide
  Antisense Strand to SEQ ID NO: 389011
auguccauaggaaacacug

SEQ ID NO: 389013 - RNA, 19 nt, Artificial Sequence
  Description of Artificial Sequence: Synthetic oligonucleotide
  Sense Strand Starting at position 893 of SEQ ID NO: 316140
uugucacucgcccauagaa

SEQ ID NO: 389014 - RNA, 19 nt, Artificial Sequence
  Description of Artificial Sequence: Synthetic oligonucleotide
  Antisense Strand to SEQ ID NO: 389013
uucuaugggcgagugacaa

SEQ ID NO: 389015 - RNA, 19 nt, Artificial Sequence
  Description of Artificial Sequence: Synthetic oligonucleotide
  Sense Strand Starting at position 893 of SEQ ID NO: 316142
gucacucgcccauagaauu

SEQ ID NO: 389016 - RNA, 19 nt, Artificial Sequence
  Description of Artificial Sequence: Synthetic oligonucleotide
  Antisense Strand to SEQ ID NO: 389015
aauucuaugggcgagugac

SEQ ID NO: 389017 - RNA, 19 nt, Artificial Sequence
  Description of Artificial Sequence: Synthetic oligonucleotide
  Sense Strand Starting at position 893 of SEQ ID NO: 316169
ugucacagaguguaaugau

SEQ ID NO: 389018 - RNA, 19 nt, Artificial Sequence
  Description of Artificial Sequence: Synthetic oligonucleotide
  Antisense Strand to SEQ ID NO: 389017
aucauuacacucugugaca

SEQ ID NO: 389019 - RNA, 19 nt, Artificial Sequence
  Description of Artificial Sequence: Synthetic oligonucleotide
  Sense Strand Starting at position 893 of SEQ ID NO: 316236
acagcuauccaugagagca

SEQ ID NO: 389020 - RNA, 19 nt, Artificial Sequence
  Description of Artificial Sequence: Synthetic oligonucleotide
  Antisense Strand to SEQ ID NO: 389019
ugcucucauggauagcugu

SEQ ID NO: 389021 - RNA, 19 nt, Artificial Sequence
  Description of Artificial Sequence: Synthetic oligonucleotide
  Sense Strand Starting at position 893 of SEQ ID NO: 316263
gauggagguuguguucuau

SEQ ID NO: 389022 - RNA, 19 nt, Artificial Sequence
  Description of Artificial Sequence: Synthetic oligonucleotide
  Antisense Strand to SEQ ID NO: 389021
auagaacacaaccuccauc

SEQ ID NO: 389023 - RNA, 19 nt, Artificial Sequence
  Description of Artificial Sequence: Synthetic oligonucleotide
  Sense Strand Starting at position 893 of SEQ ID NO: 316324
cccuuuaagcaguaucaag

SEQ ID NO: 389024 - RNA, 19 nt, Artificial Sequence
  Description of Artificial Sequence: Synthetic oligonucleotide
  Antisense Strand to SEQ ID NO: 389023
cuugauacugcuuaaaggg

SEQ ID NO: 389025 - RNA, 19 nt, Artificial Sequence
  Description of Artificial Sequence: Synthetic oligonucleotide
  Sense Strand Starting at position 893 of SEQ ID NO: 316338
ucaaguuuggugcauuaua

SEQ ID NO: 389026 - RNA, 19 nt, Artificial Sequence
  Description of Artificial Sequence: Synthetic oligonucleotide
  Antisense Strand to SEQ ID NO: 389025
uauaaugcaccaaacuuga

SEQ ID NO: 389027 - RNA, 19 nt, Artificial Sequence
  Description of Artificial Sequence: Synthetic oligonucleotide
  Sense Strand Starting at position 893 of SEQ ID NO: 316518
guuugccagaauuggaaau

SEQ ID NO: 389028 - RNA, 19 nt, Artificial Sequence
  Description of Artificial Sequence: Synthetic oligonucleotide
  Antisense Strand to SEQ ID NO: 389027
auuuccaauucuggcaaac

SEQ ID NO: 389029 - RNA, 19 nt, Artificial Sequence
  Description of Artificial Sequence: Synthetic oligonucleotide
  Sense Strand Starting at position 893 of SEQ ID NO: 316543
gagggauucucuccuguca

SEQ ID NO: 389030 - RNA, 19 nt, Artificial Sequence
  Description of Artificial Sequence: Synthetic oligonucleotide
  Antisense Strand to SEQ ID NO: 389029
ugacaggagagaaucccuc

SEQ ID NO: 389031 - RNA, 19 nt, Artificial Sequence
  Description of Artificial Sequence: Synthetic oligonucleotide
  Sense Strand Starting at position 893 of SEQ ID NO: 316568
ccacucgcugagcaauuaa

SEQ ID NO: 389032 - RNA, 19 nt, Artificial Sequence
  Description of Artificial Sequence: Synthetic oligonucleotide
  Antisense Strand to SEQ ID NO: 389031
uuaauugcucagcgagugg

SEQ ID NO: 389033 - RNA, 19 nt, Artificial Sequence
  Description of Artificial Sequence: Synthetic oligonucleotide
  Sense Strand Starting at position 893 of SEQ ID NO: 317066
guuguacuggcagaggaaa

SEQ ID NO: 389034 - RNA, 19 nt, Artificial Sequence
  Description of Artificial Sequence: Synthetic oligonucleotide
  Antisense Strand to SEQ ID NO: 389033
uuuccucugccaguacaac

SEQ ID NO: 389035 - RNA, 19 nt, Artificial Sequence
  Description of Artificial Sequence: Synthetic oligonucleotide
  Sense Strand Starting at position 893 of SEQ ID NO: 317273
gagcgucuuccuggaagag

SEQ ID NO: 389036 - RNA, 19 nt, Artificial Sequence
  Description of Artificial Sequence: Synthetic oligonucleotide
  Antisense Strand to SEQ ID NO: 389035
cucuuccaggaagacgcuc

SEQ ID NO: 389037 - RNA, 19 nt, Artificial Sequence
  Description of Artificial Sequence: Synthetic oligonucleotide
  Sense Strand Starting at position 893 of SEQ ID NO: 317352
auaaguugucacuacucua

SEQ ID NO: 389038 - RNA, 19 nt, Artificial Sequence
  Description of Artificial Sequence: Synthetic oligonucleotide
  Antisense Strand to SEQ ID NO: 389037
uagaguagugacaacuuau

SEQ ID NO: 389039 - RNA, 19 nt, Artificial Sequence
  Description of Artificial Sequence: Synthetic oligonucleotide
  Sense Strand Starting at position 893 of SEQ ID NO: 317355
aguugucacuacucuaaua

SEQ ID NO: 389040 - RNA, 19 nt, Artificial Sequence
  Description of Artificial Sequence: Synthetic oligonucleotide
  Antisense Strand to SEQ ID NO: 389039
uauuagaguagugacaacu

SEQ ID NO: 389041 - RNA, 19 nt, Artificial Sequence
  Description of Artificial Sequence: Synthetic oligonucleotide
  Sense Strand Starting at position 893 of SEQ ID NO: 317448
gggagcuuuguucauagau

SEQ ID NO: 389042 - RNA, 19 nt, Artificial Sequence
  Description of Artificial Sequence: Synthetic oligonucleotide
  Antisense Strand to SEQ ID NO: 389041
aucuaugaacaaagcuccc

SEQ ID NO: 389043 - RNA, 19 nt, Artificial Sequence
  Description of Artificial Sequence: Synthetic oligonucleotide
  Sense Strand Starting at position 893 of SEQ ID NO: 317861
guccuuggcuuggugauuu

SEQ ID NO: 389044 - RNA, 19 nt, Artificial Sequence
  Description of Artificial Sequence: Synthetic oligonucleotide
  Antisense Strand to SEQ ID NO: 389043
aaaucaccaagccaaggac

SEQ ID NO: 389045 - RNA, 19 nt, Artificial Sequence
  Description of Artificial Sequence: Synthetic oligonucleotide
  Sense Strand Starting at position 893 of SEQ ID NO: 317873
gugauuuagccuuggcaau

SEQ ID NO: 389046 - RNA, 19 nt, Artificial Sequence
  Description of Artificial Sequence: Synthetic oligonucleotide
  Antisense Strand to SEQ ID NO: 389045
auugccaaggcuaaaucac

SEQ ID NO: 389047 - RNA, 19 nt, Artificial Sequence
  Description of Artificial Sequence: Synthetic oligonucleotide
  Sense Strand Starting at position 893 of SEQ ID NO: 317901
gcuggaaacacuugggcau

SEQ ID NO: 389048 - RNA, 19 nt, Artificial Sequence
  Description of Artificial Sequence: Synthetic oligonucleotide
  Antisense Strand to SEQ ID NO: 389047
augcccaaguguuuccagc

SEQ ID NO: 389049 - RNA, 19 nt, Artificial Sequence
  Description of Artificial Sequence: Synthetic oligonucleotide
  Sense Strand Starting at position 893 of SEQ ID NO: 317914
gggcauagggcccagaaau

SEQ ID NO: 389050 - RNA, 19 nt, Artificial Sequence
  Description of Artificial Sequence: Synthetic oligonucleotide
  Antisense Strand to SEQ ID NO: 389049
auuucugggcccuaugccc

SEQ ID NO: 389051 - RNA, 19 nt, Artificial Sequence
  Description of Artificial Sequence: Synthetic oligonucleotide
  Sense Strand Starting at position 893 of SEQ ID NO: 318169
guccucugaccuuauaaag

SEQ ID NO: 389052 - RNA, 19 nt, Artificial Sequence
  Description of Artificial Sequence: Synthetic oligonucleotide
  Antisense Strand to SEQ ID NO: 389051
cuuuauaaggucagaggac

SEQ ID NO: 389053 - RNA, 19 nt, Artificial Sequence
  Description of Artificial Sequence: Synthetic oligonucleotide
  Sense Strand Starting at position 893 of SEQ ID NO: 318212
uugauuaagcucugaggag

SEQ ID NO: 389054 - RNA, 19 nt, Artificial Sequence
  Description of Artificial Sequence: Synthetic oligonucleotide
  Antisense Strand to SEQ ID NO: 389053
cuccucagagcuuaaucaa

SEQ ID NO: 389055 - RNA, 19 nt, Artificial Sequence
  Description of Artificial Sequence: Synthetic oligonucleotide
  Sense Strand Starting at position 893 of SEQ ID NO: 318224
ugaggaguacuuggcagaa

SEQ ID NO: 389056 - RNA, 19 nt, Artificial Sequence
  Description of Artificial Sequence: Synthetic oligonucleotide
  Antisense Strand to SEQ ID NO: 389055
uucugccaaguacuccuca

SEQ ID NO: 389057 - RNA, 19 nt, Artificial Sequence
  Description of Artificial Sequence: Synthetic oligonucleotide
  Sense Strand Starting at position 893 of SEQ ID NO: 318244
cccauugugggagaagguu

SEQ ID NO: 389058 - RNA, 19 nt, Artificial Sequence
  Description of Artificial Sequence: Synthetic oligonucleotide
  Antisense Strand to SEQ ID NO: 389057
aaccuucucccacaauggg

SEQ ID NO: 389059 - RNA, 19 nt, Artificial Sequence
  Description of Artificial Sequence: Synthetic oligonucleotide
  Sense Strand Starting at position 893 of SEQ ID NO: 318367
cuguucuucucaguaauaa

SEQ ID NO: 389060 - RNA, 19 nt, Artificial Sequence
  Description of Artificial Sequence: Synthetic oligonucleotide
  Antisense Strand to SEQ ID NO: 389059
uuauuacugagaagaacag

SEQ ID NO: 389061 - RNA, 19 nt, Artificial Sequence
  Description of Artificial Sequence: Synthetic oligonucleotide
  Sense Strand Starting at position 893 of SEQ ID NO: 318368
uguucuucucaguaauaau

SEQ ID NO: 389062 - RNA, 19 nt, Artificial Sequence
  Description of Artificial Sequence: Synthetic oligonucleotide
  Antisense Strand to SEQ ID NO: 389061
auuauuacugagaagaaca

SEQ ID NO: 389063 - RNA, 19 nt, Artificial Sequence
  Description of Artificial Sequence: Synthetic oligonucleotide
  Sense Strand Starting at position 893 of SEQ ID NO: 318655
gcuuaaaggcauuguuaag

SEQ ID NO: 389064 - RNA, 19 nt, Artificial Sequence
  Description of Artificial Sequence: Synthetic oligonucleotide
  Antisense Strand to SEQ ID NO: 389063
cuuaacaaugccuuuaagc

SEQ ID NO: 389065 - RNA, 19 nt, Artificial Sequence
  Description of Artificial Sequence: Synthetic oligonucleotide
  Sense Strand Starting at position 893 of SEQ ID NO: 318965
cggcauguuaccuuuguuu

SEQ ID NO: 389066 - RNA, 19 nt, Artificial Sequence
  Description of Artificial Sequence: Synthetic oligonucleotide
  Antisense Strand to SEQ ID NO: 389065
aaacaaagguaacaugccg

SEQ ID NO: 389067 - RNA, 19 nt, Artificial Sequence
  Description of Artificial Sequence: Synthetic oligonucleotide
  Sense Strand Starting at position 893 of SEQ ID NO: 318999
ggccaaguaauugagcuua

SEQ ID NO: 389068 - RNA, 19 nt, Artificial Sequence
  Description of Artificial Sequence: Synthetic oligonucleotide
  Antisense Strand to SEQ ID NO: 389067
uaagcucaauuacuuggcc

SEQ ID NO: 389069 - RNA, 19 nt, Artificial Sequence
  Description of Artificial Sequence: Synthetic oligonucleotide
  Sense Strand Starting at position 893 of SEQ ID NO: 319001
ccaaguaauugagcuuaug

SEQ ID NO: 389070 - RNA, 19 nt, Artificial Sequence
  Description of Artificial Sequence: Synthetic oligonucleotide
  Antisense Strand to SEQ ID NO: 389069
cauaagcucaauuacuugg

SEQ ID NO: 389071 - RNA, 19 nt, Artificial Sequence
  Description of Artificial Sequence: Synthetic oligonucleotide
  Sense Strand Starting at position 893 of SEQ ID NO: 319004
aguaauugagcuuaugaau

SEQ ID NO: 389072 - RNA, 19 nt, Artificial Sequence
  Description of Artificial Sequence: Synthetic oligonucleotide
  Antisense Strand to SEQ ID NO: 389071
auucauaagcucaauuacu

SEQ ID NO: 389073 - RNA, 19 nt, Artificial Sequence
  Description of Artificial Sequence: Synthetic oligonucleotide
  Sense Strand Starting at position 893 of SEQ ID NO: 319010
ugagcuuaugaauguaaac

SEQ ID NO: 389074 - RNA, 19 nt, Artificial Sequence
  Description of Artificial Sequence: Synthetic oligonucleotide
  Antisense Strand to SEQ ID NO: 389073
guuuacauucauaagcuca

SEQ ID NO: 389075 - RNA, 19 nt, Artificial Sequence
  Description of Artificial Sequence: Synthetic oligonucleotide
  Sense Strand Starting at position 893 of SEQ ID NO: 319084
gaaacauauugcuuugagg

SEQ ID NO: 389076 - RNA, 19 nt, Artificial Sequence
  Description of Artificial Sequence: Synthetic oligonucleotide
  Antisense Strand to SEQ ID NO: 389075
ccucaaagcaauauguuuc

SEQ ID NO: 389077 - RNA, 19 nt, Artificial Sequence
  Description of Artificial Sequence: Synthetic oligonucleotide
  Sense Strand Starting at position 893 of SEQ ID NO: 319090
uauugcuuugagggauuaa

SEQ ID NO: 389078 - RNA, 19 nt, Artificial Sequence
  Description of Artificial Sequence: Synthetic oligonucleotide
  Antisense Strand to SEQ ID NO: 389077
uuaaucccucaaagcaaua

SEQ ID NO: 389079 - RNA, 19 nt, Artificial Sequence
  Description of Artificial Sequence: Synthetic oligonucleotide
  Sense Strand Starting at position 893 of SEQ ID NO: 319214
ccuggacauuucgagggau

SEQ ID NO: 389080 - RNA, 19 nt, Artificial Sequence
  Description of Artificial Sequence: Synthetic oligonucleotide
  Antisense Strand to SEQ ID NO: 389079
aucccucgaaauguccagg

SEQ ID NO: 389081 - RNA, 19 nt, Artificial Sequence
  Description of Artificial Sequence: Synthetic oligonucleotide
  Sense Strand Starting at position 894 of SEQ ID NO: 315329
ggauaauuaguguggcuaa

SEQ ID NO: 389082 - RNA, 19 nt, Artificial Sequence
  Description of Artificial Sequence: Synthetic oligonucleotide
  Antisense Strand to SEQ ID NO: 389081
uuagccacacuaauuaucc

SEQ ID NO: 389083 - RNA, 19 nt, Artificial Sequence
  Description of Artificial Sequence: Synthetic oligonucleotide
  Sense Strand Starting at position 894 of SEQ ID NO: 315405
ccuuaacugggucauugau

SEQ ID NO: 389084 - RNA, 19 nt, Artificial Sequence
  Description of Artificial Sequence: Synthetic oligonucleotide
  Antisense Strand to SEQ ID NO: 389083
aucaaugacccaguuaagg

SEQ ID NO: 389085 - RNA, 19 nt, Artificial Sequence
  Description of Artificial Sequence: Synthetic oligonucleotide
  Sense Strand Starting at position 894 of SEQ ID NO: 315430
ggucauuaauaagauuucu

SEQ ID NO: 389086 - RNA, 19 nt, Artificial Sequence
  Description of Artificial Sequence: Synthetic oligonucleotide
  Antisense Strand to SEQ ID NO: 389085
agaaaucuuauuaaugacc

SEQ ID NO: 389087 - RNA, 19 nt, Artificial Sequence
  Description of Artificial Sequence: Synthetic oligonucleotide
  Sense Strand Starting at position 894 of SEQ ID NO: 315486
caauguccgcaguuuguau

SEQ ID NO: 389088 - RNA, 19 nt, Artificial Sequence
  Description of Artificial Sequence: Synthetic oligonucleotide
  Antisense Strand to SEQ ID NO: 389087
auacaaacugcggacauug

SEQ ID NO: 389089 - RNA, 19 nt, Artificial Sequence
  Description of Artificial Sequence: Synthetic oligonucleotide
  Sense Strand Starting at position 894 of SEQ ID NO: 315543
ccuaaaugggucuagguuu

SEQ ID NO: 389090 - RNA, 19 nt, Artificial Sequence
  Description of Artificial Sequence: Synthetic oligonucleotide
  Antisense Strand to SEQ ID NO: 389089
aaaccuagacccauuuagg

SEQ ID NO: 389091 - RNA, 19 nt, Artificial Sequence
  Description of Artificial Sequence: Synthetic oligonucleotide
  Sense Strand Starting at position 894 of SEQ ID NO: 315665
guaagccaucuagacuaca

SEQ ID NO: 389092 - RNA, 19 nt, Artificial Sequence
  Description of Artificial Sequence: Synthetic oligonucleotide
  Antisense Strand to SEQ ID NO: 389091
uguagucuagauggcuuac

SEQ ID NO: 389093 - RNA, 19 nt, Artificial Sequence
  Description of Artificial Sequence: Synthetic oligonucleotide
  Sense Strand Starting at position 894 of SEQ ID NO: 315687
gucuauuaacagugaggaa

SEQ ID NO: 389094 - RNA, 19 nt, Artificial Sequence
  Description of Artificial Sequence: Synthetic oligonucleotide
  Antisense Strand to SEQ ID NO: 389093
uuccucacuguuaauagac

SEQ ID NO: 389095 - RNA, 19 nt, Artificial Sequence
  Description of Artificial Sequence: Synthetic oligonucleotide
  Sense Strand Starting at position 894 of SEQ ID NO: 316061
auauguuuguucuuccaca

SEQ ID NO: 389096 - RNA, 19 nt, Artificial Sequence
  Description of Artificial Sequence: Synthetic oligonucleotide
  Antisense Strand to SEQ ID NO: 389095
uguggaagaacaaacauau

SEQ ID NO: 389097 - RNA, 19 nt, Artificial Sequence
  Description of Artificial Sequence: Synthetic oligonucleotide
  Sense Strand Starting at position 894 of SEQ ID NO: 316123
uuaggauucuacuuauacg

SEQ ID NO: 389098 - RNA, 19 nt, Artificial Sequence
  Description of Artificial Sequence: Synthetic oligonucleotide
  Antisense Strand to SEQ ID NO: 389097
cguauaaguagaauccuaa

SEQ ID NO: 389099 - RNA, 19 nt, Artificial Sequence
  Description of Artificial Sequence: Synthetic oligonucleotide
  Sense Strand Starting at position 894 of SEQ ID NO: 316235
ucucaauuguguguuauuu

SEQ ID NO: 389100 - RNA, 19 nt, Artificial Sequence
  Description of Artificial Sequence: Synthetic oligonucleotide
  Antisense Strand to SEQ ID NO: 389099
aaauaacacacaauugaga

SEQ ID NO: 389101 - RNA, 19 nt, Artificial Sequence
  Description of Artificial Sequence: Synthetic oligonucleotide
  Sense Strand Starting at position 894 of SEQ ID NO: 316332
guaugaugcaauuggaaac

SEQ ID NO: 389102 - RNA, 19 nt, Artificial Sequence
  Description of Artificial Sequence: Synthetic oligonucleotide
  Antisense Strand to SEQ ID NO: 389101
guuuccaauugcaucauac

SEQ ID NO: 389103 - RNA, 19 nt, Artificial Sequence
  Description of Artificial Sequence: Synthetic oligonucleotide
  Sense Strand Starting at position 894 of SEQ ID NO: 316385
caguguuuccuauggacau

SEQ ID NO: 389104 - RNA, 19 nt, Artificial Sequence
  Description of Artificial Sequence: Synthetic oligonucleotide
  Antisense Strand to SEQ ID NO: 389103
auguccauaggaaacacug

SEQ ID NO: 389105 - RNA, 19 nt, Artificial Sequence
  Description of Artificial Sequence: Synthetic oligonucleotide
  Sense Strand Starting at position 894 of SEQ ID NO: 316455
uugucacucgcccauagaa

SEQ ID NO: 389106 - RNA, 19 nt, Artificial Sequence
  Description of Artificial Sequence: Synthetic oligonucleotide
  Antisense Strand to SEQ ID NO: 389105
uucuaugggcgagugacaa

SEQ ID NO: 389107 - RNA, 19 nt, Artificial Sequence
  Description of Artificial Sequence: Synthetic oligonucleotide
  Sense Strand Starting at position 894 of SEQ ID NO: 316457
gucacucgcccauagaauu

SEQ ID NO: 389108 - RNA, 19 nt, Artificial Sequence
  Description of Artificial Sequence: Synthetic oligonucleotide
  Antisense Strand to SEQ ID NO: 389107
aauucuaugggcgagugac

SEQ ID NO: 389109 - RNA, 19 nt, Artificial Sequence
  Description of Artificial Sequence: Synthetic oligonucleotide
  Sense Strand Starting at position 894 of SEQ ID NO: 316484
ugucacagaguguaaugau

SEQ ID NO: 389110 - RNA, 19 nt, Artificial Sequence
  Description of Artificial Sequence: Synthetic oligonucleotide
  Antisense Strand to SEQ ID NO: 389109
aucauuacacucugugaca

SEQ ID NO: 389111 - RNA, 19 nt, Artificial Sequence
  Description of Artificial Sequence: Synthetic oligonucleotide
  Sense Strand Starting at position 894 of SEQ ID NO: 316493
guguaaugauuagcauucu

SEQ ID NO: 389112 - RNA, 19 nt, Artificial Sequence
  Description of Artificial Sequence: Synthetic oligonucleotide
  Antisense Strand to SEQ ID NO: 389111
agaaugcuaaucauuacac

SEQ ID NO: 389113 - RNA, 19 nt, Artificial Sequence
  Description of Artificial Sequence: Synthetic oligonucleotide
  Sense Strand Starting at position 894 of SEQ ID NO: 316551
acagcuauccaugagagca

SEQ ID NO: 389114 - RNA, 19 nt, Artificial Sequence
  Description of Artificial Sequence: Synthetic oligonucleotide
  Antisense Strand to SEQ ID NO: 389113
ugcucucauggauagcugu

SEQ ID NO: 389115 - RNA, 19 nt, Artificial Sequence
  Description of Artificial Sequence: Synthetic oligonucleotide
  Sense Strand Starting at position 894 of SEQ ID NO: 316578
gauggagguuguguucuau

SEQ ID NO: 389116 - RNA, 19 nt, Artificial Sequence
  Description of Artificial Sequence: Synthetic oligonucleotide
  Antisense Strand to SEQ ID NO: 389115
auagaacacaaccuccauc

SEQ ID NO: 389117 - RNA, 19 nt, Artificial Sequence
  Description of Artificial Sequence: Synthetic oligonucleotide
  Sense Strand Starting at position 894 of SEQ ID NO: 316639
cccuuuaagcaguaucaag

SEQ ID NO: 389118 - RNA, 19 nt, Artificial Sequence
  Description of Artificial Sequence: Synthetic oligonucleotide
  Antisense Strand to SEQ ID NO: 389117
cuugauacugcuuaaaggg

SEQ ID NO: 389119 - RNA, 19 nt, Artificial Sequence
  Description of Artificial Sequence: Synthetic oligonucleotide
  Sense Strand Starting at position 894 of SEQ ID NO: 316653
ucaaguuuggugcauuaua

SEQ ID NO: 389120 - RNA, 19 nt, Artificial Sequence
  Description of Artificial Sequence: Synthetic oligonucleotide
  Antisense Strand to SEQ ID NO: 389119
uauaaugcaccaaacuuga

SEQ ID NO: 389121 - RNA, 19 nt, Artificial Sequence
  Description of Artificial Sequence: Synthetic oligonucleotide
  Sense Strand Starting at position 894 of SEQ ID NO: 316833
guuugccagaauuggaaau

SEQ ID NO: 389122 - RNA, 19 nt, Artificial Sequence
  Description of Artificial Sequence: Synthetic oligonucleotide
  Antisense Strand to SEQ ID NO: 389121
auuuccaauucuggcaaac

SEQ ID NO: 389123 - RNA, 19 nt, Artificial Sequence
  Description of Artificial Sequence: Synthetic oligonucleotide
  Sense Strand Starting at position 894 of SEQ ID NO: 316858
gagggauucucuccuguca

SEQ ID NO: 389124 - RNA, 19 nt, Artificial Sequence
  Description of Artificial Sequence: Synthetic oligonucleotide
  Antisense Strand to SEQ ID NO: 389123
ugacaggagagaaucccuc

SEQ ID NO: 389125 - RNA, 19 nt, Artificial Sequence
  Description of Artificial Sequence: Synthetic oligonucleotide
  Sense Strand Starting at position 894 of SEQ ID NO: 316883
ccacucgcugagcaauuaa

SEQ ID NO: 389126 - RNA, 19 nt, Artificial Sequence
  Description of Artificial Sequence: Synthetic oligonucleotide
  Antisense Strand to SEQ ID NO: 389125
uuaauugcucagcgagugg

SEQ ID NO: 389127 - RNA, 19 nt, Artificial Sequence
  Description of Artificial Sequence: Synthetic oligonucleotide
  Sense Strand Starting at position 894 of SEQ ID NO: 317381
guuguacuggcagaggaaa

SEQ ID NO: 389128 - RNA, 19 nt, Artificial Sequence
  Description of Artificial Sequence: Synthetic oligonucleotide
  Antisense Strand to SEQ ID NO: 389127
uuuccucugccaguacaac

SEQ ID NO: 389129 - RNA, 19 nt, Artificial Sequence
  Description of Artificial Sequence: Synthetic oligonucleotide
  Sense Strand Starting at position 894 of SEQ ID NO: 317588
gagcgucuuccuggaagag

SEQ ID NO: 389130 - RNA, 19 nt, Artificial Sequence
  Description of Artificial Sequence: Synthetic oligonucleotide
  Antisense Strand to SEQ ID NO: 389129
cucuuccaggaagacgcuc

SEQ ID NO: 389131 - RNA, 19 nt, Artificial Sequence
  Description of Artificial Sequence: Synthetic oligonucleotide
  Sense Strand Starting at position 894 of SEQ ID NO: 317667
auaaguugucacuacucua

SEQ ID NO: 389132 - RNA, 19 nt, Artificial Sequence
  Description of Artificial Sequence: Synthetic oligonucleotide
  Antisense Strand to SEQ ID NO: 389131
uagaguagugacaacuuau

SEQ ID NO: 389133 - RNA, 19 nt, Artificial Sequence
  Description of Artificial Sequence: Synthetic oligonucleotide
  Sense Strand Starting at position 894 of SEQ ID NO: 317670
aguugucacuacucuaaua

SEQ ID NO: 389134 - RNA, 19 nt, Artificial Sequence
  Description of Artificial Sequence: Synthetic oligonucleotide
  Antisense Strand to SEQ ID NO: 389133
uauuagaguagugacaacu

SEQ ID NO: 389135 - RNA, 19 nt, Artificial Sequence
  Description of Artificial Sequence: Synthetic oligonucleotide
  Sense Strand Starting at position 894 of SEQ ID NO: 317763
gggagcuuuguucauagau

SEQ ID NO: 389136 - RNA, 19 nt, Artificial Sequence
  Description of Artificial Sequence: Synthetic oligonucleotide
  Antisense Strand to SEQ ID NO: 389135
aucuaugaacaaagcuccc

SEQ ID NO: 389137 - RNA, 19 nt, Artificial Sequence
  Description of Artificial Sequence: Synthetic oligonucleotide
  Sense Strand Starting at position 894 of SEQ ID NO: 317776
auagauuacugcgccuaga

SEQ ID NO: 389138 - RNA, 19 nt, Artificial Sequence
  Description of Artificial Sequence: Synthetic oligonucleotide
  Antisense Strand to SEQ ID NO: 389137
ucuaggcgcaguaaucuau

SEQ ID NO: 389139 - RNA, 19 nt, Artificial Sequence
  Description of Artificial Sequence: Synthetic oligonucleotide
  Sense Strand Starting at position 894 of SEQ ID NO: 318176
guccuuggcuuggugauuu

SEQ ID NO: 389140 - RNA, 19 nt, Artificial Sequence
  Description of Artificial Sequence: Synthetic oligonucleotide
  Antisense Strand to SEQ ID NO: 389139
aaaucaccaagccaaggac

SEQ ID NO: 389141 - RNA, 19 nt, Artificial Sequence
  Description of Artificial Sequence: Synthetic oligonucleotide
  Sense Strand Starting at position 894 of SEQ ID NO: 318188
gugauuuagccuuggcaau

SEQ ID NO: 389142 - RNA, 19 nt, Artificial Sequence
  Description of Artificial Sequence: Synthetic oligonucleotide
  Antisense Strand to SEQ ID NO: 389141
auugccaaggcuaaaucac

SEQ ID NO: 389143 - RNA, 19 nt, Artificial Sequence
  Description of Artificial Sequence: Synthetic oligonucleotide
  Sense Strand Starting at position 894 of SEQ ID NO: 318216
gcuggaaacacuugggcau

SEQ ID NO: 389144 - RNA, 19 nt, Artificial Sequence
  Description of Artificial Sequence: Synthetic oligonucleotide
  Antisense Strand to SEQ ID NO: 389143
augcccaaguguuuccagc

SEQ ID NO: 389145 - RNA, 19 nt, Artificial Sequence
  Description of Artificial Sequence: Synthetic oligonucleotide
  Sense Strand Starting at position 894 of SEQ ID NO: 318229
gggcauagggcccagaaau

SEQ ID NO: 389146 - RNA, 19 nt, Artificial Sequence
  Description of Artificial Sequence: Synthetic oligonucleotide
  Antisense Strand to SEQ ID NO: 389145
auuucugggcccuaugccc

SEQ ID NO: 389147 - RNA, 19 nt, Artificial Sequence
  Description of Artificial Sequence: Synthetic oligonucleotide
  Sense Strand Starting at position 894 of SEQ ID NO: 318484
guccucugaccuuauaaag

SEQ ID NO: 389148 - RNA, 19 nt, Artificial Sequence
  Description of Artificial Sequence: Synthetic oligonucleotide
  Antisense Strand to SEQ ID NO: 389147
cuuuauaaggucagaggac

SEQ ID NO: 389149 - RNA, 19 nt, Artificial Sequence
  Description of Artificial Sequence: Synthetic oligonucleotide
  Sense Strand Starting at position 894 of SEQ ID NO: 318527
uugauuaagcucugaggag

SEQ ID NO: 389150 - RNA, 19 nt, Artificial Sequence
  Description of Artificial Sequence: Synthetic oligonucleotide
  Antisense Strand to SEQ ID NO: 389149
cuccucagagcuuaaucaa

SEQ ID NO: 389151 - RNA, 19 nt, Artificial Sequence
  Description of Artificial Sequence: Synthetic oligonucleotide
  Sense Strand Starting at position 894 of SEQ ID NO: 318539
ugaggaguacuuggcagaa

SEQ ID NO: 389152 - RNA, 19 nt, Artificial Sequence
  Description of Artificial Sequence: Synthetic oligonucleotide
  Antisense Strand to SEQ ID NO: 389151
uucugccaaguacuccuca

SEQ ID NO: 389153 - RNA, 19 nt, Artificial Sequence
  Description of Artificial Sequence: Synthetic oligonucleotide
  Sense Strand Starting at position 894 of SEQ ID NO: 318559
cccauugugggagaagguu

SEQ ID NO: 389154 - RNA, 19 nt, Artificial Sequence
  Description of Artificial Sequence: Synthetic oligonucleotide
  Antisense Strand to SEQ ID NO: 389153
aaccuucucccacaauggg

SEQ ID NO: 389155 - RNA, 19 nt, Artificial Sequence
  Description of Artificial Sequence: Synthetic oligonucleotide
  Sense Strand Starting at position 894 of SEQ ID NO: 318682
cuguucuucucaguaauaa

SEQ ID NO: 389156 - RNA, 19 nt, Artificial Sequence
  Description of Artificial Sequence: Synthetic oligonucleotide
  Antisense Strand to SEQ ID NO: 389155
uuauuacugagaagaacag

SEQ ID NO: 389157 - RNA, 19 nt, Artificial Sequence
  Description of Artificial Sequence: Synthetic oligonucleotide
  Sense Strand Starting at position 894 of SEQ ID NO: 318683
uguucuucucaguaauaau

SEQ ID NO: 389158 - RNA, 19 nt, Artificial Sequence
  Description of Artificial Sequence: Synthetic oligonucleotide
  Antisense Strand to SEQ ID NO: 389157
auuauuacugagaagaaca

SEQ ID NO: 389159 - RNA, 19 nt, Artificial Sequence
  Description of Artificial Sequence: Synthetic oligonucleotide
  Sense Strand Starting at position 894 of SEQ ID NO: 318970
gcuuaaaggcauuguuaag

SEQ ID NO: 389160 - RNA, 19 nt, Artificial Sequence
  Description of Artificial Sequence: Synthetic oligonucleotide
  Antisense Strand to SEQ ID NO: 389159
cuuaacaaugccuuuaagc

SEQ ID NO: 389161 - RNA, 19 nt, Artificial Sequence
  Description of Artificial Sequence: Synthetic oligonucleotide
  Sense Strand Starting at position 895 of SEQ ID NO: 315451
gcgcuuaaagcagauauuu

SEQ ID NO: 389162 - RNA, 19 nt, Artificial Sequence
  Description of Artificial Sequence: Synthetic oligonucleotide
  Antisense Strand to SEQ ID NO: 389161
aaauaucugcuuuaagcgc

SEQ ID NO: 389163 - RNA, 19 nt, Artificial Sequence
  Description of Artificial Sequence: Synthetic oligonucleotide
  Sense Strand Starting at position 895 of SEQ ID NO: 315643
aaacuuagagaguguaacu

SEQ ID NO: 389164 - RNA, 19 nt, Artificial Sequence
  Description of Artificial Sequence: Synthetic oligonucleotide
  Antisense Strand to SEQ ID NO: 389163
aguuacacucucuaaguuu

SEQ ID NO: 389165 - RNA, 19 nt, Artificial Sequence
  Description of Artificial Sequence: Synthetic oligonucleotide
  Sense Strand Starting at position 895 of SEQ ID NO: 315648
uagagaguguaacuggauu

SEQ ID NO: 389166 - RNA, 19 nt, Artificial Sequence
  Description of Artificial Sequence: Synthetic oligonucleotide
  Antisense Strand to SEQ ID NO: 389165
aauccaguuacacucucua

SEQ ID NO: 389167 - RNA, 19 nt, Artificial Sequence
  Description of Artificial Sequence: Synthetic oligonucleotide
  Sense Strand Starting at position 895 of SEQ ID NO: 315656
guaacuggauugucuguaa

SEQ ID NO: 389168 - RNA, 19 nt, Artificial Sequence
  Description of Artificial Sequence: Synthetic oligonucleotide
  Antisense Strand to SEQ ID NO: 389167
uuacagacaauccaguuac

SEQ ID NO: 389169 - RNA, 19 nt, Artificial Sequence
  Description of Artificial Sequence: Synthetic oligonucleotide
  Sense Strand Starting at position 895 of SEQ ID NO: 315681
ggcugaaugcuugauggga

SEQ ID NO: 389170 - RNA, 19 nt, Artificial Sequence
  Description of Artificial Sequence: Synthetic oligonucleotide
  Antisense Strand to SEQ ID NO: 389169
ucccaucaagcauucagcc

SEQ ID NO: 389171 - RNA, 19 nt, Artificial Sequence
  Description of Artificial Sequence: Synthetic oligonucleotide
  Sense Strand Starting at position 895 of SEQ ID NO: 315685
gaaugcuugaugggaugga

SEQ ID NO: 389172 - RNA, 19 nt, Artificial Sequence
  Description of Artificial Sequence: Synthetic oligonucleotide
  Antisense Strand to SEQ ID NO: 389171
uccaucccaucaagcauuc

SEQ ID NO: 389173 - RNA, 19 nt, Artificial Sequence
  Description of Artificial Sequence: Synthetic oligonucleotide
  Sense Strand Starting at position 895 of SEQ ID NO: 315850
uuucuaacuuaugugugaa

SEQ ID NO: 389174 - RNA, 19 nt, Artificial Sequence
  Description of Artificial Sequence: Synthetic oligonucleotide
  Antisense Strand to SEQ ID NO: 389173
uucacacauaaguuagaaa

SEQ ID NO: 389175 - RNA, 19 nt, Artificial Sequence
  Description of Artificial Sequence: Synthetic oligonucleotide
  Sense Strand Starting at position 895 of SEQ ID NO: 315908
uguccuuguguuuaacauu

SEQ ID NO: 389176 - RNA, 19 nt, Artificial Sequence
  Description of Artificial Sequence: Synthetic oligonucleotide
  Antisense Strand to SEQ ID NO: 389175
aauguuaaacacaaggaca

SEQ ID NO: 389177 - RNA, 19 nt, Artificial Sequence
  Description of Artificial Sequence: Synthetic oligonucleotide
  Sense Strand Starting at position 895 of SEQ ID NO: 316059
caacaugcuccugggaguu

SEQ ID NO: 389178 - RNA, 19 nt, Artificial Sequence
  Description of Artificial Sequence: Synthetic oligonucleotide
  Antisense Strand to SEQ ID NO: 389177
aacucccaggagcauguug

SEQ ID NO: 389179 - RNA, 19 nt, Artificial Sequence
  Description of Artificial Sequence: Synthetic oligonucleotide
  Sense Strand Starting at position 895 of SEQ ID NO: 316065
gcuccugggaguuaagauu

SEQ ID NO: 389180 - RNA, 19 nt, Artificial Sequence
  Description of Artificial Sequence: Synthetic oligonucleotide
  Antisense Strand to SEQ ID NO: 389179
aaucuuaacucccaggagc

SEQ ID NO: 389181 - RNA, 19 nt, Artificial Sequence
  Description of Artificial Sequence: Synthetic oligonucleotide
  Sense Strand Starting at position 895 of SEQ ID NO: 316145
guaacacauccacaauugu

SEQ ID NO: 389182 - RNA, 19 nt, Artificial Sequence
  Description of Artificial Sequence: Synthetic oligonucleotide
  Antisense Strand to SEQ ID NO: 389181
acaauuguggauguguuac

SEQ ID NO: 389183 - RNA, 19 nt, Artificial Sequence
  Description of Artificial Sequence: Synthetic oligonucleotide
  Sense Strand Starting at position 895 of SEQ ID NO: 316225
aggccaugaagaugucuga

SEQ ID NO: 389184 - RNA, 19 nt, Artificial Sequence
  Description of Artificial Sequence: Synthetic oligonucleotide
  Antisense Strand to SEQ ID NO: 389183
ucagacaucuucauggccu

SEQ ID NO: 389185 - RNA, 19 nt, Artificial Sequence
  Description of Artificial Sequence: Synthetic oligonucleotide
  Sense Strand Starting at position 895 of SEQ ID NO: 316228
ccaugaagaugucugaguc

SEQ ID NO: 389186 - RNA, 19 nt, Artificial Sequence
  Description of Artificial Sequence: Synthetic oligonucleotide
  Antisense Strand to SEQ ID NO: 389185
gacucagacaucuucaugg

SEQ ID NO: 389187 - RNA, 19 nt, Artificial Sequence
  Description of Artificial Sequence: Synthetic oligonucleotide
  Sense Strand Starting at position 895 of SEQ ID NO: 316229
caugaagaugucugaguca

SEQ ID NO: 389188 - RNA, 19 nt, Artificial Sequence
  Description of Artificial Sequence: Synthetic oligonucleotide
  Antisense Strand to SEQ ID NO: 389187
ugacucagacaucuucaug

SEQ ID NO: 389189 - RNA, 19 nt, Artificial Sequence
  Description of Artificial Sequence: Synthetic oligonucleotide
  Sense Strand Starting at position 895 of SEQ ID NO: 316232
gaagaugucugagucacuu

SEQ ID NO: 389190 - RNA, 19 nt, Artificial Sequence
  Description of Artificial Sequence: Synthetic oligonucleotide
  Antisense Strand to SEQ ID NO: 389189
aagugacucagacaucuuc

SEQ ID NO: 389191 - RNA, 19 nt, Artificial Sequence
  Description of Artificial Sequence: Synthetic oligonucleotide
  Sense Strand Starting at position 895 of SEQ ID NO: 316337
guuugucugccucuuguca

SEQ ID NO: 389192 - RNA, 19 nt, Artificial Sequence
  Description of Artificial Sequence: Synthetic oligonucleotide
  Antisense Strand to SEQ ID NO: 389191
ugacaagaggcagacaaac

SEQ ID NO: 389193 - RNA, 19 nt, Artificial Sequence
  Description of Artificial Sequence: Synthetic oligonucleotide
  Sense Strand Starting at position 895 of SEQ ID NO: 316403
uggacuuuaucaguuugga

SEQ ID NO: 389194 - RNA, 19 nt, Artificial Sequence
  Description of Artificial Sequence: Synthetic oligonucleotide
  Antisense Strand to SEQ ID NO: 389193
uccaaacugauaaagucca

SEQ ID NO: 389195 - RNA, 19 nt, Artificial Sequence
  Description of Artificial Sequence: Synthetic oligonucleotide
  Sense Strand Starting at position 895 of SEQ ID NO: 316406
acuuuaucaguuuggacaa

SEQ ID NO: 389196 - RNA, 19 nt, Artificial Sequence
  Description of Artificial Sequence: Synthetic oligonucleotide
  Antisense Strand to SEQ ID NO: 389195
uuguccaaacugauaaagu

SEQ ID NO: 389197 - RNA, 19 nt, Artificial Sequence
  Description of Artificial Sequence: Synthetic oligonucleotide
  Sense Strand Starting at position 895 of SEQ ID NO: 316421
acaacagagugagaugaaa

SEQ ID NO: 389198 - RNA, 19 nt, Artificial Sequence
  Description of Artificial Sequence: Synthetic oligonucleotide
  Antisense Strand to SEQ ID NO: 389197
uuucaucucacucuguugu

SEQ ID NO: 389199 - RNA, 19 nt, Artificial Sequence
  Description of Artificial Sequence: Synthetic oligonucleotide
  Sense Strand Starting at position 895 of SEQ ID NO: 316429
gugagaugaaacugucaca

SEQ ID NO: 389200 - RNA, 19 nt, Artificial Sequence
  Description of Artificial Sequence: Synthetic oligonucleotide
  Antisense Strand to SEQ ID NO: 389199
ugugacaguuucaucucac

SEQ ID NO: 389201 - RNA, 19 nt, Artificial Sequence
  Description of Artificial Sequence: Synthetic oligonucleotide
  Sense Strand Starting at position 895 of SEQ ID NO: 316647
cuagaagucuccuuuccag

SEQ ID NO: 389202 - RNA, 19 nt, Artificial Sequence
  Description of Artificial Sequence: Synthetic oligonucleotide
  Antisense Strand to SEQ ID NO: 389201
cuggaaaggagacuucuag

SEQ ID NO: 389203 - RNA, 19 nt, Artificial Sequence
  Description of Artificial Sequence: Synthetic oligonucleotide
  Sense Strand Starting at position 895 of SEQ ID NO: 316659
uuuccagauucugugauaa

SEQ ID NO: 389204 - RNA, 19 nt, Artificial Sequence
  Description of Artificial Sequence: Synthetic oligonucleotide
  Antisense Strand to SEQ ID NO: 389203
uuaucacagaaucuggaaa

SEQ ID NO: 389205 - RNA, 19 nt, Artificial Sequence
  Description of Artificial Sequence: Synthetic oligonucleotide
  Sense Strand Starting at position 895 of SEQ ID NO: 316865
ugauuaaucagaggcauug

SEQ ID NO: 389206 - RNA, 19 nt, Artificial Sequence
  Description of Artificial Sequence: Synthetic oligonucleotide
  Antisense Strand to SEQ ID NO: 389205
caaugccucugauuaauca

SEQ ID NO: 389207 - RNA, 19 nt, Artificial Sequence
  Description of Artificial Sequence: Synthetic oligonucleotide
  Sense Strand Starting at position 895 of SEQ ID NO: 316871
aucagaggcauuggaauau

SEQ ID NO: 389208 - RNA, 19 nt, Artificial Sequence
  Description of Artificial Sequence: Synthetic oligonucleotide
  Antisense Strand to SEQ ID NO: 389207
auauuccaaugccucugau

SEQ ID NO: 389209 - RNA, 19 nt, Artificial Sequence
  Description of Artificial Sequence: Synthetic oligonucleotide
  Sense Strand Starting at position 895 of SEQ ID NO: 316973
ugcuguaaccuugacugga

SEQ ID NO: 389210 - RNA, 19 nt, Artificial Sequence
  Description of Artificial Sequence: Synthetic oligonucleotide
  Antisense Strand to SEQ ID NO: 389209
uccagucaagguuacagca

SEQ ID NO: 389211 - RNA, 19 nt, Artificial Sequence
  Description of Artificial Sequence: Synthetic oligonucleotide
  Sense Strand Starting at position 895 of SEQ ID NO: 317018
ccaggugaccauggagauu

SEQ ID NO: 389212 - RNA, 19 nt, Artificial Sequence
  Description of Artificial Sequence: Synthetic oligonucleotide
  Antisense Strand to SEQ ID NO: 389211
aaucuccauggucaccugg

SEQ ID NO: 389213 - RNA, 19 nt, Artificial Sequence
  Description of Artificial Sequence: Synthetic oligonucleotide
  Sense Strand Starting at position 895 of SEQ ID NO: 317080
guugaacaugcaggauaua

SEQ ID NO: 389214 - RNA, 19 nt, Artificial Sequence
  Description of Artificial Sequence: Synthetic oligonucleotide
  Antisense Strand to SEQ ID NO: 389213
uauauccugcauguucaac

SEQ ID NO: 389215 - RNA, 19 nt, Artificial Sequence
  Description of Artificial Sequence: Synthetic oligonucleotide
  Sense Strand Starting at position 895 of SEQ ID NO: 317149
ggagguauaccuugugaug

SEQ ID NO: 389216 - RNA, 19 nt, Artificial Sequence
  Description of Artificial Sequence: Synthetic oligonucleotide
  Antisense Strand to SEQ ID NO: 389215
caucacaagguauaccucc

SEQ ID NO: 389217 - RNA, 19 nt, Artificial Sequence
  Description of Artificial Sequence: Synthetic oligonucleotide
  Sense Strand Starting at position 895 of SEQ ID NO: 317889
aguagugcgcaauaaacau

SEQ ID NO: 389218 - RNA, 19 nt, Artificial Sequence
  Description of Artificial Sequence: Synthetic oligonucleotide
  Antisense Strand to SEQ ID NO: 389217
auguuuauugcgcacuacu

SEQ ID NO: 389219 - RNA, 19 nt, Artificial Sequence
  Description of Artificial Sequence: Synthetic oligonucleotide
  Sense Strand Starting at position 895 of SEQ ID NO: 318430
gcuaucaaacaagauguuu

SEQ ID NO: 389220 - RNA, 19 nt, Artificial Sequence
  Description of Artificial Sequence: Synthetic oligonucleotide
  Antisense Strand to SEQ ID NO: 389219
aaacaucuuguuugauagc

SEQ ID NO: 389221 - RNA, 19 nt, Artificial Sequence
  Description of Artificial Sequence: Synthetic oligonucleotide
  Sense Strand Starting at position 895 of SEQ ID NO: 318447
uuugaaauguggucagaau

SEQ ID NO: 389222 - RNA, 19 nt, Artificial Sequence
  Description of Artificial Sequence: Synthetic oligonucleotide
  Antisense Strand to SEQ ID NO: 389221
auucugaccacauuucaaa

SEQ ID NO: 389223 - RNA, 19 nt, Artificial Sequence
  Description of Artificial Sequence: Synthetic oligonucleotide
  Sense Strand Starting at position 895 of SEQ ID NO: 318580
auaugaugacaugggcaua

SEQ ID NO: 389224 - RNA, 19 nt, Artificial Sequence
  Description of Artificial Sequence: Synthetic oligonucleotide
  Antisense Strand to SEQ ID NO: 389223
uaugcccaugucaucauau

SEQ ID NO: 389225 - RNA, 19 nt, Artificial Sequence
  Description of Artificial Sequence: Synthetic oligonucleotide
  Sense Strand Starting at position 895 of SEQ ID NO: 318591
ugggcauaugacugacuga

SEQ ID NO: 389226 - RNA, 19 nt, Artificial Sequence
  Description of Artificial Sequence: Synthetic oligonucleotide
  Antisense Strand to SEQ ID NO: 389225
ucagucagucauaugccca

SEQ ID NO: 389227 - RNA, 19 nt, Artificial Sequence
  Description of Artificial Sequence: Synthetic oligonucleotide
  Sense Strand Starting at position 895 of SEQ ID NO: 318715
cucccugucuugccaaaga

SEQ ID NO: 389228 - RNA, 19 nt, Artificial Sequence
  Description of Artificial Sequence: Synthetic oligonucleotide
  Antisense Strand to SEQ ID NO: 389227
ucuuuggcaagacagggag

SEQ ID NO: 389229 - RNA, 19 nt, Artificial Sequence
  Description of Artificial Sequence: Synthetic oligonucleotide
  Sense Strand Starting at position 895 of SEQ ID NO: 318905
aggagaugcugcuccacaa

SEQ ID NO: 389230 - RNA, 19 nt, Artificial Sequence
  Description of Artificial Sequence: Synthetic oligonucleotide
  Antisense Strand to SEQ ID NO: 389229
uuguggagcagcaucuccu

SEQ ID NO: 389231 - RNA, 19 nt, Artificial Sequence
  Description of Artificial Sequence: Synthetic oligonucleotide
  Sense Strand Starting at position 895 of SEQ ID NO: 319003
gcugccuuccuagaagaac

SEQ ID NO: 389232 - RNA, 19 nt, Artificial Sequence
  Description of Artificial Sequence: Synthetic oligonucleotide
  Antisense Strand to SEQ ID NO: 389231
guucuucuaggaaggcagc

SEQ ID NO: 389233 - RNA, 19 nt, Artificial Sequence
  Description of Artificial Sequence: Synthetic oligonucleotide
  Sense Strand Starting at position 895 of SEQ ID NO: 319012
cuagaagaacgauggucau

SEQ ID NO: 389234 - RNA, 19 nt, Artificial Sequence
  Description of Artificial Sequence: Synthetic oligonucleotide
  Antisense Strand to SEQ ID NO: 389233
augaccaucguucuucuag

SEQ ID NO: 389235 - RNA, 19 nt, Artificial Sequence
  Description of Artificial Sequence: Synthetic oligonucleotide
  Sense Strand Starting at position 895 of SEQ ID NO: 319075
gaagcaucaguuugacuuu

SEQ ID NO: 389236 - RNA, 19 nt, Artificial Sequence
  Description of Artificial Sequence: Synthetic oligonucleotide
  Antisense Strand to SEQ ID NO: 389235
aaagucaaacugaugcuuc

SEQ ID NO: 389237 - RNA, 19 nt, Artificial Sequence
  Description of Artificial Sequence: Synthetic oligonucleotide
  Sense Strand Starting at position 895 of SEQ ID NO: 319150
ugucuaacacaguacugaa

SEQ ID NO: 389238 - RNA, 19 nt, Artificial Sequence
  Description of Artificial Sequence: Synthetic oligonucleotide
  Antisense Strand to SEQ ID NO: 389237
uucaguacuguguuagaca

SEQ ID NO: 389239 - RNA, 19 nt, Artificial Sequence
  Description of Artificial Sequence: Synthetic oligonucleotide
  Sense Strand Starting at position 895 of SEQ ID NO: 319175
agaucacaucgagggcauu

SEQ ID NO: 389240 - RNA, 19 nt, Artificial Sequence
  Description of Artificial Sequence: Synthetic oligonucleotide
  Antisense Strand to SEQ ID NO: 389239
aaugcccucgaugugaucu

SEQ ID NO: 389241 - RNA, 19 nt, Artificial Sequence
  Description of Artificial Sequence: Synthetic oligonucleotide
  Sense Strand Starting at position 896 of SEQ ID NO: 315451
ggucacuuucucugcaagu

SEQ ID NO: 389242 - RNA, 19 nt, Artificial Sequence
  Description of Artificial Sequence: Synthetic oligonucleotide
  Antisense Strand to SEQ ID NO: 389241
acuugcagagaaagugacc

SEQ ID NO: 389243 - RNA, 19 nt, Artificial Sequence
  Description of Artificial Sequence: Synthetic oligonucleotide
  Sense Strand Starting at position 896 of SEQ ID NO: 315452
gucacuuucucugcaaguu

SEQ ID NO: 389244 - RNA, 19 nt, Artificial Sequence
  Description of Artificial Sequence: Synthetic oligonucleotide
  Antisense Strand to SEQ ID NO: 389243
aacuugcagagaaagugac

SEQ ID NO: 389245 - RNA, 19 nt, Artificial Sequence
  Description of Artificial Sequence: Synthetic oligonucleotide
  Sense Strand Starting at position 896 of SEQ ID NO: 315566
acaagcgcuccauggaaau

SEQ ID NO: 389246 - RNA, 19 nt, Artificial Sequence
  Description of Artificial Sequence: Synthetic oligonucleotide
  Antisense Strand to SEQ ID NO: 389245
auuuccauggagcgcuugu

SEQ ID NO: 389247 - RNA, 19 nt, Artificial Sequence
  Description of Artificial Sequence: Synthetic oligonucleotide
  Sense Strand Starting at position 896 of SEQ ID NO: 315798
cccaucuucugaggcacaa

SEQ ID NO: 389248 - RNA, 19 nt, Artificial Sequence
  Description of Artificial Sequence: Synthetic oligonucleotide
  Antisense Strand to SEQ ID NO: 389247
uugugccucagaagauggg

SEQ ID NO: 389249 - RNA, 19 nt, Artificial Sequence
  Description of Artificial Sequence: Synthetic oligonucleotide
  Sense Strand Starting at position 896 of SEQ ID NO: 317348
uggcccaucccaugauauu

SEQ ID NO: 389250 - RNA, 19 nt, Artificial Sequence
  Description of Artificial Sequence: Synthetic oligonucleotide
  Antisense Strand to SEQ ID NO: 389249
aauaucaugggaugggcca

SEQ ID NO: 389251 - RNA, 19 nt, Artificial Sequence
  Description of Artificial Sequence: Synthetic oligonucleotide
  Sense Strand Starting at position 896 of SEQ ID NO: 317349
ggcccaucccaugauauua

SEQ ID NO: 389252 - RNA, 19 nt, Artificial Sequence
  Description of Artificial Sequence: Synthetic oligonucleotide
  Antisense Strand to SEQ ID NO: 389251
uaauaucaugggaugggcc

SEQ ID NO: 389253 - RNA, 19 nt, Artificial Sequence
  Description of Artificial Sequence: Synthetic oligonucleotide
  Sense Strand Starting at position 896 of SEQ ID NO: 317781
ccuacagaagcuugacaua

SEQ ID NO: 389254 - RNA, 19 nt, Artificial Sequence
  Description of Artificial Sequence: Synthetic oligonucleotide
  Antisense Strand to SEQ ID NO: 389253
uaugucaagcuucuguagg

SEQ ID NO: 389255 - RNA, 19 nt, Artificial Sequence
  Description of Artificial Sequence: Synthetic oligonucleotide
  Sense Strand Starting at position 896 of SEQ ID NO: 317784
acagaagcuugacauagau

SEQ ID NO: 389256 - RNA, 19 nt, Artificial Sequence
  Description of Artificial Sequence: Synthetic oligonucleotide
  Antisense Strand to SEQ ID NO: 389255
aucuaugucaagcuucugu

SEQ ID NO: 389257 - RNA, 19 nt, Artificial Sequence
  Description of Artificial Sequence: Synthetic oligonucleotide
  Sense Strand Starting at position 896 of SEQ ID NO: 317792
uugacauagaugggcuuua

SEQ ID NO: 389258 - RNA, 19 nt, Artificial Sequence
  Description of Artificial Sequence: Synthetic oligonucleotide
  Antisense Strand to SEQ ID NO: 389257
uaaagcccaucuaugucaa

SEQ ID NO: 389259 - RNA, 19 nt, Artificial Sequence
  Description of Artificial Sequence: Synthetic oligonucleotide
  Sense Strand Starting at position 896 of SEQ ID NO: 317913
agcaguucucacuguggau

SEQ ID NO: 389260 - RNA, 19 nt, Artificial Sequence
  Description of Artificial Sequence: Synthetic oligonucleotide
  Antisense Strand to SEQ ID NO: 389259
auccacagugagaacugcu

SEQ ID NO: 389261 - RNA, 19 nt, Artificial Sequence
  Description of Artificial Sequence: Synthetic oligonucleotide
  Sense Strand Starting at position 896 of SEQ ID NO: 318372
ccuggauugccaggguacu

SEQ ID NO: 389262 - RNA, 19 nt, Artificial Sequence
  Description of Artificial Sequence: Synthetic oligonucleotide
  Antisense Strand to SEQ ID NO: 389261
aguacccuggcaauccagg

SEQ ID NO: 389263 - RNA, 19 nt, Artificial Sequence
  Description of Artificial Sequence: Synthetic oligonucleotide
  Sense Strand Starting at position 896 of SEQ ID NO: 318590
cccuguuacucuguaggca

SEQ ID NO: 389264 - RNA, 19 nt, Artificial Sequence
  Description of Artificial Sequence: Synthetic oligonucleotide
  Antisense Strand to SEQ ID NO: 389263
ugccuacagaguaacaggg

SEQ ID NO: 389265 - RNA, 19 nt, Artificial Sequence
  Description of Artificial Sequence: Synthetic oligonucleotide
  Sense Strand Starting at position 896 of SEQ ID NO: 318947
auggaugccuucuccaagu

SEQ ID NO: 389266 - RNA, 19 nt, Artificial Sequence
  Description of Artificial Sequence: Synthetic oligonucleotide
  Antisense Strand to SEQ ID NO: 389265
acuuggagaaggcauccau

SEQ ID NO: 389267 - RNA, 19 nt, Artificial Sequence
  Description of Artificial Sequence: Synthetic oligonucleotide
  Sense Strand Starting at position 896 of SEQ ID NO: 319116
cgugaagggucucuauuac

SEQ ID NO: 389268 - RNA, 19 nt, Artificial Sequence
  Description of Artificial Sequence: Synthetic oligonucleotide
  Antisense Strand to SEQ ID NO: 389267
guaauagagacccuucacg

SEQ ID NO: 389269 - RNA, 19 nt, Artificial Sequence
  Description of Artificial Sequence: Synthetic oligonucleotide
  Sense Strand Starting at position 897 of SEQ ID NO: 315376
gccacuuggucucucaaag

SEQ ID NO: 389270 - RNA, 19 nt, Artificial Sequence
  Description of Artificial Sequence: Synthetic oligonucleotide
  Antisense Strand to SEQ ID NO: 389269
cuuugagagaccaaguggc

SEQ ID NO: 389271 - RNA, 19 nt, Artificial Sequence
  Description of Artificial Sequence: Synthetic oligonucleotide
  Sense Strand Starting at position 897 of SEQ ID NO: 315638
ugcccaacuucugucugua

SEQ ID NO: 389272 - RNA, 19 nt, Artificial Sequence
  Description of Artificial Sequence: Synthetic oligonucleotide
  Antisense Strand to SEQ ID NO: 389271
uacagacagaaguugggca

SEQ ID NO: 389273 - RNA, 19 nt, Artificial Sequence
  Description of Artificial Sequence: Synthetic oligonucleotide
  Sense Strand Starting at position 897 of SEQ ID NO: 315640
cccaacuucugucuguaga

SEQ ID NO: 389274 - RNA, 19 nt, Artificial Sequence
  Description of Artificial Sequence: Synthetic oligonucleotide
  Antisense Strand to SEQ ID NO: 389273
ucuacagacagaaguuggg

SEQ ID NO: 389275 - RNA, 19 nt, Artificial Sequence
  Description of Artificial Sequence: Synthetic oligonucleotide
  Sense Strand Starting at position 897 of SEQ ID NO: 315681
uggagcuguccucgacaac

SEQ ID NO: 389276 - RNA, 19 nt, Artificial Sequence
  Description of Artificial Sequence: Synthetic oligonucleotide
  Antisense Strand to SEQ ID NO: 389275
guugucgaggacagcucca

SEQ ID NO: 389277 - RNA, 19 nt, Artificial Sequence
  Description of Artificial Sequence: Synthetic oligonucleotide
  Sense Strand Starting at position 897 of SEQ ID NO: 315682
ggagcuguccucgacaaca

SEQ ID NO: 389278 - RNA, 19 nt, Artificial Sequence
  Description of Artificial Sequence: Synthetic oligonucleotide
  Antisense Strand to SEQ ID NO: 389277
uguugucgaggacagcucc

SEQ ID NO: 389279 - RNA, 19 nt, Artificial Sequence
  Description of Artificial Sequence: Synthetic oligonucleotide
  Sense Strand Starting at position 897 of SEQ ID NO: 315684
agcuguccucgacaacaaa

SEQ ID NO: 389280 - RNA, 19 nt, Artificial Sequence
  Description of Artificial Sequence: Synthetic oligonucleotide
  Antisense Strand to SEQ ID NO: 389279
uuuguugucgaggacagcu

SEQ ID NO: 389281 - RNA, 19 nt, Artificial Sequence
  Description of Artificial Sequence: Synthetic oligonucleotide
  Sense Strand Starting at position 897 of SEQ ID NO: 315828
ucacuacagaggugaguua

SEQ ID NO: 389282 - RNA, 19 nt, Artificial Sequence
  Description of Artificial Sequence: Synthetic oligonucleotide
  Antisense Strand to SEQ ID NO: 389281
uaacucaccucuguaguga

SEQ ID NO: 389283 - RNA, 19 nt, Artificial Sequence
  Description of Artificial Sequence: Synthetic oligonucleotide
  Sense Strand Starting at position 897 of SEQ ID NO: 315835
agaggugaguuauucauug

SEQ ID NO: 389284 - RNA, 19 nt, Artificial Sequence
  Description of Artificial Sequence: Synthetic oligonucleotide
  Antisense Strand to SEQ ID NO: 389283
caaugaauaacucaccucu

SEQ ID NO: 389285 - RNA, 19 nt, Artificial Sequence
  Description of Artificial Sequence: Synthetic oligonucleotide
  Sense Strand Starting at position 897 of SEQ ID NO: 315965
acuuaauaugucugugugu

SEQ ID NO: 389286 - RNA, 19 nt, Artificial Sequence
  Description of Artificial Sequence: Synthetic oligonucleotide
  Antisense Strand to SEQ ID NO: 389285
acacacagacauauuaagu

SEQ ID NO: 389287 - RNA, 19 nt, Artificial Sequence
  Description of Artificial Sequence: Synthetic oligonucleotide
  Sense Strand Starting at position 897 of SEQ ID NO: 316059
gccagaaagggcuguuacu

SEQ ID NO: 389288 - RNA, 19 nt, Artificial Sequence
  Description of Artificial Sequence: Synthetic oligonucleotide
  Antisense Strand to SEQ ID NO: 389287
aguaacagcccuuucuggc

SEQ ID NO: 389289 - RNA, 19 nt, Artificial Sequence
  Description of Artificial Sequence: Synthetic oligonucleotide
  Sense Strand Starting at position 897 of SEQ ID NO: 316266
ggcggagucgccagaguuu

SEQ ID NO: 389290 - RNA, 19 nt, Artificial Sequence
  Description of Artificial Sequence: Synthetic oligonucleotide
  Antisense Strand to SEQ ID NO: 389289
aaacucuggcgacuccgcc

SEQ ID NO: 389291 - RNA, 19 nt, Artificial Sequence
  Description of Artificial Sequence: Synthetic oligonucleotide
  Sense Strand Starting at position 897 of SEQ ID NO: 316295
ggagaaguguggucccaac

SEQ ID NO: 389292 - RNA, 19 nt, Artificial Sequence
  Description of Artificial Sequence: Synthetic oligonucleotide
  Antisense Strand to SEQ ID NO: 389291
guugggaccacacuucucc

SEQ ID NO: 389293 - RNA, 19 nt, Artificial Sequence
  Description of Artificial Sequence: Synthetic oligonucleotide
  Sense Strand Starting at position 897 of SEQ ID NO: 316541
gcuguuacccggagaccga

SEQ ID NO: 389294 - RNA, 19 nt, Artificial Sequence
  Description of Artificial Sequence: Synthetic oligonucleotide
  Antisense Strand to SEQ ID NO: 389293
ucggucuccggguaacagc

SEQ ID NO: 389295 - RNA, 19 nt, Artificial Sequence
  Description of Artificial Sequence: Synthetic oligonucleotide
  Sense Strand Starting at position 897 of SEQ ID NO: 317391
agccuauuugcucaccagu

SEQ ID NO: 389296 - RNA, 19 nt, Artificial Sequence
  Description of Artificial Sequence: Synthetic oligonucleotide
  Antisense Strand to SEQ ID NO: 389295
acuggugagcaaauaggcu

SEQ ID NO: 389297 - RNA, 19 nt, Artificial Sequence
  Description of Artificial Sequence: Synthetic oligonucleotide
  Sense Strand Starting at position 897 of SEQ ID NO: 317584
gggccuucugcgggaggaa

SEQ ID NO: 389298 - RNA, 19 nt, Artificial Sequence
  Description of Artificial Sequence: Synthetic oligonucleotide
  Antisense Strand to SEQ ID NO: 389297
uuccucccgcagaaggccc

SEQ ID NO: 389299 - RNA, 19 nt, Artificial Sequence
  Description of Artificial Sequence: Synthetic oligonucleotide
  Sense Strand Starting at position 897 of SEQ ID NO: 317585
ggccuucugcgggaggaaa

SEQ ID NO: 389300 - RNA, 19 nt, Artificial Sequence
  Description of Artificial Sequence: Synthetic oligonucleotide
  Antisense Strand to SEQ ID NO: 389299
uuuccucccgcagaaggcc

SEQ ID NO: 389301 - RNA, 19 nt, Artificial Sequence
  Description of Artificial Sequence: Synthetic oligonucleotide
  Sense Strand Starting at position 897 of SEQ ID NO: 317699
ggcccauccuauuaggacu

SEQ ID NO: 389302 - RNA, 19 nt, Artificial Sequence
  Description of Artificial Sequence: Synthetic oligonucleotide
  Antisense Strand to SEQ ID NO: 389301
aguccuaauaggaugggcc

SEQ ID NO: 389303 - RNA, 19 nt, Artificial Sequence
  Description of Artificial Sequence: Synthetic oligonucleotide
  Sense Strand Starting at position 897 of SEQ ID NO: 317721
ggaggacuuuggcucaaag

SEQ ID NO: 389304 - RNA, 19 nt, Artificial Sequence
  Description of Artificial Sequence: Synthetic oligonucleotide
  Antisense Strand to SEQ ID NO: 389303
cuuugagccaaaguccucc

SEQ ID NO: 389305 - RNA, 19 nt, Artificial Sequence
  Description of Artificial Sequence: Synthetic oligonucleotide
  Sense Strand Starting at position 897 of SEQ ID NO: 318060
gugacaucauucugcacaa

SEQ ID NO: 389306 - RNA, 19 nt, Artificial Sequence
  Description of Artificial Sequence: Synthetic oligonucleotide
  Antisense Strand to SEQ ID NO: 389305
uugugcagaaugaugucac

SEQ ID NO: 389307 - RNA, 19 nt, Artificial Sequence
  Description of Artificial Sequence: Synthetic oligonucleotide
  Sense Strand Starting at position 897 of SEQ ID NO: 318138
uggcuuuccugccuaugua

SEQ ID NO: 389308 - RNA, 19 nt, Artificial Sequence
  Description of Artificial Sequence: Synthetic oligonucleotide
  Antisense Strand to SEQ ID NO: 389307
uacauaggcaggaaagcca

SEQ ID NO: 389309 - RNA, 19 nt, Artificial Sequence
  Description of Artificial Sequence: Synthetic oligonucleotide
  Sense Strand Starting at position 897 of SEQ ID NO: 318371
agccauuacucgccaagga

SEQ ID NO: 389310 - RNA, 19 nt, Artificial Sequence
  Description of Artificial Sequence: Synthetic oligonucleotide
  Antisense Strand to SEQ ID NO: 389309
uccuuggcgaguaauggcu

SEQ ID NO: 389311 - RNA, 19 nt, Artificial Sequence
  Description of Artificial Sequence: Synthetic oligonucleotide
  Sense Strand Starting at position 897 of SEQ ID NO: 318372
gccauuacucgccaaggau

SEQ ID NO: 389312 - RNA, 19 nt, Artificial Sequence
  Description of Artificial Sequence: Synthetic oligonucleotide
  Antisense Strand to SEQ ID NO: 389311
auccuuggcgaguaauggc

SEQ ID NO: 389313 - RNA, 19 nt, Artificial Sequence
  Description of Artificial Sequence: Synthetic oligonucleotide
  Sense Strand Starting at position 897 of SEQ ID NO: 318375
auuacucgccaaggauaga

SEQ ID NO: 389314 - RNA, 19 nt, Artificial Sequence
  Description of Artificial Sequence: Synthetic oligonucleotide
  Antisense Strand to SEQ ID NO: 389313
ucuauccuuggcgaguaau

SEQ ID NO: 389315 - RNA, 19 nt, Artificial Sequence
  Description of Artificial Sequence: Synthetic oligonucleotide
  Sense Strand Starting at position 897 of SEQ ID NO: 318376
uuacucgccaaggauagau

SEQ ID NO: 389316 - RNA, 19 nt, Artificial Sequence
  Description of Artificial Sequence: Synthetic oligonucleotide
  Antisense Strand to SEQ ID NO: 389315
aucuauccuuggcgaguaa

SEQ ID NO: 389317 - RNA, 19 nt, Artificial Sequence
  Description of Artificial Sequence: Synthetic oligonucleotide
  Sense Strand Starting at position 897 of SEQ ID NO: 318477
agaagaaaguaugccuuau

SEQ ID NO: 389318 - RNA, 19 nt, Artificial Sequence
  Description of Artificial Sequence: Synthetic oligonucleotide
  Antisense Strand to SEQ ID NO: 389317
auaaggcauacuuucuucu

SEQ ID NO: 389319 - RNA, 19 nt, Artificial Sequence
  Description of Artificial Sequence: Synthetic oligonucleotide
  Sense Strand Starting at position 897 of SEQ ID NO: 318613
ucuggaaugugccugacuu

SEQ ID NO: 389320 - RNA, 19 nt, Artificial Sequence
  Description of Artificial Sequence: Synthetic oligonucleotide
  Antisense Strand to SEQ ID NO: 389319
aagucaggcacauuccaga

SEQ ID NO: 389321 - RNA, 19 nt, Artificial Sequence
  Description of Artificial Sequence: Synthetic oligonucleotide
  Sense Strand Starting at position 897 of SEQ ID NO: 318614
cuggaaugugccugacuuc

SEQ ID NO: 389322 - RNA, 19 nt, Artificial Sequence
  Description of Artificial Sequence: Synthetic oligonucleotide
  Antisense Strand to SEQ ID NO: 389321
gaagucaggcacauuccag

SEQ ID NO: 389323 - RNA, 19 nt, Artificial Sequence
  Description of Artificial Sequence: Synthetic oligonucleotide
  Sense Strand Starting at position 897 of SEQ ID NO: 318617
gaaugugccugacuuccaa

SEQ ID NO: 389324 - RNA, 19 nt, Artificial Sequence
  Description of Artificial Sequence: Synthetic oligonucleotide
  Antisense Strand to SEQ ID NO: 389323
uuggaagucaggcacauuc

SEQ ID NO: 389325 - RNA, 19 nt, Artificial Sequence
  Description of Artificial Sequence: Synthetic oligonucleotide
  Sense Strand Starting at position 897 of SEQ ID NO: 318621
gugccugacuuccaauacu

SEQ ID NO: 389326 - RNA, 19 nt, Artificial Sequence
  Description of Artificial Sequence: Synthetic oligonucleotide
  Antisense Strand to SEQ ID NO: 389325
aguauuggaagucaggcac

SEQ ID NO: 389327 - RNA, 19 nt, Artificial Sequence
  Description of Artificial Sequence: Synthetic oligonucleotide
  Sense Strand Starting at position 897 of SEQ ID NO: 318662
gcccaaagcuccuguuuac

SEQ ID NO: 389328 - RNA, 19 nt, Artificial Sequence
  Description of Artificial Sequence: Synthetic oligonucleotide
  Antisense Strand to SEQ ID NO: 389327
guaaacaggagcuuugggc

SEQ ID NO: 389329 - RNA, 19 nt, Artificial Sequence
  Description of Artificial Sequence: Synthetic oligonucleotide
  Sense Strand Starting at position 897 of SEQ ID NO: 318672
ccuguuuacucagggcaca

SEQ ID NO: 389330 - RNA, 19 nt, Artificial Sequence
  Description of Artificial Sequence: Synthetic oligonucleotide
  Antisense Strand to SEQ ID NO: 389329
ugugcccugaguaaacagg

SEQ ID NO: 389331 - RNA, 19 nt, Artificial Sequence
  Description of Artificial Sequence: Synthetic oligonucleotide
  Sense Strand Starting at position 897 of SEQ ID NO: 318831
uguccugagcucugccuau

SEQ ID NO: 389332 - RNA, 19 nt, Artificial Sequence
  Description of Artificial Sequence: Synthetic oligonucleotide
  Antisense Strand to SEQ ID NO: 389331
auaggcagagcucaggaca

SEQ ID NO: 389333 - RNA, 19 nt, Artificial Sequence
  Description of Artificial Sequence: Synthetic oligonucleotide
  Sense Strand Starting at position 897 of SEQ ID NO: 318843
ugccuaugccuguggaaga

SEQ ID NO: 389334 - RNA, 19 nt, Artificial Sequence
  Description of Artificial Sequence: Synthetic oligonucleotide
  Antisense Strand to SEQ ID NO: 389333
ucuuccacaggcauaggca

SEQ ID NO: 389335 - RNA, 19 nt, Artificial Sequence
  Description of Artificial Sequence: Synthetic oligonucleotide
  Sense Strand Starting at position 897 of SEQ ID NO: 318844
gccuaugccuguggaagau

SEQ ID NO: 389336 - RNA, 19 nt, Artificial Sequence
  Description of Artificial Sequence: Synthetic oligonucleotide
  Antisense Strand to SEQ ID NO: 389335
aucuuccacaggcauaggc

SEQ ID NO: 389337 - RNA, 19 nt, Artificial Sequence
  Description of Artificial Sequence: Synthetic oligonucleotide
  Sense Strand Starting at position 897 of SEQ ID NO: 319023
ucugaucacuccuccagua

SEQ ID NO: 389338 - RNA, 19 nt, Artificial Sequence
  Description of Artificial Sequence: Synthetic oligonucleotide
  Antisense Strand to SEQ ID NO: 389337
uacuggaggagugaucaga

SEQ ID NO: 389339 - RNA, 19 nt, Artificial Sequence
  Description of Artificial Sequence: Synthetic oligonucleotide
  Sense Strand Starting at position 897 of SEQ ID NO: 319025
ugaucacuccuccaguacu

SEQ ID NO: 389340 - RNA, 19 nt, Artificial Sequence
  Description of Artificial Sequence: Synthetic oligonucleotide
  Antisense Strand to SEQ ID NO: 389339
aguacuggaggagugauca

SEQ ID NO: 389341 - RNA, 19 nt, Artificial Sequence
  Description of Artificial Sequence: Synthetic oligonucleotide
  Sense Strand Starting at position 897 of SEQ ID NO: 319028
ucacuccuccaguacuaga

SEQ ID NO: 389342 - RNA, 19 nt, Artificial Sequence
  Description of Artificial Sequence: Synthetic oligonucleotide
  Antisense Strand to SEQ ID NO: 389341
ucuaguacuggaggaguga

SEQ ID NO: 389343 - RNA, 19 nt, Artificial Sequence
  Description of Artificial Sequence: Synthetic oligonucleotide
  Sense Strand Starting at position 897 of SEQ ID NO: 319039
guacuagaaccaggaaguu

SEQ ID NO: 389344 - RNA, 19 nt, Artificial Sequence
  Description of Artificial Sequence: Synthetic oligonucleotide
  Antisense Strand to SEQ ID NO: 389343
aacuuccugguucuaguac

SEQ ID NO: 389345 - RNA, 19 nt, Artificial Sequence
  Description of Artificial Sequence: Synthetic oligonucleotide
  Sense Strand Starting at position 897 of SEQ ID NO: 319099
caaccauggucacgaaaug

SEQ ID NO: 389346 - RNA, 19 nt, Artificial Sequence
  Description of Artificial Sequence: Synthetic oligonucleotide
  Antisense Strand to SEQ ID NO: 389345
cauuucgugaccaugguug

SEQ ID NO: 389347 - RNA, 19 nt, Artificial Sequence
  Description of Artificial Sequence: Synthetic oligonucleotide
  Sense Strand Starting at position 898 of SEQ ID NO: 315283
ucaggacuuuccuugagca

SEQ ID NO: 389348 - RNA, 19 nt, Artificial Sequence
  Description of Artificial Sequence: Synthetic oligonucleotide
  Antisense Strand to SEQ ID NO: 389347
ugcucaaggaaaguccuga

SEQ ID NO: 389349 - RNA, 19 nt, Artificial Sequence
  Description of Artificial Sequence: Synthetic oligonucleotide
  Sense Strand Starting at position 898 of SEQ ID NO: 315288
acuuuccuugagcagaauu

SEQ ID NO: 389350 - RNA, 19 nt, Artificial Sequence
  Description of Artificial Sequence: Synthetic oligonucleotide
  Antisense Strand to SEQ ID NO: 389349
aauucugcucaaggaaagu

SEQ ID NO: 389351 - RNA, 19 nt, Artificial Sequence
  Description of Artificial Sequence: Synthetic oligonucleotide
  Sense Strand Starting at position 898 of SEQ ID NO: 315290
uuuccuugagcagaauuga

SEQ ID NO: 389352 - RNA, 19 nt, Artificial Sequence
  Description of Artificial Sequence: Synthetic oligonucleotide
  Antisense Strand to SEQ ID NO: 389351
ucaauucugcucaaggaaa

SEQ ID NO: 389353 - RNA, 19 nt, Artificial Sequence
  Description of Artificial Sequence: Synthetic oligonucleotide
  Sense Strand Starting at position 898 of SEQ ID NO: 315697
gcaggauugcucugaccag

SEQ ID NO: 389354 - RNA, 19 nt, Artificial Sequence
  Description of Artificial Sequence: Synthetic oligonucleotide
  Antisense Strand to SEQ ID NO: 389353
cuggucagagcaauccugc

SEQ ID NO: 389355 - RNA, 19 nt, Artificial Sequence
  Description of Artificial Sequence: Synthetic oligonucleotide
  Sense Strand Starting at position 898 of SEQ ID NO: 315698
caggauugcucugaccagu

SEQ ID NO: 389356 - RNA, 19 nt, Artificial Sequence
  Description of Artificial Sequence: Synthetic oligonucleotide
  Antisense Strand to SEQ ID NO: 389355
acuggucagagcaauccug

SEQ ID NO: 389357 - RNA, 19 nt, Artificial Sequence
  Description of Artificial Sequence: Synthetic oligonucleotide
  Sense Strand Starting at position 898 of SEQ ID NO: 315701
gauugcucugaccaguaaa

SEQ ID NO: 389358 - RNA, 19 nt, Artificial Sequence
  Description of Artificial Sequence: Synthetic oligonucleotide
  Antisense Strand to SEQ ID NO: 389357
uuuacuggucagagcaauc

SEQ ID NO: 389359 - RNA, 19 nt, Artificial Sequence
  Description of Artificial Sequence: Synthetic oligonucleotide
  Sense Strand Starting at position 898 of SEQ ID NO: 315704
ugcucugaccaguaaacau

SEQ ID NO: 389360 - RNA, 19 nt, Artificial Sequence
  Description of Artificial Sequence: Synthetic oligonucleotide
  Antisense Strand to SEQ ID NO: 389359
auguuuacuggucagagca

SEQ ID NO: 389361 - RNA, 19 nt, Artificial Sequence
  Description of Artificial Sequence: Synthetic oligonucleotide
  Sense Strand Starting at position 898 of SEQ ID NO: 315727
cagugugugccuggcauua

SEQ ID NO: 389362 - RNA, 19 nt, Artificial Sequence
  Description of Artificial Sequence: Synthetic oligonucleotide
  Antisense Strand to SEQ ID NO: 389361
uaaugccaggcacacacug

SEQ ID NO: 389363 - RNA, 19 nt, Artificial Sequence
  Description of Artificial Sequence: Synthetic oligonucleotide
  Sense Strand Starting at position 898 of SEQ ID NO: 315729
gugugugccuggcauuagu

SEQ ID NO: 389364 - RNA, 19 nt, Artificial Sequence
  Description of Artificial Sequence: Synthetic oligonucleotide
  Antisense Strand to SEQ ID NO: 389363
acuaaugccaggcacacac

SEQ ID NO: 389365 - RNA, 19 nt, Artificial Sequence
  Description of Artificial Sequence: Synthetic oligonucleotide
  Sense Strand Starting at position 898 of SEQ ID NO: 315738
uggcauuagugaugccaac

SEQ ID NO: 389366 - RNA, 19 nt, Artificial Sequence
  Description of Artificial Sequence: Synthetic oligonucleotide
  Antisense Strand to SEQ ID NO: 389365
guuggcaucacuaaugcca

SEQ ID NO: 389367 - RNA, 19 nt, Artificial Sequence
  Description of Artificial Sequence: Synthetic oligonucleotide
  Sense Strand Starting at position 898 of SEQ ID NO: 315964
gccacuuggucucucaaag

SEQ ID NO: 389368 - RNA, 19 nt, Artificial Sequence
  Description of Artificial Sequence: Synthetic oligonucleotide
  Antisense Strand to SEQ ID NO: 389367
cuuugagagaccaaguggc

SEQ ID NO: 389369 - RNA, 19 nt, Artificial Sequence
  Description of Artificial Sequence: Synthetic oligonucleotide
  Sense Strand Starting at position 898 of SEQ ID NO: 316226
ugcccaacuucugucugua

SEQ ID NO: 389370 - RNA, 19 nt, Artificial Sequence
  Description of Artificial Sequence: Synthetic oligonucleotide
  Antisense Strand to SEQ ID NO: 389369
uacagacagaaguugggca

SEQ ID NO: 389371 - RNA, 19 nt, Artificial Sequence
  Description of Artificial Sequence: Synthetic oligonucleotide
  Sense Strand Starting at position 898 of SEQ ID NO: 316228
cccaacuucugucuguaga

SEQ ID NO: 389372 - RNA, 19 nt, Artificial Sequence
  Description of Artificial Sequence: Synthetic oligonucleotide
  Antisense Strand to SEQ ID NO: 389371
ucuacagacagaaguuggg

SEQ ID NO: 389373 - RNA, 19 nt, Artificial Sequence
  Description of Artificial Sequence: Synthetic oligonucleotide
  Sense Strand Starting at position 898 of SEQ ID NO: 316269
uggagcuguccucgacaac

SEQ ID NO: 389374 - RNA, 19 nt, Artificial Sequence
  Description of Artificial Sequence: Synthetic oligonucleotide
  Antisense Strand to SEQ ID NO: 389373
guugucgaggacagcucca

SEQ ID NO: 389375 - RNA, 19 nt, Artificial Sequence
  Description of Artificial Sequence: Synthetic oligonucleotide
  Sense Strand Starting at position 898 of SEQ ID NO: 316270
ggagcuguccucgacaaca

SEQ ID NO: 389376 - RNA, 19 nt, Artificial Sequence
  Description of Artificial Sequence: Synthetic oligonucleotide
  Antisense Strand to SEQ ID NO: 389375
uguugucgaggacagcucc

SEQ ID NO: 389377 - RNA, 19 nt, Artificial Sequence
  Description of Artificial Sequence: Synthetic oligonucleotide
  Sense Strand Starting at position 898 of SEQ ID NO: 316272
agcuguccucgacaacaaa

SEQ ID NO: 389378 - RNA, 19 nt, Artificial Sequence
  Description of Artificial Sequence: Synthetic oligonucleotide
  Antisense Strand to SEQ ID NO: 389377
uuuguugucgaggacagcu

SEQ ID NO: 389379 - RNA, 19 nt, Artificial Sequence
  Description of Artificial Sequence: Synthetic oligonucleotide
  Sense Strand Starting at position 898 of SEQ ID NO: 316416
ucacuacagaggugaguua

SEQ ID NO: 389380 - RNA, 19 nt, Artificial Sequence
  Description of Artificial Sequence: Synthetic oligonucleotide
  Antisense Strand to SEQ ID NO: 389379
uaacucaccucuguaguga

SEQ ID NO: 389381 - RNA, 19 nt, Artificial Sequence
  Description of Artificial Sequence: Synthetic oligonucleotide
  Sense Strand Starting at position 898 of SEQ ID NO: 316423
agaggugaguuauucauug

SEQ ID NO: 389382 - RNA, 19 nt, Artificial Sequence
  Description of Artificial Sequence: Synthetic oligonucleotide
  Antisense Strand to SEQ ID NO: 389381
caaugaauaacucaccucu

SEQ ID NO: 389383 - RNA, 19 nt, Artificial Sequence
  Description of Artificial Sequence: Synthetic oligonucleotide
  Sense Strand Starting at position 898 of SEQ ID NO: 316553
acuuaauaugucugugugu

SEQ ID NO: 389384 - RNA, 19 nt, Artificial Sequence
  Description of Artificial Sequence: Synthetic oligonucleotide
  Antisense Strand to SEQ ID NO: 389383
acacacagacauauuaagu

SEQ ID NO: 389385 - RNA, 19 nt, Artificial Sequence
  Description of Artificial Sequence: Synthetic oligonucleotide
  Sense Strand Starting at position 898 of SEQ ID NO: 316647
gccagaaagggcuguuacu

SEQ ID NO: 389386 - RNA, 19 nt, Artificial Sequence
  Description of Artificial Sequence: Synthetic oligonucleotide
  Antisense Strand to SEQ ID NO: 389385
aguaacagcccuuucuggc

SEQ ID NO: 389387 - RNA, 19 nt, Artificial Sequence
  Description of Artificial Sequence: Synthetic oligonucleotide
  Sense Strand Starting at position 898 of SEQ ID NO: 316854
ggcggagucgccagaguuu

SEQ ID NO: 389388 - RNA, 19 nt, Artificial Sequence
  Description of Artificial Sequence: Synthetic oligonucleotide
  Antisense Strand to SEQ ID NO: 389387
aaacucuggcgacuccgcc

SEQ ID NO: 389389 - RNA, 19 nt, Artificial Sequence
  Description of Artificial Sequence: Synthetic oligonucleotide
  Sense Strand Starting at position 898 of SEQ ID NO: 316883
ggagaaguguggucccaac

SEQ ID NO: 389390 - RNA, 19 nt, Artificial Sequence
  Description of Artificial Sequence: Synthetic oligonucleotide
  Antisense Strand to SEQ ID NO: 389389
guugggaccacacuucucc

SEQ ID NO: 389391 - RNA, 19 nt, Artificial Sequence
  Description of Artificial Sequence: Synthetic oligonucleotide
  Sense Strand Starting at position 898 of SEQ ID NO: 317129
gcuguuacccggagaccga

SEQ ID NO: 389392 - RNA, 19 nt, Artificial Sequence
  Description of Artificial Sequence: Synthetic oligonucleotide
  Antisense Strand to SEQ ID NO: 389391
ucggucuccggguaacagc

SEQ ID NO: 389393 - RNA, 19 nt, Artificial Sequence
  Description of Artificial Sequence: Synthetic oligonucleotide
  Sense Strand Starting at position 898 of SEQ ID NO: 317979
agccuauuugcucaccagu

SEQ ID NO: 389394 - RNA, 19 nt, Artificial Sequence
  Description of Artificial Sequence: Synthetic oligonucleotide
  Antisense Strand to SEQ ID NO: 389393
acuggugagcaaauaggcu

SEQ ID NO: 389395 - RNA, 19 nt, Artificial Sequence
  Description of Artificial Sequence: Synthetic oligonucleotide
  Sense Strand Starting at position 898 of SEQ ID NO: 318172
gggccuucugcgggaggaa

SEQ ID NO: 389396 - RNA, 19 nt, Artificial Sequence
  Description of Artificial Sequence: Synthetic oligonucleotide
  Antisense Strand to SEQ ID NO: 389395
uuccucccgcagaaggccc

SEQ ID NO: 389397 - RNA, 19 nt, Artificial Sequence
  Description of Artificial Sequence: Synthetic oligonucleotide
  Sense Strand Starting at position 898 of SEQ ID NO: 318173
ggccuucugcgggaggaaa

SEQ ID NO: 389398 - RNA, 19 nt, Artificial Sequence
  Description of Artificial Sequence: Synthetic oligonucleotide
  Antisense Strand to SEQ ID NO: 389397
uuuccucccgcagaaggcc

SEQ ID NO: 389399 - RNA, 19 nt, Artificial Sequence
  Description of Artificial Sequence: Synthetic oligonucleotide
  Sense Strand Starting at position 898 of SEQ ID NO: 318287
ggcccauccuauuaggacu

SEQ ID NO: 389400 - RNA, 19 nt, Artificial Sequence
  Description of Artificial Sequence: Synthetic oligonucleotide
  Antisense Strand to SEQ ID NO: 389399
aguccuaauaggaugggcc

SEQ ID NO: 389401 - RNA, 19 nt, Artificial Sequence
  Description of Artificial Sequence: Synthetic oligonucleotide
  Sense Strand Starting at position 898 of SEQ ID NO: 318309
ggaggacuuuggcucaaag

SEQ ID NO: 389402 - RNA, 19 nt, Artificial Sequence
  Description of Artificial Sequence: Synthetic oligonucleotide
  Antisense Strand to SEQ ID NO: 389401
cuuugagccaaaguccucc

SEQ ID NO: 389403 - RNA, 19 nt, Artificial Sequence
  Description of Artificial Sequence: Synthetic oligonucleotide
  Sense Strand Starting at position 898 of SEQ ID NO: 318648
gugacaucauucugcacaa

SEQ ID NO: 389404 - RNA, 19 nt, Artificial Sequence
  Description of Artificial Sequence: Synthetic oligonucleotide
  Antisense Strand to SEQ ID NO: 389403
uugugcagaaugaugucac

SEQ ID NO: 389405 - RNA, 19 nt, Artificial Sequence
  Description of Artificial Sequence: Synthetic oligonucleotide
  Sense Strand Starting at position 898 of SEQ ID NO: 318726
uggcuuuccugccuaugua

SEQ ID NO: 389406 - RNA, 19 nt, Artificial Sequence
  Description of Artificial Sequence: Synthetic oligonucleotide
  Antisense Strand to SEQ ID NO: 389405
uacauaggcaggaaagcca

SEQ ID NO: 389407 - RNA, 19 nt, Artificial Sequence
  Description of Artificial Sequence: Synthetic oligonucleotide
  Sense Strand Starting at position 898 of SEQ ID NO: 318959
agccauuacucgccaagga

SEQ ID NO: 389408 - RNA, 19 nt, Artificial Sequence
  Description of Artificial Sequence: Synthetic oligonucleotide
  Antisense Strand to SEQ ID NO: 389407
uccuuggcgaguaauggcu

SEQ ID NO: 389409 - RNA, 19 nt, Artificial Sequence
  Description of Artificial Sequence: Synthetic oligonucleotide
  Sense Strand Starting at position 898 of SEQ ID NO: 318960
gccauuacucgccaaggau

SEQ ID NO: 389410 - RNA, 19 nt, Artificial Sequence
  Description of Artificial Sequence: Synthetic oligonucleotide
  Antisense Strand to SEQ ID NO: 389409
auccuuggcgaguaauggc

SEQ ID NO: 389411 - RNA, 19 nt, Artificial Sequence
  Description of Artificial Sequence: Synthetic oligonucleotide
  Sense Strand Starting at position 898 of SEQ ID NO: 318963
auuacucgccaaggauaga

SEQ ID NO: 389412 - RNA, 19 nt, Artificial Sequence
  Description of Artificial Sequence: Synthetic oligonucleotide
  Antisense Strand to SEQ ID NO: 389411
ucuauccuuggcgaguaau

SEQ ID NO: 389413 - RNA, 19 nt, Artificial Sequence
  Description of Artificial Sequence: Synthetic oligonucleotide
  Sense Strand Starting at position 898 of SEQ ID NO: 318964
uuacucgccaaggauagau

SEQ ID NO: 389414 - RNA, 19 nt, Artificial Sequence
  Description of Artificial Sequence: Synthetic oligonucleotide
  Antisense Strand to SEQ ID NO: 389413
aucuauccuuggcgaguaa

SEQ ID NO: 389415 - RNA, 19 nt, Artificial Sequence
  Description of Artificial Sequence: Synthetic oligonucleotide
  Sense Strand Starting at position 898 of SEQ ID NO: 319065
agaagaaaguaugccuuau

SEQ ID NO: 389416 - RNA, 19 nt, Artificial Sequence
  Description of Artificial Sequence: Synthetic oligonucleotide
  Antisense Strand to SEQ ID NO: 389415
auaaggcauacuuucuucu

SEQ ID NO: 389417 - RNA, 19 nt, Artificial Sequence
  Description of Artificial Sequence: Synthetic oligonucleotide
  Sense Strand Starting at position 898 of SEQ ID NO: 319201
ucuggaaugugccugacuu

SEQ ID NO: 389418 - RNA, 19 nt, Artificial Sequence
  Description of Artificial Sequence: Synthetic oligonucleotide
  Antisense Strand to SEQ ID NO: 389417
aagucaggcacauuccaga

SEQ ID NO: 389419 - RNA, 19 nt, Artificial Sequence
  Description of Artificial Sequence: Synthetic oligonucleotide
  Sense Strand Starting at position 898 of SEQ ID NO: 319202
cuggaaugugccugacuuc

SEQ ID NO: 389420 - RNA, 19 nt, Artificial Sequence
  Description of Artificial Sequence: Synthetic oligonucleotide
  Antisense Strand to SEQ ID NO: 389419
gaagucaggcacauuccag

SEQ ID NO: 389421 - RNA, 19 nt, Artificial Sequence
  Description of Artificial Sequence: Synthetic oligonucleotide
  Sense Strand Starting at position 898 of SEQ ID NO: 319205
gaaugugccugacuuccaa

SEQ ID NO: 389422 - RNA, 19 nt, Artificial Sequence
  Description of Artificial Sequence: Synthetic oligonucleotide
  Antisense Strand to SEQ ID NO: 389421
uuggaagucaggcacauuc

SEQ ID NO: 389423 - RNA, 19 nt, Artificial Sequence
  Description of Artificial Sequence: Synthetic oligonucleotide
  Sense Strand Starting at position 898 of SEQ ID NO: 319209
gugccugacuuccaauacu

SEQ ID NO: 389424 - RNA, 19 nt, Artificial Sequence
  Description of Artificial Sequence: Synthetic oligonucleotide
  Antisense Strand to SEQ ID NO: 389423
aguauuggaagucaggcac

SEQ ID NO: 389425 - RNA, 19 nt, Artificial Sequence
  Description of Artificial Sequence: Synthetic oligonucleotide
  Sense Strand Starting at position 899 of SEQ ID NO: 315509
gugcauaccugggcuuuau

SEQ ID NO: 389426 - RNA, 19 nt, Artificial Sequence
  Description of Artificial Sequence: Synthetic oligonucleotide
  Antisense Strand to SEQ ID NO: 389425
auaaagcccagguaugcac

SEQ ID NO: 389427 - RNA, 19 nt, Artificial Sequence
  Description of Artificial Sequence: Synthetic oligonucleotide
  Sense Strand Starting at position 899 of SEQ ID NO: 315664
accuguauucucgcgugca

SEQ ID NO: 389428 - RNA, 19 nt, Artificial Sequence
  Description of Artificial Sequence: Synthetic oligonucleotide
  Antisense Strand to SEQ ID NO: 389427
ugcacgcgagaauacaggu

SEQ ID NO: 389429 - RNA, 19 nt, Artificial Sequence
  Description of Artificial Sequence: Synthetic oligonucleotide
  Sense Strand Starting at position 899 of SEQ ID NO: 315665
ccuguauucucgcgugcac

SEQ ID NO: 389430 - RNA, 19 nt, Artificial Sequence
  Description of Artificial Sequence: Synthetic oligonucleotide
  Antisense Strand to SEQ ID NO: 389429
gugcacgcgagaauacagg

SEQ ID NO: 389431 - RNA, 19 nt, Artificial Sequence
  Description of Artificial Sequence: Synthetic oligonucleotide
  Sense Strand Starting at position 899 of SEQ ID NO: 315666
cuguauucucgcgugcaca

SEQ ID NO: 389432 - RNA, 19 nt, Artificial Sequence
  Description of Artificial Sequence: Synthetic oligonucleotide
  Antisense Strand to SEQ ID NO: 389431
ugugcacgcgagaauacag

SEQ ID NO: 389433 - RNA, 19 nt, Artificial Sequence
  Description of Artificial Sequence: Synthetic oligonucleotide
  Sense Strand Starting at position 899 of SEQ ID NO: 316329
cugcuugaucuugaggaug

SEQ ID NO: 389434 - RNA, 19 nt, Artificial Sequence
  Description of Artificial Sequence: Synthetic oligonucleotide
  Antisense Strand to SEQ ID NO: 389433
cauccucaagaucaagcag

SEQ ID NO: 389435 - RNA, 19 nt, Artificial Sequence
  Description of Artificial Sequence: Synthetic oligonucleotide
  Sense Strand Starting at position 899 of SEQ ID NO: 316331
gcuugaucuugaggauguu

SEQ ID NO: 389436 - RNA, 19 nt, Artificial Sequence
  Description of Artificial Sequence: Synthetic oligonucleotide
  Antisense Strand to SEQ ID NO: 389435
aacauccucaagaucaagc

SEQ ID NO: 389437 - RNA, 19 nt, Artificial Sequence
  Description of Artificial Sequence: Synthetic oligonucleotide
  Sense Strand Starting at position 899 of SEQ ID NO: 316340
ugaggauguugucgucgga

SEQ ID NO: 389438 - RNA, 19 nt, Artificial Sequence
  Description of Artificial Sequence: Synthetic oligonucleotide
  Antisense Strand to SEQ ID NO: 389437
uccgacgacaacauccuca

SEQ ID NO: 389439 - RNA, 19 nt, Artificial Sequence
  Description of Artificial Sequence: Synthetic oligonucleotide
  Sense Strand Starting at position 899 of SEQ ID NO: 316460
ugcgguugcgcgggaagaa

SEQ ID NO: 389440 - RNA, 19 nt, Artificial Sequence
  Description of Artificial Sequence: Synthetic oligonucleotide
  Antisense Strand to SEQ ID NO: 389439
uucuucccgcgcaaccgca

SEQ ID NO: 389441 - RNA, 19 nt, Artificial Sequence
  Description of Artificial Sequence: Synthetic oligonucleotide
  Sense Strand Starting at position 899 of SEQ ID NO: 316691
ggcagaagcccugguagau

SEQ ID NO: 389442 - RNA, 19 nt, Artificial Sequence
  Description of Artificial Sequence: Synthetic oligonucleotide
  Antisense Strand to SEQ ID NO: 389441
aucuaccagggcuucugcc

SEQ ID NO: 389443 - RNA, 19 nt, Artificial Sequence
  Description of Artificial Sequence: Synthetic oligonucleotide
  Sense Strand Starting at position 899 of SEQ ID NO: 316748
gcugcaggaucuuguugua

SEQ ID NO: 389444 - RNA, 19 nt, Artificial Sequence
  Description of Artificial Sequence: Synthetic oligonucleotide
  Antisense Strand to SEQ ID NO: 389443
uacaacaagauccugcagc

SEQ ID NO: 389445 - RNA, 19 nt, Artificial Sequence
  Description of Artificial Sequence: Synthetic oligonucleotide
  Sense Strand Starting at position 899 of SEQ ID NO: 316751
gcaggaucuuguuguaguu

SEQ ID NO: 389446 - RNA, 19 nt, Artificial Sequence
  Description of Artificial Sequence: Synthetic oligonucleotide
  Antisense Strand to SEQ ID NO: 389445
aacuacaacaagauccugc

SEQ ID NO: 389447 - RNA, 19 nt, Artificial Sequence
  Description of Artificial Sequence: Synthetic oligonucleotide
  Sense Strand Starting at position 899 of SEQ ID NO: 318066
accagugcucagggucaga

SEQ ID NO: 389448 - RNA, 19 nt, Artificial Sequence
  Description of Artificial Sequence: Synthetic oligonucleotide
  Antisense Strand to SEQ ID NO: 389447
ucugacccugagcacuggu

SEQ ID NO: 389449 - RNA, 19 nt, Artificial Sequence
  Description of Artificial Sequence: Synthetic oligonucleotide
  Sense Strand Starting at position 899 of SEQ ID NO: 318069
agugcucagggucagauau

SEQ ID NO: 389450 - RNA, 19 nt, Artificial Sequence
  Description of Artificial Sequence: Synthetic oligonucleotide
  Antisense Strand to SEQ ID NO: 389449
auaucugacccugagcacu

SEQ ID NO: 389451 - RNA, 19 nt, Artificial Sequence
  Description of Artificial Sequence: Synthetic oligonucleotide
  Sense Strand Starting at position 899 of SEQ ID NO: 318071
ugcucagggucagauauau

SEQ ID NO: 389452 - RNA, 19 nt, Artificial Sequence
  Description of Artificial Sequence: Synthetic oligonucleotide
  Antisense Strand to SEQ ID NO: 389451
auauaucugacccugagca

SEQ ID NO: 389453 - RNA, 19 nt, Artificial Sequence
  Description of Artificial Sequence: Synthetic oligonucleotide
  Sense Strand Starting at position 899 of SEQ ID NO: 318228
aggcacuuucccugacauc

SEQ ID NO: 389454 - RNA, 19 nt, Artificial Sequence
  Description of Artificial Sequence: Synthetic oligonucleotide
  Antisense Strand to SEQ ID NO: 389453
gaugucagggaaagugccu

SEQ ID NO: 389455 - RNA, 19 nt, Artificial Sequence
  Description of Artificial Sequence: Synthetic oligonucleotide
  Sense Strand Starting at position 899 of SEQ ID NO: 318250
ccaggcuuaguggaagauu

SEQ ID NO: 389456 - RNA, 19 nt, Artificial Sequence
  Description of Artificial Sequence: Synthetic oligonucleotide
  Antisense Strand to SEQ ID NO: 389455
aaucuuccacuaagccugg

SEQ ID NO: 389457 - RNA, 19 nt, Artificial Sequence
  Description of Artificial Sequence: Synthetic oligonucleotide
  Sense Strand Starting at position 899 of SEQ ID NO: 318253
ggcuuaguggaagauuagu

SEQ ID NO: 389458 - RNA, 19 nt, Artificial Sequence
  Description of Artificial Sequence: Synthetic oligonucleotide
  Antisense Strand to SEQ ID NO: 389457
acuaaucuuccacuaagcc

SEQ ID NO: 389459 - RNA, 19 nt, Artificial Sequence
  Description of Artificial Sequence: Synthetic oligonucleotide
  Sense Strand Starting at position 899 of SEQ ID NO: 318259
guggaagauuagucccaca

SEQ ID NO: 389460 - RNA, 19 nt, Artificial Sequence
  Description of Artificial Sequence: Synthetic oligonucleotide
  Antisense Strand to SEQ ID NO: 389459
ugugggacuaaucuuccac

SEQ ID NO: 389461 - RNA, 19 nt, Artificial Sequence
  Description of Artificial Sequence: Synthetic oligonucleotide
  Sense Strand Starting at position 899 of SEQ ID NO: 318293
caggguucuugaucucaaa

SEQ ID NO: 389462 - RNA, 19 nt, Artificial Sequence
  Description of Artificial Sequence: Synthetic oligonucleotide
  Antisense Strand to SEQ ID NO: 389461
uuugagaucaagaacccug

SEQ ID NO: 389463 - RNA, 19 nt, Artificial Sequence
  Description of Artificial Sequence: Synthetic oligonucleotide
  Sense Strand Starting at position 899 of SEQ ID NO: 318474
aggcgagcgcuauugguaa

SEQ ID NO: 389464 - RNA, 19 nt, Artificial Sequence
  Description of Artificial Sequence: Synthetic oligonucleotide
  Antisense Strand to SEQ ID NO: 389463
uuaccaauagcgcucgccu

SEQ ID NO: 389465 - RNA, 19 nt, Artificial Sequence
  Description of Artificial Sequence: Synthetic oligonucleotide
  Sense Strand Starting at position 899 of SEQ ID NO: 318478
gagcgcuauugguaaccca

SEQ ID NO: 389466 - RNA, 19 nt, Artificial Sequence
  Description of Artificial Sequence: Synthetic oligonucleotide
  Antisense Strand to SEQ ID NO: 389465
uggguuaccaauagcgcuc

SEQ ID NO: 389467 - RNA, 19 nt, Artificial Sequence
  Description of Artificial Sequence: Synthetic oligonucleotide
  Sense Strand Starting at position 899 of SEQ ID NO: 318565
gagcuacaguguuugaaag

SEQ ID NO: 389468 - RNA, 19 nt, Artificial Sequence
  Description of Artificial Sequence: Synthetic oligonucleotide
  Antisense Strand to SEQ ID NO: 389467
cuuucaaacacuguagcuc

SEQ ID NO: 389469 - RNA, 19 nt, Artificial Sequence
  Description of Artificial Sequence: Synthetic oligonucleotide
  Sense Strand Starting at position 899 of SEQ ID NO: 318567
gcuacaguguuugaaagca

SEQ ID NO: 389470 - RNA, 19 nt, Artificial Sequence
  Description of Artificial Sequence: Synthetic oligonucleotide
  Antisense Strand to SEQ ID NO: 389469
ugcuuucaaacacuguagc

SEQ ID NO: 389471 - RNA, 19 nt, Artificial Sequence
  Description of Artificial Sequence: Synthetic oligonucleotide
  Sense Strand Starting at position 899 of SEQ ID NO: 318657
gggccucacucugagagua

SEQ ID NO: 389472 - RNA, 19 nt, Artificial Sequence
  Description of Artificial Sequence: Synthetic oligonucleotide
  Antisense Strand to SEQ ID NO: 389471
uacucucagagugaggccc

SEQ ID NO: 389473 - RNA, 19 nt, Artificial Sequence
  Description of Artificial Sequence: Synthetic oligonucleotide
  Sense Strand Starting at position 899 of SEQ ID NO: 318869
aguguugagcugcaggaaa

SEQ ID NO: 389474 - RNA, 19 nt, Artificial Sequence
  Description of Artificial Sequence: Synthetic oligonucleotide
  Antisense Strand to SEQ ID NO: 389473
uuuccugcagcucaacacu

SEQ ID NO: 389475 - RNA, 19 nt, Artificial Sequence
  Description of Artificial Sequence: Synthetic oligonucleotide
  Sense Strand Starting at position 899 of SEQ ID NO: 318963
uuccucucuggauggagaa

SEQ ID NO: 389476 - RNA, 19 nt, Artificial Sequence
  Description of Artificial Sequence: Synthetic oligonucleotide
  Antisense Strand to SEQ ID NO: 389475
uucuccauccagagaggaa

SEQ ID NO: 389477 - RNA, 19 nt, Artificial Sequence
  Description of Artificial Sequence: Synthetic oligonucleotide
  Sense Strand Starting at position 899 of SEQ ID NO: 319099
gcuggucucucugucuuau

SEQ ID NO: 389478 - RNA, 19 nt, Artificial Sequence
  Description of Artificial Sequence: Synthetic oligonucleotide
  Antisense Strand to SEQ ID NO: 389477
auaagacagagagaccagc

SEQ ID NO: 389479 - RNA, 19 nt, Artificial Sequence
  Description of Artificial Sequence: Synthetic oligonucleotide
  Sense Strand Starting at position 900 of SEQ ID NO: 315275
cuuaauagccaacaaguga

SEQ ID NO: 389480 - RNA, 19 nt, Artificial Sequence
  Description of Artificial Sequence: Synthetic oligonucleotide
  Antisense Strand to SEQ ID NO: 389479
ucacuuguuggcuauuaag

SEQ ID NO: 389481 - RNA, 19 nt, Artificial Sequence
  Description of Artificial Sequence: Synthetic oligonucleotide
  Sense Strand Starting at position 900 of SEQ ID NO: 315380
gacugaagugcugaugcuu

SEQ ID NO: 389482 - RNA, 19 nt, Artificial Sequence
  Description of Artificial Sequence: Synthetic oligonucleotide
  Antisense Strand to SEQ ID NO: 389481
aagcaucagcacuucaguc

SEQ ID NO: 389483 - RNA, 19 nt, Artificial Sequence
  Description of Artificial Sequence: Synthetic oligonucleotide
  Sense Strand Starting at position 900 of SEQ ID NO: 315568
gaagaaaugguaugacugu

SEQ ID NO: 389484 - RNA, 19 nt, Artificial Sequence
  Description of Artificial Sequence: Synthetic oligonucleotide
  Antisense Strand to SEQ ID NO: 389483
acagucauaccauuucuuc

SEQ ID NO: 389485 - RNA, 19 nt, Artificial Sequence
  Description of Artificial Sequence: Synthetic oligonucleotide
  Sense Strand Starting at position 900 of SEQ ID NO: 315577
guaugacuguuauugagua

SEQ ID NO: 389486 - RNA, 19 nt, Artificial Sequence
  Description of Artificial Sequence: Synthetic oligonucleotide
  Antisense Strand to SEQ ID NO: 389485
uacucaauaacagucauac

SEQ ID NO: 389487 - RNA, 19 nt, Artificial Sequence
  Description of Artificial Sequence: Synthetic oligonucleotide
  Sense Strand Starting at position 900 of SEQ ID NO: 315581
gacuguuauugaguaugga

SEQ ID NO: 389488 - RNA, 19 nt, Artificial Sequence
  Description of Artificial Sequence: Synthetic oligonucleotide
  Antisense Strand to SEQ ID NO: 389487
uccauacucaauaacaguc

SEQ ID NO: 389489 - RNA, 19 nt, Artificial Sequence
  Description of Artificial Sequence: Synthetic oligonucleotide
  Sense Strand Starting at position 900 of SEQ ID NO: 315582
acuguuauugaguauggag

SEQ ID NO: 389490 - RNA, 19 nt, Artificial Sequence
  Description of Artificial Sequence: Synthetic oligonucleotide
  Antisense Strand to SEQ ID NO: 389489
cuccauacucaauaacagu

SEQ ID NO: 389491 - RNA, 19 nt, Artificial Sequence
  Description of Artificial Sequence: Synthetic oligonucleotide
  Sense Strand Starting at position 900 of SEQ ID NO: 315584
uguuauugaguauggaguu

SEQ ID NO: 389492 - RNA, 19 nt, Artificial Sequence
  Description of Artificial Sequence: Synthetic oligonucleotide
  Antisense Strand to SEQ ID NO: 389491
aacuccauacucaauaaca

SEQ ID NO: 389493 - RNA, 19 nt, Artificial Sequence
  Description of Artificial Sequence: Synthetic oligonucleotide
  Sense Strand Starting at position 900 of SEQ ID NO: 315628
uggaauuagugauuacagu

SEQ ID NO: 389494 - RNA, 19 nt, Artificial Sequence
  Description of Artificial Sequence: Synthetic oligonucleotide
  Antisense Strand to SEQ ID NO: 389493
acuguaaucacuaauucca

SEQ ID NO: 389495 - RNA, 19 nt, Artificial Sequence
  Description of Artificial Sequence: Synthetic oligonucleotide
  Sense Strand Starting at position 900 of SEQ ID NO: 315696
aggugaauucuguggugua

SEQ ID NO: 389496 - RNA, 19 nt, Artificial Sequence
  Description of Artificial Sequence: Synthetic oligonucleotide
  Antisense Strand to SEQ ID NO: 389495
uacaccacagaauucaccu

SEQ ID NO: 389497 - RNA, 19 nt, Artificial Sequence
  Description of Artificial Sequence: Synthetic oligonucleotide
  Sense Strand Starting at position 900 of SEQ ID NO: 315703
uucugugguguaugaauaa

SEQ ID NO: 389498 - RNA, 19 nt, Artificial Sequence
  Description of Artificial Sequence: Synthetic oligonucleotide
  Antisense Strand to SEQ ID NO: 389497
uuauucauacaccacagaa

SEQ ID NO: 389499 - RNA, 19 nt, Artificial Sequence
  Description of Artificial Sequence: Synthetic oligonucleotide
  Sense Strand Starting at position 900 of SEQ ID NO: 315786
gucuuaacacuugaagggu

SEQ ID NO: 389500 - RNA, 19 nt, Artificial Sequence
  Description of Artificial Sequence: Synthetic oligonucleotide
  Antisense Strand to SEQ ID NO: 389499
acccuucaaguguuaagac

SEQ ID NO: 389501 - RNA, 19 nt, Artificial Sequence
  Description of Artificial Sequence: Synthetic oligonucleotide
  Sense Strand Starting at position 900 of SEQ ID NO: 316087
cuugaaagaacaugcguaa

SEQ ID NO: 389502 - RNA, 19 nt, Artificial Sequence
  Description of Artificial Sequence: Synthetic oligonucleotide
  Antisense Strand to SEQ ID NO: 389501
uuacgcauguucuuucaag

SEQ ID NO: 389503 - RNA, 19 nt, Artificial Sequence
  Description of Artificial Sequence: Synthetic oligonucleotide
  Sense Strand Starting at position 900 of SEQ ID NO: 316168
gucccaugguaucucucaa

SEQ ID NO: 389504 - RNA, 19 nt, Artificial Sequence
  Description of Artificial Sequence: Synthetic oligonucleotide
  Antisense Strand to SEQ ID NO: 389503
uugagagauaccaugggac

SEQ ID NO: 389505 - RNA, 19 nt, Artificial Sequence
  Description of Artificial Sequence: Synthetic oligonucleotide
  Sense Strand Starting at position 900 of SEQ ID NO: 316232
ucaacagugguuuauacau

SEQ ID NO: 389506 - RNA, 19 nt, Artificial Sequence
  Description of Artificial Sequence: Synthetic oligonucleotide
  Antisense Strand to SEQ ID NO: 389505
auguauaaaccacuguuga

SEQ ID NO: 389507 - RNA, 19 nt, Artificial Sequence
  Description of Artificial Sequence: Synthetic oligonucleotide
  Sense Strand Starting at position 900 of SEQ ID NO: 316297
ucuguauccuagccuggaa

SEQ ID NO: 389508 - RNA, 19 nt, Artificial Sequence
  Description of Artificial Sequence: Synthetic oligonucleotide
  Antisense Strand to SEQ ID NO: 389507
uuccaggcuaggauacaga

SEQ ID NO: 389509 - RNA, 19 nt, Artificial Sequence
  Description of Artificial Sequence: Synthetic oligonucleotide
  Sense Strand Starting at position 900 of SEQ ID NO: 316426
aggacuucuggaggaaugu

SEQ ID NO: 389510 - RNA, 19 nt, Artificial Sequence
  Description of Artificial Sequence: Synthetic oligonucleotide
  Antisense Strand to SEQ ID NO: 389509
acauuccuccagaaguccu

SEQ ID NO: 389511 - RNA, 19 nt, Artificial Sequence
  Description of Artificial Sequence: Synthetic oligonucleotide
  Sense Strand Starting at position 900 of SEQ ID NO: 316564
ugcuaaggacguggagaau

SEQ ID NO: 389512 - RNA, 19 nt, Artificial Sequence
  Description of Artificial Sequence: Synthetic oligonucleotide
  Antisense Strand to SEQ ID NO: 389511
auucuccacguccuuagca

SEQ ID NO: 389513 - RNA, 19 nt, Artificial Sequence
  Description of Artificial Sequence: Synthetic oligonucleotide
  Sense Strand Starting at position 900 of SEQ ID NO: 317401
aagcgacggccuuaaggau

SEQ ID NO: 389514 - RNA, 19 nt, Artificial Sequence
  Description of Artificial Sequence: Synthetic oligonucleotide
  Antisense Strand to SEQ ID NO: 389513
auccuuaaggccgucgcuu

SEQ ID NO: 389515 - RNA, 19 nt, Artificial Sequence
  Description of Artificial Sequence: Synthetic oligonucleotide
  Sense Strand Starting at position 900 of SEQ ID NO: 317445
gcuguaaccagauugcguu

SEQ ID NO: 389516 - RNA, 19 nt, Artificial Sequence
  Description of Artificial Sequence: Synthetic oligonucleotide
  Antisense Strand to SEQ ID NO: 389515
aacgcaaucugguuacagc

SEQ ID NO: 389517 - RNA, 19 nt, Artificial Sequence
  Description of Artificial Sequence: Synthetic oligonucleotide
  Sense Strand Starting at position 900 of SEQ ID NO: 317449
uaaccagauugcguuaaag

SEQ ID NO: 389518 - RNA, 19 nt, Artificial Sequence
  Description of Artificial Sequence: Synthetic oligonucleotide
  Antisense Strand to SEQ ID NO: 389517
cuuuaacgcaaucugguua

SEQ ID NO: 389519 - RNA, 19 nt, Artificial Sequence
  Description of Artificial Sequence: Synthetic oligonucleotide
  Sense Strand Starting at position 900 of SEQ ID NO: 317451
accagauugcguuaaagca

SEQ ID NO: 389520 - RNA, 19 nt, Artificial Sequence
  Description of Artificial Sequence: Synthetic oligonucleotide
  Antisense Strand to SEQ ID NO: 389519
ugcuuuaacgcaaucuggu

SEQ ID NO: 389521 - RNA, 19 nt, Artificial Sequence
  Description of Artificial Sequence: Synthetic oligonucleotide
  Sense Strand Starting at position 900 of SEQ ID NO: 317509
ccuauugagagcugaguau

SEQ ID NO: 389522 - RNA, 19 nt, Artificial Sequence
  Description of Artificial Sequence: Synthetic oligonucleotide
  Antisense Strand to SEQ ID NO: 389521
auacucagcucucaauagg

SEQ ID NO: 389523 - RNA, 19 nt, Artificial Sequence
  Description of Artificial Sequence: Synthetic oligonucleotide
  Sense Strand Starting at position 900 of SEQ ID NO: 317564
acguucuuaagacaagugu

SEQ ID NO: 389524 - RNA, 19 nt, Artificial Sequence
  Description of Artificial Sequence: Synthetic oligonucleotide
  Antisense Strand to SEQ ID NO: 389523
acacuugucuuaagaacgu

SEQ ID NO: 389525 - RNA, 19 nt, Artificial Sequence
  Description of Artificial Sequence: Synthetic oligonucleotide
  Sense Strand Starting at position 900 of SEQ ID NO: 317568
ucuuaagacaagugucgau

SEQ ID NO: 389526 - RNA, 19 nt, Artificial Sequence
  Description of Artificial Sequence: Synthetic oligonucleotide
  Antisense Strand to SEQ ID NO: 389525
aucgacacuugucuuaaga

SEQ ID NO: 389527 - RNA, 19 nt, Artificial Sequence
  Description of Artificial Sequence: Synthetic oligonucleotide
  Sense Strand Starting at position 900 of SEQ ID NO: 317593
uaacaugaguuacucggaa

SEQ ID NO: 389528 - RNA, 19 nt, Artificial Sequence
  Description of Artificial Sequence: Synthetic oligonucleotide
  Antisense Strand to SEQ ID NO: 389527
uuccgaguaacucauguua

SEQ ID NO: 389529 - RNA, 19 nt, Artificial Sequence
  Description of Artificial Sequence: Synthetic oligonucleotide
  Sense Strand Starting at position 900 of SEQ ID NO: 317595
acaugaguuacucggaauc

SEQ ID NO: 389530 - RNA, 19 nt, Artificial Sequence
  Description of Artificial Sequence: Synthetic oligonucleotide
  Antisense Strand to SEQ ID NO: 389529
gauuccgaguaacucaugu

SEQ ID NO: 389531 - RNA, 19 nt, Artificial Sequence
  Description of Artificial Sequence: Synthetic oligonucleotide
  Sense Strand Starting at position 900 of SEQ ID NO: 317626
uggagagaucaagguucga

SEQ ID NO: 389532 - RNA, 19 nt, Artificial Sequence
  Description of Artificial Sequence: Synthetic oligonucleotide
  Antisense Strand to SEQ ID NO: 389531
ucgaaccuugaucucucca

SEQ ID NO: 389533 - RNA, 19 nt, Artificial Sequence
  Description of Artificial Sequence: Synthetic oligonucleotide
  Sense Strand Starting at position 900 of SEQ ID NO: 317767
ggccucagaagcuguuaga

SEQ ID NO: 389534 - RNA, 19 nt, Artificial Sequence
  Description of Artificial Sequence: Synthetic oligonucleotide
  Antisense Strand to SEQ ID NO: 389533
ucuaacagcuucugaggcc

SEQ ID NO: 389535 - RNA, 19 nt, Artificial Sequence
  Description of Artificial Sequence: Synthetic oligonucleotide
  Sense Strand Starting at position 900 of SEQ ID NO: 318004
ggaggagaauuguucgaac

SEQ ID NO: 389536 - RNA, 19 nt, Artificial Sequence
  Description of Artificial Sequence: Synthetic oligonucleotide
  Antisense Strand to SEQ ID NO: 389535
guucgaacaauucuccucc

SEQ ID NO: 389537 - RNA, 19 nt, Artificial Sequence
  Description of Artificial Sequence: Synthetic oligonucleotide
  Sense Strand Starting at position 900 of SEQ ID NO: 318367
cccuuaucuuaaccgagau

SEQ ID NO: 389538 - RNA, 19 nt, Artificial Sequence
  Description of Artificial Sequence: Synthetic oligonucleotide
  Antisense Strand to SEQ ID NO: 389537
aucucgguuaagauaaggg

SEQ ID NO: 389539 - RNA, 19 nt, Artificial Sequence
  Description of Artificial Sequence: Synthetic oligonucleotide
  Sense Strand Starting at position 900 of SEQ ID NO: 318445
uaccaaugaccuggaaguu

SEQ ID NO: 389540 - RNA, 19 nt, Artificial Sequence
  Description of Artificial Sequence: Synthetic oligonucleotide
  Antisense Strand to SEQ ID NO: 389539
aacuuccaggucauuggua

SEQ ID NO: 389541 - RNA, 19 nt, Artificial Sequence
  Description of Artificial Sequence: Synthetic oligonucleotide
  Sense Strand Starting at position 900 of SEQ ID NO: 318673
gguauuucggguugacagu

SEQ ID NO: 389542 - RNA, 19 nt, Artificial Sequence
  Description of Artificial Sequence: Synthetic oligonucleotide
  Antisense Strand to SEQ ID NO: 389541
acugucaacccgaaauacc

SEQ ID NO: 389543 - RNA, 19 nt, Artificial Sequence
  Description of Artificial Sequence: Synthetic oligonucleotide
  Sense Strand Starting at position 900 of SEQ ID NO: 318705
aaggauucugaguggaggu

SEQ ID NO: 389544 - RNA, 19 nt, Artificial Sequence
  Description of Artificial Sequence: Synthetic oligonucleotide
  Antisense Strand to SEQ ID NO: 389543
accuccacucagaauccuu

SEQ ID NO: 389545 - RNA, 19 nt, Artificial Sequence
  Description of Artificial Sequence: Synthetic oligonucleotide
  Sense Strand Starting at position 900 of SEQ ID NO: 318984
gcucgcuuccaacagagaa

SEQ ID NO: 389546 - RNA, 19 nt, Artificial Sequence
  Description of Artificial Sequence: Synthetic oligonucleotide
  Antisense Strand to SEQ ID NO: 389545
uucucuguuggaagcgagc

SEQ ID NO: 389547 - RNA, 19 nt, Artificial Sequence
  Description of Artificial Sequence: Synthetic oligonucleotide
  Sense Strand Starting at position 900 of SEQ ID NO: 319021
cuacuucugggaugguaga

SEQ ID NO: 389548 - RNA, 19 nt, Artificial Sequence
  Description of Artificial Sequence: Synthetic oligonucleotide
  Antisense Strand to SEQ ID NO: 389547
ucuaccaucccagaaguag

SEQ ID NO: 389549 - RNA, 19 nt, Artificial Sequence
  Description of Artificial Sequence: Synthetic oligonucleotide
  Sense Strand Starting at position 900 of SEQ ID NO: 319038
gagagcagucuuuagccua

SEQ ID NO: 389550 - RNA, 19 nt, Artificial Sequence
  Description of Artificial Sequence: Synthetic oligonucleotide
  Antisense Strand to SEQ ID NO: 389549
uaggcuaaagacugcucuc

SEQ ID NO: 389551 - RNA, 19 nt, Artificial Sequence
  Description of Artificial Sequence: Synthetic oligonucleotide
  Sense Strand Starting at position 900 of SEQ ID NO: 319041
agcagucuuuagccuaaga

SEQ ID NO: 389552 - RNA, 19 nt, Artificial Sequence
  Description of Artificial Sequence: Synthetic oligonucleotide
  Antisense Strand to SEQ ID NO: 389551
ucuuaggcuaaagacugcu

SEQ ID NO: 389553 - RNA, 19 nt, Artificial Sequence
  Description of Artificial Sequence: Synthetic oligonucleotide
  Sense Strand Starting at position 900 of SEQ ID NO: 319055
uaagaccuguucuuaggua

SEQ ID NO: 389554 - RNA, 19 nt, Artificial Sequence
  Description of Artificial Sequence: Synthetic oligonucleotide
  Antisense Strand to SEQ ID NO: 389553
uaccuaagaacaggucuua

SEQ ID NO: 389555 - RNA, 19 nt, Artificial Sequence
  Description of Artificial Sequence: Synthetic oligonucleotide
  Sense Strand Starting at position 900 of SEQ ID NO: 319059
accuguucuuagguaagua

SEQ ID NO: 389556 - RNA, 19 nt, Artificial Sequence
  Description of Artificial Sequence: Synthetic oligonucleotide
  Antisense Strand to SEQ ID NO: 389555
uacuuaccuaagaacaggu

SEQ ID NO: 389557 - RNA, 19 nt, Artificial Sequence
  Description of Artificial Sequence: Synthetic oligonucleotide
  Sense Strand Starting at position 900 of SEQ ID NO: 319067
uuagguaaguagccgaauu

SEQ ID NO: 389558 - RNA, 19 nt, Artificial Sequence
  Description of Artificial Sequence: Synthetic oligonucleotide
  Antisense Strand to SEQ ID NO: 389557
aauucggcuacuuaccuaa

SEQ ID NO: 389559 - RNA, 19 nt, Artificial Sequence
  Description of Artificial Sequence: Synthetic oligonucleotide
  Sense Strand Starting at position 901 of SEQ ID NO: 315292
cacacaaagguguguaaga

SEQ ID NO: 389560 - RNA, 19 nt, Artificial Sequence
  Description of Artificial Sequence: Synthetic oligonucleotide
  Antisense Strand to SEQ ID NO: 389559
ucuuacacaccuuugugug

SEQ ID NO: 389561 - RNA, 19 nt, Artificial Sequence
  Description of Artificial Sequence: Synthetic oligonucleotide
  Sense Strand Starting at position 901 of SEQ ID NO: 315293
acacaaagguguguaagaa

SEQ ID NO: 389562 - RNA, 19 nt, Artificial Sequence
  Description of Artificial Sequence: Synthetic oligonucleotide
  Antisense Strand to SEQ ID NO: 389561
uucuuacacaccuuugugu

SEQ ID NO: 389563 - RNA, 19 nt, Artificial Sequence
  Description of Artificial Sequence: Synthetic oligonucleotide
  Sense Strand Starting at position 901 of SEQ ID NO: 315357
uaagaagugcgucaugaag

SEQ ID NO: 389564 - RNA, 19 nt, Artificial Sequence
  Description of Artificial Sequence: Synthetic oligonucleotide
  Antisense Strand to SEQ ID NO: 389563
cuucaugacgcacuucuua

SEQ ID NO: 389565 - RNA, 19 nt, Artificial Sequence
  Description of Artificial Sequence: Synthetic oligonucleotide
  Sense Strand Starting at position 901 of SEQ ID NO: 315488
ccaguucugguuuaugacu

SEQ ID NO: 389566 - RNA, 19 nt, Artificial Sequence
  Description of Artificial Sequence: Synthetic oligonucleotide
  Antisense Strand to SEQ ID NO: 389565
agucauaaaccagaacugg

SEQ ID NO: 389567 - RNA, 19 nt, Artificial Sequence
  Description of Artificial Sequence: Synthetic oligonucleotide
  Sense Strand Starting at position 901 of SEQ ID NO: 315714
ugagccuucccaugacaug

SEQ ID NO: 389568 - RNA, 19 nt, Artificial Sequence
  Description of Artificial Sequence: Synthetic oligonucleotide
  Antisense Strand to SEQ ID NO: 389567
caugucaugggaaggcuca

SEQ ID NO: 389569 - RNA, 19 nt, Artificial Sequence
  Description of Artificial Sequence: Synthetic oligonucleotide
  Sense Strand Starting at position 901 of SEQ ID NO: 316013
ugcaucagaagugaaguua

SEQ ID NO: 389570 - RNA, 19 nt, Artificial Sequence
  Description of Artificial Sequence: Synthetic oligonucleotide
  Antisense Strand to SEQ ID NO: 389569
uaacuucacuucugaugca

SEQ ID NO: 389571 - RNA, 19 nt, Artificial Sequence
  Description of Artificial Sequence: Synthetic oligonucleotide
  Sense Strand Starting at position 901 of SEQ ID NO: 316534
cuaauagagucgcccagaa

SEQ ID NO: 389572 - RNA, 19 nt, Artificial Sequence
  Description of Artificial Sequence: Synthetic oligonucleotide
  Antisense Strand to SEQ ID NO: 389571
uucugggcgacucuauuag

SEQ ID NO: 389573 - RNA, 19 nt, Artificial Sequence
  Description of Artificial Sequence: Synthetic oligonucleotide
  Sense Strand Starting at position 901 of SEQ ID NO: 316536
aauagagucgcccagaaca

SEQ ID NO: 389574 - RNA, 19 nt, Artificial Sequence
  Description of Artificial Sequence: Synthetic oligonucleotide
  Antisense Strand to SEQ ID NO: 389573
uguucugggcgacucuauu

SEQ ID NO: 389575 - RNA, 19 nt, Artificial Sequence
  Description of Artificial Sequence: Synthetic oligonucleotide
  Sense Strand Starting at position 901 of SEQ ID NO: 317556
uggaaaugacugugagggu

SEQ ID NO: 389576 - RNA, 19 nt, Artificial Sequence
  Description of Artificial Sequence: Synthetic oligonucleotide
  Antisense Strand to SEQ ID NO: 389575
acccucacagucauuucca

SEQ ID NO: 389577 - RNA, 19 nt, Artificial Sequence
  Description of Artificial Sequence: Synthetic oligonucleotide
  Sense Strand Starting at position 901 of SEQ ID NO: 317597
aagacuucucaggguacuu

SEQ ID NO: 389578 - RNA, 19 nt, Artificial Sequence
  Description of Artificial Sequence: Synthetic oligonucleotide
  Antisense Strand to SEQ ID NO: 389577
aaguacccugagaagucuu

SEQ ID NO: 389579 - RNA, 19 nt, Artificial Sequence
  Description of Artificial Sequence: Synthetic oligonucleotide
  Sense Strand Starting at position 901 of SEQ ID NO: 317602
uucucaggguacuuagauu

SEQ ID NO: 389580 - RNA, 19 nt, Artificial Sequence
  Description of Artificial Sequence: Synthetic oligonucleotide
  Antisense Strand to SEQ ID NO: 389579
aaucuaaguacccugagaa

SEQ ID NO: 389581 - RNA, 19 nt, Artificial Sequence
  Description of Artificial Sequence: Synthetic oligonucleotide
  Sense Strand Starting at position 901 of SEQ ID NO: 317608
ggguacuuagauuggguga

SEQ ID NO: 389582 - RNA, 19 nt, Artificial Sequence
  Description of Artificial Sequence: Synthetic oligonucleotide
  Antisense Strand to SEQ ID NO: 389581
ucacccaaucuaaguaccc

SEQ ID NO: 389583 - RNA, 19 nt, Artificial Sequence
  Description of Artificial Sequence: Synthetic oligonucleotide
  Sense Strand Starting at position 901 of SEQ ID NO: 317619
uugggugagcccugaagga

SEQ ID NO: 389584 - RNA, 19 nt, Artificial Sequence
  Description of Artificial Sequence: Synthetic oligonucleotide
  Antisense Strand to SEQ ID NO: 389583
uccuucagggcucacccaa

SEQ ID NO: 389585 - RNA, 19 nt, Artificial Sequence
  Description of Artificial Sequence: Synthetic oligonucleotide
  Sense Strand Starting at position 901 of SEQ ID NO: 317698
uuccgagaccuugaguaaa

SEQ ID NO: 389586 - RNA, 19 nt, Artificial Sequence
  Description of Artificial Sequence: Synthetic oligonucleotide
  Antisense Strand to SEQ ID NO: 389585
uuuacucaaggucucggaa

SEQ ID NO: 389587 - RNA, 19 nt, Artificial Sequence
  Description of Artificial Sequence: Synthetic oligonucleotide
  Sense Strand Starting at position 901 of SEQ ID NO: 317700
ccgagaccuugaguaaauc

SEQ ID NO: 389588 - RNA, 19 nt, Artificial Sequence
  Description of Artificial Sequence: Synthetic oligonucleotide
  Antisense Strand to SEQ ID NO: 389587
gauuuacucaaggucucgg

SEQ ID NO: 389589 - RNA, 19 nt, Artificial Sequence
  Description of Artificial Sequence: Synthetic oligonucleotide
  Sense Strand Starting at position 901 of SEQ ID NO: 317701
cgagaccuugaguaaaucu

SEQ ID NO: 389590 - RNA, 19 nt, Artificial Sequence
  Description of Artificial Sequence: Synthetic oligonucleotide
  Antisense Strand to SEQ ID NO: 389589
agauuuacucaaggucucg

SEQ ID NO: 389591 - RNA, 19 nt, Artificial Sequence
  Description of Artificial Sequence: Synthetic oligonucleotide
  Sense Strand Starting at position 901 of SEQ ID NO: 317784
ugcugacuucucuaacaug

SEQ ID NO: 389592 - RNA, 19 nt, Artificial Sequence
  Description of Artificial Sequence: Synthetic oligonucleotide
  Antisense Strand to SEQ ID NO: 389591
cauguuagagaagucagca

SEQ ID NO: 389593 - RNA, 19 nt, Artificial Sequence
  Description of Artificial Sequence: Synthetic oligonucleotide
  Sense Strand Starting at position 901 of SEQ ID NO: 317933
augguccuaugauugcaau

SEQ ID NO: 389594 - RNA, 19 nt, Artificial Sequence
  Description of Artificial Sequence: Synthetic oligonucleotide
  Antisense Strand to SEQ ID NO: 389593
auugcaaucauaggaccau

SEQ ID NO: 389595 - RNA, 19 nt, Artificial Sequence
  Description of Artificial Sequence: Synthetic oligonucleotide
  Sense Strand Starting at position 901 of SEQ ID NO: 317959
cggucuguuaaggaguaua

SEQ ID NO: 389596 - RNA, 19 nt, Artificial Sequence
  Description of Artificial Sequence: Synthetic oligonucleotide
  Antisense Strand to SEQ ID NO: 389595
uauacuccuuaacagaccg

SEQ ID NO: 389597 - RNA, 19 nt, Artificial Sequence
  Description of Artificial Sequence: Synthetic oligonucleotide
  Sense Strand Starting at position 901 of SEQ ID NO: 318012
gcuugccuuccugaagaaa

SEQ ID NO: 389598 - RNA, 19 nt, Artificial Sequence
  Description of Artificial Sequence: Synthetic oligonucleotide
  Antisense Strand to SEQ ID NO: 389597
uuucuucaggaaggcaagc

SEQ ID NO: 389599 - RNA, 19 nt, Artificial Sequence
  Description of Artificial Sequence: Synthetic oligonucleotide
  Sense Strand Starting at position 901 of SEQ ID NO: 318061
gaaggaugaguggguauua

SEQ ID NO: 389600 - RNA, 19 nt, Artificial Sequence
  Description of Artificial Sequence: Synthetic oligonucleotide
  Antisense Strand to SEQ ID NO: 389599
uaauacccacucauccuuc

SEQ ID NO: 389601 - RNA, 19 nt, Artificial Sequence
  Description of Artificial Sequence: Synthetic oligonucleotide
  Sense Strand Starting at position 901 of SEQ ID NO: 318070
guggguauuagguaggaga

SEQ ID NO: 389602 - RNA, 19 nt, Artificial Sequence
  Description of Artificial Sequence: Synthetic oligonucleotide
  Antisense Strand to SEQ ID NO: 389601
ucuccuaccuaauacccac

SEQ ID NO: 389603 - RNA, 19 nt, Artificial Sequence
  Description of Artificial Sequence: Synthetic oligonucleotide
  Sense Strand Starting at position 901 of SEQ ID NO: 318072
ggguauuagguaggagauu

SEQ ID NO: 389604 - RNA, 19 nt, Artificial Sequence
  Description of Artificial Sequence: Synthetic oligonucleotide
  Antisense Strand to SEQ ID NO: 389603
aaucuccuaccuaauaccc

SEQ ID NO: 389605 - RNA, 19 nt, Artificial Sequence
  Description of Artificial Sequence: Synthetic oligonucleotide
  Sense Strand Starting at position 901 of SEQ ID NO: 318131
cugauagaguuccugaguu

SEQ ID NO: 389606 - RNA, 19 nt, Artificial Sequence
  Description of Artificial Sequence: Synthetic oligonucleotide
  Antisense Strand to SEQ ID NO: 389605
aacucaggaacucuaucag

SEQ ID NO: 389607 - RNA, 19 nt, Artificial Sequence
  Description of Artificial Sequence: Synthetic oligonucleotide
  Sense Strand Starting at position 901 of SEQ ID NO: 318133
gauagaguuccugaguuag

SEQ ID NO: 389608 - RNA, 19 nt, Artificial Sequence
  Description of Artificial Sequence: Synthetic oligonucleotide
  Antisense Strand to SEQ ID NO: 389607
cuaacucaggaacucuauc

SEQ ID NO: 389609 - RNA, 19 nt, Artificial Sequence
  Description of Artificial Sequence: Synthetic oligonucleotide
  Sense Strand Starting at position 901 of SEQ ID NO: 318135
uagaguuccugaguuagaa

SEQ ID NO: 389610 - RNA, 19 nt, Artificial Sequence
  Description of Artificial Sequence: Synthetic oligonucleotide
  Antisense Strand to SEQ ID NO: 389609
uucuaacucaggaacucua

SEQ ID NO: 389611 - RNA, 19 nt, Artificial Sequence
  Description of Artificial Sequence: Synthetic oligonucleotide
  Sense Strand Starting at position 901 of SEQ ID NO: 318199
uuagaaguacugcagcuua

SEQ ID NO: 389612 - RNA, 19 nt, Artificial Sequence
  Description of Artificial Sequence: Synthetic oligonucleotide
  Antisense Strand to SEQ ID NO: 389611
uaagcugcaguacuucuaa

SEQ ID NO: 389613 - RNA, 19 nt, Artificial Sequence
  Description of Artificial Sequence: Synthetic oligonucleotide
  Sense Strand Starting at position 901 of SEQ ID NO: 318204
aguacugcagcuuaaauau

SEQ ID NO: 389614 - RNA, 19 nt, Artificial Sequence
  Description of Artificial Sequence: Synthetic oligonucleotide
  Antisense Strand to SEQ ID NO: 389613
auauuuaagcugcaguacu

SEQ ID NO: 389615 - RNA, 19 nt, Artificial Sequence
  Description of Artificial Sequence: Synthetic oligonucleotide
  Sense Strand Starting at position 901 of SEQ ID NO: 318239
uguggaauguuacuuuaua

SEQ ID NO: 389616 - RNA, 19 nt, Artificial Sequence
  Description of Artificial Sequence: Synthetic oligonucleotide
  Antisense Strand to SEQ ID NO: 389615
uauaaaguaacauuccaca

SEQ ID NO: 389617 - RNA, 19 nt, Artificial Sequence
  Description of Artificial Sequence: Synthetic oligonucleotide
  Sense Strand Starting at position 901 of SEQ ID NO: 318240
guggaauguuacuuuauau

SEQ ID NO: 389618 - RNA, 19 nt, Artificial Sequence
  Description of Artificial Sequence: Synthetic oligonucleotide
  Antisense Strand to SEQ ID NO: 389617
auauaaaguaacauuccac

SEQ ID NO: 389619 - RNA, 19 nt, Artificial Sequence
  Description of Artificial Sequence: Synthetic oligonucleotide
  Sense Strand Starting at position 901 of SEQ ID NO: 318352
agcaucagacauuggagau

SEQ ID NO: 389620 - RNA, 19 nt, Artificial Sequence
  Description of Artificial Sequence: Synthetic oligonucleotide
  Antisense Strand to SEQ ID NO: 389619
aucuccaaugucugaugcu

SEQ ID NO: 389621 - RNA, 19 nt, Artificial Sequence
  Description of Artificial Sequence: Synthetic oligonucleotide
  Sense Strand Starting at position 901 of SEQ ID NO: 318353
gcaucagacauuggagaua

SEQ ID NO: 389622 - RNA, 19 nt, Artificial Sequence
  Description of Artificial Sequence: Synthetic oligonucleotide
  Antisense Strand to SEQ ID NO: 389621
uaucuccaaugucugaugc

SEQ ID NO: 389623 - RNA, 19 nt, Artificial Sequence
  Description of Artificial Sequence: Synthetic oligonucleotide
  Sense Strand Starting at position 901 of SEQ ID NO: 318550
agagaaauccagggugugu

SEQ ID NO: 389624 - RNA, 19 nt, Artificial Sequence
  Description of Artificial Sequence: Synthetic oligonucleotide
  Antisense Strand to SEQ ID NO: 389623
acacacccuggauuucucu

SEQ ID NO: 389625 - RNA, 19 nt, Artificial Sequence
  Description of Artificial Sequence: Synthetic oligonucleotide
  Sense Strand Starting at position 901 of SEQ ID NO: 318588
ucuuuccuccucugaggau

SEQ ID NO: 389626 - RNA, 19 nt, Artificial Sequence
  Description of Artificial Sequence: Synthetic oligonucleotide
  Antisense Strand to SEQ ID NO: 389625
auccucagaggaggaaaga

SEQ ID NO: 389627 - RNA, 19 nt, Artificial Sequence
  Description of Artificial Sequence: Synthetic oligonucleotide
  Sense Strand Starting at position 901 of SEQ ID NO: 318705
ccucaauuccauuaagggu

SEQ ID NO: 389628 - RNA, 19 nt, Artificial Sequence
  Description of Artificial Sequence: Synthetic oligonucleotide
  Antisense Strand to SEQ ID NO: 389627
acccuuaauggaauugagg

SEQ ID NO: 389629 - RNA, 19 nt, Artificial Sequence
  Description of Artificial Sequence: Synthetic oligonucleotide
  Sense Strand Starting at position 901 of SEQ ID NO: 318913
ucauuauuugcagguuuau

SEQ ID NO: 389630 - RNA, 19 nt, Artificial Sequence
  Description of Artificial Sequence: Synthetic oligonucleotide
  Antisense Strand to SEQ ID NO: 389629
auaaaccugcaaauaauga

SEQ ID NO: 389631 - RNA, 19 nt, Artificial Sequence
  Description of Artificial Sequence: Synthetic oligonucleotide
  Sense Strand Starting at position 901 of SEQ ID NO: 318919
uuugcagguuuaucuagaa

SEQ ID NO: 389632 - RNA, 19 nt, Artificial Sequence
  Description of Artificial Sequence: Synthetic oligonucleotide
  Antisense Strand to SEQ ID NO: 389631
uucuagauaaaccugcaaa

SEQ ID NO: 389633 - RNA, 19 nt, Artificial Sequence
  Description of Artificial Sequence: Synthetic oligonucleotide
  Sense Strand Starting at position 901 of SEQ ID NO: 319077
ucgcaaucacagcaacaau

SEQ ID NO: 389634 - RNA, 19 nt, Artificial Sequence
  Description of Artificial Sequence: Synthetic oligonucleotide
  Antisense Strand to SEQ ID NO: 389633
auuguugcugugauugcga

SEQ ID NO: 389635 - RNA, 19 nt, Artificial Sequence
  Description of Artificial Sequence: Synthetic oligonucleotide
  Sense Strand Starting at position 901 of SEQ ID NO: 319120
ccagauauguaagcuccaa

SEQ ID NO: 389636 - RNA, 19 nt, Artificial Sequence
  Description of Artificial Sequence: Synthetic oligonucleotide
  Antisense Strand to SEQ ID NO: 389635
uuggagcuuacauaucugg

SEQ ID NO: 389637 - RNA, 19 nt, Artificial Sequence
  Description of Artificial Sequence: Synthetic oligonucleotide
  Sense Strand Starting at position 901 of SEQ ID NO: 319124
auauguaagcuccaaauga

SEQ ID NO: 389638 - RNA, 19 nt, Artificial Sequence
  Description of Artificial Sequence: Synthetic oligonucleotide
  Antisense Strand to SEQ ID NO: 389637
ucauuuggagcuuacauau

SEQ ID NO: 389639 - RNA, 19 nt, Artificial Sequence
  Description of Artificial Sequence: Synthetic oligonucleotide
  Sense Strand Starting at position 902 of SEQ ID NO: 315441
uuauuuagcugaugaagaa

SEQ ID NO: 389640 - RNA, 19 nt, Artificial Sequence
  Description of Artificial Sequence: Synthetic oligonucleotide
  Antisense Strand to SEQ ID NO: 389639
uucuucaucagcuaaauaa

SEQ ID NO: 389641 - RNA, 19 nt, Artificial Sequence
  Description of Artificial Sequence: Synthetic oligonucleotide
  Sense Strand Starting at position 902 of SEQ ID NO: 315541
agaguuaucuuucuaccau

SEQ ID NO: 389642 - RNA, 19 nt, Artificial Sequence
  Description of Artificial Sequence: Synthetic oligonucleotide
  Antisense Strand to SEQ ID NO: 389641
augguagaaagauaacucu

SEQ ID NO: 389643 - RNA, 19 nt, Artificial Sequence
  Description of Artificial Sequence: Synthetic oligonucleotide
  Sense Strand Starting at position 902 of SEQ ID NO: 315919
ggacuagauucagcgauag

SEQ ID NO: 389644 - RNA, 19 nt, Artificial Sequence
  Description of Artificial Sequence: Synthetic oligonucleotide
  Antisense Strand to SEQ ID NO: 389643
cuaucgcugaaucuagucc

SEQ ID NO: 389645 - RNA, 19 nt, Artificial Sequence
  Description of Artificial Sequence: Synthetic oligonucleotide
  Sense Strand Starting at position 902 of SEQ ID NO: 315929
cagcgauagauggguuuau

SEQ ID NO: 389646 - RNA, 19 nt, Artificial Sequence
  Description of Artificial Sequence: Synthetic oligonucleotide
  Antisense Strand to SEQ ID NO: 389645
auaaacccaucuaucgcug

SEQ ID NO: 389647 - RNA, 19 nt, Artificial Sequence
  Description of Artificial Sequence: Synthetic oligonucleotide
  Sense Strand Starting at position 902 of SEQ ID NO: 315930
agcgauagauggguuuauu

SEQ ID NO: 389648 - RNA, 19 nt, Artificial Sequence
  Description of Artificial Sequence: Synthetic oligonucleotide
  Antisense Strand to SEQ ID NO: 389647
aauaaacccaucuaucgcu

SEQ ID NO: 389649 - RNA, 19 nt, Artificial Sequence
  Description of Artificial Sequence: Synthetic oligonucleotide
  Sense Strand Starting at position 902 of SEQ ID NO: 316086
gucagugguuagguugaca

SEQ ID NO: 389650 - RNA, 19 nt, Artificial Sequence
  Description of Artificial Sequence: Synthetic oligonucleotide
  Antisense Strand to SEQ ID NO: 389649
ugucaaccuaaccacugac

SEQ ID NO: 389651 - RNA, 19 nt, Artificial Sequence
  Description of Artificial Sequence: Synthetic oligonucleotide
  Sense Strand Starting at position 902 of SEQ ID NO: 316189
aucucucaaggauguuaga

SEQ ID NO: 389652 - RNA, 19 nt, Artificial Sequence
  Description of Artificial Sequence: Synthetic oligonucleotide
  Antisense Strand to SEQ ID NO: 389651
ucuaacauccuugagagau

SEQ ID NO: 389653 - RNA, 19 nt, Artificial Sequence
  Description of Artificial Sequence: Synthetic oligonucleotide
  Sense Strand Starting at position 902 of SEQ ID NO: 316203
uuagaauacuuccugugac

SEQ ID NO: 389654 - RNA, 19 nt, Artificial Sequence
  Description of Artificial Sequence: Synthetic oligonucleotide
  Antisense Strand to SEQ ID NO: 389653
gucacaggaaguauucuaa

SEQ ID NO: 389655 - RNA, 19 nt, Artificial Sequence
  Description of Artificial Sequence: Synthetic oligonucleotide
  Sense Strand Starting at position 902 of SEQ ID NO: 316206
gaauacuuccugugacagc

SEQ ID NO: 389656 - RNA, 19 nt, Artificial Sequence
  Description of Artificial Sequence: Synthetic oligonucleotide
  Antisense Strand to SEQ ID NO: 389655
gcugucacaggaaguauuc

SEQ ID NO: 389657 - RNA, 19 nt, Artificial Sequence
  Description of Artificial Sequence: Synthetic oligonucleotide
  Sense Strand Starting at position 902 of SEQ ID NO: 316362
aagugaaguaaaugagagu

SEQ ID NO: 389658 - RNA, 19 nt, Artificial Sequence
  Description of Artificial Sequence: Synthetic oligonucleotide
  Antisense Strand to SEQ ID NO: 389657
acucucauuuacuucacuu

SEQ ID NO: 389659 - RNA, 19 nt, Artificial Sequence
  Description of Artificial Sequence: Synthetic oligonucleotide
  Sense Strand Starting at position 902 of SEQ ID NO: 316400
guuauuugcugacaccaca

SEQ ID NO: 389660 - RNA, 19 nt, Artificial Sequence
  Description of Artificial Sequence: Synthetic oligonucleotide
  Antisense Strand to SEQ ID NO: 389659
uguggugucagcaaauaac

SEQ ID NO: 389661 - RNA, 19 nt, Artificial Sequence
  Description of Artificial Sequence: Synthetic oligonucleotide
  Sense Strand Starting at position 902 of SEQ ID NO: 316549
gcugucagguguccaagaa

SEQ ID NO: 389662 - RNA, 19 nt, Artificial Sequence
  Description of Artificial Sequence: Synthetic oligonucleotide
  Antisense Strand to SEQ ID NO: 389661
uucuuggacaccugacagc

SEQ ID NO: 389663 - RNA, 19 nt, Artificial Sequence
  Description of Artificial Sequence: Synthetic oligonucleotide
  Sense Strand Starting at position 902 of SEQ ID NO: 316550
cugucagguguccaagaaa

SEQ ID NO: 389664 - RNA, 19 nt, Artificial Sequence
  Description of Artificial Sequence: Synthetic oligonucleotide
  Antisense Strand to SEQ ID NO: 389663
uuucuuggacaccugacag

SEQ ID NO: 389665 - RNA, 19 nt, Artificial Sequence
  Description of Artificial Sequence: Synthetic oligonucleotide
  Sense Strand Starting at position 902 of SEQ ID NO: 316599
cucagaaugcuauggauag

SEQ ID NO: 389666 - RNA, 19 nt, Artificial Sequence
  Description of Artificial Sequence: Synthetic oligonucleotide
  Antisense Strand to SEQ ID NO: 389665
cuauccauagcauucugag

SEQ ID NO: 389667 - RNA, 19 nt, Artificial Sequence
  Description of Artificial Sequence: Synthetic oligonucleotide
  Sense Strand Starting at position 902 of SEQ ID NO: 317310
ggcggaguuucccugagaa

SEQ ID NO: 389668 - RNA, 19 nt, Artificial Sequence
  Description of Artificial Sequence: Synthetic oligonucleotide
  Antisense Strand to SEQ ID NO: 389667
uucucagggaaacuccgcc

SEQ ID NO: 389669 - RNA, 19 nt, Artificial Sequence
  Description of Artificial Sequence: Synthetic oligonucleotide
  Sense Strand Starting at position 902 of SEQ ID NO: 317312
cggaguuucccugagaagg

SEQ ID NO: 389670 - RNA, 19 nt, Artificial Sequence
  Description of Artificial Sequence: Synthetic oligonucleotide
  Antisense Strand to SEQ ID NO: 389669
ccuucucagggaaacuccg

SEQ ID NO: 389671 - RNA, 19 nt, Artificial Sequence
  Description of Artificial Sequence: Synthetic oligonucleotide
  Sense Strand Starting at position 902 of SEQ ID NO: 317507
gacgucaaauugccucuua

SEQ ID NO: 389672 - RNA, 19 nt, Artificial Sequence
  Description of Artificial Sequence: Synthetic oligonucleotide
  Antisense Strand to SEQ ID NO: 389671
uaagaggcaauuugacguc

SEQ ID NO: 389673 - RNA, 19 nt, Artificial Sequence
  Description of Artificial Sequence: Synthetic oligonucleotide
  Sense Strand Starting at position 902 of SEQ ID NO: 317508
acgucaaauugccucuuau

SEQ ID NO: 389674 - RNA, 19 nt, Artificial Sequence
  Description of Artificial Sequence: Synthetic oligonucleotide
  Antisense Strand to SEQ ID NO: 389673
auaagaggcaauuugacgu

SEQ ID NO: 389675 - RNA, 19 nt, Artificial Sequence
  Description of Artificial Sequence: Synthetic oligonucleotide
  Sense Strand Starting at position 902 of SEQ ID NO: 317626
cagggaucccuuuguaaua

SEQ ID NO: 389676 - RNA, 19 nt, Artificial Sequence
  Description of Artificial Sequence: Synthetic oligonucleotide
  Antisense Strand to SEQ ID NO: 389675
uauuacaaagggaucccug

SEQ ID NO: 389677 - RNA, 19 nt, Artificial Sequence
  Description of Artificial Sequence: Synthetic oligonucleotide
  Sense Strand Starting at position 902 of SEQ ID NO: 317627
agggaucccuuuguaauag

SEQ ID NO: 389678 - RNA, 19 nt, Artificial Sequence
  Description of Artificial Sequence: Synthetic oligonucleotide
  Antisense Strand to SEQ ID NO: 389677
cuauuacaaagggaucccu

SEQ ID NO: 389679 - RNA, 19 nt, Artificial Sequence
  Description of Artificial Sequence: Synthetic oligonucleotide
  Sense Strand Starting at position 902 of SEQ ID NO: 317662
gggugacuuagacguagga

SEQ ID NO: 389680 - RNA, 19 nt, Artificial Sequence
  Description of Artificial Sequence: Synthetic oligonucleotide
  Antisense Strand to SEQ ID NO: 389679
uccuacgucuaagucaccc

SEQ ID NO: 389681 - RNA, 19 nt, Artificial Sequence
  Description of Artificial Sequence: Synthetic oligonucleotide
  Sense Strand Starting at position 902 of SEQ ID NO: 317664
gugacuuagacguaggaaa

SEQ ID NO: 389682 - RNA, 19 nt, Artificial Sequence
  Description of Artificial Sequence: Synthetic oligonucleotide
  Antisense Strand to SEQ ID NO: 389681
uuuccuacgucuaagucac

SEQ ID NO: 389683 - RNA, 19 nt, Artificial Sequence
  Description of Artificial Sequence: Synthetic oligonucleotide
  Sense Strand Starting at position 902 of SEQ ID NO: 317740
ggcacuaggccucaagaga

SEQ ID NO: 389684 - RNA, 19 nt, Artificial Sequence
  Description of Artificial Sequence: Synthetic oligonucleotide
  Antisense Strand to SEQ ID NO: 389683
ucucuugaggccuagugcc

SEQ ID NO: 389685 - RNA, 19 nt, Artificial Sequence
  Description of Artificial Sequence: Synthetic oligonucleotide
  Sense Strand Starting at position 902 of SEQ ID NO: 317787
guccuaggugcugcguaau

SEQ ID NO: 389686 - RNA, 19 nt, Artificial Sequence
  Description of Artificial Sequence: Synthetic oligonucleotide
  Antisense Strand to SEQ ID NO: 389685
auuacgcagcaccuaggac

SEQ ID NO: 389687 - RNA, 19 nt, Artificial Sequence
  Description of Artificial Sequence: Synthetic oligonucleotide
  Sense Strand Starting at position 902 of SEQ ID NO: 317893
ugauguaacucuuugagga

SEQ ID NO: 389688 - RNA, 19 nt, Artificial Sequence
  Description of Artificial Sequence: Synthetic oligonucleotide
  Antisense Strand to SEQ ID NO: 389687
uccucaaagaguuacauca

SEQ ID NO: 389689 - RNA, 19 nt, Artificial Sequence
  Description of Artificial Sequence: Synthetic oligonucleotide
  Sense Strand Starting at position 902 of SEQ ID NO: 317894
gauguaacucuuugaggaa

SEQ ID NO: 389690 - RNA, 19 nt, Artificial Sequence
  Description of Artificial Sequence: Synthetic oligonucleotide
  Antisense Strand to SEQ ID NO: 389689
uuccucaaagaguuacauc

SEQ ID NO: 389691 - RNA, 19 nt, Artificial Sequence
  Description of Artificial Sequence: Synthetic oligonucleotide
  Sense Strand Starting at position 902 of SEQ ID NO: 318411
guuucuugacagugggcaa

SEQ ID NO: 389692 - RNA, 19 nt, Artificial Sequence
  Description of Artificial Sequence: Synthetic oligonucleotide
  Antisense Strand to SEQ ID NO: 389691
uugcccacugucaagaaac

SEQ ID NO: 389693 - RNA, 19 nt, Artificial Sequence
  Description of Artificial Sequence: Synthetic oligonucleotide
  Sense Strand Starting at position 902 of SEQ ID NO: 318448
agguauauaguauaguaca

SEQ ID NO: 389694 - RNA, 19 nt, Artificial Sequence
  Description of Artificial Sequence: Synthetic oligonucleotide
  Antisense Strand to SEQ ID NO: 389693
uguacuauacuauauaccu

SEQ ID NO: 389695 - RNA, 19 nt, Artificial Sequence
  Description of Artificial Sequence: Synthetic oligonucleotide
  Sense Strand Starting at position 902 of SEQ ID NO: 318488
auauauaggucaguguaga

SEQ ID NO: 389696 - RNA, 19 nt, Artificial Sequence
  Description of Artificial Sequence: Synthetic oligonucleotide
  Antisense Strand to SEQ ID NO: 389695
ucuacacugaccuauauau

SEQ ID NO: 389697 - RNA, 19 nt, Artificial Sequence
  Description of Artificial Sequence: Synthetic oligonucleotide
  Sense Strand Starting at position 902 of SEQ ID NO: 318489
uauauaggucaguguagau

SEQ ID NO: 389698 - RNA, 19 nt, Artificial Sequence
  Description of Artificial Sequence: Synthetic oligonucleotide
  Antisense Strand to SEQ ID NO: 389697
aucuacacugaccuauaua

SEQ ID NO: 389699 - RNA, 19 nt, Artificial Sequence
  Description of Artificial Sequence: Synthetic oligonucleotide
  Sense Strand Starting at position 902 of SEQ ID NO: 318493
uaggucaguguagauauau

SEQ ID NO: 389700 - RNA, 19 nt, Artificial Sequence
  Description of Artificial Sequence: Synthetic oligonucleotide
  Antisense Strand to SEQ ID NO: 389699
auauaucuacacugaccua

SEQ ID NO: 389701 - RNA, 19 nt, Artificial Sequence
  Description of Artificial Sequence: Synthetic oligonucleotide
  Sense Strand Starting at position 902 of SEQ ID NO: 318875
ugguuauaucccuaagccu

SEQ ID NO: 389702 - RNA, 19 nt, Artificial Sequence
  Description of Artificial Sequence: Synthetic oligonucleotide
  Antisense Strand to SEQ ID NO: 389701
aggcuuagggauauaacca

SEQ ID NO: 389703 - RNA, 19 nt, Artificial Sequence
  Description of Artificial Sequence: Synthetic oligonucleotide
  Sense Strand Starting at position 902 of SEQ ID NO: 318882
aucccuaagccuuguggaa

SEQ ID NO: 389704 - RNA, 19 nt, Artificial Sequence
  Description of Artificial Sequence: Synthetic oligonucleotide
  Antisense Strand to SEQ ID NO: 389703
uuccacaaggcuuagggau

SEQ ID NO: 389705 - RNA, 19 nt, Artificial Sequence
  Description of Artificial Sequence: Synthetic oligonucleotide
  Sense Strand Starting at position 902 of SEQ ID NO: 318886
cuaagccuuguggaaauau

SEQ ID NO: 389706 - RNA, 19 nt, Artificial Sequence
  Description of Artificial Sequence: Synthetic oligonucleotide
  Antisense Strand to SEQ ID NO: 389705
auauuuccacaaggcuuag

SEQ ID NO: 389707 - RNA, 19 nt, Artificial Sequence
  Description of Artificial Sequence: Synthetic oligonucleotide
  Sense Strand Starting at position 902 of SEQ ID NO: 318933
cugugcucccaggaguuua

SEQ ID NO: 389708 - RNA, 19 nt, Artificial Sequence
  Description of Artificial Sequence: Synthetic oligonucleotide
  Antisense Strand to SEQ ID NO: 389707
uaaacuccugggagcacag

SEQ ID NO: 389709 - RNA, 19 nt, Artificial Sequence
  Description of Artificial Sequence: Synthetic oligonucleotide
  Sense Strand Starting at position 902 of SEQ ID NO: 319122
gaauauugugcuggaguca

SEQ ID NO: 389710 - RNA, 19 nt, Artificial Sequence
  Description of Artificial Sequence: Synthetic oligonucleotide
  Antisense Strand to SEQ ID NO: 389709
ugacuccagcacaauauuc

SEQ ID NO: 389711 - RNA, 19 nt, Artificial Sequence
  Description of Artificial Sequence: Synthetic oligonucleotide
  Sense Strand Starting at position 902 of SEQ ID NO: 319127
uugugcuggagucacuaaa

SEQ ID NO: 389712 - RNA, 19 nt, Artificial Sequence
  Description of Artificial Sequence: Synthetic oligonucleotide
  Antisense Strand to SEQ ID NO: 389711
uuuagugacuccagcacaa

SEQ ID NO: 389713 - RNA, 19 nt, Artificial Sequence
  Description of Artificial Sequence: Synthetic oligonucleotide
  Sense Strand Starting at position 902 of SEQ ID NO: 319192
gacaguaguggaggcuuua

SEQ ID NO: 389714 - RNA, 19 nt, Artificial Sequence
  Description of Artificial Sequence: Synthetic oligonucleotide
  Antisense Strand to SEQ ID NO: 389713
uaaagccuccacuacuguc

SEQ ID NO: 389715 - RNA, 19 nt, Artificial Sequence
  Description of Artificial Sequence: Synthetic oligonucleotide
  Sense Strand Starting at position 902 of SEQ ID NO: 319204
ggcuuuaggaugcacguua

SEQ ID NO: 389716 - RNA, 19 nt, Artificial Sequence
  Description of Artificial Sequence: Synthetic oligonucleotide
  Antisense Strand to SEQ ID NO: 389715
uaacgugcauccuaaagcc

SEQ ID NO: 389717 - RNA, 19 nt, Artificial Sequence
  Description of Artificial Sequence: Synthetic oligonucleotide
  Sense Strand Starting at position 902 of SEQ ID NO: 319217
acguuaaggaaugguggaa

SEQ ID NO: 389718 - RNA, 19 nt, Artificial Sequence
  Description of Artificial Sequence: Synthetic oligonucleotide
  Antisense Strand to SEQ ID NO: 389717
uuccaccauuccuuaacgu

SEQ ID NO: 389719 - RNA, 19 nt, Artificial Sequence
  Description of Artificial Sequence: Synthetic oligonucleotide
  Sense Strand Starting at position 903 of SEQ ID NO: 315357
gcagaucacuugucagaag

SEQ ID NO: 389720 - RNA, 19 nt, Artificial Sequence
  Description of Artificial Sequence: Synthetic oligonucleotide
  Antisense Strand to SEQ ID NO: 389719
cuucugacaagugaucugc

SEQ ID NO: 389721 - RNA, 19 nt, Artificial Sequence
  Description of Artificial Sequence: Synthetic oligonucleotide
  Sense Strand Starting at position 903 of SEQ ID NO: 315675
uugcacacucacugggaua

SEQ ID NO: 389722 - RNA, 19 nt, Artificial Sequence
  Description of Artificial Sequence: Synthetic oligonucleotide
  Antisense Strand to SEQ ID NO: 389721
uaucccagugagugugcaa

SEQ ID NO: 389723 - RNA, 19 nt, Artificial Sequence
  Description of Artificial Sequence: Synthetic oligonucleotide
  Sense Strand Starting at position 903 of SEQ ID NO: 315688
gggauauauguuuguugag

SEQ ID NO: 389724 - RNA, 19 nt, Artificial Sequence
  Description of Artificial Sequence: Synthetic oligonucleotide
  Antisense Strand to SEQ ID NO: 389723
cucaacaaacauauauccc

SEQ ID NO: 389725 - RNA, 19 nt, Artificial Sequence
  Description of Artificial Sequence: Synthetic oligonucleotide
  Sense Strand Starting at position 903 of SEQ ID NO: 315689
ggauauauguuuguugaga

SEQ ID NO: 389726 - RNA, 19 nt, Artificial Sequence
  Description of Artificial Sequence: Synthetic oligonucleotide
  Antisense Strand to SEQ ID NO: 389725
ucucaacaaacauauaucc

SEQ ID NO: 389727 - RNA, 19 nt, Artificial Sequence
  Description of Artificial Sequence: Synthetic oligonucleotide
  Sense Strand Starting at position 903 of SEQ ID NO: 315690
gauauauguuuguugagaa

SEQ ID NO: 389728 - RNA, 19 nt, Artificial Sequence
  Description of Artificial Sequence: Synthetic oligonucleotide
  Antisense Strand to SEQ ID NO: 389727
uucucaacaaacauauauc

SEQ ID NO: 389729 - RNA, 19 nt, Artificial Sequence
  Description of Artificial Sequence: Synthetic oligonucleotide
  Sense Strand Starting at position 903 of SEQ ID NO: 315705
agaauaauggcaggcagaa

SEQ ID NO: 389730 - RNA, 19 nt, Artificial Sequence
  Description of Artificial Sequence: Synthetic oligonucleotide
  Antisense Strand to SEQ ID NO: 389729
uucugccugccauuauucu

SEQ ID NO: 389731 - RNA, 19 nt, Artificial Sequence
  Description of Artificial Sequence: Synthetic oligonucleotide
  Sense Strand Starting at position 903 of SEQ ID NO: 315980
ccaggacuuguccaagcaa

SEQ ID NO: 389732 - RNA, 19 nt, Artificial Sequence
  Description of Artificial Sequence: Synthetic oligonucleotide
  Antisense Strand to SEQ ID NO: 389731
uugcuuggacaaguccugg

SEQ ID NO: 389733 - RNA, 19 nt, Artificial Sequence
  Description of Artificial Sequence: Synthetic oligonucleotide
  Sense Strand Starting at position 903 of SEQ ID NO: 316091
guagcuugucucuuucgua

SEQ ID NO: 389734 - RNA, 19 nt, Artificial Sequence
  Description of Artificial Sequence: Synthetic oligonucleotide
  Antisense Strand to SEQ ID NO: 389733
uacgaaagagacaagcuac

SEQ ID NO: 389735 - RNA, 19 nt, Artificial Sequence
  Description of Artificial Sequence: Synthetic oligonucleotide
  Sense Strand Starting at position 903 of SEQ ID NO: 316214
ggaauuccuauguguugaa

SEQ ID NO: 389736 - RNA, 19 nt, Artificial Sequence
  Description of Artificial Sequence: Synthetic oligonucleotide
  Antisense Strand to SEQ ID NO: 389735
uucaacacauaggaauucc

SEQ ID NO: 389737 - RNA, 19 nt, Artificial Sequence
  Description of Artificial Sequence: Synthetic oligonucleotide
  Sense Strand Starting at position 903 of SEQ ID NO: 316215
gaauuccuauguguugaaa

SEQ ID NO: 389738 - RNA, 19 nt, Artificial Sequence
  Description of Artificial Sequence: Synthetic oligonucleotide
  Antisense Strand to SEQ ID NO: 389737
uuucaacacauaggaauuc

SEQ ID NO: 389739 - RNA, 19 nt, Artificial Sequence
  Description of Artificial Sequence: Synthetic oligonucleotide
  Sense Strand Starting at position 903 of SEQ ID NO: 316218
uuccuauguguugaaauga

SEQ ID NO: 389740 - RNA, 19 nt, Artificial Sequence
  Description of Artificial Sequence: Synthetic oligonucleotide
  Antisense Strand to SEQ ID NO: 389739
ucauuucaacacauaggaa

SEQ ID NO: 389741 - RNA, 19 nt, Artificial Sequence
  Description of Artificial Sequence: Synthetic oligonucleotide
  Sense Strand Starting at position 903 of SEQ ID NO: 316375
guagauaaagaguguugga

SEQ ID NO: 389742 - RNA, 19 nt, Artificial Sequence
  Description of Artificial Sequence: Synthetic oligonucleotide
  Antisense Strand to SEQ ID NO: 389741
uccaacacucuuuaucuac

SEQ ID NO: 389743 - RNA, 19 nt, Artificial Sequence
  Description of Artificial Sequence: Synthetic oligonucleotide
  Sense Strand Starting at position 903 of SEQ ID NO: 316451
gugaguuucuauuuauagu

SEQ ID NO: 389744 - RNA, 19 nt, Artificial Sequence
  Description of Artificial Sequence: Synthetic oligonucleotide
  Antisense Strand to SEQ ID NO: 389743
acuauaaauagaaacucac

SEQ ID NO: 389745 - RNA, 19 nt, Artificial Sequence
  Description of Artificial Sequence: Synthetic oligonucleotide
  Sense Strand Starting at position 903 of SEQ ID NO: 316621
ucuuaagggucuguaagga

SEQ ID NO: 389746 - RNA, 19 nt, Artificial Sequence
  Description of Artificial Sequence: Synthetic oligonucleotide
  Antisense Strand to SEQ ID NO: 389745
uccuuacagacccuuaaga

SEQ ID NO: 389747 - RNA, 19 nt, Artificial Sequence
  Description of Artificial Sequence: Synthetic oligonucleotide
  Sense Strand Starting at position 903 of SEQ ID NO: 316634
uaaggaguacuggguacua

SEQ ID NO: 389748 - RNA, 19 nt, Artificial Sequence
  Description of Artificial Sequence: Synthetic oligonucleotide
  Antisense Strand to SEQ ID NO: 389747
uaguacccaguacuccuua

SEQ ID NO: 389749 - RNA, 19 nt, Artificial Sequence
  Description of Artificial Sequence: Synthetic oligonucleotide
  Sense Strand Starting at position 903 of SEQ ID NO: 316696
ggaaguuguuucucuaaag

SEQ ID NO: 389750 - RNA, 19 nt, Artificial Sequence
  Description of Artificial Sequence: Synthetic oligonucleotide
  Antisense Strand to SEQ ID NO: 389749
cuuuagagaaacaacuucc

SEQ ID NO: 389751 - RNA, 19 nt, Artificial Sequence
  Description of Artificial Sequence: Synthetic oligonucleotide
  Sense Strand Starting at position 903 of SEQ ID NO: 316697
gaaguuguuucucuaaagg

SEQ ID NO: 389752 - RNA, 19 nt, Artificial Sequence
  Description of Artificial Sequence: Synthetic oligonucleotide
  Antisense Strand to SEQ ID NO: 389751
ccuuuagagaaacaacuuc

SEQ ID NO: 389753 - RNA, 19 nt, Artificial Sequence
  Description of Artificial Sequence: Synthetic oligonucleotide
  Sense Strand Starting at position 903 of SEQ ID NO: 316705
uucucuaaaggucgaaaga

SEQ ID NO: 389754 - RNA, 19 nt, Artificial Sequence
  Description of Artificial Sequence: Synthetic oligonucleotide
  Antisense Strand to SEQ ID NO: 389753
ucuuucgaccuuuagagaa

SEQ ID NO: 389755 - RNA, 19 nt, Artificial Sequence
  Description of Artificial Sequence: Synthetic oligonucleotide
  Sense Strand Starting at position 903 of SEQ ID NO: 317047
gaacgaaucugagccugau

SEQ ID NO: 389756 - RNA, 19 nt, Artificial Sequence
  Description of Artificial Sequence: Synthetic oligonucleotide
  Antisense Strand to SEQ ID NO: 389755
aucaggcucagauucguuc

SEQ ID NO: 389757 - RNA, 19 nt, Artificial Sequence
  Description of Artificial Sequence: Synthetic oligonucleotide
  Sense Strand Starting at position 903 of SEQ ID NO: 317053
aucugagccugauucugaa

SEQ ID NO: 389758 - RNA, 19 nt, Artificial Sequence
  Description of Artificial Sequence: Synthetic oligonucleotide
  Antisense Strand to SEQ ID NO: 389757
uucagaaucaggcucagau

SEQ ID NO: 389759 - RNA, 19 nt, Artificial Sequence
  Description of Artificial Sequence: Synthetic oligonucleotide
  Sense Strand Starting at position 903 of SEQ ID NO: 317248
guucuccguggcuuaagua

SEQ ID NO: 389760 - RNA, 19 nt, Artificial Sequence
  Description of Artificial Sequence: Synthetic oligonucleotide
  Antisense Strand to SEQ ID NO: 389759
uacuuaagccacggagaac

SEQ ID NO: 389761 - RNA, 19 nt, Artificial Sequence
  Description of Artificial Sequence: Synthetic oligonucleotide
  Sense Strand Starting at position 903 of SEQ ID NO: 317489
uagguagaucagggaagua

SEQ ID NO: 389762 - RNA, 19 nt, Artificial Sequence
  Description of Artificial Sequence: Synthetic oligonucleotide
  Antisense Strand to SEQ ID NO: 389761
uacuucccugaucuaccua

SEQ ID NO: 389763 - RNA, 19 nt, Artificial Sequence
  Description of Artificial Sequence: Synthetic oligonucleotide
  Sense Strand Starting at position 903 of SEQ ID NO: 317578
ggguuucuaauagagcaua

SEQ ID NO: 389764 - RNA, 19 nt, Artificial Sequence
  Description of Artificial Sequence: Synthetic oligonucleotide
  Antisense Strand to SEQ ID NO: 389763
uaugcucuauuagaaaccc

SEQ ID NO: 389765 - RNA, 19 nt, Artificial Sequence
  Description of Artificial Sequence: Synthetic oligonucleotide
  Sense Strand Starting at position 903 of SEQ ID NO: 317674
uugugaggaauauguaaug

SEQ ID NO: 389766 - RNA, 19 nt, Artificial Sequence
  Description of Artificial Sequence: Synthetic oligonucleotide
  Antisense Strand to SEQ ID NO: 389765
cauuacauauuccucacaa

SEQ ID NO: 389767 - RNA, 19 nt, Artificial Sequence
  Description of Artificial Sequence: Synthetic oligonucleotide
  Sense Strand Starting at position 903 of SEQ ID NO: 317783
gagccaagagcuuaguaau

SEQ ID NO: 389768 - RNA, 19 nt, Artificial Sequence
  Description of Artificial Sequence: Synthetic oligonucleotide
  Antisense Strand to SEQ ID NO: 389767
auuacuaagcucuuggcuc

SEQ ID NO: 389769 - RNA, 19 nt, Artificial Sequence
  Description of Artificial Sequence: Synthetic oligonucleotide
  Sense Strand Starting at position 903 of SEQ ID NO: 317939
gcaguucuagagcacuaaa

SEQ ID NO: 389770 - RNA, 19 nt, Artificial Sequence
  Description of Artificial Sequence: Synthetic oligonucleotide
  Antisense Strand to SEQ ID NO: 389769
uuuagugcucuagaacugc

SEQ ID NO: 389771 - RNA, 19 nt, Artificial Sequence
  Description of Artificial Sequence: Synthetic oligonucleotide
  Sense Strand Starting at position 903 of SEQ ID NO: 318077
ucuaaaguuccacgagaug

SEQ ID NO: 389772 - RNA, 19 nt, Artificial Sequence
  Description of Artificial Sequence: Synthetic oligonucleotide
  Antisense Strand to SEQ ID NO: 389771
caucucguggaacuuuaga

SEQ ID NO: 389773 - RNA, 19 nt, Artificial Sequence
  Description of Artificial Sequence: Synthetic oligonucleotide
  Sense Strand Starting at position 903 of SEQ ID NO: 318086
ccacgagauggcgacauua

SEQ ID NO: 389774 - RNA, 19 nt, Artificial Sequence
  Description of Artificial Sequence: Synthetic oligonucleotide
  Antisense Strand to SEQ ID NO: 389773
uaaugucgccaucucgugg

SEQ ID NO: 389775 - RNA, 19 nt, Artificial Sequence
  Description of Artificial Sequence: Synthetic oligonucleotide
  Sense Strand Starting at position 903 of SEQ ID NO: 318088
acgagauggcgacauuacu

SEQ ID NO: 389776 - RNA, 19 nt, Artificial Sequence
  Description of Artificial Sequence: Synthetic oligonucleotide
  Antisense Strand to SEQ ID NO: 389775
aguaaugucgccaucucgu

SEQ ID NO: 389777 - RNA, 19 nt, Artificial Sequence
  Description of Artificial Sequence: Synthetic oligonucleotide
  Sense Strand Starting at position 903 of SEQ ID NO: 318098
gacauuacuccgugaauga

SEQ ID NO: 389778 - RNA, 19 nt, Artificial Sequence
  Description of Artificial Sequence: Synthetic oligonucleotide
  Antisense Strand to SEQ ID NO: 389777
ucauucacggaguaauguc

SEQ ID NO: 389779 - RNA, 19 nt, Artificial Sequence
  Description of Artificial Sequence: Synthetic oligonucleotide
  Sense Strand Starting at position 903 of SEQ ID NO: 318099
acauuacuccgugaaugaa

SEQ ID NO: 389780 - RNA, 19 nt, Artificial Sequence
  Description of Artificial Sequence: Synthetic oligonucleotide
  Antisense Strand to SEQ ID NO: 389779
uucauucacggaguaaugu

SEQ ID NO: 389781 - RNA, 19 nt, Artificial Sequence
  Description of Artificial Sequence: Synthetic oligonucleotide
  Sense Strand Starting at position 903 of SEQ ID NO: 318102
uuacuccgugaaugaaaca

SEQ ID NO: 389782 - RNA, 19 nt, Artificial Sequence
  Description of Artificial Sequence: Synthetic oligonucleotide
  Antisense Strand to SEQ ID NO: 389781
uguuucauucacggaguaa

SEQ ID NO: 389783 - RNA, 19 nt, Artificial Sequence
  Description of Artificial Sequence: Synthetic oligonucleotide
  Sense Strand Starting at position 903 of SEQ ID NO: 318161
gaguaucuacuguaagcua

SEQ ID NO: 389784 - RNA, 19 nt, Artificial Sequence
  Description of Artificial Sequence: Synthetic oligonucleotide
  Antisense Strand to SEQ ID NO: 389783
uagcuuacaguagauacuc

SEQ ID NO: 389785 - RNA, 19 nt, Artificial Sequence
  Description of Artificial Sequence: Synthetic oligonucleotide
  Sense Strand Starting at position 903 of SEQ ID NO: 318187
gguaaauggcagugaaaug

SEQ ID NO: 389786 - RNA, 19 nt, Artificial Sequence
  Description of Artificial Sequence: Synthetic oligonucleotide
  Antisense Strand to SEQ ID NO: 389785
cauuucacugccauuuacc

SEQ ID NO: 389787 - RNA, 19 nt, Artificial Sequence
  Description of Artificial Sequence: Synthetic oligonucleotide
  Sense Strand Starting at position 903 of SEQ ID NO: 318289
uaugcuugggcagaaauga

SEQ ID NO: 389788 - RNA, 19 nt, Artificial Sequence
  Description of Artificial Sequence: Synthetic oligonucleotide
  Antisense Strand to SEQ ID NO: 389787
ucauuucugcccaagcaua

SEQ ID NO: 389789 - RNA, 19 nt, Artificial Sequence
  Description of Artificial Sequence: Synthetic oligonucleotide
  Sense Strand Starting at position 903 of SEQ ID NO: 318589
caaccugugcgacaaagaa

SEQ ID NO: 389790 - RNA, 19 nt, Artificial Sequence
  Description of Artificial Sequence: Synthetic oligonucleotide
  Antisense Strand to SEQ ID NO: 389789
uucuuugucgcacagguug

SEQ ID NO: 389791 - RNA, 19 nt, Artificial Sequence
  Description of Artificial Sequence: Synthetic oligonucleotide
  Sense Strand Starting at position 903 of SEQ ID NO: 318682
ucagaugcaguguaacuua

SEQ ID NO: 389792 - RNA, 19 nt, Artificial Sequence
  Description of Artificial Sequence: Synthetic oligonucleotide
  Antisense Strand to SEQ ID NO: 389791
uaaguuacacugcaucuga

SEQ ID NO: 389793 - RNA, 19 nt, Artificial Sequence
  Description of Artificial Sequence: Synthetic oligonucleotide
  Sense Strand Starting at position 903 of SEQ ID NO: 319091
uguccucaucuguaugaua

SEQ ID NO: 389794 - RNA, 19 nt, Artificial Sequence
  Description of Artificial Sequence: Synthetic oligonucleotide
  Antisense Strand to SEQ ID NO: 389793
uaucauacagaugaggaca

SEQ ID NO: 389795 - RNA, 19 nt, Artificial Sequence
  Description of Artificial Sequence: Synthetic oligonucleotide
  Sense Strand Starting at position 903 of SEQ ID NO: 319146
aggacugaguaagucaaua

SEQ ID NO: 389796 - RNA, 19 nt, Artificial Sequence
  Description of Artificial Sequence: Synthetic oligonucleotide
  Antisense Strand to SEQ ID NO: 389795
uauugacuuacucaguccu

SEQ ID NO: 389797 - RNA, 19 nt, Artificial Sequence
  Description of Artificial Sequence: Synthetic oligonucleotide
  Sense Strand Starting at position 903 of SEQ ID NO: 319157
agucaauauguguaaagua

SEQ ID NO: 389798 - RNA, 19 nt, Artificial Sequence
  Description of Artificial Sequence: Synthetic oligonucleotide
  Antisense Strand to SEQ ID NO: 389797
uacuuuacacauauugacu

SEQ ID NO: 389799 - RNA, 19 nt, Artificial Sequence
  Description of Artificial Sequence: Synthetic oligonucleotide
  Sense Strand Starting at position 904 of SEQ ID NO: 315298
gauccuacagugugggauu

SEQ ID NO: 389800 - RNA, 19 nt, Artificial Sequence
  Description of Artificial Sequence: Synthetic oligonucleotide
  Antisense Strand to SEQ ID NO: 389799
aaucccacacuguaggauc

SEQ ID NO: 389801 - RNA, 19 nt, Artificial Sequence
  Description of Artificial Sequence: Synthetic oligonucleotide
  Sense Strand Starting at position 904 of SEQ ID NO: 315301
ccuacagugugggauugua

SEQ ID NO: 389802 - RNA, 19 nt, Artificial Sequence
  Description of Artificial Sequence: Synthetic oligonucleotide
  Antisense Strand to SEQ ID NO: 389801
uacaaucccacacuguagg

SEQ ID NO: 389803 - RNA, 19 nt, Artificial Sequence
  Description of Artificial Sequence: Synthetic oligonucleotide
  Sense Strand Starting at position 904 of SEQ ID NO: 315955
gagaaaggcugcgucucaa

SEQ ID NO: 389804 - RNA, 19 nt, Artificial Sequence
  Description of Artificial Sequence: Synthetic oligonucleotide
  Antisense Strand to SEQ ID NO: 389803
uugagacgcagccuuucuc

SEQ ID NO: 389805 - RNA, 19 nt, Artificial Sequence
  Description of Artificial Sequence: Synthetic oligonucleotide
  Sense Strand Starting at position 904 of SEQ ID NO: 316031
gcuaaagauucugagggca

SEQ ID NO: 389806 - RNA, 19 nt, Artificial Sequence
  Description of Artificial Sequence: Synthetic oligonucleotide
  Antisense Strand to SEQ ID NO: 389805
ugcccucagaaucuuuagc

SEQ ID NO: 389807 - RNA, 19 nt, Artificial Sequence
  Description of Artificial Sequence: Synthetic oligonucleotide
  Sense Strand Starting at position 904 of SEQ ID NO: 316056
gaauauaggcucugaaguc

SEQ ID NO: 389808 - RNA, 19 nt, Artificial Sequence
  Description of Artificial Sequence: Synthetic oligonucleotide
  Antisense Strand to SEQ ID NO: 389807
gacuucagagccuauauuc

SEQ ID NO: 389809 - RNA, 19 nt, Artificial Sequence
  Description of Artificial Sequence: Synthetic oligonucleotide
  Sense Strand Starting at position 904 of SEQ ID NO: 316062
aggcucugaagucagauua

SEQ ID NO: 389810 - RNA, 19 nt, Artificial Sequence
  Description of Artificial Sequence: Synthetic oligonucleotide
  Antisense Strand to SEQ ID NO: 389809
uaaucugacuucagagccu

SEQ ID NO: 389811 - RNA, 19 nt, Artificial Sequence
  Description of Artificial Sequence: Synthetic oligonucleotide
  Sense Strand Starting at position 904 of SEQ ID NO: 316073
ucagauuacucgcugugaa

SEQ ID NO: 389812 - RNA, 19 nt, Artificial Sequence
  Description of Artificial Sequence: Synthetic oligonucleotide
  Antisense Strand to SEQ ID NO: 389811
uucacagcgaguaaucuga

SEQ ID NO: 389813 - RNA, 19 nt, Artificial Sequence
  Description of Artificial Sequence: Synthetic oligonucleotide
  Sense Strand Starting at position 904 of SEQ ID NO: 316074
cagauuacucgcugugaag

SEQ ID NO: 389814 - RNA, 19 nt, Artificial Sequence
  Description of Artificial Sequence: Synthetic oligonucleotide
  Antisense Strand to SEQ ID NO: 389813
cuucacagcgaguaaucug

SEQ ID NO: 389815 - RNA, 19 nt, Artificial Sequence
  Description of Artificial Sequence: Synthetic oligonucleotide
  Sense Strand Starting at position 904 of SEQ ID NO: 316145
ccucaugaggacugucauu

SEQ ID NO: 389816 - RNA, 19 nt, Artificial Sequence
  Description of Artificial Sequence: Synthetic oligonucleotide
  Antisense Strand to SEQ ID NO: 389815
aaugacaguccucaugagg

SEQ ID NO: 389817 - RNA, 19 nt, Artificial Sequence
  Description of Artificial Sequence: Synthetic oligonucleotide
  Sense Strand Starting at position 904 of SEQ ID NO: 316358
ccaggcuggucucacaaga

SEQ ID NO: 389818 - RNA, 19 nt, Artificial Sequence
  Description of Artificial Sequence: Synthetic oligonucleotide
  Antisense Strand to SEQ ID NO: 389817
ucuugugagaccagccugg

SEQ ID NO: 389819 - RNA, 19 nt, Artificial Sequence
  Description of Artificial Sequence: Synthetic oligonucleotide
  Sense Strand Starting at position 904 of SEQ ID NO: 316390
agagcagguagcgauuaua

SEQ ID NO: 389820 - RNA, 19 nt, Artificial Sequence
  Description of Artificial Sequence: Synthetic oligonucleotide
  Antisense Strand to SEQ ID NO: 389819
uauaaucgcuaccugcucu

SEQ ID NO: 389821 - RNA, 19 nt, Artificial Sequence
  Description of Artificial Sequence: Synthetic oligonucleotide
  Sense Strand Starting at position 904 of SEQ ID NO: 316393
gcagguagcgauuauaaau

SEQ ID NO: 389822 - RNA, 19 nt, Artificial Sequence
  Description of Artificial Sequence: Synthetic oligonucleotide
  Antisense Strand to SEQ ID NO: 389821
auuuauaaucgcuaccugc

SEQ ID NO: 389823 - RNA, 19 nt, Artificial Sequence
  Description of Artificial Sequence: Synthetic oligonucleotide
  Sense Strand Starting at position 904 of SEQ ID NO: 316405
uauaaauaugccuaggagu

SEQ ID NO: 389824 - RNA, 19 nt, Artificial Sequence
  Description of Artificial Sequence: Synthetic oligonucleotide
  Antisense Strand to SEQ ID NO: 389823
acuccuaggcauauuuaua

SEQ ID NO: 389825 - RNA, 19 nt, Artificial Sequence
  Description of Artificial Sequence: Synthetic oligonucleotide
  Sense Strand Starting at position 904 of SEQ ID NO: 316407
uaaauaugccuaggaguuu

SEQ ID NO: 389826 - RNA, 19 nt, Artificial Sequence
  Description of Artificial Sequence: Synthetic oligonucleotide
  Antisense Strand to SEQ ID NO: 389825
aaacuccuaggcauauuua

SEQ ID NO: 389827 - RNA, 19 nt, Artificial Sequence
  Description of Artificial Sequence: Synthetic oligonucleotide
  Sense Strand Starting at position 904 of SEQ ID NO: 316517
aauguuuacugagggaggu

SEQ ID NO: 389828 - RNA, 19 nt, Artificial Sequence
  Description of Artificial Sequence: Synthetic oligonucleotide
  Antisense Strand to SEQ ID NO: 389827
accucccucaguaaacauu

SEQ ID NO: 389829 - RNA, 19 nt, Artificial Sequence
  Description of Artificial Sequence: Synthetic oligonucleotide
  Sense Strand Starting at position 904 of SEQ ID NO: 316597
gggcauguccgcgagguua

SEQ ID NO: 389830 - RNA, 19 nt, Artificial Sequence
  Description of Artificial Sequence: Synthetic oligonucleotide
  Antisense Strand to SEQ ID NO: 389829
uaaccucgcggacaugccc

SEQ ID NO: 389831 - RNA, 19 nt, Artificial Sequence
  Description of Artificial Sequence: Synthetic oligonucleotide
  Sense Strand Starting at position 904 of SEQ ID NO: 317327
gggaauuugccaugacguc

SEQ ID NO: 389832 - RNA, 19 nt, Artificial Sequence
  Description of Artificial Sequence: Synthetic oligonucleotide
  Antisense Strand to SEQ ID NO: 389831
gacgucauggcaaauuccc

SEQ ID NO: 389833 - RNA, 19 nt, Artificial Sequence
  Description of Artificial Sequence: Synthetic oligonucleotide
  Sense Strand Starting at position 904 of SEQ ID NO: 317628
agugcuggcuucuaucaca

SEQ ID NO: 389834 - RNA, 19 nt, Artificial Sequence
  Description of Artificial Sequence: Synthetic oligonucleotide
  Antisense Strand to SEQ ID NO: 389833
ugugauagaagccagcacu

SEQ ID NO: 389835 - RNA, 19 nt, Artificial Sequence
  Description of Artificial Sequence: Synthetic oligonucleotide
  Sense Strand Starting at position 904 of SEQ ID NO: 319212
gcaccaugcuaagcauaga

SEQ ID NO: 389836 - RNA, 19 nt, Artificial Sequence
  Description of Artificial Sequence: Synthetic oligonucleotide
  Antisense Strand to SEQ ID NO: 389835
ucuaugcuuagcauggugc

SEQ ID NO: 389837 - RNA, 19 nt, Artificial Sequence
  Description of Artificial Sequence: Synthetic oligonucleotide
  Sense Strand Starting at position 905 of SEQ ID NO: 315248
aauguuuacugagggaggu

SEQ ID NO: 389838 - RNA, 19 nt, Artificial Sequence
  Description of Artificial Sequence: Synthetic oligonucleotide
  Antisense Strand to SEQ ID NO: 389837
accucccucaguaaacauu

SEQ ID NO: 389839 - RNA, 19 nt, Artificial Sequence
  Description of Artificial Sequence: Synthetic oligonucleotide
  Sense Strand Starting at position 905 of SEQ ID NO: 315328
gggcauguccgcgagguua

SEQ ID NO: 389840 - RNA, 19 nt, Artificial Sequence
  Description of Artificial Sequence: Synthetic oligonucleotide
  Antisense Strand to SEQ ID NO: 389839
uaaccucgcggacaugccc

SEQ ID NO: 389841 - RNA, 19 nt, Artificial Sequence
  Description of Artificial Sequence: Synthetic oligonucleotide
  Sense Strand Starting at position 905 of SEQ ID NO: 316058
gggaauuugccaugacguc

SEQ ID NO: 389842 - RNA, 19 nt, Artificial Sequence
  Description of Artificial Sequence: Synthetic oligonucleotide
  Antisense Strand to SEQ ID NO: 389841
gacgucauggcaaauuccc

SEQ ID NO: 389843 - RNA, 19 nt, Artificial Sequence
  Description of Artificial Sequence: Synthetic oligonucleotide
  Sense Strand Starting at position 905 of SEQ ID NO: 316359
agugcuggcuucuaucaca

SEQ ID NO: 389844 - RNA, 19 nt, Artificial Sequence
  Description of Artificial Sequence: Synthetic oligonucleotide
  Antisense Strand to SEQ ID NO: 389843
ugugauagaagccagcacu

SEQ ID NO: 389845 - RNA, 19 nt, Artificial Sequence
  Description of Artificial Sequence: Synthetic oligonucleotide
  Sense Strand Starting at position 905 of SEQ ID NO: 317943
gcaccaugcuaagcauaga

SEQ ID NO: 389846 - RNA, 19 nt, Artificial Sequence
  Description of Artificial Sequence: Synthetic oligonucleotide
  Antisense Strand to SEQ ID NO: 389845
ucuaugcuuagcauggugc

SEQ ID NO: 389847 - RNA, 19 nt, Artificial Sequence
  Description of Artificial Sequence: Synthetic oligonucleotide
  Sense Strand Starting at position 905 of SEQ ID NO: 317956
cauagaaucgaguguguag

SEQ ID NO: 389848 - RNA, 19 nt, Artificial Sequence
  Description of Artificial Sequence: Synthetic oligonucleotide
  Antisense Strand to SEQ ID NO: 389847
cuacacacucgauucuaug

SEQ ID NO: 389849 - RNA, 19 nt, Artificial Sequence
  Description of Artificial Sequence: Synthetic oligonucleotide
  Sense Strand Starting at position 905 of SEQ ID NO: 317958
uagaaucgaguguguagaa

SEQ ID NO: 389850 - RNA, 19 nt, Artificial Sequence
  Description of Artificial Sequence: Synthetic oligonucleotide
  Antisense Strand to SEQ ID NO: 389849
uucuacacacucgauucua

SEQ ID NO: 389851 - RNA, 19 nt, Artificial Sequence
  Description of Artificial Sequence: Synthetic oligonucleotide
  Sense Strand Starting at position 905 of SEQ ID NO: 317959
agaaucgaguguguagaaa

SEQ ID NO: 389852 - RNA, 19 nt, Artificial Sequence
  Description of Artificial Sequence: Synthetic oligonucleotide
  Antisense Strand to SEQ ID NO: 389851
uuucuacacacucgauucu

SEQ ID NO: 389853 - RNA, 19 nt, Artificial Sequence
  Description of Artificial Sequence: Synthetic oligonucleotide
  Sense Strand Starting at position 905 of SEQ ID NO: 317963
ucgaguguguagaaagaug

SEQ ID NO: 389854 - RNA, 19 nt, Artificial Sequence
  Description of Artificial Sequence: Synthetic oligonucleotide
  Antisense Strand to SEQ ID NO: 389853
caucuuucuacacacucga

SEQ ID NO: 389855 - RNA, 19 nt, Artificial Sequence
  Description of Artificial Sequence: Synthetic oligonucleotide
  Sense Strand Starting at position 905 of SEQ ID NO: 318108
caggaaugggugugggaau

SEQ ID NO: 389856 - RNA, 19 nt, Artificial Sequence
  Description of Artificial Sequence: Synthetic oligonucleotide
  Antisense Strand to SEQ ID NO: 389855
auucccacacccauuccug

SEQ ID NO: 389857 - RNA, 19 nt, Artificial Sequence
  Description of Artificial Sequence: Synthetic oligonucleotide
  Sense Strand Starting at position 905 of SEQ ID NO: 318109
aggaaugggugugggaauu

SEQ ID NO: 389858 - RNA, 19 nt, Artificial Sequence
  Description of Artificial Sequence: Synthetic oligonucleotide
  Antisense Strand to SEQ ID NO: 389857
aauucccacacccauuccu

SEQ ID NO: 389859 - RNA, 19 nt, Artificial Sequence
  Description of Artificial Sequence: Synthetic oligonucleotide
  Sense Strand Starting at position 905 of SEQ ID NO: 318130
gaccuuugucuaugcugau

SEQ ID NO: 389860 - RNA, 19 nt, Artificial Sequence
  Description of Artificial Sequence: Synthetic oligonucleotide
  Antisense Strand to SEQ ID NO: 389859
aucagcauagacaaagguc

SEQ ID NO: 389861 - RNA, 19 nt, Artificial Sequence
  Description of Artificial Sequence: Synthetic oligonucleotide
  Sense Strand Starting at position 905 of SEQ ID NO: 318213
ugggcucugagcugacuua

SEQ ID NO: 389862 - RNA, 19 nt, Artificial Sequence
  Description of Artificial Sequence: Synthetic oligonucleotide
  Antisense Strand to SEQ ID NO: 389861
uaagucagcucagagccca

SEQ ID NO: 389863 - RNA, 19 nt, Artificial Sequence
  Description of Artificial Sequence: Synthetic oligonucleotide
  Sense Strand Starting at position 905 of SEQ ID NO: 318214
gggcucugagcugacuuau

SEQ ID NO: 389864 - RNA, 19 nt, Artificial Sequence
  Description of Artificial Sequence: Synthetic oligonucleotide
  Antisense Strand to SEQ ID NO: 389863
auaagucagcucagagccc

SEQ ID NO: 389865 - RNA, 19 nt, Artificial Sequence
  Description of Artificial Sequence: Synthetic oligonucleotide
  Sense Strand Starting at position 905 of SEQ ID NO: 318237
cccauuguuacuugguguu

SEQ ID NO: 389866 - RNA, 19 nt, Artificial Sequence
  Description of Artificial Sequence: Synthetic oligonucleotide
  Antisense Strand to SEQ ID NO: 389865
aacaccaaguaacaauggg

SEQ ID NO: 389867 - RNA, 19 nt, Artificial Sequence
  Description of Artificial Sequence: Synthetic oligonucleotide
  Sense Strand Starting at position 905 of SEQ ID NO: 318240
auuguuacuugguguuuga

SEQ ID NO: 389868 - RNA, 19 nt, Artificial Sequence
  Description of Artificial Sequence: Synthetic oligonucleotide
  Antisense Strand to SEQ ID NO: 389867
ucaaacaccaaguaacaau

SEQ ID NO: 389869 - RNA, 19 nt, Artificial Sequence
  Description of Artificial Sequence: Synthetic oligonucleotide
  Sense Strand Starting at position 905 of SEQ ID NO: 318243
guuacuugguguuugagaa

SEQ ID NO: 389870 - RNA, 19 nt, Artificial Sequence
  Description of Artificial Sequence: Synthetic oligonucleotide
  Antisense Strand to SEQ ID NO: 389869
uucucaaacaccaaguaac

SEQ ID NO: 389871 - RNA, 19 nt, Artificial Sequence
  Description of Artificial Sequence: Synthetic oligonucleotide
  Sense Strand Starting at position 905 of SEQ ID NO: 318244
uuacuugguguuugagaag

SEQ ID NO: 389872 - RNA, 19 nt, Artificial Sequence
  Description of Artificial Sequence: Synthetic oligonucleotide
  Antisense Strand to SEQ ID NO: 389871
cuucucaaacaccaaguaa

SEQ ID NO: 389873 - RNA, 19 nt, Artificial Sequence
  Description of Artificial Sequence: Synthetic oligonucleotide
  Sense Strand Starting at position 905 of SEQ ID NO: 318400
ggcuauaagucugggaggu

SEQ ID NO: 389874 - RNA, 19 nt, Artificial Sequence
  Description of Artificial Sequence: Synthetic oligonucleotide
  Antisense Strand to SEQ ID NO: 389873
accucccagacuuauagcc

SEQ ID NO: 389875 - RNA, 19 nt, Artificial Sequence
  Description of Artificial Sequence: Synthetic oligonucleotide
  Sense Strand Starting at position 905 of SEQ ID NO: 318401
gcuauaagucugggaggug

SEQ ID NO: 389876 - RNA, 19 nt, Artificial Sequence
  Description of Artificial Sequence: Synthetic oligonucleotide
  Antisense Strand to SEQ ID NO: 389875
caccucccagacuuauagc

SEQ ID NO: 389877 - RNA, 19 nt, Artificial Sequence
  Description of Artificial Sequence: Synthetic oligonucleotide
  Sense Strand Starting at position 905 of SEQ ID NO: 318428
ggagaaaguagcuggauga

SEQ ID NO: 389878 - RNA, 19 nt, Artificial Sequence
  Description of Artificial Sequence: Synthetic oligonucleotide
  Antisense Strand to SEQ ID NO: 389877
ucauccagcuacuuucucc

SEQ ID NO: 389879 - RNA, 19 nt, Artificial Sequence
  Description of Artificial Sequence: Synthetic oligonucleotide
  Sense Strand Starting at position 905 of SEQ ID NO: 318509
guaggagacacuugccaau

SEQ ID NO: 389880 - RNA, 19 nt, Artificial Sequence
  Description of Artificial Sequence: Synthetic oligonucleotide
  Antisense Strand to SEQ ID NO: 389879
auuggcaagugucuccuac

SEQ ID NO: 389881 - RNA, 19 nt, Artificial Sequence
  Description of Artificial Sequence: Synthetic oligonucleotide
  Sense Strand Starting at position 905 of SEQ ID NO: 318567
gcaccuggccucugaaaug

SEQ ID NO: 389882 - RNA, 19 nt, Artificial Sequence
  Description of Artificial Sequence: Synthetic oligonucleotide
  Antisense Strand to SEQ ID NO: 389881
cauuucagaggccaggugc

SEQ ID NO: 389883 - RNA, 19 nt, Artificial Sequence
  Description of Artificial Sequence: Synthetic oligonucleotide
  Sense Strand Starting at position 905 of SEQ ID NO: 318578
cugaaauggugccucuuaa

SEQ ID NO: 389884 - RNA, 19 nt, Artificial Sequence
  Description of Artificial Sequence: Synthetic oligonucleotide
  Antisense Strand to SEQ ID NO: 389883
uuaagaggcaccauuucag

SEQ ID NO: 389885 - RNA, 19 nt, Artificial Sequence
  Description of Artificial Sequence: Synthetic oligonucleotide
  Sense Strand Starting at position 905 of SEQ ID NO: 318626
ccagcugucucuggaauga

SEQ ID NO: 389886 - RNA, 19 nt, Artificial Sequence
  Description of Artificial Sequence: Synthetic oligonucleotide
  Antisense Strand to SEQ ID NO: 389885
ucauuccagagacagcugg

SEQ ID NO: 389887 - RNA, 19 nt, Artificial Sequence
  Description of Artificial Sequence: Synthetic oligonucleotide
  Sense Strand Starting at position 905 of SEQ ID NO: 318758
ccgugcuugccucuuaaua

SEQ ID NO: 389888 - RNA, 19 nt, Artificial Sequence
  Description of Artificial Sequence: Synthetic oligonucleotide
  Antisense Strand to SEQ ID NO: 389887
uauuaagaggcaagcacgg

SEQ ID NO: 389889 - RNA, 19 nt, Artificial Sequence
  Description of Artificial Sequence: Synthetic oligonucleotide
  Sense Strand Starting at position 905 of SEQ ID NO: 318759
cgugcuugccucuuaauac

SEQ ID NO: 389890 - RNA, 19 nt, Artificial Sequence
  Description of Artificial Sequence: Synthetic oligonucleotide
  Antisense Strand to SEQ ID NO: 389889
guauuaagaggcaagcacg

SEQ ID NO: 389891 - RNA, 19 nt, Artificial Sequence
  Description of Artificial Sequence: Synthetic oligonucleotide
  Sense Strand Starting at position 905 of SEQ ID NO: 318760
gugcuugccucuuaauacu

SEQ ID NO: 389892 - RNA, 19 nt, Artificial Sequence
  Description of Artificial Sequence: Synthetic oligonucleotide
  Antisense Strand to SEQ ID NO: 389891
aguauuaagaggcaagcac

SEQ ID NO: 389893 - RNA, 19 nt, Artificial Sequence
  Description of Artificial Sequence: Synthetic oligonucleotide
  Sense Strand Starting at position 906 of SEQ ID NO: 315246
uuaagaagguaugcuuaga

SEQ ID NO: 389894 - RNA, 19 nt, Artificial Sequence
  Description of Artificial Sequence: Synthetic oligonucleotide
  Antisense Strand to SEQ ID NO: 389893
ucuaagcauaccuucuuaa

SEQ ID NO: 389895 - RNA, 19 nt, Artificial Sequence
  Description of Artificial Sequence: Synthetic oligonucleotide
  Sense Strand Starting at position 906 of SEQ ID NO: 315271
aagugaauugcccagugau

SEQ ID NO: 389896 - RNA, 19 nt, Artificial Sequence
  Description of Artificial Sequence: Synthetic oligonucleotide
  Antisense Strand to SEQ ID NO: 389895
aucacugggcaauucacuu

SEQ ID NO: 389897 - RNA, 19 nt, Artificial Sequence
  Description of Artificial Sequence: Synthetic oligonucleotide
  Sense Strand Starting at position 906 of SEQ ID NO: 315406
ugggaaucacgugauuggu

SEQ ID NO: 389898 - RNA, 19 nt, Artificial Sequence
  Description of Artificial Sequence: Synthetic oligonucleotide
  Antisense Strand to SEQ ID NO: 389897
accaaucacgugauuccca

SEQ ID NO: 389899 - RNA, 19 nt, Artificial Sequence
  Description of Artificial Sequence: Synthetic oligonucleotide
  Sense Strand Starting at position 906 of SEQ ID NO: 315528
acuagaaggcuuuguuuau

SEQ ID NO: 389900 - RNA, 19 nt, Artificial Sequence
  Description of Artificial Sequence: Synthetic oligonucleotide
  Antisense Strand to SEQ ID NO: 389899
auaaacaaagccuucuagu

SEQ ID NO: 389901 - RNA, 19 nt, Artificial Sequence
  Description of Artificial Sequence: Synthetic oligonucleotide
  Sense Strand Starting at position 906 of SEQ ID NO: 315640
cuccuuucugcugaagauc

SEQ ID NO: 389902 - RNA, 19 nt, Artificial Sequence
  Description of Artificial Sequence: Synthetic oligonucleotide
  Antisense Strand to SEQ ID NO: 389901
gaucuucagcagaaaggag

SEQ ID NO: 389903 - RNA, 19 nt, Artificial Sequence
  Description of Artificial Sequence: Synthetic oligonucleotide
  Sense Strand Starting at position 906 of SEQ ID NO: 315797
gcuggaagaucugcaagau

SEQ ID NO: 389904 - RNA, 19 nt, Artificial Sequence
  Description of Artificial Sequence: Synthetic oligonucleotide
  Antisense Strand to SEQ ID NO: 389903
aucuugcagaucuuccagc

SEQ ID NO: 389905 - RNA, 19 nt, Artificial Sequence
  Description of Artificial Sequence: Synthetic oligonucleotide
  Sense Strand Starting at position 906 of SEQ ID NO: 315986
ccgugauaaaggcacugua

SEQ ID NO: 389906 - RNA, 19 nt, Artificial Sequence
  Description of Artificial Sequence: Synthetic oligonucleotide
  Antisense Strand to SEQ ID NO: 389905
uacagugccuuuaucacgg

SEQ ID NO: 389907 - RNA, 19 nt, Artificial Sequence
  Description of Artificial Sequence: Synthetic oligonucleotide
  Sense Strand Starting at position 906 of SEQ ID NO: 315989
ugauaaaggcacuguacuu

SEQ ID NO: 389908 - RNA, 19 nt, Artificial Sequence
  Description of Artificial Sequence: Synthetic oligonucleotide
  Antisense Strand to SEQ ID NO: 389907
aaguacagugccuuuauca

SEQ ID NO: 389909 - RNA, 19 nt, Artificial Sequence
  Description of Artificial Sequence: Synthetic oligonucleotide
  Sense Strand Starting at position 906 of SEQ ID NO: 316046
gaggauaagugacuugcuu

SEQ ID NO: 389910 - RNA, 19 nt, Artificial Sequence
  Description of Artificial Sequence: Synthetic oligonucleotide
  Antisense Strand to SEQ ID NO: 389909
aagcaagucacuuauccuc

SEQ ID NO: 389911 - RNA, 19 nt, Artificial Sequence
  Description of Artificial Sequence: Synthetic oligonucleotide
  Sense Strand Starting at position 906 of SEQ ID NO: 316048
ggauaagugacuugcuuaa

SEQ ID NO: 389912 - RNA, 19 nt, Artificial Sequence
  Description of Artificial Sequence: Synthetic oligonucleotide
  Antisense Strand to SEQ ID NO: 389911
uuaagcaagucacuuaucc

SEQ ID NO: 389913 - RNA, 19 nt, Artificial Sequence
  Description of Artificial Sequence: Synthetic oligonucleotide
  Sense Strand Starting at position 906 of SEQ ID NO: 316050
auaagugacuugcuuaaac

SEQ ID NO: 389914 - RNA, 19 nt, Artificial Sequence
  Description of Artificial Sequence: Synthetic oligonucleotide
  Antisense Strand to SEQ ID NO: 389913
guuuaagcaagucacuuau

SEQ ID NO: 389915 - RNA, 19 nt, Artificial Sequence
  Description of Artificial Sequence: Synthetic oligonucleotide
  Sense Strand Starting at position 906 of SEQ ID NO: 316076
gcuaguagccgagaaccaa

SEQ ID NO: 389916 - RNA, 19 nt, Artificial Sequence
  Description of Artificial Sequence: Synthetic oligonucleotide
  Antisense Strand to SEQ ID NO: 389915
uugguucucggcuacuagc

SEQ ID NO: 389917 - RNA, 19 nt, Artificial Sequence
  Description of Artificial Sequence: Synthetic oligonucleotide
  Sense Strand Starting at position 906 of SEQ ID NO: 316252
guuggcuggcaauaaagua

SEQ ID NO: 389918 - RNA, 19 nt, Artificial Sequence
  Description of Artificial Sequence: Synthetic oligonucleotide
  Antisense Strand to SEQ ID NO: 389917
uacuuuauugccagccaac

SEQ ID NO: 389919 - RNA, 19 nt, Artificial Sequence
  Description of Artificial Sequence: Synthetic oligonucleotide
  Sense Strand Starting at position 906 of SEQ ID NO: 316317
ggucacauacuuuagcaga

SEQ ID NO: 389920 - RNA, 19 nt, Artificial Sequence
  Description of Artificial Sequence: Synthetic oligonucleotide
  Antisense Strand to SEQ ID NO: 389919
ucugcuaaaguaugugacc

SEQ ID NO: 389921 - RNA, 19 nt, Artificial Sequence
  Description of Artificial Sequence: Synthetic oligonucleotide
  Sense Strand Starting at position 906 of SEQ ID NO: 316319
ucacauacuuuagcagaga

SEQ ID NO: 389922 - RNA, 19 nt, Artificial Sequence
  Description of Artificial Sequence: Synthetic oligonucleotide
  Antisense Strand to SEQ ID NO: 389921
ucucugcuaaaguauguga

SEQ ID NO: 389923 - RNA, 19 nt, Artificial Sequence
  Description of Artificial Sequence: Synthetic oligonucleotide
  Sense Strand Starting at position 906 of SEQ ID NO: 316322
cauacuuuagcagagaguu

SEQ ID NO: 389924 - RNA, 19 nt, Artificial Sequence
  Description of Artificial Sequence: Synthetic oligonucleotide
  Antisense Strand to SEQ ID NO: 389923
aacucucugcuaaaguaug

SEQ ID NO: 389925 - RNA, 19 nt, Artificial Sequence
  Description of Artificial Sequence: Synthetic oligonucleotide
  Sense Strand Starting at position 906 of SEQ ID NO: 316334
gagaguucccaucagugag

SEQ ID NO: 389926 - RNA, 19 nt, Artificial Sequence
  Description of Artificial Sequence: Synthetic oligonucleotide
  Antisense Strand to SEQ ID NO: 389925
cucacugaugggaacucuc

SEQ ID NO: 389927 - RNA, 19 nt, Artificial Sequence
  Description of Artificial Sequence: Synthetic oligonucleotide
  Sense Strand Starting at position 906 of SEQ ID NO: 316355
ggagacggguuccuaaaca

SEQ ID NO: 389928 - RNA, 19 nt, Artificial Sequence
  Description of Artificial Sequence: Synthetic oligonucleotide
  Antisense Strand to SEQ ID NO: 389927
uguuuaggaacccgucucc

SEQ ID NO: 389929 - RNA, 19 nt, Artificial Sequence
  Description of Artificial Sequence: Synthetic oligonucleotide
  Sense Strand Starting at position 906 of SEQ ID NO: 316824
ucugcaaacucuccuggau

SEQ ID NO: 389930 - RNA, 19 nt, Artificial Sequence
  Description of Artificial Sequence: Synthetic oligonucleotide
  Antisense Strand to SEQ ID NO: 389929
auccaggagaguuugcaga

SEQ ID NO: 389931 - RNA, 19 nt, Artificial Sequence
  Description of Artificial Sequence: Synthetic oligonucleotide
  Sense Strand Starting at position 906 of SEQ ID NO: 317347
gaauguugggagugauaau

SEQ ID NO: 389932 - RNA, 19 nt, Artificial Sequence
  Description of Artificial Sequence: Synthetic oligonucleotide
  Antisense Strand to SEQ ID NO: 389931
auuaucacucccaacauuc

SEQ ID NO: 389933 - RNA, 19 nt, Artificial Sequence
  Description of Artificial Sequence: Synthetic oligonucleotide
  Sense Strand Starting at position 906 of SEQ ID NO: 317356
gagugauaauuugcgccga

SEQ ID NO: 389934 - RNA, 19 nt, Artificial Sequence
  Description of Artificial Sequence: Synthetic oligonucleotide
  Antisense Strand to SEQ ID NO: 389933
ucggcgcaaauuaucacuc

SEQ ID NO: 389935 - RNA, 19 nt, Artificial Sequence
  Description of Artificial Sequence: Synthetic oligonucleotide
  Sense Strand Starting at position 906 of SEQ ID NO: 317358
gugauaauuugcgccgaga

SEQ ID NO: 389936 - RNA, 19 nt, Artificial Sequence
  Description of Artificial Sequence: Synthetic oligonucleotide
  Antisense Strand to SEQ ID NO: 389935
ucucggcgcaaauuaucac

SEQ ID NO: 389937 - RNA, 19 nt, Artificial Sequence
  Description of Artificial Sequence: Synthetic oligonucleotide
  Sense Strand Starting at position 906 of SEQ ID NO: 317399
ggauuacacaguuauggca

SEQ ID NO: 389938 - RNA, 19 nt, Artificial Sequence
  Description of Artificial Sequence: Synthetic oligonucleotide
  Antisense Strand to SEQ ID NO: 389937
ugccauaacuguguaaucc

SEQ ID NO: 389939 - RNA, 19 nt, Artificial Sequence
  Description of Artificial Sequence: Synthetic oligonucleotide
  Sense Strand Starting at position 906 of SEQ ID NO: 317455
accaaaugucauuguaaag

SEQ ID NO: 389940 - RNA, 19 nt, Artificial Sequence
  Description of Artificial Sequence: Synthetic oligonucleotide
  Antisense Strand to SEQ ID NO: 389939
cuuuacaaugacauuuggu

SEQ ID NO: 389941 - RNA, 19 nt, Artificial Sequence
  Description of Artificial Sequence: Synthetic oligonucleotide
  Sense Strand Starting at position 906 of SEQ ID NO: 317466
uuguaaagucaagguaauu

SEQ ID NO: 389942 - RNA, 19 nt, Artificial Sequence
  Description of Artificial Sequence: Synthetic oligonucleotide
  Antisense Strand to SEQ ID NO: 389941
aauuaccuugacuuuacaa

SEQ ID NO: 389943 - RNA, 19 nt, Artificial Sequence
  Description of Artificial Sequence: Synthetic oligonucleotide
  Sense Strand Starting at position 906 of SEQ ID NO: 317478
gguaauuaauacguuuaca

SEQ ID NO: 389944 - RNA, 19 nt, Artificial Sequence
  Description of Artificial Sequence: Synthetic oligonucleotide
  Antisense Strand to SEQ ID NO: 389943
uguaaacguauuaauuacc

SEQ ID NO: 389945 - RNA, 19 nt, Artificial Sequence
  Description of Artificial Sequence: Synthetic oligonucleotide
  Sense Strand Starting at position 906 of SEQ ID NO: 317742
gaacuuaagucaucuagag

SEQ ID NO: 389946 - RNA, 19 nt, Artificial Sequence
  Description of Artificial Sequence: Synthetic oligonucleotide
  Antisense Strand to SEQ ID NO: 389945
cucuagaugacuuaaguuc

SEQ ID NO: 389947 - RNA, 19 nt, Artificial Sequence
  Description of Artificial Sequence: Synthetic oligonucleotide
  Sense Strand Starting at position 906 of SEQ ID NO: 317779
acuccaccuccauagaguu

SEQ ID NO: 389948 - RNA, 19 nt, Artificial Sequence
  Description of Artificial Sequence: Synthetic oligonucleotide
  Antisense Strand to SEQ ID NO: 389947
aacucuauggagguggagu

SEQ ID NO: 389949 - RNA, 19 nt, Artificial Sequence
  Description of Artificial Sequence: Synthetic oligonucleotide
  Sense Strand Starting at position 906 of SEQ ID NO: 317872
agguauuaaguugguaaau

SEQ ID NO: 389950 - RNA, 19 nt, Artificial Sequence
  Description of Artificial Sequence: Synthetic oligonucleotide
  Antisense Strand to SEQ ID NO: 389949
auuuaccaacuuaauaccu

SEQ ID NO: 389951 - RNA, 19 nt, Artificial Sequence
  Description of Artificial Sequence: Synthetic oligonucleotide
  Sense Strand Starting at position 906 of SEQ ID NO: 317873
gguauuaaguugguaaauu

SEQ ID NO: 389952 - RNA, 19 nt, Artificial Sequence
  Description of Artificial Sequence: Synthetic oligonucleotide
  Antisense Strand to SEQ ID NO: 389951
aauuuaccaacuuaauacc

SEQ ID NO: 389953 - RNA, 19 nt, Artificial Sequence
  Description of Artificial Sequence: Synthetic oligonucleotide
  Sense Strand Starting at position 906 of SEQ ID NO: 317994
aauaguguuguuuagauga

SEQ ID NO: 389954 - RNA, 19 nt, Artificial Sequence
  Description of Artificial Sequence: Synthetic oligonucleotide
  Antisense Strand to SEQ ID NO: 389953
ucaucuaaacaacacuauu

SEQ ID NO: 389955 - RNA, 19 nt, Artificial Sequence
  Description of Artificial Sequence: Synthetic oligonucleotide
  Sense Strand Starting at position 906 of SEQ ID NO: 318023
aaaggcugaaguggugaua

SEQ ID NO: 389956 - RNA, 19 nt, Artificial Sequence
  Description of Artificial Sequence: Synthetic oligonucleotide
  Antisense Strand to SEQ ID NO: 389955
uaucaccacuucagccuuu

SEQ ID NO: 389957 - RNA, 19 nt, Artificial Sequence
  Description of Artificial Sequence: Synthetic oligonucleotide
  Sense Strand Starting at position 906 of SEQ ID NO: 318026
ggcugaaguggugauauua

SEQ ID NO: 389958 - RNA, 19 nt, Artificial Sequence
  Description of Artificial Sequence: Synthetic oligonucleotide
  Antisense Strand to SEQ ID NO: 389957
uaauaucaccacuucagcc

SEQ ID NO: 389959 - RNA, 19 nt, Artificial Sequence
  Description of Artificial Sequence: Synthetic oligonucleotide
  Sense Strand Starting at position 906 of SEQ ID NO: 318165
acgacauagccuuaacaua

SEQ ID NO: 389960 - RNA, 19 nt, Artificial Sequence
  Description of Artificial Sequence: Synthetic oligonucleotide
  Antisense Strand to SEQ ID NO: 389959
uauguuaaggcuaugucgu

SEQ ID NO: 389961 - RNA, 19 nt, Artificial Sequence
  Description of Artificial Sequence: Synthetic oligonucleotide
  Sense Strand Starting at position 906 of SEQ ID NO: 318384
ucaagcaaccuugguauau

SEQ ID NO: 389962 - RNA, 19 nt, Artificial Sequence
  Description of Artificial Sequence: Synthetic oligonucleotide
  Antisense Strand to SEQ ID NO: 389961
auauaccaagguugcuuga

SEQ ID NO: 389963 - RNA, 19 nt, Artificial Sequence
  Description of Artificial Sequence: Synthetic oligonucleotide
  Sense Strand Starting at position 906 of SEQ ID NO: 318410
gauaaacuguauccuggau

SEQ ID NO: 389964 - RNA, 19 nt, Artificial Sequence
  Description of Artificial Sequence: Synthetic oligonucleotide
  Antisense Strand to SEQ ID NO: 389963
auccaggauacaguuuauc

SEQ ID NO: 389965 - RNA, 19 nt, Artificial Sequence
  Description of Artificial Sequence: Synthetic oligonucleotide
  Sense Strand Starting at position 906 of SEQ ID NO: 318468
uuaccaaaguaguuauaca

SEQ ID NO: 389966 - RNA, 19 nt, Artificial Sequence
  Description of Artificial Sequence: Synthetic oligonucleotide
  Antisense Strand to SEQ ID NO: 389965
uguauaacuacuuugguaa

SEQ ID NO: 389967 - RNA, 19 nt, Artificial Sequence
  Description of Artificial Sequence: Synthetic oligonucleotide
  Sense Strand Starting at position 906 of SEQ ID NO: 318475
aguaguuauacagauggca

SEQ ID NO: 389968 - RNA, 19 nt, Artificial Sequence
  Description of Artificial Sequence: Synthetic oligonucleotide
  Antisense Strand to SEQ ID NO: 389967
ugccaucuguauaacuacu

SEQ ID NO: 389969 - RNA, 19 nt, Artificial Sequence
  Description of Artificial Sequence: Synthetic oligonucleotide
  Sense Strand Starting at position 906 of SEQ ID NO: 318964
uuacucacagauggguaua

SEQ ID NO: 389970 - RNA, 19 nt, Artificial Sequence
  Description of Artificial Sequence: Synthetic oligonucleotide
  Antisense Strand to SEQ ID NO: 389969
uauacccaucugugaguaa

SEQ ID NO: 389971 - RNA, 19 nt, Artificial Sequence
  Description of Artificial Sequence: Synthetic oligonucleotide
  Sense Strand Starting at position 906 of SEQ ID NO: 319159
ucgauaggugaaugguuaa

SEQ ID NO: 389972 - RNA, 19 nt, Artificial Sequence
  Description of Artificial Sequence: Synthetic oligonucleotide
  Antisense Strand to SEQ ID NO: 389971
uuaaccauucaccuaucga

SEQ ID NO: 389973 - RNA, 19 nt, Artificial Sequence
  Description of Artificial Sequence: Synthetic oligonucleotide
  Sense Strand Starting at position 907 of SEQ ID NO: 315236
augagcaaguucccuaaau

SEQ ID NO: 389974 - RNA, 19 nt, Artificial Sequence
  Description of Artificial Sequence: Synthetic oligonucleotide
  Antisense Strand to SEQ ID NO: 389973
auuuagggaacuugcucau

SEQ ID NO: 389975 - RNA, 19 nt, Artificial Sequence
  Description of Artificial Sequence: Synthetic oligonucleotide
  Sense Strand Starting at position 907 of SEQ ID NO: 315237
ugagcaaguucccuaaauu

SEQ ID NO: 389976 - RNA, 19 nt, Artificial Sequence
  Description of Artificial Sequence: Synthetic oligonucleotide
  Antisense Strand to SEQ ID NO: 389975
aauuuagggaacuugcuca

SEQ ID NO: 389977 - RNA, 19 nt, Artificial Sequence
  Description of Artificial Sequence: Synthetic oligonucleotide
  Sense Strand Starting at position 907 of SEQ ID NO: 315238
gagcaaguucccuaaauug

SEQ ID NO: 389978 - RNA, 19 nt, Artificial Sequence
  Description of Artificial Sequence: Synthetic oligonucleotide
  Antisense Strand to SEQ ID NO: 389977
caauuuagggaacuugcuc

SEQ ID NO: 389979 - RNA, 19 nt, Artificial Sequence
  Description of Artificial Sequence: Synthetic oligonucleotide
  Sense Strand Starting at position 907 of SEQ ID NO: 315255
ugucuuuaagcauggaacu

SEQ ID NO: 389980 - RNA, 19 nt, Artificial Sequence
  Description of Artificial Sequence: Synthetic oligonucleotide
  Antisense Strand to SEQ ID NO: 389979
aguuccaugcuuaaagaca

SEQ ID NO: 389981 - RNA, 19 nt, Artificial Sequence
  Description of Artificial Sequence: Synthetic oligonucleotide
  Sense Strand Starting at position 907 of SEQ ID NO: 315256
gucuuuaagcauggaacua

SEQ ID NO: 389982 - RNA, 19 nt, Artificial Sequence
  Description of Artificial Sequence: Synthetic oligonucleotide
  Antisense Strand to SEQ ID NO: 389981
uaguuccaugcuuaaagac

SEQ ID NO: 389983 - RNA, 19 nt, Artificial Sequence
  Description of Artificial Sequence: Synthetic oligonucleotide
  Sense Strand Starting at position 907 of SEQ ID NO: 315335
aaauaaucgcauugguuua

SEQ ID NO: 389984 - RNA, 19 nt, Artificial Sequence
  Description of Artificial Sequence: Synthetic oligonucleotide
  Antisense Strand to SEQ ID NO: 389983
uaaaccaaugcgauuauuu

SEQ ID NO: 389985 - RNA, 19 nt, Artificial Sequence
  Description of Artificial Sequence: Synthetic oligonucleotide
  Sense Strand Starting at position 907 of SEQ ID NO: 315572
uuggcaguauuaucuggau

SEQ ID NO: 389986 - RNA, 19 nt, Artificial Sequence
  Description of Artificial Sequence: Synthetic oligonucleotide
  Antisense Strand to SEQ ID NO: 389985
auccagauaauacugccaa

SEQ ID NO: 389987 - RNA, 19 nt, Artificial Sequence
  Description of Artificial Sequence: Synthetic oligonucleotide
  Sense Strand Starting at position 907 of SEQ ID NO: 315653
ucacauucuccuggucuca

SEQ ID NO: 389988 - RNA, 19 nt, Artificial Sequence
  Description of Artificial Sequence: Synthetic oligonucleotide
  Antisense Strand to SEQ ID NO: 389987
ugagaccaggagaauguga

SEQ ID NO: 389989 - RNA, 19 nt, Artificial Sequence
  Description of Artificial Sequence: Synthetic oligonucleotide
  Sense Strand Starting at position 907 of SEQ ID NO: 315742
cuacuaaguguguagcaca

SEQ ID NO: 389990 - RNA, 19 nt, Artificial Sequence
  Description of Artificial Sequence: Synthetic oligonucleotide
  Antisense Strand to SEQ ID NO: 389989
ugugcuacacacuuaguag

SEQ ID NO: 389991 - RNA, 19 nt, Artificial Sequence
  Description of Artificial Sequence: Synthetic oligonucleotide
  Sense Strand Starting at position 907 of SEQ ID NO: 315906
cuugaugagauagguguau

SEQ ID NO: 389992 - RNA, 19 nt, Artificial Sequence
  Description of Artificial Sequence: Synthetic oligonucleotide
  Antisense Strand to SEQ ID NO: 389991
auacaccuaucucaucaag

SEQ ID NO: 389993 - RNA, 19 nt, Artificial Sequence
  Description of Artificial Sequence: Synthetic oligonucleotide
  Sense Strand Starting at position 907 of SEQ ID NO: 315908
ugaugagauagguguauca

SEQ ID NO: 389994 - RNA, 19 nt, Artificial Sequence
  Description of Artificial Sequence: Synthetic oligonucleotide
  Antisense Strand to SEQ ID NO: 389993
ugauacaccuaucucauca

SEQ ID NO: 389995 - RNA, 19 nt, Artificial Sequence
  Description of Artificial Sequence: Synthetic oligonucleotide
  Sense Strand Starting at position 907 of SEQ ID NO: 316155
uggcauuguucccugaaua

SEQ ID NO: 389996 - RNA, 19 nt, Artificial Sequence
  Description of Artificial Sequence: Synthetic oligonucleotide
  Antisense Strand to SEQ ID NO: 389995
uauucagggaacaaugcca

SEQ ID NO: 389997 - RNA, 19 nt, Artificial Sequence
  Description of Artificial Sequence: Synthetic oligonucleotide
  Sense Strand Starting at position 907 of SEQ ID NO: 316173
acaguuggugcuuagcaaa

SEQ ID NO: 389998 - RNA, 19 nt, Artificial Sequence
  Description of Artificial Sequence: Synthetic oligonucleotide
  Antisense Strand to SEQ ID NO: 389997
uuugcuaagcaccaacugu

SEQ ID NO: 389999 - RNA, 19 nt, Artificial Sequence
  Description of Artificial Sequence: Synthetic oligonucleotide
  Sense Strand Starting at position 907 of SEQ ID NO: 316253
gagauauugcugcagcuua

SEQ ID NO: 390000 - RNA, 19 nt, Artificial Sequence
  Description of Artificial Sequence: Synthetic oligonucleotide
  Antisense Strand to SEQ ID NO: 389999
uaagcugcagcaauaucuc

SEQ ID NO: 390001 - RNA, 19 nt, Artificial Sequence
  Description of Artificial Sequence: Synthetic oligonucleotide
  Sense Strand Starting at position 907 of SEQ ID NO: 316405
acugguuucuucuuggaaa

SEQ ID NO: 390002 - RNA, 19 nt, Artificial Sequence
  Description of Artificial Sequence: Synthetic oligonucleotide
  Antisense Strand to SEQ ID NO: 390001
uuuccaagaagaaaccagu

SEQ ID NO: 390003 - RNA, 19 nt, Artificial Sequence
  Description of Artificial Sequence: Synthetic oligonucleotide
  Sense Strand Starting at position 907 of SEQ ID NO: 316708
agugaacaaucuccuugua

SEQ ID NO: 390004 - RNA, 19 nt, Artificial Sequence
  Description of Artificial Sequence: Synthetic oligonucleotide
  Antisense Strand to SEQ ID NO: 390003
uacaaggagauuguucacu

SEQ ID NO: 390005 - RNA, 19 nt, Artificial Sequence
  Description of Artificial Sequence: Synthetic oligonucleotide
  Sense Strand Starting at position 907 of SEQ ID NO: 316710
ugaacaaucuccuuguaug

SEQ ID NO: 390006 - RNA, 19 nt, Artificial Sequence
  Description of Artificial Sequence: Synthetic oligonucleotide
  Antisense Strand to SEQ ID NO: 390005
cauacaaggagauuguuca

SEQ ID NO: 390007 - RNA, 19 nt, Artificial Sequence
  Description of Artificial Sequence: Synthetic oligonucleotide
  Sense Strand Starting at position 907 of SEQ ID NO: 316762
ucuuguagaggaggucaaa

SEQ ID NO: 390008 - RNA, 19 nt, Artificial Sequence
  Description of Artificial Sequence: Synthetic oligonucleotide
  Antisense Strand to SEQ ID NO: 390007
uuugaccuccucuacaaga

SEQ ID NO: 390009 - RNA, 19 nt, Artificial Sequence
  Description of Artificial Sequence: Synthetic oligonucleotide
  Sense Strand Starting at position 907 of SEQ ID NO: 316773
aggucaaacuccucaggga

SEQ ID NO: 390010 - RNA, 19 nt, Artificial Sequence
  Description of Artificial Sequence: Synthetic oligonucleotide
  Antisense Strand to SEQ ID NO: 390009
ucccugaggaguuugaccu

SEQ ID NO: 390011 - RNA, 19 nt, Artificial Sequence
  Description of Artificial Sequence: Synthetic oligonucleotide
  Sense Strand Starting at position 907 of SEQ ID NO: 316867
gaacaauguccaggccaca

SEQ ID NO: 390012 - RNA, 19 nt, Artificial Sequence
  Description of Artificial Sequence: Synthetic oligonucleotide
  Antisense Strand to SEQ ID NO: 390011
uguggccuggacauuguuc

SEQ ID NO: 390013 - RNA, 19 nt, Artificial Sequence
  Description of Artificial Sequence: Synthetic oligonucleotide
  Sense Strand Starting at position 907 of SEQ ID NO: 316975
ccaugaagcccaggaguaa

SEQ ID NO: 390014 - RNA, 19 nt, Artificial Sequence
  Description of Artificial Sequence: Synthetic oligonucleotide
  Antisense Strand to SEQ ID NO: 390013
uuacuccugggcuucaugg

SEQ ID NO: 390015 - RNA, 19 nt, Artificial Sequence
  Description of Artificial Sequence: Synthetic oligonucleotide
  Sense Strand Starting at position 907 of SEQ ID NO: 317051
cgcugaacccugcaagaga

SEQ ID NO: 390016 - RNA, 19 nt, Artificial Sequence
  Description of Artificial Sequence: Synthetic oligonucleotide
  Antisense Strand to SEQ ID NO: 390015
ucucuugcaggguucagcg

SEQ ID NO: 390017 - RNA, 19 nt, Artificial Sequence
  Description of Artificial Sequence: Synthetic oligonucleotide
  Sense Strand Starting at position 907 of SEQ ID NO: 317121
cucacugggcucuaauacu

SEQ ID NO: 390018 - RNA, 19 nt, Artificial Sequence
  Description of Artificial Sequence: Synthetic oligonucleotide
  Antisense Strand to SEQ ID NO: 390017
aguauuagagcccagugag

SEQ ID NO: 390019 - RNA, 19 nt, Artificial Sequence
  Description of Artificial Sequence: Synthetic oligonucleotide
  Sense Strand Starting at position 907 of SEQ ID NO: 317580
aggcacauuuguguuccau

SEQ ID NO: 390020 - RNA, 19 nt, Artificial Sequence
  Description of Artificial Sequence: Synthetic oligonucleotide
  Antisense Strand to SEQ ID NO: 390019
auggaacacaaaugugccu

SEQ ID NO: 390021 - RNA, 19 nt, Artificial Sequence
  Description of Artificial Sequence: Synthetic oligonucleotide
  Sense Strand Starting at position 907 of SEQ ID NO: 317612
ucucuuggcaccggaagaa

SEQ ID NO: 390022 - RNA, 19 nt, Artificial Sequence
  Description of Artificial Sequence: Synthetic oligonucleotide
  Antisense Strand to SEQ ID NO: 390021
uucuuccggugccaagaga

SEQ ID NO: 390023 - RNA, 19 nt, Artificial Sequence
  Description of Artificial Sequence: Synthetic oligonucleotide
  Sense Strand Starting at position 907 of SEQ ID NO: 317645
uggauaccauguuuggaau

SEQ ID NO: 390024 - RNA, 19 nt, Artificial Sequence
  Description of Artificial Sequence: Synthetic oligonucleotide
  Antisense Strand to SEQ ID NO: 390023
auuccaaacaugguaucca

SEQ ID NO: 390025 - RNA, 19 nt, Artificial Sequence
  Description of Artificial Sequence: Synthetic oligonucleotide
  Sense Strand Starting at position 907 of SEQ ID NO: 317646
ggauaccauguuuggaauu

SEQ ID NO: 390026 - RNA, 19 nt, Artificial Sequence
  Description of Artificial Sequence: Synthetic oligonucleotide
  Antisense Strand to SEQ ID NO: 390025
aauuccaaacaugguaucc

SEQ ID NO: 390027 - RNA, 19 nt, Artificial Sequence
  Description of Artificial Sequence: Synthetic oligonucleotide
  Sense Strand Starting at position 907 of SEQ ID NO: 317675
agguacuggcagugagaaa

SEQ ID NO: 390028 - RNA, 19 nt, Artificial Sequence
  Description of Artificial Sequence: Synthetic oligonucleotide
  Antisense Strand to SEQ ID NO: 390027
uuucucacugccaguaccu

SEQ ID NO: 390029 - RNA, 19 nt, Artificial Sequence
  Description of Artificial Sequence: Synthetic oligonucleotide
  Sense Strand Starting at position 907 of SEQ ID NO: 317868
cagugcuucugagugagga

SEQ ID NO: 390030 - RNA, 19 nt, Artificial Sequence
  Description of Artificial Sequence: Synthetic oligonucleotide
  Antisense Strand to SEQ ID NO: 390029
uccucacucagaagcacug

SEQ ID NO: 390031 - RNA, 19 nt, Artificial Sequence
  Description of Artificial Sequence: Synthetic oligonucleotide
  Sense Strand Starting at position 907 of SEQ ID NO: 317870
gugcuucugagugaggaca

SEQ ID NO: 390032 - RNA, 19 nt, Artificial Sequence
  Description of Artificial Sequence: Synthetic oligonucleotide
  Antisense Strand to SEQ ID NO: 390031
uguccucacucagaagcac

SEQ ID NO: 390033 - RNA, 19 nt, Artificial Sequence
  Description of Artificial Sequence: Synthetic oligonucleotide
  Sense Strand Starting at position 907 of SEQ ID NO: 317954
ccugaaggccuuuauuaag

SEQ ID NO: 390034 - RNA, 19 nt, Artificial Sequence
  Description of Artificial Sequence: Synthetic oligonucleotide
  Antisense Strand to SEQ ID NO: 390033
cuuaauaaaggccuucagg

SEQ ID NO: 390035 - RNA, 19 nt, Artificial Sequence
  Description of Artificial Sequence: Synthetic oligonucleotide
  Sense Strand Starting at position 907 of SEQ ID NO: 318210
acuuauaaguuaguuguga

SEQ ID NO: 390036 - RNA, 19 nt, Artificial Sequence
  Description of Artificial Sequence: Synthetic oligonucleotide
  Antisense Strand to SEQ ID NO: 390035
ucacaacuaacuuauaagu

SEQ ID NO: 390037 - RNA, 19 nt, Artificial Sequence
  Description of Artificial Sequence: Synthetic oligonucleotide
  Sense Strand Starting at position 907 of SEQ ID NO: 318212
uuauaaguuaguugugaca

SEQ ID NO: 390038 - RNA, 19 nt, Artificial Sequence
  Description of Artificial Sequence: Synthetic oligonucleotide
  Antisense Strand to SEQ ID NO: 390037
ugucacaacuaacuuauaa

SEQ ID NO: 390039 - RNA, 19 nt, Artificial Sequence
  Description of Artificial Sequence: Synthetic oligonucleotide
  Sense Strand Starting at position 907 of SEQ ID NO: 318388
guggaaguacaguacuaga

SEQ ID NO: 390040 - RNA, 19 nt, Artificial Sequence
  Description of Artificial Sequence: Synthetic oligonucleotide
  Antisense Strand to SEQ ID NO: 390039
ucuaguacuguacuuccac

SEQ ID NO: 390041 - RNA, 19 nt, Artificial Sequence
  Description of Artificial Sequence: Synthetic oligonucleotide
  Sense Strand Starting at position 907 of SEQ ID NO: 318393
aguacaguacuagauccau

SEQ ID NO: 390042 - RNA, 19 nt, Artificial Sequence
  Description of Artificial Sequence: Synthetic oligonucleotide
  Antisense Strand to SEQ ID NO: 390041
auggaucuaguacuguacu

SEQ ID NO: 390043 - RNA, 19 nt, Artificial Sequence
  Description of Artificial Sequence: Synthetic oligonucleotide
  Sense Strand Starting at position 907 of SEQ ID NO: 318429
uucuaugaagucugacaau

SEQ ID NO: 390044 - RNA, 19 nt, Artificial Sequence
  Description of Artificial Sequence: Synthetic oligonucleotide
  Antisense Strand to SEQ ID NO: 390043
auugucagacuucauagaa

SEQ ID NO: 390045 - RNA, 19 nt, Artificial Sequence
  Description of Artificial Sequence: Synthetic oligonucleotide
  Sense Strand Starting at position 907 of SEQ ID NO: 318454
ggaacuucugguugaaccu

SEQ ID NO: 390046 - RNA, 19 nt, Artificial Sequence
  Description of Artificial Sequence: Synthetic oligonucleotide
  Antisense Strand to SEQ ID NO: 390045
agguucaaccagaaguucc

SEQ ID NO: 390047 - RNA, 19 nt, Artificial Sequence
  Description of Artificial Sequence: Synthetic oligonucleotide
  Sense Strand Starting at position 907 of SEQ ID NO: 318484
uugggcugccaagagauaa

SEQ ID NO: 390048 - RNA, 19 nt, Artificial Sequence
  Description of Artificial Sequence: Synthetic oligonucleotide
  Antisense Strand to SEQ ID NO: 390047
uuaucucuuggcagcccaa

SEQ ID NO: 390049 - RNA, 19 nt, Artificial Sequence
  Description of Artificial Sequence: Synthetic oligonucleotide
  Sense Strand Starting at position 907 of SEQ ID NO: 318495
agagauaaagcuggaguau

SEQ ID NO: 390050 - RNA, 19 nt, Artificial Sequence
  Description of Artificial Sequence: Synthetic oligonucleotide
  Antisense Strand to SEQ ID NO: 390049
auacuccagcuuuaucucu

SEQ ID NO: 390051 - RNA, 19 nt, Artificial Sequence
  Description of Artificial Sequence: Synthetic oligonucleotide
  Sense Strand Starting at position 907 of SEQ ID NO: 318967
aaaugugacucucuggauu

SEQ ID NO: 390052 - RNA, 19 nt, Artificial Sequence
  Description of Artificial Sequence: Synthetic oligonucleotide
  Antisense Strand to SEQ ID NO: 390051
aauccagagagucacauuu

SEQ ID NO: 390053 - RNA, 19 nt, Artificial Sequence
  Description of Artificial Sequence: Synthetic oligonucleotide
  Sense Strand Starting at position 908 of SEQ ID NO: 315612
acuagauuauuaccucgau

SEQ ID NO: 390054 - RNA, 19 nt, Artificial Sequence
  Description of Artificial Sequence: Synthetic oligonucleotide
  Antisense Strand to SEQ ID NO: 390053
aucgagguaauaaucuagu

SEQ ID NO: 390055 - RNA, 19 nt, Artificial Sequence
  Description of Artificial Sequence: Synthetic oligonucleotide
  Sense Strand Starting at position 908 of SEQ ID NO: 315613
cuagauuauuaccucgauu

SEQ ID NO: 390056 - RNA, 19 nt, Artificial Sequence
  Description of Artificial Sequence: Synthetic oligonucleotide
  Antisense Strand to SEQ ID NO: 390055
aaucgagguaauaaucuag

SEQ ID NO: 390057 - RNA, 19 nt, Artificial Sequence
  Description of Artificial Sequence: Synthetic oligonucleotide
  Sense Strand Starting at position 908 of SEQ ID NO: 315615
agauuauuaccucgauucu

SEQ ID NO: 390058 - RNA, 19 nt, Artificial Sequence
  Description of Artificial Sequence: Synthetic oligonucleotide
  Antisense Strand to SEQ ID NO: 390057
agaaucgagguaauaaucu

SEQ ID NO: 390059 - RNA, 19 nt, Artificial Sequence
  Description of Artificial Sequence: Synthetic oligonucleotide
  Sense Strand Starting at position 908 of SEQ ID NO: 315616
gauuauuaccucgauucug

SEQ ID NO: 390060 - RNA, 19 nt, Artificial Sequence
  Description of Artificial Sequence: Synthetic oligonucleotide
  Antisense Strand to SEQ ID NO: 390059
cagaaucgagguaauaauc

SEQ ID NO: 390061 - RNA, 19 nt, Artificial Sequence
  Description of Artificial Sequence: Synthetic oligonucleotide
  Sense Strand Starting at position 908 of SEQ ID NO: 315808
aauuauguuggaggauacu

SEQ ID NO: 390062 - RNA, 19 nt, Artificial Sequence
  Description of Artificial Sequence: Synthetic oligonucleotide
  Antisense Strand to SEQ ID NO: 390061
aguauccuccaacauaauu

SEQ ID NO: 390063 - RNA, 19 nt, Artificial Sequence
  Description of Artificial Sequence: Synthetic oligonucleotide
  Sense Strand Starting at position 908 of SEQ ID NO: 315817
ggaggauacuuccuguauu

SEQ ID NO: 390064 - RNA, 19 nt, Artificial Sequence
  Description of Artificial Sequence: Synthetic oligonucleotide
  Antisense Strand to SEQ ID NO: 390063
aauacaggaaguauccucc

SEQ ID NO: 390065 - RNA, 19 nt, Artificial Sequence
  Description of Artificial Sequence: Synthetic oligonucleotide
  Sense Strand Starting at position 908 of SEQ ID NO: 315820
ggauacuuccuguauuacc

SEQ ID NO: 390066 - RNA, 19 nt, Artificial Sequence
  Description of Artificial Sequence: Synthetic oligonucleotide
  Antisense Strand to SEQ ID NO: 390065
gguaauacaggaaguaucc

SEQ ID NO: 390067 - RNA, 19 nt, Artificial Sequence
  Description of Artificial Sequence: Synthetic oligonucleotide
  Sense Strand Starting at position 908 of SEQ ID NO: 315852
uacagaaaucuuuggcgga

SEQ ID NO: 390068 - RNA, 19 nt, Artificial Sequence
  Description of Artificial Sequence: Synthetic oligonucleotide
  Antisense Strand to SEQ ID NO: 390067
uccgccaaagauuucugua

SEQ ID NO: 390069 - RNA, 19 nt, Artificial Sequence
  Description of Artificial Sequence: Synthetic oligonucleotide
  Sense Strand Starting at position 908 of SEQ ID NO: 316221
uuuguuacugcauaaagaa

SEQ ID NO: 390070 - RNA, 19 nt, Artificial Sequence
  Description of Artificial Sequence: Synthetic oligonucleotide
  Antisense Strand to SEQ ID NO: 390069
uucuuuaugcaguaacaaa

SEQ ID NO: 390071 - RNA, 19 nt, Artificial Sequence
  Description of Artificial Sequence: Synthetic oligonucleotide
  Sense Strand Starting at position 908 of SEQ ID NO: 316259
uauguauuuggcugauugu

SEQ ID NO: 390072 - RNA, 19 nt, Artificial Sequence
  Description of Artificial Sequence: Synthetic oligonucleotide
  Antisense Strand to SEQ ID NO: 390071
acaaucagccaaauacaua

SEQ ID NO: 390073 - RNA, 19 nt, Artificial Sequence
  Description of Artificial Sequence: Synthetic oligonucleotide
  Sense Strand Starting at position 908 of SEQ ID NO: 316262
guauuuggcugauuguguu

SEQ ID NO: 390074 - RNA, 19 nt, Artificial Sequence
  Description of Artificial Sequence: Synthetic oligonucleotide
  Antisense Strand to SEQ ID NO: 390073
aacacaaucagccaaauac

SEQ ID NO: 390075 - RNA, 19 nt, Artificial Sequence
  Description of Artificial Sequence: Synthetic oligonucleotide
  Sense Strand Starting at position 908 of SEQ ID NO: 316319
aguuaugugagauaaaugu

SEQ ID NO: 390076 - RNA, 19 nt, Artificial Sequence
  Description of Artificial Sequence: Synthetic oligonucleotide
  Antisense Strand to SEQ ID NO: 390075
acauuuaucucacauaacu

SEQ ID NO: 390077 - RNA, 19 nt, Artificial Sequence
  Description of Artificial Sequence: Synthetic oligonucleotide
  Sense Strand Starting at position 908 of SEQ ID NO: 316396
guuaaugggcuuuaaaugu

SEQ ID NO: 390078 - RNA, 19 nt, Artificial Sequence
  Description of Artificial Sequence: Synthetic oligonucleotide
  Antisense Strand to SEQ ID NO: 390077
acauuuaaagcccauuaac

SEQ ID NO: 390079 - RNA, 19 nt, Artificial Sequence
  Description of Artificial Sequence: Synthetic oligonucleotide
  Sense Strand Starting at position 908 of SEQ ID NO: 316414
ucauguuauuucuugcuau

SEQ ID NO: 390080 - RNA, 19 nt, Artificial Sequence
  Description of Artificial Sequence: Synthetic oligonucleotide
  Antisense Strand to SEQ ID NO: 390079
auagcaagaaauaacauga

SEQ ID NO: 390081 - RNA, 19 nt, Artificial Sequence
  Description of Artificial Sequence: Synthetic oligonucleotide
  Sense Strand Starting at position 908 of SEQ ID NO: 316485
ugaaauccauuguuguuga

SEQ ID NO: 390082 - RNA, 19 nt, Artificial Sequence
  Description of Artificial Sequence: Synthetic oligonucleotide
  Antisense Strand to SEQ ID NO: 390081
ucaacaacaauggauuuca

SEQ ID NO: 390083 - RNA, 19 nt, Artificial Sequence
  Description of Artificial Sequence: Synthetic oligonucleotide
  Sense Strand Starting at position 908 of SEQ ID NO: 316924
aauauuuaggcccggucau

SEQ ID NO: 390084 - RNA, 19 nt, Artificial Sequence
  Description of Artificial Sequence: Synthetic oligonucleotide
  Antisense Strand to SEQ ID NO: 390083
augaccgggccuaaauauu

SEQ ID NO: 390085 - RNA, 19 nt, Artificial Sequence
  Description of Artificial Sequence: Synthetic oligonucleotide
  Sense Strand Starting at position 908 of SEQ ID NO: 316925
auauuuaggcccggucaua

SEQ ID NO: 390086 - RNA, 19 nt, Artificial Sequence
  Description of Artificial Sequence: Synthetic oligonucleotide
  Antisense Strand to SEQ ID NO: 390085
uaugaccgggccuaaauau

SEQ ID NO: 390087 - RNA, 19 nt, Artificial Sequence
  Description of Artificial Sequence: Synthetic oligonucleotide
  Sense Strand Starting at position 908 of SEQ ID NO: 316957
aggagucaguaccuguaga

SEQ ID NO: 390088 - RNA, 19 nt, Artificial Sequence
  Description of Artificial Sequence: Synthetic oligonucleotide
  Antisense Strand to SEQ ID NO: 390087
ucuacagguacugacuccu

SEQ ID NO: 390089 - RNA, 19 nt, Artificial Sequence
  Description of Artificial Sequence: Synthetic oligonucleotide
  Sense Strand Starting at position 908 of SEQ ID NO: 317028
ugcauuaucagaggcagag

SEQ ID NO: 390090 - RNA, 19 nt, Artificial Sequence
  Description of Artificial Sequence: Synthetic oligonucleotide
  Antisense Strand to SEQ ID NO: 390089
cucugccucugauaaugca

SEQ ID NO: 390091 - RNA, 19 nt, Artificial Sequence
  Description of Artificial Sequence: Synthetic oligonucleotide
  Sense Strand Starting at position 908 of SEQ ID NO: 317076
aagguaucagccgaaguaa

SEQ ID NO: 390092 - RNA, 19 nt, Artificial Sequence
  Description of Artificial Sequence: Synthetic oligonucleotide
  Antisense Strand to SEQ ID NO: 390091
uuacuucggcugauaccuu

SEQ ID NO: 390093 - RNA, 19 nt, Artificial Sequence
  Description of Artificial Sequence: Synthetic oligonucleotide
  Sense Strand Starting at position 908 of SEQ ID NO: 317260
uuuauacugcaaggaaauc

SEQ ID NO: 390094 - RNA, 19 nt, Artificial Sequence
  Description of Artificial Sequence: Synthetic oligonucleotide
  Antisense Strand to SEQ ID NO: 390093
gauuuccuugcaguauaaa

SEQ ID NO: 390095 - RNA, 19 nt, Artificial Sequence
  Description of Artificial Sequence: Synthetic oligonucleotide
  Sense Strand Starting at position 908 of SEQ ID NO: 317308
ggaguauugcuuuaucaau

SEQ ID NO: 390096 - RNA, 19 nt, Artificial Sequence
  Description of Artificial Sequence: Synthetic oligonucleotide
  Antisense Strand to SEQ ID NO: 390095
auugauaaagcaauacucc

SEQ ID NO: 390097 - RNA, 19 nt, Artificial Sequence
  Description of Artificial Sequence: Synthetic oligonucleotide
  Sense Strand Starting at position 908 of SEQ ID NO: 317589
ucauuaaaucugcgauaaa

SEQ ID NO: 390098 - RNA, 19 nt, Artificial Sequence
  Description of Artificial Sequence: Synthetic oligonucleotide
  Antisense Strand to SEQ ID NO: 390097
uuuaucgcagauuuaauga

SEQ ID NO: 390099 - RNA, 19 nt, Artificial Sequence
  Description of Artificial Sequence: Synthetic oligonucleotide
  Sense Strand Starting at position 908 of SEQ ID NO: 317898
agauauggguaauuguuau

SEQ ID NO: 390100 - RNA, 19 nt, Artificial Sequence
  Description of Artificial Sequence: Synthetic oligonucleotide
  Antisense Strand to SEQ ID NO: 390099
auaacaauuacccauaucu

SEQ ID NO: 390101 - RNA, 19 nt, Artificial Sequence
  Description of Artificial Sequence: Synthetic oligonucleotide
  Sense Strand Starting at position 908 of SEQ ID NO: 317965
uuacuagaugcugacagua

SEQ ID NO: 390102 - RNA, 19 nt, Artificial Sequence
  Description of Artificial Sequence: Synthetic oligonucleotide
  Antisense Strand to SEQ ID NO: 390101
uacugucagcaucuaguaa

SEQ ID NO: 390103 - RNA, 19 nt, Artificial Sequence
  Description of Artificial Sequence: Synthetic oligonucleotide
  Sense Strand Starting at position 908 of SEQ ID NO: 317970
agaugcugacaguauucua

SEQ ID NO: 390104 - RNA, 19 nt, Artificial Sequence
  Description of Artificial Sequence: Synthetic oligonucleotide
  Antisense Strand to SEQ ID NO: 390103
uagaauacugucagcaucu

SEQ ID NO: 390105 - RNA, 19 nt, Artificial Sequence
  Description of Artificial Sequence: Synthetic oligonucleotide
  Sense Strand Starting at position 908 of SEQ ID NO: 318018
ucacaacaucuaugugagu

SEQ ID NO: 390106 - RNA, 19 nt, Artificial Sequence
  Description of Artificial Sequence: Synthetic oligonucleotide
  Antisense Strand to SEQ ID NO: 390105
acucacauagauguuguga

SEQ ID NO: 390107 - RNA, 19 nt, Artificial Sequence
  Description of Artificial Sequence: Synthetic oligonucleotide
  Sense Strand Starting at position 908 of SEQ ID NO: 318025
aucuaugugaguuauguac

SEQ ID NO: 390108 - RNA, 19 nt, Artificial Sequence
  Description of Artificial Sequence: Synthetic oligonucleotide
  Antisense Strand to SEQ ID NO: 390107
guacauaacucacauagau

SEQ ID NO: 390109 - RNA, 19 nt, Artificial Sequence
  Description of Artificial Sequence: Synthetic oligonucleotide
  Sense Strand Starting at position 908 of SEQ ID NO: 318029
augugaguuauguaccuug

SEQ ID NO: 390110 - RNA, 19 nt, Artificial Sequence
  Description of Artificial Sequence: Synthetic oligonucleotide
  Antisense Strand to SEQ ID NO: 390109
caagguacauaacucacau

SEQ ID NO: 390111 - RNA, 19 nt, Artificial Sequence
  Description of Artificial Sequence: Synthetic oligonucleotide
  Sense Strand Starting at position 908 of SEQ ID NO: 318072
ugccacaaagccugagaua

SEQ ID NO: 390112 - RNA, 19 nt, Artificial Sequence
  Description of Artificial Sequence: Synthetic oligonucleotide
  Antisense Strand to SEQ ID NO: 390111
uaucucaggcuuuguggca

SEQ ID NO: 390113 - RNA, 19 nt, Artificial Sequence
  Description of Artificial Sequence: Synthetic oligonucleotide
  Sense Strand Starting at position 908 of SEQ ID NO: 318073
gccacaaagccugagauaa

SEQ ID NO: 390114 - RNA, 19 nt, Artificial Sequence
  Description of Artificial Sequence: Synthetic oligonucleotide
  Antisense Strand to SEQ ID NO: 390113
uuaucucaggcuuuguggc

SEQ ID NO: 390115 - RNA, 19 nt, Artificial Sequence
  Description of Artificial Sequence: Synthetic oligonucleotide
  Sense Strand Starting at position 908 of SEQ ID NO: 318081
gccugagauaaccauggua

SEQ ID NO: 390116 - RNA, 19 nt, Artificial Sequence
  Description of Artificial Sequence: Synthetic oligonucleotide
  Antisense Strand to SEQ ID NO: 390115
uaccaugguuaucucaggc

SEQ ID NO: 390117 - RNA, 19 nt, Artificial Sequence
  Description of Artificial Sequence: Synthetic oligonucleotide
  Sense Strand Starting at position 908 of SEQ ID NO: 318083
cugagauaaccaugguagu

SEQ ID NO: 390118 - RNA, 19 nt, Artificial Sequence
  Description of Artificial Sequence: Synthetic oligonucleotide
  Antisense Strand to SEQ ID NO: 390117
acuaccaugguuaucucag

SEQ ID NO: 390119 - RNA, 19 nt, Artificial Sequence
  Description of Artificial Sequence: Synthetic oligonucleotide
  Sense Strand Starting at position 908 of SEQ ID NO: 318316
auauuauugaugugaguag

SEQ ID NO: 390120 - RNA, 19 nt, Artificial Sequence
  Description of Artificial Sequence: Synthetic oligonucleotide
  Antisense Strand to SEQ ID NO: 390119
cuacucacaucaauaauau

SEQ ID NO: 390121 - RNA, 19 nt, Artificial Sequence
  Description of Artificial Sequence: Synthetic oligonucleotide
  Sense Strand Starting at position 908 of SEQ ID NO: 318431
uugaacacuuugucaguaa

SEQ ID NO: 390122 - RNA, 19 nt, Artificial Sequence
  Description of Artificial Sequence: Synthetic oligonucleotide
  Antisense Strand to SEQ ID NO: 390121
uuacugacaaaguguucaa

SEQ ID NO: 390123 - RNA, 19 nt, Artificial Sequence
  Description of Artificial Sequence: Synthetic oligonucleotide
  Sense Strand Starting at position 908 of SEQ ID NO: 318435
acacuuugucaguaagcag

SEQ ID NO: 390124 - RNA, 19 nt, Artificial Sequence
  Description of Artificial Sequence: Synthetic oligonucleotide
  Antisense Strand to SEQ ID NO: 390123
cugcuuacugacaaagugu

SEQ ID NO: 390125 - RNA, 19 nt, Artificial Sequence
  Description of Artificial Sequence: Synthetic oligonucleotide
  Sense Strand Starting at position 908 of SEQ ID NO: 318729
uuggguaucauguauguua

SEQ ID NO: 390126 - RNA, 19 nt, Artificial Sequence
  Description of Artificial Sequence: Synthetic oligonucleotide
  Antisense Strand to SEQ ID NO: 390125
uaacauacaugauacccaa

SEQ ID NO: 390127 - RNA, 19 nt, Artificial Sequence
  Description of Artificial Sequence: Synthetic oligonucleotide
  Sense Strand Starting at position 908 of SEQ ID NO: 318828
uuggaauauguugguaaag

SEQ ID NO: 390128 - RNA, 19 nt, Artificial Sequence
  Description of Artificial Sequence: Synthetic oligonucleotide
  Antisense Strand to SEQ ID NO: 390127
cuuuaccaacauauuccaa

SEQ ID NO: 390129 - RNA, 19 nt, Artificial Sequence
  Description of Artificial Sequence: Synthetic oligonucleotide
  Sense Strand Starting at position 908 of SEQ ID NO: 318829
uggaauauguugguaaagu

SEQ ID NO: 390130 - RNA, 19 nt, Artificial Sequence
  Description of Artificial Sequence: Synthetic oligonucleotide
  Antisense Strand to SEQ ID NO: 390129
acuuuaccaacauauucca

SEQ ID NO: 390131 - RNA, 19 nt, Artificial Sequence
  Description of Artificial Sequence: Synthetic oligonucleotide
  Sense Strand Starting at position 908 of SEQ ID NO: 319063
agucuucuacgauacaaua

SEQ ID NO: 390132 - RNA, 19 nt, Artificial Sequence
  Description of Artificial Sequence: Synthetic oligonucleotide
  Antisense Strand to SEQ ID NO: 390131
uauuguaucguagaagacu

SEQ ID NO: 390133 - RNA, 19 nt, Artificial Sequence
  Description of Artificial Sequence: Synthetic oligonucleotide
  Sense Strand Starting at position 909 of SEQ ID NO: 315322
ugccgauuuacagguguga

SEQ ID NO: 390134 - RNA, 19 nt, Artificial Sequence
  Description of Artificial Sequence: Synthetic oligonucleotide
  Antisense Strand to SEQ ID NO: 390133
ucacaccuguaaaucggca

SEQ ID NO: 390135 - RNA, 19 nt, Artificial Sequence
  Description of Artificial Sequence: Synthetic oligonucleotide
  Sense Strand Starting at position 909 of SEQ ID NO: 315440
gucucaacagucuaaucca

SEQ ID NO: 390136 - RNA, 19 nt, Artificial Sequence
  Description of Artificial Sequence: Synthetic oligonucleotide
  Antisense Strand to SEQ ID NO: 390135
uggauuagacuguugagac

SEQ ID NO: 390137 - RNA, 19 nt, Artificial Sequence
  Description of Artificial Sequence: Synthetic oligonucleotide
  Sense Strand Starting at position 909 of SEQ ID NO: 315894
guuugcagugcuguccaua

SEQ ID NO: 390138 - RNA, 19 nt, Artificial Sequence
  Description of Artificial Sequence: Synthetic oligonucleotide
  Antisense Strand to SEQ ID NO: 390137
uauggacagcacugcaaac

SEQ ID NO: 390139 - RNA, 19 nt, Artificial Sequence
  Description of Artificial Sequence: Synthetic oligonucleotide
  Sense Strand Starting at position 909 of SEQ ID NO: 315895
uuugcagugcuguccauau

SEQ ID NO: 390140 - RNA, 19 nt, Artificial Sequence
  Description of Artificial Sequence: Synthetic oligonucleotide
  Antisense Strand to SEQ ID NO: 390139
auauggacagcacugcaaa

SEQ ID NO: 390141 - RNA, 19 nt, Artificial Sequence
  Description of Artificial Sequence: Synthetic oligonucleotide
  Sense Strand Starting at position 909 of SEQ ID NO: 315914
gcucauccaggucauuaau

SEQ ID NO: 390142 - RNA, 19 nt, Artificial Sequence
  Description of Artificial Sequence: Synthetic oligonucleotide
  Antisense Strand to SEQ ID NO: 390141
auuaaugaccuggaugagc

SEQ ID NO: 390143 - RNA, 19 nt, Artificial Sequence
  Description of Artificial Sequence: Synthetic oligonucleotide
  Sense Strand Starting at position 909 of SEQ ID NO: 316013
cuaggaauggugugaugag

SEQ ID NO: 390144 - RNA, 19 nt, Artificial Sequence
  Description of Artificial Sequence: Synthetic oligonucleotide
  Antisense Strand to SEQ ID NO: 390143
cucaucacaccauuccuag

SEQ ID NO: 390145 - RNA, 19 nt, Artificial Sequence
  Description of Artificial Sequence: Synthetic oligonucleotide
  Sense Strand Starting at position 909 of SEQ ID NO: 316260
ucauguaaaggauguaguu

SEQ ID NO: 390146 - RNA, 19 nt, Artificial Sequence
  Description of Artificial Sequence: Synthetic oligonucleotide
  Antisense Strand to SEQ ID NO: 390145
aacuacauccuuuacauga

SEQ ID NO: 390147 - RNA, 19 nt, Artificial Sequence
  Description of Artificial Sequence: Synthetic oligonucleotide
  Sense Strand Starting at position 909 of SEQ ID NO: 316282
ugagccuugauggacuauu

SEQ ID NO: 390148 - RNA, 19 nt, Artificial Sequence
  Description of Artificial Sequence: Synthetic oligonucleotide
  Antisense Strand to SEQ ID NO: 390147
aauaguccaucaaggcuca

SEQ ID NO: 390149 - RNA, 19 nt, Artificial Sequence
  Description of Artificial Sequence: Synthetic oligonucleotide
  Sense Strand Starting at position 909 of SEQ ID NO: 316340
ugaagucaauuacuuguau

SEQ ID NO: 390150 - RNA, 19 nt, Artificial Sequence
  Description of Artificial Sequence: Synthetic oligonucleotide
  Antisense Strand to SEQ ID NO: 390149
auacaaguaauugacuuca

SEQ ID NO: 390151 - RNA, 19 nt, Artificial Sequence
  Description of Artificial Sequence: Synthetic oligonucleotide
  Sense Strand Starting at position 909 of SEQ ID NO: 316856
guauaaggcagagggauau

SEQ ID NO: 390152 - RNA, 19 nt, Artificial Sequence
  Description of Artificial Sequence: Synthetic oligonucleotide
  Antisense Strand to SEQ ID NO: 390151
auaucccucugccuuauac

SEQ ID NO: 390153 - RNA, 19 nt, Artificial Sequence
  Description of Artificial Sequence: Synthetic oligonucleotide
  Sense Strand Starting at position 909 of SEQ ID NO: 316965
acucauuggcuauacguau

SEQ ID NO: 390154 - RNA, 19 nt, Artificial Sequence
  Description of Artificial Sequence: Synthetic oligonucleotide
  Antisense Strand to SEQ ID NO: 390153
auacguauagccaaugagu

SEQ ID NO: 390155 - RNA, 19 nt, Artificial Sequence
  Description of Artificial Sequence: Synthetic oligonucleotide
  Sense Strand Starting at position 909 of SEQ ID NO: 317093
ucuccaacuugaguaguga

SEQ ID NO: 390156 - RNA, 19 nt, Artificial Sequence
  Description of Artificial Sequence: Synthetic oligonucleotide
  Antisense Strand to SEQ ID NO: 390155
ucacuacucaaguuggaga

SEQ ID NO: 390157 - RNA, 19 nt, Artificial Sequence
  Description of Artificial Sequence: Synthetic oligonucleotide
  Sense Strand Starting at position 909 of SEQ ID NO: 317094
cuccaacuugaguagugau

SEQ ID NO: 390158 - RNA, 19 nt, Artificial Sequence
  Description of Artificial Sequence: Synthetic oligonucleotide
  Antisense Strand to SEQ ID NO: 390157
aucacuacucaaguuggag

SEQ ID NO: 390159 - RNA, 19 nt, Artificial Sequence
  Description of Artificial Sequence: Synthetic oligonucleotide
  Sense Strand Starting at position 909 of SEQ ID NO: 317125
gguagaggugaaugugaug

SEQ ID NO: 390160 - RNA, 19 nt, Artificial Sequence
  Description of Artificial Sequence: Synthetic oligonucleotide
  Antisense Strand to SEQ ID NO: 390159
caucacauucaccucuacc

SEQ ID NO: 390161 - RNA, 19 nt, Artificial Sequence
  Description of Artificial Sequence: Synthetic oligonucleotide
  Sense Strand Starting at position 909 of SEQ ID NO: 317309
ugaaguaaacuuuggaauu

SEQ ID NO: 390162 - RNA, 19 nt, Artificial Sequence
  Description of Artificial Sequence: Synthetic oligonucleotide
  Antisense Strand to SEQ ID NO: 390161
aauuccaaaguuuacuuca

SEQ ID NO: 390163 - RNA, 19 nt, Artificial Sequence
  Description of Artificial Sequence: Synthetic oligonucleotide
  Sense Strand Starting at position 909 of SEQ ID NO: 317319
uuuggaauuucugaaagaa

SEQ ID NO: 390164 - RNA, 19 nt, Artificial Sequence
  Description of Artificial Sequence: Synthetic oligonucleotide
  Antisense Strand to SEQ ID NO: 390163
uucuuucagaaauuccaaa

SEQ ID NO: 390165 - RNA, 19 nt, Artificial Sequence
  Description of Artificial Sequence: Synthetic oligonucleotide
  Sense Strand Starting at position 909 of SEQ ID NO: 317337
aggagcauuuguuaaauau

SEQ ID NO: 390166 - RNA, 19 nt, Artificial Sequence
  Description of Artificial Sequence: Synthetic oligonucleotide
  Antisense Strand to SEQ ID NO: 390165
auauuuaacaaaugcuccu

SEQ ID NO: 390167 - RNA, 19 nt, Artificial Sequence
  Description of Artificial Sequence: Synthetic oligonucleotide
  Sense Strand Starting at position 909 of SEQ ID NO: 317595
auuuauguugugugaaggu

SEQ ID NO: 390168 - RNA, 19 nt, Artificial Sequence
  Description of Artificial Sequence: Synthetic oligonucleotide
  Antisense Strand to SEQ ID NO: 390167
accuucacacaacauaaau

SEQ ID NO: 390169 - RNA, 19 nt, Artificial Sequence
  Description of Artificial Sequence: Synthetic oligonucleotide
  Sense Strand Starting at position 909 of SEQ ID NO: 317666
ggacauguuucacugggac

SEQ ID NO: 390170 - RNA, 19 nt, Artificial Sequence
  Description of Artificial Sequence: Synthetic oligonucleotide
  Antisense Strand to SEQ ID NO: 390169
gucccagugaaacaugucc

SEQ ID NO: 390171 - RNA, 19 nt, Artificial Sequence
  Description of Artificial Sequence: Synthetic oligonucleotide
  Sense Strand Starting at position 909 of SEQ ID NO: 317736
guaauaaauaugugagguc

SEQ ID NO: 390172 - RNA, 19 nt, Artificial Sequence
  Description of Artificial Sequence: Synthetic oligonucleotide
  Antisense Strand to SEQ ID NO: 390171
gaccucacauauuuauuac

SEQ ID NO: 390173 - RNA, 19 nt, Artificial Sequence
  Description of Artificial Sequence: Synthetic oligonucleotide
  Sense Strand Starting at position 909 of SEQ ID NO: 318297
gccuauguaguagaaauga

SEQ ID NO: 390174 - RNA, 19 nt, Artificial Sequence
  Description of Artificial Sequence: Synthetic oligonucleotide
  Antisense Strand to SEQ ID NO: 390173
ucauuucuacuacauaggc

SEQ ID NO: 390175 - RNA, 19 nt, Artificial Sequence
  Description of Artificial Sequence: Synthetic oligonucleotide
  Sense Strand Starting at position 909 of SEQ ID NO: 318377
uuaggagacuauccuuacu

SEQ ID NO: 390176 - RNA, 19 nt, Artificial Sequence
  Description of Artificial Sequence: Synthetic oligonucleotide
  Antisense Strand to SEQ ID NO: 390175
aguaaggauagucuccuaa

SEQ ID NO: 390177 - RNA, 19 nt, Artificial Sequence
  Description of Artificial Sequence: Synthetic oligonucleotide
  Sense Strand Starting at position 909 of SEQ ID NO: 318379
aggagacuauccuuacugu

SEQ ID NO: 390178 - RNA, 19 nt, Artificial Sequence
  Description of Artificial Sequence: Synthetic oligonucleotide
  Antisense Strand to SEQ ID NO: 390177
acaguaaggauagucuccu

SEQ ID NO: 390179 - RNA, 19 nt, Artificial Sequence
  Description of Artificial Sequence: Synthetic oligonucleotide
  Sense Strand Starting at position 909 of SEQ ID NO: 318382
agacuauccuuacuguaca

SEQ ID NO: 390180 - RNA, 19 nt, Artificial Sequence
  Description of Artificial Sequence: Synthetic oligonucleotide
  Antisense Strand to SEQ ID NO: 390179
uguacaguaaggauagucu

SEQ ID NO: 390181 - RNA, 19 nt, Artificial Sequence
  Description of Artificial Sequence: Synthetic oligonucleotide
  Sense Strand Starting at position 909 of SEQ ID NO: 318385
cuauccuuacuguacagau

SEQ ID NO: 390182 - RNA, 19 nt, Artificial Sequence
  Description of Artificial Sequence: Synthetic oligonucleotide
  Antisense Strand to SEQ ID NO: 390181
aucuguacaguaaggauag

SEQ ID NO: 390183 - RNA, 19 nt, Artificial Sequence
  Description of Artificial Sequence: Synthetic oligonucleotide
  Sense Strand Starting at position 909 of SEQ ID NO: 318437
aggccaucucucgaggaca

SEQ ID NO: 390184 - RNA, 19 nt, Artificial Sequence
  Description of Artificial Sequence: Synthetic oligonucleotide
  Antisense Strand to SEQ ID NO: 390183
uguccucgagagauggccu

SEQ ID NO: 390185 - RNA, 19 nt, Artificial Sequence
  Description of Artificial Sequence: Synthetic oligonucleotide
  Sense Strand Starting at position 909 of SEQ ID NO: 318502
ucaauuaacugccugagag

SEQ ID NO: 390186 - RNA, 19 nt, Artificial Sequence
  Description of Artificial Sequence: Synthetic oligonucleotide
  Antisense Strand to SEQ ID NO: 390185
cucucaggcaguuaauuga

SEQ ID NO: 390187 - RNA, 19 nt, Artificial Sequence
  Description of Artificial Sequence: Synthetic oligonucleotide
  Sense Strand Starting at position 909 of SEQ ID NO: 318503
caauuaacugccugagagu

SEQ ID NO: 390188 - RNA, 19 nt, Artificial Sequence
  Description of Artificial Sequence: Synthetic oligonucleotide
  Antisense Strand to SEQ ID NO: 390187
acucucaggcaguuaauug

SEQ ID NO: 390189 - RNA, 19 nt, Artificial Sequence
  Description of Artificial Sequence: Synthetic oligonucleotide
  Sense Strand Starting at position 909 of SEQ ID NO: 318504
aauuaacugccugagaguu

SEQ ID NO: 390190 - RNA, 19 nt, Artificial Sequence
  Description of Artificial Sequence: Synthetic oligonucleotide
  Antisense Strand to SEQ ID NO: 390189
aacucucaggcaguuaauu

SEQ ID NO: 390191 - RNA, 19 nt, Artificial Sequence
  Description of Artificial Sequence: Synthetic oligonucleotide
  Sense Strand Starting at position 909 of SEQ ID NO: 318520
guuguagaucuugacugga

SEQ ID NO: 390192 - RNA, 19 nt, Artificial Sequence
  Description of Artificial Sequence: Synthetic oligonucleotide
  Antisense Strand to SEQ ID NO: 390191
uccagucaagaucuacaac

SEQ ID NO: 390193 - RNA, 19 nt, Artificial Sequence
  Description of Artificial Sequence: Synthetic oligonucleotide
  Sense Strand Starting at position 909 of SEQ ID NO: 318522
uguagaucuugacuggacu

SEQ ID NO: 390194 - RNA, 19 nt, Artificial Sequence
  Description of Artificial Sequence: Synthetic oligonucleotide
  Antisense Strand to SEQ ID NO: 390193
aguccagucaagaucuaca

SEQ ID NO: 390195 - RNA, 19 nt, Artificial Sequence
  Description of Artificial Sequence: Synthetic oligonucleotide
  Sense Strand Starting at position 909 of SEQ ID NO: 318667
cugaaugcugaagaaguuu

SEQ ID NO: 390196 - RNA, 19 nt, Artificial Sequence
  Description of Artificial Sequence: Synthetic oligonucleotide
  Antisense Strand to SEQ ID NO: 390195
aaacuucuucagcauucag

SEQ ID NO: 390197 - RNA, 19 nt, Artificial Sequence
  Description of Artificial Sequence: Synthetic oligonucleotide
  Sense Strand Starting at position 909 of SEQ ID NO: 318673
gcugaagaaguuuggacaa

SEQ ID NO: 390198 - RNA, 19 nt, Artificial Sequence
  Description of Artificial Sequence: Synthetic oligonucleotide
  Antisense Strand to SEQ ID NO: 390197
uuguccaaacuucuucagc

SEQ ID NO: 390199 - RNA, 19 nt, Artificial Sequence
  Description of Artificial Sequence: Synthetic oligonucleotide
  Sense Strand Starting at position 909 of SEQ ID NO: 318705
cuaggugucucccugaaga

SEQ ID NO: 390200 - RNA, 19 nt, Artificial Sequence
  Description of Artificial Sequence: Synthetic oligonucleotide
  Antisense Strand to SEQ ID NO: 390199
ucuucagggagacaccuag

SEQ ID NO: 390201 - RNA, 19 nt, Artificial Sequence
  Description of Artificial Sequence: Synthetic oligonucleotide
  Sense Strand Starting at position 909 of SEQ ID NO: 318890
uuuauauuggaaugcuauc

SEQ ID NO: 390202 - RNA, 19 nt, Artificial Sequence
  Description of Artificial Sequence: Synthetic oligonucleotide
  Antisense Strand to SEQ ID NO: 390201
gauagcauuccaauauaaa

SEQ ID NO: 390203 - RNA, 19 nt, Artificial Sequence
  Description of Artificial Sequence: Synthetic oligonucleotide
  Sense Strand Starting at position 909 of SEQ ID NO: 319006
ccaggucuugcugaccaau

SEQ ID NO: 390204 - RNA, 19 nt, Artificial Sequence
  Description of Artificial Sequence: Synthetic oligonucleotide
  Antisense Strand to SEQ ID NO: 390203
auuggucagcaagaccugg

SEQ ID NO: 390205 - RNA, 19 nt, Artificial Sequence
  Description of Artificial Sequence: Synthetic oligonucleotide
  Sense Strand Starting at position 909 of SEQ ID NO: 319053
cgucuuugggcccacagaa

SEQ ID NO: 390206 - RNA, 19 nt, Artificial Sequence
  Description of Artificial Sequence: Synthetic oligonucleotide
  Antisense Strand to SEQ ID NO: 390205
uucugugggcccaaagacg

SEQ ID NO: 390207 - RNA, 19 nt, Artificial Sequence
  Description of Artificial Sequence: Synthetic oligonucleotide
  Sense Strand Starting at position 909 of SEQ ID NO: 319185
cuccucuucccagauguuu

SEQ ID NO: 390208 - RNA, 19 nt, Artificial Sequence
  Description of Artificial Sequence: Synthetic oligonucleotide
  Antisense Strand to SEQ ID NO: 390207
aaacaucugggaagaggag

SEQ ID NO: 390209 - RNA, 19 nt, Artificial Sequence
  Description of Artificial Sequence: Synthetic oligonucleotide
  Sense Strand Starting at position 909 of SEQ ID NO: 319191
uucccagauguuuaguuga

SEQ ID NO: 390210 - RNA, 19 nt, Artificial Sequence
  Description of Artificial Sequence: Synthetic oligonucleotide
  Antisense Strand to SEQ ID NO: 390209
ucaacuaaacaucugggaa

SEQ ID NO: 390211 - RNA, 19 nt, Artificial Sequence
  Description of Artificial Sequence: Synthetic oligonucleotide
  Sense Strand Starting at position 909 of SEQ ID NO: 319194
ccagauguuuaguugacca

SEQ ID NO: 390212 - RNA, 19 nt, Artificial Sequence
  Description of Artificial Sequence: Synthetic oligonucleotide
  Antisense Strand to SEQ ID NO: 390211
uggucaacuaaacaucugg

SEQ ID NO: 390213 - RNA, 19 nt, Artificial Sequence
  Description of Artificial Sequence: Synthetic oligonucleotide
  Sense Strand Starting at position 910 of SEQ ID NO: 315271
acugguagcaucuaugagu

SEQ ID NO: 390214 - RNA, 19 nt, Artificial Sequence
  Description of Artificial Sequence: Synthetic oligonucleotide
  Antisense Strand to SEQ ID NO: 390213
acucauagaugcuaccagu

SEQ ID NO: 390215 - RNA, 19 nt, Artificial Sequence
  Description of Artificial Sequence: Synthetic oligonucleotide
  Sense Strand Starting at position 910 of SEQ ID NO: 315282
cuaugagugucuucuguca

SEQ ID NO: 390216 - RNA, 19 nt, Artificial Sequence
  Description of Artificial Sequence: Synthetic oligonucleotide
  Antisense Strand to SEQ ID NO: 390215
ugacagaagacacucauag

SEQ ID NO: 390217 - RNA, 19 nt, Artificial Sequence
  Description of Artificial Sequence: Synthetic oligonucleotide
  Sense Strand Starting at position 910 of SEQ ID NO: 315362
gucccuauaccagaaaggu

SEQ ID NO: 390218 - RNA, 19 nt, Artificial Sequence
  Description of Artificial Sequence: Synthetic oligonucleotide
  Antisense Strand to SEQ ID NO: 390217
accuuucugguauagggac

SEQ ID NO: 390219 - RNA, 19 nt, Artificial Sequence
  Description of Artificial Sequence: Synthetic oligonucleotide
  Sense Strand Starting at position 910 of SEQ ID NO: 315406
uugguucuguucucaguca

SEQ ID NO: 390220 - RNA, 19 nt, Artificial Sequence
  Description of Artificial Sequence: Synthetic oligonucleotide
  Antisense Strand to SEQ ID NO: 390219
ugacugagaacagaaccaa

SEQ ID NO: 390221 - RNA, 19 nt, Artificial Sequence
  Description of Artificial Sequence: Synthetic oligonucleotide
  Sense Strand Starting at position 910 of SEQ ID NO: 315414
guucucagucagcaaucga

SEQ ID NO: 390222 - RNA, 19 nt, Artificial Sequence
  Description of Artificial Sequence: Synthetic oligonucleotide
  Antisense Strand to SEQ ID NO: 390221
ucgauugcugacugagaac

SEQ ID NO: 390223 - RNA, 19 nt, Artificial Sequence
  Description of Artificial Sequence: Synthetic oligonucleotide
  Sense Strand Starting at position 910 of SEQ ID NO: 315470
cugaaaccugucgaagauu

SEQ ID NO: 390224 - RNA, 19 nt, Artificial Sequence
  Description of Artificial Sequence: Synthetic oligonucleotide
  Antisense Strand to SEQ ID NO: 390223
aaucuucgacagguuucag

SEQ ID NO: 390225 - RNA, 19 nt, Artificial Sequence
  Description of Artificial Sequence: Synthetic oligonucleotide
  Sense Strand Starting at position 910 of SEQ ID NO: 315547
caauuugucucacgaauga

SEQ ID NO: 390226 - RNA, 19 nt, Artificial Sequence
  Description of Artificial Sequence: Synthetic oligonucleotide
  Antisense Strand to SEQ ID NO: 390225
ucauucgugagacaaauug

SEQ ID NO: 390227 - RNA, 19 nt, Artificial Sequence
  Description of Artificial Sequence: Synthetic oligonucleotide
  Sense Strand Starting at position 910 of SEQ ID NO: 315551
uugucucacgaaugacaga

SEQ ID NO: 390228 - RNA, 19 nt, Artificial Sequence
  Description of Artificial Sequence: Synthetic oligonucleotide
  Antisense Strand to SEQ ID NO: 390227
ucugucauucgugagacaa

SEQ ID NO: 390229 - RNA, 19 nt, Artificial Sequence
  Description of Artificial Sequence: Synthetic oligonucleotide
  Sense Strand Starting at position 910 of SEQ ID NO: 315615
aggaauagguauuauacaa

SEQ ID NO: 390230 - RNA, 19 nt, Artificial Sequence
  Description of Artificial Sequence: Synthetic oligonucleotide
  Antisense Strand to SEQ ID NO: 390229
uuguauaauaccuauuccu

SEQ ID NO: 390231 - RNA, 19 nt, Artificial Sequence
  Description of Artificial Sequence: Synthetic oligonucleotide
  Sense Strand Starting at position 910 of SEQ ID NO: 315637
aguuuaucauugucugguu

SEQ ID NO: 390232 - RNA, 19 nt, Artificial Sequence
  Description of Artificial Sequence: Synthetic oligonucleotide
  Antisense Strand to SEQ ID NO: 390231
aaccagacaaugauaaacu

SEQ ID NO: 390233 - RNA, 19 nt, Artificial Sequence
  Description of Artificial Sequence: Synthetic oligonucleotide
  Sense Strand Starting at position 910 of SEQ ID NO: 315638
guuuaucauugucugguuu

SEQ ID NO: 390234 - RNA, 19 nt, Artificial Sequence
  Description of Artificial Sequence: Synthetic oligonucleotide
  Antisense Strand to SEQ ID NO: 390233
aaaccagacaaugauaaac

SEQ ID NO: 390235 - RNA, 19 nt, Artificial Sequence
  Description of Artificial Sequence: Synthetic oligonucleotide
  Sense Strand Starting at position 910 of SEQ ID NO: 315815
ccaagugaauuggauucuu

SEQ ID NO: 390236 - RNA, 19 nt, Artificial Sequence
  Description of Artificial Sequence: Synthetic oligonucleotide
  Antisense Strand to SEQ ID NO: 390235
aagaauccaauucacuugg

SEQ ID NO: 390237 - RNA, 19 nt, Artificial Sequence
  Description of Artificial Sequence: Synthetic oligonucleotide
  Sense Strand Starting at position 910 of SEQ ID NO: 315820
ugaauuggauucuucuuau

SEQ ID NO: 390238 - RNA, 19 nt, Artificial Sequence
  Description of Artificial Sequence: Synthetic oligonucleotide
  Antisense Strand to SEQ ID NO: 390237
auaagaagaauccaauuca

SEQ ID NO: 390239 - RNA, 19 nt, Artificial Sequence
  Description of Artificial Sequence: Synthetic oligonucleotide
  Sense Strand Starting at position 910 of SEQ ID NO: 315888
uugcaaauuucggaccuau

SEQ ID NO: 390240 - RNA, 19 nt, Artificial Sequence
  Description of Artificial Sequence: Synthetic oligonucleotide
  Antisense Strand to SEQ ID NO: 390239
auagguccgaaauuugcaa

SEQ ID NO: 390241 - RNA, 19 nt, Artificial Sequence
  Description of Artificial Sequence: Synthetic oligonucleotide
  Sense Strand Starting at position 910 of SEQ ID NO: 316153
accugagauuucuguuaac

SEQ ID NO: 390242 - RNA, 19 nt, Artificial Sequence
  Description of Artificial Sequence: Synthetic oligonucleotide
  Antisense Strand to SEQ ID NO: 390241
guuaacagaaaucucaggu

SEQ ID NO: 390243 - RNA, 19 nt, Artificial Sequence
  Description of Artificial Sequence: Synthetic oligonucleotide
  Sense Strand Starting at position 910 of SEQ ID NO: 316156
ugagauuucuguuaaccuc

SEQ ID NO: 390244 - RNA, 19 nt, Artificial Sequence
  Description of Artificial Sequence: Synthetic oligonucleotide
  Antisense Strand to SEQ ID NO: 390243
gagguuaacagaaaucuca

SEQ ID NO: 390245 - RNA, 19 nt, Artificial Sequence
  Description of Artificial Sequence: Synthetic oligonucleotide
  Sense Strand Starting at position 910 of SEQ ID NO: 317471
cgaggagggauccgaaguu

SEQ ID NO: 390246 - RNA, 19 nt, Artificial Sequence
  Description of Artificial Sequence: Synthetic oligonucleotide
  Antisense Strand to SEQ ID NO: 390245
aacuucggaucccuccucg

SEQ ID NO: 390247 - RNA, 19 nt, Artificial Sequence
  Description of Artificial Sequence: Synthetic oligonucleotide
  Sense Strand Starting at position 910 of SEQ ID NO: 317596
ccaagauguucuuuccagu

SEQ ID NO: 390248 - RNA, 19 nt, Artificial Sequence
  Description of Artificial Sequence: Synthetic oligonucleotide
  Antisense Strand to SEQ ID NO: 390247
acuggaaagaacaucuugg

SEQ ID NO: 390249 - RNA, 19 nt, Artificial Sequence
  Description of Artificial Sequence: Synthetic oligonucleotide
  Sense Strand Starting at position 910 of SEQ ID NO: 317697
gaguuccuugcguuuguaa

SEQ ID NO: 390250 - RNA, 19 nt, Artificial Sequence
  Description of Artificial Sequence: Synthetic oligonucleotide
  Antisense Strand to SEQ ID NO: 390249
uuacaaacgcaaggaacuc

SEQ ID NO: 390251 - RNA, 19 nt, Artificial Sequence
  Description of Artificial Sequence: Synthetic oligonucleotide
  Sense Strand Starting at position 910 of SEQ ID NO: 317710
uuguaaguuacaugguuau

SEQ ID NO: 390252 - RNA, 19 nt, Artificial Sequence
  Description of Artificial Sequence: Synthetic oligonucleotide
  Antisense Strand to SEQ ID NO: 390251
auaaccauguaacuuacaa

SEQ ID NO: 390253 - RNA, 19 nt, Artificial Sequence
  Description of Artificial Sequence: Synthetic oligonucleotide
  Sense Strand Starting at position 910 of SEQ ID NO: 317788
uuaaauuucuuagcagugu

SEQ ID NO: 390254 - RNA, 19 nt, Artificial Sequence
  Description of Artificial Sequence: Synthetic oligonucleotide
  Antisense Strand to SEQ ID NO: 390253
acacugcuaagaaauuuaa

SEQ ID NO: 390255 - RNA, 19 nt, Artificial Sequence
  Description of Artificial Sequence: Synthetic oligonucleotide
  Sense Strand Starting at position 910 of SEQ ID NO: 317852
ggacgugaggcacgagaaa

SEQ ID NO: 390256 - RNA, 19 nt, Artificial Sequence
  Description of Artificial Sequence: Synthetic oligonucleotide
  Antisense Strand to SEQ ID NO: 390255
uuucucgugccucacgucc

SEQ ID NO: 390257 - RNA, 19 nt, Artificial Sequence
  Description of Artificial Sequence: Synthetic oligonucleotide
  Sense Strand Starting at position 910 of SEQ ID NO: 317865
gagaaacaguuucucaugu

SEQ ID NO: 390258 - RNA, 19 nt, Artificial Sequence
  Description of Artificial Sequence: Synthetic oligonucleotide
  Antisense Strand to SEQ ID NO: 390257
acaugagaaacuguuucuc

SEQ ID NO: 390259 - RNA, 19 nt, Artificial Sequence
  Description of Artificial Sequence: Synthetic oligonucleotide
  Sense Strand Starting at position 910 of SEQ ID NO: 317875
uucucauguguuggguaga

SEQ ID NO: 390260 - RNA, 19 nt, Artificial Sequence
  Description of Artificial Sequence: Synthetic oligonucleotide
  Antisense Strand to SEQ ID NO: 390259
ucuacccaacacaugagaa

SEQ ID NO: 390261 - RNA, 19 nt, Artificial Sequence
  Description of Artificial Sequence: Synthetic oligonucleotide
  Sense Strand Starting at position 910 of SEQ ID NO: 317951
gcaggugcgcguucagaaa

SEQ ID NO: 390262 - RNA, 19 nt, Artificial Sequence
  Description of Artificial Sequence: Synthetic oligonucleotide
  Antisense Strand to SEQ ID NO: 390261
uuucugaacgcgcaccugc

SEQ ID NO: 390263 - RNA, 19 nt, Artificial Sequence
  Description of Artificial Sequence: Synthetic oligonucleotide
  Sense Strand Starting at position 910 of SEQ ID NO: 318012
cagucuuauuucuggagca

SEQ ID NO: 390264 - RNA, 19 nt, Artificial Sequence
  Description of Artificial Sequence: Synthetic oligonucleotide
  Antisense Strand to SEQ ID NO: 390263
ugcuccagaaauaagacug

SEQ ID NO: 390265 - RNA, 19 nt, Artificial Sequence
  Description of Artificial Sequence: Synthetic oligonucleotide
  Sense Strand Starting at position 910 of SEQ ID NO: 318013
agucuuauuucuggagcau

SEQ ID NO: 390266 - RNA, 19 nt, Artificial Sequence
  Description of Artificial Sequence: Synthetic oligonucleotide
  Antisense Strand to SEQ ID NO: 390265
augcuccagaaauaagacu

SEQ ID NO: 390267 - RNA, 19 nt, Artificial Sequence
  Description of Artificial Sequence: Synthetic oligonucleotide
  Sense Strand Starting at position 910 of SEQ ID NO: 318174
ucguuugugguugaagcaa

SEQ ID NO: 390268 - RNA, 19 nt, Artificial Sequence
  Description of Artificial Sequence: Synthetic oligonucleotide
  Antisense Strand to SEQ ID NO: 390267
uugcuucaaccacaaacga

SEQ ID NO: 390269 - RNA, 19 nt, Artificial Sequence
  Description of Artificial Sequence: Synthetic oligonucleotide
  Sense Strand Starting at position 910 of SEQ ID NO: 318284
cugagagccacggaucuua

SEQ ID NO: 390270 - RNA, 19 nt, Artificial Sequence
  Description of Artificial Sequence: Synthetic oligonucleotide
  Antisense Strand to SEQ ID NO: 390269
uaagauccguggcucucag

SEQ ID NO: 390271 - RNA, 19 nt, Artificial Sequence
  Description of Artificial Sequence: Synthetic oligonucleotide
  Sense Strand Starting at position 910 of SEQ ID NO: 318325
cauuuauuggccugugauu

SEQ ID NO: 390272 - RNA, 19 nt, Artificial Sequence
  Description of Artificial Sequence: Synthetic oligonucleotide
  Antisense Strand to SEQ ID NO: 390271
aaucacaggccaauaaaug

SEQ ID NO: 390273 - RNA, 19 nt, Artificial Sequence
  Description of Artificial Sequence: Synthetic oligonucleotide
  Sense Strand Starting at position 910 of SEQ ID NO: 318327
uuuauuggccugugauuua

SEQ ID NO: 390274 - RNA, 19 nt, Artificial Sequence
  Description of Artificial Sequence: Synthetic oligonucleotide
  Antisense Strand to SEQ ID NO: 390273
uaaaucacaggccaauaaa

SEQ ID NO: 390275 - RNA, 19 nt, Artificial Sequence
  Description of Artificial Sequence: Synthetic oligonucleotide
  Sense Strand Starting at position 910 of SEQ ID NO: 318399
gcguccuacuucuuguuaa

SEQ ID NO: 390276 - RNA, 19 nt, Artificial Sequence
  Description of Artificial Sequence: Synthetic oligonucleotide
  Antisense Strand to SEQ ID NO: 390275
uuaacaagaaguaggacgc

SEQ ID NO: 390277 - RNA, 19 nt, Artificial Sequence
  Description of Artificial Sequence: Synthetic oligonucleotide
  Sense Strand Starting at position 910 of SEQ ID NO: 318656
uagagacugugucuugaca

SEQ ID NO: 390278 - RNA, 19 nt, Artificial Sequence
  Description of Artificial Sequence: Synthetic oligonucleotide
  Antisense Strand to SEQ ID NO: 390277
ugucaagacacagucucua

SEQ ID NO: 390279 - RNA, 19 nt, Artificial Sequence
  Description of Artificial Sequence: Synthetic oligonucleotide
  Sense Strand Starting at position 910 of SEQ ID NO: 318670
ugacauguugccuagacua

SEQ ID NO: 390280 - RNA, 19 nt, Artificial Sequence
  Description of Artificial Sequence: Synthetic oligonucleotide
  Antisense Strand to SEQ ID NO: 390279
uagucuaggcaacauguca

SEQ ID NO: 390281 - RNA, 19 nt, Artificial Sequence
  Description of Artificial Sequence: Synthetic oligonucleotide
  Sense Strand Starting at position 910 of SEQ ID NO: 318672
acauguugccuagacuagu

SEQ ID NO: 390282 - RNA, 19 nt, Artificial Sequence
  Description of Artificial Sequence: Synthetic oligonucleotide
  Antisense Strand to SEQ ID NO: 390281
acuagucuaggcaacaugu

SEQ ID NO: 390283 - RNA, 19 nt, Artificial Sequence
  Description of Artificial Sequence: Synthetic oligonucleotide
  Sense Strand Starting at position 910 of SEQ ID NO: 318678
ugccuagacuagucugaaa

SEQ ID NO: 390284 - RNA, 19 nt, Artificial Sequence
  Description of Artificial Sequence: Synthetic oligonucleotide
  Antisense Strand to SEQ ID NO: 390283
uuucagacuagucuaggca

SEQ ID NO: 390285 - RNA, 19 nt, Artificial Sequence
  Description of Artificial Sequence: Synthetic oligonucleotide
  Sense Strand Starting at position 910 of SEQ ID NO: 318680
ccuagacuagucugaaacu

SEQ ID NO: 390286 - RNA, 19 nt, Artificial Sequence
  Description of Artificial Sequence: Synthetic oligonucleotide
  Antisense Strand to SEQ ID NO: 390285
aguuucagacuagucuagg

SEQ ID NO: 390287 - RNA, 19 nt, Artificial Sequence
  Description of Artificial Sequence: Synthetic oligonucleotide
  Sense Strand Starting at position 910 of SEQ ID NO: 319046
aguagaaucgcuugacccu

SEQ ID NO: 390288 - RNA, 19 nt, Artificial Sequence
  Description of Artificial Sequence: Synthetic oligonucleotide
  Antisense Strand to SEQ ID NO: 390287
agggucaagcgauucuacu

SEQ ID NO: 390289 - RNA, 19 nt, Artificial Sequence
  Description of Artificial Sequence: Synthetic oligonucleotide
  Sense Strand Starting at position 910 of SEQ ID NO: 319073
gagguuacaagccgagauu

SEQ ID NO: 390290 - RNA, 19 nt, Artificial Sequence
  Description of Artificial Sequence: Synthetic oligonucleotide
  Antisense Strand to SEQ ID NO: 390289
aaucucggcuuguaaccuc

SEQ ID NO: 390291 - RNA, 19 nt, Artificial Sequence
  Description of Artificial Sequence: Synthetic oligonucleotide
  Sense Strand Starting at position 910 of SEQ ID NO: 319169
aguuuauugacagaguugu

SEQ ID NO: 390292 - RNA, 19 nt, Artificial Sequence
  Description of Artificial Sequence: Synthetic oligonucleotide
  Antisense Strand to SEQ ID NO: 390291
acaacucugucaauaaacu

SEQ ID NO: 390293 - RNA, 19 nt, Artificial Sequence
  Description of Artificial Sequence: Synthetic oligonucleotide
  Sense Strand Starting at position 911 of SEQ ID NO: 315268
ucggcuaaugaugaucaua

SEQ ID NO: 390294 - RNA, 19 nt, Artificial Sequence
  Description of Artificial Sequence: Synthetic oligonucleotide
  Antisense Strand to SEQ ID NO: 390293
uaugaucaucauuagccga

SEQ ID NO: 390295 - RNA, 19 nt, Artificial Sequence
  Description of Artificial Sequence: Synthetic oligonucleotide
  Sense Strand Starting at position 911 of SEQ ID NO: 315270
ggcuaaugaugaucauaua

SEQ ID NO: 390296 - RNA, 19 nt, Artificial Sequence
  Description of Artificial Sequence: Synthetic oligonucleotide
  Antisense Strand to SEQ ID NO: 390295
uauaugaucaucauuagcc

SEQ ID NO: 390297 - RNA, 19 nt, Artificial Sequence
  Description of Artificial Sequence: Synthetic oligonucleotide
  Sense Strand Starting at position 911 of SEQ ID NO: 315413
gagaaacagugcuuaugaa

SEQ ID NO: 390298 - RNA, 19 nt, Artificial Sequence
  Description of Artificial Sequence: Synthetic oligonucleotide
  Antisense Strand to SEQ ID NO: 390297
uucauaagcacuguuucuc

SEQ ID NO: 390299 - RNA, 19 nt, Artificial Sequence
  Description of Artificial Sequence: Synthetic oligonucleotide
  Sense Strand Starting at position 911 of SEQ ID NO: 315516
gcacuauguuaauuaggaa

SEQ ID NO: 390300 - RNA, 19 nt, Artificial Sequence
  Description of Artificial Sequence: Synthetic oligonucleotide
  Antisense Strand to SEQ ID NO: 390299
uuccuaauuaacauagugc

SEQ ID NO: 390301 - RNA, 19 nt, Artificial Sequence
  Description of Artificial Sequence: Synthetic oligonucleotide
  Sense Strand Starting at position 911 of SEQ ID NO: 315692
ccuauuuguugauauuugu

SEQ ID NO: 390302 - RNA, 19 nt, Artificial Sequence
  Description of Artificial Sequence: Synthetic oligonucleotide
  Antisense Strand to SEQ ID NO: 390301
acaaauaucaacaaauagg

SEQ ID NO: 390303 - RNA, 19 nt, Artificial Sequence
  Description of Artificial Sequence: Synthetic oligonucleotide
  Sense Strand Starting at position 911 of SEQ ID NO: 315698
uguugauauuuguugcacu

SEQ ID NO: 390304 - RNA, 19 nt, Artificial Sequence
  Description of Artificial Sequence: Synthetic oligonucleotide
  Antisense Strand to SEQ ID NO: 390303
agugcaacaaauaucaaca

SEQ ID NO: 390305 - RNA, 19 nt, Artificial Sequence
  Description of Artificial Sequence: Synthetic oligonucleotide
  Sense Strand Starting at position 911 of SEQ ID NO: 315780
acaguauagccaggacauu

SEQ ID NO: 390306 - RNA, 19 nt, Artificial Sequence
  Description of Artificial Sequence: Synthetic oligonucleotide
  Antisense Strand to SEQ ID NO: 390305
aauguccuggcuauacugu

SEQ ID NO: 390307 - RNA, 19 nt, Artificial Sequence
  Description of Artificial Sequence: Synthetic oligonucleotide
  Sense Strand Starting at position 911 of SEQ ID NO: 316093
gcaauuaagugacuuaauu

SEQ ID NO: 390308 - RNA, 19 nt, Artificial Sequence
  Description of Artificial Sequence: Synthetic oligonucleotide
  Antisense Strand to SEQ ID NO: 390307
aauuaagucacuuaauugc

SEQ ID NO: 390309 - RNA, 19 nt, Artificial Sequence
  Description of Artificial Sequence: Synthetic oligonucleotide
  Sense Strand Starting at position 911 of SEQ ID NO: 316330
ggagguaucugauucugac

SEQ ID NO: 390310 - RNA, 19 nt, Artificial Sequence
  Description of Artificial Sequence: Synthetic oligonucleotide
  Antisense Strand to SEQ ID NO: 390309
gucagaaucagauaccucc

SEQ ID NO: 390311 - RNA, 19 nt, Artificial Sequence
  Description of Artificial Sequence: Synthetic oligonucleotide
  Sense Strand Starting at position 911 of SEQ ID NO: 316359
agaaguuaauagguaguca

SEQ ID NO: 390312 - RNA, 19 nt, Artificial Sequence
  Description of Artificial Sequence: Synthetic oligonucleotide
  Antisense Strand to SEQ ID NO: 390311
ugacuaccuauuaacuucu

SEQ ID NO: 390313 - RNA, 19 nt, Artificial Sequence
  Description of Artificial Sequence: Synthetic oligonucleotide
  Sense Strand Starting at position 911 of SEQ ID NO: 316537
gguccuacacucugggaau

SEQ ID NO: 390314 - RNA, 19 nt, Artificial Sequence
  Description of Artificial Sequence: Synthetic oligonucleotide
  Antisense Strand to SEQ ID NO: 390313
auucccagaguguaggacc

SEQ ID NO: 390315 - RNA, 19 nt, Artificial Sequence
  Description of Artificial Sequence: Synthetic oligonucleotide
  Sense Strand Starting at position 911 of SEQ ID NO: 316540
ccuacacucugggaauuua

SEQ ID NO: 390316 - RNA, 19 nt, Artificial Sequence
  Description of Artificial Sequence: Synthetic oligonucleotide
  Antisense Strand to SEQ ID NO: 390315
uaaauucccagaguguagg

SEQ ID NO: 390317 - RNA, 19 nt, Artificial Sequence
  Description of Artificial Sequence: Synthetic oligonucleotide
  Sense Strand Starting at position 911 of SEQ ID NO: 316555
uuuacaauucuuugggaga

SEQ ID NO: 390318 - RNA, 19 nt, Artificial Sequence
  Description of Artificial Sequence: Synthetic oligonucleotide
  Antisense Strand to SEQ ID NO: 390317
ucucccaaagaauuguaaa

SEQ ID NO: 390319 - RNA, 19 nt, Artificial Sequence
  Description of Artificial Sequence: Synthetic oligonucleotide
  Sense Strand Starting at position 911 of SEQ ID NO: 316737
ccuuauguauucuugggaa

SEQ ID NO: 390320 - RNA, 19 nt, Artificial Sequence
  Description of Artificial Sequence: Synthetic oligonucleotide
  Antisense Strand to SEQ ID NO: 390319
uucccaagaauacauaagg

SEQ ID NO: 390321 - RNA, 19 nt, Artificial Sequence
  Description of Artificial Sequence: Synthetic oligonucleotide
  Sense Strand Starting at position 911 of SEQ ID NO: 316739
uuauguauucuugggaaau

SEQ ID NO: 390322 - RNA, 19 nt, Artificial Sequence
  Description of Artificial Sequence: Synthetic oligonucleotide
  Antisense Strand to SEQ ID NO: 390321
auuucccaagaauacauaa

SEQ ID NO: 390323 - RNA, 19 nt, Artificial Sequence
  Description of Artificial Sequence: Synthetic oligonucleotide
  Sense Strand Starting at position 911 of SEQ ID NO: 316749
uugggaaaucuaugcaaac

SEQ ID NO: 390324 - RNA, 19 nt, Artificial Sequence
  Description of Artificial Sequence: Synthetic oligonucleotide
  Antisense Strand to SEQ ID NO: 390323
guuugcauagauuucccaa

SEQ ID NO: 390325 - RNA, 19 nt, Artificial Sequence
  Description of Artificial Sequence: Synthetic oligonucleotide
  Sense Strand Starting at position 911 of SEQ ID NO: 316885
uaagguucugaacauguuu

SEQ ID NO: 390326 - RNA, 19 nt, Artificial Sequence
  Description of Artificial Sequence: Synthetic oligonucleotide
  Antisense Strand to SEQ ID NO: 390325
aaacauguucagaaccuua

SEQ ID NO: 390327 - RNA, 19 nt, Artificial Sequence
  Description of Artificial Sequence: Synthetic oligonucleotide
  Sense Strand Starting at position 911 of SEQ ID NO: 316946
gaguguacacaugauagua

SEQ ID NO: 390328 - RNA, 19 nt, Artificial Sequence
  Description of Artificial Sequence: Synthetic oligonucleotide
  Antisense Strand to SEQ ID NO: 390327
uacuaucauguguacacuc

SEQ ID NO: 390329 - RNA, 19 nt, Artificial Sequence
  Description of Artificial Sequence: Synthetic oligonucleotide
  Sense Strand Starting at position 911 of SEQ ID NO: 317054
ggaacuuuaccuugugaua

SEQ ID NO: 390330 - RNA, 19 nt, Artificial Sequence
  Description of Artificial Sequence: Synthetic oligonucleotide
  Antisense Strand to SEQ ID NO: 390329
uaucacaagguaaaguucc

SEQ ID NO: 390331 - RNA, 19 nt, Artificial Sequence
  Description of Artificial Sequence: Synthetic oligonucleotide
  Sense Strand Starting at position 911 of SEQ ID NO: 317250
ugaauacacccaugaguca

SEQ ID NO: 390332 - RNA, 19 nt, Artificial Sequence
  Description of Artificial Sequence: Synthetic oligonucleotide
  Antisense Strand to SEQ ID NO: 390331
ugacucauggguguauuca

SEQ ID NO: 390333 - RNA, 19 nt, Artificial Sequence
  Description of Artificial Sequence: Synthetic oligonucleotide
  Sense Strand Starting at position 911 of SEQ ID NO: 317280
uccaaauauuugggagaga

SEQ ID NO: 390334 - RNA, 19 nt, Artificial Sequence
  Description of Artificial Sequence: Synthetic oligonucleotide
  Antisense Strand to SEQ ID NO: 390333
ucucucccaaauauuugga

SEQ ID NO: 390335 - RNA, 19 nt, Artificial Sequence
  Description of Artificial Sequence: Synthetic oligonucleotide
  Sense Strand Starting at position 911 of SEQ ID NO: 317396
uggcaagacuugguacauu

SEQ ID NO: 390336 - RNA, 19 nt, Artificial Sequence
  Description of Artificial Sequence: Synthetic oligonucleotide
  Antisense Strand to SEQ ID NO: 390335
aauguaccaagucuugcca

SEQ ID NO: 390337 - RNA, 19 nt, Artificial Sequence
  Description of Artificial Sequence: Synthetic oligonucleotide
  Sense Strand Starting at position 911 of SEQ ID NO: 317646
cugguugaaucucuaauca

SEQ ID NO: 390338 - RNA, 19 nt, Artificial Sequence
  Description of Artificial Sequence: Synthetic oligonucleotide
  Antisense Strand to SEQ ID NO: 390337
ugauuagagauucaaccag

SEQ ID NO: 390339 - RNA, 19 nt, Artificial Sequence
  Description of Artificial Sequence: Synthetic oligonucleotide
  Sense Strand Starting at position 911 of SEQ ID NO: 317690
ucaaauauguauccauagu

SEQ ID NO: 390340 - RNA, 19 nt, Artificial Sequence
  Description of Artificial Sequence: Synthetic oligonucleotide
  Antisense Strand to SEQ ID NO: 390339
acuauggauacauauuuga

SEQ ID NO: 390341 - RNA, 19 nt, Artificial Sequence
  Description of Artificial Sequence: Synthetic oligonucleotide
  Sense Strand Starting at position 911 of SEQ ID NO: 317696
auguauccauaguuuaaac

SEQ ID NO: 390342 - RNA, 19 nt, Artificial Sequence
  Description of Artificial Sequence: Synthetic oligonucleotide
  Antisense Strand to SEQ ID NO: 390341
guuuaaacuauggauacau

SEQ ID NO: 390343 - RNA, 19 nt, Artificial Sequence
  Description of Artificial Sequence: Synthetic oligonucleotide
  Sense Strand Starting at position 911 of SEQ ID NO: 317752
agguacuuacucuacugau

SEQ ID NO: 390344 - RNA, 19 nt, Artificial Sequence
  Description of Artificial Sequence: Synthetic oligonucleotide
  Antisense Strand to SEQ ID NO: 390343
aucaguagaguaaguaccu

SEQ ID NO: 390345 - RNA, 19 nt, Artificial Sequence
  Description of Artificial Sequence: Synthetic oligonucleotide
  Sense Strand Starting at position 911 of SEQ ID NO: 317948
ucaauugauguuuaaacga

SEQ ID NO: 390346 - RNA, 19 nt, Artificial Sequence
  Description of Artificial Sequence: Synthetic oligonucleotide
  Antisense Strand to SEQ ID NO: 390345
ucguuuaaacaucaauuga

SEQ ID NO: 390347 - RNA, 19 nt, Artificial Sequence
  Description of Artificial Sequence: Synthetic oligonucleotide
  Sense Strand Starting at position 911 of SEQ ID NO: 317953
ugauguuuaaacgauaagu

SEQ ID NO: 390348 - RNA, 19 nt, Artificial Sequence
  Description of Artificial Sequence: Synthetic oligonucleotide
  Antisense Strand to SEQ ID NO: 390347
acuuaucguuuaaacauca

SEQ ID NO: 390349 - RNA, 19 nt, Artificial Sequence
  Description of Artificial Sequence: Synthetic oligonucleotide
  Sense Strand Starting at position 911 of SEQ ID NO: 317992
uggaguucucuaugagaag

SEQ ID NO: 390350 - RNA, 19 nt, Artificial Sequence
  Description of Artificial Sequence: Synthetic oligonucleotide
  Antisense Strand to SEQ ID NO: 390349
cuucucauagagaacucca

SEQ ID NO: 390351 - RNA, 19 nt, Artificial Sequence
  Description of Artificial Sequence: Synthetic oligonucleotide
  Sense Strand Starting at position 911 of SEQ ID NO: 318147
ccaaauuaccgauguggga

SEQ ID NO: 390352 - RNA, 19 nt, Artificial Sequence
  Description of Artificial Sequence: Synthetic oligonucleotide
  Antisense Strand to SEQ ID NO: 390351
ucccacaucgguaauuugg

SEQ ID NO: 390353 - RNA, 19 nt, Artificial Sequence
  Description of Artificial Sequence: Synthetic oligonucleotide
  Sense Strand Starting at position 911 of SEQ ID NO: 318178
acaugaguggccuauuaga

SEQ ID NO: 390354 - RNA, 19 nt, Artificial Sequence
  Description of Artificial Sequence: Synthetic oligonucleotide
  Antisense Strand to SEQ ID NO: 390353
ucuaauaggccacucaugu

SEQ ID NO: 390355 - RNA, 19 nt, Artificial Sequence
  Description of Artificial Sequence: Synthetic oligonucleotide
  Sense Strand Starting at position 911 of SEQ ID NO: 318253
aggcaauaauucucugaau

SEQ ID NO: 390356 - RNA, 19 nt, Artificial Sequence
  Description of Artificial Sequence: Synthetic oligonucleotide
  Antisense Strand to SEQ ID NO: 390355
auucagagaauuauugccu

SEQ ID NO: 390357 - RNA, 19 nt, Artificial Sequence
  Description of Artificial Sequence: Synthetic oligonucleotide
  Sense Strand Starting at position 911 of SEQ ID NO: 318254
ggcaauaauucucugaauu

SEQ ID NO: 390358 - RNA, 19 nt, Artificial Sequence
  Description of Artificial Sequence: Synthetic oligonucleotide
  Antisense Strand to SEQ ID NO: 390357
aauucagagaauuauugcc

SEQ ID NO: 390359 - RNA, 19 nt, Artificial Sequence
  Description of Artificial Sequence: Synthetic oligonucleotide
  Sense Strand Starting at position 911 of SEQ ID NO: 318268
gaauuauacuuaucgugau

SEQ ID NO: 390360 - RNA, 19 nt, Artificial Sequence
  Description of Artificial Sequence: Synthetic oligonucleotide
  Antisense Strand to SEQ ID NO: 390359
aucacgauaaguauaauuc

SEQ ID NO: 390361 - RNA, 19 nt, Artificial Sequence
  Description of Artificial Sequence: Synthetic oligonucleotide
  Sense Strand Starting at position 911 of SEQ ID NO: 318310
ucugguuaaucuccauuga

SEQ ID NO: 390362 - RNA, 19 nt, Artificial Sequence
  Description of Artificial Sequence: Synthetic oligonucleotide
  Antisense Strand to SEQ ID NO: 390361
ucaauggagauuaaccaga

SEQ ID NO: 390363 - RNA, 19 nt, Artificial Sequence
  Description of Artificial Sequence: Synthetic oligonucleotide
  Sense Strand Starting at position 911 of SEQ ID NO: 318314
guuaaucuccauugaguaa

SEQ ID NO: 390364 - RNA, 19 nt, Artificial Sequence
  Description of Artificial Sequence: Synthetic oligonucleotide
  Antisense Strand to SEQ ID NO: 390363
uuacucaauggagauuaac

SEQ ID NO: 390365 - RNA, 19 nt, Artificial Sequence
  Description of Artificial Sequence: Synthetic oligonucleotide
  Sense Strand Starting at position 911 of SEQ ID NO: 318529
ugacuacagugauuacagu

SEQ ID NO: 390366 - RNA, 19 nt, Artificial Sequence
  Description of Artificial Sequence: Synthetic oligonucleotide
  Antisense Strand to SEQ ID NO: 390365
acuguaaucacuguaguca

SEQ ID NO: 390367 - RNA, 19 nt, Artificial Sequence
  Description of Artificial Sequence: Synthetic oligonucleotide
  Sense Strand Starting at position 911 of SEQ ID NO: 318689
acucaaguccuauaccagu

SEQ ID NO: 390368 - RNA, 19 nt, Artificial Sequence
  Description of Artificial Sequence: Synthetic oligonucleotide
  Antisense Strand to SEQ ID NO: 390367
acugguauaggacuugagu

SEQ ID NO: 390369 - RNA, 19 nt, Artificial Sequence
  Description of Artificial Sequence: Synthetic oligonucleotide
  Sense Strand Starting at position 911 of SEQ ID NO: 319119
gugcuagguagacaaugau

SEQ ID NO: 390370 - RNA, 19 nt, Artificial Sequence
  Description of Artificial Sequence: Synthetic oligonucleotide
  Antisense Strand to SEQ ID NO: 390369
aucauugucuaccuagcac

SEQ ID NO: 390371 - RNA, 19 nt, Artificial Sequence
  Description of Artificial Sequence: Synthetic oligonucleotide
  Sense Strand Starting at position 911 of SEQ ID NO: 319140
acaagacggaugugucaaa

SEQ ID NO: 390372 - RNA, 19 nt, Artificial Sequence
  Description of Artificial Sequence: Synthetic oligonucleotide
  Antisense Strand to SEQ ID NO: 390371
uuugacacauccgucuugu

SEQ ID NO: 390373 - RNA, 19 nt, Artificial Sequence
  Description of Artificial Sequence: Synthetic oligonucleotide
  Sense Strand Starting at position 912 of SEQ ID NO: 315237
gugaaagugugggccagaa

SEQ ID NO: 390374 - RNA, 19 nt, Artificial Sequence
  Description of Artificial Sequence: Synthetic oligonucleotide
  Antisense Strand to SEQ ID NO: 390373
uucuggcccacacuuucac

SEQ ID NO: 390375 - RNA, 19 nt, Artificial Sequence
  Description of Artificial Sequence: Synthetic oligonucleotide
  Sense Strand Starting at position 912 of SEQ ID NO: 315239
gaaagugugggccagaaug

SEQ ID NO: 390376 - RNA, 19 nt, Artificial Sequence
  Description of Artificial Sequence: Synthetic oligonucleotide
  Antisense Strand to SEQ ID NO: 390375
cauucuggcccacacuuuc

SEQ ID NO: 390377 - RNA, 19 nt, Artificial Sequence
  Description of Artificial Sequence: Synthetic oligonucleotide
  Sense Strand Starting at position 912 of SEQ ID NO: 315246
ugggccagaaugugugaaa

SEQ ID NO: 390378 - RNA, 19 nt, Artificial Sequence
  Description of Artificial Sequence: Synthetic oligonucleotide
  Antisense Strand to SEQ ID NO: 390377
uuucacacauucuggccca

SEQ ID NO: 390379 - RNA, 19 nt, Artificial Sequence
  Description of Artificial Sequence: Synthetic oligonucleotide
  Sense Strand Starting at position 912 of SEQ ID NO: 315372
guauauguuccacgguugu

SEQ ID NO: 390380 - RNA, 19 nt, Artificial Sequence
  Description of Artificial Sequence: Synthetic oligonucleotide
  Antisense Strand to SEQ ID NO: 390379
acaaccguggaacauauac

SEQ ID NO: 390381 - RNA, 19 nt, Artificial Sequence
  Description of Artificial Sequence: Synthetic oligonucleotide
  Sense Strand Starting at position 912 of SEQ ID NO: 315432
uaagguuaguggcuaacau

SEQ ID NO: 390382 - RNA, 19 nt, Artificial Sequence
  Description of Artificial Sequence: Synthetic oligonucleotide
  Antisense Strand to SEQ ID NO: 390381
auguuagccacuaaccuua

SEQ ID NO: 390383 - RNA, 19 nt, Artificial Sequence
  Description of Artificial Sequence: Synthetic oligonucleotide
  Sense Strand Starting at position 912 of SEQ ID NO: 315441
uggcuaacauccuuauugu

SEQ ID NO: 390384 - RNA, 19 nt, Artificial Sequence
  Description of Artificial Sequence: Synthetic oligonucleotide
  Antisense Strand to SEQ ID NO: 390383
acaauaaggauguuagcca

SEQ ID NO: 390385 - RNA, 19 nt, Artificial Sequence
  Description of Artificial Sequence: Synthetic oligonucleotide
  Sense Strand Starting at position 912 of SEQ ID NO: 315442
ggcuaacauccuuauuguc

SEQ ID NO: 390386 - RNA, 19 nt, Artificial Sequence
  Description of Artificial Sequence: Synthetic oligonucleotide
  Antisense Strand to SEQ ID NO: 390385
gacaauaaggauguuagcc

SEQ ID NO: 390387 - RNA, 19 nt, Artificial Sequence
  Description of Artificial Sequence: Synthetic oligonucleotide
  Sense Strand Starting at position 912 of SEQ ID NO: 315921
agcaguuauuguuuaagaa

SEQ ID NO: 390388 - RNA, 19 nt, Artificial Sequence
  Description of Artificial Sequence: Synthetic oligonucleotide
  Antisense Strand to SEQ ID NO: 390387
uucuuaaacaauaacugcu

SEQ ID NO: 390389 - RNA, 19 nt, Artificial Sequence
  Description of Artificial Sequence: Synthetic oligonucleotide
  Sense Strand Starting at position 912 of SEQ ID NO: 315922
gcaguuauuguuuaagaac

SEQ ID NO: 390390 - RNA, 19 nt, Artificial Sequence
  Description of Artificial Sequence: Synthetic oligonucleotide
  Antisense Strand to SEQ ID NO: 390389
guucuuaaacaauaacugc

SEQ ID NO: 390391 - RNA, 19 nt, Artificial Sequence
  Description of Artificial Sequence: Synthetic oligonucleotide
  Sense Strand Starting at position 912 of SEQ ID NO: 315925
guuauuguuuaagaacuag

SEQ ID NO: 390392 - RNA, 19 nt, Artificial Sequence
  Description of Artificial Sequence: Synthetic oligonucleotide
  Antisense Strand to SEQ ID NO: 390391
cuaguucuuaaacaauaac

SEQ ID NO: 390393 - RNA, 19 nt, Artificial Sequence
  Description of Artificial Sequence: Synthetic oligonucleotide
  Sense Strand Starting at position 912 of SEQ ID NO: 316261
uguauuugauuccaaagug

SEQ ID NO: 390394 - RNA, 19 nt, Artificial Sequence
  Description of Artificial Sequence: Synthetic oligonucleotide
  Antisense Strand to SEQ ID NO: 390393
cacuuuggaaucaaauaca

SEQ ID NO: 390395 - RNA, 19 nt, Artificial Sequence
  Description of Artificial Sequence: Synthetic oligonucleotide
  Sense Strand Starting at position 912 of SEQ ID NO: 316358
acugguagcaucuaugagu

SEQ ID NO: 390396 - RNA, 19 nt, Artificial Sequence
  Description of Artificial Sequence: Synthetic oligonucleotide
  Antisense Strand to SEQ ID NO: 390395
acucauagaugcuaccagu

SEQ ID NO: 390397 - RNA, 19 nt, Artificial Sequence
  Description of Artificial Sequence: Synthetic oligonucleotide
  Sense Strand Starting at position 912 of SEQ ID NO: 316369
cuaugagugucuucuguca

SEQ ID NO: 390398 - RNA, 19 nt, Artificial Sequence
  Description of Artificial Sequence: Synthetic oligonucleotide
  Antisense Strand to SEQ ID NO: 390397
ugacagaagacacucauag

SEQ ID NO: 390399 - RNA, 19 nt, Artificial Sequence
  Description of Artificial Sequence: Synthetic oligonucleotide
  Sense Strand Starting at position 912 of SEQ ID NO: 316449
gucccuauaccagaaaggu

SEQ ID NO: 390400 - RNA, 19 nt, Artificial Sequence
  Description of Artificial Sequence: Synthetic oligonucleotide
  Antisense Strand to SEQ ID NO: 390399
accuuucugguauagggac

SEQ ID NO: 390401 - RNA, 19 nt, Artificial Sequence
  Description of Artificial Sequence: Synthetic oligonucleotide
  Sense Strand Starting at position 912 of SEQ ID NO: 316493
uugguucuguucucaguca

SEQ ID NO: 390402 - RNA, 19 nt, Artificial Sequence
  Description of Artificial Sequence: Synthetic oligonucleotide
  Antisense Strand to SEQ ID NO: 390401
ugacugagaacagaaccaa

SEQ ID NO: 390403 - RNA, 19 nt, Artificial Sequence
  Description of Artificial Sequence: Synthetic oligonucleotide
  Sense Strand Starting at position 912 of SEQ ID NO: 316501
guucucagucagcaaucga

SEQ ID NO: 390404 - RNA, 19 nt, Artificial Sequence
  Description of Artificial Sequence: Synthetic oligonucleotide
  Antisense Strand to SEQ ID NO: 390403
ucgauugcugacugagaac

SEQ ID NO: 390405 - RNA, 19 nt, Artificial Sequence
  Description of Artificial Sequence: Synthetic oligonucleotide
  Sense Strand Starting at position 912 of SEQ ID NO: 316557
cugaaaccugucgaagauu

SEQ ID NO: 390406 - RNA, 19 nt, Artificial Sequence
  Description of Artificial Sequence: Synthetic oligonucleotide
  Antisense Strand to SEQ ID NO: 390405
aaucuucgacagguuucag

SEQ ID NO: 390407 - RNA, 19 nt, Artificial Sequence
  Description of Artificial Sequence: Synthetic oligonucleotide
  Sense Strand Starting at position 912 of SEQ ID NO: 316634
caauuugucucacgaauga

SEQ ID NO: 390408 - RNA, 19 nt, Artificial Sequence
  Description of Artificial Sequence: Synthetic oligonucleotide
  Antisense Strand to SEQ ID NO: 390407
ucauucgugagacaaauug

SEQ ID NO: 390409 - RNA, 19 nt, Artificial Sequence
  Description of Artificial Sequence: Synthetic oligonucleotide
  Sense Strand Starting at position 912 of SEQ ID NO: 316638
uugucucacgaaugacaga

SEQ ID NO: 390410 - RNA, 19 nt, Artificial Sequence
  Description of Artificial Sequence: Synthetic oligonucleotide
  Antisense Strand to SEQ ID NO: 390409
ucugucauucgugagacaa

SEQ ID NO: 390411 - RNA, 19 nt, Artificial Sequence
  Description of Artificial Sequence: Synthetic oligonucleotide
  Sense Strand Starting at position 912 of SEQ ID NO: 316702
aggaauagguauuauacaa

SEQ ID NO: 390412 - RNA, 19 nt, Artificial Sequence
  Description of Artificial Sequence: Synthetic oligonucleotide
  Antisense Strand to SEQ ID NO: 390411
uuguauaauaccuauuccu

SEQ ID NO: 390413 - RNA, 19 nt, Artificial Sequence
  Description of Artificial Sequence: Synthetic oligonucleotide
  Sense Strand Starting at position 912 of SEQ ID NO: 316724
aguuuaucauugucugguu

SEQ ID NO: 390414 - RNA, 19 nt, Artificial Sequence
  Description of Artificial Sequence: Synthetic oligonucleotide
  Antisense Strand to SEQ ID NO: 390413
aaccagacaaugauaaacu

SEQ ID NO: 390415 - RNA, 19 nt, Artificial Sequence
  Description of Artificial Sequence: Synthetic oligonucleotide
  Sense Strand Starting at position 912 of SEQ ID NO: 316725
guuuaucauugucugguuu

SEQ ID NO: 390416 - RNA, 19 nt, Artificial Sequence
  Description of Artificial Sequence: Synthetic oligonucleotide
  Antisense Strand to SEQ ID NO: 390415
aaaccagacaaugauaaac

SEQ ID NO: 390417 - RNA, 19 nt, Artificial Sequence
  Description of Artificial Sequence: Synthetic oligonucleotide
  Sense Strand Starting at position 912 of SEQ ID NO: 316786
ucccuaaucuugcaaggaa

SEQ ID NO: 390418 - RNA, 19 nt, Artificial Sequence
  Description of Artificial Sequence: Synthetic oligonucleotide
  Antisense Strand to SEQ ID NO: 390417
uuccuugcaagauuaggga

SEQ ID NO: 390419 - RNA, 19 nt, Artificial Sequence
  Description of Artificial Sequence: Synthetic oligonucleotide
  Sense Strand Starting at position 912 of SEQ ID NO: 316902
ccaagugaauuggauucuu

SEQ ID NO: 390420 - RNA, 19 nt, Artificial Sequence
  Description of Artificial Sequence: Synthetic oligonucleotide
  Antisense Strand to SEQ ID NO: 390419
aagaauccaauucacuugg

SEQ ID NO: 390421 - RNA, 19 nt, Artificial Sequence
  Description of Artificial Sequence: Synthetic oligonucleotide
  Sense Strand Starting at position 912 of SEQ ID NO: 316907
ugaauuggauucuucuuau

SEQ ID NO: 390422 - RNA, 19 nt, Artificial Sequence
  Description of Artificial Sequence: Synthetic oligonucleotide
  Antisense Strand to SEQ ID NO: 390421
auaagaagaauccaauuca

SEQ ID NO: 390423 - RNA, 19 nt, Artificial Sequence
  Description of Artificial Sequence: Synthetic oligonucleotide
  Sense Strand Starting at position 912 of SEQ ID NO: 316975
uugcaaauuucggaccuau

SEQ ID NO: 390424 - RNA, 19 nt, Artificial Sequence
  Description of Artificial Sequence: Synthetic oligonucleotide
  Antisense Strand to SEQ ID NO: 390423
auagguccgaaauuugcaa

SEQ ID NO: 390425 - RNA, 19 nt, Artificial Sequence
  Description of Artificial Sequence: Synthetic oligonucleotide
  Sense Strand Starting at position 912 of SEQ ID NO: 317240
accugagauuucuguuaac

SEQ ID NO: 390426 - RNA, 19 nt, Artificial Sequence
  Description of Artificial Sequence: Synthetic oligonucleotide
  Antisense Strand to SEQ ID NO: 390425
guuaacagaaaucucaggu

SEQ ID NO: 390427 - RNA, 19 nt, Artificial Sequence
  Description of Artificial Sequence: Synthetic oligonucleotide
  Sense Strand Starting at position 912 of SEQ ID NO: 317243
ugagauuucuguuaaccuc

SEQ ID NO: 390428 - RNA, 19 nt, Artificial Sequence
  Description of Artificial Sequence: Synthetic oligonucleotide
  Antisense Strand to SEQ ID NO: 390427
gagguuaacagaaaucuca

SEQ ID NO: 390429 - RNA, 19 nt, Artificial Sequence
  Description of Artificial Sequence: Synthetic oligonucleotide
  Sense Strand Starting at position 912 of SEQ ID NO: 318558
cgaggagggauccgaaguu

SEQ ID NO: 390430 - RNA, 19 nt, Artificial Sequence
  Description of Artificial Sequence: Synthetic oligonucleotide
  Antisense Strand to SEQ ID NO: 390429
aacuucggaucccuccucg

SEQ ID NO: 390431 - RNA, 19 nt, Artificial Sequence
  Description of Artificial Sequence: Synthetic oligonucleotide
  Sense Strand Starting at position 912 of SEQ ID NO: 318683
ccaagauguucuuuccagu

SEQ ID NO: 390432 - RNA, 19 nt, Artificial Sequence
  Description of Artificial Sequence: Synthetic oligonucleotide
  Antisense Strand to SEQ ID NO: 390431
acuggaaagaacaucuugg

SEQ ID NO: 390433 - RNA, 19 nt, Artificial Sequence
  Description of Artificial Sequence: Synthetic oligonucleotide
  Sense Strand Starting at position 912 of SEQ ID NO: 318784
gaguuccuugcguuuguaa

SEQ ID NO: 390434 - RNA, 19 nt, Artificial Sequence
  Description of Artificial Sequence: Synthetic oligonucleotide
  Antisense Strand to SEQ ID NO: 390433
uuacaaacgcaaggaacuc

SEQ ID NO: 390435 - RNA, 19 nt, Artificial Sequence
  Description of Artificial Sequence: Synthetic oligonucleotide
  Sense Strand Starting at position 912 of SEQ ID NO: 318791
uugcguuuguaaguuacau

SEQ ID NO: 390436 - RNA, 19 nt, Artificial Sequence
  Description of Artificial Sequence: Synthetic oligonucleotide
  Antisense Strand to SEQ ID NO: 390435
auguaacuuacaaacgcaa

SEQ ID NO: 390437 - RNA, 19 nt, Artificial Sequence
  Description of Artificial Sequence: Synthetic oligonucleotide
  Sense Strand Starting at position 912 of SEQ ID NO: 318797
uuguaaguuacaugguuau

SEQ ID NO: 390438 - RNA, 19 nt, Artificial Sequence
  Description of Artificial Sequence: Synthetic oligonucleotide
  Antisense Strand to SEQ ID NO: 390437
auaaccauguaacuuacaa

SEQ ID NO: 390439 - RNA, 19 nt, Artificial Sequence
  Description of Artificial Sequence: Synthetic oligonucleotide
  Sense Strand Starting at position 912 of SEQ ID NO: 318875
uuaaauuucuuagcagugu

SEQ ID NO: 390440 - RNA, 19 nt, Artificial Sequence
  Description of Artificial Sequence: Synthetic oligonucleotide
  Antisense Strand to SEQ ID NO: 390439
acacugcuaagaaauuuaa

SEQ ID NO: 390441 - RNA, 19 nt, Artificial Sequence
  Description of Artificial Sequence: Synthetic oligonucleotide
  Sense Strand Starting at position 912 of SEQ ID NO: 318939
ggacgugaggcacgagaaa

SEQ ID NO: 390442 - RNA, 19 nt, Artificial Sequence
  Description of Artificial Sequence: Synthetic oligonucleotide
  Antisense Strand to SEQ ID NO: 390441
uuucucgugccucacgucc

SEQ ID NO: 390443 - RNA, 19 nt, Artificial Sequence
  Description of Artificial Sequence: Synthetic oligonucleotide
  Sense Strand Starting at position 912 of SEQ ID NO: 318952
gagaaacaguuucucaugu

SEQ ID NO: 390444 - RNA, 19 nt, Artificial Sequence
  Description of Artificial Sequence: Synthetic oligonucleotide
  Antisense Strand to SEQ ID NO: 390443
acaugagaaacuguuucuc

SEQ ID NO: 390445 - RNA, 19 nt, Artificial Sequence
  Description of Artificial Sequence: Synthetic oligonucleotide
  Sense Strand Starting at position 912 of SEQ ID NO: 318962
uucucauguguuggguaga

SEQ ID NO: 390446 - RNA, 19 nt, Artificial Sequence
  Description of Artificial Sequence: Synthetic oligonucleotide
  Antisense Strand to SEQ ID NO: 390445
ucuacccaacacaugagaa

SEQ ID NO: 390447 - RNA, 19 nt, Artificial Sequence
  Description of Artificial Sequence: Synthetic oligonucleotide
  Sense Strand Starting at position 912 of SEQ ID NO: 319038
gcaggugcgcguucagaaa

SEQ ID NO: 390448 - RNA, 19 nt, Artificial Sequence
  Description of Artificial Sequence: Synthetic oligonucleotide
  Antisense Strand to SEQ ID NO: 390447
uuucugaacgcgcaccugc

SEQ ID NO: 390449 - RNA, 19 nt, Artificial Sequence
  Description of Artificial Sequence: Synthetic oligonucleotide
  Sense Strand Starting at position 912 of SEQ ID NO: 319099
cagucuuauuucuggagca

SEQ ID NO: 390450 - RNA, 19 nt, Artificial Sequence
  Description of Artificial Sequence: Synthetic oligonucleotide
  Antisense Strand to SEQ ID NO: 390449
ugcuccagaaauaagacug

SEQ ID NO: 390451 - RNA, 19 nt, Artificial Sequence
  Description of Artificial Sequence: Synthetic oligonucleotide
  Sense Strand Starting at position 912 of SEQ ID NO: 319100
agucuuauuucuggagcau

SEQ ID NO: 390452 - RNA, 19 nt, Artificial Sequence
  Description of Artificial Sequence: Synthetic oligonucleotide
  Antisense Strand to SEQ ID NO: 390451
augcuccagaaauaagacu

SEQ ID NO: 390453 - RNA, 19 nt, Artificial Sequence
  Description of Artificial Sequence: Synthetic oligonucleotide
  Sense Strand Starting at position 913 of SEQ ID NO: 315302
gugagaaaccugcauucug

SEQ ID NO: 390454 - RNA, 19 nt, Artificial Sequence
  Description of Artificial Sequence: Synthetic oligonucleotide
  Antisense Strand to SEQ ID NO: 390453
cagaaugcagguuucucac

SEQ ID NO: 390455 - RNA, 19 nt, Artificial Sequence
  Description of Artificial Sequence: Synthetic oligonucleotide
  Sense Strand Starting at position 913 of SEQ ID NO: 315394
uucuacuaaguuugucauu

SEQ ID NO: 390456 - RNA, 19 nt, Artificial Sequence
  Description of Artificial Sequence: Synthetic oligonucleotide
  Antisense Strand to SEQ ID NO: 390455
aaugacaaacuuaguagaa

SEQ ID NO: 390457 - RNA, 19 nt, Artificial Sequence
  Description of Artificial Sequence: Synthetic oligonucleotide
  Sense Strand Starting at position 913 of SEQ ID NO: 315404
uuugucauucuuggcaaag

SEQ ID NO: 390458 - RNA, 19 nt, Artificial Sequence
  Description of Artificial Sequence: Synthetic oligonucleotide
  Antisense Strand to SEQ ID NO: 390457
cuuugccaagaaugacaaa

SEQ ID NO: 390459 - RNA, 19 nt, Artificial Sequence
  Description of Artificial Sequence: Synthetic oligonucleotide
  Sense Strand Starting at position 913 of SEQ ID NO: 315415
uggcaaaguugguucuaca

SEQ ID NO: 390460 - RNA, 19 nt, Artificial Sequence
  Description of Artificial Sequence: Synthetic oligonucleotide
  Antisense Strand to SEQ ID NO: 390459
uguagaaccaacuuugcca

SEQ ID NO: 390461 - RNA, 19 nt, Artificial Sequence
  Description of Artificial Sequence: Synthetic oligonucleotide
  Sense Strand Starting at position 913 of SEQ ID NO: 315466
gcagagugauggguaagga

SEQ ID NO: 390462 - RNA, 19 nt, Artificial Sequence
  Description of Artificial Sequence: Synthetic oligonucleotide
  Antisense Strand to SEQ ID NO: 390461
uccuuacccaucacucugc

SEQ ID NO: 390463 - RNA, 19 nt, Artificial Sequence
  Description of Artificial Sequence: Synthetic oligonucleotide
  Sense Strand Starting at position 913 of SEQ ID NO: 315503
guugaaagcuuucucaaug

SEQ ID NO: 390464 - RNA, 19 nt, Artificial Sequence
  Description of Artificial Sequence: Synthetic oligonucleotide
  Antisense Strand to SEQ ID NO: 390463
cauugagaaagcuuucaac

SEQ ID NO: 390465 - RNA, 19 nt, Artificial Sequence
  Description of Artificial Sequence: Synthetic oligonucleotide
  Sense Strand Starting at position 913 of SEQ ID NO: 315504
uugaaagcuuucucaaugu

SEQ ID NO: 390466 - RNA, 19 nt, Artificial Sequence
  Description of Artificial Sequence: Synthetic oligonucleotide
  Antisense Strand to SEQ ID NO: 390465
acauugagaaagcuuucaa

SEQ ID NO: 390467 - RNA, 19 nt, Artificial Sequence
  Description of Artificial Sequence: Synthetic oligonucleotide
  Sense Strand Starting at position 913 of SEQ ID NO: 315722
aagaguaugcagcaaugaa

SEQ ID NO: 390468 - RNA, 19 nt, Artificial Sequence
  Description of Artificial Sequence: Synthetic oligonucleotide
  Antisense Strand to SEQ ID NO: 390467
uucauugcugcauacucuu

SEQ ID NO: 390469 - RNA, 19 nt, Artificial Sequence
  Description of Artificial Sequence: Synthetic oligonucleotide
  Sense Strand Starting at position 913 of SEQ ID NO: 315770
gggugauuggcccaguguu

SEQ ID NO: 390470 - RNA, 19 nt, Artificial Sequence
  Description of Artificial Sequence: Synthetic oligonucleotide
  Antisense Strand to SEQ ID NO: 390469
aacacugggccaaucaccc

SEQ ID NO: 390471 - RNA, 19 nt, Artificial Sequence
  Description of Artificial Sequence: Synthetic oligonucleotide
  Sense Strand Starting at position 913 of SEQ ID NO: 315864
uugccuaaccuccaggaaa

SEQ ID NO: 390472 - RNA, 19 nt, Artificial Sequence
  Description of Artificial Sequence: Synthetic oligonucleotide
  Antisense Strand to SEQ ID NO: 390471
uuuccuggagguuaggcaa

SEQ ID NO: 390473 - RNA, 19 nt, Artificial Sequence
  Description of Artificial Sequence: Synthetic oligonucleotide
  Sense Strand Starting at position 913 of SEQ ID NO: 315934
ugaacuggccucuagcuau

SEQ ID NO: 390474 - RNA, 19 nt, Artificial Sequence
  Description of Artificial Sequence: Synthetic oligonucleotide
  Antisense Strand to SEQ ID NO: 390473
auagcuagaggccaguuca

SEQ ID NO: 390475 - RNA, 19 nt, Artificial Sequence
  Description of Artificial Sequence: Synthetic oligonucleotide
  Sense Strand Starting at position 913 of SEQ ID NO: 316136
cgaggcgcuccugucaauu

SEQ ID NO: 390476 - RNA, 19 nt, Artificial Sequence
  Description of Artificial Sequence: Synthetic oligonucleotide
  Antisense Strand to SEQ ID NO: 390475
aauugacaggagcgccucg

SEQ ID NO: 390477 - RNA, 19 nt, Artificial Sequence
  Description of Artificial Sequence: Synthetic oligonucleotide
  Sense Strand Starting at position 913 of SEQ ID NO: 316148
gucaauuggcccgauugca

SEQ ID NO: 390478 - RNA, 19 nt, Artificial Sequence
  Description of Artificial Sequence: Synthetic oligonucleotide
  Antisense Strand to SEQ ID NO: 390477
ugcaaucgggccaauugac

SEQ ID NO: 390479 - RNA, 19 nt, Artificial Sequence
  Description of Artificial Sequence: Synthetic oligonucleotide
  Sense Strand Starting at position 913 of SEQ ID NO: 316157
cccgauugcacuuguaaag

SEQ ID NO: 390480 - RNA, 19 nt, Artificial Sequence
  Description of Artificial Sequence: Synthetic oligonucleotide
  Antisense Strand to SEQ ID NO: 390479
cuuuacaagugcaaucggg

SEQ ID NO: 390481 - RNA, 19 nt, Artificial Sequence
  Description of Artificial Sequence: Synthetic oligonucleotide
  Sense Strand Starting at position 913 of SEQ ID NO: 316174
aguugauagaguuggaaag

SEQ ID NO: 390482 - RNA, 19 nt, Artificial Sequence
  Description of Artificial Sequence: Synthetic oligonucleotide
  Antisense Strand to SEQ ID NO: 390481
cuuuccaacucuaucaacu

SEQ ID NO: 390483 - RNA, 19 nt, Artificial Sequence
  Description of Artificial Sequence: Synthetic oligonucleotide
  Sense Strand Starting at position 913 of SEQ ID NO: 316175
guugauagaguuggaaaga

SEQ ID NO: 390484 - RNA, 19 nt, Artificial Sequence
  Description of Artificial Sequence: Synthetic oligonucleotide
  Antisense Strand to SEQ ID NO: 390483
ucuuuccaacucuaucaac

SEQ ID NO: 390485 - RNA, 19 nt, Artificial Sequence
  Description of Artificial Sequence: Synthetic oligonucleotide
  Sense Strand Starting at position 913 of SEQ ID NO: 316176
uugauagaguuggaaagaa

SEQ ID NO: 390486 - RNA, 19 nt, Artificial Sequence
  Description of Artificial Sequence: Synthetic oligonucleotide
  Antisense Strand to SEQ ID NO: 390485
uucuuuccaacucuaucaa

SEQ ID NO: 390487 - RNA, 19 nt, Artificial Sequence
  Description of Artificial Sequence: Synthetic oligonucleotide
  Sense Strand Starting at position 913 of SEQ ID NO: 316210
ucggauuccucccuagagu

SEQ ID NO: 390488 - RNA, 19 nt, Artificial Sequence
  Description of Artificial Sequence: Synthetic oligonucleotide
  Antisense Strand to SEQ ID NO: 390487
acucuagggaggaauccga

SEQ ID NO: 390489 - RNA, 19 nt, Artificial Sequence
  Description of Artificial Sequence: Synthetic oligonucleotide
  Sense Strand Starting at position 913 of SEQ ID NO: 316211
cggauuccucccuagagug

SEQ ID NO: 390490 - RNA, 19 nt, Artificial Sequence
  Description of Artificial Sequence: Synthetic oligonucleotide
  Antisense Strand to SEQ ID NO: 390489
cacucuagggaggaauccg

SEQ ID NO: 390491 - RNA, 19 nt, Artificial Sequence
  Description of Artificial Sequence: Synthetic oligonucleotide
  Sense Strand Starting at position 913 of SEQ ID NO: 316473
acaaauaugcuguggauga

SEQ ID NO: 390492 - RNA, 19 nt, Artificial Sequence
  Description of Artificial Sequence: Synthetic oligonucleotide
  Antisense Strand to SEQ ID NO: 390491
ucauccacagcauauuugu

SEQ ID NO: 390493 - RNA, 19 nt, Artificial Sequence
  Description of Artificial Sequence: Synthetic oligonucleotide
  Sense Strand Starting at position 913 of SEQ ID NO: 316634
cacgcuguccuguuguuua

SEQ ID NO: 390494 - RNA, 19 nt, Artificial Sequence
  Description of Artificial Sequence: Synthetic oligonucleotide
  Antisense Strand to SEQ ID NO: 390493
uaaacaacaggacagcgug

SEQ ID NO: 390495 - RNA, 19 nt, Artificial Sequence
  Description of Artificial Sequence: Synthetic oligonucleotide
  Sense Strand Starting at position 913 of SEQ ID NO: 316636
cgcuguccuguuguuuaua

SEQ ID NO: 390496 - RNA, 19 nt, Artificial Sequence
  Description of Artificial Sequence: Synthetic oligonucleotide
  Antisense Strand to SEQ ID NO: 390495
uauaaacaacaggacagcg

SEQ ID NO: 390497 - RNA, 19 nt, Artificial Sequence
  Description of Artificial Sequence: Synthetic oligonucleotide
  Sense Strand Starting at position 913 of SEQ ID NO: 317462
ccgguugggcaagaagaau

SEQ ID NO: 390498 - RNA, 19 nt, Artificial Sequence
  Description of Artificial Sequence: Synthetic oligonucleotide
  Antisense Strand to SEQ ID NO: 390497
auucuucuugcccaaccgg

SEQ ID NO: 390499 - RNA, 19 nt, Artificial Sequence
  Description of Artificial Sequence: Synthetic oligonucleotide
  Sense Strand Starting at position 913 of SEQ ID NO: 318093
uugcgaaucguuguuccuu

SEQ ID NO: 390500 - RNA, 19 nt, Artificial Sequence
  Description of Artificial Sequence: Synthetic oligonucleotide
  Antisense Strand to SEQ ID NO: 390499
aaggaacaacgauucgcaa

SEQ ID NO: 390501 - RNA, 19 nt, Artificial Sequence
  Description of Artificial Sequence: Synthetic oligonucleotide
  Sense Strand Starting at position 913 of SEQ ID NO: 318152
gguagucuuagcguugguu

SEQ ID NO: 390502 - RNA, 19 nt, Artificial Sequence
  Description of Artificial Sequence: Synthetic oligonucleotide
  Antisense Strand to SEQ ID NO: 390501
aaccaacgcuaagacuacc

SEQ ID NO: 390503 - RNA, 19 nt, Artificial Sequence
  Description of Artificial Sequence: Synthetic oligonucleotide
  Sense Strand Starting at position 913 of SEQ ID NO: 318153
guagucuuagcguugguuu

SEQ ID NO: 390504 - RNA, 19 nt, Artificial Sequence
  Description of Artificial Sequence: Synthetic oligonucleotide
  Antisense Strand to SEQ ID NO: 390503
aaaccaacgcuaagacuac

SEQ ID NO: 390505 - RNA, 19 nt, Artificial Sequence
  Description of Artificial Sequence: Synthetic oligonucleotide
  Sense Strand Starting at position 913 of SEQ ID NO: 318476
ggaagugcacucugacgau

SEQ ID NO: 390506 - RNA, 19 nt, Artificial Sequence
  Description of Artificial Sequence: Synthetic oligonucleotide
  Antisense Strand to SEQ ID NO: 390505
aucgucagagugcacuucc

SEQ ID NO: 390507 - RNA, 19 nt, Artificial Sequence
  Description of Artificial Sequence: Synthetic oligonucleotide
  Sense Strand Starting at position 913 of SEQ ID NO: 318683
guuugaaaguccuuuggaa

SEQ ID NO: 390508 - RNA, 19 nt, Artificial Sequence
  Description of Artificial Sequence: Synthetic oligonucleotide
  Antisense Strand to SEQ ID NO: 390507
uuccaaaggacuuucaaac

SEQ ID NO: 390509 - RNA, 19 nt, Artificial Sequence
  Description of Artificial Sequence: Synthetic oligonucleotide
  Sense Strand Starting at position 913 of SEQ ID NO: 318732
ucggucaucgcaggaagaa

SEQ ID NO: 390510 - RNA, 19 nt, Artificial Sequence
  Description of Artificial Sequence: Synthetic oligonucleotide
  Antisense Strand to SEQ ID NO: 390509
uucuuccugcgaugaccga

SEQ ID NO: 390511 - RNA, 19 nt, Artificial Sequence
  Description of Artificial Sequence: Synthetic oligonucleotide
  Sense Strand Starting at position 913 of SEQ ID NO: 318823
cgacgaagauaacucgaaa

SEQ ID NO: 390512 - RNA, 19 nt, Artificial Sequence
  Description of Artificial Sequence: Synthetic oligonucleotide
  Antisense Strand to SEQ ID NO: 390511
uuucgaguuaucuucgucg

SEQ ID NO: 390513 - RNA, 19 nt, Artificial Sequence
  Description of Artificial Sequence: Synthetic oligonucleotide
  Sense Strand Starting at position 913 of SEQ ID NO: 318826
cgaagauaacucgaaaugu

SEQ ID NO: 390514 - RNA, 19 nt, Artificial Sequence
  Description of Artificial Sequence: Synthetic oligonucleotide
  Antisense Strand to SEQ ID NO: 390513
acauuucgaguuaucuucg

SEQ ID NO: 390515 - RNA, 19 nt, Artificial Sequence
  Description of Artificial Sequence: Synthetic oligonucleotide
  Sense Strand Starting at position 913 of SEQ ID NO: 318863
gggucuugaaagugggaaa

SEQ ID NO: 390516 - RNA, 19 nt, Artificial Sequence
  Description of Artificial Sequence: Synthetic oligonucleotide
  Antisense Strand to SEQ ID NO: 390515
uuucccacuuucaagaccc

SEQ ID NO: 390517 - RNA, 19 nt, Artificial Sequence
  Description of Artificial Sequence: Synthetic oligonucleotide
  Sense Strand Starting at position 913 of SEQ ID NO: 318896
caauguucgcguccgcuua

SEQ ID NO: 390518 - RNA, 19 nt, Artificial Sequence
  Description of Artificial Sequence: Synthetic oligonucleotide
  Antisense Strand to SEQ ID NO: 390517
uaagcggacgcgaacauug

SEQ ID NO: 390519 - RNA, 19 nt, Artificial Sequence
  Description of Artificial Sequence: Synthetic oligonucleotide
  Sense Strand Starting at position 913 of SEQ ID NO: 318900
guucgcguccgcuuagaau

SEQ ID NO: 390520 - RNA, 19 nt, Artificial Sequence
  Description of Artificial Sequence: Synthetic oligonucleotide
  Antisense Strand to SEQ ID NO: 390519
auucuaagcggacgcgaac

SEQ ID NO: 390521 - RNA, 19 nt, Artificial Sequence
  Description of Artificial Sequence: Synthetic oligonucleotide
  Sense Strand Starting at position 913 of SEQ ID NO: 318921
ggaaacaagugagcuuuaa

SEQ ID NO: 390522 - RNA, 19 nt, Artificial Sequence
  Description of Artificial Sequence: Synthetic oligonucleotide
  Antisense Strand to SEQ ID NO: 390521
uuaaagcucacuuguuucc

SEQ ID NO: 390523 - RNA, 19 nt, Artificial Sequence
  Description of Artificial Sequence: Synthetic oligonucleotide
  Sense Strand Starting at position 913 of SEQ ID NO: 319147
aaauguucccagugguuaa

SEQ ID NO: 390524 - RNA, 19 nt, Artificial Sequence
  Description of Artificial Sequence: Synthetic oligonucleotide
  Antisense Strand to SEQ ID NO: 390523
uuaaccacugggaacauuu

SEQ ID NO: 390525 - RNA, 19 nt, Artificial Sequence
  Description of Artificial Sequence: Synthetic oligonucleotide
  Sense Strand Starting at position 913 of SEQ ID NO: 319151
guucccagugguuaaucau

SEQ ID NO: 390526 - RNA, 19 nt, Artificial Sequence
  Description of Artificial Sequence: Synthetic oligonucleotide
  Antisense Strand to SEQ ID NO: 390525
augauuaaccacugggaac

SEQ ID NO: 390527 - RNA, 19 nt, Artificial Sequence
  Description of Artificial Sequence: Synthetic oligonucleotide
  Sense Strand Starting at position 913 of SEQ ID NO: 319161
guuaaucaugcguacagua

SEQ ID NO: 390528 - RNA, 19 nt, Artificial Sequence
  Description of Artificial Sequence: Synthetic oligonucleotide
  Antisense Strand to SEQ ID NO: 390527
uacuguacgcaugauuaac

SEQ ID NO: 390529 - RNA, 19 nt, Artificial Sequence
  Description of Artificial Sequence: Synthetic oligonucleotide
  Sense Strand Starting at position 913 of SEQ ID NO: 319163
uaaucaugcguacaguagu

SEQ ID NO: 390530 - RNA, 19 nt, Artificial Sequence
  Description of Artificial Sequence: Synthetic oligonucleotide
  Antisense Strand to SEQ ID NO: 390529
acuacuguacgcaugauua

SEQ ID NO: 390531 - RNA, 19 nt, Artificial Sequence
  Description of Artificial Sequence: Synthetic oligonucleotide
  Sense Strand Starting at position 913 of SEQ ID NO: 319171
cguacaguaguagauuaua

SEQ ID NO: 390532 - RNA, 19 nt, Artificial Sequence
  Description of Artificial Sequence: Synthetic oligonucleotide
  Antisense Strand to SEQ ID NO: 390531
uauaaucuacuacuguacg

SEQ ID NO: 390533 - RNA, 19 nt, Artificial Sequence
  Description of Artificial Sequence: Synthetic oligonucleotide
  Sense Strand Starting at position 914 of SEQ ID NO: 315349
agcucuguccaugaugauc

SEQ ID NO: 390534 - RNA, 19 nt, Artificial Sequence
  Description of Artificial Sequence: Synthetic oligonucleotide
  Antisense Strand to SEQ ID NO: 390533
gaucaucauggacagagcu

SEQ ID NO: 390535 - RNA, 19 nt, Artificial Sequence
  Description of Artificial Sequence: Synthetic oligonucleotide
  Sense Strand Starting at position 914 of SEQ ID NO: 315463
guccacacucgacacauaa

SEQ ID NO: 390536 - RNA, 19 nt, Artificial Sequence
  Description of Artificial Sequence: Synthetic oligonucleotide
  Antisense Strand to SEQ ID NO: 390535
uuaugugucgaguguggac

SEQ ID NO: 390537 - RNA, 19 nt, Artificial Sequence
  Description of Artificial Sequence: Synthetic oligonucleotide
  Sense Strand Starting at position 914 of SEQ ID NO: 315601
gggugacucaccugcuauc

SEQ ID NO: 390538 - RNA, 19 nt, Artificial Sequence
  Description of Artificial Sequence: Synthetic oligonucleotide
  Antisense Strand to SEQ ID NO: 390537
gauagcaggugagucaccc

SEQ ID NO: 390539 - RNA, 19 nt, Artificial Sequence
  Description of Artificial Sequence: Synthetic oligonucleotide
  Sense Strand Starting at position 914 of SEQ ID NO: 315757
cuguucugccaccauacua

SEQ ID NO: 390540 - RNA, 19 nt, Artificial Sequence
  Description of Artificial Sequence: Synthetic oligonucleotide
  Antisense Strand to SEQ ID NO: 390539
uaguaugguggcagaacag

SEQ ID NO: 390541 - RNA, 19 nt, Artificial Sequence
  Description of Artificial Sequence: Synthetic oligonucleotide
  Sense Strand Starting at position 914 of SEQ ID NO: 315987
acaguaggugcuggauaaa

SEQ ID NO: 390542 - RNA, 19 nt, Artificial Sequence
  Description of Artificial Sequence: Synthetic oligonucleotide
  Antisense Strand to SEQ ID NO: 390541
uuuauccagcaccuacugu

SEQ ID NO: 390543 - RNA, 19 nt, Artificial Sequence
  Description of Artificial Sequence: Synthetic oligonucleotide
  Sense Strand Starting at position 914 of SEQ ID NO: 315990
guaggugcuggauaaauga

SEQ ID NO: 390544 - RNA, 19 nt, Artificial Sequence
  Description of Artificial Sequence: Synthetic oligonucleotide
  Antisense Strand to SEQ ID NO: 390543
ucauuuauccagcaccuac

SEQ ID NO: 390545 - RNA, 19 nt, Artificial Sequence
  Description of Artificial Sequence: Synthetic oligonucleotide
  Sense Strand Starting at position 914 of SEQ ID NO: 316012
ggguuaugcugauagugau

SEQ ID NO: 390546 - RNA, 19 nt, Artificial Sequence
  Description of Artificial Sequence: Synthetic oligonucleotide
  Antisense Strand to SEQ ID NO: 390545
aucacuaucagcauaaccc

SEQ ID NO: 390547 - RNA, 19 nt, Artificial Sequence
  Description of Artificial Sequence: Synthetic oligonucleotide
  Sense Strand Starting at position 914 of SEQ ID NO: 316022
gauagugauggcuguuagu

SEQ ID NO: 390548 - RNA, 19 nt, Artificial Sequence
  Description of Artificial Sequence: Synthetic oligonucleotide
  Antisense Strand to SEQ ID NO: 390547
acuaacagccaucacuauc

SEQ ID NO: 390549 - RNA, 19 nt, Artificial Sequence
  Description of Artificial Sequence: Synthetic oligonucleotide
  Sense Strand Starting at position 914 of SEQ ID NO: 316025
agugauggcuguuaguaac

SEQ ID NO: 390550 - RNA, 19 nt, Artificial Sequence
  Description of Artificial Sequence: Synthetic oligonucleotide
  Antisense Strand to SEQ ID NO: 390549
guuacuaacagccaucacu

SEQ ID NO: 390551 - RNA, 19 nt, Artificial Sequence
  Description of Artificial Sequence: Synthetic oligonucleotide
  Sense Strand Starting at position 914 of SEQ ID NO: 316028
gauggcuguuaguaacaau

SEQ ID NO: 390552 - RNA, 19 nt, Artificial Sequence
  Description of Artificial Sequence: Synthetic oligonucleotide
  Antisense Strand to SEQ ID NO: 390551
auuguuacuaacagccauc

SEQ ID NO: 390553 - RNA, 19 nt, Artificial Sequence
  Description of Artificial Sequence: Synthetic oligonucleotide
  Sense Strand Starting at position 914 of SEQ ID NO: 316031
ggcuguuaguaacaaucca

SEQ ID NO: 390554 - RNA, 19 nt, Artificial Sequence
  Description of Artificial Sequence: Synthetic oligonucleotide
  Antisense Strand to SEQ ID NO: 390553
uggauuguuacuaacagcc

SEQ ID NO: 390555 - RNA, 19 nt, Artificial Sequence
  Description of Artificial Sequence: Synthetic oligonucleotide
  Sense Strand Starting at position 914 of SEQ ID NO: 316086
gugugaugaccauggguau

SEQ ID NO: 390556 - RNA, 19 nt, Artificial Sequence
  Description of Artificial Sequence: Synthetic oligonucleotide
  Antisense Strand to SEQ ID NO: 390555
auacccauggucaucacac

SEQ ID NO: 390557 - RNA, 19 nt, Artificial Sequence
  Description of Artificial Sequence: Synthetic oligonucleotide
  Sense Strand Starting at position 914 of SEQ ID NO: 316100
gguauacagagaugccauu

SEQ ID NO: 390558 - RNA, 19 nt, Artificial Sequence
  Description of Artificial Sequence: Synthetic oligonucleotide
  Antisense Strand to SEQ ID NO: 390557
aauggcaucucuguauacc

SEQ ID NO: 390559 - RNA, 19 nt, Artificial Sequence
  Description of Artificial Sequence: Synthetic oligonucleotide
  Sense Strand Starting at position 914 of SEQ ID NO: 316110
gaugccauuuccugagauc

SEQ ID NO: 390560 - RNA, 19 nt, Artificial Sequence
  Description of Artificial Sequence: Synthetic oligonucleotide
  Antisense Strand to SEQ ID NO: 390559
gaucucaggaaauggcauc

SEQ ID NO: 390561 - RNA, 19 nt, Artificial Sequence
  Description of Artificial Sequence: Synthetic oligonucleotide
  Sense Strand Starting at position 914 of SEQ ID NO: 316708
aauccugaggccgggaaau

SEQ ID NO: 390562 - RNA, 19 nt, Artificial Sequence
  Description of Artificial Sequence: Synthetic oligonucleotide
  Antisense Strand to SEQ ID NO: 390561
auuucccggccucaggauu

SEQ ID NO: 390563 - RNA, 19 nt, Artificial Sequence
  Description of Artificial Sequence: Synthetic oligonucleotide
  Sense Strand Starting at position 914 of SEQ ID NO: 316880
uggccucauggcuaaggua

SEQ ID NO: 390564 - RNA, 19 nt, Artificial Sequence
  Description of Artificial Sequence: Synthetic oligonucleotide
  Antisense Strand to SEQ ID NO: 390563
uaccuuagccaugaggcca

SEQ ID NO: 390565 - RNA, 19 nt, Artificial Sequence
  Description of Artificial Sequence: Synthetic oligonucleotide
  Sense Strand Starting at position 914 of SEQ ID NO: 317017
ggucauacccagggugaga

SEQ ID NO: 390566 - RNA, 19 nt, Artificial Sequence
  Description of Artificial Sequence: Synthetic oligonucleotide
  Antisense Strand to SEQ ID NO: 390565
ucucacccuggguaugacc

SEQ ID NO: 390567 - RNA, 19 nt, Artificial Sequence
  Description of Artificial Sequence: Synthetic oligonucleotide
  Sense Strand Starting at position 914 of SEQ ID NO: 317929
acuggugguugagaggaaa

SEQ ID NO: 390568 - RNA, 19 nt, Artificial Sequence
  Description of Artificial Sequence: Synthetic oligonucleotide
  Antisense Strand to SEQ ID NO: 390567
uuuccucucaaccaccagu

SEQ ID NO: 390569 - RNA, 19 nt, Artificial Sequence
  Description of Artificial Sequence: Synthetic oligonucleotide
  Sense Strand Starting at position 914 of SEQ ID NO: 318203
cgaggacagucuuccaaau

SEQ ID NO: 390570 - RNA, 19 nt, Artificial Sequence
  Description of Artificial Sequence: Synthetic oligonucleotide
  Antisense Strand to SEQ ID NO: 390569
auuuggaagacuguccucg

SEQ ID NO: 390571 - RNA, 19 nt, Artificial Sequence
  Description of Artificial Sequence: Synthetic oligonucleotide
  Sense Strand Starting at position 914 of SEQ ID NO: 318236
ucaagaugucuucgcggaa

SEQ ID NO: 390572 - RNA, 19 nt, Artificial Sequence
  Description of Artificial Sequence: Synthetic oligonucleotide
  Antisense Strand to SEQ ID NO: 390571
uuccgcgaagacaucuuga

SEQ ID NO: 390573 - RNA, 19 nt, Artificial Sequence
  Description of Artificial Sequence: Synthetic oligonucleotide
  Sense Strand Starting at position 914 of SEQ ID NO: 318237
caagaugucuucgcggaau

SEQ ID NO: 390574 - RNA, 19 nt, Artificial Sequence
  Description of Artificial Sequence: Synthetic oligonucleotide
  Antisense Strand to SEQ ID NO: 390573
auuccgcgaagacaucuug

SEQ ID NO: 390575 - RNA, 19 nt, Artificial Sequence
  Description of Artificial Sequence: Synthetic oligonucleotide
  Sense Strand Starting at position 914 of SEQ ID NO: 318239
agaugucuucgcggaauag

SEQ ID NO: 390576 - RNA, 19 nt, Artificial Sequence
  Description of Artificial Sequence: Synthetic oligonucleotide
  Antisense Strand to SEQ ID NO: 390575
cuauuccgcgaagacaucu

SEQ ID NO: 390577 - RNA, 19 nt, Artificial Sequence
  Description of Artificial Sequence: Synthetic oligonucleotide
  Sense Strand Starting at position 914 of SEQ ID NO: 318240
gaugucuucgcggaauaga

SEQ ID NO: 390578 - RNA, 19 nt, Artificial Sequence
  Description of Artificial Sequence: Synthetic oligonucleotide
  Antisense Strand to SEQ ID NO: 390577
ucuauuccgcgaagacauc

SEQ ID NO: 390579 - RNA, 19 nt, Artificial Sequence
  Description of Artificial Sequence: Synthetic oligonucleotide
  Sense Strand Starting at position 914 of SEQ ID NO: 318261
gcaggauccuuacuggacu

SEQ ID NO: 390580 - RNA, 19 nt, Artificial Sequence
  Description of Artificial Sequence: Synthetic oligonucleotide
  Antisense Strand to SEQ ID NO: 390579
aguccaguaaggauccugc

SEQ ID NO: 390581 - RNA, 19 nt, Artificial Sequence
  Description of Artificial Sequence: Synthetic oligonucleotide
  Sense Strand Starting at position 914 of SEQ ID NO: 318295
acaagagaaaucuguguga

SEQ ID NO: 390582 - RNA, 19 nt, Artificial Sequence
  Description of Artificial Sequence: Synthetic oligonucleotide
  Antisense Strand to SEQ ID NO: 390581
ucacacagauuucucuugu

SEQ ID NO: 390583 - RNA, 19 nt, Artificial Sequence
  Description of Artificial Sequence: Synthetic oligonucleotide
  Sense Strand Starting at position 914 of SEQ ID NO: 318297
aagagaaaucugugugagu

SEQ ID NO: 390584 - RNA, 19 nt, Artificial Sequence
  Description of Artificial Sequence: Synthetic oligonucleotide
  Antisense Strand to SEQ ID NO: 390583
acucacacagauuucucuu

SEQ ID NO: 390585 - RNA, 19 nt, Artificial Sequence
  Description of Artificial Sequence: Synthetic oligonucleotide
  Sense Strand Starting at position 914 of SEQ ID NO: 318298
agagaaaucugugugagug

SEQ ID NO: 390586 - RNA, 19 nt, Artificial Sequence
  Description of Artificial Sequence: Synthetic oligonucleotide
  Antisense Strand to SEQ ID NO: 390585
cacucacacagauuucucu

SEQ ID NO: 390587 - RNA, 19 nt, Artificial Sequence
  Description of Artificial Sequence: Synthetic oligonucleotide
  Sense Strand Starting at position 914 of SEQ ID NO: 318299
gagaaaucugugugagugu

SEQ ID NO: 390588 - RNA, 19 nt, Artificial Sequence
  Description of Artificial Sequence: Synthetic oligonucleotide
  Antisense Strand to SEQ ID NO: 390587
acacucacacagauuucuc

SEQ ID NO: 390589 - RNA, 19 nt, Artificial Sequence
  Description of Artificial Sequence: Synthetic oligonucleotide
  Sense Strand Starting at position 914 of SEQ ID NO: 318300
agaaaucugugugagugua

SEQ ID NO: 390590 - RNA, 19 nt, Artificial Sequence
  Description of Artificial Sequence: Synthetic oligonucleotide
  Antisense Strand to SEQ ID NO: 390589
uacacucacacagauuucu

SEQ ID NO: 390591 - RNA, 19 nt, Artificial Sequence
  Description of Artificial Sequence: Synthetic oligonucleotide
  Sense Strand Starting at position 914 of SEQ ID NO: 318302
aaaucugugugaguguaaa

SEQ ID NO: 390592 - RNA, 19 nt, Artificial Sequence
  Description of Artificial Sequence: Synthetic oligonucleotide
  Antisense Strand to SEQ ID NO: 390591
uuuacacucacacagauuu

SEQ ID NO: 390593 - RNA, 19 nt, Artificial Sequence
  Description of Artificial Sequence: Synthetic oligonucleotide
  Sense Strand Starting at position 914 of SEQ ID NO: 318480
agcacuuugucacccauuu

SEQ ID NO: 390594 - RNA, 19 nt, Artificial Sequence
  Description of Artificial Sequence: Synthetic oligonucleotide
  Antisense Strand to SEQ ID NO: 390593
aaaugggugacaaagugcu

SEQ ID NO: 390595 - RNA, 19 nt, Artificial Sequence
  Description of Artificial Sequence: Synthetic oligonucleotide
  Sense Strand Starting at position 914 of SEQ ID NO: 318821
aguguuacaucauauggac

SEQ ID NO: 390596 - RNA, 19 nt, Artificial Sequence
  Description of Artificial Sequence: Synthetic oligonucleotide
  Antisense Strand to SEQ ID NO: 390595
guccauaugauguaacacu

SEQ ID NO: 390597 - RNA, 19 nt, Artificial Sequence
  Description of Artificial Sequence: Synthetic oligonucleotide
  Sense Strand Starting at position 914 of SEQ ID NO: 318824
guuacaucauauggacgau

SEQ ID NO: 390598 - RNA, 19 nt, Artificial Sequence
  Description of Artificial Sequence: Synthetic oligonucleotide
  Antisense Strand to SEQ ID NO: 390597
aucguccauaugauguaac

SEQ ID NO: 390599 - RNA, 19 nt, Artificial Sequence
  Description of Artificial Sequence: Synthetic oligonucleotide
  Sense Strand Starting at position 914 of SEQ ID NO: 318827
acaucauauggacgauucu

SEQ ID NO: 390600 - RNA, 19 nt, Artificial Sequence
  Description of Artificial Sequence: Synthetic oligonucleotide
  Antisense Strand to SEQ ID NO: 390599
agaaucguccauaugaugu

SEQ ID NO: 390601 - RNA, 19 nt, Artificial Sequence
  Description of Artificial Sequence: Synthetic oligonucleotide
  Sense Strand Starting at position 914 of SEQ ID NO: 318836
ggacgauucugaggcccau

SEQ ID NO: 390602 - RNA, 19 nt, Artificial Sequence
  Description of Artificial Sequence: Synthetic oligonucleotide
  Antisense Strand to SEQ ID NO: 390601
augggccucagaaucgucc

SEQ ID NO: 390603 - RNA, 19 nt, Artificial Sequence
  Description of Artificial Sequence: Synthetic oligonucleotide
  Sense Strand Starting at position 914 of SEQ ID NO: 318880
gcuguacuauuuccauuau

SEQ ID NO: 390604 - RNA, 19 nt, Artificial Sequence
  Description of Artificial Sequence: Synthetic oligonucleotide
  Antisense Strand to SEQ ID NO: 390603
auaauggaaauaguacagc

SEQ ID NO: 390605 - RNA, 19 nt, Artificial Sequence
  Description of Artificial Sequence: Synthetic oligonucleotide
  Sense Strand Starting at position 914 of SEQ ID NO: 319010
cugcauaugagcuguauga

SEQ ID NO: 390606 - RNA, 19 nt, Artificial Sequence
  Description of Artificial Sequence: Synthetic oligonucleotide
  Antisense Strand to SEQ ID NO: 390605
ucauacagcucauaugcag

SEQ ID NO: 390607 - RNA, 19 nt, Artificial Sequence
  Description of Artificial Sequence: Synthetic oligonucleotide
  Sense Strand Starting at position 914 of SEQ ID NO: 319113
gggaguuccucgggcccaa

SEQ ID NO: 390608 - RNA, 19 nt, Artificial Sequence
  Description of Artificial Sequence: Synthetic oligonucleotide
  Antisense Strand to SEQ ID NO: 390607
uugggcccgaggaacuccc

SEQ ID NO: 390609 - RNA, 19 nt, Artificial Sequence
  Description of Artificial Sequence: Synthetic oligonucleotide
  Sense Strand Starting at position 915 of SEQ ID NO: 315380
cuguucugccaccauacua

SEQ ID NO: 390610 - RNA, 19 nt, Artificial Sequence
  Description of Artificial Sequence: Synthetic oligonucleotide
  Antisense Strand to SEQ ID NO: 390609
uaguaugguggcagaacag

SEQ ID NO: 390611 - RNA, 19 nt, Artificial Sequence
  Description of Artificial Sequence: Synthetic oligonucleotide
  Sense Strand Starting at position 915 of SEQ ID NO: 315610
acaguaggugcuggauaaa

SEQ ID NO: 390612 - RNA, 19 nt, Artificial Sequence
  Description of Artificial Sequence: Synthetic oligonucleotide
  Antisense Strand to SEQ ID NO: 390611
uuuauccagcaccuacugu

SEQ ID NO: 390613 - RNA, 19 nt, Artificial Sequence
  Description of Artificial Sequence: Synthetic oligonucleotide
  Sense Strand Starting at position 915 of SEQ ID NO: 315613
guaggugcuggauaaauga

SEQ ID NO: 390614 - RNA, 19 nt, Artificial Sequence
  Description of Artificial Sequence: Synthetic oligonucleotide
  Antisense Strand to SEQ ID NO: 390613
ucauuuauccagcaccuac

SEQ ID NO: 390615 - RNA, 19 nt, Artificial Sequence
  Description of Artificial Sequence: Synthetic oligonucleotide
  Sense Strand Starting at position 915 of SEQ ID NO: 315645
gauagugauggcuguuagu

SEQ ID NO: 390616 - RNA, 19 nt, Artificial Sequence
  Description of Artificial Sequence: Synthetic oligonucleotide
  Antisense Strand to SEQ ID NO: 390615
acuaacagccaucacuauc

SEQ ID NO: 390617 - RNA, 19 nt, Artificial Sequence
  Description of Artificial Sequence: Synthetic oligonucleotide
  Sense Strand Starting at position 915 of SEQ ID NO: 315651
gauggcuguuaguaacaau

SEQ ID NO: 390618 - RNA, 19 nt, Artificial Sequence
  Description of Artificial Sequence: Synthetic oligonucleotide
  Antisense Strand to SEQ ID NO: 390617
auuguuacuaacagccauc

SEQ ID NO: 390619 - RNA, 19 nt, Artificial Sequence
  Description of Artificial Sequence: Synthetic oligonucleotide
  Sense Strand Starting at position 915 of SEQ ID NO: 315709
gugugaugaccauggguau

SEQ ID NO: 390620 - RNA, 19 nt, Artificial Sequence
  Description of Artificial Sequence: Synthetic oligonucleotide
  Antisense Strand to SEQ ID NO: 390619
auacccauggucaucacac

SEQ ID NO: 390621 - RNA, 19 nt, Artificial Sequence
  Description of Artificial Sequence: Synthetic oligonucleotide
  Sense Strand Starting at position 915 of SEQ ID NO: 315723
gguauacagagaugccauu

SEQ ID NO: 390622 - RNA, 19 nt, Artificial Sequence
  Description of Artificial Sequence: Synthetic oligonucleotide
  Antisense Strand to SEQ ID NO: 390621
aauggcaucucuguauacc

SEQ ID NO: 390623 - RNA, 19 nt, Artificial Sequence
  Description of Artificial Sequence: Synthetic oligonucleotide
  Sense Strand Starting at position 915 of SEQ ID NO: 315733
gaugccauuuccugagauc

SEQ ID NO: 390624 - RNA, 19 nt, Artificial Sequence
  Description of Artificial Sequence: Synthetic oligonucleotide
  Antisense Strand to SEQ ID NO: 390623
gaucucaggaaauggcauc

SEQ ID NO: 390625 - RNA, 19 nt, Artificial Sequence
  Description of Artificial Sequence: Synthetic oligonucleotide
  Sense Strand Starting at position 915 of SEQ ID NO: 316331
aauccugaggccgggaaau

SEQ ID NO: 390626 - RNA, 19 nt, Artificial Sequence
  Description of Artificial Sequence: Synthetic oligonucleotide
  Antisense Strand to SEQ ID NO: 390625
auuucccggccucaggauu

SEQ ID NO: 390627 - RNA, 19 nt, Artificial Sequence
  Description of Artificial Sequence: Synthetic oligonucleotide
  Sense Strand Starting at position 915 of SEQ ID NO: 316503
uggccucauggcuaaggua

SEQ ID NO: 390628 - RNA, 19 nt, Artificial Sequence
  Description of Artificial Sequence: Synthetic oligonucleotide
  Antisense Strand to SEQ ID NO: 390627
uaccuuagccaugaggcca

SEQ ID NO: 390629 - RNA, 19 nt, Artificial Sequence
  Description of Artificial Sequence: Synthetic oligonucleotide
  Sense Strand Starting at position 915 of SEQ ID NO: 316640
ggucauacccagggugaga

SEQ ID NO: 390630 - RNA, 19 nt, Artificial Sequence
  Description of Artificial Sequence: Synthetic oligonucleotide
  Antisense Strand to SEQ ID NO: 390629
ucucacccuggguaugacc

SEQ ID NO: 390631 - RNA, 19 nt, Artificial Sequence
  Description of Artificial Sequence: Synthetic oligonucleotide
  Sense Strand Starting at position 915 of SEQ ID NO: 317552
acuggugguugagaggaaa

SEQ ID NO: 390632 - RNA, 19 nt, Artificial Sequence
  Description of Artificial Sequence: Synthetic oligonucleotide
  Antisense Strand to SEQ ID NO: 390631
uuuccucucaaccaccagu

SEQ ID NO: 390633 - RNA, 19 nt, Artificial Sequence
  Description of Artificial Sequence: Synthetic oligonucleotide
  Sense Strand Starting at position 915 of SEQ ID NO: 317826
cgaggacagucuuccaaau

SEQ ID NO: 390634 - RNA, 19 nt, Artificial Sequence
  Description of Artificial Sequence: Synthetic oligonucleotide
  Antisense Strand to SEQ ID NO: 390633
auuuggaagacuguccucg

SEQ ID NO: 390635 - RNA, 19 nt, Artificial Sequence
  Description of Artificial Sequence: Synthetic oligonucleotide
  Sense Strand Starting at position 915 of SEQ ID NO: 317859
ucaagaugucuucgcggaa

SEQ ID NO: 390636 - RNA, 19 nt, Artificial Sequence
  Description of Artificial Sequence: Synthetic oligonucleotide
  Antisense Strand to SEQ ID NO: 390635
uuccgcgaagacaucuuga

SEQ ID NO: 390637 - RNA, 19 nt, Artificial Sequence
  Description of Artificial Sequence: Synthetic oligonucleotide
  Sense Strand Starting at position 915 of SEQ ID NO: 317860
caagaugucuucgcggaau

SEQ ID NO: 390638 - RNA, 19 nt, Artificial Sequence
  Description of Artificial Sequence: Synthetic oligonucleotide
  Antisense Strand to SEQ ID NO: 390637
auuccgcgaagacaucuug

SEQ ID NO: 390639 - RNA, 19 nt, Artificial Sequence
  Description of Artificial Sequence: Synthetic oligonucleotide
  Sense Strand Starting at position 915 of SEQ ID NO: 317862
agaugucuucgcggaauag

SEQ ID NO: 390640 - RNA, 19 nt, Artificial Sequence
  Description of Artificial Sequence: Synthetic oligonucleotide
  Antisense Strand to SEQ ID NO: 390639
cuauuccgcgaagacaucu

SEQ ID NO: 390641 - RNA, 19 nt, Artificial Sequence
  Description of Artificial Sequence: Synthetic oligonucleotide
  Sense Strand Starting at position 915 of SEQ ID NO: 317863
gaugucuucgcggaauaga

SEQ ID NO: 390642 - RNA, 19 nt, Artificial Sequence
  Description of Artificial Sequence: Synthetic oligonucleotide
  Antisense Strand to SEQ ID NO: 390641
ucuauuccgcgaagacauc

SEQ ID NO: 390643 - RNA, 19 nt, Artificial Sequence
  Description of Artificial Sequence: Synthetic oligonucleotide
  Sense Strand Starting at position 915 of SEQ ID NO: 317884
gcaggauccuuacuggacu

SEQ ID NO: 390644 - RNA, 19 nt, Artificial Sequence
  Description of Artificial Sequence: Synthetic oligonucleotide
  Antisense Strand to SEQ ID NO: 390643
aguccaguaaggauccugc

SEQ ID NO: 390645 - RNA, 19 nt, Artificial Sequence
  Description of Artificial Sequence: Synthetic oligonucleotide
  Sense Strand Starting at position 915 of SEQ ID NO: 317918
acaagagaaaucuguguga

SEQ ID NO: 390646 - RNA, 19 nt, Artificial Sequence
  Description of Artificial Sequence: Synthetic oligonucleotide
  Antisense Strand to SEQ ID NO: 390645
ucacacagauuucucuugu

SEQ ID NO: 390647 - RNA, 19 nt, Artificial Sequence
  Description of Artificial Sequence: Synthetic oligonucleotide
  Sense Strand Starting at position 915 of SEQ ID NO: 317920
aagagaaaucugugugagu

SEQ ID NO: 390648 - RNA, 19 nt, Artificial Sequence
  Description of Artificial Sequence: Synthetic oligonucleotide
  Antisense Strand to SEQ ID NO: 390647
acucacacagauuucucuu

SEQ ID NO: 390649 - RNA, 19 nt, Artificial Sequence
  Description of Artificial Sequence: Synthetic oligonucleotide
  Sense Strand Starting at position 915 of SEQ ID NO: 317921
agagaaaucugugugagug

SEQ ID NO: 390650 - RNA, 19 nt, Artificial Sequence
  Description of Artificial Sequence: Synthetic oligonucleotide
  Antisense Strand to SEQ ID NO: 390649
cacucacacagauuucucu

SEQ ID NO: 390651 - RNA, 19 nt, Artificial Sequence
  Description of Artificial Sequence: Synthetic oligonucleotide
  Sense Strand Starting at position 915 of SEQ ID NO: 317922
gagaaaucugugugagugu

SEQ ID NO: 390652 - RNA, 19 nt, Artificial Sequence
  Description of Artificial Sequence: Synthetic oligonucleotide
  Antisense Strand to SEQ ID NO: 390651
acacucacacagauuucuc

SEQ ID NO: 390653 - RNA, 19 nt, Artificial Sequence
  Description of Artificial Sequence: Synthetic oligonucleotide
  Sense Strand Starting at position 915 of SEQ ID NO: 317923
agaaaucugugugagugua

SEQ ID NO: 390654 - RNA, 19 nt, Artificial Sequence
  Description of Artificial Sequence: Synthetic oligonucleotide
  Antisense Strand to SEQ ID NO: 390653
uacacucacacagauuucu

SEQ ID NO: 390655 - RNA, 19 nt, Artificial Sequence
  Description of Artificial Sequence: Synthetic oligonucleotide
  Sense Strand Starting at position 915 of SEQ ID NO: 317925
aaaucugugugaguguaaa

SEQ ID NO: 390656 - RNA, 19 nt, Artificial Sequence
  Description of Artificial Sequence: Synthetic oligonucleotide
  Antisense Strand to SEQ ID NO: 390655
uuuacacucacacagauuu

SEQ ID NO: 390657 - RNA, 19 nt, Artificial Sequence
  Description of Artificial Sequence: Synthetic oligonucleotide
  Sense Strand Starting at position 915 of SEQ ID NO: 318103
agcacuuugucacccauuu

SEQ ID NO: 390658 - RNA, 19 nt, Artificial Sequence
  Description of Artificial Sequence: Synthetic oligonucleotide
  Antisense Strand to SEQ ID NO: 390657
aaaugggugacaaagugcu

SEQ ID NO: 390659 - RNA, 19 nt, Artificial Sequence
  Description of Artificial Sequence: Synthetic oligonucleotide
  Sense Strand Starting at position 915 of SEQ ID NO: 318444
aguguuacaucauauggac

SEQ ID NO: 390660 - RNA, 19 nt, Artificial Sequence
  Description of Artificial Sequence: Synthetic oligonucleotide
  Antisense Strand to SEQ ID NO: 390659
guccauaugauguaacacu

SEQ ID NO: 390661 - RNA, 19 nt, Artificial Sequence
  Description of Artificial Sequence: Synthetic oligonucleotide
  Sense Strand Starting at position 915 of SEQ ID NO: 318450
acaucauauggacgauucu

SEQ ID NO: 390662 - RNA, 19 nt, Artificial Sequence
  Description of Artificial Sequence: Synthetic oligonucleotide
  Antisense Strand to SEQ ID NO: 390661
agaaucguccauaugaugu

SEQ ID NO: 390663 - RNA, 19 nt, Artificial Sequence
  Description of Artificial Sequence: Synthetic oligonucleotide
  Sense Strand Starting at position 915 of SEQ ID NO: 318503
gcuguacuauuuccauuau

SEQ ID NO: 390664 - RNA, 19 nt, Artificial Sequence
  Description of Artificial Sequence: Synthetic oligonucleotide
  Antisense Strand to SEQ ID NO: 390663
auaauggaaauaguacagc

SEQ ID NO: 390665 - RNA, 19 nt, Artificial Sequence
  Description of Artificial Sequence: Synthetic oligonucleotide
  Sense Strand Starting at position 915 of SEQ ID NO: 318633
cugcauaugagcuguauga

SEQ ID NO: 390666 - RNA, 19 nt, Artificial Sequence
  Description of Artificial Sequence: Synthetic oligonucleotide
  Antisense Strand to SEQ ID NO: 390665
ucauacagcucauaugcag

SEQ ID NO: 390667 - RNA, 19 nt, Artificial Sequence
  Description of Artificial Sequence: Synthetic oligonucleotide
  Sense Strand Starting at position 915 of SEQ ID NO: 318876
acaggaacgcagugcuaau

SEQ ID NO: 390668 - RNA, 19 nt, Artificial Sequence
  Description of Artificial Sequence: Synthetic oligonucleotide
  Antisense Strand to SEQ ID NO: 390667
auuagcacugcguuccugu

SEQ ID NO: 390669 - RNA, 19 nt, Artificial Sequence
  Description of Artificial Sequence: Synthetic oligonucleotide
  Sense Strand Starting at position 915 of SEQ ID NO: 318987
ggcgaugucagagaaaguu

SEQ ID NO: 390670 - RNA, 19 nt, Artificial Sequence
  Description of Artificial Sequence: Synthetic oligonucleotide
  Antisense Strand to SEQ ID NO: 390669
aacuuucucugacaucgcc

SEQ ID NO: 390671 - RNA, 19 nt, Artificial Sequence
  Description of Artificial Sequence: Synthetic oligonucleotide
  Sense Strand Starting at position 915 of SEQ ID NO: 319013
ggaccucugagcugugaau

SEQ ID NO: 390672 - RNA, 19 nt, Artificial Sequence
  Description of Artificial Sequence: Synthetic oligonucleotide
  Antisense Strand to SEQ ID NO: 390671
auucacagcucagaggucc

SEQ ID NO: 390673 - RNA, 19 nt, Artificial Sequence
  Description of Artificial Sequence: Synthetic oligonucleotide
  Sense Strand Starting at position 915 of SEQ ID NO: 319015
accucugagcugugaauug

SEQ ID NO: 390674 - RNA, 19 nt, Artificial Sequence
  Description of Artificial Sequence: Synthetic oligonucleotide
  Antisense Strand to SEQ ID NO: 390673
caauucacagcucagaggu

SEQ ID NO: 390675 - RNA, 19 nt, Artificial Sequence
  Description of Artificial Sequence: Synthetic oligonucleotide
  Sense Strand Starting at position 915 of SEQ ID NO: 319020
ugagcugugaauugucacu

SEQ ID NO: 390676 - RNA, 19 nt, Artificial Sequence
  Description of Artificial Sequence: Synthetic oligonucleotide
  Antisense Strand to SEQ ID NO: 390675
agugacaauucacagcuca

SEQ ID NO: 390677 - RNA, 19 nt, Artificial Sequence
  Description of Artificial Sequence: Synthetic oligonucleotide
  Sense Strand Starting at position 915 of SEQ ID NO: 319022
agcugugaauugucacugu

SEQ ID NO: 390678 - RNA, 19 nt, Artificial Sequence
  Description of Artificial Sequence: Synthetic oligonucleotide
  Antisense Strand to SEQ ID NO: 390677
acagugacaauucacagcu

SEQ ID NO: 390679 - RNA, 19 nt, Artificial Sequence
  Description of Artificial Sequence: Synthetic oligonucleotide
  Sense Strand Starting at position 915 of SEQ ID NO: 319026
gugaauugucacugugaca

SEQ ID NO: 390680 - RNA, 19 nt, Artificial Sequence
  Description of Artificial Sequence: Synthetic oligonucleotide
  Antisense Strand to SEQ ID NO: 390679
ugucacagugacaauucac

SEQ ID NO: 390681 - RNA, 19 nt, Artificial Sequence
  Description of Artificial Sequence: Synthetic oligonucleotide
  Sense Strand Starting at position 915 of SEQ ID NO: 319029
aauugucacugugacagaa

SEQ ID NO: 390682 - RNA, 19 nt, Artificial Sequence
  Description of Artificial Sequence: Synthetic oligonucleotide
  Antisense Strand to SEQ ID NO: 390681
uucugucacagugacaauu

SEQ ID NO: 390683 - RNA, 19 nt, Artificial Sequence
  Description of Artificial Sequence: Synthetic oligonucleotide
  Sense Strand Starting at position 915 of SEQ ID NO: 319112
guugaugccucagaggauu

SEQ ID NO: 390684 - RNA, 19 nt, Artificial Sequence
  Description of Artificial Sequence: Synthetic oligonucleotide
  Antisense Strand to SEQ ID NO: 390683
aauccucugaggcaucaac

SEQ ID NO: 390685 - RNA, 19 nt, Artificial Sequence
  Description of Artificial Sequence: Synthetic oligonucleotide
  Sense Strand Starting at position 915 of SEQ ID NO: 319195
gggaaagccuuguccugaa

SEQ ID NO: 390686 - RNA, 19 nt, Artificial Sequence
  Description of Artificial Sequence: Synthetic oligonucleotide
  Antisense Strand to SEQ ID NO: 390685
uucaggacaaggcuuuccc

SEQ ID NO: 390687 - RNA, 19 nt, Artificial Sequence
  Description of Artificial Sequence: Synthetic oligonucleotide
  Sense Strand Starting at position 915 of SEQ ID NO: 319199
aagccuuguccugaaguau

SEQ ID NO: 390688 - RNA, 19 nt, Artificial Sequence
  Description of Artificial Sequence: Synthetic oligonucleotide
  Antisense Strand to SEQ ID NO: 390687
auacuucaggacaaggcuu

SEQ ID NO: 390689 - RNA, 19 nt, Artificial Sequence
  Description of Artificial Sequence: Synthetic oligonucleotide
  Sense Strand Starting at position 916 of SEQ ID NO: 315470
uuauguucuggugaaauuc

SEQ ID NO: 390690 - RNA, 19 nt, Artificial Sequence
  Description of Artificial Sequence: Synthetic oligonucleotide
  Antisense Strand to SEQ ID NO: 390689
gaauuucaccagaacauaa

SEQ ID NO: 390691 - RNA, 19 nt, Artificial Sequence
  Description of Artificial Sequence: Synthetic oligonucleotide
  Sense Strand Starting at position 916 of SEQ ID NO: 315478
uggugaaauucugucuucu

SEQ ID NO: 390692 - RNA, 19 nt, Artificial Sequence
  Description of Artificial Sequence: Synthetic oligonucleotide
  Antisense Strand to SEQ ID NO: 390691
agaagacagaauuucacca

SEQ ID NO: 390693 - RNA, 19 nt, Artificial Sequence
  Description of Artificial Sequence: Synthetic oligonucleotide
  Sense Strand Starting at position 916 of SEQ ID NO: 315480
gugaaauucugucuucuua

SEQ ID NO: 390694 - RNA, 19 nt, Artificial Sequence
  Description of Artificial Sequence: Synthetic oligonucleotide
  Antisense Strand to SEQ ID NO: 390693
uaagaagacagaauuucac

SEQ ID NO: 390695 - RNA, 19 nt, Artificial Sequence
  Description of Artificial Sequence: Synthetic oligonucleotide
  Sense Strand Starting at position 916 of SEQ ID NO: 315542
cguggcuuagcccaaagaa

SEQ ID NO: 390696 - RNA, 19 nt, Artificial Sequence
  Description of Artificial Sequence: Synthetic oligonucleotide
  Antisense Strand to SEQ ID NO: 390695
uucuuugggcuaagccacg

SEQ ID NO: 390697 - RNA, 19 nt, Artificial Sequence
  Description of Artificial Sequence: Synthetic oligonucleotide
  Sense Strand Starting at position 916 of SEQ ID NO: 315656
ccacgauucuaaccuauga

SEQ ID NO: 390698 - RNA, 19 nt, Artificial Sequence
  Description of Artificial Sequence: Synthetic oligonucleotide
  Antisense Strand to SEQ ID NO: 390697
ucauagguuagaaucgugg

SEQ ID NO: 390699 - RNA, 19 nt, Artificial Sequence
  Description of Artificial Sequence: Synthetic oligonucleotide
  Sense Strand Starting at position 916 of SEQ ID NO: 315783
agguuccuauauucugaga

SEQ ID NO: 390700 - RNA, 19 nt, Artificial Sequence
  Description of Artificial Sequence: Synthetic oligonucleotide
  Antisense Strand to SEQ ID NO: 390699
ucucagaauauaggaaccu

SEQ ID NO: 390701 - RNA, 19 nt, Artificial Sequence
  Description of Artificial Sequence: Synthetic oligonucleotide
  Sense Strand Starting at position 916 of SEQ ID NO: 316020
acaaacguaccguaauuaa

SEQ ID NO: 390702 - RNA, 19 nt, Artificial Sequence
  Description of Artificial Sequence: Synthetic oligonucleotide
  Antisense Strand to SEQ ID NO: 390701
uuaauuacgguacguuugu

SEQ ID NO: 390703 - RNA, 19 nt, Artificial Sequence
  Description of Artificial Sequence: Synthetic oligonucleotide
  Sense Strand Starting at position 916 of SEQ ID NO: 316023
aacguaccguaauuaauau

SEQ ID NO: 390704 - RNA, 19 nt, Artificial Sequence
  Description of Artificial Sequence: Synthetic oligonucleotide
  Antisense Strand to SEQ ID NO: 390703
auauuaauuacgguacguu

SEQ ID NO: 390705 - RNA, 19 nt, Artificial Sequence
  Description of Artificial Sequence: Synthetic oligonucleotide
  Sense Strand Starting at position 916 of SEQ ID NO: 316157
cuaaauuaccacuggguca

SEQ ID NO: 390706 - RNA, 19 nt, Artificial Sequence
  Description of Artificial Sequence: Synthetic oligonucleotide
  Antisense Strand to SEQ ID NO: 390705
ugacccagugguaauuuag

SEQ ID NO: 390707 - RNA, 19 nt, Artificial Sequence
  Description of Artificial Sequence: Synthetic oligonucleotide
  Sense Strand Starting at position 916 of SEQ ID NO: 316269
gcagaaauacaguguggca

SEQ ID NO: 390708 - RNA, 19 nt, Artificial Sequence
  Description of Artificial Sequence: Synthetic oligonucleotide
  Antisense Strand to SEQ ID NO: 390707
ugccacacuguauuucugc

SEQ ID NO: 390709 - RNA, 19 nt, Artificial Sequence
  Description of Artificial Sequence: Synthetic oligonucleotide
  Sense Strand Starting at position 916 of SEQ ID NO: 316300
gggaaauggucucuucuuu

SEQ ID NO: 390710 - RNA, 19 nt, Artificial Sequence
  Description of Artificial Sequence: Synthetic oligonucleotide
  Antisense Strand to SEQ ID NO: 390709
aaagaagagaccauuuccc

SEQ ID NO: 390711 - RNA, 19 nt, Artificial Sequence
  Description of Artificial Sequence: Synthetic oligonucleotide
  Sense Strand Starting at position 916 of SEQ ID NO: 316327
gccuauuagcuugagacua

SEQ ID NO: 390712 - RNA, 19 nt, Artificial Sequence
  Description of Artificial Sequence: Synthetic oligonucleotide
  Antisense Strand to SEQ ID NO: 390711
uagucucaagcuaauaggc

SEQ ID NO: 390713 - RNA, 19 nt, Artificial Sequence
  Description of Artificial Sequence: Synthetic oligonucleotide
  Sense Strand Starting at position 916 of SEQ ID NO: 316434
agcuuaacagucgaagauc

SEQ ID NO: 390714 - RNA, 19 nt, Artificial Sequence
  Description of Artificial Sequence: Synthetic oligonucleotide
  Antisense Strand to SEQ ID NO: 390713
gaucuucgacuguuaagcu

SEQ ID NO: 390715 - RNA, 19 nt, Artificial Sequence
  Description of Artificial Sequence: Synthetic oligonucleotide
  Sense Strand Starting at position 916 of SEQ ID NO: 316472
uuugauguucccgauuaca

SEQ ID NO: 390716 - RNA, 19 nt, Artificial Sequence
  Description of Artificial Sequence: Synthetic oligonucleotide
  Antisense Strand to SEQ ID NO: 390715
uguaaucgggaacaucaaa

SEQ ID NO: 390717 - RNA, 19 nt, Artificial Sequence
  Description of Artificial Sequence: Synthetic oligonucleotide
  Sense Strand Starting at position 916 of SEQ ID NO: 316475
gauguucccgauuacagaa

SEQ ID NO: 390718 - RNA, 19 nt, Artificial Sequence
  Description of Artificial Sequence: Synthetic oligonucleotide
  Antisense Strand to SEQ ID NO: 390717
uucuguaaucgggaacauc

SEQ ID NO: 390719 - RNA, 19 nt, Artificial Sequence
  Description of Artificial Sequence: Synthetic oligonucleotide
  Sense Strand Starting at position 916 of SEQ ID NO: 317177
ucgcgauaucuagggagga

SEQ ID NO: 390720 - RNA, 19 nt, Artificial Sequence
  Description of Artificial Sequence: Synthetic oligonucleotide
  Antisense Strand to SEQ ID NO: 390719
uccucccuagauaucgcga

SEQ ID NO: 390721 - RNA, 19 nt, Artificial Sequence
  Description of Artificial Sequence: Synthetic oligonucleotide
  Sense Strand Starting at position 916 of SEQ ID NO: 317296
gggagcugucucugagaac

SEQ ID NO: 390722 - RNA, 19 nt, Artificial Sequence
  Description of Artificial Sequence: Synthetic oligonucleotide
  Antisense Strand to SEQ ID NO: 390721
guucucagagacagcuccc

SEQ ID NO: 390723 - RNA, 19 nt, Artificial Sequence
  Description of Artificial Sequence: Synthetic oligonucleotide
  Sense Strand Starting at position 916 of SEQ ID NO: 317385
uugugaggccguaguguua

SEQ ID NO: 390724 - RNA, 19 nt, Artificial Sequence
  Description of Artificial Sequence: Synthetic oligonucleotide
  Antisense Strand to SEQ ID NO: 390723
uaacacuacggccucacaa

SEQ ID NO: 390725 - RNA, 19 nt, Artificial Sequence
  Description of Artificial Sequence: Synthetic oligonucleotide
  Sense Strand Starting at position 916 of SEQ ID NO: 317457
gagguuagcugacuugaag

SEQ ID NO: 390726 - RNA, 19 nt, Artificial Sequence
  Description of Artificial Sequence: Synthetic oligonucleotide
  Antisense Strand to SEQ ID NO: 390725
cuucaagucagcuaaccuc

SEQ ID NO: 390727 - RNA, 19 nt, Artificial Sequence
  Description of Artificial Sequence: Synthetic oligonucleotide
  Sense Strand Starting at position 916 of SEQ ID NO: 317496
ccauuucgcccguguaaac

SEQ ID NO: 390728 - RNA, 19 nt, Artificial Sequence
  Description of Artificial Sequence: Synthetic oligonucleotide
  Antisense Strand to SEQ ID NO: 390727
guuuacacgggcgaaaugg

SEQ ID NO: 390729 - RNA, 19 nt, Artificial Sequence
  Description of Artificial Sequence: Synthetic oligonucleotide
  Sense Strand Starting at position 916 of SEQ ID NO: 317515
agccgaacugccuauuaua

SEQ ID NO: 390730 - RNA, 19 nt, Artificial Sequence
  Description of Artificial Sequence: Synthetic oligonucleotide
  Antisense Strand to SEQ ID NO: 390729
uauaauaggcaguucggcu

SEQ ID NO: 390731 - RNA, 19 nt, Artificial Sequence
  Description of Artificial Sequence: Synthetic oligonucleotide
  Sense Strand Starting at position 916 of SEQ ID NO: 317562
uccuuagaggccuauuaug

SEQ ID NO: 390732 - RNA, 19 nt, Artificial Sequence
  Description of Artificial Sequence: Synthetic oligonucleotide
  Antisense Strand to SEQ ID NO: 390731
cauaauaggccucuaagga

SEQ ID NO: 390733 - RNA, 19 nt, Artificial Sequence
  Description of Artificial Sequence: Synthetic oligonucleotide
  Sense Strand Starting at position 916 of SEQ ID NO: 317583
aucauagaaugucugcauu

SEQ ID NO: 390734 - RNA, 19 nt, Artificial Sequence
  Description of Artificial Sequence: Synthetic oligonucleotide
  Antisense Strand to SEQ ID NO: 390733
aaugcagacauucuaugau

SEQ ID NO: 390735 - RNA, 19 nt, Artificial Sequence
  Description of Artificial Sequence: Synthetic oligonucleotide
  Sense Strand Starting at position 916 of SEQ ID NO: 317586
auagaaugucugcauugga

SEQ ID NO: 390736 - RNA, 19 nt, Artificial Sequence
  Description of Artificial Sequence: Synthetic oligonucleotide
  Antisense Strand to SEQ ID NO: 390735
uccaaugcagacauucuau

SEQ ID NO: 390737 - RNA, 19 nt, Artificial Sequence
  Description of Artificial Sequence: Synthetic oligonucleotide
  Sense Strand Starting at position 916 of SEQ ID NO: 317589
gaaugucugcauuggaauc

SEQ ID NO: 390738 - RNA, 19 nt, Artificial Sequence
  Description of Artificial Sequence: Synthetic oligonucleotide
  Antisense Strand to SEQ ID NO: 390737
gauuccaaugcagacauuc

SEQ ID NO: 390739 - RNA, 19 nt, Artificial Sequence
  Description of Artificial Sequence: Synthetic oligonucleotide
  Sense Strand Starting at position 916 of SEQ ID NO: 317860
gugugugguauuuguuaug

SEQ ID NO: 390740 - RNA, 19 nt, Artificial Sequence
  Description of Artificial Sequence: Synthetic oligonucleotide
  Antisense Strand to SEQ ID NO: 390739
cauaacaaauaccacacac

SEQ ID NO: 390741 - RNA, 19 nt, Artificial Sequence
  Description of Artificial Sequence: Synthetic oligonucleotide
  Sense Strand Starting at position 916 of SEQ ID NO: 318201
aguucuuagauugagcuga

SEQ ID NO: 390742 - RNA, 19 nt, Artificial Sequence
  Description of Artificial Sequence: Synthetic oligonucleotide
  Antisense Strand to SEQ ID NO: 390741
ucagcucaaucuaagaacu

SEQ ID NO: 390743 - RNA, 19 nt, Artificial Sequence
  Description of Artificial Sequence: Synthetic oligonucleotide
  Sense Strand Starting at position 916 of SEQ ID NO: 318203
uucuuagauugagcugaca

SEQ ID NO: 390744 - RNA, 19 nt, Artificial Sequence
  Description of Artificial Sequence: Synthetic oligonucleotide
  Antisense Strand to SEQ ID NO: 390743
ugucagcucaaucuaagaa

SEQ ID NO: 390745 - RNA, 19 nt, Artificial Sequence
  Description of Artificial Sequence: Synthetic oligonucleotide
  Sense Strand Starting at position 916 of SEQ ID NO: 318314
ggcucaucucuggaccaca

SEQ ID NO: 390746 - RNA, 19 nt, Artificial Sequence
  Description of Artificial Sequence: Synthetic oligonucleotide
  Antisense Strand to SEQ ID NO: 390745
ugugguccagagaugagcc

SEQ ID NO: 390747 - RNA, 19 nt, Artificial Sequence
  Description of Artificial Sequence: Synthetic oligonucleotide
  Sense Strand Starting at position 916 of SEQ ID NO: 318472
agaugaguuccuggcacag

SEQ ID NO: 390748 - RNA, 19 nt, Artificial Sequence
  Description of Artificial Sequence: Synthetic oligonucleotide
  Antisense Strand to SEQ ID NO: 390747
cugugccaggaacucaucu

SEQ ID NO: 390749 - RNA, 19 nt, Artificial Sequence
  Description of Artificial Sequence: Synthetic oligonucleotide
  Sense Strand Starting at position 916 of SEQ ID NO: 318513
ggauguggauggagauaau

SEQ ID NO: 390750 - RNA, 19 nt, Artificial Sequence
  Description of Artificial Sequence: Synthetic oligonucleotide
  Antisense Strand to SEQ ID NO: 390749
auuaucuccauccacaucc

SEQ ID NO: 390751 - RNA, 19 nt, Artificial Sequence
  Description of Artificial Sequence: Synthetic oligonucleotide
  Sense Strand Starting at position 916 of SEQ ID NO: 318566
caggguugcuggucacaga

SEQ ID NO: 390752 - RNA, 19 nt, Artificial Sequence
  Description of Artificial Sequence: Synthetic oligonucleotide
  Antisense Strand to SEQ ID NO: 390751
ucugugaccagcaacccug

SEQ ID NO: 390753 - RNA, 19 nt, Artificial Sequence
  Description of Artificial Sequence: Synthetic oligonucleotide
  Sense Strand Starting at position 916 of SEQ ID NO: 318763
gagagaggguucucagcga

SEQ ID NO: 390754 - RNA, 19 nt, Artificial Sequence
  Description of Artificial Sequence: Synthetic oligonucleotide
  Antisense Strand to SEQ ID NO: 390753
ucgcugagaacccucucuc

SEQ ID NO: 390755 - RNA, 19 nt, Artificial Sequence
  Description of Artificial Sequence: Synthetic oligonucleotide
  Sense Strand Starting at position 916 of SEQ ID NO: 318871
aggagucuaggucagugau

SEQ ID NO: 390756 - RNA, 19 nt, Artificial Sequence
  Description of Artificial Sequence: Synthetic oligonucleotide
  Antisense Strand to SEQ ID NO: 390755
aucacugaccuagacuccu

SEQ ID NO: 390757 - RNA, 19 nt, Artificial Sequence
  Description of Artificial Sequence: Synthetic oligonucleotide
  Sense Strand Starting at position 916 of SEQ ID NO: 318921
uucccuguauguuccaaau

SEQ ID NO: 390758 - RNA, 19 nt, Artificial Sequence
  Description of Artificial Sequence: Synthetic oligonucleotide
  Antisense Strand to SEQ ID NO: 390757
auuuggaacauacagggaa

SEQ ID NO: 390759 - RNA, 19 nt, Artificial Sequence
  Description of Artificial Sequence: Synthetic oligonucleotide
  Sense Strand Starting at position 916 of SEQ ID NO: 318934
ccaaauuauugggcagauu

SEQ ID NO: 390760 - RNA, 19 nt, Artificial Sequence
  Description of Artificial Sequence: Synthetic oligonucleotide
  Antisense Strand to SEQ ID NO: 390759
aaucugcccaauaauuugg

SEQ ID NO: 390761 - RNA, 19 nt, Artificial Sequence
  Description of Artificial Sequence: Synthetic oligonucleotide
  Sense Strand Starting at position 916 of SEQ ID NO: 318946
gcagauuugcuuuguuccu

SEQ ID NO: 390762 - RNA, 19 nt, Artificial Sequence
  Description of Artificial Sequence: Synthetic oligonucleotide
  Antisense Strand to SEQ ID NO: 390761
aggaacaaagcaaaucugc

SEQ ID NO: 390763 - RNA, 19 nt, Artificial Sequence
  Description of Artificial Sequence: Synthetic oligonucleotide
  Sense Strand Starting at position 916 of SEQ ID NO: 318973
ugggaagcaucacugaguu

SEQ ID NO: 390764 - RNA, 19 nt, Artificial Sequence
  Description of Artificial Sequence: Synthetic oligonucleotide
  Antisense Strand to SEQ ID NO: 390763
aacucagugaugcuuccca

SEQ ID NO: 390765 - RNA, 19 nt, Artificial Sequence
  Description of Artificial Sequence: Synthetic oligonucleotide
  Sense Strand Starting at position 916 of SEQ ID NO: 319072
gaucguaugacauaaagug

SEQ ID NO: 390766 - RNA, 19 nt, Artificial Sequence
  Description of Artificial Sequence: Synthetic oligonucleotide
  Antisense Strand to SEQ ID NO: 390765
cacuuuaugucauacgauc

SEQ ID NO: 390767 - RNA, 19 nt, Artificial Sequence
  Description of Artificial Sequence: Synthetic oligonucleotide
  Sense Strand Starting at position 916 of SEQ ID NO: 319146
ugaagaaccuuggaaacau

SEQ ID NO: 390768 - RNA, 19 nt, Artificial Sequence
  Description of Artificial Sequence: Synthetic oligonucleotide
  Antisense Strand to SEQ ID NO: 390767
auguuuccaagguucuuca

SEQ ID NO: 390769 - RNA, 19 nt, Artificial Sequence
  Description of Artificial Sequence: Synthetic oligonucleotide
  Sense Strand Starting at position 917 of SEQ ID NO: 315263
gggacuauguuugucagga

SEQ ID NO: 390770 - RNA, 19 nt, Artificial Sequence
  Description of Artificial Sequence: Synthetic oligonucleotide
  Antisense Strand to SEQ ID NO: 390769
uccugacaaacauaguccc

SEQ ID NO: 390771 - RNA, 19 nt, Artificial Sequence
  Description of Artificial Sequence: Synthetic oligonucleotide
  Sense Strand Starting at position 917 of SEQ ID NO: 315264
ggacuauguuugucaggag

SEQ ID NO: 390772 - RNA, 19 nt, Artificial Sequence
  Description of Artificial Sequence: Synthetic oligonucleotide
  Antisense Strand to SEQ ID NO: 390771
cuccugacaaacauagucc

SEQ ID NO: 390773 - RNA, 19 nt, Artificial Sequence
  Description of Artificial Sequence: Synthetic oligonucleotide
  Sense Strand Starting at position 917 of SEQ ID NO: 315268
uauguuugucaggagcaag

SEQ ID NO: 390774 - RNA, 19 nt, Artificial Sequence
  Description of Artificial Sequence: Synthetic oligonucleotide
  Antisense Strand to SEQ ID NO: 390773
cuugcuccugacaaacaua

SEQ ID NO: 390775 - RNA, 19 nt, Artificial Sequence
  Description of Artificial Sequence: Synthetic oligonucleotide
  Sense Strand Starting at position 917 of SEQ ID NO: 315309
aagcaaaguuaugauuuga

SEQ ID NO: 390776 - RNA, 19 nt, Artificial Sequence
  Description of Artificial Sequence: Synthetic oligonucleotide
  Antisense Strand to SEQ ID NO: 390775
ucaaaucauaacuuugcuu

SEQ ID NO: 390777 - RNA, 19 nt, Artificial Sequence
  Description of Artificial Sequence: Synthetic oligonucleotide
  Sense Strand Starting at position 917 of SEQ ID NO: 315377
uccuuucucgcugaaacaa

SEQ ID NO: 390778 - RNA, 19 nt, Artificial Sequence
  Description of Artificial Sequence: Synthetic oligonucleotide
  Antisense Strand to SEQ ID NO: 390777
uuguuucagcgagaaagga

SEQ ID NO: 390779 - RNA, 19 nt, Artificial Sequence
  Description of Artificial Sequence: Synthetic oligonucleotide
  Sense Strand Starting at position 917 of SEQ ID NO: 315487
ccagaauguuaagcuacau

SEQ ID NO: 390780 - RNA, 19 nt, Artificial Sequence
  Description of Artificial Sequence: Synthetic oligonucleotide
  Antisense Strand to SEQ ID NO: 390779
auguagcuuaacauucugg

SEQ ID NO: 390781 - RNA, 19 nt, Artificial Sequence
  Description of Artificial Sequence: Synthetic oligonucleotide
  Sense Strand Starting at position 917 of SEQ ID NO: 315663
cccguucuccuagaaaucu

SEQ ID NO: 390782 - RNA, 19 nt, Artificial Sequence
  Description of Artificial Sequence: Synthetic oligonucleotide
  Antisense Strand to SEQ ID NO: 390781
agauuucuaggagaacggg

SEQ ID NO: 390783 - RNA, 19 nt, Artificial Sequence
  Description of Artificial Sequence: Synthetic oligonucleotide
  Sense Strand Starting at position 917 of SEQ ID NO: 315693
gagcuccuagauuguauaa

SEQ ID NO: 390784 - RNA, 19 nt, Artificial Sequence
  Description of Artificial Sequence: Synthetic oligonucleotide
  Antisense Strand to SEQ ID NO: 390783
uuauacaaucuaggagcuc

SEQ ID NO: 390785 - RNA, 19 nt, Artificial Sequence
  Description of Artificial Sequence: Synthetic oligonucleotide
  Sense Strand Starting at position 917 of SEQ ID NO: 315748
uuaaguucuucugccagag

SEQ ID NO: 390786 - RNA, 19 nt, Artificial Sequence
  Description of Artificial Sequence: Synthetic oligonucleotide
  Antisense Strand to SEQ ID NO: 390785
cucuggcagaagaacuuaa

SEQ ID NO: 390787 - RNA, 19 nt, Artificial Sequence
  Description of Artificial Sequence: Synthetic oligonucleotide
  Sense Strand Starting at position 917 of SEQ ID NO: 315752
guucuucugccagagguga

SEQ ID NO: 390788 - RNA, 19 nt, Artificial Sequence
  Description of Artificial Sequence: Synthetic oligonucleotide
  Antisense Strand to SEQ ID NO: 390787
ucaccucuggcagaagaac

SEQ ID NO: 390789 - RNA, 19 nt, Artificial Sequence
  Description of Artificial Sequence: Synthetic oligonucleotide
  Sense Strand Starting at position 917 of SEQ ID NO: 315754
ucuucugccagaggugaua

SEQ ID NO: 390790 - RNA, 19 nt, Artificial Sequence
  Description of Artificial Sequence: Synthetic oligonucleotide
  Antisense Strand to SEQ ID NO: 390789
uaucaccucuggcagaaga

SEQ ID NO: 390791 - RNA, 19 nt, Artificial Sequence
  Description of Artificial Sequence: Synthetic oligonucleotide
  Sense Strand Starting at position 917 of SEQ ID NO: 315756
uucugccagaggugauaaa

SEQ ID NO: 390792 - RNA, 19 nt, Artificial Sequence
  Description of Artificial Sequence: Synthetic oligonucleotide
  Antisense Strand to SEQ ID NO: 390791
uuuaucaccucuggcagaa

SEQ ID NO: 390793 - RNA, 19 nt, Artificial Sequence
  Description of Artificial Sequence: Synthetic oligonucleotide
  Sense Strand Starting at position 917 of SEQ ID NO: 315998
cuggguucuguuuacaaga

SEQ ID NO: 390794 - RNA, 19 nt, Artificial Sequence
  Description of Artificial Sequence: Synthetic oligonucleotide
  Antisense Strand to SEQ ID NO: 390793
ucuuguaaacagaacccag

SEQ ID NO: 390795 - RNA, 19 nt, Artificial Sequence
  Description of Artificial Sequence: Synthetic oligonucleotide
  Sense Strand Starting at position 917 of SEQ ID NO: 316015
gaaacuaaggccugagacu

SEQ ID NO: 390796 - RNA, 19 nt, Artificial Sequence
  Description of Artificial Sequence: Synthetic oligonucleotide
  Antisense Strand to SEQ ID NO: 390795
agucucaggccuuaguuuc

SEQ ID NO: 390797 - RNA, 19 nt, Artificial Sequence
  Description of Artificial Sequence: Synthetic oligonucleotide
  Sense Strand Starting at position 917 of SEQ ID NO: 316268
ccuuaagcuuuaccagagu

SEQ ID NO: 390798 - RNA, 19 nt, Artificial Sequence
  Description of Artificial Sequence: Synthetic oligonucleotide
  Antisense Strand to SEQ ID NO: 390797
acucugguaaagcuuaagg

SEQ ID NO: 390799 - RNA, 19 nt, Artificial Sequence
  Description of Artificial Sequence: Synthetic oligonucleotide
  Sense Strand Starting at position 917 of SEQ ID NO: 316353
cugguuuccaucgagaggu

SEQ ID NO: 390800 - RNA, 19 nt, Artificial Sequence
  Description of Artificial Sequence: Synthetic oligonucleotide
  Antisense Strand to SEQ ID NO: 390799
accucucgauggaaaccag

SEQ ID NO: 390801 - RNA, 19 nt, Artificial Sequence
  Description of Artificial Sequence: Synthetic oligonucleotide
  Sense Strand Starting at position 917 of SEQ ID NO: 316656
ggcauuuguuucucugcca

SEQ ID NO: 390802 - RNA, 19 nt, Artificial Sequence
  Description of Artificial Sequence: Synthetic oligonucleotide
  Antisense Strand to SEQ ID NO: 390801
uggcagagaaacaaaugcc

SEQ ID NO: 390803 - RNA, 19 nt, Artificial Sequence
  Description of Artificial Sequence: Synthetic oligonucleotide
  Sense Strand Starting at position 917 of SEQ ID NO: 317040
gccaguguuccuuugccua

SEQ ID NO: 390804 - RNA, 19 nt, Artificial Sequence
  Description of Artificial Sequence: Synthetic oligonucleotide
  Antisense Strand to SEQ ID NO: 390803
uaggcaaaggaacacuggc

SEQ ID NO: 390805 - RNA, 19 nt, Artificial Sequence
  Description of Artificial Sequence: Synthetic oligonucleotide
  Sense Strand Starting at position 917 of SEQ ID NO: 317447
ugcuguuugacagauucga

SEQ ID NO: 390806 - RNA, 19 nt, Artificial Sequence
  Description of Artificial Sequence: Synthetic oligonucleotide
  Antisense Strand to SEQ ID NO: 390805
ucgaaucugucaaacagca

SEQ ID NO: 390807 - RNA, 19 nt, Artificial Sequence
  Description of Artificial Sequence: Synthetic oligonucleotide
  Sense Strand Starting at position 917 of SEQ ID NO: 317464
gagucucuugcucggauuu

SEQ ID NO: 390808 - RNA, 19 nt, Artificial Sequence
  Description of Artificial Sequence: Synthetic oligonucleotide
  Antisense Strand to SEQ ID NO: 390807
aaauccgagcaagagacuc

SEQ ID NO: 390809 - RNA, 19 nt, Artificial Sequence
  Description of Artificial Sequence: Synthetic oligonucleotide
  Sense Strand Starting at position 917 of SEQ ID NO: 317465
agucucuugcucggauuua

SEQ ID NO: 390810 - RNA, 19 nt, Artificial Sequence
  Description of Artificial Sequence: Synthetic oligonucleotide
  Antisense Strand to SEQ ID NO: 390809
uaaauccgagcaagagacu

SEQ ID NO: 390811 - RNA, 19 nt, Artificial Sequence
  Description of Artificial Sequence: Synthetic oligonucleotide
  Sense Strand Starting at position 917 of SEQ ID NO: 317661
ccaagaaguugugugaauu

SEQ ID NO: 390812 - RNA, 19 nt, Artificial Sequence
  Description of Artificial Sequence: Synthetic oligonucleotide
  Antisense Strand to SEQ ID NO: 390811
aauucacacaacuucuugg

SEQ ID NO: 390813 - RNA, 19 nt, Artificial Sequence
  Description of Artificial Sequence: Synthetic oligonucleotide
  Sense Strand Starting at position 917 of SEQ ID NO: 317764
caauguacagcuuaaugga

SEQ ID NO: 390814 - RNA, 19 nt, Artificial Sequence
  Description of Artificial Sequence: Synthetic oligonucleotide
  Antisense Strand to SEQ ID NO: 390813
uccauuaagcuguacauug

SEQ ID NO: 390815 - RNA, 19 nt, Artificial Sequence
  Description of Artificial Sequence: Synthetic oligonucleotide
  Sense Strand Starting at position 917 of SEQ ID NO: 317825
uuaauaacaccguguaaua

SEQ ID NO: 390816 - RNA, 19 nt, Artificial Sequence
  Description of Artificial Sequence: Synthetic oligonucleotide
  Antisense Strand to SEQ ID NO: 390815
uauuacacgguguuauuaa

SEQ ID NO: 390817 - RNA, 19 nt, Artificial Sequence
  Description of Artificial Sequence: Synthetic oligonucleotide
  Sense Strand Starting at position 917 of SEQ ID NO: 317827
aauaacaccguguaauaug

SEQ ID NO: 390818 - RNA, 19 nt, Artificial Sequence
  Description of Artificial Sequence: Synthetic oligonucleotide
  Antisense Strand to SEQ ID NO: 390817
cauauuacacgguguuauu

SEQ ID NO: 390819 - RNA, 19 nt, Artificial Sequence
  Description of Artificial Sequence: Synthetic oligonucleotide
  Sense Strand Starting at position 917 of SEQ ID NO: 317866
ucauuaauagcuggaagga

SEQ ID NO: 390820 - RNA, 19 nt, Artificial Sequence
  Description of Artificial Sequence: Synthetic oligonucleotide
  Antisense Strand to SEQ ID NO: 390819
uccuuccagcuauuaauga

SEQ ID NO: 390821 - RNA, 19 nt, Artificial Sequence
  Description of Artificial Sequence: Synthetic oligonucleotide
  Sense Strand Starting at position 917 of SEQ ID NO: 317941
augugacagguccauaauc

SEQ ID NO: 390822 - RNA, 19 nt, Artificial Sequence
  Description of Artificial Sequence: Synthetic oligonucleotide
  Antisense Strand to SEQ ID NO: 390821
gauuauggaccugucacau

SEQ ID NO: 390823 - RNA, 19 nt, Artificial Sequence
  Description of Artificial Sequence: Synthetic oligonucleotide
  Sense Strand Starting at position 917 of SEQ ID NO: 317943
gugacagguccauaaucau

SEQ ID NO: 390824 - RNA, 19 nt, Artificial Sequence
  Description of Artificial Sequence: Synthetic oligonucleotide
  Antisense Strand to SEQ ID NO: 390823
augauuauggaccugucac

SEQ ID NO: 390825 - RNA, 19 nt, Artificial Sequence
  Description of Artificial Sequence: Synthetic oligonucleotide
  Sense Strand Starting at position 917 of SEQ ID NO: 318018
aauugaguaucuucguaaa

SEQ ID NO: 390826 - RNA, 19 nt, Artificial Sequence
  Description of Artificial Sequence: Synthetic oligonucleotide
  Antisense Strand to SEQ ID NO: 390825
uuuacgaagauacucaauu

SEQ ID NO: 390827 - RNA, 19 nt, Artificial Sequence
  Description of Artificial Sequence: Synthetic oligonucleotide
  Sense Strand Starting at position 917 of SEQ ID NO: 318106
gguugaauaccaugaguaa

SEQ ID NO: 390828 - RNA, 19 nt, Artificial Sequence
  Description of Artificial Sequence: Synthetic oligonucleotide
  Antisense Strand to SEQ ID NO: 390827
uuacucaugguauucaacc

SEQ ID NO: 390829 - RNA, 19 nt, Artificial Sequence
  Description of Artificial Sequence: Synthetic oligonucleotide
  Sense Strand Starting at position 917 of SEQ ID NO: 318281
augugcauuguacauauau

SEQ ID NO: 390830 - RNA, 19 nt, Artificial Sequence
  Description of Artificial Sequence: Synthetic oligonucleotide
  Antisense Strand to SEQ ID NO: 390829
auauauguacaaugcacau

SEQ ID NO: 390831 - RNA, 19 nt, Artificial Sequence
  Description of Artificial Sequence: Synthetic oligonucleotide
  Sense Strand Starting at position 917 of SEQ ID NO: 318318
guguguauagcacaaggaa

SEQ ID NO: 390832 - RNA, 19 nt, Artificial Sequence
  Description of Artificial Sequence: Synthetic oligonucleotide
  Antisense Strand to SEQ ID NO: 390831
uuccuugugcuauacacac

SEQ ID NO: 390833 - RNA, 19 nt, Artificial Sequence
  Description of Artificial Sequence: Synthetic oligonucleotide
  Sense Strand Starting at position 917 of SEQ ID NO: 318511
ugcauaugguaucuuauuu

SEQ ID NO: 390834 - RNA, 19 nt, Artificial Sequence
  Description of Artificial Sequence: Synthetic oligonucleotide
  Antisense Strand to SEQ ID NO: 390833
aaauaagauaccauaugca

SEQ ID NO: 390835 - RNA, 19 nt, Artificial Sequence
  Description of Artificial Sequence: Synthetic oligonucleotide
  Sense Strand Starting at position 917 of SEQ ID NO: 318668
gauucuugguuugucucaa

SEQ ID NO: 390836 - RNA, 19 nt, Artificial Sequence
  Description of Artificial Sequence: Synthetic oligonucleotide
  Antisense Strand to SEQ ID NO: 390835
uugagacaaaccaagaauc

SEQ ID NO: 390837 - RNA, 19 nt, Artificial Sequence
  Description of Artificial Sequence: Synthetic oligonucleotide
  Sense Strand Starting at position 917 of SEQ ID NO: 318775
cacaauacgugacuggaaa

SEQ ID NO: 390838 - RNA, 19 nt, Artificial Sequence
  Description of Artificial Sequence: Synthetic oligonucleotide
  Antisense Strand to SEQ ID NO: 390837
uuuccagucacguauugug

SEQ ID NO: 390839 - RNA, 19 nt, Artificial Sequence
  Description of Artificial Sequence: Synthetic oligonucleotide
  Sense Strand Starting at position 917 of SEQ ID NO: 318776
acaauacgugacuggaaau

SEQ ID NO: 390840 - RNA, 19 nt, Artificial Sequence
  Description of Artificial Sequence: Synthetic oligonucleotide
  Antisense Strand to SEQ ID NO: 390839
auuuccagucacguauugu

SEQ ID NO: 390841 - RNA, 19 nt, Artificial Sequence
  Description of Artificial Sequence: Synthetic oligonucleotide
  Sense Strand Starting at position 917 of SEQ ID NO: 318848
gggcuagagaguugccaau

SEQ ID NO: 390842 - RNA, 19 nt, Artificial Sequence
  Description of Artificial Sequence: Synthetic oligonucleotide
  Antisense Strand to SEQ ID NO: 390841
auuggcaacucucuagccc

SEQ ID NO: 390843 - RNA, 19 nt, Artificial Sequence
  Description of Artificial Sequence: Synthetic oligonucleotide
  Sense Strand Starting at position 917 of SEQ ID NO: 318876
uguauugaguacucagacu

SEQ ID NO: 390844 - RNA, 19 nt, Artificial Sequence
  Description of Artificial Sequence: Synthetic oligonucleotide
  Antisense Strand to SEQ ID NO: 390843
agucugaguacucaauaca

SEQ ID NO: 390845 - RNA, 19 nt, Artificial Sequence
  Description of Artificial Sequence: Synthetic oligonucleotide
  Sense Strand Starting at position 917 of SEQ ID NO: 318882
gaguacucagacuguacua

SEQ ID NO: 390846 - RNA, 19 nt, Artificial Sequence
  Description of Artificial Sequence: Synthetic oligonucleotide
  Antisense Strand to SEQ ID NO: 390845
uaguacagucugaguacuc

SEQ ID NO: 390847 - RNA, 19 nt, Artificial Sequence
  Description of Artificial Sequence: Synthetic oligonucleotide
  Sense Strand Starting at position 917 of SEQ ID NO: 319209
gagugaaacucugucaauc

SEQ ID NO: 390848 - RNA, 19 nt, Artificial Sequence
  Description of Artificial Sequence: Synthetic oligonucleotide
  Antisense Strand to SEQ ID NO: 390847
gauugacagaguuucacuc

SEQ ID NO: 390849 - RNA, 19 nt, Artificial Sequence
  Description of Artificial Sequence: Synthetic oligonucleotide
  Sense Strand Starting at position 918 of SEQ ID NO: 315257
ggcaguuaugcccauagaa

SEQ ID NO: 390850 - RNA, 19 nt, Artificial Sequence
  Description of Artificial Sequence: Synthetic oligonucleotide
  Antisense Strand to SEQ ID NO: 390849
uucuaugggcauaacugcc

SEQ ID NO: 390851 - RNA, 19 nt, Artificial Sequence
  Description of Artificial Sequence: Synthetic oligonucleotide
  Sense Strand Starting at position 918 of SEQ ID NO: 315332
gugggaaagguuuacagca

SEQ ID NO: 390852 - RNA, 19 nt, Artificial Sequence
  Description of Artificial Sequence: Synthetic oligonucleotide
  Antisense Strand to SEQ ID NO: 390851
ugcuguaaaccuuucccac

SEQ ID NO: 390853 - RNA, 19 nt, Artificial Sequence
  Description of Artificial Sequence: Synthetic oligonucleotide
  Sense Strand Starting at position 918 of SEQ ID NO: 315630
uugaguucuacaggagaua

SEQ ID NO: 390854 - RNA, 19 nt, Artificial Sequence
  Description of Artificial Sequence: Synthetic oligonucleotide
  Antisense Strand to SEQ ID NO: 390853
uaucuccuguagaacucaa

SEQ ID NO: 390855 - RNA, 19 nt, Artificial Sequence
  Description of Artificial Sequence: Synthetic oligonucleotide
  Sense Strand Starting at position 918 of SEQ ID NO: 315659
accuuaaaguagcugaaua

SEQ ID NO: 390856 - RNA, 19 nt, Artificial Sequence
  Description of Artificial Sequence: Synthetic oligonucleotide
  Antisense Strand to SEQ ID NO: 390855
uauucagcuacuuuaaggu

SEQ ID NO: 390857 - RNA, 19 nt, Artificial Sequence
  Description of Artificial Sequence: Synthetic oligonucleotide
  Sense Strand Starting at position 918 of SEQ ID NO: 315765
uggauacagugguuucagu

SEQ ID NO: 390858 - RNA, 19 nt, Artificial Sequence
  Description of Artificial Sequence: Synthetic oligonucleotide
  Antisense Strand to SEQ ID NO: 390857
acugaaaccacuguaucca

SEQ ID NO: 390859 - RNA, 19 nt, Artificial Sequence
  Description of Artificial Sequence: Synthetic oligonucleotide
  Sense Strand Starting at position 918 of SEQ ID NO: 315795
gcagcauuagaauagaauu

SEQ ID NO: 390860 - RNA, 19 nt, Artificial Sequence
  Description of Artificial Sequence: Synthetic oligonucleotide
  Antisense Strand to SEQ ID NO: 390859
aauucuauucuaaugcugc

SEQ ID NO: 390861 - RNA, 19 nt, Artificial Sequence
  Description of Artificial Sequence: Synthetic oligonucleotide
  Sense Strand Starting at position 918 of SEQ ID NO: 315806
auagaauuagcuggguaaa

SEQ ID NO: 390862 - RNA, 19 nt, Artificial Sequence
  Description of Artificial Sequence: Synthetic oligonucleotide
  Antisense Strand to SEQ ID NO: 390861
uuuacccagcuaauucuau

SEQ ID NO: 390863 - RNA, 19 nt, Artificial Sequence
  Description of Artificial Sequence: Synthetic oligonucleotide
  Sense Strand Starting at position 918 of SEQ ID NO: 315983
agauuauucugggucagaa

SEQ ID NO: 390864 - RNA, 19 nt, Artificial Sequence
  Description of Artificial Sequence: Synthetic oligonucleotide
  Antisense Strand to SEQ ID NO: 390863
uucugacccagaauaaucu

SEQ ID NO: 390865 - RNA, 19 nt, Artificial Sequence
  Description of Artificial Sequence: Synthetic oligonucleotide
  Sense Strand Starting at position 918 of SEQ ID NO: 316047
uuuguacaguccuugauuu

SEQ ID NO: 390866 - RNA, 19 nt, Artificial Sequence
  Description of Artificial Sequence: Synthetic oligonucleotide
  Antisense Strand to SEQ ID NO: 390865
aaaucaaggacuguacaaa

SEQ ID NO: 390867 - RNA, 19 nt, Artificial Sequence
  Description of Artificial Sequence: Synthetic oligonucleotide
  Sense Strand Starting at position 918 of SEQ ID NO: 316098
gaaacacugccauagguuu

SEQ ID NO: 390868 - RNA, 19 nt, Artificial Sequence
  Description of Artificial Sequence: Synthetic oligonucleotide
  Antisense Strand to SEQ ID NO: 390867
aaaccuauggcaguguuuc

SEQ ID NO: 390869 - RNA, 19 nt, Artificial Sequence
  Description of Artificial Sequence: Synthetic oligonucleotide
  Sense Strand Starting at position 918 of SEQ ID NO: 316210
agaaguaaccaccagucuu

SEQ ID NO: 390870 - RNA, 19 nt, Artificial Sequence
  Description of Artificial Sequence: Synthetic oligonucleotide
  Antisense Strand to SEQ ID NO: 390869
aagacuggugguuacuucu

SEQ ID NO: 390871 - RNA, 19 nt, Artificial Sequence
  Description of Artificial Sequence: Synthetic oligonucleotide
  Sense Strand Starting at position 918 of SEQ ID NO: 316223
agucuuuguuaucuacaua

SEQ ID NO: 390872 - RNA, 19 nt, Artificial Sequence
  Description of Artificial Sequence: Synthetic oligonucleotide
  Antisense Strand to SEQ ID NO: 390871
uauguagauaacaaagacu

SEQ ID NO: 390873 - RNA, 19 nt, Artificial Sequence
  Description of Artificial Sequence: Synthetic oligonucleotide
  Sense Strand Starting at position 918 of SEQ ID NO: 316347
uguguaugcacgcuaauau

SEQ ID NO: 390874 - RNA, 19 nt, Artificial Sequence
  Description of Artificial Sequence: Synthetic oligonucleotide
  Antisense Strand to SEQ ID NO: 390873
auauuagcgugcauacaca

SEQ ID NO: 390875 - RNA, 19 nt, Artificial Sequence
  Description of Artificial Sequence: Synthetic oligonucleotide
  Sense Strand Starting at position 918 of SEQ ID NO: 316413
cuaguuucucaaggauauu

SEQ ID NO: 390876 - RNA, 19 nt, Artificial Sequence
  Description of Artificial Sequence: Synthetic oligonucleotide
  Antisense Strand to SEQ ID NO: 390875
aauauccuugagaaacuag

SEQ ID NO: 390877 - RNA, 19 nt, Artificial Sequence
  Description of Artificial Sequence: Synthetic oligonucleotide
  Sense Strand Starting at position 918 of SEQ ID NO: 316484
uuguauuuguugucucuaa

SEQ ID NO: 390878 - RNA, 19 nt, Artificial Sequence
  Description of Artificial Sequence: Synthetic oligonucleotide
  Antisense Strand to SEQ ID NO: 390877
uuagagacaacaaauacaa

SEQ ID NO: 390879 - RNA, 19 nt, Artificial Sequence
  Description of Artificial Sequence: Synthetic oligonucleotide
  Sense Strand Starting at position 918 of SEQ ID NO: 316531
augugaguacuguacucca

SEQ ID NO: 390880 - RNA, 19 nt, Artificial Sequence
  Description of Artificial Sequence: Synthetic oligonucleotide
  Antisense Strand to SEQ ID NO: 390879
uggaguacaguacucacau

SEQ ID NO: 390881 - RNA, 19 nt, Artificial Sequence
  Description of Artificial Sequence: Synthetic oligonucleotide
  Sense Strand Starting at position 918 of SEQ ID NO: 316577
uuggaaucccucugcaaau

SEQ ID NO: 390882 - RNA, 19 nt, Artificial Sequence
  Description of Artificial Sequence: Synthetic oligonucleotide
  Antisense Strand to SEQ ID NO: 390881
auuugcagagggauuccaa

SEQ ID NO: 390883 - RNA, 19 nt, Artificial Sequence
  Description of Artificial Sequence: Synthetic oligonucleotide
  Sense Strand Starting at position 918 of SEQ ID NO: 316578
uggaaucccucugcaaaua

SEQ ID NO: 390884 - RNA, 19 nt, Artificial Sequence
  Description of Artificial Sequence: Synthetic oligonucleotide
  Antisense Strand to SEQ ID NO: 390883
uauuugcagagggauucca

SEQ ID NO: 390885 - RNA, 19 nt, Artificial Sequence
  Description of Artificial Sequence: Synthetic oligonucleotide
  Sense Strand Starting at position 918 of SEQ ID NO: 316602
cugcaaauagcugaauaga

SEQ ID NO: 390886 - RNA, 19 nt, Artificial Sequence
  Description of Artificial Sequence: Synthetic oligonucleotide
  Antisense Strand to SEQ ID NO: 390885
ucuauucagcuauuugcag

SEQ ID NO: 390887 - RNA, 19 nt, Artificial Sequence
  Description of Artificial Sequence: Synthetic oligonucleotide
  Sense Strand Starting at position 918 of SEQ ID NO: 316680
ugaguuaguucacuggaug

SEQ ID NO: 390888 - RNA, 19 nt, Artificial Sequence
  Description of Artificial Sequence: Synthetic oligonucleotide
  Antisense Strand to SEQ ID NO: 390887
cauccagugaacuaacuca

SEQ ID NO: 390889 - RNA, 19 nt, Artificial Sequence
  Description of Artificial Sequence: Synthetic oligonucleotide
  Sense Strand Starting at position 918 of SEQ ID NO: 316683
guuaguucacuggaugguu

SEQ ID NO: 390890 - RNA, 19 nt, Artificial Sequence
  Description of Artificial Sequence: Synthetic oligonucleotide
  Antisense Strand to SEQ ID NO: 390889
aaccauccagugaacuaac

SEQ ID NO: 390891 - RNA, 19 nt, Artificial Sequence
  Description of Artificial Sequence: Synthetic oligonucleotide
  Sense Strand Starting at position 918 of SEQ ID NO: 317244
ccacuacucuguguaccaa

SEQ ID NO: 390892 - RNA, 19 nt, Artificial Sequence
  Description of Artificial Sequence: Synthetic oligonucleotide
  Antisense Strand to SEQ ID NO: 390891
uugguacacagaguagugg

SEQ ID NO: 390893 - RNA, 19 nt, Artificial Sequence
  Description of Artificial Sequence: Synthetic oligonucleotide
  Sense Strand Starting at position 918 of SEQ ID NO: 317319
ucuuaaacucaggguaugu

SEQ ID NO: 390894 - RNA, 19 nt, Artificial Sequence
  Description of Artificial Sequence: Synthetic oligonucleotide
  Antisense Strand to SEQ ID NO: 390893
acauacccugaguuuaaga

SEQ ID NO: 390895 - RNA, 19 nt, Artificial Sequence
  Description of Artificial Sequence: Synthetic oligonucleotide
  Sense Strand Starting at position 918 of SEQ ID NO: 317588
aagaucuguugaucucaga

SEQ ID NO: 390896 - RNA, 19 nt, Artificial Sequence
  Description of Artificial Sequence: Synthetic oligonucleotide
  Antisense Strand to SEQ ID NO: 390895
ucugagaucaacagaucuu

SEQ ID NO: 390897 - RNA, 19 nt, Artificial Sequence
  Description of Artificial Sequence: Synthetic oligonucleotide
  Sense Strand Starting at position 918 of SEQ ID NO: 317685
uguucuuggaaguauuaag

SEQ ID NO: 390898 - RNA, 19 nt, Artificial Sequence
  Description of Artificial Sequence: Synthetic oligonucleotide
  Antisense Strand to SEQ ID NO: 390897
cuuaauacuuccaagaaca

SEQ ID NO: 390899 - RNA, 19 nt, Artificial Sequence
  Description of Artificial Sequence: Synthetic oligonucleotide
  Sense Strand Starting at position 918 of SEQ ID NO: 318107
guauuauguaaauagcugu

SEQ ID NO: 390900 - RNA, 19 nt, Artificial Sequence
  Description of Artificial Sequence: Synthetic oligonucleotide
  Antisense Strand to SEQ ID NO: 390899
acagcuauuuacauaauac

SEQ ID NO: 390901 - RNA, 19 nt, Artificial Sequence
  Description of Artificial Sequence: Synthetic oligonucleotide
  Sense Strand Starting at position 918 of SEQ ID NO: 318395
cuaauuuagugggaauuaa

SEQ ID NO: 390902 - RNA, 19 nt, Artificial Sequence
  Description of Artificial Sequence: Synthetic oligonucleotide
  Antisense Strand to SEQ ID NO: 390901
uuaauucccacuaaauuag

SEQ ID NO: 390903 - RNA, 19 nt, Artificial Sequence
  Description of Artificial Sequence: Synthetic oligonucleotide
  Sense Strand Starting at position 918 of SEQ ID NO: 318406
ggaauuaaauucuuugguu

SEQ ID NO: 390904 - RNA, 19 nt, Artificial Sequence
  Description of Artificial Sequence: Synthetic oligonucleotide
  Antisense Strand to SEQ ID NO: 390903
aaccaaagaauuuaauucc

SEQ ID NO: 390905 - RNA, 19 nt, Artificial Sequence
  Description of Artificial Sequence: Synthetic oligonucleotide
  Sense Strand Starting at position 918 of SEQ ID NO: 318502
uguauacauuaggcuuaua

SEQ ID NO: 390906 - RNA, 19 nt, Artificial Sequence
  Description of Artificial Sequence: Synthetic oligonucleotide
  Antisense Strand to SEQ ID NO: 390905
uauaagccuaauguauaca

SEQ ID NO: 390907 - RNA, 19 nt, Artificial Sequence
  Description of Artificial Sequence: Synthetic oligonucleotide
  Sense Strand Starting at position 918 of SEQ ID NO: 318505
auacauuaggcuuauaugu

SEQ ID NO: 390908 - RNA, 19 nt, Artificial Sequence
  Description of Artificial Sequence: Synthetic oligonucleotide
  Antisense Strand to SEQ ID NO: 390907
acauauaagccuaauguau

SEQ ID NO: 390909 - RNA, 19 nt, Artificial Sequence
  Description of Artificial Sequence: Synthetic oligonucleotide
  Sense Strand Starting at position 918 of SEQ ID NO: 318510
uuaggcuuauaugucuaaa

SEQ ID NO: 390910 - RNA, 19 nt, Artificial Sequence
  Description of Artificial Sequence: Synthetic oligonucleotide
  Antisense Strand to SEQ ID NO: 390909
uuuagacauauaagccuaa

SEQ ID NO: 390911 - RNA, 19 nt, Artificial Sequence
  Description of Artificial Sequence: Synthetic oligonucleotide
  Sense Strand Starting at position 918 of SEQ ID NO: 318513
ggcuuauaugucuaaagcu

SEQ ID NO: 390912 - RNA, 19 nt, Artificial Sequence
  Description of Artificial Sequence: Synthetic oligonucleotide
  Antisense Strand to SEQ ID NO: 390911
agcuuuagacauauaagcc

SEQ ID NO: 390913 - RNA, 19 nt, Artificial Sequence
  Description of Artificial Sequence: Synthetic oligonucleotide
  Sense Strand Starting at position 918 of SEQ ID NO: 318599
ugauacguacuaugauuga

SEQ ID NO: 390914 - RNA, 19 nt, Artificial Sequence
  Description of Artificial Sequence: Synthetic oligonucleotide
  Antisense Strand to SEQ ID NO: 390913
ucaaucauaguacguauca

SEQ ID NO: 390915 - RNA, 19 nt, Artificial Sequence
  Description of Artificial Sequence: Synthetic oligonucleotide
  Sense Strand Starting at position 918 of SEQ ID NO: 318602
uacguacuaugauugaaag

SEQ ID NO: 390916 - RNA, 19 nt, Artificial Sequence
  Description of Artificial Sequence: Synthetic oligonucleotide
  Antisense Strand to SEQ ID NO: 390915
cuuucaaucauaguacgua

SEQ ID NO: 390917 - RNA, 19 nt, Artificial Sequence
  Description of Artificial Sequence: Synthetic oligonucleotide
  Sense Strand Starting at position 918 of SEQ ID NO: 318603
acguacuaugauugaaaga

SEQ ID NO: 390918 - RNA, 19 nt, Artificial Sequence
  Description of Artificial Sequence: Synthetic oligonucleotide
  Antisense Strand to SEQ ID NO: 390917
ucuuucaaucauaguacgu

SEQ ID NO: 390919 - RNA, 19 nt, Artificial Sequence
  Description of Artificial Sequence: Synthetic oligonucleotide
  Sense Strand Starting at position 918 of SEQ ID NO: 318704
cauguuaauucuuugaggu

SEQ ID NO: 390920 - RNA, 19 nt, Artificial Sequence
  Description of Artificial Sequence: Synthetic oligonucleotide
  Antisense Strand to SEQ ID NO: 390919
accucaaagaauuaacaug

SEQ ID NO: 390921 - RNA, 19 nt, Artificial Sequence
  Description of Artificial Sequence: Synthetic oligonucleotide
  Sense Strand Starting at position 918 of SEQ ID NO: 318705
auguuaauucuuugaggug

SEQ ID NO: 390922 - RNA, 19 nt, Artificial Sequence
  Description of Artificial Sequence: Synthetic oligonucleotide
  Antisense Strand to SEQ ID NO: 390921
caccucaaagaauuaacau

SEQ ID NO: 390923 - RNA, 19 nt, Artificial Sequence
  Description of Artificial Sequence: Synthetic oligonucleotide
  Sense Strand Starting at position 918 of SEQ ID NO: 318938
uccugagaaugcucccuuu

SEQ ID NO: 390924 - RNA, 19 nt, Artificial Sequence
  Description of Artificial Sequence: Synthetic oligonucleotide
  Antisense Strand to SEQ ID NO: 390923
aaagggagcauucucagga

SEQ ID NO: 390925 - RNA, 19 nt, Artificial Sequence
  Description of Artificial Sequence: Synthetic oligonucleotide
  Sense Strand Starting at position 918 of SEQ ID NO: 318941
ugagaaugcucccuuuccu

SEQ ID NO: 390926 - RNA, 19 nt, Artificial Sequence
  Description of Artificial Sequence: Synthetic oligonucleotide
  Antisense Strand to SEQ ID NO: 390925
aggaaagggagcauucuca

SEQ ID NO: 390927 - RNA, 19 nt, Artificial Sequence
  Description of Artificial Sequence: Synthetic oligonucleotide
  Sense Strand Starting at position 918 of SEQ ID NO: 319020
gcuuccuguuuauuuaagu

SEQ ID NO: 390928 - RNA, 19 nt, Artificial Sequence
  Description of Artificial Sequence: Synthetic oligonucleotide
  Antisense Strand to SEQ ID NO: 390927
acuuaaauaaacaggaagc

SEQ ID NO: 390929 - RNA, 19 nt, Artificial Sequence
  Description of Artificial Sequence: Synthetic oligonucleotide
  Sense Strand Starting at position 919 of SEQ ID NO: 315339
augcacuguugucuacaaa

SEQ ID NO: 390930 - RNA, 19 nt, Artificial Sequence
  Description of Artificial Sequence: Synthetic oligonucleotide
  Antisense Strand to SEQ ID NO: 390929
uuuguagacaacagugcau

SEQ ID NO: 390931 - RNA, 19 nt, Artificial Sequence
  Description of Artificial Sequence: Synthetic oligonucleotide
  Sense Strand Starting at position 919 of SEQ ID NO: 315340
ugcacuguugucuacaaau

SEQ ID NO: 390932 - RNA, 19 nt, Artificial Sequence
  Description of Artificial Sequence: Synthetic oligonucleotide
  Antisense Strand to SEQ ID NO: 390931
auuuguagacaacagugca

SEQ ID NO: 390933 - RNA, 19 nt, Artificial Sequence
  Description of Artificial Sequence: Synthetic oligonucleotide
  Sense Strand Starting at position 919 of SEQ ID NO: 315367
ccagauugugucuaccaca

SEQ ID NO: 390934 - RNA, 19 nt, Artificial Sequence
  Description of Artificial Sequence: Synthetic oligonucleotide
  Antisense Strand to SEQ ID NO: 390933
ugugguagacacaaucugg

SEQ ID NO: 390935 - RNA, 19 nt, Artificial Sequence
  Description of Artificial Sequence: Synthetic oligonucleotide
  Sense Strand Starting at position 919 of SEQ ID NO: 315404
ccuggaauguuccuucuga

SEQ ID NO: 390936 - RNA, 19 nt, Artificial Sequence
  Description of Artificial Sequence: Synthetic oligonucleotide
  Antisense Strand to SEQ ID NO: 390935
ucagaaggaacauuccagg

SEQ ID NO: 390937 - RNA, 19 nt, Artificial Sequence
  Description of Artificial Sequence: Synthetic oligonucleotide
  Sense Strand Starting at position 919 of SEQ ID NO: 315405
cuggaauguuccuucugaa

SEQ ID NO: 390938 - RNA, 19 nt, Artificial Sequence
  Description of Artificial Sequence: Synthetic oligonucleotide
  Antisense Strand to SEQ ID NO: 390937
uucagaaggaacauuccag

SEQ ID NO: 390939 - RNA, 19 nt, Artificial Sequence
  Description of Artificial Sequence: Synthetic oligonucleotide
  Sense Strand Starting at position 919 of SEQ ID NO: 315433
aacuuuauagcguaaguuu

SEQ ID NO: 390940 - RNA, 19 nt, Artificial Sequence
  Description of Artificial Sequence: Synthetic oligonucleotide
  Antisense Strand to SEQ ID NO: 390939
aaacuuacgcuauaaaguu

SEQ ID NO: 390941 - RNA, 19 nt, Artificial Sequence
  Description of Artificial Sequence: Synthetic oligonucleotide
  Sense Strand Starting at position 919 of SEQ ID NO: 315466
uuggaaacgagcugaauaa

SEQ ID NO: 390942 - RNA, 19 nt, Artificial Sequence
  Description of Artificial Sequence: Synthetic oligonucleotide
  Antisense Strand to SEQ ID NO: 390941
uuauucagcucguuuccaa

SEQ ID NO: 390943 - RNA, 19 nt, Artificial Sequence
  Description of Artificial Sequence: Synthetic oligonucleotide
  Sense Strand Starting at position 919 of SEQ ID NO: 315484
aaaugcugagcauauguaa

SEQ ID NO: 390944 - RNA, 19 nt, Artificial Sequence
  Description of Artificial Sequence: Synthetic oligonucleotide
  Antisense Strand to SEQ ID NO: 390943
uuacauaugcucagcauuu

SEQ ID NO: 390945 - RNA, 19 nt, Artificial Sequence
  Description of Artificial Sequence: Synthetic oligonucleotide
  Sense Strand Starting at position 919 of SEQ ID NO: 315487
ugcugagcauauguaacaa

SEQ ID NO: 390946 - RNA, 19 nt, Artificial Sequence
  Description of Artificial Sequence: Synthetic oligonucleotide
  Antisense Strand to SEQ ID NO: 390945
uuguuacauaugcucagca

SEQ ID NO: 390947 - RNA, 19 nt, Artificial Sequence
  Description of Artificial Sequence: Synthetic oligonucleotide
  Sense Strand Starting at position 919 of SEQ ID NO: 315546
ucuggaauuugucagauaa

SEQ ID NO: 390948 - RNA, 19 nt, Artificial Sequence
  Description of Artificial Sequence: Synthetic oligonucleotide
  Antisense Strand to SEQ ID NO: 390947
uuaucugacaaauuccaga

SEQ ID NO: 390949 - RNA, 19 nt, Artificial Sequence
  Description of Artificial Sequence: Synthetic oligonucleotide
  Sense Strand Starting at position 919 of SEQ ID NO: 315548
uggaauuugucagauaaua

SEQ ID NO: 390950 - RNA, 19 nt, Artificial Sequence
  Description of Artificial Sequence: Synthetic oligonucleotide
  Antisense Strand to SEQ ID NO: 390949
uauuaucugacaaauucca

SEQ ID NO: 390951 - RNA, 19 nt, Artificial Sequence
  Description of Artificial Sequence: Synthetic oligonucleotide
  Sense Strand Starting at position 919 of SEQ ID NO: 315568
cagaguccuccagacgaua

SEQ ID NO: 390952 - RNA, 19 nt, Artificial Sequence
  Description of Artificial Sequence: Synthetic oligonucleotide
  Antisense Strand to SEQ ID NO: 390951
uaucgucuggaggacucug

SEQ ID NO: 390953 - RNA, 19 nt, Artificial Sequence
  Description of Artificial Sequence: Synthetic oligonucleotide
  Sense Strand Starting at position 919 of SEQ ID NO: 315571
aguccuccagacgauaaau

SEQ ID NO: 390954 - RNA, 19 nt, Artificial Sequence
  Description of Artificial Sequence: Synthetic oligonucleotide
  Antisense Strand to SEQ ID NO: 390953
auuuaucgucuggaggacu

SEQ ID NO: 390955 - RNA, 19 nt, Artificial Sequence
  Description of Artificial Sequence: Synthetic oligonucleotide
  Sense Strand Starting at position 919 of SEQ ID NO: 315771
gcucguuaagacuaauaca

SEQ ID NO: 390956 - RNA, 19 nt, Artificial Sequence
  Description of Artificial Sequence: Synthetic oligonucleotide
  Antisense Strand to SEQ ID NO: 390955
uguauuagucuuaacgagc

SEQ ID NO: 390957 - RNA, 19 nt, Artificial Sequence
  Description of Artificial Sequence: Synthetic oligonucleotide
  Sense Strand Starting at position 919 of SEQ ID NO: 315802
gccaaagccuagcuauaaa

SEQ ID NO: 390958 - RNA, 19 nt, Artificial Sequence
  Description of Artificial Sequence: Synthetic oligonucleotide
  Antisense Strand to SEQ ID NO: 390957
uuuauagcuaggcuuuggc

SEQ ID NO: 390959 - RNA, 19 nt, Artificial Sequence
  Description of Artificial Sequence: Synthetic oligonucleotide
  Sense Strand Starting at position 919 of SEQ ID NO: 315853
cguuacagaccauguauaa

SEQ ID NO: 390960 - RNA, 19 nt, Artificial Sequence
  Description of Artificial Sequence: Synthetic oligonucleotide
  Antisense Strand to SEQ ID NO: 390959
uuauacauggucuguaacg

SEQ ID NO: 390961 - RNA, 19 nt, Artificial Sequence
  Description of Artificial Sequence: Synthetic oligonucleotide
  Sense Strand Starting at position 919 of SEQ ID NO: 315869
uaaaguaaguaagcguaua

SEQ ID NO: 390962 - RNA, 19 nt, Artificial Sequence
  Description of Artificial Sequence: Synthetic oligonucleotide
  Antisense Strand to SEQ ID NO: 390961
uauacgcuuacuuacuuua

SEQ ID NO: 390963 - RNA, 19 nt, Artificial Sequence
  Description of Artificial Sequence: Synthetic oligonucleotide
  Sense Strand Starting at position 919 of SEQ ID NO: 315883
guauacguucuuuaaaugu

SEQ ID NO: 390964 - RNA, 19 nt, Artificial Sequence
  Description of Artificial Sequence: Synthetic oligonucleotide
  Antisense Strand to SEQ ID NO: 390963
acauuuaaagaacguauac

SEQ ID NO: 390965 - RNA, 19 nt, Artificial Sequence
  Description of Artificial Sequence: Synthetic oligonucleotide
  Sense Strand Starting at position 919 of SEQ ID NO: 315999
uuaauaaugcacuggucua

SEQ ID NO: 390966 - RNA, 19 nt, Artificial Sequence
  Description of Artificial Sequence: Synthetic oligonucleotide
  Antisense Strand to SEQ ID NO: 390965
uagaccagugcauuauuaa

SEQ ID NO: 390967 - RNA, 19 nt, Artificial Sequence
  Description of Artificial Sequence: Synthetic oligonucleotide
  Sense Strand Starting at position 919 of SEQ ID NO: 316361
uaacgcagugcuucucgaa

SEQ ID NO: 390968 - RNA, 19 nt, Artificial Sequence
  Description of Artificial Sequence: Synthetic oligonucleotide
  Antisense Strand to SEQ ID NO: 390967
uucgagaagcacugcguua

SEQ ID NO: 390969 - RNA, 19 nt, Artificial Sequence
  Description of Artificial Sequence: Synthetic oligonucleotide
  Sense Strand Starting at position 919 of SEQ ID NO: 316401
gcauuauauuaagcuggga

SEQ ID NO: 390970 - RNA, 19 nt, Artificial Sequence
  Description of Artificial Sequence: Synthetic oligonucleotide
  Antisense Strand to SEQ ID NO: 390969
ucccagcuuaauauaaugc

SEQ ID NO: 390971 - RNA, 19 nt, Artificial Sequence
  Description of Artificial Sequence: Synthetic oligonucleotide
  Sense Strand Starting at position 919 of SEQ ID NO: 316404
uuauauuaagcugggaauc

SEQ ID NO: 390972 - RNA, 19 nt, Artificial Sequence
  Description of Artificial Sequence: Synthetic oligonucleotide
  Antisense Strand to SEQ ID NO: 390971
gauucccagcuuaauauaa

SEQ ID NO: 390973 - RNA, 19 nt, Artificial Sequence
  Description of Artificial Sequence: Synthetic oligonucleotide
  Sense Strand Starting at position 919 of SEQ ID NO: 316564
cugaaaucucucuacucga

SEQ ID NO: 390974 - RNA, 19 nt, Artificial Sequence
  Description of Artificial Sequence: Synthetic oligonucleotide
  Antisense Strand to SEQ ID NO: 390973
ucgaguagagagauuucag

SEQ ID NO: 390975 - RNA, 19 nt, Artificial Sequence
  Description of Artificial Sequence: Synthetic oligonucleotide
  Sense Strand Starting at position 919 of SEQ ID NO: 316569
aucucucuacucgaaguuu

SEQ ID NO: 390976 - RNA, 19 nt, Artificial Sequence
  Description of Artificial Sequence: Synthetic oligonucleotide
  Antisense Strand to SEQ ID NO: 390975
aaacuucgaguagagagau

SEQ ID NO: 390977 - RNA, 19 nt, Artificial Sequence
  Description of Artificial Sequence: Synthetic oligonucleotide
  Sense Strand Starting at position 919 of SEQ ID NO: 316615
guggaaggcgugcaaucaa

SEQ ID NO: 390978 - RNA, 19 nt, Artificial Sequence
  Description of Artificial Sequence: Synthetic oligonucleotide
  Antisense Strand to SEQ ID NO: 390977
uugauugcacgccuuccac

SEQ ID NO: 390979 - RNA, 19 nt, Artificial Sequence
  Description of Artificial Sequence: Synthetic oligonucleotide
  Sense Strand Starting at position 919 of SEQ ID NO: 316622
gcgugcaaucaagaacagu

SEQ ID NO: 390980 - RNA, 19 nt, Artificial Sequence
  Description of Artificial Sequence: Synthetic oligonucleotide
  Antisense Strand to SEQ ID NO: 390979
acuguucuugauugcacgc

SEQ ID NO: 390981 - RNA, 19 nt, Artificial Sequence
  Description of Artificial Sequence: Synthetic oligonucleotide
  Sense Strand Starting at position 919 of SEQ ID NO: 316643
aggcaaccaccucgaaauu

SEQ ID NO: 390982 - RNA, 19 nt, Artificial Sequence
  Description of Artificial Sequence: Synthetic oligonucleotide
  Antisense Strand to SEQ ID NO: 390981
aauuucgaggugguugccu

SEQ ID NO: 390983 - RNA, 19 nt, Artificial Sequence
  Description of Artificial Sequence: Synthetic oligonucleotide
  Sense Strand Starting at position 919 of SEQ ID NO: 316644
ggcaaccaccucgaaauua

SEQ ID NO: 390984 - RNA, 19 nt, Artificial Sequence
  Description of Artificial Sequence: Synthetic oligonucleotide
  Antisense Strand to SEQ ID NO: 390983
uaauuucgaggugguugcc

SEQ ID NO: 390985 - RNA, 19 nt, Artificial Sequence
  Description of Artificial Sequence: Synthetic oligonucleotide
  Sense Strand Starting at position 919 of SEQ ID NO: 318330
uguggcaagaaguaaugua

SEQ ID NO: 390986 - RNA, 19 nt, Artificial Sequence
  Description of Artificial Sequence: Synthetic oligonucleotide
  Antisense Strand to SEQ ID NO: 390985
uacauuacuucuugccaca

SEQ ID NO: 390987 - RNA, 19 nt, Artificial Sequence
  Description of Artificial Sequence: Synthetic oligonucleotide
  Sense Strand Starting at position 919 of SEQ ID NO: 318337
agaaguaauguauacagca

SEQ ID NO: 390988 - RNA, 19 nt, Artificial Sequence
  Description of Artificial Sequence: Synthetic oligonucleotide
  Antisense Strand to SEQ ID NO: 390987
ugcuguauacauuacuucu

SEQ ID NO: 390989 - RNA, 19 nt, Artificial Sequence
  Description of Artificial Sequence: Synthetic oligonucleotide
  Sense Strand Starting at position 919 of SEQ ID NO: 318350
acagcaaagucauuaagag

SEQ ID NO: 390990 - RNA, 19 nt, Artificial Sequence
  Description of Artificial Sequence: Synthetic oligonucleotide
  Antisense Strand to SEQ ID NO: 390989
cucuuaaugacuuugcugu

SEQ ID NO: 390991 - RNA, 19 nt, Artificial Sequence
  Description of Artificial Sequence: Synthetic oligonucleotide
  Sense Strand Starting at position 919 of SEQ ID NO: 318359
ucauuaagagcucaagguu

SEQ ID NO: 390992 - RNA, 19 nt, Artificial Sequence
  Description of Artificial Sequence: Synthetic oligonucleotide
  Antisense Strand to SEQ ID NO: 390991
aaccuugagcucuuaauga

SEQ ID NO: 390993 - RNA, 19 nt, Artificial Sequence
  Description of Artificial Sequence: Synthetic oligonucleotide
  Sense Strand Starting at position 919 of SEQ ID NO: 318428
ugaaguaguuaccuaaacu

SEQ ID NO: 390994 - RNA, 19 nt, Artificial Sequence
  Description of Artificial Sequence: Synthetic oligonucleotide
  Antisense Strand to SEQ ID NO: 390993
aguuuagguaacuacuuca

SEQ ID NO: 390995 - RNA, 19 nt, Artificial Sequence
  Description of Artificial Sequence: Synthetic oligonucleotide
  Sense Strand Starting at position 919 of SEQ ID NO: 318508
ugaaauggcaaaugugaaa

SEQ ID NO: 390996 - RNA, 19 nt, Artificial Sequence
  Description of Artificial Sequence: Synthetic oligonucleotide
  Antisense Strand to SEQ ID NO: 390995
uuucacauuugccauuuca

SEQ ID NO: 390997 - RNA, 19 nt, Artificial Sequence
  Description of Artificial Sequence: Synthetic oligonucleotide
  Sense Strand Starting at position 919 of SEQ ID NO: 318538
gugcgugaaaccuggaaca

SEQ ID NO: 390998 - RNA, 19 nt, Artificial Sequence
  Description of Artificial Sequence: Synthetic oligonucleotide
  Antisense Strand to SEQ ID NO: 390997
uguuccagguuucacgcac

SEQ ID NO: 390999 - RNA, 19 nt, Artificial Sequence
  Description of Artificial Sequence: Synthetic oligonucleotide
  Sense Strand Starting at position 919 of SEQ ID NO: 318540
gcgugaaaccuggaacacu

SEQ ID NO: 391000 - RNA, 19 nt, Artificial Sequence
  Description of Artificial Sequence: Synthetic oligonucleotide
  Antisense Strand to SEQ ID NO: 390999
aguguuccagguuucacgc

SEQ ID NO: 391001 - RNA, 19 nt, Artificial Sequence
  Description of Artificial Sequence: Synthetic oligonucleotide
  Sense Strand Starting at position 919 of SEQ ID NO: 318578
uuaccacuguuagcauuau

SEQ ID NO: 391002 - RNA, 19 nt, Artificial Sequence
  Description of Artificial Sequence: Synthetic oligonucleotide
  Antisense Strand to SEQ ID NO: 391001
auaaugcuaacagugguaa

SEQ ID NO: 391003 - RNA, 19 nt, Artificial Sequence
  Description of Artificial Sequence: Synthetic oligonucleotide
  Sense Strand Starting at position 919 of SEQ ID NO: 318584
cuguuagcauuauuacaug

SEQ ID NO: 391004 - RNA, 19 nt, Artificial Sequence
  Description of Artificial Sequence: Synthetic oligonucleotide
  Antisense Strand to SEQ ID NO: 391003
cauguaauaaugcuaacag

SEQ ID NO: 391005 - RNA, 19 nt, Artificial Sequence
  Description of Artificial Sequence: Synthetic oligonucleotide
  Sense Strand Starting at position 919 of SEQ ID NO: 318604
cauaaucucccaggaggua

SEQ ID NO: 391006 - RNA, 19 nt, Artificial Sequence
  Description of Artificial Sequence: Synthetic oligonucleotide
  Antisense Strand to SEQ ID NO: 391005
uaccuccugggagauuaug

SEQ ID NO: 391007 - RNA, 19 nt, Artificial Sequence
  Description of Artificial Sequence: Synthetic oligonucleotide
  Sense Strand Starting at position 919 of SEQ ID NO: 319190
gcacaaagucauggaagga

SEQ ID NO: 391008 - RNA, 19 nt, Artificial Sequence
  Description of Artificial Sequence: Synthetic oligonucleotide
  Antisense Strand to SEQ ID NO: 391007
uccuuccaugacuuugugc

SEQ ID NO: 391009 - RNA, 19 nt, Artificial Sequence
  Description of Artificial Sequence: Synthetic oligonucleotide
  Sense Strand Starting at position 920 of SEQ ID NO: 315615
uucugaaucuugccaaguc

SEQ ID NO: 391010 - RNA, 19 nt, Artificial Sequence
  Description of Artificial Sequence: Synthetic oligonucleotide
  Antisense Strand to SEQ ID NO: 391009
gacuuggcaagauucagaa

SEQ ID NO: 391011 - RNA, 19 nt, Artificial Sequence
  Description of Artificial Sequence: Synthetic oligonucleotide
  Sense Strand Starting at position 920 of SEQ ID NO: 315677
aggccaauaaguuguaaga

SEQ ID NO: 391012 - RNA, 19 nt, Artificial Sequence
  Description of Artificial Sequence: Synthetic oligonucleotide
  Antisense Strand to SEQ ID NO: 391011
ucuuacaacuuauuggccu

SEQ ID NO: 391013 - RNA, 19 nt, Artificial Sequence
  Description of Artificial Sequence: Synthetic oligonucleotide
  Sense Strand Starting at position 920 of SEQ ID NO: 315697
gcaucaacgcauuaagaaa

SEQ ID NO: 391014 - RNA, 19 nt, Artificial Sequence
  Description of Artificial Sequence: Synthetic oligonucleotide
  Antisense Strand to SEQ ID NO: 391013
uuucuuaaugcguugaugc

SEQ ID NO: 391015 - RNA, 19 nt, Artificial Sequence
  Description of Artificial Sequence: Synthetic oligonucleotide
  Sense Strand Starting at position 920 of SEQ ID NO: 315738
auaagacagcuuuguuaac

SEQ ID NO: 391016 - RNA, 19 nt, Artificial Sequence
  Description of Artificial Sequence: Synthetic oligonucleotide
  Antisense Strand to SEQ ID NO: 391015
guuaacaaagcugucuuau

SEQ ID NO: 391017 - RNA, 19 nt, Artificial Sequence
  Description of Artificial Sequence: Synthetic oligonucleotide
  Sense Strand Starting at position 920 of SEQ ID NO: 315768
cccuguaauuuggaagaca

SEQ ID NO: 391018 - RNA, 19 nt, Artificial Sequence
  Description of Artificial Sequence: Synthetic oligonucleotide
  Antisense Strand to SEQ ID NO: 391017
ugucuuccaaauuacaggg

SEQ ID NO: 391019 - RNA, 19 nt, Artificial Sequence
  Description of Artificial Sequence: Synthetic oligonucleotide
  Sense Strand Starting at position 920 of SEQ ID NO: 315810
gucagauaacgcuaggugu

SEQ ID NO: 391020 - RNA, 19 nt, Artificial Sequence
  Description of Artificial Sequence: Synthetic oligonucleotide
  Antisense Strand to SEQ ID NO: 391019
acaccuagcguuaucugac

SEQ ID NO: 391021 - RNA, 19 nt, Artificial Sequence
  Description of Artificial Sequence: Synthetic oligonucleotide
  Sense Strand Starting at position 920 of SEQ ID NO: 315859
gagagcuauuggccuggaa

SEQ ID NO: 391022 - RNA, 19 nt, Artificial Sequence
  Description of Artificial Sequence: Synthetic oligonucleotide
  Antisense Strand to SEQ ID NO: 391021
uuccaggccaauagcucuc

SEQ ID NO: 391023 - RNA, 19 nt, Artificial Sequence
  Description of Artificial Sequence: Synthetic oligonucleotide
  Sense Strand Starting at position 920 of SEQ ID NO: 315861
gagcuauuggccuggaaac

SEQ ID NO: 391024 - RNA, 19 nt, Artificial Sequence
  Description of Artificial Sequence: Synthetic oligonucleotide
  Antisense Strand to SEQ ID NO: 391023
guuuccaggccaauagcuc

SEQ ID NO: 391025 - RNA, 19 nt, Artificial Sequence
  Description of Artificial Sequence: Synthetic oligonucleotide
  Sense Strand Starting at position 920 of SEQ ID NO: 315862
agcuauuggccuggaaacu

SEQ ID NO: 391026 - RNA, 19 nt, Artificial Sequence
  Description of Artificial Sequence: Synthetic oligonucleotide
  Antisense Strand to SEQ ID NO: 391025
aguuuccaggccaauagcu

SEQ ID NO: 391027 - RNA, 19 nt, Artificial Sequence
  Description of Artificial Sequence: Synthetic oligonucleotide
  Sense Strand Starting at position 920 of SEQ ID NO: 315871
ccuggaaacucuucuugag

SEQ ID NO: 391028 - RNA, 19 nt, Artificial Sequence
  Description of Artificial Sequence: Synthetic oligonucleotide
  Antisense Strand to SEQ ID NO: 391027
cucaagaagaguuuccagg

SEQ ID NO: 391029 - RNA, 19 nt, Artificial Sequence
  Description of Artificial Sequence: Synthetic oligonucleotide
  Sense Strand Starting at position 920 of SEQ ID NO: 315873
uggaaacucuucuugagca

SEQ ID NO: 391030 - RNA, 19 nt, Artificial Sequence
  Description of Artificial Sequence: Synthetic oligonucleotide
  Antisense Strand to SEQ ID NO: 391029
ugcucaagaagaguuucca

SEQ ID NO: 391031 - RNA, 19 nt, Artificial Sequence
  Description of Artificial Sequence: Synthetic oligonucleotide
  Sense Strand Starting at position 920 of SEQ ID NO: 315883
ucuugagcacuuuaugaug

SEQ ID NO: 391032 - RNA, 19 nt, Artificial Sequence
  Description of Artificial Sequence: Synthetic oligonucleotide
  Antisense Strand to SEQ ID NO: 391031
caucauaaagugcucaaga

SEQ ID NO: 391033 - RNA, 19 nt, Artificial Sequence
  Description of Artificial Sequence: Synthetic oligonucleotide
  Sense Strand Starting at position 920 of SEQ ID NO: 315904
gagaaucagccaugcagca

SEQ ID NO: 391034 - RNA, 19 nt, Artificial Sequence
  Description of Artificial Sequence: Synthetic oligonucleotide
  Antisense Strand to SEQ ID NO: 391033
ugcugcauggcugauucuc

SEQ ID NO: 391035 - RNA, 19 nt, Artificial Sequence
  Description of Artificial Sequence: Synthetic oligonucleotide
  Sense Strand Starting at position 920 of SEQ ID NO: 316043
ugagaugccuccucucuca

SEQ ID NO: 391036 - RNA, 19 nt, Artificial Sequence
  Description of Artificial Sequence: Synthetic oligonucleotide
  Antisense Strand to SEQ ID NO: 391035
ugagagaggaggcaucuca

SEQ ID NO: 391037 - RNA, 19 nt, Artificial Sequence
  Description of Artificial Sequence: Synthetic oligonucleotide
  Sense Strand Starting at position 920 of SEQ ID NO: 316184
ggacuuauuuaauaagaug

SEQ ID NO: 391038 - RNA, 19 nt, Artificial Sequence
  Description of Artificial Sequence: Synthetic oligonucleotide
  Antisense Strand to SEQ ID NO: 391037
caucuuauuaaauaagucc

SEQ ID NO: 391039 - RNA, 19 nt, Artificial Sequence
  Description of Artificial Sequence: Synthetic oligonucleotide
  Sense Strand Starting at position 920 of SEQ ID NO: 316249
cccguaaugccagcauguu

SEQ ID NO: 391040 - RNA, 19 nt, Artificial Sequence
  Description of Artificial Sequence: Synthetic oligonucleotide
  Antisense Strand to SEQ ID NO: 391039
aacaugcuggcauuacggg

SEQ ID NO: 391041 - RNA, 19 nt, Artificial Sequence
  Description of Artificial Sequence: Synthetic oligonucleotide
  Sense Strand Starting at position 920 of SEQ ID NO: 316329
guggaacugucucuacuaa

SEQ ID NO: 391042 - RNA, 19 nt, Artificial Sequence
  Description of Artificial Sequence: Synthetic oligonucleotide
  Antisense Strand to SEQ ID NO: 391041
uuaguagagacaguuccac

SEQ ID NO: 391043 - RNA, 19 nt, Artificial Sequence
  Description of Artificial Sequence: Synthetic oligonucleotide
  Sense Strand Starting at position 920 of SEQ ID NO: 316772
gcgcucuacaaaggagaaa

SEQ ID NO: 391044 - RNA, 19 nt, Artificial Sequence
  Description of Artificial Sequence: Synthetic oligonucleotide
  Antisense Strand to SEQ ID NO: 391043
uuucuccuuuguagagcgc

SEQ ID NO: 391045 - RNA, 19 nt, Artificial Sequence
  Description of Artificial Sequence: Synthetic oligonucleotide
  Sense Strand Starting at position 920 of SEQ ID NO: 316803
uccugcuggccucaagaua

SEQ ID NO: 391046 - RNA, 19 nt, Artificial Sequence
  Description of Artificial Sequence: Synthetic oligonucleotide
  Antisense Strand to SEQ ID NO: 391045
uaucuugaggccagcagga

SEQ ID NO: 391047 - RNA, 19 nt, Artificial Sequence
  Description of Artificial Sequence: Synthetic oligonucleotide
  Sense Strand Starting at position 920 of SEQ ID NO: 316846
cucaaaguuugguccacuu

SEQ ID NO: 391048 - RNA, 19 nt, Artificial Sequence
  Description of Artificial Sequence: Synthetic oligonucleotide
  Antisense Strand to SEQ ID NO: 391047
aaguggaccaaacuuugag

SEQ ID NO: 391049 - RNA, 19 nt, Artificial Sequence
  Description of Artificial Sequence: Synthetic oligonucleotide
  Sense Strand Starting at position 920 of SEQ ID NO: 316941
gacacucaugagcgagauu

SEQ ID NO: 391050 - RNA, 19 nt, Artificial Sequence
  Description of Artificial Sequence: Synthetic oligonucleotide
  Antisense Strand to SEQ ID NO: 391049
aaucucgcucaugaguguc

SEQ ID NO: 391051 - RNA, 19 nt, Artificial Sequence
  Description of Artificial Sequence: Synthetic oligonucleotide
  Sense Strand Starting at position 920 of SEQ ID NO: 316974
ggucauucuguacaaaggu

SEQ ID NO: 391052 - RNA, 19 nt, Artificial Sequence
  Description of Artificial Sequence: Synthetic oligonucleotide
  Antisense Strand to SEQ ID NO: 391051
accuuuguacagaaugacc

SEQ ID NO: 391053 - RNA, 19 nt, Artificial Sequence
  Description of Artificial Sequence: Synthetic oligonucleotide
  Sense Strand Starting at position 920 of SEQ ID NO: 316993
ggucuuagguuucccauca

SEQ ID NO: 391054 - RNA, 19 nt, Artificial Sequence
  Description of Artificial Sequence: Synthetic oligonucleotide
  Antisense Strand to SEQ ID NO: 391053
ugaugggaaaccuaagacc

SEQ ID NO: 391055 - RNA, 19 nt, Artificial Sequence
  Description of Artificial Sequence: Synthetic oligonucleotide
  Sense Strand Starting at position 920 of SEQ ID NO: 317058
gcaguuuacuaaccucaag

SEQ ID NO: 391056 - RNA, 19 nt, Artificial Sequence
  Description of Artificial Sequence: Synthetic oligonucleotide
  Antisense Strand to SEQ ID NO: 391055
cuugagguuaguaaacugc

SEQ ID NO: 391057 - RNA, 19 nt, Artificial Sequence
  Description of Artificial Sequence: Synthetic oligonucleotide
  Sense Strand Starting at position 920 of SEQ ID NO: 317359
ggucgcguuuagauuguca

SEQ ID NO: 391058 - RNA, 19 nt, Artificial Sequence
  Description of Artificial Sequence: Synthetic oligonucleotide
  Antisense Strand to SEQ ID NO: 391057
ugacaaucuaaacgcgacc

SEQ ID NO: 391059 - RNA, 19 nt, Artificial Sequence
  Description of Artificial Sequence: Synthetic oligonucleotide
  Sense Strand Starting at position 920 of SEQ ID NO: 317774
acgauaacuuggccuagga

SEQ ID NO: 391060 - RNA, 19 nt, Artificial Sequence
  Description of Artificial Sequence: Synthetic oligonucleotide
  Antisense Strand to SEQ ID NO: 391059
uccuaggccaaguuaucgu

SEQ ID NO: 391061 - RNA, 19 nt, Artificial Sequence
  Description of Artificial Sequence: Synthetic oligonucleotide
  Sense Strand Starting at position 920 of SEQ ID NO: 317916
acguaaacacguagucgua

SEQ ID NO: 391062 - RNA, 19 nt, Artificial Sequence
  Description of Artificial Sequence: Synthetic oligonucleotide
  Antisense Strand to SEQ ID NO: 391061
uacgacuacguguuuacgu

SEQ ID NO: 391063 - RNA, 19 nt, Artificial Sequence
  Description of Artificial Sequence: Synthetic oligonucleotide
  Sense Strand Starting at position 920 of SEQ ID NO: 318044
cuuucuguuguagacugaa

SEQ ID NO: 391064 - RNA, 19 nt, Artificial Sequence
  Description of Artificial Sequence: Synthetic oligonucleotide
  Antisense Strand to SEQ ID NO: 391063
uucagucuacaacagaaag

SEQ ID NO: 391065 - RNA, 19 nt, Artificial Sequence
  Description of Artificial Sequence: Synthetic oligonucleotide
  Sense Strand Starting at position 920 of SEQ ID NO: 318087
aucccaagauauccaggua

SEQ ID NO: 391066 - RNA, 19 nt, Artificial Sequence
  Description of Artificial Sequence: Synthetic oligonucleotide
  Antisense Strand to SEQ ID NO: 391065
uaccuggauaucuugggau

SEQ ID NO: 391067 - RNA, 19 nt, Artificial Sequence
  Description of Artificial Sequence: Synthetic oligonucleotide
  Sense Strand Starting at position 920 of SEQ ID NO: 318090
ccaagauauccagguacua

SEQ ID NO: 391068 - RNA, 19 nt, Artificial Sequence
  Description of Artificial Sequence: Synthetic oligonucleotide
  Antisense Strand to SEQ ID NO: 391067
uaguaccuggauaucuugg

SEQ ID NO: 391069 - RNA, 19 nt, Artificial Sequence
  Description of Artificial Sequence: Synthetic oligonucleotide
  Sense Strand Starting at position 920 of SEQ ID NO: 318102
gguacuaugccuggaaccu

SEQ ID NO: 391070 - RNA, 19 nt, Artificial Sequence
  Description of Artificial Sequence: Synthetic oligonucleotide
  Antisense Strand to SEQ ID NO: 391069
agguuccaggcauaguacc

SEQ ID NO: 391071 - RNA, 19 nt, Artificial Sequence
  Description of Artificial Sequence: Synthetic oligonucleotide
  Sense Strand Starting at position 920 of SEQ ID NO: 318120
ugugaagaguuaccuuaua

SEQ ID NO: 391072 - RNA, 19 nt, Artificial Sequence
  Description of Artificial Sequence: Synthetic oligonucleotide
  Antisense Strand to SEQ ID NO: 391071
uauaagguaacucuucaca

SEQ ID NO: 391073 - RNA, 19 nt, Artificial Sequence
  Description of Artificial Sequence: Synthetic oligonucleotide
  Sense Strand Starting at position 920 of SEQ ID NO: 318575
agucuuugagaucgaaauu

SEQ ID NO: 391074 - RNA, 19 nt, Artificial Sequence
  Description of Artificial Sequence: Synthetic oligonucleotide
  Antisense Strand to SEQ ID NO: 391073
aauuucgaucucaaagacu

SEQ ID NO: 391075 - RNA, 19 nt, Artificial Sequence
  Description of Artificial Sequence: Synthetic oligonucleotide
  Sense Strand Starting at position 920 of SEQ ID NO: 318576
gucuuugagaucgaaauua

SEQ ID NO: 391076 - RNA, 19 nt, Artificial Sequence
  Description of Artificial Sequence: Synthetic oligonucleotide
  Antisense Strand to SEQ ID NO: 391075
uaauuucgaucucaaagac

SEQ ID NO: 391077 - RNA, 19 nt, Artificial Sequence
  Description of Artificial Sequence: Synthetic oligonucleotide
  Sense Strand Starting at position 920 of SEQ ID NO: 318592
uuaggaucaugccauuuaa

SEQ ID NO: 391078 - RNA, 19 nt, Artificial Sequence
  Description of Artificial Sequence: Synthetic oligonucleotide
  Antisense Strand to SEQ ID NO: 391077
uuaaauggcaugauccuaa

SEQ ID NO: 391079 - RNA, 19 nt, Artificial Sequence
  Description of Artificial Sequence: Synthetic oligonucleotide
  Sense Strand Starting at position 920 of SEQ ID NO: 318777
uccagaggcuggguuaaau

SEQ ID NO: 391080 - RNA, 19 nt, Artificial Sequence
  Description of Artificial Sequence: Synthetic oligonucleotide
  Antisense Strand to SEQ ID NO: 391079
auuuaacccagccucugga

SEQ ID NO: 391081 - RNA, 19 nt, Artificial Sequence
  Description of Artificial Sequence: Synthetic oligonucleotide
  Sense Strand Starting at position 920 of SEQ ID NO: 318859
caguaagugcuccacagau

SEQ ID NO: 391082 - RNA, 19 nt, Artificial Sequence
  Description of Artificial Sequence: Synthetic oligonucleotide
  Antisense Strand to SEQ ID NO: 391081
aucuguggagcacuuacug

SEQ ID NO: 391083 - RNA, 19 nt, Artificial Sequence
  Description of Artificial Sequence: Synthetic oligonucleotide
  Sense Strand Starting at position 920 of SEQ ID NO: 318917
acuucagugggaggucaaa

SEQ ID NO: 391084 - RNA, 19 nt, Artificial Sequence
  Description of Artificial Sequence: Synthetic oligonucleotide
  Antisense Strand to SEQ ID NO: 391083
uuugaccucccacugaagu

SEQ ID NO: 391085 - RNA, 19 nt, Artificial Sequence
  Description of Artificial Sequence: Synthetic oligonucleotide
  Sense Strand Starting at position 920 of SEQ ID NO: 318992
gaggcuucuuacccucaga

SEQ ID NO: 391086 - RNA, 19 nt, Artificial Sequence
  Description of Artificial Sequence: Synthetic oligonucleotide
  Antisense Strand to SEQ ID NO: 391085
ucugaggguaagaagccuc

SEQ ID NO: 391087 - RNA, 19 nt, Artificial Sequence
  Description of Artificial Sequence: Synthetic oligonucleotide
  Sense Strand Starting at position 920 of SEQ ID NO: 319164
acucuuauuccuuaccgua

SEQ ID NO: 391088 - RNA, 19 nt, Artificial Sequence
  Description of Artificial Sequence: Synthetic oligonucleotide
  Antisense Strand to SEQ ID NO: 391087
uacgguaaggaauaagagu

SEQ ID NO: 391089 - RNA, 19 nt, Artificial Sequence
  Description of Artificial Sequence: Synthetic oligonucleotide
  Sense Strand Starting at position 921 of SEQ ID NO: 315367
gacugagaugcccgaugga

SEQ ID NO: 391090 - RNA, 19 nt, Artificial Sequence
  Description of Artificial Sequence: Synthetic oligonucleotide
  Antisense Strand to SEQ ID NO: 391089
uccaucgggcaucucaguc

SEQ ID NO: 391091 - RNA, 19 nt, Artificial Sequence
  Description of Artificial Sequence: Synthetic oligonucleotide
  Sense Strand Starting at position 921 of SEQ ID NO: 315431
gaaggagcauuugauggaa

SEQ ID NO: 391092 - RNA, 19 nt, Artificial Sequence
  Description of Artificial Sequence: Synthetic oligonucleotide
  Antisense Strand to SEQ ID NO: 391091
uuccaucaaaugcuccuuc

SEQ ID NO: 391093 - RNA, 19 nt, Artificial Sequence
  Description of Artificial Sequence: Synthetic oligonucleotide
  Sense Strand Starting at position 921 of SEQ ID NO: 315500
uaugguaauuaugucaaag

SEQ ID NO: 391094 - RNA, 19 nt, Artificial Sequence
  Description of Artificial Sequence: Synthetic oligonucleotide
  Antisense Strand to SEQ ID NO: 391093
cuuugacauaauuaccaua

SEQ ID NO: 391095 - RNA, 19 nt, Artificial Sequence
  Description of Artificial Sequence: Synthetic oligonucleotide
  Sense Strand Starting at position 921 of SEQ ID NO: 315517
aguugugacuuacucugga

SEQ ID NO: 391096 - RNA, 19 nt, Artificial Sequence
  Description of Artificial Sequence: Synthetic oligonucleotide
  Antisense Strand to SEQ ID NO: 391095
uccagaguaagucacaacu

SEQ ID NO: 391097 - RNA, 19 nt, Artificial Sequence
  Description of Artificial Sequence: Synthetic oligonucleotide
  Sense Strand Starting at position 921 of SEQ ID NO: 315658
guuuaagucucacugagau

SEQ ID NO: 391098 - RNA, 19 nt, Artificial Sequence
  Description of Artificial Sequence: Synthetic oligonucleotide
  Antisense Strand to SEQ ID NO: 391097
aucucagugagacuuaaac

SEQ ID NO: 391099 - RNA, 19 nt, Artificial Sequence
  Description of Artificial Sequence: Synthetic oligonucleotide
  Sense Strand Starting at position 921 of SEQ ID NO: 315664
gucucacugagaugguuua

SEQ ID NO: 391100 - RNA, 19 nt, Artificial Sequence
  Description of Artificial Sequence: Synthetic oligonucleotide
  Antisense Strand to SEQ ID NO: 391099
uaaaccaucucagugagac

SEQ ID NO: 391101 - RNA, 19 nt, Artificial Sequence
  Description of Artificial Sequence: Synthetic oligonucleotide
  Sense Strand Starting at position 921 of SEQ ID NO: 315665
ucucacugagaugguuuaa

SEQ ID NO: 391102 - RNA, 19 nt, Artificial Sequence
  Description of Artificial Sequence: Synthetic oligonucleotide
  Antisense Strand to SEQ ID NO: 391101
uuaaaccaucucagugaga

SEQ ID NO: 391103 - RNA, 19 nt, Artificial Sequence
  Description of Artificial Sequence: Synthetic oligonucleotide
  Sense Strand Starting at position 921 of SEQ ID NO: 315753
gcagucuaugucuacauau

SEQ ID NO: 391104 - RNA, 19 nt, Artificial Sequence
  Description of Artificial Sequence: Synthetic oligonucleotide
  Antisense Strand to SEQ ID NO: 391103
auauguagacauagacugc

SEQ ID NO: 391105 - RNA, 19 nt, Artificial Sequence
  Description of Artificial Sequence: Synthetic oligonucleotide
  Sense Strand Starting at position 921 of SEQ ID NO: 315755
agucuaugucuacauauuc

SEQ ID NO: 391106 - RNA, 19 nt, Artificial Sequence
  Description of Artificial Sequence: Synthetic oligonucleotide
  Antisense Strand to SEQ ID NO: 391105
gaauauguagacauagacu

SEQ ID NO: 391107 - RNA, 19 nt, Artificial Sequence
  Description of Artificial Sequence: Synthetic oligonucleotide
  Sense Strand Starting at position 921 of SEQ ID NO: 315794
ccugacugugcucauacau

SEQ ID NO: 391108 - RNA, 19 nt, Artificial Sequence
  Description of Artificial Sequence: Synthetic oligonucleotide
  Antisense Strand to SEQ ID NO: 391107
auguaugagcacagucagg

SEQ ID NO: 391109 - RNA, 19 nt, Artificial Sequence
  Description of Artificial Sequence: Synthetic oligonucleotide
  Sense Strand Starting at position 921 of SEQ ID NO: 315805
ucauacaugcauugauaug

SEQ ID NO: 391110 - RNA, 19 nt, Artificial Sequence
  Description of Artificial Sequence: Synthetic oligonucleotide
  Antisense Strand to SEQ ID NO: 391109
cauaucaaugcauguauga

SEQ ID NO: 391111 - RNA, 19 nt, Artificial Sequence
  Description of Artificial Sequence: Synthetic oligonucleotide
  Sense Strand Starting at position 921 of SEQ ID NO: 315812
ugcauugauaugggaagca

SEQ ID NO: 391112 - RNA, 19 nt, Artificial Sequence
  Description of Artificial Sequence: Synthetic oligonucleotide
  Antisense Strand to SEQ ID NO: 391111
ugcuucccauaucaaugca

SEQ ID NO: 391113 - RNA, 19 nt, Artificial Sequence
  Description of Artificial Sequence: Synthetic oligonucleotide
  Sense Strand Starting at position 921 of SEQ ID NO: 315846
ggaaauaaucuaugugccu

SEQ ID NO: 391114 - RNA, 19 nt, Artificial Sequence
  Description of Artificial Sequence: Synthetic oligonucleotide
  Antisense Strand to SEQ ID NO: 391113
aggcacauagauuauuucc

SEQ ID NO: 391115 - RNA, 19 nt, Artificial Sequence
  Description of Artificial Sequence: Synthetic oligonucleotide
  Sense Strand Starting at position 921 of SEQ ID NO: 316213
aucugaaagcagugucuaa

SEQ ID NO: 391116 - RNA, 19 nt, Artificial Sequence
  Description of Artificial Sequence: Synthetic oligonucleotide
  Antisense Strand to SEQ ID NO: 391115
uuagacacugcuuucagau

SEQ ID NO: 391117 - RNA, 19 nt, Artificial Sequence
  Description of Artificial Sequence: Synthetic oligonucleotide
  Sense Strand Starting at position 921 of SEQ ID NO: 316259
uuucuuuaccuggaagucu

SEQ ID NO: 391118 - RNA, 19 nt, Artificial Sequence
  Description of Artificial Sequence: Synthetic oligonucleotide
  Antisense Strand to SEQ ID NO: 391117
agacuuccagguaaagaaa

SEQ ID NO: 391119 - RNA, 19 nt, Artificial Sequence
  Description of Artificial Sequence: Synthetic oligonucleotide
  Sense Strand Starting at position 921 of SEQ ID NO: 316303
cccuaaugguuucugacau

SEQ ID NO: 391120 - RNA, 19 nt, Artificial Sequence
  Description of Artificial Sequence: Synthetic oligonucleotide
  Antisense Strand to SEQ ID NO: 391119
augucagaaaccauuaggg

SEQ ID NO: 391121 - RNA, 19 nt, Artificial Sequence
  Description of Artificial Sequence: Synthetic oligonucleotide
  Sense Strand Starting at position 921 of SEQ ID NO: 316310
gguuucugacaucaugugu

SEQ ID NO: 391122 - RNA, 19 nt, Artificial Sequence
  Description of Artificial Sequence: Synthetic oligonucleotide
  Antisense Strand to SEQ ID NO: 391121
acacaugaugucagaaacc

SEQ ID NO: 391123 - RNA, 19 nt, Artificial Sequence
  Description of Artificial Sequence: Synthetic oligonucleotide
  Sense Strand Starting at position 921 of SEQ ID NO: 316315
cugacaucauguguugaaa

SEQ ID NO: 391124 - RNA, 19 nt, Artificial Sequence
  Description of Artificial Sequence: Synthetic oligonucleotide
  Antisense Strand to SEQ ID NO: 391123
uuucaacacaugaugucag

SEQ ID NO: 391125 - RNA, 19 nt, Artificial Sequence
  Description of Artificial Sequence: Synthetic oligonucleotide
  Sense Strand Starting at position 921 of SEQ ID NO: 316356
ucagguauuuggucuguua

SEQ ID NO: 391126 - RNA, 19 nt, Artificial Sequence
  Description of Artificial Sequence: Synthetic oligonucleotide
  Antisense Strand to SEQ ID NO: 391125
uaacagaccaaauaccuga

SEQ ID NO: 391127 - RNA, 19 nt, Artificial Sequence
  Description of Artificial Sequence: Synthetic oligonucleotide
  Sense Strand Starting at position 921 of SEQ ID NO: 316475
ucccuagagcugugacaua

SEQ ID NO: 391128 - RNA, 19 nt, Artificial Sequence
  Description of Artificial Sequence: Synthetic oligonucleotide
  Antisense Strand to SEQ ID NO: 391127
uaugucacagcucuaggga

SEQ ID NO: 391129 - RNA, 19 nt, Artificial Sequence
  Description of Artificial Sequence: Synthetic oligonucleotide
  Sense Strand Starting at position 921 of SEQ ID NO: 316509
gcuuucuaaucagcauaga

SEQ ID NO: 391130 - RNA, 19 nt, Artificial Sequence
  Description of Artificial Sequence: Synthetic oligonucleotide
  Antisense Strand to SEQ ID NO: 391129
ucuaugcugauuagaaagc

SEQ ID NO: 391131 - RNA, 19 nt, Artificial Sequence
  Description of Artificial Sequence: Synthetic oligonucleotide
  Sense Strand Starting at position 921 of SEQ ID NO: 316602
gugcaaaggcccuagaucu

SEQ ID NO: 391132 - RNA, 19 nt, Artificial Sequence
  Description of Artificial Sequence: Synthetic oligonucleotide
  Antisense Strand to SEQ ID NO: 391131
agaucuagggccuuugcac

SEQ ID NO: 391133 - RNA, 19 nt, Artificial Sequence
  Description of Artificial Sequence: Synthetic oligonucleotide
  Sense Strand Starting at position 921 of SEQ ID NO: 316651
gcuguuuaauuugugaauu

SEQ ID NO: 391134 - RNA, 19 nt, Artificial Sequence
  Description of Artificial Sequence: Synthetic oligonucleotide
  Antisense Strand to SEQ ID NO: 391133
aauucacaaauuaaacagc

SEQ ID NO: 391135 - RNA, 19 nt, Artificial Sequence
  Description of Artificial Sequence: Synthetic oligonucleotide
  Sense Strand Starting at position 921 of SEQ ID NO: 316659
auuugugaauuagagcaaa

SEQ ID NO: 391136 - RNA, 19 nt, Artificial Sequence
  Description of Artificial Sequence: Synthetic oligonucleotide
  Antisense Strand to SEQ ID NO: 391135
uuugcucuaauucacaaau

SEQ ID NO: 391137 - RNA, 19 nt, Artificial Sequence
  Description of Artificial Sequence: Synthetic oligonucleotide
  Sense Strand Starting at position 921 of SEQ ID NO: 317274
cugugaugucagcaaguca

SEQ ID NO: 391138 - RNA, 19 nt, Artificial Sequence
  Description of Artificial Sequence: Synthetic oligonucleotide
  Antisense Strand to SEQ ID NO: 391137
ugacuugcugacaucacag

SEQ ID NO: 391139 - RNA, 19 nt, Artificial Sequence
  Description of Artificial Sequence: Synthetic oligonucleotide
  Sense Strand Starting at position 921 of SEQ ID NO: 317397
gaaggaagccuuugcugga

SEQ ID NO: 391140 - RNA, 19 nt, Artificial Sequence
  Description of Artificial Sequence: Synthetic oligonucleotide
  Antisense Strand to SEQ ID NO: 391139
uccagcaaaggcuuccuuc

SEQ ID NO: 391141 - RNA, 19 nt, Artificial Sequence
  Description of Artificial Sequence: Synthetic oligonucleotide
  Sense Strand Starting at position 921 of SEQ ID NO: 317402
aagccuuugcuggaugcaa

SEQ ID NO: 391142 - RNA, 19 nt, Artificial Sequence
  Description of Artificial Sequence: Synthetic oligonucleotide
  Antisense Strand to SEQ ID NO: 391141
uugcauccagcaaaggcuu

SEQ ID NO: 391143 - RNA, 19 nt, Artificial Sequence
  Description of Artificial Sequence: Synthetic oligonucleotide
  Sense Strand Starting at position 921 of SEQ ID NO: 317429
cuacguaaccuccaaauga

SEQ ID NO: 391144 - RNA, 19 nt, Artificial Sequence
  Description of Artificial Sequence: Synthetic oligonucleotide
  Antisense Strand to SEQ ID NO: 391143
ucauuuggagguuacguag

SEQ ID NO: 391145 - RNA, 19 nt, Artificial Sequence
  Description of Artificial Sequence: Synthetic oligonucleotide
  Sense Strand Starting at position 921 of SEQ ID NO: 317536
gguucagaucugggcacaa

SEQ ID NO: 391146 - RNA, 19 nt, Artificial Sequence
  Description of Artificial Sequence: Synthetic oligonucleotide
  Antisense Strand to SEQ ID NO: 391145
uugugcccagaucugaacc

SEQ ID NO: 391147 - RNA, 19 nt, Artificial Sequence
  Description of Artificial Sequence: Synthetic oligonucleotide
  Sense Strand Starting at position 921 of SEQ ID NO: 317628
aauuaaaugcugugucaag

SEQ ID NO: 391148 - RNA, 19 nt, Artificial Sequence
  Description of Artificial Sequence: Synthetic oligonucleotide
  Antisense Strand to SEQ ID NO: 391147
cuugacacagcauuuaauu

SEQ ID NO: 391149 - RNA, 19 nt, Artificial Sequence
  Description of Artificial Sequence: Synthetic oligonucleotide
  Sense Strand Starting at position 921 of SEQ ID NO: 317730
gagacuaugucaccuuuga

SEQ ID NO: 391150 - RNA, 19 nt, Artificial Sequence
  Description of Artificial Sequence: Synthetic oligonucleotide
  Antisense Strand to SEQ ID NO: 391149
ucaaaggugacauagucuc

SEQ ID NO: 391151 - RNA, 19 nt, Artificial Sequence
  Description of Artificial Sequence: Synthetic oligonucleotide
  Sense Strand Starting at position 921 of SEQ ID NO: 318198
aguaacuuaacuuguggga

SEQ ID NO: 391152 - RNA, 19 nt, Artificial Sequence
  Description of Artificial Sequence: Synthetic oligonucleotide
  Antisense Strand to SEQ ID NO: 391151
ucccacaaguuaaguuacu

SEQ ID NO: 391153 - RNA, 19 nt, Artificial Sequence
  Description of Artificial Sequence: Synthetic oligonucleotide
  Sense Strand Starting at position 921 of SEQ ID NO: 318202
acuuaacuugugggaucuu

SEQ ID NO: 391154 - RNA, 19 nt, Artificial Sequence
  Description of Artificial Sequence: Synthetic oligonucleotide
  Antisense Strand to SEQ ID NO: 391153
aagaucccacaaguuaagu

SEQ ID NO: 391155 - RNA, 19 nt, Artificial Sequence
  Description of Artificial Sequence: Synthetic oligonucleotide
  Sense Strand Starting at position 921 of SEQ ID NO: 318292
cucuaaaggcuagguauaa

SEQ ID NO: 391156 - RNA, 19 nt, Artificial Sequence
  Description of Artificial Sequence: Synthetic oligonucleotide
  Antisense Strand to SEQ ID NO: 391155
uuauaccuagccuuuagag

SEQ ID NO: 391157 - RNA, 19 nt, Artificial Sequence
  Description of Artificial Sequence: Synthetic oligonucleotide
  Sense Strand Starting at position 921 of SEQ ID NO: 318293
ucuaaaggcuagguauaaa

SEQ ID NO: 391158 - RNA, 19 nt, Artificial Sequence
  Description of Artificial Sequence: Synthetic oligonucleotide
  Antisense Strand to SEQ ID NO: 391157
uuuauaccuagccuuuaga

SEQ ID NO: 391159 - RNA, 19 nt, Artificial Sequence
  Description of Artificial Sequence: Synthetic oligonucleotide
  Sense Strand Starting at position 921 of SEQ ID NO: 318499
guauuuccauggucaucuu

SEQ ID NO: 391160 - RNA, 19 nt, Artificial Sequence
  Description of Artificial Sequence: Synthetic oligonucleotide
  Antisense Strand to SEQ ID NO: 391159
aagaugaccauggaaauac

SEQ ID NO: 391161 - RNA, 19 nt, Artificial Sequence
  Description of Artificial Sequence: Synthetic oligonucleotide
  Sense Strand Starting at position 921 of SEQ ID NO: 318624
aagcacugugagugaaagu

SEQ ID NO: 391162 - RNA, 19 nt, Artificial Sequence
  Description of Artificial Sequence: Synthetic oligonucleotide
  Antisense Strand to SEQ ID NO: 391161
acuuucacucacagugcuu

SEQ ID NO: 391163 - RNA, 19 nt, Artificial Sequence
  Description of Artificial Sequence: Synthetic oligonucleotide
  Sense Strand Starting at position 921 of SEQ ID NO: 318625
agcacugugagugaaagua

SEQ ID NO: 391164 - RNA, 19 nt, Artificial Sequence
  Description of Artificial Sequence: Synthetic oligonucleotide
  Antisense Strand to SEQ ID NO: 391163
uacuuucacucacagugcu

SEQ ID NO: 391165 - RNA, 19 nt, Artificial Sequence
  Description of Artificial Sequence: Synthetic oligonucleotide
  Sense Strand Starting at position 921 of SEQ ID NO: 318679
ggaauauuccaucaugcac

SEQ ID NO: 391166 - RNA, 19 nt, Artificial Sequence
  Description of Artificial Sequence: Synthetic oligonucleotide
  Antisense Strand to SEQ ID NO: 391165
gugcaugauggaauauucc

SEQ ID NO: 391167 - RNA, 19 nt, Artificial Sequence
  Description of Artificial Sequence: Synthetic oligonucleotide
  Sense Strand Starting at position 921 of SEQ ID NO: 318950
uggaauaacuucucaguaa

SEQ ID NO: 391168 - RNA, 19 nt, Artificial Sequence
  Description of Artificial Sequence: Synthetic oligonucleotide
  Antisense Strand to SEQ ID NO: 391167
uuacugagaaguuauucca

SEQ ID NO: 391169 - RNA, 19 nt, Artificial Sequence
  Description of Artificial Sequence: Synthetic oligonucleotide
  Sense Strand Starting at position 922 of SEQ ID NO: 315327
gagcgagauccugacuuua

SEQ ID NO: 391170 - RNA, 19 nt, Artificial Sequence
  Description of Artificial Sequence: Synthetic oligonucleotide
  Antisense Strand to SEQ ID NO: 391169
uaaagucaggaucucgcuc

SEQ ID NO: 391171 - RNA, 19 nt, Artificial Sequence
  Description of Artificial Sequence: Synthetic oligonucleotide
  Sense Strand Starting at position 922 of SEQ ID NO: 315329
gcgagauccugacuuuaaa

SEQ ID NO: 391172 - RNA, 19 nt, Artificial Sequence
  Description of Artificial Sequence: Synthetic oligonucleotide
  Antisense Strand to SEQ ID NO: 391171
uuuaaagucaggaucucgc

SEQ ID NO: 391173 - RNA, 19 nt, Artificial Sequence
  Description of Artificial Sequence: Synthetic oligonucleotide
  Sense Strand Starting at position 922 of SEQ ID NO: 315393
gagggacagucuccaacuu

SEQ ID NO: 391174 - RNA, 19 nt, Artificial Sequence
  Description of Artificial Sequence: Synthetic oligonucleotide
  Antisense Strand to SEQ ID NO: 391173
aaguuggagacugucccuc

SEQ ID NO: 391175 - RNA, 19 nt, Artificial Sequence
  Description of Artificial Sequence: Synthetic oligonucleotide
  Sense Strand Starting at position 922 of SEQ ID NO: 315431
uugcguacucuuggaguuu

SEQ ID NO: 391176 - RNA, 19 nt, Artificial Sequence
  Description of Artificial Sequence: Synthetic oligonucleotide
  Antisense Strand to SEQ ID NO: 391175
aaacuccaagaguacgcaa

SEQ ID NO: 391177 - RNA, 19 nt, Artificial Sequence
  Description of Artificial Sequence: Synthetic oligonucleotide
  Sense Strand Starting at position 922 of SEQ ID NO: 315432
ugcguacucuuggaguuua

SEQ ID NO: 391178 - RNA, 19 nt, Artificial Sequence
  Description of Artificial Sequence: Synthetic oligonucleotide
  Antisense Strand to SEQ ID NO: 391177
uaaacuccaagaguacgca

SEQ ID NO: 391179 - RNA, 19 nt, Artificial Sequence
  Description of Artificial Sequence: Synthetic oligonucleotide
  Sense Strand Starting at position 922 of SEQ ID NO: 315440
cuuggaguuuauugcaaac

SEQ ID NO: 391180 - RNA, 19 nt, Artificial Sequence
  Description of Artificial Sequence: Synthetic oligonucleotide
  Antisense Strand to SEQ ID NO: 391179
guuugcaauaaacuccaag

SEQ ID NO: 391181 - RNA, 19 nt, Artificial Sequence
  Description of Artificial Sequence: Synthetic oligonucleotide
  Sense Strand Starting at position 922 of SEQ ID NO: 315463
ggagaagguuuacuauuac

SEQ ID NO: 391182 - RNA, 19 nt, Artificial Sequence
  Description of Artificial Sequence: Synthetic oligonucleotide
  Antisense Strand to SEQ ID NO: 391181
guaauaguaaaccuucucc

SEQ ID NO: 391183 - RNA, 19 nt, Artificial Sequence
  Description of Artificial Sequence: Synthetic oligonucleotide
  Sense Strand Starting at position 922 of SEQ ID NO: 315469
gguuuacuauuacuaaaug

SEQ ID NO: 391184 - RNA, 19 nt, Artificial Sequence
  Description of Artificial Sequence: Synthetic oligonucleotide
  Antisense Strand to SEQ ID NO: 391183
cauuuaguaauaguaaacc

SEQ ID NO: 391185 - RNA, 19 nt, Artificial Sequence
  Description of Artificial Sequence: Synthetic oligonucleotide
  Sense Strand Starting at position 922 of SEQ ID NO: 315546
cugggauccuuuccuuuaa

SEQ ID NO: 391186 - RNA, 19 nt, Artificial Sequence
  Description of Artificial Sequence: Synthetic oligonucleotide
  Antisense Strand to SEQ ID NO: 391185
uuaaaggaaaggaucccag

SEQ ID NO: 391187 - RNA, 19 nt, Artificial Sequence
  Description of Artificial Sequence: Synthetic oligonucleotide
  Sense Strand Starting at position 922 of SEQ ID NO: 315548
gggauccuuuccuuuaaag

SEQ ID NO: 391188 - RNA, 19 nt, Artificial Sequence
  Description of Artificial Sequence: Synthetic oligonucleotide
  Antisense Strand to SEQ ID NO: 391187
cuuuaaaggaaaggauccc

SEQ ID NO: 391189 - RNA, 19 nt, Artificial Sequence
  Description of Artificial Sequence: Synthetic oligonucleotide
  Sense Strand Starting at position 922 of SEQ ID NO: 315588
agaauauaguuacuggguu

SEQ ID NO: 391190 - RNA, 19 nt, Artificial Sequence
  Description of Artificial Sequence: Synthetic oligonucleotide
  Antisense Strand to SEQ ID NO: 391189
aacccaguaacuauauucu

SEQ ID NO: 391191 - RNA, 19 nt, Artificial Sequence
  Description of Artificial Sequence: Synthetic oligonucleotide
  Sense Strand Starting at position 922 of SEQ ID NO: 315589
gaauauaguuacuggguuu

SEQ ID NO: 391192 - RNA, 19 nt, Artificial Sequence
  Description of Artificial Sequence: Synthetic oligonucleotide
  Antisense Strand to SEQ ID NO: 391191
aaacccaguaacuauauuc

SEQ ID NO: 391193 - RNA, 19 nt, Artificial Sequence
  Description of Artificial Sequence: Synthetic oligonucleotide
  Sense Strand Starting at position 922 of SEQ ID NO: 315985
agcgauauuuccuccucag

SEQ ID NO: 391194 - RNA, 19 nt, Artificial Sequence
  Description of Artificial Sequence: Synthetic oligonucleotide
  Antisense Strand to SEQ ID NO: 391193
cugaggaggaaauaucgcu

SEQ ID NO: 391195 - RNA, 19 nt, Artificial Sequence
  Description of Artificial Sequence: Synthetic oligonucleotide
  Sense Strand Starting at position 922 of SEQ ID NO: 316112
uaggaauauucccagggac

SEQ ID NO: 391196 - RNA, 19 nt, Artificial Sequence
  Description of Artificial Sequence: Synthetic oligonucleotide
  Antisense Strand to SEQ ID NO: 391195
gucccugggaauauuccua

SEQ ID NO: 391197 - RNA, 19 nt, Artificial Sequence
  Description of Artificial Sequence: Synthetic oligonucleotide
  Sense Strand Starting at position 922 of SEQ ID NO: 316126
gggaccauguuugaagaaa

SEQ ID NO: 391198 - RNA, 19 nt, Artificial Sequence
  Description of Artificial Sequence: Synthetic oligonucleotide
  Antisense Strand to SEQ ID NO: 391197
uuucuucaaacaugguccc

SEQ ID NO: 391199 - RNA, 19 nt, Artificial Sequence
  Description of Artificial Sequence: Synthetic oligonucleotide
  Sense Strand Starting at position 922 of SEQ ID NO: 316189
uuuaauacacuucggcaaa

SEQ ID NO: 391200 - RNA, 19 nt, Artificial Sequence
  Description of Artificial Sequence: Synthetic oligonucleotide
  Antisense Strand to SEQ ID NO: 391199
uuugccgaaguguauuaaa

SEQ ID NO: 391201 - RNA, 19 nt, Artificial Sequence
  Description of Artificial Sequence: Synthetic oligonucleotide
  Sense Strand Starting at position 922 of SEQ ID NO: 316225
gaugaaacuuugugacaaa

SEQ ID NO: 391202 - RNA, 19 nt, Artificial Sequence
  Description of Artificial Sequence: Synthetic oligonucleotide
  Antisense Strand to SEQ ID NO: 391201
uuugucacaaaguuucauc

SEQ ID NO: 391203 - RNA, 19 nt, Artificial Sequence
  Description of Artificial Sequence: Synthetic oligonucleotide
  Sense Strand Starting at position 922 of SEQ ID NO: 316226
augaaacuuugugacaaac

SEQ ID NO: 391204 - RNA, 19 nt, Artificial Sequence
  Description of Artificial Sequence: Synthetic oligonucleotide
  Antisense Strand to SEQ ID NO: 391203
guuugucacaaaguuucau

SEQ ID NO: 391205 - RNA, 19 nt, Artificial Sequence
  Description of Artificial Sequence: Synthetic oligonucleotide
  Sense Strand Starting at position 922 of SEQ ID NO: 316241
aaacgcaacuguuaaaugu

SEQ ID NO: 391206 - RNA, 19 nt, Artificial Sequence
  Description of Artificial Sequence: Synthetic oligonucleotide
  Antisense Strand to SEQ ID NO: 391205
acauuuaacaguugcguuu

SEQ ID NO: 391207 - RNA, 19 nt, Artificial Sequence
  Description of Artificial Sequence: Synthetic oligonucleotide
  Sense Strand Starting at position 922 of SEQ ID NO: 316249
cuguuaaauguaggugaug

SEQ ID NO: 391208 - RNA, 19 nt, Artificial Sequence
  Description of Artificial Sequence: Synthetic oligonucleotide
  Antisense Strand to SEQ ID NO: 391207
caucaccuacauuuaacag

SEQ ID NO: 391209 - RNA, 19 nt, Artificial Sequence
  Description of Artificial Sequence: Synthetic oligonucleotide
  Sense Strand Starting at position 922 of SEQ ID NO: 316254
aaauguaggugauggcaua

SEQ ID NO: 391210 - RNA, 19 nt, Artificial Sequence
  Description of Artificial Sequence: Synthetic oligonucleotide
  Antisense Strand to SEQ ID NO: 391209
uaugccaucaccuacauuu

SEQ ID NO: 391211 - RNA, 19 nt, Artificial Sequence
  Description of Artificial Sequence: Synthetic oligonucleotide
  Sense Strand Starting at position 922 of SEQ ID NO: 316392
ggaugagaacgcuguuguc

SEQ ID NO: 391212 - RNA, 19 nt, Artificial Sequence
  Description of Artificial Sequence: Synthetic oligonucleotide
  Antisense Strand to SEQ ID NO: 391211
gacaacagcguucucaucc

SEQ ID NO: 391213 - RNA, 19 nt, Artificial Sequence
  Description of Artificial Sequence: Synthetic oligonucleotide
  Sense Strand Starting at position 922 of SEQ ID NO: 316398
gaacgcuguugucuucgaa

SEQ ID NO: 391214 - RNA, 19 nt, Artificial Sequence
  Description of Artificial Sequence: Synthetic oligonucleotide
  Antisense Strand to SEQ ID NO: 391213
uucgaagacaacagcguuc

SEQ ID NO: 391215 - RNA, 19 nt, Artificial Sequence
  Description of Artificial Sequence: Synthetic oligonucleotide
  Sense Strand Starting at position 922 of SEQ ID NO: 316426
ggugaagggucuuaagcaa

SEQ ID NO: 391216 - RNA, 19 nt, Artificial Sequence
  Description of Artificial Sequence: Synthetic oligonucleotide
  Antisense Strand to SEQ ID NO: 391215
uugcuuaagacccuucacc

SEQ ID NO: 391217 - RNA, 19 nt, Artificial Sequence
  Description of Artificial Sequence: Synthetic oligonucleotide
  Sense Strand Starting at position 922 of SEQ ID NO: 316491
aaggcuggaucugacaaau

SEQ ID NO: 391218 - RNA, 19 nt, Artificial Sequence
  Description of Artificial Sequence: Synthetic oligonucleotide
  Antisense Strand to SEQ ID NO: 391217
auuugucagauccagccuu

SEQ ID NO: 391219 - RNA, 19 nt, Artificial Sequence
  Description of Artificial Sequence: Synthetic oligonucleotide
  Sense Strand Starting at position 922 of SEQ ID NO: 316577
gccggugucucagggaaac

SEQ ID NO: 391220 - RNA, 19 nt, Artificial Sequence
  Description of Artificial Sequence: Synthetic oligonucleotide
  Antisense Strand to SEQ ID NO: 391219
guuucccugagacaccggc

SEQ ID NO: 391221 - RNA, 19 nt, Artificial Sequence
  Description of Artificial Sequence: Synthetic oligonucleotide
  Sense Strand Starting at position 922 of SEQ ID NO: 316884
gaaguacuccacugcgaau

SEQ ID NO: 391222 - RNA, 19 nt, Artificial Sequence
  Description of Artificial Sequence: Synthetic oligonucleotide
  Antisense Strand to SEQ ID NO: 391221
auucgcaguggaguacuuc

SEQ ID NO: 391223 - RNA, 19 nt, Artificial Sequence
  Description of Artificial Sequence: Synthetic oligonucleotide
  Sense Strand Starting at position 922 of SEQ ID NO: 316896
ugcgaauucgacgagguca

SEQ ID NO: 391224 - RNA, 19 nt, Artificial Sequence
  Description of Artificial Sequence: Synthetic oligonucleotide
  Antisense Strand to SEQ ID NO: 391223
ugaccucgucgaauucgca

SEQ ID NO: 391225 - RNA, 19 nt, Artificial Sequence
  Description of Artificial Sequence: Synthetic oligonucleotide
  Sense Strand Starting at position 922 of SEQ ID NO: 317792
ugagaugucaaacggguaa

SEQ ID NO: 391226 - RNA, 19 nt, Artificial Sequence
  Description of Artificial Sequence: Synthetic oligonucleotide
  Antisense Strand to SEQ ID NO: 391225
uuacccguuugacaucuca

SEQ ID NO: 391227 - RNA, 19 nt, Artificial Sequence
  Description of Artificial Sequence: Synthetic oligonucleotide
  Sense Strand Starting at position 922 of SEQ ID NO: 317804
cggguaaggccuuguagga

SEQ ID NO: 391228 - RNA, 19 nt, Artificial Sequence
  Description of Artificial Sequence: Synthetic oligonucleotide
  Antisense Strand to SEQ ID NO: 391227
uccuacaaggccuuacccg

SEQ ID NO: 391229 - RNA, 19 nt, Artificial Sequence
  Description of Artificial Sequence: Synthetic oligonucleotide
  Sense Strand Starting at position 922 of SEQ ID NO: 317821
gaaguaggcguuugaauga

SEQ ID NO: 391230 - RNA, 19 nt, Artificial Sequence
  Description of Artificial Sequence: Synthetic oligonucleotide
  Antisense Strand to SEQ ID NO: 391229
ucauucaaacgccuacuuc

SEQ ID NO: 391231 - RNA, 19 nt, Artificial Sequence
  Description of Artificial Sequence: Synthetic oligonucleotide
  Sense Strand Starting at position 922 of SEQ ID NO: 317826
aggcguuugaaugagauca

SEQ ID NO: 391232 - RNA, 19 nt, Artificial Sequence
  Description of Artificial Sequence: Synthetic oligonucleotide
  Antisense Strand to SEQ ID NO: 391231
ugaucucauucaaacgccu

SEQ ID NO: 391233 - RNA, 19 nt, Artificial Sequence
  Description of Artificial Sequence: Synthetic oligonucleotide
  Sense Strand Starting at position 922 of SEQ ID NO: 317828
gcguuugaaugagaucaua

SEQ ID NO: 391234 - RNA, 19 nt, Artificial Sequence
  Description of Artificial Sequence: Synthetic oligonucleotide
  Antisense Strand to SEQ ID NO: 391233
uaugaucucauucaaacgc

SEQ ID NO: 391235 - RNA, 19 nt, Artificial Sequence
  Description of Artificial Sequence: Synthetic oligonucleotide
  Sense Strand Starting at position 922 of SEQ ID NO: 317896
aaauguguacagugagaaa

SEQ ID NO: 391236 - RNA, 19 nt, Artificial Sequence
  Description of Artificial Sequence: Synthetic oligonucleotide
  Antisense Strand to SEQ ID NO: 391235
uuucucacuguacacauuu

SEQ ID NO: 391237 - RNA, 19 nt, Artificial Sequence
  Description of Artificial Sequence: Synthetic oligonucleotide
  Sense Strand Starting at position 922 of SEQ ID NO: 318033
ggucaacacugcuugauga

SEQ ID NO: 391238 - RNA, 19 nt, Artificial Sequence
  Description of Artificial Sequence: Synthetic oligonucleotide
  Antisense Strand to SEQ ID NO: 391237
ucaucaagcaguguugacc

SEQ ID NO: 391239 - RNA, 19 nt, Artificial Sequence
  Description of Artificial Sequence: Synthetic oligonucleotide
  Sense Strand Starting at position 922 of SEQ ID NO: 318034
gucaacacugcuugaugaa

SEQ ID NO: 391240 - RNA, 19 nt, Artificial Sequence
  Description of Artificial Sequence: Synthetic oligonucleotide
  Antisense Strand to SEQ ID NO: 391239
uucaucaagcaguguugac

SEQ ID NO: 391241 - RNA, 19 nt, Artificial Sequence
  Description of Artificial Sequence: Synthetic oligonucleotide
  Sense Strand Starting at position 922 of SEQ ID NO: 318037
aacacugcuugaugaaguu

SEQ ID NO: 391242 - RNA, 19 nt, Artificial Sequence
  Description of Artificial Sequence: Synthetic oligonucleotide
  Antisense Strand to SEQ ID NO: 391241
aacuucaucaagcaguguu

SEQ ID NO: 391243 - RNA, 19 nt, Artificial Sequence
  Description of Artificial Sequence: Synthetic oligonucleotide
  Sense Strand Starting at position 922 of SEQ ID NO: 318324
uaaacaccgccugguaauu

SEQ ID NO: 391244 - RNA, 19 nt, Artificial Sequence
  Description of Artificial Sequence: Synthetic oligonucleotide
  Antisense Strand to SEQ ID NO: 391243
aauuaccaggcgguguuua

SEQ ID NO: 391245 - RNA, 19 nt, Artificial Sequence
  Description of Artificial Sequence: Synthetic oligonucleotide
  Sense Strand Starting at position 922 of SEQ ID NO: 318333
ccugguaauuacucaguau

SEQ ID NO: 391246 - RNA, 19 nt, Artificial Sequence
  Description of Artificial Sequence: Synthetic oligonucleotide
  Antisense Strand to SEQ ID NO: 391245
auacugaguaauuaccagg

SEQ ID NO: 391247 - RNA, 19 nt, Artificial Sequence
  Description of Artificial Sequence: Synthetic oligonucleotide
  Sense Strand Starting at position 922 of SEQ ID NO: 318336
gguaauuacucaguauuaa

SEQ ID NO: 391248 - RNA, 19 nt, Artificial Sequence
  Description of Artificial Sequence: Synthetic oligonucleotide
  Antisense Strand to SEQ ID NO: 391247
uuaauacugaguaauuacc

SEQ ID NO: 391249 - RNA, 19 nt, Artificial Sequence
  Description of Artificial Sequence: Synthetic oligonucleotide
  Sense Strand Starting at position 923 of SEQ ID NO: 315641
gccaguuggucaccaugau

SEQ ID NO: 391250 - RNA, 19 nt, Artificial Sequence
  Description of Artificial Sequence: Synthetic oligonucleotide
  Antisense Strand to SEQ ID NO: 391249
aucauggugaccaacuggc

SEQ ID NO: 391251 - RNA, 19 nt, Artificial Sequence
  Description of Artificial Sequence: Synthetic oligonucleotide
  Sense Strand Starting at position 923 of SEQ ID NO: 315642
ccaguuggucaccaugaua

SEQ ID NO: 391252 - RNA, 19 nt, Artificial Sequence
  Description of Artificial Sequence: Synthetic oligonucleotide
  Antisense Strand to SEQ ID NO: 391251
uaucauggugaccaacugg

SEQ ID NO: 391253 - RNA, 19 nt, Artificial Sequence
  Description of Artificial Sequence: Synthetic oligonucleotide
  Sense Strand Starting at position 923 of SEQ ID NO: 315645
guuggucaccaugauauac

SEQ ID NO: 391254 - RNA, 19 nt, Artificial Sequence
  Description of Artificial Sequence: Synthetic oligonucleotide
  Antisense Strand to SEQ ID NO: 391253
guauaucauggugaccaac

SEQ ID NO: 391255 - RNA, 19 nt, Artificial Sequence
  Description of Artificial Sequence: Synthetic oligonucleotide
  Sense Strand Starting at position 923 of SEQ ID NO: 315656
ugauauacccagugugcaa

SEQ ID NO: 391256 - RNA, 19 nt, Artificial Sequence
  Description of Artificial Sequence: Synthetic oligonucleotide
  Antisense Strand to SEQ ID NO: 391255
uugcacacuggguauauca

SEQ ID NO: 391257 - RNA, 19 nt, Artificial Sequence
  Description of Artificial Sequence: Synthetic oligonucleotide
  Sense Strand Starting at position 923 of SEQ ID NO: 315744
acacgagucuggugacaac

SEQ ID NO: 391258 - RNA, 19 nt, Artificial Sequence
  Description of Artificial Sequence: Synthetic oligonucleotide
  Antisense Strand to SEQ ID NO: 391257
guugucaccagacucgugu

SEQ ID NO: 391259 - RNA, 19 nt, Artificial Sequence
  Description of Artificial Sequence: Synthetic oligonucleotide
  Sense Strand Starting at position 923 of SEQ ID NO: 315747
cgagucuggugacaacaaa

SEQ ID NO: 391260 - RNA, 19 nt, Artificial Sequence
  Description of Artificial Sequence: Synthetic oligonucleotide
  Antisense Strand to SEQ ID NO: 391259
uuuguugucaccagacucg

SEQ ID NO: 391261 - RNA, 19 nt, Artificial Sequence
  Description of Artificial Sequence: Synthetic oligonucleotide
  Sense Strand Starting at position 923 of SEQ ID NO: 315847
gcaagucacacaugcgaaa

SEQ ID NO: 391262 - RNA, 19 nt, Artificial Sequence
  Description of Artificial Sequence: Synthetic oligonucleotide
  Antisense Strand to SEQ ID NO: 391261
uuucgcaugugugacuugc

SEQ ID NO: 391263 - RNA, 19 nt, Artificial Sequence
  Description of Artificial Sequence: Synthetic oligonucleotide
  Sense Strand Starting at position 923 of SEQ ID NO: 315989
caggguaggcgucagagaa

SEQ ID NO: 391264 - RNA, 19 nt, Artificial Sequence
  Description of Artificial Sequence: Synthetic oligonucleotide
  Antisense Strand to SEQ ID NO: 391263
uucucugacgccuacccug

SEQ ID NO: 391265 - RNA, 19 nt, Artificial Sequence
  Description of Artificial Sequence: Synthetic oligonucleotide
  Sense Strand Starting at position 923 of SEQ ID NO: 316035
uccuucugaccagguuuaa

SEQ ID NO: 391266 - RNA, 19 nt, Artificial Sequence
  Description of Artificial Sequence: Synthetic oligonucleotide
  Antisense Strand to SEQ ID NO: 391265
uuaaaccuggucagaagga

SEQ ID NO: 391267 - RNA, 19 nt, Artificial Sequence
  Description of Artificial Sequence: Synthetic oligonucleotide
  Sense Strand Starting at position 923 of SEQ ID NO: 316355
gagaaagacucuugagacc

SEQ ID NO: 391268 - RNA, 19 nt, Artificial Sequence
  Description of Artificial Sequence: Synthetic oligonucleotide
  Antisense Strand to SEQ ID NO: 391267
ggucucaagagucuuucuc

SEQ ID NO: 391269 - RNA, 19 nt, Artificial Sequence
  Description of Artificial Sequence: Synthetic oligonucleotide
  Sense Strand Starting at position 923 of SEQ ID NO: 317692
aaagacugagcugguuaga

SEQ ID NO: 391270 - RNA, 19 nt, Artificial Sequence
  Description of Artificial Sequence: Synthetic oligonucleotide
  Antisense Strand to SEQ ID NO: 391269
ucuaaccagcucagucuuu

SEQ ID NO: 391271 - RNA, 19 nt, Artificial Sequence
  Description of Artificial Sequence: Synthetic oligonucleotide
  Sense Strand Starting at position 923 of SEQ ID NO: 317893
gaacuugguugucagccau

SEQ ID NO: 391272 - RNA, 19 nt, Artificial Sequence
  Description of Artificial Sequence: Synthetic oligonucleotide
  Antisense Strand to SEQ ID NO: 391271
auggcugacaaccaaguuc

SEQ ID NO: 391273 - RNA, 19 nt, Artificial Sequence
  Description of Artificial Sequence: Synthetic oligonucleotide
  Sense Strand Starting at position 923 of SEQ ID NO: 318062
aaugucacuucccaggaga

SEQ ID NO: 391274 - RNA, 19 nt, Artificial Sequence
  Description of Artificial Sequence: Synthetic oligonucleotide
  Antisense Strand to SEQ ID NO: 391273
ucuccugggaagugacauu

SEQ ID NO: 391275 - RNA, 19 nt, Artificial Sequence
  Description of Artificial Sequence: Synthetic oligonucleotide
  Sense Strand Starting at position 923 of SEQ ID NO: 318064
ugucacuucccaggagaca

SEQ ID NO: 391276 - RNA, 19 nt, Artificial Sequence
  Description of Artificial Sequence: Synthetic oligonucleotide
  Antisense Strand to SEQ ID NO: 391275
ugucuccugggaagugaca

SEQ ID NO: 391277 - RNA, 19 nt, Artificial Sequence
  Description of Artificial Sequence: Synthetic oligonucleotide
  Sense Strand Starting at position 923 of SEQ ID NO: 318190
gguggccugagcugagaaa

SEQ ID NO: 391278 - RNA, 19 nt, Artificial Sequence
  Description of Artificial Sequence: Synthetic oligonucleotide
  Antisense Strand to SEQ ID NO: 391277
uuucucagcucaggccacc

SEQ ID NO: 391279 - RNA, 19 nt, Artificial Sequence
  Description of Artificial Sequence: Synthetic oligonucleotide
  Sense Strand Starting at position 923 of SEQ ID NO: 318235
ggacuuuggucuucucaca

SEQ ID NO: 391280 - RNA, 19 nt, Artificial Sequence
  Description of Artificial Sequence: Synthetic oligonucleotide
  Antisense Strand to SEQ ID NO: 391279
ugugagaagaccaaagucc

SEQ ID NO: 391281 - RNA, 19 nt, Artificial Sequence
  Description of Artificial Sequence: Synthetic oligonucleotide
  Sense Strand Starting at position 923 of SEQ ID NO: 318266
gguggugaaagcuauuaca

SEQ ID NO: 391282 - RNA, 19 nt, Artificial Sequence
  Description of Artificial Sequence: Synthetic oligonucleotide
  Antisense Strand to SEQ ID NO: 391281
uguaauagcuuucaccacc

SEQ ID NO: 391283 - RNA, 19 nt, Artificial Sequence
  Description of Artificial Sequence: Synthetic oligonucleotide
  Sense Strand Starting at position 923 of SEQ ID NO: 318310
gggcuccugcgggauagau

SEQ ID NO: 391284 - RNA, 19 nt, Artificial Sequence
  Description of Artificial Sequence: Synthetic oligonucleotide
  Antisense Strand to SEQ ID NO: 391283
aucuaucccgcaggagccc

SEQ ID NO: 391285 - RNA, 19 nt, Artificial Sequence
  Description of Artificial Sequence: Synthetic oligonucleotide
  Sense Strand Starting at position 923 of SEQ ID NO: 318383
ccacguuguucagguggga

SEQ ID NO: 391286 - RNA, 19 nt, Artificial Sequence
  Description of Artificial Sequence: Synthetic oligonucleotide
  Antisense Strand to SEQ ID NO: 391285
ucccaccugaacaacgugg

SEQ ID NO: 391287 - RNA, 19 nt, Artificial Sequence
  Description of Artificial Sequence: Synthetic oligonucleotide
  Sense Strand Starting at position 923 of SEQ ID NO: 318399
ggaggacccugguugagau

SEQ ID NO: 391288 - RNA, 19 nt, Artificial Sequence
  Description of Artificial Sequence: Synthetic oligonucleotide
  Antisense Strand to SEQ ID NO: 391287
aucucaaccaggguccucc

SEQ ID NO: 391289 - RNA, 19 nt, Artificial Sequence
  Description of Artificial Sequence: Synthetic oligonucleotide
  Sense Strand Starting at position 923 of SEQ ID NO: 318400
gaggacccugguugagauu

SEQ ID NO: 391290 - RNA, 19 nt, Artificial Sequence
  Description of Artificial Sequence: Synthetic oligonucleotide
  Antisense Strand to SEQ ID NO: 391289
aaucucaaccaggguccuc

SEQ ID NO: 391291 - RNA, 19 nt, Artificial Sequence
  Description of Artificial Sequence: Synthetic oligonucleotide
  Sense Strand Starting at position 923 of SEQ ID NO: 318406
ccugguugagauugcggaa

SEQ ID NO: 391292 - RNA, 19 nt, Artificial Sequence
  Description of Artificial Sequence: Synthetic oligonucleotide
  Antisense Strand to SEQ ID NO: 391291
uuccgcaaucucaaccagg

SEQ ID NO: 391293 - RNA, 19 nt, Artificial Sequence
  Description of Artificial Sequence: Synthetic oligonucleotide
  Sense Strand Starting at position 923 of SEQ ID NO: 318409
gguugagauugcggaagau

SEQ ID NO: 391294 - RNA, 19 nt, Artificial Sequence
  Description of Artificial Sequence: Synthetic oligonucleotide
  Antisense Strand to SEQ ID NO: 391293
aucuuccgcaaucucaacc

SEQ ID NO: 391295 - RNA, 19 nt, Artificial Sequence
  Description of Artificial Sequence: Synthetic oligonucleotide
  Sense Strand Starting at position 923 of SEQ ID NO: 318463
ggacuauccuuugggaaag

SEQ ID NO: 391296 - RNA, 19 nt, Artificial Sequence
  Description of Artificial Sequence: Synthetic oligonucleotide
  Antisense Strand to SEQ ID NO: 391295
cuuucccaaaggauagucc

SEQ ID NO: 391297 - RNA, 19 nt, Artificial Sequence
  Description of Artificial Sequence: Synthetic oligonucleotide
  Sense Strand Starting at position 923 of SEQ ID NO: 318464
gacuauccuuugggaaaga

SEQ ID NO: 391298 - RNA, 19 nt, Artificial Sequence
  Description of Artificial Sequence: Synthetic oligonucleotide
  Antisense Strand to SEQ ID NO: 391297
ucuuucccaaaggauaguc

SEQ ID NO: 391299 - RNA, 19 nt, Artificial Sequence
  Description of Artificial Sequence: Synthetic oligonucleotide
  Sense Strand Starting at position 923 of SEQ ID NO: 318512
gcuguucucugggccugaa

SEQ ID NO: 391300 - RNA, 19 nt, Artificial Sequence
  Description of Artificial Sequence: Synthetic oligonucleotide
  Antisense Strand to SEQ ID NO: 391299
uucaggcccagagaacagc

SEQ ID NO: 391301 - RNA, 19 nt, Artificial Sequence
  Description of Artificial Sequence: Synthetic oligonucleotide
  Sense Strand Starting at position 923 of SEQ ID NO: 318619
acggcacuucccugaguga

SEQ ID NO: 391302 - RNA, 19 nt, Artificial Sequence
  Description of Artificial Sequence: Synthetic oligonucleotide
  Antisense Strand to SEQ ID NO: 391301
ucacucagggaagugccgu

SEQ ID NO: 391303 - RNA, 19 nt, Artificial Sequence
  Description of Artificial Sequence: Synthetic oligonucleotide
  Sense Strand Starting at position 923 of SEQ ID NO: 318620
cggcacuucccugagugaa

SEQ ID NO: 391304 - RNA, 19 nt, Artificial Sequence
  Description of Artificial Sequence: Synthetic oligonucleotide
  Antisense Strand to SEQ ID NO: 391303
uucacucagggaagugccg

SEQ ID NO: 391305 - RNA, 19 nt, Artificial Sequence
  Description of Artificial Sequence: Synthetic oligonucleotide
  Sense Strand Starting at position 923 of SEQ ID NO: 318932
ccgugugguucaccaugga

SEQ ID NO: 391306 - RNA, 19 nt, Artificial Sequence
  Description of Artificial Sequence: Synthetic oligonucleotide
  Antisense Strand to SEQ ID NO: 391305
uccauggugaaccacacgg

SEQ ID NO: 391307 - RNA, 19 nt, Artificial Sequence
  Description of Artificial Sequence: Synthetic oligonucleotide
  Sense Strand Starting at position 923 of SEQ ID NO: 318936
gugguucaccauggaagaa

SEQ ID NO: 391308 - RNA, 19 nt, Artificial Sequence
  Description of Artificial Sequence: Synthetic oligonucleotide
  Antisense Strand to SEQ ID NO: 391307
uucuuccauggugaaccac

SEQ ID NO: 391309 - RNA, 19 nt, Artificial Sequence
  Description of Artificial Sequence: Synthetic oligonucleotide
  Sense Strand Starting at position 923 of SEQ ID NO: 319190
uaguuuacaucagggaucu

SEQ ID NO: 391310 - RNA, 19 nt, Artificial Sequence
  Description of Artificial Sequence: Synthetic oligonucleotide
  Antisense Strand to SEQ ID NO: 391309
agaucccugauguaaacua

SEQ ID NO: 391311 - RNA, 19 nt, Artificial Sequence
  Description of Artificial Sequence: Synthetic oligonucleotide
  Sense Strand Starting at position 924 of SEQ ID NO: 315309
acacguuucuugguacuga

SEQ ID NO: 391312 - RNA, 19 nt, Artificial Sequence
  Description of Artificial Sequence: Synthetic oligonucleotide
  Antisense Strand to SEQ ID NO: 391311
ucaguaccaagaaacgugu

SEQ ID NO: 391313 - RNA, 19 nt, Artificial Sequence
  Description of Artificial Sequence: Synthetic oligonucleotide
  Sense Strand Starting at position 924 of SEQ ID NO: 315961
uucugugacuucucagucu

SEQ ID NO: 391314 - RNA, 19 nt, Artificial Sequence
  Description of Artificial Sequence: Synthetic oligonucleotide
  Antisense Strand to SEQ ID NO: 391313
agacugagaagucacagaa

SEQ ID NO: 391315 - RNA, 19 nt, Artificial Sequence
  Description of Artificial Sequence: Synthetic oligonucleotide
  Sense Strand Starting at position 924 of SEQ ID NO: 316084
cuuugcgucacugauagaa

SEQ ID NO: 391316 - RNA, 19 nt, Artificial Sequence
  Description of Artificial Sequence: Synthetic oligonucleotide
  Antisense Strand to SEQ ID NO: 391315
uucuaucagugacgcaaag

SEQ ID NO: 391317 - RNA, 19 nt, Artificial Sequence
  Description of Artificial Sequence: Synthetic oligonucleotide
  Sense Strand Starting at position 924 of SEQ ID NO: 316158
gagugaagaucagagaauu

SEQ ID NO: 391318 - RNA, 19 nt, Artificial Sequence
  Description of Artificial Sequence: Synthetic oligonucleotide
  Antisense Strand to SEQ ID NO: 391317
aauucucugaucuucacuc

SEQ ID NO: 391319 - RNA, 19 nt, Artificial Sequence
  Description of Artificial Sequence: Synthetic oligonucleotide
  Sense Strand Starting at position 924 of SEQ ID NO: 316226
cggguagucguugaaacaa

SEQ ID NO: 391320 - RNA, 19 nt, Artificial Sequence
  Description of Artificial Sequence: Synthetic oligonucleotide
  Antisense Strand to SEQ ID NO: 391319
uuguuucaacgacuacccg

SEQ ID NO: 391321 - RNA, 19 nt, Artificial Sequence
  Description of Artificial Sequence: Synthetic oligonucleotide
  Sense Strand Starting at position 924 of SEQ ID NO: 316293
uaaucuugacgacacguaa

SEQ ID NO: 391322 - RNA, 19 nt, Artificial Sequence
  Description of Artificial Sequence: Synthetic oligonucleotide
  Antisense Strand to SEQ ID NO: 391321
uuacgugucgucaagauua

SEQ ID NO: 391323 - RNA, 19 nt, Artificial Sequence
  Description of Artificial Sequence: Synthetic oligonucleotide
  Sense Strand Starting at position 924 of SEQ ID NO: 316340
ucgacuugauucuuaaaua

SEQ ID NO: 391324 - RNA, 19 nt, Artificial Sequence
  Description of Artificial Sequence: Synthetic oligonucleotide
  Antisense Strand to SEQ ID NO: 391323
uauuuaagaaucaagucga

SEQ ID NO: 391325 - RNA, 19 nt, Artificial Sequence
  Description of Artificial Sequence: Synthetic oligonucleotide
  Sense Strand Starting at position 924 of SEQ ID NO: 316417
ggagguauaucucagagaa

SEQ ID NO: 391326 - RNA, 19 nt, Artificial Sequence
  Description of Artificial Sequence: Synthetic oligonucleotide
  Antisense Strand to SEQ ID NO: 391325
uucucugagauauaccucc

SEQ ID NO: 391327 - RNA, 19 nt, Artificial Sequence
  Description of Artificial Sequence: Synthetic oligonucleotide
  Sense Strand Starting at position 924 of SEQ ID NO: 316442
gcguuaggccugcugguaa

SEQ ID NO: 391328 - RNA, 19 nt, Artificial Sequence
  Description of Artificial Sequence: Synthetic oligonucleotide
  Antisense Strand to SEQ ID NO: 391327
uuaccagcaggccuaacgc

SEQ ID NO: 391329 - RNA, 19 nt, Artificial Sequence
  Description of Artificial Sequence: Synthetic oligonucleotide
  Sense Strand Starting at position 924 of SEQ ID NO: 316504
acagcaaacugaguuaacu

SEQ ID NO: 391330 - RNA, 19 nt, Artificial Sequence
  Description of Artificial Sequence: Synthetic oligonucleotide
  Antisense Strand to SEQ ID NO: 391329
aguuaacucaguuugcugu

SEQ ID NO: 391331 - RNA, 19 nt, Artificial Sequence
  Description of Artificial Sequence: Synthetic oligonucleotide
  Sense Strand Starting at position 924 of SEQ ID NO: 316743
ccuaucacuucgucacuca

SEQ ID NO: 391332 - RNA, 19 nt, Artificial Sequence
  Description of Artificial Sequence: Synthetic oligonucleotide
  Antisense Strand to SEQ ID NO: 391331
ugagugacgaagugauagg

SEQ ID NO: 391333 - RNA, 19 nt, Artificial Sequence
  Description of Artificial Sequence: Synthetic oligonucleotide
  Sense Strand Starting at position 924 of SEQ ID NO: 317452
agcucuagaucacuaaagu

SEQ ID NO: 391334 - RNA, 19 nt, Artificial Sequence
  Description of Artificial Sequence: Synthetic oligonucleotide
  Antisense Strand to SEQ ID NO: 391333
acuuuagugaucuagagcu

SEQ ID NO: 391335 - RNA, 19 nt, Artificial Sequence
  Description of Artificial Sequence: Synthetic oligonucleotide
  Sense Strand Starting at position 924 of SEQ ID NO: 317453
gcucuagaucacuaaaguc

SEQ ID NO: 391336 - RNA, 19 nt, Artificial Sequence
  Description of Artificial Sequence: Synthetic oligonucleotide
  Antisense Strand to SEQ ID NO: 391335
gacuuuagugaucuagagc

SEQ ID NO: 391337 - RNA, 19 nt, Artificial Sequence
  Description of Artificial Sequence: Synthetic oligonucleotide
  Sense Strand Starting at position 924 of SEQ ID NO: 317554
cgacuuggcacccgggaua

SEQ ID NO: 391338 - RNA, 19 nt, Artificial Sequence
  Description of Artificial Sequence: Synthetic oligonucleotide
  Antisense Strand to SEQ ID NO: 391337
uaucccgggugccaagucg

SEQ ID NO: 391339 - RNA, 19 nt, Artificial Sequence
  Description of Artificial Sequence: Synthetic oligonucleotide
  Sense Strand Starting at position 924 of SEQ ID NO: 317569
gauagauuugcgugcaggu

SEQ ID NO: 391340 - RNA, 19 nt, Artificial Sequence
  Description of Artificial Sequence: Synthetic oligonucleotide
  Antisense Strand to SEQ ID NO: 391339
accugcacgcaaaucuauc

SEQ ID NO: 391341 - RNA, 19 nt, Artificial Sequence
  Description of Artificial Sequence: Synthetic oligonucleotide
  Sense Strand Starting at position 924 of SEQ ID NO: 317612
gauucugggacuugagguu

SEQ ID NO: 391342 - RNA, 19 nt, Artificial Sequence
  Description of Artificial Sequence: Synthetic oligonucleotide
  Antisense Strand to SEQ ID NO: 391341
aaccucaagucccagaauc

SEQ ID NO: 391343 - RNA, 19 nt, Artificial Sequence
  Description of Artificial Sequence: Synthetic oligonucleotide
  Sense Strand Starting at position 924 of SEQ ID NO: 317759
ccucacguucuagacuuua

SEQ ID NO: 391344 - RNA, 19 nt, Artificial Sequence
  Description of Artificial Sequence: Synthetic oligonucleotide
  Antisense Strand to SEQ ID NO: 391343
uaaagucuagaacgugagg

SEQ ID NO: 391345 - RNA, 19 nt, Artificial Sequence
  Description of Artificial Sequence: Synthetic oligonucleotide
  Sense Strand Starting at position 924 of SEQ ID NO: 317764
cguucuagacuuuauuaac

SEQ ID NO: 391346 - RNA, 19 nt, Artificial Sequence
  Description of Artificial Sequence: Synthetic oligonucleotide
  Antisense Strand to SEQ ID NO: 391345
guuaauaaagucuagaacg

SEQ ID NO: 391347 - RNA, 19 nt, Artificial Sequence
  Description of Artificial Sequence: Synthetic oligonucleotide
  Sense Strand Starting at position 924 of SEQ ID NO: 317806
uugcauaaaucgucugaau

SEQ ID NO: 391348 - RNA, 19 nt, Artificial Sequence
  Description of Artificial Sequence: Synthetic oligonucleotide
  Antisense Strand to SEQ ID NO: 391347
auucagacgauuuaugcaa

SEQ ID NO: 391349 - RNA, 19 nt, Artificial Sequence
  Description of Artificial Sequence: Synthetic oligonucleotide
  Sense Strand Starting at position 924 of SEQ ID NO: 317808
gcauaaaucgucugaauua

SEQ ID NO: 391350 - RNA, 19 nt, Artificial Sequence
  Description of Artificial Sequence: Synthetic oligonucleotide
  Antisense Strand to SEQ ID NO: 391349
uaauucagacgauuuaugc

SEQ ID NO: 391351 - RNA, 19 nt, Artificial Sequence
  Description of Artificial Sequence: Synthetic oligonucleotide
  Sense Strand Starting at position 924 of SEQ ID NO: 317854
ugguuaccugcucagcaua

SEQ ID NO: 391352 - RNA, 19 nt, Artificial Sequence
  Description of Artificial Sequence: Synthetic oligonucleotide
  Antisense Strand to SEQ ID NO: 391351
uaugcugagcagguaacca

SEQ ID NO: 391353 - RNA, 19 nt, Artificial Sequence
  Description of Artificial Sequence: Synthetic oligonucleotide
  Sense Strand Starting at position 924 of SEQ ID NO: 318430
cuuguaaccuagucuuuga

SEQ ID NO: 391354 - RNA, 19 nt, Artificial Sequence
  Description of Artificial Sequence: Synthetic oligonucleotide
  Antisense Strand to SEQ ID NO: 391353
ucaaagacuagguuacaag

SEQ ID NO: 391355 - RNA, 19 nt, Artificial Sequence
  Description of Artificial Sequence: Synthetic oligonucleotide
  Sense Strand Starting at position 924 of SEQ ID NO: 318433
guaaccuagucuuugacuu

SEQ ID NO: 391356 - RNA, 19 nt, Artificial Sequence
  Description of Artificial Sequence: Synthetic oligonucleotide
  Antisense Strand to SEQ ID NO: 391355
aagucaaagacuagguuac

SEQ ID NO: 391357 - RNA, 19 nt, Artificial Sequence
  Description of Artificial Sequence: Synthetic oligonucleotide
  Sense Strand Starting at position 924 of SEQ ID NO: 318441
gucuuugacuuuccuagga

SEQ ID NO: 391358 - RNA, 19 nt, Artificial Sequence
  Description of Artificial Sequence: Synthetic oligonucleotide
  Antisense Strand to SEQ ID NO: 391357
uccuaggaaagucaaagac

SEQ ID NO: 391359 - RNA, 19 nt, Artificial Sequence
  Description of Artificial Sequence: Synthetic oligonucleotide
  Sense Strand Starting at position 924 of SEQ ID NO: 318445
uugacuuuccuaggaucuu

SEQ ID NO: 391360 - RNA, 19 nt, Artificial Sequence
  Description of Artificial Sequence: Synthetic oligonucleotide
  Antisense Strand to SEQ ID NO: 391359
aagauccuaggaaagucaa

SEQ ID NO: 391361 - RNA, 19 nt, Artificial Sequence
  Description of Artificial Sequence: Synthetic oligonucleotide
  Sense Strand Starting at position 924 of SEQ ID NO: 318457
ggaucuuggcucugacaca

SEQ ID NO: 391362 - RNA, 19 nt, Artificial Sequence
  Description of Artificial Sequence: Synthetic oligonucleotide
  Antisense Strand to SEQ ID NO: 391361
ugugucagagccaagaucc

SEQ ID NO: 391363 - RNA, 19 nt, Artificial Sequence
  Description of Artificial Sequence: Synthetic oligonucleotide
  Sense Strand Starting at position 924 of SEQ ID NO: 318530
ugcugaaagaguuggaaua

SEQ ID NO: 391364 - RNA, 19 nt, Artificial Sequence
  Description of Artificial Sequence: Synthetic oligonucleotide
  Antisense Strand to SEQ ID NO: 391363
uauuccaacucuuucagca

SEQ ID NO: 391365 - RNA, 19 nt, Artificial Sequence
  Description of Artificial Sequence: Synthetic oligonucleotide
  Sense Strand Starting at position 924 of SEQ ID NO: 318531
gcugaaagaguuggaauaa

SEQ ID NO: 391366 - RNA, 19 nt, Artificial Sequence
  Description of Artificial Sequence: Synthetic oligonucleotide
  Antisense Strand to SEQ ID NO: 391365
uuauuccaacucuuucagc

SEQ ID NO: 391367 - RNA, 19 nt, Artificial Sequence
  Description of Artificial Sequence: Synthetic oligonucleotide
  Sense Strand Starting at position 924 of SEQ ID NO: 318532
cugaaagaguuggaauaau

SEQ ID NO: 391368 - RNA, 19 nt, Artificial Sequence
  Description of Artificial Sequence: Synthetic oligonucleotide
  Antisense Strand to SEQ ID NO: 391367
auuauuccaacucuuucag

SEQ ID NO: 391369 - RNA, 19 nt, Artificial Sequence
  Description of Artificial Sequence: Synthetic oligonucleotide
  Sense Strand Starting at position 924 of SEQ ID NO: 318562
cuuucuuuacgaugauaaa

SEQ ID NO: 391370 - RNA, 19 nt, Artificial Sequence
  Description of Artificial Sequence: Synthetic oligonucleotide
  Antisense Strand to SEQ ID NO: 391369
uuuaucaucguaaagaaag

SEQ ID NO: 391371 - RNA, 19 nt, Artificial Sequence
  Description of Artificial Sequence: Synthetic oligonucleotide
  Sense Strand Starting at position 924 of SEQ ID NO: 318591
gggacugagucaucaguua

SEQ ID NO: 391372 - RNA, 19 nt, Artificial Sequence
  Description of Artificial Sequence: Synthetic oligonucleotide
  Antisense Strand to SEQ ID NO: 391371
uaacugaugacucaguccc

SEQ ID NO: 391373 - RNA, 19 nt, Artificial Sequence
  Description of Artificial Sequence: Synthetic oligonucleotide
  Sense Strand Starting at position 924 of SEQ ID NO: 318600
ucaucaguuaugugugaca

SEQ ID NO: 391374 - RNA, 19 nt, Artificial Sequence
  Description of Artificial Sequence: Synthetic oligonucleotide
  Antisense Strand to SEQ ID NO: 391373
ugucacacauaacugauga

SEQ ID NO: 391375 - RNA, 19 nt, Artificial Sequence
  Description of Artificial Sequence: Synthetic oligonucleotide
  Sense Strand Starting at position 924 of SEQ ID NO: 318602
aucaguuaugugugacacu

SEQ ID NO: 391376 - RNA, 19 nt, Artificial Sequence
  Description of Artificial Sequence: Synthetic oligonucleotide
  Antisense Strand to SEQ ID NO: 391375
agugucacacauaacugau

SEQ ID NO: 391377 - RNA, 19 nt, Artificial Sequence
  Description of Artificial Sequence: Synthetic oligonucleotide
  Sense Strand Starting at position 924 of SEQ ID NO: 318646
ugcuacagacuuggauuau

SEQ ID NO: 391378 - RNA, 19 nt, Artificial Sequence
  Description of Artificial Sequence: Synthetic oligonucleotide
  Antisense Strand to SEQ ID NO: 391377
auaauccaagucuguagca

SEQ ID NO: 391379 - RNA, 19 nt, Artificial Sequence
  Description of Artificial Sequence: Synthetic oligonucleotide
  Sense Strand Starting at position 924 of SEQ ID NO: 318876
aaguuuaauacggagcgau

SEQ ID NO: 391380 - RNA, 19 nt, Artificial Sequence
  Description of Artificial Sequence: Synthetic oligonucleotide
  Antisense Strand to SEQ ID NO: 391379
aucgcuccguauuaaacuu

SEQ ID NO: 391381 - RNA, 19 nt, Artificial Sequence
  Description of Artificial Sequence: Synthetic oligonucleotide
  Sense Strand Starting at position 924 of SEQ ID NO: 318879
uuuaauacggagcgauuaa

SEQ ID NO: 391382 - RNA, 19 nt, Artificial Sequence
  Description of Artificial Sequence: Synthetic oligonucleotide
  Antisense Strand to SEQ ID NO: 391381
uuaaucgcuccguauuaaa

SEQ ID NO: 391383 - RNA, 19 nt, Artificial Sequence
  Description of Artificial Sequence: Synthetic oligonucleotide
  Sense Strand Starting at position 924 of SEQ ID NO: 318880
uuaauacggagcgauuaau

SEQ ID NO: 391384 - RNA, 19 nt, Artificial Sequence
  Description of Artificial Sequence: Synthetic oligonucleotide
  Antisense Strand to SEQ ID NO: 391383
auuaaucgcuccguauuaa

SEQ ID NO: 391385 - RNA, 19 nt, Artificial Sequence
  Description of Artificial Sequence: Synthetic oligonucleotide
  Sense Strand Starting at position 924 of SEQ ID NO: 318886
cggagcgauuaauuaugga

SEQ ID NO: 391386 - RNA, 19 nt, Artificial Sequence
  Description of Artificial Sequence: Synthetic oligonucleotide
  Antisense Strand to SEQ ID NO: 391385
uccauaauuaaucgcuccg

SEQ ID NO: 391387 - RNA, 19 nt, Artificial Sequence
  Description of Artificial Sequence: Synthetic oligonucleotide
  Sense Strand Starting at position 924 of SEQ ID NO: 319206
cccugaaaguaacugcaua

SEQ ID NO: 391388 - RNA, 19 nt, Artificial Sequence
  Description of Artificial Sequence: Synthetic oligonucleotide
  Antisense Strand to SEQ ID NO: 391387
uaugcaguuacuuucaggg

SEQ ID NO: 391389 - RNA, 19 nt, Artificial Sequence
  Description of Artificial Sequence: Synthetic oligonucleotide
  Sense Strand Starting at position 924 of SEQ ID NO: 319218
cugcauauccauuagcagu

SEQ ID NO: 391390 - RNA, 19 nt, Artificial Sequence
  Description of Artificial Sequence: Synthetic oligonucleotide
  Antisense Strand to SEQ ID NO: 391389
acugcuaauggauaugcag

SEQ ID NO: 391391 - RNA, 19 nt, Artificial Sequence
  Description of Artificial Sequence: Synthetic oligonucleotide
  Sense Strand Starting at position 925 of SEQ ID NO: 315255
ucaccuggauguuuaacau

SEQ ID NO: 391392 - RNA, 19 nt, Artificial Sequence
  Description of Artificial Sequence: Synthetic oligonucleotide
  Antisense Strand to SEQ ID NO: 391391
auguuaaacauccagguga

SEQ ID NO: 391393 - RNA, 19 nt, Artificial Sequence
  Description of Artificial Sequence: Synthetic oligonucleotide
  Sense Strand Starting at position 925 of SEQ ID NO: 315290
cuugauaaguuacugaguu

SEQ ID NO: 391394 - RNA, 19 nt, Artificial Sequence
  Description of Artificial Sequence: Synthetic oligonucleotide
  Antisense Strand to SEQ ID NO: 391393
aacucaguaacuuaucaag

SEQ ID NO: 391395 - RNA, 19 nt, Artificial Sequence
  Description of Artificial Sequence: Synthetic oligonucleotide
  Sense Strand Starting at position 925 of SEQ ID NO: 315320
uccagaugguuccugucau

SEQ ID NO: 391396 - RNA, 19 nt, Artificial Sequence
  Description of Artificial Sequence: Synthetic oligonucleotide
  Antisense Strand to SEQ ID NO: 391395
augacaggaaccaucugga

SEQ ID NO: 391397 - RNA, 19 nt, Artificial Sequence
  Description of Artificial Sequence: Synthetic oligonucleotide
  Sense Strand Starting at position 925 of SEQ ID NO: 315327
gguuccugucauggagaca

SEQ ID NO: 391398 - RNA, 19 nt, Artificial Sequence
  Description of Artificial Sequence: Synthetic oligonucleotide
  Antisense Strand to SEQ ID NO: 391397
ugucuccaugacaggaacc

SEQ ID NO: 391399 - RNA, 19 nt, Artificial Sequence
  Description of Artificial Sequence: Synthetic oligonucleotide
  Sense Strand Starting at position 925 of SEQ ID NO: 315328
guuccugucauggagacau

SEQ ID NO: 391400 - RNA, 19 nt, Artificial Sequence
  Description of Artificial Sequence: Synthetic oligonucleotide
  Antisense Strand to SEQ ID NO: 391399
augucuccaugacaggaac

SEQ ID NO: 391401 - RNA, 19 nt, Artificial Sequence
  Description of Artificial Sequence: Synthetic oligonucleotide
  Sense Strand Starting at position 925 of SEQ ID NO: 315479
auagacagccaaugugaua

SEQ ID NO: 391402 - RNA, 19 nt, Artificial Sequence
  Description of Artificial Sequence: Synthetic oligonucleotide
  Antisense Strand to SEQ ID NO: 391401
uaucacauuggcugucuau

SEQ ID NO: 391403 - RNA, 19 nt, Artificial Sequence
  Description of Artificial Sequence: Synthetic oligonucleotide
  Sense Strand Starting at position 925 of SEQ ID NO: 315541
caaagaguugcauagguuu

SEQ ID NO: 391404 - RNA, 19 nt, Artificial Sequence
  Description of Artificial Sequence: Synthetic oligonucleotide
  Antisense Strand to SEQ ID NO: 391403
aaaccuaugcaacucuuug

SEQ ID NO: 391405 - RNA, 19 nt, Artificial Sequence
  Description of Artificial Sequence: Synthetic oligonucleotide
  Sense Strand Starting at position 925 of SEQ ID NO: 315544
agaguugcauagguuuaua

SEQ ID NO: 391406 - RNA, 19 nt, Artificial Sequence
  Description of Artificial Sequence: Synthetic oligonucleotide
  Antisense Strand to SEQ ID NO: 391405
uauaaaccuaugcaacucu

SEQ ID NO: 391407 - RNA, 19 nt, Artificial Sequence
  Description of Artificial Sequence: Synthetic oligonucleotide
  Sense Strand Starting at position 925 of SEQ ID NO: 315547
guugcauagguuuauauau

SEQ ID NO: 391408 - RNA, 19 nt, Artificial Sequence
  Description of Artificial Sequence: Synthetic oligonucleotide
  Antisense Strand to SEQ ID NO: 391407
auauauaaaccuaugcaac

SEQ ID NO: 391409 - RNA, 19 nt, Artificial Sequence
  Description of Artificial Sequence: Synthetic oligonucleotide
  Sense Strand Starting at position 925 of SEQ ID NO: 315633
uuguccugugaauggaaca

SEQ ID NO: 391410 - RNA, 19 nt, Artificial Sequence
  Description of Artificial Sequence: Synthetic oligonucleotide
  Antisense Strand to SEQ ID NO: 391409
uguuccauucacaggacaa

SEQ ID NO: 391411 - RNA, 19 nt, Artificial Sequence
  Description of Artificial Sequence: Synthetic oligonucleotide
  Sense Strand Starting at position 925 of SEQ ID NO: 315634
uguccugugaauggaacaa

SEQ ID NO: 391412 - RNA, 19 nt, Artificial Sequence
  Description of Artificial Sequence: Synthetic oligonucleotide
  Antisense Strand to SEQ ID NO: 391411
uuguuccauucacaggaca

SEQ ID NO: 391413 - RNA, 19 nt, Artificial Sequence
  Description of Artificial Sequence: Synthetic oligonucleotide
  Sense Strand Starting at position 925 of SEQ ID NO: 315671
aagggaucuugggcucaga

SEQ ID NO: 391414 - RNA, 19 nt, Artificial Sequence
  Description of Artificial Sequence: Synthetic oligonucleotide
  Antisense Strand to SEQ ID NO: 391413
ucugagcccaagaucccuu

SEQ ID NO: 391415 - RNA, 19 nt, Artificial Sequence
  Description of Artificial Sequence: Synthetic oligonucleotide
  Sense Strand Starting at position 925 of SEQ ID NO: 315807
ggcaaagcuaugcaaguaa

SEQ ID NO: 391416 - RNA, 19 nt, Artificial Sequence
  Description of Artificial Sequence: Synthetic oligonucleotide
  Antisense Strand to SEQ ID NO: 391415
uuacuugcauagcuuugcc

SEQ ID NO: 391417 - RNA, 19 nt, Artificial Sequence
  Description of Artificial Sequence: Synthetic oligonucleotide
  Sense Strand Starting at position 925 of SEQ ID NO: 315870
aguuaaauaucuguuggau

SEQ ID NO: 391418 - RNA, 19 nt, Artificial Sequence
  Description of Artificial Sequence: Synthetic oligonucleotide
  Antisense Strand to SEQ ID NO: 391417
auccaacagauauuuaacu

SEQ ID NO: 391419 - RNA, 19 nt, Artificial Sequence
  Description of Artificial Sequence: Synthetic oligonucleotide
  Sense Strand Starting at position 925 of SEQ ID NO: 316077
gaaguaauuuaaugaaggu

SEQ ID NO: 391420 - RNA, 19 nt, Artificial Sequence
  Description of Artificial Sequence: Synthetic oligonucleotide
  Antisense Strand to SEQ ID NO: 391419
accuucauuaaauuacuuc

SEQ ID NO: 391421 - RNA, 19 nt, Artificial Sequence
  Description of Artificial Sequence: Synthetic oligonucleotide
  Sense Strand Starting at position 925 of SEQ ID NO: 316228
aauuguugagagugggaga

SEQ ID NO: 391422 - RNA, 19 nt, Artificial Sequence
  Description of Artificial Sequence: Synthetic oligonucleotide
  Antisense Strand to SEQ ID NO: 391421
ucucccacucucaacaauu

SEQ ID NO: 391423 - RNA, 19 nt, Artificial Sequence
  Description of Artificial Sequence: Synthetic oligonucleotide
  Sense Strand Starting at position 925 of SEQ ID NO: 316254
acuaguuccuacuuacaga

SEQ ID NO: 391424 - RNA, 19 nt, Artificial Sequence
  Description of Artificial Sequence: Synthetic oligonucleotide
  Antisense Strand to SEQ ID NO: 391423
ucuguaaguaggaacuagu

SEQ ID NO: 391425 - RNA, 19 nt, Artificial Sequence
  Description of Artificial Sequence: Synthetic oligonucleotide
  Sense Strand Starting at position 925 of SEQ ID NO: 316287
cgucucuaaguuuaaacau

SEQ ID NO: 391426 - RNA, 19 nt, Artificial Sequence
  Description of Artificial Sequence: Synthetic oligonucleotide
  Antisense Strand to SEQ ID NO: 391425
auguuuaaacuuagagacg

SEQ ID NO: 391427 - RNA, 19 nt, Artificial Sequence
  Description of Artificial Sequence: Synthetic oligonucleotide
  Sense Strand Starting at position 925 of SEQ ID NO: 316344
ggaggugcuuugccaggaa

SEQ ID NO: 391428 - RNA, 19 nt, Artificial Sequence
  Description of Artificial Sequence: Synthetic oligonucleotide
  Antisense Strand to SEQ ID NO: 391427
uuccuggcaaagcaccucc

SEQ ID NO: 391429 - RNA, 19 nt, Artificial Sequence
  Description of Artificial Sequence: Synthetic oligonucleotide
  Sense Strand Starting at position 925 of SEQ ID NO: 316348
gugcuuugccaggaauuag

SEQ ID NO: 391430 - RNA, 19 nt, Artificial Sequence
  Description of Artificial Sequence: Synthetic oligonucleotide
  Antisense Strand to SEQ ID NO: 391429
cuaauuccuggcaaagcac

SEQ ID NO: 391431 - RNA, 19 nt, Artificial Sequence
  Description of Artificial Sequence: Synthetic oligonucleotide
  Sense Strand Starting at position 925 of SEQ ID NO: 316517
ggagcaaacucuuugacug

SEQ ID NO: 391432 - RNA, 19 nt, Artificial Sequence
  Description of Artificial Sequence: Synthetic oligonucleotide
  Antisense Strand to SEQ ID NO: 391431
cagucaaagaguuugcucc

SEQ ID NO: 391433 - RNA, 19 nt, Artificial Sequence
  Description of Artificial Sequence: Synthetic oligonucleotide
  Sense Strand Starting at position 925 of SEQ ID NO: 316522
aaacucuuugacuguagga

SEQ ID NO: 391434 - RNA, 19 nt, Artificial Sequence
  Description of Artificial Sequence: Synthetic oligonucleotide
  Antisense Strand to SEQ ID NO: 391433
uccuacagucaaagaguuu

SEQ ID NO: 391435 - RNA, 19 nt, Artificial Sequence
  Description of Artificial Sequence: Synthetic oligonucleotide
  Sense Strand Starting at position 925 of SEQ ID NO: 316524
acucuuugacuguaggauu

SEQ ID NO: 391436 - RNA, 19 nt, Artificial Sequence
  Description of Artificial Sequence: Synthetic oligonucleotide
  Antisense Strand to SEQ ID NO: 391435
aauccuacagucaaagagu

SEQ ID NO: 391437 - RNA, 19 nt, Artificial Sequence
  Description of Artificial Sequence: Synthetic oligonucleotide
  Sense Strand Starting at position 925 of SEQ ID NO: 316538
ggauuaagacucugggcac

SEQ ID NO: 391438 - RNA, 19 nt, Artificial Sequence
  Description of Artificial Sequence: Synthetic oligonucleotide
  Antisense Strand to SEQ ID NO: 391437
gugcccagagucuuaaucc

SEQ ID NO: 391439 - RNA, 19 nt, Artificial Sequence
  Description of Artificial Sequence: Synthetic oligonucleotide
  Sense Strand Starting at position 925 of SEQ ID NO: 316567
cgucuugguccuuugcauu

SEQ ID NO: 391440 - RNA, 19 nt, Artificial Sequence
  Description of Artificial Sequence: Synthetic oligonucleotide
  Antisense Strand to SEQ ID NO: 391439
aaugcaaaggaccaagacg

SEQ ID NO: 391441 - RNA, 19 nt, Artificial Sequence
  Description of Artificial Sequence: Synthetic oligonucleotide
  Sense Strand Starting at position 925 of SEQ ID NO: 316642
ugagaagacucagagagaa

SEQ ID NO: 391442 - RNA, 19 nt, Artificial Sequence
  Description of Artificial Sequence: Synthetic oligonucleotide
  Antisense Strand to SEQ ID NO: 391441
uucucucugagucuucuca

SEQ ID NO: 391443 - RNA, 19 nt, Artificial Sequence
  Description of Artificial Sequence: Synthetic oligonucleotide
  Sense Strand Starting at position 925 of SEQ ID NO: 316726
gcgggagaaggugguaaua

SEQ ID NO: 391444 - RNA, 19 nt, Artificial Sequence
  Description of Artificial Sequence: Synthetic oligonucleotide
  Antisense Strand to SEQ ID NO: 391443
uauuaccaccuucucccgc

SEQ ID NO: 391445 - RNA, 19 nt, Artificial Sequence
  Description of Artificial Sequence: Synthetic oligonucleotide
  Sense Strand Starting at position 925 of SEQ ID NO: 317189
gccuccgggccguuauaaa

SEQ ID NO: 391446 - RNA, 19 nt, Artificial Sequence
  Description of Artificial Sequence: Synthetic oligonucleotide
  Antisense Strand to SEQ ID NO: 391445
uuuauaacggcccggaggc

SEQ ID NO: 391447 - RNA, 19 nt, Artificial Sequence
  Description of Artificial Sequence: Synthetic oligonucleotide
  Sense Strand Starting at position 925 of SEQ ID NO: 317539
gcaaaucauuugcuguaca

SEQ ID NO: 391448 - RNA, 19 nt, Artificial Sequence
  Description of Artificial Sequence: Synthetic oligonucleotide
  Antisense Strand to SEQ ID NO: 391447
uguacagcaaaugauuugc

SEQ ID NO: 391449 - RNA, 19 nt, Artificial Sequence
  Description of Artificial Sequence: Synthetic oligonucleotide
  Sense Strand Starting at position 925 of SEQ ID NO: 317709
cucuccucacgguggaaua

SEQ ID NO: 391450 - RNA, 19 nt, Artificial Sequence
  Description of Artificial Sequence: Synthetic oligonucleotide
  Antisense Strand to SEQ ID NO: 391449
uauuccaccgugaggagag

SEQ ID NO: 391451 - RNA, 19 nt, Artificial Sequence
  Description of Artificial Sequence: Synthetic oligonucleotide
  Sense Strand Starting at position 925 of SEQ ID NO: 317722
ggaauaacuuaacagagaa

SEQ ID NO: 391452 - RNA, 19 nt, Artificial Sequence
  Description of Artificial Sequence: Synthetic oligonucleotide
  Antisense Strand to SEQ ID NO: 391451
uucucuguuaaguuauucc

SEQ ID NO: 391453 - RNA, 19 nt, Artificial Sequence
  Description of Artificial Sequence: Synthetic oligonucleotide
  Sense Strand Starting at position 925 of SEQ ID NO: 317753
ucaaauacccuggaaacgu

SEQ ID NO: 391454 - RNA, 19 nt, Artificial Sequence
  Description of Artificial Sequence: Synthetic oligonucleotide
  Antisense Strand to SEQ ID NO: 391453
acguuuccaggguauuuga

SEQ ID NO: 391455 - RNA, 19 nt, Artificial Sequence
  Description of Artificial Sequence: Synthetic oligonucleotide
  Sense Strand Starting at position 925 of SEQ ID NO: 317832
cgugaaaggauuuguccuu

SEQ ID NO: 391456 - RNA, 19 nt, Artificial Sequence
  Description of Artificial Sequence: Synthetic oligonucleotide
  Antisense Strand to SEQ ID NO: 391455
aaggacaaauccuuucacg

SEQ ID NO: 391457 - RNA, 19 nt, Artificial Sequence
  Description of Artificial Sequence: Synthetic oligonucleotide
  Sense Strand Starting at position 925 of SEQ ID NO: 318128
ugcgauagggcguuauugu

SEQ ID NO: 391458 - RNA, 19 nt, Artificial Sequence
  Description of Artificial Sequence: Synthetic oligonucleotide
  Antisense Strand to SEQ ID NO: 391457
acaauaacgcccuaucgca

SEQ ID NO: 391459 - RNA, 19 nt, Artificial Sequence
  Description of Artificial Sequence: Synthetic oligonucleotide
  Sense Strand Starting at position 925 of SEQ ID NO: 318162
guaaacaugaauugagugu

SEQ ID NO: 391460 - RNA, 19 nt, Artificial Sequence
  Description of Artificial Sequence: Synthetic oligonucleotide
  Antisense Strand to SEQ ID NO: 391459
acacucaauucauguuuac

SEQ ID NO: 391461 - RNA, 19 nt, Artificial Sequence
  Description of Artificial Sequence: Synthetic oligonucleotide
  Sense Strand Starting at position 925 of SEQ ID NO: 318166
acaugaauugagugucuag

SEQ ID NO: 391462 - RNA, 19 nt, Artificial Sequence
  Description of Artificial Sequence: Synthetic oligonucleotide
  Antisense Strand to SEQ ID NO: 391461
cuagacacucaauucaugu

SEQ ID NO: 391463 - RNA, 19 nt, Artificial Sequence
  Description of Artificial Sequence: Synthetic oligonucleotide
  Sense Strand Starting at position 925 of SEQ ID NO: 318377
cuuuccuggucucuuaaga

SEQ ID NO: 391464 - RNA, 19 nt, Artificial Sequence
  Description of Artificial Sequence: Synthetic oligonucleotide
  Antisense Strand to SEQ ID NO: 391463
ucuuaagagaccaggaaag

SEQ ID NO: 391465 - RNA, 19 nt, Artificial Sequence
  Description of Artificial Sequence: Synthetic oligonucleotide
  Sense Strand Starting at position 925 of SEQ ID NO: 318556
uguuaaacagcugaauauu

SEQ ID NO: 391466 - RNA, 19 nt, Artificial Sequence
  Description of Artificial Sequence: Synthetic oligonucleotide
  Antisense Strand to SEQ ID NO: 391465
aauauucagcuguuuaaca

SEQ ID NO: 391467 - RNA, 19 nt, Artificial Sequence
  Description of Artificial Sequence: Synthetic oligonucleotide
  Sense Strand Starting at position 925 of SEQ ID NO: 318978
uuacacagcuguuuggaaa

SEQ ID NO: 391468 - RNA, 19 nt, Artificial Sequence
  Description of Artificial Sequence: Synthetic oligonucleotide
  Antisense Strand to SEQ ID NO: 391467
uuuccaaacagcuguguaa

SEQ ID NO: 391469 - RNA, 19 nt, Artificial Sequence
  Description of Artificial Sequence: Synthetic oligonucleotide
  Sense Strand Starting at position 925 of SEQ ID NO: 319104
gcuuuaaugcuuuaggaga

SEQ ID NO: 391470 - RNA, 19 nt, Artificial Sequence
  Description of Artificial Sequence: Synthetic oligonucleotide
  Antisense Strand to SEQ ID NO: 391469
ucuccuaaagcauuaaagc

SEQ ID NO: 391471 - RNA, 19 nt, Artificial Sequence
  Description of Artificial Sequence: Synthetic oligonucleotide
  Sense Strand Starting at position 926 of SEQ ID NO: 315271
cuagcaaauuucuaugaug

SEQ ID NO: 391472 - RNA, 19 nt, Artificial Sequence
  Description of Artificial Sequence: Synthetic oligonucleotide
  Antisense Strand to SEQ ID NO: 391471
caucauagaaauuugcuag

SEQ ID NO: 391473 - RNA, 19 nt, Artificial Sequence
  Description of Artificial Sequence: Synthetic oligonucleotide
  Sense Strand Starting at position 926 of SEQ ID NO: 315274
gcaaauuucuaugaugaca

SEQ ID NO: 391474 - RNA, 19 nt, Artificial Sequence
  Description of Artificial Sequence: Synthetic oligonucleotide
  Antisense Strand to SEQ ID NO: 391473
ugucaucauagaaauuugc

SEQ ID NO: 391475 - RNA, 19 nt, Artificial Sequence
  Description of Artificial Sequence: Synthetic oligonucleotide
  Sense Strand Starting at position 926 of SEQ ID NO: 315401
uuacaaauuggcugaauga

SEQ ID NO: 391476 - RNA, 19 nt, Artificial Sequence
  Description of Artificial Sequence: Synthetic oligonucleotide
  Antisense Strand to SEQ ID NO: 391475
ucauucagccaauuuguaa

SEQ ID NO: 391477 - RNA, 19 nt, Artificial Sequence
  Description of Artificial Sequence: Synthetic oligonucleotide
  Sense Strand Starting at position 926 of SEQ ID NO: 315545
aguggaauguuagcaaauu

SEQ ID NO: 391478 - RNA, 19 nt, Artificial Sequence
  Description of Artificial Sequence: Synthetic oligonucleotide
  Antisense Strand to SEQ ID NO: 391477
aauuugcuaacauuccacu

SEQ ID NO: 391479 - RNA, 19 nt, Artificial Sequence
  Description of Artificial Sequence: Synthetic oligonucleotide
  Sense Strand Starting at position 926 of SEQ ID NO: 316084
cuugguauuccuuauauau

SEQ ID NO: 391480 - RNA, 19 nt, Artificial Sequence
  Description of Artificial Sequence: Synthetic oligonucleotide
  Antisense Strand to SEQ ID NO: 391479
auauauaaggaauaccaag

SEQ ID NO: 391481 - RNA, 19 nt, Artificial Sequence
  Description of Artificial Sequence: Synthetic oligonucleotide
  Sense Strand Starting at position 926 of SEQ ID NO: 316229
guacaaacgaucugagaaa

SEQ ID NO: 391482 - RNA, 19 nt, Artificial Sequence
  Description of Artificial Sequence: Synthetic oligonucleotide
  Antisense Strand to SEQ ID NO: 391481
uuucucagaucguuuguac

SEQ ID NO: 391483 - RNA, 19 nt, Artificial Sequence
  Description of Artificial Sequence: Synthetic oligonucleotide
  Sense Strand Starting at position 926 of SEQ ID NO: 316342
guuaaugugagacaagcaa

SEQ ID NO: 391484 - RNA, 19 nt, Artificial Sequence
  Description of Artificial Sequence: Synthetic oligonucleotide
  Antisense Strand to SEQ ID NO: 391483
uugcuugucucacauuaac

SEQ ID NO: 391485 - RNA, 19 nt, Artificial Sequence
  Description of Artificial Sequence: Synthetic oligonucleotide
  Sense Strand Starting at position 926 of SEQ ID NO: 316366
gcucaaaguccagaaauug

SEQ ID NO: 391486 - RNA, 19 nt, Artificial Sequence
  Description of Artificial Sequence: Synthetic oligonucleotide
  Antisense Strand to SEQ ID NO: 391485
caauuucuggacuuugagc

SEQ ID NO: 391487 - RNA, 19 nt, Artificial Sequence
  Description of Artificial Sequence: Synthetic oligonucleotide
  Sense Strand Starting at position 926 of SEQ ID NO: 316500
cuaguucucugacugggaa

SEQ ID NO: 391488 - RNA, 19 nt, Artificial Sequence
  Description of Artificial Sequence: Synthetic oligonucleotide
  Antisense Strand to SEQ ID NO: 391487
uucccagucagagaacuag

SEQ ID NO: 391489 - RNA, 19 nt, Artificial Sequence
  Description of Artificial Sequence: Synthetic oligonucleotide
  Sense Strand Starting at position 926 of SEQ ID NO: 316502
aguucucugacugggaacu

SEQ ID NO: 391490 - RNA, 19 nt, Artificial Sequence
  Description of Artificial Sequence: Synthetic oligonucleotide
  Antisense Strand to SEQ ID NO: 391489
aguucccagucagagaacu

SEQ ID NO: 391491 - RNA, 19 nt, Artificial Sequence
  Description of Artificial Sequence: Synthetic oligonucleotide
  Sense Strand Starting at position 926 of SEQ ID NO: 316503
guucucugacugggaacuu

SEQ ID NO: 391492 - RNA, 19 nt, Artificial Sequence
  Description of Artificial Sequence: Synthetic oligonucleotide
  Antisense Strand to SEQ ID NO: 391491
aaguucccagucagagaac

SEQ ID NO: 391493 - RNA, 19 nt, Artificial Sequence
  Description of Artificial Sequence: Synthetic oligonucleotide
  Sense Strand Starting at position 926 of SEQ ID NO: 316521
ucagcuuugaagggaaaug

SEQ ID NO: 391494 - RNA, 19 nt, Artificial Sequence
  Description of Artificial Sequence: Synthetic oligonucleotide
  Antisense Strand to SEQ ID NO: 391493
cauuucccuucaaagcuga

SEQ ID NO: 391495 - RNA, 19 nt, Artificial Sequence
  Description of Artificial Sequence: Synthetic oligonucleotide
  Sense Strand Starting at position 926 of SEQ ID NO: 316575
ucaucuagguucuuagauc

SEQ ID NO: 391496 - RNA, 19 nt, Artificial Sequence
  Description of Artificial Sequence: Synthetic oligonucleotide
  Antisense Strand to SEQ ID NO: 391495
gaucuaagaaccuagauga

SEQ ID NO: 391497 - RNA, 19 nt, Artificial Sequence
  Description of Artificial Sequence: Synthetic oligonucleotide
  Sense Strand Starting at position 926 of SEQ ID NO: 316589
agaucuguccuguaggcaa

SEQ ID NO: 391498 - RNA, 19 nt, Artificial Sequence
  Description of Artificial Sequence: Synthetic oligonucleotide
  Antisense Strand to SEQ ID NO: 391497
uugccuacaggacagaucu

SEQ ID NO: 391499 - RNA, 19 nt, Artificial Sequence
  Description of Artificial Sequence: Synthetic oligonucleotide
  Sense Strand Starting at position 926 of SEQ ID NO: 316697
ucgguacuuacuggaaacu

SEQ ID NO: 391500 - RNA, 19 nt, Artificial Sequence
  Description of Artificial Sequence: Synthetic oligonucleotide
  Antisense Strand to SEQ ID NO: 391499
aguuuccaguaaguaccga

SEQ ID NO: 391501 - RNA, 19 nt, Artificial Sequence
  Description of Artificial Sequence: Synthetic oligonucleotide
  Sense Strand Starting at position 926 of SEQ ID NO: 316698
cgguacuuacuggaaacuu

SEQ ID NO: 391502 - RNA, 19 nt, Artificial Sequence
  Description of Artificial Sequence: Synthetic oligonucleotide
  Antisense Strand to SEQ ID NO: 391501
aaguuuccaguaaguaccg

SEQ ID NO: 391503 - RNA, 19 nt, Artificial Sequence
  Description of Artificial Sequence: Synthetic oligonucleotide
  Sense Strand Starting at position 926 of SEQ ID NO: 316709
ggaaacuuucuaggaggcu

SEQ ID NO: 391504 - RNA, 19 nt, Artificial Sequence
  Description of Artificial Sequence: Synthetic oligonucleotide
  Antisense Strand to SEQ ID NO: 391503
agccuccuagaaaguuucc

SEQ ID NO: 391505 - RNA, 19 nt, Artificial Sequence
  Description of Artificial Sequence: Synthetic oligonucleotide
  Sense Strand Starting at position 926 of SEQ ID NO: 316725
gcugcagcucuagagaaga

SEQ ID NO: 391506 - RNA, 19 nt, Artificial Sequence
  Description of Artificial Sequence: Synthetic oligonucleotide
  Antisense Strand to SEQ ID NO: 391505
ucuucucuagagcugcagc

SEQ ID NO: 391507 - RNA, 19 nt, Artificial Sequence
  Description of Artificial Sequence: Synthetic oligonucleotide
  Sense Strand Starting at position 926 of SEQ ID NO: 316799
agacgcuauugauuacuca

SEQ ID NO: 391508 - RNA, 19 nt, Artificial Sequence
  Description of Artificial Sequence: Synthetic oligonucleotide
  Antisense Strand to SEQ ID NO: 391507
ugaguaaucaauagcgucu

SEQ ID NO: 391509 - RNA, 19 nt, Artificial Sequence
  Description of Artificial Sequence: Synthetic oligonucleotide
  Sense Strand Starting at position 926 of SEQ ID NO: 317161
guaaacacugcugagacau

SEQ ID NO: 391510 - RNA, 19 nt, Artificial Sequence
  Description of Artificial Sequence: Synthetic oligonucleotide
  Antisense Strand to SEQ ID NO: 391509
augucucagcaguguuuac

SEQ ID NO: 391511 - RNA, 19 nt, Artificial Sequence
  Description of Artificial Sequence: Synthetic oligonucleotide
  Sense Strand Starting at position 926 of SEQ ID NO: 317255
caguucucugacuggucaa

SEQ ID NO: 391512 - RNA, 19 nt, Artificial Sequence
  Description of Artificial Sequence: Synthetic oligonucleotide
  Antisense Strand to SEQ ID NO: 391511
uugaccagucagagaacug

SEQ ID NO: 391513 - RNA, 19 nt, Artificial Sequence
  Description of Artificial Sequence: Synthetic oligonucleotide
  Sense Strand Starting at position 926 of SEQ ID NO: 317258
uucucugacuggucaagac

SEQ ID NO: 391514 - RNA, 19 nt, Artificial Sequence
  Description of Artificial Sequence: Synthetic oligonucleotide
  Antisense Strand to SEQ ID NO: 391513
gucuugaccagucagagaa

SEQ ID NO: 391515 - RNA, 19 nt, Artificial Sequence
  Description of Artificial Sequence: Synthetic oligonucleotide
  Sense Strand Starting at position 926 of SEQ ID NO: 317331
gacacugaguugucccuga

SEQ ID NO: 391516 - RNA, 19 nt, Artificial Sequence
  Description of Artificial Sequence: Synthetic oligonucleotide
  Antisense Strand to SEQ ID NO: 391515
ucagggacaacucaguguc

SEQ ID NO: 391517 - RNA, 19 nt, Artificial Sequence
  Description of Artificial Sequence: Synthetic oligonucleotide
  Sense Strand Starting at position 926 of SEQ ID NO: 317336
ugaguugucccugaagaua

SEQ ID NO: 391518 - RNA, 19 nt, Artificial Sequence
  Description of Artificial Sequence: Synthetic oligonucleotide
  Antisense Strand to SEQ ID NO: 391517
uaucuucagggacaacuca

SEQ ID NO: 391519 - RNA, 19 nt, Artificial Sequence
  Description of Artificial Sequence: Synthetic oligonucleotide
  Sense Strand Starting at position 926 of SEQ ID NO: 317339
guugucccugaagauauua

SEQ ID NO: 391520 - RNA, 19 nt, Artificial Sequence
  Description of Artificial Sequence: Synthetic oligonucleotide
  Antisense Strand to SEQ ID NO: 391519
uaauaucuucagggacaac

SEQ ID NO: 391521 - RNA, 19 nt, Artificial Sequence
  Description of Artificial Sequence: Synthetic oligonucleotide
  Sense Strand Starting at position 926 of SEQ ID NO: 317426
uuugaucauccacauguuu

SEQ ID NO: 391522 - RNA, 19 nt, Artificial Sequence
  Description of Artificial Sequence: Synthetic oligonucleotide
  Antisense Strand to SEQ ID NO: 391521
aaacauguggaugaucaaa

SEQ ID NO: 391523 - RNA, 19 nt, Artificial Sequence
  Description of Artificial Sequence: Synthetic oligonucleotide
  Sense Strand Starting at position 926 of SEQ ID NO: 318301
uuauguguccuacacugua

SEQ ID NO: 391524 - RNA, 19 nt, Artificial Sequence
  Description of Artificial Sequence: Synthetic oligonucleotide
  Antisense Strand to SEQ ID NO: 391523
uacaguguaggacacauaa

SEQ ID NO: 391525 - RNA, 19 nt, Artificial Sequence
  Description of Artificial Sequence: Synthetic oligonucleotide
  Sense Strand Starting at position 926 of SEQ ID NO: 318410
agaaguuaacuuugugaaa

SEQ ID NO: 391526 - RNA, 19 nt, Artificial Sequence
  Description of Artificial Sequence: Synthetic oligonucleotide
  Antisense Strand to SEQ ID NO: 391525
uuucacaaaguuaacuucu

SEQ ID NO: 391527 - RNA, 19 nt, Artificial Sequence
  Description of Artificial Sequence: Synthetic oligonucleotide
  Sense Strand Starting at position 926 of SEQ ID NO: 318411
gaaguuaacuuugugaaag

SEQ ID NO: 391528 - RNA, 19 nt, Artificial Sequence
  Description of Artificial Sequence: Synthetic oligonucleotide
  Antisense Strand to SEQ ID NO: 391527
cuuucacaaaguuaacuuc

SEQ ID NO: 391529 - RNA, 19 nt, Artificial Sequence
  Description of Artificial Sequence: Synthetic oligonucleotide
  Sense Strand Starting at position 926 of SEQ ID NO: 318431
gauaucuggcuuuagcuca

SEQ ID NO: 391530 - RNA, 19 nt, Artificial Sequence
  Description of Artificial Sequence: Synthetic oligonucleotide
  Antisense Strand to SEQ ID NO: 391529
ugagcuaaagccagauauc

SEQ ID NO: 391531 - RNA, 19 nt, Artificial Sequence
  Description of Artificial Sequence: Synthetic oligonucleotide
  Sense Strand Starting at position 926 of SEQ ID NO: 318436
cuggcuuuagcucaauaug

SEQ ID NO: 391532 - RNA, 19 nt, Artificial Sequence
  Description of Artificial Sequence: Synthetic oligonucleotide
  Antisense Strand to SEQ ID NO: 391531
cauauugagcuaaagccag

SEQ ID NO: 391533 - RNA, 19 nt, Artificial Sequence
  Description of Artificial Sequence: Synthetic oligonucleotide
  Sense Strand Starting at position 926 of SEQ ID NO: 318439
gcuuuagcucaauaugaau

SEQ ID NO: 391534 - RNA, 19 nt, Artificial Sequence
  Description of Artificial Sequence: Synthetic oligonucleotide
  Antisense Strand to SEQ ID NO: 391533
auucauauugagcuaaagc

SEQ ID NO: 391535 - RNA, 19 nt, Artificial Sequence
  Description of Artificial Sequence: Synthetic oligonucleotide
  Sense Strand Starting at position 926 of SEQ ID NO: 318613
ccaacauagugucuacuua

SEQ ID NO: 391536 - RNA, 19 nt, Artificial Sequence
  Description of Artificial Sequence: Synthetic oligonucleotide
  Antisense Strand to SEQ ID NO: 391535
uaaguagacacuauguugg

SEQ ID NO: 391537 - RNA, 19 nt, Artificial Sequence
  Description of Artificial Sequence: Synthetic oligonucleotide
  Sense Strand Starting at position 926 of SEQ ID NO: 318814
cugaaaugacaguguuaac

SEQ ID NO: 391538 - RNA, 19 nt, Artificial Sequence
  Description of Artificial Sequence: Synthetic oligonucleotide
  Antisense Strand to SEQ ID NO: 391537
guuaacacugucauuucag

SEQ ID NO: 391539 - RNA, 19 nt, Artificial Sequence
  Description of Artificial Sequence: Synthetic oligonucleotide
  Sense Strand Starting at position 926 of SEQ ID NO: 318923
aguguuuauuucuugcuca

SEQ ID NO: 391540 - RNA, 19 nt, Artificial Sequence
  Description of Artificial Sequence: Synthetic oligonucleotide
  Antisense Strand to SEQ ID NO: 391539
ugagcaagaaauaaacacu

SEQ ID NO: 391541 - RNA, 19 nt, Artificial Sequence
  Description of Artificial Sequence: Synthetic oligonucleotide
  Sense Strand Starting at position 926 of SEQ ID NO: 318952
acuacaagucugcaugacu

SEQ ID NO: 391542 - RNA, 19 nt, Artificial Sequence
  Description of Artificial Sequence: Synthetic oligonucleotide
  Antisense Strand to SEQ ID NO: 391541
agucaugcagacuuguagu

SEQ ID NO: 391543 - RNA, 19 nt, Artificial Sequence
  Description of Artificial Sequence: Synthetic oligonucleotide
  Sense Strand Starting at position 926 of SEQ ID NO: 318961
cugcaugacuuuccaagua

SEQ ID NO: 391544 - RNA, 19 nt, Artificial Sequence
  Description of Artificial Sequence: Synthetic oligonucleotide
  Antisense Strand to SEQ ID NO: 391543
uacuuggaaagucaugcag

SEQ ID NO: 391545 - RNA, 19 nt, Artificial Sequence
  Description of Artificial Sequence: Synthetic oligonucleotide
  Sense Strand Starting at position 926 of SEQ ID NO: 319165
cgagguaugccugacuuga

SEQ ID NO: 391546 - RNA, 19 nt, Artificial Sequence
  Description of Artificial Sequence: Synthetic oligonucleotide
  Antisense Strand to SEQ ID NO: 391545
ucaagucaggcauaccucg

SEQ ID NO: 391547 - RNA, 19 nt, Artificial Sequence
  Description of Artificial Sequence: Synthetic oligonucleotide
  Sense Strand Starting at position 926 of SEQ ID NO: 319167
agguaugccugacuugaag

SEQ ID NO: 391548 - RNA, 19 nt, Artificial Sequence
  Description of Artificial Sequence: Synthetic oligonucleotide
  Antisense Strand to SEQ ID NO: 391547
cuucaagucaggcauaccu

SEQ ID NO: 391549 - RNA, 19 nt, Artificial Sequence
  Description of Artificial Sequence: Synthetic oligonucleotide
  Sense Strand Starting at position 926 of SEQ ID NO: 319169
guaugccugacuugaagag

SEQ ID NO: 391550 - RNA, 19 nt, Artificial Sequence
  Description of Artificial Sequence: Synthetic oligonucleotide
  Antisense Strand to SEQ ID NO: 391549
cucuucaagucaggcauac

SEQ ID NO: 391551 - RNA, 19 nt, Artificial Sequence
  Description of Artificial Sequence: Synthetic oligonucleotide
  Sense Strand Starting at position 927 of SEQ ID NO: 315318
aggaauacccauugguuaa

SEQ ID NO: 391552 - RNA, 19 nt, Artificial Sequence
  Description of Artificial Sequence: Synthetic oligonucleotide
  Antisense Strand to SEQ ID NO: 391551
uuaaccaauggguauuccu

SEQ ID NO: 391553 - RNA, 19 nt, Artificial Sequence
  Description of Artificial Sequence: Synthetic oligonucleotide
  Sense Strand Starting at position 927 of SEQ ID NO: 315322
auacccauugguuaaagua

SEQ ID NO: 391554 - RNA, 19 nt, Artificial Sequence
  Description of Artificial Sequence: Synthetic oligonucleotide
  Antisense Strand to SEQ ID NO: 391553
uacuuuaaccaauggguau

SEQ ID NO: 391555 - RNA, 19 nt, Artificial Sequence
  Description of Artificial Sequence: Synthetic oligonucleotide
  Sense Strand Starting at position 927 of SEQ ID NO: 315344
agaauaugucauuguacaa

SEQ ID NO: 391556 - RNA, 19 nt, Artificial Sequence
  Description of Artificial Sequence: Synthetic oligonucleotide
  Antisense Strand to SEQ ID NO: 391555
uuguacaaugacauauucu

SEQ ID NO: 391557 - RNA, 19 nt, Artificial Sequence
  Description of Artificial Sequence: Synthetic oligonucleotide
  Sense Strand Starting at position 927 of SEQ ID NO: 315370
cuggaaugaaagugucaca

SEQ ID NO: 391558 - RNA, 19 nt, Artificial Sequence
  Description of Artificial Sequence: Synthetic oligonucleotide
  Antisense Strand to SEQ ID NO: 391557
ugugacacuuucauuccag

SEQ ID NO: 391559 - RNA, 19 nt, Artificial Sequence
  Description of Artificial Sequence: Synthetic oligonucleotide
  Sense Strand Starting at position 927 of SEQ ID NO: 315803
gaauguuguuuguuuacua

SEQ ID NO: 391560 - RNA, 19 nt, Artificial Sequence
  Description of Artificial Sequence: Synthetic oligonucleotide
  Antisense Strand to SEQ ID NO: 391559
uaguaaacaaacaacauuc

SEQ ID NO: 391561 - RNA, 19 nt, Artificial Sequence
  Description of Artificial Sequence: Synthetic oligonucleotide
  Sense Strand Starting at position 927 of SEQ ID NO: 315917
agaggauguugggagaaau

SEQ ID NO: 391562 - RNA, 19 nt, Artificial Sequence
  Description of Artificial Sequence: Synthetic oligonucleotide
  Antisense Strand to SEQ ID NO: 391561
auuucucccaacauccucu

SEQ ID NO: 391563 - RNA, 19 nt, Artificial Sequence
  Description of Artificial Sequence: Synthetic oligonucleotide
  Sense Strand Starting at position 927 of SEQ ID NO: 315930
agaaaucguauagguaaau

SEQ ID NO: 391564 - RNA, 19 nt, Artificial Sequence
  Description of Artificial Sequence: Synthetic oligonucleotide
  Antisense Strand to SEQ ID NO: 391563
auuuaccuauacgauuucu

SEQ ID NO: 391565 - RNA, 19 nt, Artificial Sequence
  Description of Artificial Sequence: Synthetic oligonucleotide
  Sense Strand Starting at position 927 of SEQ ID NO: 315931
gaaaucguauagguaaauu

SEQ ID NO: 391566 - RNA, 19 nt, Artificial Sequence
  Description of Artificial Sequence: Synthetic oligonucleotide
  Antisense Strand to SEQ ID NO: 391565
aauuuaccuauacgauuuc

SEQ ID NO: 391567 - RNA, 19 nt, Artificial Sequence
  Description of Artificial Sequence: Synthetic oligonucleotide
  Sense Strand Starting at position 927 of SEQ ID NO: 315977
ugaucuggauuggagagaa

SEQ ID NO: 391568 - RNA, 19 nt, Artificial Sequence
  Description of Artificial Sequence: Synthetic oligonucleotide
  Antisense Strand to SEQ ID NO: 391567
uucucuccaauccagauca

SEQ ID NO: 391569 - RNA, 19 nt, Artificial Sequence
  Description of Artificial Sequence: Synthetic oligonucleotide
  Sense Strand Starting at position 927 of SEQ ID NO: 315996
cggauagguguauggaagu

SEQ ID NO: 391570 - RNA, 19 nt, Artificial Sequence
  Description of Artificial Sequence: Synthetic oligonucleotide
  Antisense Strand to SEQ ID NO: 391569
acuuccauacaccuauccg

SEQ ID NO: 391571 - RNA, 19 nt, Artificial Sequence
  Description of Artificial Sequence: Synthetic oligonucleotide
  Sense Strand Starting at position 927 of SEQ ID NO: 316002
gguguauggaagugauaaa

SEQ ID NO: 391572 - RNA, 19 nt, Artificial Sequence
  Description of Artificial Sequence: Synthetic oligonucleotide
  Antisense Strand to SEQ ID NO: 391571
uuuaucacuuccauacacc

SEQ ID NO: 391573 - RNA, 19 nt, Artificial Sequence
  Description of Artificial Sequence: Synthetic oligonucleotide
  Sense Strand Starting at position 927 of SEQ ID NO: 316052
gggagcuuuaagcaagagu

SEQ ID NO: 391574 - RNA, 19 nt, Artificial Sequence
  Description of Artificial Sequence: Synthetic oligonucleotide
  Antisense Strand to SEQ ID NO: 391573
acucuugcuuaaagcuccc

SEQ ID NO: 391575 - RNA, 19 nt, Artificial Sequence
  Description of Artificial Sequence: Synthetic oligonucleotide
  Sense Strand Starting at position 927 of SEQ ID NO: 316166
uuauguguggucuacucuu

SEQ ID NO: 391576 - RNA, 19 nt, Artificial Sequence
  Description of Artificial Sequence: Synthetic oligonucleotide
  Antisense Strand to SEQ ID NO: 391575
aagaguagaccacacauaa

SEQ ID NO: 391577 - RNA, 19 nt, Artificial Sequence
  Description of Artificial Sequence: Synthetic oligonucleotide
  Sense Strand Starting at position 927 of SEQ ID NO: 316174
ggucuacucuucuugguaa

SEQ ID NO: 391578 - RNA, 19 nt, Artificial Sequence
  Description of Artificial Sequence: Synthetic oligonucleotide
  Antisense Strand to SEQ ID NO: 391577
uuaccaagaagaguagacc

SEQ ID NO: 391579 - RNA, 19 nt, Artificial Sequence
  Description of Artificial Sequence: Synthetic oligonucleotide
  Sense Strand Starting at position 927 of SEQ ID NO: 316176
ucuacucuucuugguaaag

SEQ ID NO: 391580 - RNA, 19 nt, Artificial Sequence
  Description of Artificial Sequence: Synthetic oligonucleotide
  Antisense Strand to SEQ ID NO: 391579
cuuuaccaagaagaguaga

SEQ ID NO: 391581 - RNA, 19 nt, Artificial Sequence
  Description of Artificial Sequence: Synthetic oligonucleotide
  Sense Strand Starting at position 927 of SEQ ID NO: 316188
gguaaaggugcuuaccaga

SEQ ID NO: 391582 - RNA, 19 nt, Artificial Sequence
  Description of Artificial Sequence: Synthetic oligonucleotide
  Antisense Strand to SEQ ID NO: 391581
ucugguaagcaccuuuacc

SEQ ID NO: 391583 - RNA, 19 nt, Artificial Sequence
  Description of Artificial Sequence: Synthetic oligonucleotide
  Sense Strand Starting at position 927 of SEQ ID NO: 316321
cccgcugucgaugaaugaa

SEQ ID NO: 391584 - RNA, 19 nt, Artificial Sequence
  Description of Artificial Sequence: Synthetic oligonucleotide
  Antisense Strand to SEQ ID NO: 391583
uucauucaucgacagcggg

SEQ ID NO: 391585 - RNA, 19 nt, Artificial Sequence
  Description of Artificial Sequence: Synthetic oligonucleotide
  Sense Strand Starting at position 927 of SEQ ID NO: 316324
gcugucgaugaaugaagau

SEQ ID NO: 391586 - RNA, 19 nt, Artificial Sequence
  Description of Artificial Sequence: Synthetic oligonucleotide
  Antisense Strand to SEQ ID NO: 391585
aucuucauucaucgacagc

SEQ ID NO: 391587 - RNA, 19 nt, Artificial Sequence
  Description of Artificial Sequence: Synthetic oligonucleotide
  Sense Strand Starting at position 927 of SEQ ID NO: 316375
gugagucuuggaggaucca

SEQ ID NO: 391588 - RNA, 19 nt, Artificial Sequence
  Description of Artificial Sequence: Synthetic oligonucleotide
  Antisense Strand to SEQ ID NO: 391587
uggauccuccaagacucac

SEQ ID NO: 391589 - RNA, 19 nt, Artificial Sequence
  Description of Artificial Sequence: Synthetic oligonucleotide
  Sense Strand Starting at position 927 of SEQ ID NO: 316575
ggaauuccgggucgaagaa

SEQ ID NO: 391590 - RNA, 19 nt, Artificial Sequence
  Description of Artificial Sequence: Synthetic oligonucleotide
  Antisense Strand to SEQ ID NO: 391589
uucuucgacccggaauucc

SEQ ID NO: 391591 - RNA, 19 nt, Artificial Sequence
  Description of Artificial Sequence: Synthetic oligonucleotide
  Sense Strand Starting at position 927 of SEQ ID NO: 316600
uggagagugucccucugaa

SEQ ID NO: 391592 - RNA, 19 nt, Artificial Sequence
  Description of Artificial Sequence: Synthetic oligonucleotide
  Antisense Strand to SEQ ID NO: 391591
uucagagggacacucucca

SEQ ID NO: 391593 - RNA, 19 nt, Artificial Sequence
  Description of Artificial Sequence: Synthetic oligonucleotide
  Sense Strand Starting at position 927 of SEQ ID NO: 316798
gacagaugcgcagaagacu

SEQ ID NO: 391594 - RNA, 19 nt, Artificial Sequence
  Description of Artificial Sequence: Synthetic oligonucleotide
  Antisense Strand to SEQ ID NO: 391593
agucuucugcgcaucuguc

SEQ ID NO: 391595 - RNA, 19 nt, Artificial Sequence
  Description of Artificial Sequence: Synthetic oligonucleotide
  Sense Strand Starting at position 927 of SEQ ID NO: 316807
gcagaagacuuccugcuca

SEQ ID NO: 391596 - RNA, 19 nt, Artificial Sequence
  Description of Artificial Sequence: Synthetic oligonucleotide
  Antisense Strand to SEQ ID NO: 391595
ugagcaggaagucuucugc

SEQ ID NO: 391597 - RNA, 19 nt, Artificial Sequence
  Description of Artificial Sequence: Synthetic oligonucleotide
  Sense Strand Starting at position 927 of SEQ ID NO: 316947
ggguguguccaucgagaga

SEQ ID NO: 391598 - RNA, 19 nt, Artificial Sequence
  Description of Artificial Sequence: Synthetic oligonucleotide
  Antisense Strand to SEQ ID NO: 391597
ucucucgauggacacaccc

SEQ ID NO: 391599 - RNA, 19 nt, Artificial Sequence
  Description of Artificial Sequence: Synthetic oligonucleotide
  Sense Strand Starting at position 927 of SEQ ID NO: 317471
augcacguccgaugacuaa

SEQ ID NO: 391600 - RNA, 19 nt, Artificial Sequence
  Description of Artificial Sequence: Synthetic oligonucleotide
  Antisense Strand to SEQ ID NO: 391599
uuagucaucggacgugcau

SEQ ID NO: 391601 - RNA, 19 nt, Artificial Sequence
  Description of Artificial Sequence: Synthetic oligonucleotide
  Sense Strand Starting at position 927 of SEQ ID NO: 317517
gcaccaggaugugucaaua

SEQ ID NO: 391602 - RNA, 19 nt, Artificial Sequence
  Description of Artificial Sequence: Synthetic oligonucleotide
  Antisense Strand to SEQ ID NO: 391601
uauugacacauccuggugc

SEQ ID NO: 391603 - RNA, 19 nt, Artificial Sequence
  Description of Artificial Sequence: Synthetic oligonucleotide
  Sense Strand Starting at position 927 of SEQ ID NO: 317565
guaggcguggccuagagau

SEQ ID NO: 391604 - RNA, 19 nt, Artificial Sequence
  Description of Artificial Sequence: Synthetic oligonucleotide
  Antisense Strand to SEQ ID NO: 391603
aucucuaggccacgccuac

SEQ ID NO: 391605 - RNA, 19 nt, Artificial Sequence
  Description of Artificial Sequence: Synthetic oligonucleotide
  Sense Strand Starting at position 927 of SEQ ID NO: 317567
aggcguggccuagagauga

SEQ ID NO: 391606 - RNA, 19 nt, Artificial Sequence
  Description of Artificial Sequence: Synthetic oligonucleotide
  Antisense Strand to SEQ ID NO: 391605
ucaucucuaggccacgccu

SEQ ID NO: 391607 - RNA, 19 nt, Artificial Sequence
  Description of Artificial Sequence: Synthetic oligonucleotide
  Sense Strand Starting at position 927 of SEQ ID NO: 317577
uagagaugauuggaucaau

SEQ ID NO: 391608 - RNA, 19 nt, Artificial Sequence
  Description of Artificial Sequence: Synthetic oligonucleotide
  Antisense Strand to SEQ ID NO: 391607
auugauccaaucaucucua

SEQ ID NO: 391609 - RNA, 19 nt, Artificial Sequence
  Description of Artificial Sequence: Synthetic oligonucleotide
  Sense Strand Starting at position 927 of SEQ ID NO: 317774
guagcuuacgucucaaugu

SEQ ID NO: 391610 - RNA, 19 nt, Artificial Sequence
  Description of Artificial Sequence: Synthetic oligonucleotide
  Antisense Strand to SEQ ID NO: 391609
acauugagacguaagcuac

SEQ ID NO: 391611 - RNA, 19 nt, Artificial Sequence
  Description of Artificial Sequence: Synthetic oligonucleotide
  Sense Strand Starting at position 927 of SEQ ID NO: 317783
gucucaaugucucuucuaa

SEQ ID NO: 391612 - RNA, 19 nt, Artificial Sequence
  Description of Artificial Sequence: Synthetic oligonucleotide
  Antisense Strand to SEQ ID NO: 391611
uuagaagagacauugagac

SEQ ID NO: 391613 - RNA, 19 nt, Artificial Sequence
  Description of Artificial Sequence: Synthetic oligonucleotide
  Sense Strand Starting at position 927 of SEQ ID NO: 317861
cuuccuacgugguucuaaa

SEQ ID NO: 391614 - RNA, 19 nt, Artificial Sequence
  Description of Artificial Sequence: Synthetic oligonucleotide
  Antisense Strand to SEQ ID NO: 391613
uuuagaaccacguaggaag

SEQ ID NO: 391615 - RNA, 19 nt, Artificial Sequence
  Description of Artificial Sequence: Synthetic oligonucleotide
  Sense Strand Starting at position 927 of SEQ ID NO: 317919
uugcuuugauaaguaaacu

SEQ ID NO: 391616 - RNA, 19 nt, Artificial Sequence
  Description of Artificial Sequence: Synthetic oligonucleotide
  Antisense Strand to SEQ ID NO: 391615
aguuuacuuaucaaagcaa

SEQ ID NO: 391617 - RNA, 19 nt, Artificial Sequence
  Description of Artificial Sequence: Synthetic oligonucleotide
  Sense Strand Starting at position 927 of SEQ ID NO: 317993
uugauacaggccugcaaua

SEQ ID NO: 391618 - RNA, 19 nt, Artificial Sequence
  Description of Artificial Sequence: Synthetic oligonucleotide
  Antisense Strand to SEQ ID NO: 391617
uauugcaggccuguaucaa

SEQ ID NO: 391619 - RNA, 19 nt, Artificial Sequence
  Description of Artificial Sequence: Synthetic oligonucleotide
  Sense Strand Starting at position 927 of SEQ ID NO: 318148
ucugcuaucggauacuaga

SEQ ID NO: 391620 - RNA, 19 nt, Artificial Sequence
  Description of Artificial Sequence: Synthetic oligonucleotide
  Antisense Strand to SEQ ID NO: 391619
ucuaguauccgauagcaga

SEQ ID NO: 391621 - RNA, 19 nt, Artificial Sequence
  Description of Artificial Sequence: Synthetic oligonucleotide
  Sense Strand Starting at position 927 of SEQ ID NO: 318151
gcuaucggauacuagauuu

SEQ ID NO: 391622 - RNA, 19 nt, Artificial Sequence
  Description of Artificial Sequence: Synthetic oligonucleotide
  Antisense Strand to SEQ ID NO: 391621
aaaucuaguauccgauagc

SEQ ID NO: 391623 - RNA, 19 nt, Artificial Sequence
  Description of Artificial Sequence: Synthetic oligonucleotide
  Sense Strand Starting at position 927 of SEQ ID NO: 318482
auaguuugguugcuuccaa

SEQ ID NO: 391624 - RNA, 19 nt, Artificial Sequence
  Description of Artificial Sequence: Synthetic oligonucleotide
  Antisense Strand to SEQ ID NO: 391623
uuggaagcaaccaaacuau

SEQ ID NO: 391625 - RNA, 19 nt, Artificial Sequence
  Description of Artificial Sequence: Synthetic oligonucleotide
  Sense Strand Starting at position 927 of SEQ ID NO: 318483
uaguuugguugcuuccaaa

SEQ ID NO: 391626 - RNA, 19 nt, Artificial Sequence
  Description of Artificial Sequence: Synthetic oligonucleotide
  Antisense Strand to SEQ ID NO: 391625
uuuggaagcaaccaaacua

SEQ ID NO: 391627 - RNA, 19 nt, Artificial Sequence
  Description of Artificial Sequence: Synthetic oligonucleotide
  Sense Strand Starting at position 927 of SEQ ID NO: 318958
uauguauucuggcuaugaa

SEQ ID NO: 391628 - RNA, 19 nt, Artificial Sequence
  Description of Artificial Sequence: Synthetic oligonucleotide
  Antisense Strand to SEQ ID NO: 391627
uucauagccagaauacaua

SEQ ID NO: 391629 - RNA, 19 nt, Artificial Sequence
  Description of Artificial Sequence: Synthetic oligonucleotide
  Sense Strand Starting at position 927 of SEQ ID NO: 319141
gaucaaaguccuggagagu

SEQ ID NO: 391630 - RNA, 19 nt, Artificial Sequence
  Description of Artificial Sequence: Synthetic oligonucleotide
  Antisense Strand to SEQ ID NO: 391629
acucuccaggacuuugauc

SEQ ID NO: 391631 - RNA, 19 nt, Artificial Sequence
  Description of Artificial Sequence: Synthetic oligonucleotide
  Sense Strand Starting at position 928 of SEQ ID NO: 315286
agaucugaauaguuauuga

SEQ ID NO: 391632 - RNA, 19 nt, Artificial Sequence
  Description of Artificial Sequence: Synthetic oligonucleotide
  Antisense Strand to SEQ ID NO: 391631
ucaauaacuauucagaucu

SEQ ID NO: 391633 - RNA, 19 nt, Artificial Sequence
  Description of Artificial Sequence: Synthetic oligonucleotide
  Sense Strand Starting at position 928 of SEQ ID NO: 315289
ucugaauaguuauugaugu

SEQ ID NO: 391634 - RNA, 19 nt, Artificial Sequence
  Description of Artificial Sequence: Synthetic oligonucleotide
  Antisense Strand to SEQ ID NO: 391633
acaucaauaacuauucaga

SEQ ID NO: 391635 - RNA, 19 nt, Artificial Sequence
  Description of Artificial Sequence: Synthetic oligonucleotide
  Sense Strand Starting at position 928 of SEQ ID NO: 315334
ugacaucagcuuuaccagu

SEQ ID NO: 391636 - RNA, 19 nt, Artificial Sequence
  Description of Artificial Sequence: Synthetic oligonucleotide
  Antisense Strand to SEQ ID NO: 391635
acugguaaagcugauguca

SEQ ID NO: 391637 - RNA, 19 nt, Artificial Sequence
  Description of Artificial Sequence: Synthetic oligonucleotide
  Sense Strand Starting at position 928 of SEQ ID NO: 315412
aaguuagaaguuugguuua

SEQ ID NO: 391638 - RNA, 19 nt, Artificial Sequence
  Description of Artificial Sequence: Synthetic oligonucleotide
  Antisense Strand to SEQ ID NO: 391637
uaaaccaaacuucuaacuu

SEQ ID NO: 391639 - RNA, 19 nt, Artificial Sequence
  Description of Artificial Sequence: Synthetic oligonucleotide
  Sense Strand Starting at position 928 of SEQ ID NO: 315414
guuagaaguuugguuuaca

SEQ ID NO: 391640 - RNA, 19 nt, Artificial Sequence
  Description of Artificial Sequence: Synthetic oligonucleotide
  Antisense Strand to SEQ ID NO: 391639
uguaaaccaaacuucuaac

SEQ ID NO: 391641 - RNA, 19 nt, Artificial Sequence
  Description of Artificial Sequence: Synthetic oligonucleotide
  Sense Strand Starting at position 928 of SEQ ID NO: 315415
uuagaaguuugguuuacau

SEQ ID NO: 391642 - RNA, 19 nt, Artificial Sequence
  Description of Artificial Sequence: Synthetic oligonucleotide
  Antisense Strand to SEQ ID NO: 391641
auguaaaccaaacuucuaa

SEQ ID NO: 391643 - RNA, 19 nt, Artificial Sequence
  Description of Artificial Sequence: Synthetic oligonucleotide
  Sense Strand Starting at position 928 of SEQ ID NO: 315494
aacacuuuccauuggguga

SEQ ID NO: 391644 - RNA, 19 nt, Artificial Sequence
  Description of Artificial Sequence: Synthetic oligonucleotide
  Antisense Strand to SEQ ID NO: 391643
ucacccaauggaaaguguu

SEQ ID NO: 391645 - RNA, 19 nt, Artificial Sequence
  Description of Artificial Sequence: Synthetic oligonucleotide
  Sense Strand Starting at position 928 of SEQ ID NO: 315497
acuuuccauugggugaaau

SEQ ID NO: 391646 - RNA, 19 nt, Artificial Sequence
  Description of Artificial Sequence: Synthetic oligonucleotide
  Antisense Strand to SEQ ID NO: 391645
auuucacccaauggaaagu

SEQ ID NO: 391647 - RNA, 19 nt, Artificial Sequence
  Description of Artificial Sequence: Synthetic oligonucleotide
  Sense Strand Starting at position 928 of SEQ ID NO: 315498
cuuuccauugggugaaauc

SEQ ID NO: 391648 - RNA, 19 nt, Artificial Sequence
  Description of Artificial Sequence: Synthetic oligonucleotide
  Antisense Strand to SEQ ID NO: 391647
gauuucacccaauggaaag

SEQ ID NO: 391649 - RNA, 19 nt, Artificial Sequence
  Description of Artificial Sequence: Synthetic oligonucleotide
  Sense Strand Starting at position 928 of SEQ ID NO: 315665
cuuguauaguaagcauacu

SEQ ID NO: 391650 - RNA, 19 nt, Artificial Sequence
  Description of Artificial Sequence: Synthetic oligonucleotide
  Antisense Strand to SEQ ID NO: 391649
aguaugcuuacuauacaag

SEQ ID NO: 391651 - RNA, 19 nt, Artificial Sequence
  Description of Artificial Sequence: Synthetic oligonucleotide
  Sense Strand Starting at position 928 of SEQ ID NO: 315686
uuggcaguuuccuuggaga

SEQ ID NO: 391652 - RNA, 19 nt, Artificial Sequence
  Description of Artificial Sequence: Synthetic oligonucleotide
  Antisense Strand to SEQ ID NO: 391651
ucuccaaggaaacugccaa

SEQ ID NO: 391653 - RNA, 19 nt, Artificial Sequence
  Description of Artificial Sequence: Synthetic oligonucleotide
  Sense Strand Starting at position 928 of SEQ ID NO: 315771
gguaacuaacaacguaaga

SEQ ID NO: 391654 - RNA, 19 nt, Artificial Sequence
  Description of Artificial Sequence: Synthetic oligonucleotide
  Antisense Strand to SEQ ID NO: 391653
ucuuacguuguuaguuacc

SEQ ID NO: 391655 - RNA, 19 nt, Artificial Sequence
  Description of Artificial Sequence: Synthetic oligonucleotide
  Sense Strand Starting at position 928 of SEQ ID NO: 315782
acguaagagaucuggugau

SEQ ID NO: 391656 - RNA, 19 nt, Artificial Sequence
  Description of Artificial Sequence: Synthetic oligonucleotide
  Antisense Strand to SEQ ID NO: 391655
aucaccagaucucuuacgu

SEQ ID NO: 391657 - RNA, 19 nt, Artificial Sequence
  Description of Artificial Sequence: Synthetic oligonucleotide
  Sense Strand Starting at position 928 of SEQ ID NO: 315792
ucuggugauuucuugguuu

SEQ ID NO: 391658 - RNA, 19 nt, Artificial Sequence
  Description of Artificial Sequence: Synthetic oligonucleotide
  Antisense Strand to SEQ ID NO: 391657
aaaccaagaaaucaccaga

SEQ ID NO: 391659 - RNA, 19 nt, Artificial Sequence
  Description of Artificial Sequence: Synthetic oligonucleotide
  Sense Strand Starting at position 928 of SEQ ID NO: 315829
caguaugaugcuggagaaa

SEQ ID NO: 391660 - RNA, 19 nt, Artificial Sequence
  Description of Artificial Sequence: Synthetic oligonucleotide
  Antisense Strand to SEQ ID NO: 391659
uuucuccagcaucauacug

SEQ ID NO: 391661 - RNA, 19 nt, Artificial Sequence
  Description of Artificial Sequence: Synthetic oligonucleotide
  Sense Strand Starting at position 928 of SEQ ID NO: 315898
aucugaauaugaccuugua

SEQ ID NO: 391662 - RNA, 19 nt, Artificial Sequence
  Description of Artificial Sequence: Synthetic oligonucleotide
  Antisense Strand to SEQ ID NO: 391661
uacaaggucauauucagau

SEQ ID NO: 391663 - RNA, 19 nt, Artificial Sequence
  Description of Artificial Sequence: Synthetic oligonucleotide
  Sense Strand Starting at position 928 of SEQ ID NO: 315901
ugaauaugaccuuguaaag

SEQ ID NO: 391664 - RNA, 19 nt, Artificial Sequence
  Description of Artificial Sequence: Synthetic oligonucleotide
  Antisense Strand to SEQ ID NO: 391663
cuuuacaaggucauauuca

SEQ ID NO: 391665 - RNA, 19 nt, Artificial Sequence
  Description of Artificial Sequence: Synthetic oligonucleotide
  Sense Strand Starting at position 928 of SEQ ID NO: 315947
gguauccuugcgcagauuu

SEQ ID NO: 391666 - RNA, 19 nt, Artificial Sequence
  Description of Artificial Sequence: Synthetic oligonucleotide
  Antisense Strand to SEQ ID NO: 391665
aaaucugcgcaaggauacc

SEQ ID NO: 391667 - RNA, 19 nt, Artificial Sequence
  Description of Artificial Sequence: Synthetic oligonucleotide
  Sense Strand Starting at position 928 of SEQ ID NO: 316068
gcccaauuuccagguuguu

SEQ ID NO: 391668 - RNA, 19 nt, Artificial Sequence
  Description of Artificial Sequence: Synthetic oligonucleotide
  Antisense Strand to SEQ ID NO: 391667
aacaaccuggaaauugggc

SEQ ID NO: 391669 - RNA, 19 nt, Artificial Sequence
  Description of Artificial Sequence: Synthetic oligonucleotide
  Sense Strand Starting at position 928 of SEQ ID NO: 316078
cagguuguuggauacucaa

SEQ ID NO: 391670 - RNA, 19 nt, Artificial Sequence
  Description of Artificial Sequence: Synthetic oligonucleotide
  Antisense Strand to SEQ ID NO: 391669
uugaguauccaacaaccug

SEQ ID NO: 391671 - RNA, 19 nt, Artificial Sequence
  Description of Artificial Sequence: Synthetic oligonucleotide
  Sense Strand Starting at position 928 of SEQ ID NO: 316081
guuguuggauacucaaugu

SEQ ID NO: 391672 - RNA, 19 nt, Artificial Sequence
  Description of Artificial Sequence: Synthetic oligonucleotide
  Antisense Strand to SEQ ID NO: 391671
acauugaguauccaacaac

SEQ ID NO: 391673 - RNA, 19 nt, Artificial Sequence
  Description of Artificial Sequence: Synthetic oligonucleotide
  Sense Strand Starting at position 928 of SEQ ID NO: 316085
uuggauacucaaugugaga

SEQ ID NO: 391674 - RNA, 19 nt, Artificial Sequence
  Description of Artificial Sequence: Synthetic oligonucleotide
  Antisense Strand to SEQ ID NO: 391673
ucucacauugaguauccaa

SEQ ID NO: 391675 - RNA, 19 nt, Artificial Sequence
  Description of Artificial Sequence: Synthetic oligonucleotide
  Sense Strand Starting at position 928 of SEQ ID NO: 316100
gagagauucccgcaauccu

SEQ ID NO: 391676 - RNA, 19 nt, Artificial Sequence
  Description of Artificial Sequence: Synthetic oligonucleotide
  Antisense Strand to SEQ ID NO: 391675
aggauugcgggaaucucuc

SEQ ID NO: 391677 - RNA, 19 nt, Artificial Sequence
  Description of Artificial Sequence: Synthetic oligonucleotide
  Sense Strand Starting at position 928 of SEQ ID NO: 316310
ggcggaauuccaggucaaa

SEQ ID NO: 391678 - RNA, 19 nt, Artificial Sequence
  Description of Artificial Sequence: Synthetic oligonucleotide
  Antisense Strand to SEQ ID NO: 391677
uuugaccuggaauuccgcc

SEQ ID NO: 391679 - RNA, 19 nt, Artificial Sequence
  Description of Artificial Sequence: Synthetic oligonucleotide
  Sense Strand Starting at position 928 of SEQ ID NO: 316338
uggagaacgucucucugaa

SEQ ID NO: 391680 - RNA, 19 nt, Artificial Sequence
  Description of Artificial Sequence: Synthetic oligonucleotide
  Antisense Strand to SEQ ID NO: 391679
uucagagagacguucucca

SEQ ID NO: 391681 - RNA, 19 nt, Artificial Sequence
  Description of Artificial Sequence: Synthetic oligonucleotide
  Sense Strand Starting at position 928 of SEQ ID NO: 316340
gagaacgucucucugaacu

SEQ ID NO: 391682 - RNA, 19 nt, Artificial Sequence
  Description of Artificial Sequence: Synthetic oligonucleotide
  Antisense Strand to SEQ ID NO: 391681
aguucagagagacguucuc

SEQ ID NO: 391683 - RNA, 19 nt, Artificial Sequence
  Description of Artificial Sequence: Synthetic oligonucleotide
  Sense Strand Starting at position 928 of SEQ ID NO: 316534
gggacagaugcgcagaauu

SEQ ID NO: 391684 - RNA, 19 nt, Artificial Sequence
  Description of Artificial Sequence: Synthetic oligonucleotide
  Antisense Strand to SEQ ID NO: 391683
aauucugcgcaucuguccc

SEQ ID NO: 391685 - RNA, 19 nt, Artificial Sequence
  Description of Artificial Sequence: Synthetic oligonucleotide
  Sense Strand Starting at position 928 of SEQ ID NO: 316682
ggguguguccaccgagaga

SEQ ID NO: 391686 - RNA, 19 nt, Artificial Sequence
  Description of Artificial Sequence: Synthetic oligonucleotide
  Antisense Strand to SEQ ID NO: 391685
ucucucgguggacacaccc

SEQ ID NO: 391687 - RNA, 19 nt, Artificial Sequence
  Description of Artificial Sequence: Synthetic oligonucleotide
  Sense Strand Starting at position 928 of SEQ ID NO: 317033
ugaaguccucuuugaagua

SEQ ID NO: 391688 - RNA, 19 nt, Artificial Sequence
  Description of Artificial Sequence: Synthetic oligonucleotide
  Antisense Strand to SEQ ID NO: 391687
uacuucaaagaggacuuca

SEQ ID NO: 391689 - RNA, 19 nt, Artificial Sequence
  Description of Artificial Sequence: Synthetic oligonucleotide
  Sense Strand Starting at position 928 of SEQ ID NO: 317045
ugaaguaacagaugucggu

SEQ ID NO: 391690 - RNA, 19 nt, Artificial Sequence
  Description of Artificial Sequence: Synthetic oligonucleotide
  Antisense Strand to SEQ ID NO: 391689
accgacaucuguuacuuca

SEQ ID NO: 391691 - RNA, 19 nt, Artificial Sequence
  Description of Artificial Sequence: Synthetic oligonucleotide
  Sense Strand Starting at position 928 of SEQ ID NO: 317346
guauccgugcuguccagua

SEQ ID NO: 391692 - RNA, 19 nt, Artificial Sequence
  Description of Artificial Sequence: Synthetic oligonucleotide
  Antisense Strand to SEQ ID NO: 391691
uacuggacagcacggauac

SEQ ID NO: 391693 - RNA, 19 nt, Artificial Sequence
  Description of Artificial Sequence: Synthetic oligonucleotide
  Sense Strand Starting at position 928 of SEQ ID NO: 317361
aguauccguggcuauaauu

SEQ ID NO: 391694 - RNA, 19 nt, Artificial Sequence
  Description of Artificial Sequence: Synthetic oligonucleotide
  Antisense Strand to SEQ ID NO: 391693
aauuauagccacggauacu

SEQ ID NO: 391695 - RNA, 19 nt, Artificial Sequence
  Description of Artificial Sequence: Synthetic oligonucleotide
  Sense Strand Starting at position 928 of SEQ ID NO: 317370
ggcuauaauuggucggaca

SEQ ID NO: 391696 - RNA, 19 nt, Artificial Sequence
  Description of Artificial Sequence: Synthetic oligonucleotide
  Antisense Strand to SEQ ID NO: 391695
uguccgaccaauuauagcc

SEQ ID NO: 391697 - RNA, 19 nt, Artificial Sequence
  Description of Artificial Sequence: Synthetic oligonucleotide
  Sense Strand Starting at position 928 of SEQ ID NO: 317371
gcuauaauuggucggacac

SEQ ID NO: 391698 - RNA, 19 nt, Artificial Sequence
  Description of Artificial Sequence: Synthetic oligonucleotide
  Antisense Strand to SEQ ID NO: 391697
guguccgaccaauuauagc

SEQ ID NO: 391699 - RNA, 19 nt, Artificial Sequence
  Description of Artificial Sequence: Synthetic oligonucleotide
  Sense Strand Starting at position 928 of SEQ ID NO: 317422
gcagaaugaucaguauaac

SEQ ID NO: 391700 - RNA, 19 nt, Artificial Sequence
  Description of Artificial Sequence: Synthetic oligonucleotide
  Antisense Strand to SEQ ID NO: 391699
guuauacugaucauucugc

SEQ ID NO: 391701 - RNA, 19 nt, Artificial Sequence
  Description of Artificial Sequence: Synthetic oligonucleotide
  Sense Strand Starting at position 928 of SEQ ID NO: 317543
cucagaucucuccgaccca

SEQ ID NO: 391702 - RNA, 19 nt, Artificial Sequence
  Description of Artificial Sequence: Synthetic oligonucleotide
  Antisense Strand to SEQ ID NO: 391701
ugggucggagagaucugag

SEQ ID NO: 391703 - RNA, 19 nt, Artificial Sequence
  Description of Artificial Sequence: Synthetic oligonucleotide
  Sense Strand Starting at position 928 of SEQ ID NO: 317774
gagacucggucccuaugaa

SEQ ID NO: 391704 - RNA, 19 nt, Artificial Sequence
  Description of Artificial Sequence: Synthetic oligonucleotide
  Antisense Strand to SEQ ID NO: 391703
uucauagggaccgagucuc

SEQ ID NO: 391705 - RNA, 19 nt, Artificial Sequence
  Description of Artificial Sequence: Synthetic oligonucleotide
  Sense Strand Starting at position 928 of SEQ ID NO: 317775
agacucggucccuaugaaa

SEQ ID NO: 391706 - RNA, 19 nt, Artificial Sequence
  Description of Artificial Sequence: Synthetic oligonucleotide
  Antisense Strand to SEQ ID NO: 391705
uuucauagggaccgagucu

SEQ ID NO: 391707 - RNA, 19 nt, Artificial Sequence
  Description of Artificial Sequence: Synthetic oligonucleotide
  Sense Strand Starting at position 928 of SEQ ID NO: 317979
gugaaacauuugugaauag

SEQ ID NO: 391708 - RNA, 19 nt, Artificial Sequence
  Description of Artificial Sequence: Synthetic oligonucleotide
  Antisense Strand to SEQ ID NO: 391707
cuauucacaaauguuucac

SEQ ID NO: 391709 - RNA, 19 nt, Artificial Sequence
  Description of Artificial Sequence: Synthetic oligonucleotide
  Sense Strand Starting at position 928 of SEQ ID NO: 317980
ugaaacauuugugaauagu

SEQ ID NO: 391710 - RNA, 19 nt, Artificial Sequence
  Description of Artificial Sequence: Synthetic oligonucleotide
  Antisense Strand to SEQ ID NO: 391709
acuauucacaaauguuuca

SEQ ID NO: 391711 - RNA, 19 nt, Artificial Sequence
  Description of Artificial Sequence: Synthetic oligonucleotide
  Sense Strand Starting at position 929 of SEQ ID NO: 315509
aagagcuggcucuaagagu

SEQ ID NO: 391712 - RNA, 19 nt, Artificial Sequence
  Description of Artificial Sequence: Synthetic oligonucleotide
  Antisense Strand to SEQ ID NO: 391711
acucuuagagccagcucuu

SEQ ID NO: 391713 - RNA, 19 nt, Artificial Sequence
  Description of Artificial Sequence: Synthetic oligonucleotide
  Sense Strand Starting at position 929 of SEQ ID NO: 315587
gaggguacaugaucauuau

SEQ ID NO: 391714 - RNA, 19 nt, Artificial Sequence
  Description of Artificial Sequence: Synthetic oligonucleotide
  Antisense Strand to SEQ ID NO: 391713
auaaugaucauguacccuc

SEQ ID NO: 391715 - RNA, 19 nt, Artificial Sequence
  Description of Artificial Sequence: Synthetic oligonucleotide
  Sense Strand Starting at position 929 of SEQ ID NO: 315647
gguacaacuaugugcaaga

SEQ ID NO: 391716 - RNA, 19 nt, Artificial Sequence
  Description of Artificial Sequence: Synthetic oligonucleotide
  Antisense Strand to SEQ ID NO: 391715
ucuugcacauaguuguacc

SEQ ID NO: 391717 - RNA, 19 nt, Artificial Sequence
  Description of Artificial Sequence: Synthetic oligonucleotide
  Sense Strand Starting at position 929 of SEQ ID NO: 315648
guacaacuaugugcaagau

SEQ ID NO: 391718 - RNA, 19 nt, Artificial Sequence
  Description of Artificial Sequence: Synthetic oligonucleotide
  Antisense Strand to SEQ ID NO: 391717
aucuugcacauaguuguac

SEQ ID NO: 391719 - RNA, 19 nt, Artificial Sequence
  Description of Artificial Sequence: Synthetic oligonucleotide
  Sense Strand Starting at position 929 of SEQ ID NO: 315708
uugagaaggucgucauaaa

SEQ ID NO: 391720 - RNA, 19 nt, Artificial Sequence
  Description of Artificial Sequence: Synthetic oligonucleotide
  Antisense Strand to SEQ ID NO: 391719
uuuaugacgaccuucucaa

SEQ ID NO: 391721 - RNA, 19 nt, Artificial Sequence
  Description of Artificial Sequence: Synthetic oligonucleotide
  Sense Strand Starting at position 929 of SEQ ID NO: 315709
ugagaaggucgucauaaac

SEQ ID NO: 391722 - RNA, 19 nt, Artificial Sequence
  Description of Artificial Sequence: Synthetic oligonucleotide
  Antisense Strand to SEQ ID NO: 391721
guuuaugacgaccuucuca

SEQ ID NO: 391723 - RNA, 19 nt, Artificial Sequence
  Description of Artificial Sequence: Synthetic oligonucleotide
  Sense Strand Starting at position 929 of SEQ ID NO: 315770
guaguaaauuaacuuggga

SEQ ID NO: 391724 - RNA, 19 nt, Artificial Sequence
  Description of Artificial Sequence: Synthetic oligonucleotide
  Antisense Strand to SEQ ID NO: 391723
ucccaaguuaauuuacuac

SEQ ID NO: 391725 - RNA, 19 nt, Artificial Sequence
  Description of Artificial Sequence: Synthetic oligonucleotide
  Sense Strand Starting at position 929 of SEQ ID NO: 315835
gagaaaugugcuggaacug

SEQ ID NO: 391726 - RNA, 19 nt, Artificial Sequence
  Description of Artificial Sequence: Synthetic oligonucleotide
  Antisense Strand to SEQ ID NO: 391725
caguuccagcacauuucuc

SEQ ID NO: 391727 - RNA, 19 nt, Artificial Sequence
  Description of Artificial Sequence: Synthetic oligonucleotide
  Sense Strand Starting at position 929 of SEQ ID NO: 316015
gccacugauccagaauucu

SEQ ID NO: 391728 - RNA, 19 nt, Artificial Sequence
  Description of Artificial Sequence: Synthetic oligonucleotide
  Antisense Strand to SEQ ID NO: 391727
agaauucuggaucaguggc

SEQ ID NO: 391729 - RNA, 19 nt, Artificial Sequence
  Description of Artificial Sequence: Synthetic oligonucleotide
  Sense Strand Starting at position 929 of SEQ ID NO: 316023
uccagaauucugcaacgca

SEQ ID NO: 391730 - RNA, 19 nt, Artificial Sequence
  Description of Artificial Sequence: Synthetic oligonucleotide
  Antisense Strand to SEQ ID NO: 391729
ugcguugcagaauucugga

SEQ ID NO: 391731 - RNA, 19 nt, Artificial Sequence
  Description of Artificial Sequence: Synthetic oligonucleotide
  Sense Strand Starting at position 929 of SEQ ID NO: 316035
caacgcagccuguaucaaa

SEQ ID NO: 391732 - RNA, 19 nt, Artificial Sequence
  Description of Artificial Sequence: Synthetic oligonucleotide
  Antisense Strand to SEQ ID NO: 391731
uuugauacaggcugcguug

SEQ ID NO: 391733 - RNA, 19 nt, Artificial Sequence
  Description of Artificial Sequence: Synthetic oligonucleotide
  Sense Strand Starting at position 929 of SEQ ID NO: 316067
guuauccacucuccgagau

SEQ ID NO: 391734 - RNA, 19 nt, Artificial Sequence
  Description of Artificial Sequence: Synthetic oligonucleotide
  Antisense Strand to SEQ ID NO: 391733
aucucggagaguggauaac

SEQ ID NO: 391735 - RNA, 19 nt, Artificial Sequence
  Description of Artificial Sequence: Synthetic oligonucleotide
  Sense Strand Starting at position 929 of SEQ ID NO: 316303
gauggaauuccaggucgaa

SEQ ID NO: 391736 - RNA, 19 nt, Artificial Sequence
  Description of Artificial Sequence: Synthetic oligonucleotide
  Antisense Strand to SEQ ID NO: 391735
uucgaccuggaauuccauc

SEQ ID NO: 391737 - RNA, 19 nt, Artificial Sequence
  Description of Artificial Sequence: Synthetic oligonucleotide
  Sense Strand Starting at position 929 of SEQ ID NO: 316306
ggaauuccaggucgaagau

SEQ ID NO: 391738 - RNA, 19 nt, Artificial Sequence
  Description of Artificial Sequence: Synthetic oligonucleotide
  Antisense Strand to SEQ ID NO: 391737
aucuucgaccuggaauucc

SEQ ID NO: 391739 - RNA, 19 nt, Artificial Sequence
  Description of Artificial Sequence: Synthetic oligonucleotide
  Sense Strand Starting at position 929 of SEQ ID NO: 316516
cagcgaucucugggacaga

SEQ ID NO: 391740 - RNA, 19 nt, Artificial Sequence
  Description of Artificial Sequence: Synthetic oligonucleotide
  Antisense Strand to SEQ ID NO: 391739
ucugucccagagaucgcug

SEQ ID NO: 391741 - RNA, 19 nt, Artificial Sequence
  Description of Artificial Sequence: Synthetic oligonucleotide
  Sense Strand Starting at position 929 of SEQ ID NO: 316675
ggguguguccaccaagaga

SEQ ID NO: 391742 - RNA, 19 nt, Artificial Sequence
  Description of Artificial Sequence: Synthetic oligonucleotide
  Antisense Strand to SEQ ID NO: 391741
ucucuugguggacacaccc

SEQ ID NO: 391743 - RNA, 19 nt, Artificial Sequence
  Description of Artificial Sequence: Synthetic oligonucleotide
  Sense Strand Starting at position 929 of SEQ ID NO: 317482
ggaguugaagagcgauuca

SEQ ID NO: 391744 - RNA, 19 nt, Artificial Sequence
  Description of Artificial Sequence: Synthetic oligonucleotide
  Antisense Strand to SEQ ID NO: 391743
ugaaucgcucuucaacucc

SEQ ID NO: 391745 - RNA, 19 nt, Artificial Sequence
  Description of Artificial Sequence: Synthetic oligonucleotide
  Sense Strand Starting at position 929 of SEQ ID NO: 317588
guuacuauugacggauagu

SEQ ID NO: 391746 - RNA, 19 nt, Artificial Sequence
  Description of Artificial Sequence: Synthetic oligonucleotide
  Antisense Strand to SEQ ID NO: 391745
acuauccgucaauaguaac

SEQ ID NO: 391747 - RNA, 19 nt, Artificial Sequence
  Description of Artificial Sequence: Synthetic oligonucleotide
  Sense Strand Starting at position 929 of SEQ ID NO: 317589
uuacuauugacggauagug

SEQ ID NO: 391748 - RNA, 19 nt, Artificial Sequence
  Description of Artificial Sequence: Synthetic oligonucleotide
  Antisense Strand to SEQ ID NO: 391747
cacuauccgucaauaguaa

SEQ ID NO: 391749 - RNA, 19 nt, Artificial Sequence
  Description of Artificial Sequence: Synthetic oligonucleotide
  Sense Strand Starting at position 929 of SEQ ID NO: 317632
cuuguacaucgauguaaua

SEQ ID NO: 391750 - RNA, 19 nt, Artificial Sequence
  Description of Artificial Sequence: Synthetic oligonucleotide
  Antisense Strand to SEQ ID NO: 391749
uauuacaucgauguacaag

SEQ ID NO: 391751 - RNA, 19 nt, Artificial Sequence
  Description of Artificial Sequence: Synthetic oligonucleotide
  Sense Strand Starting at position 929 of SEQ ID NO: 317683
cugagauccugcgugacaa

SEQ ID NO: 391752 - RNA, 19 nt, Artificial Sequence
  Description of Artificial Sequence: Synthetic oligonucleotide
  Antisense Strand to SEQ ID NO: 391751
uugucacgcaggaucucag

SEQ ID NO: 391753 - RNA, 19 nt, Artificial Sequence
  Description of Artificial Sequence: Synthetic oligonucleotide
  Sense Strand Starting at position 929 of SEQ ID NO: 317713
gcauuaucuguuuauuaug

SEQ ID NO: 391754 - RNA, 19 nt, Artificial Sequence
  Description of Artificial Sequence: Synthetic oligonucleotide
  Antisense Strand to SEQ ID NO: 391753
cauaauaaacagauaaugc

SEQ ID NO: 391755 - RNA, 19 nt, Artificial Sequence
  Description of Artificial Sequence: Synthetic oligonucleotide
  Sense Strand Starting at position 929 of SEQ ID NO: 317727
uuaugauaguugguacuau

SEQ ID NO: 391756 - RNA, 19 nt, Artificial Sequence
  Description of Artificial Sequence: Synthetic oligonucleotide
  Antisense Strand to SEQ ID NO: 391755
auaguaccaacuaucauaa

SEQ ID NO: 391757 - RNA, 19 nt, Artificial Sequence
  Description of Artificial Sequence: Synthetic oligonucleotide
  Sense Strand Starting at position 929 of SEQ ID NO: 317739
guacuauaguaauuacagu

SEQ ID NO: 391758 - RNA, 19 nt, Artificial Sequence
  Description of Artificial Sequence: Synthetic oligonucleotide
  Antisense Strand to SEQ ID NO: 391757
acuguaauuacuauaguac

SEQ ID NO: 391759 - RNA, 19 nt, Artificial Sequence
  Description of Artificial Sequence: Synthetic oligonucleotide
  Sense Strand Starting at position 929 of SEQ ID NO: 317750
auuacagucuucccuugau

SEQ ID NO: 391760 - RNA, 19 nt, Artificial Sequence
  Description of Artificial Sequence: Synthetic oligonucleotide
  Antisense Strand to SEQ ID NO: 391759
aucaagggaagacuguaau

SEQ ID NO: 391761 - RNA, 19 nt, Artificial Sequence
  Description of Artificial Sequence: Synthetic oligonucleotide
  Sense Strand Starting at position 929 of SEQ ID NO: 317762
ccuugauaucccuggagga

SEQ ID NO: 391762 - RNA, 19 nt, Artificial Sequence
  Description of Artificial Sequence: Synthetic oligonucleotide
  Antisense Strand to SEQ ID NO: 391761
uccuccagggauaucaagg

SEQ ID NO: 391763 - RNA, 19 nt, Artificial Sequence
  Description of Artificial Sequence: Synthetic oligonucleotide
  Sense Strand Starting at position 929 of SEQ ID NO: 317763
cuugauaucccuggaggau

SEQ ID NO: 391764 - RNA, 19 nt, Artificial Sequence
  Description of Artificial Sequence: Synthetic oligonucleotide
  Antisense Strand to SEQ ID NO: 391763
auccuccagggauaucaag

SEQ ID NO: 391765 - RNA, 19 nt, Artificial Sequence
  Description of Artificial Sequence: Synthetic oligonucleotide
  Sense Strand Starting at position 929 of SEQ ID NO: 318251
ugugccugaccuuauauau

SEQ ID NO: 391766 - RNA, 19 nt, Artificial Sequence
  Description of Artificial Sequence: Synthetic oligonucleotide
  Antisense Strand to SEQ ID NO: 391765
auauauaaggucaggcaca

SEQ ID NO: 391767 - RNA, 19 nt, Artificial Sequence
  Description of Artificial Sequence: Synthetic oligonucleotide
  Sense Strand Starting at position 929 of SEQ ID NO: 318650
cgacucuauuauguuacaa

SEQ ID NO: 391768 - RNA, 19 nt, Artificial Sequence
  Description of Artificial Sequence: Synthetic oligonucleotide
  Antisense Strand to SEQ ID NO: 391767
uuguaacauaauagagucg

SEQ ID NO: 391769 - RNA, 19 nt, Artificial Sequence
  Description of Artificial Sequence: Synthetic oligonucleotide
  Sense Strand Starting at position 929 of SEQ ID NO: 318663
uuacaaucagcugaaguau

SEQ ID NO: 391770 - RNA, 19 nt, Artificial Sequence
  Description of Artificial Sequence: Synthetic oligonucleotide
  Antisense Strand to SEQ ID NO: 391769
auacuucagcugauuguaa

SEQ ID NO: 391771 - RNA, 19 nt, Artificial Sequence
  Description of Artificial Sequence: Synthetic oligonucleotide
  Sense Strand Starting at position 929 of SEQ ID NO: 318669
ucagcugaaguaugguuaa

SEQ ID NO: 391772 - RNA, 19 nt, Artificial Sequence
  Description of Artificial Sequence: Synthetic oligonucleotide
  Antisense Strand to SEQ ID NO: 391771
uuaaccauacuucagcuga

SEQ ID NO: 391773 - RNA, 19 nt, Artificial Sequence
  Description of Artificial Sequence: Synthetic oligonucleotide
  Sense Strand Starting at position 929 of SEQ ID NO: 318672
gcugaaguaugguuaacuu

SEQ ID NO: 391774 - RNA, 19 nt, Artificial Sequence
  Description of Artificial Sequence: Synthetic oligonucleotide
  Antisense Strand to SEQ ID NO: 391773
aaguuaaccauacuucagc

SEQ ID NO: 391775 - RNA, 19 nt, Artificial Sequence
  Description of Artificial Sequence: Synthetic oligonucleotide
  Sense Strand Starting at position 929 of SEQ ID NO: 318756
aaaugucaugcagaaaggu

SEQ ID NO: 391776 - RNA, 19 nt, Artificial Sequence
  Description of Artificial Sequence: Synthetic oligonucleotide
  Antisense Strand to SEQ ID NO: 391775
accuuucugcaugacauuu

SEQ ID NO: 391777 - RNA, 19 nt, Artificial Sequence
  Description of Artificial Sequence: Synthetic oligonucleotide
  Sense Strand Starting at position 929 of SEQ ID NO: 318766
cagaaagguuagccaacuu

SEQ ID NO: 391778 - RNA, 19 nt, Artificial Sequence
  Description of Artificial Sequence: Synthetic oligonucleotide
  Antisense Strand to SEQ ID NO: 391777
aaguuggcuaaccuuucug

SEQ ID NO: 391779 - RNA, 19 nt, Artificial Sequence
  Description of Artificial Sequence: Synthetic oligonucleotide
  Sense Strand Starting at position 929 of SEQ ID NO: 318869
ugaccugugucagcugaaa

SEQ ID NO: 391780 - RNA, 19 nt, Artificial Sequence
  Description of Artificial Sequence: Synthetic oligonucleotide
  Antisense Strand to SEQ ID NO: 391779
uuucagcugacacagguca

SEQ ID NO: 391781 - RNA, 19 nt, Artificial Sequence
  Description of Artificial Sequence: Synthetic oligonucleotide
  Sense Strand Starting at position 929 of SEQ ID NO: 319020
uccugacaucuuugcuaag

SEQ ID NO: 391782 - RNA, 19 nt, Artificial Sequence
  Description of Artificial Sequence: Synthetic oligonucleotide
  Antisense Strand to SEQ ID NO: 391781
cuuagcaaagaugucagga

SEQ ID NO: 391783 - RNA, 19 nt, Artificial Sequence
  Description of Artificial Sequence: Synthetic oligonucleotide
  Sense Strand Starting at position 929 of SEQ ID NO: 319060
cgggaaccauuauuacauu

SEQ ID NO: 391784 - RNA, 19 nt, Artificial Sequence
  Description of Artificial Sequence: Synthetic oligonucleotide
  Antisense Strand to SEQ ID NO: 391783
aauguaauaaugguucccg

SEQ ID NO: 391785 - RNA, 19 nt, Artificial Sequence
  Description of Artificial Sequence: Synthetic oligonucleotide
  Sense Strand Starting at position 929 of SEQ ID NO: 319061
gggaaccauuauuacauuu

SEQ ID NO: 391786 - RNA, 19 nt, Artificial Sequence
  Description of Artificial Sequence: Synthetic oligonucleotide
  Antisense Strand to SEQ ID NO: 391785
aaauguaauaaugguuccc

SEQ ID NO: 391787 - RNA, 19 nt, Artificial Sequence
  Description of Artificial Sequence: Synthetic oligonucleotide
  Sense Strand Starting at position 929 of SEQ ID NO: 319178
auagcauuccuuuggauag

SEQ ID NO: 391788 - RNA, 19 nt, Artificial Sequence
  Description of Artificial Sequence: Synthetic oligonucleotide
  Antisense Strand to SEQ ID NO: 391787
cuauccaaaggaaugcuau

SEQ ID NO: 391789 - RNA, 19 nt, Artificial Sequence
  Description of Artificial Sequence: Synthetic oligonucleotide
  Sense Strand Starting at position 929 of SEQ ID NO: 319188
uuuggauagucuuuacauu

SEQ ID NO: 391790 - RNA, 19 nt, Artificial Sequence
  Description of Artificial Sequence: Synthetic oligonucleotide
  Antisense Strand to SEQ ID NO: 391789
aauguaaagacuauccaaa

SEQ ID NO: 391791 - RNA, 19 nt, Artificial Sequence
  Description of Artificial Sequence: Synthetic oligonucleotide
  Sense Strand Starting at position 930 of SEQ ID NO: 315299
cuguucugucagcagggaa

SEQ ID NO: 391792 - RNA, 19 nt, Artificial Sequence
  Description of Artificial Sequence: Synthetic oligonucleotide
  Antisense Strand to SEQ ID NO: 391791
uucccugcugacagaacag

SEQ ID NO: 391793 - RNA, 19 nt, Artificial Sequence
  Description of Artificial Sequence: Synthetic oligonucleotide
  Sense Strand Starting at position 930 of SEQ ID NO: 315312
agggaaugcucucucccuu

SEQ ID NO: 391794 - RNA, 19 nt, Artificial Sequence
  Description of Artificial Sequence: Synthetic oligonucleotide
  Antisense Strand to SEQ ID NO: 391793
aagggagagagcauucccu

SEQ ID NO: 391795 - RNA, 19 nt, Artificial Sequence
  Description of Artificial Sequence: Synthetic oligonucleotide
  Sense Strand Starting at position 930 of SEQ ID NO: 315809
ggauaauaagcaugccuaa

SEQ ID NO: 391796 - RNA, 19 nt, Artificial Sequence
  Description of Artificial Sequence: Synthetic oligonucleotide
  Antisense Strand to SEQ ID NO: 391795
uuaggcaugcuuauuaucc

SEQ ID NO: 391797 - RNA, 19 nt, Artificial Sequence
  Description of Artificial Sequence: Synthetic oligonucleotide
  Sense Strand Starting at position 930 of SEQ ID NO: 315872
auaccugaugcuugacaag

SEQ ID NO: 391798 - RNA, 19 nt, Artificial Sequence
  Description of Artificial Sequence: Synthetic oligonucleotide
  Antisense Strand to SEQ ID NO: 391797
cuugucaagcaucagguau

SEQ ID NO: 391799 - RNA, 19 nt, Artificial Sequence
  Description of Artificial Sequence: Synthetic oligonucleotide
  Sense Strand Starting at position 930 of SEQ ID NO: 315879
augcuugacaagcguuaca

SEQ ID NO: 391800 - RNA, 19 nt, Artificial Sequence
  Description of Artificial Sequence: Synthetic oligonucleotide
  Antisense Strand to SEQ ID NO: 391799
uguaacgcuugucaagcau

SEQ ID NO: 391801 - RNA, 19 nt, Artificial Sequence
  Description of Artificial Sequence: Synthetic oligonucleotide
  Sense Strand Starting at position 930 of SEQ ID NO: 315882
cuugacaagcguuacacau

SEQ ID NO: 391802 - RNA, 19 nt, Artificial Sequence
  Description of Artificial Sequence: Synthetic oligonucleotide
  Antisense Strand to SEQ ID NO: 391801
auguguaacgcuugucaag

SEQ ID NO: 391803 - RNA, 19 nt, Artificial Sequence
  Description of Artificial Sequence: Synthetic oligonucleotide
  Sense Strand Starting at position 930 of SEQ ID NO: 315939
uugucacucuggucugauu

SEQ ID NO: 391804 - RNA, 19 nt, Artificial Sequence
  Description of Artificial Sequence: Synthetic oligonucleotide
  Antisense Strand to SEQ ID NO: 391803
aaucagaccagagugacaa

SEQ ID NO: 391805 - RNA, 19 nt, Artificial Sequence
  Description of Artificial Sequence: Synthetic oligonucleotide
  Sense Strand Starting at position 930 of SEQ ID NO: 316188
aaagcuuccuggcuguuaa

SEQ ID NO: 391806 - RNA, 19 nt, Artificial Sequence
  Description of Artificial Sequence: Synthetic oligonucleotide
  Antisense Strand to SEQ ID NO: 391805
uuaacagccaggaagcuuu

SEQ ID NO: 391807 - RNA, 19 nt, Artificial Sequence
  Description of Artificial Sequence: Synthetic oligonucleotide
  Sense Strand Starting at position 930 of SEQ ID NO: 316343
gaguuuagacucugucuua

SEQ ID NO: 391808 - RNA, 19 nt, Artificial Sequence
  Description of Artificial Sequence: Synthetic oligonucleotide
  Antisense Strand to SEQ ID NO: 391807
uaagacagagucuaaacuc

SEQ ID NO: 391809 - RNA, 19 nt, Artificial Sequence
  Description of Artificial Sequence: Synthetic oligonucleotide
  Sense Strand Starting at position 930 of SEQ ID NO: 316344
aguuuagacucugucuuaa

SEQ ID NO: 391810 - RNA, 19 nt, Artificial Sequence
  Description of Artificial Sequence: Synthetic oligonucleotide
  Antisense Strand to SEQ ID NO: 391809
uuaagacagagucuaaacu

SEQ ID NO: 391811 - RNA, 19 nt, Artificial Sequence
  Description of Artificial Sequence: Synthetic oligonucleotide
  Sense Strand Starting at position 930 of SEQ ID NO: 316346
uuuagacucugucuuaaag

SEQ ID NO: 391812 - RNA, 19 nt, Artificial Sequence
  Description of Artificial Sequence: Synthetic oligonucleotide
  Antisense Strand to SEQ ID NO: 391811
cuuuaagacagagucuaaa

SEQ ID NO: 391813 - RNA, 19 nt, Artificial Sequence
  Description of Artificial Sequence: Synthetic oligonucleotide
  Sense Strand Starting at position 930 of SEQ ID NO: 316356
gucuuaaagccuuguuagu

SEQ ID NO: 391814 - RNA, 19 nt, Artificial Sequence
  Description of Artificial Sequence: Synthetic oligonucleotide
  Antisense Strand to SEQ ID NO: 391813
acuaacaaggcuuuaagac

SEQ ID NO: 391815 - RNA, 19 nt, Artificial Sequence
  Description of Artificial Sequence: Synthetic oligonucleotide
  Sense Strand Starting at position 930 of SEQ ID NO: 316515
agugcuccuguguuuaguu

SEQ ID NO: 391816 - RNA, 19 nt, Artificial Sequence
  Description of Artificial Sequence: Synthetic oligonucleotide
  Antisense Strand to SEQ ID NO: 391815
aacuaaacacaggagcacu

SEQ ID NO: 391817 - RNA, 19 nt, Artificial Sequence
  Description of Artificial Sequence: Synthetic oligonucleotide
  Sense Strand Starting at position 930 of SEQ ID NO: 316523
uguguuuaguucuuuccca

SEQ ID NO: 391818 - RNA, 19 nt, Artificial Sequence
  Description of Artificial Sequence: Synthetic oligonucleotide
  Antisense Strand to SEQ ID NO: 391817
ugggaaagaacuaaacaca

SEQ ID NO: 391819 - RNA, 19 nt, Artificial Sequence
  Description of Artificial Sequence: Synthetic oligonucleotide
  Sense Strand Starting at position 930 of SEQ ID NO: 316527
uuuaguucuuucccaguga

SEQ ID NO: 391820 - RNA, 19 nt, Artificial Sequence
  Description of Artificial Sequence: Synthetic oligonucleotide
  Antisense Strand to SEQ ID NO: 391819
ucacugggaaagaacuaaa

SEQ ID NO: 391821 - RNA, 19 nt, Artificial Sequence
  Description of Artificial Sequence: Synthetic oligonucleotide
  Sense Strand Starting at position 930 of SEQ ID NO: 316531
guucuuucccagugaggcu

SEQ ID NO: 391822 - RNA, 19 nt, Artificial Sequence
  Description of Artificial Sequence: Synthetic oligonucleotide
  Antisense Strand to SEQ ID NO: 391821
agccucacugggaaagaac

SEQ ID NO: 391823 - RNA, 19 nt, Artificial Sequence
  Description of Artificial Sequence: Synthetic oligonucleotide
  Sense Strand Starting at position 930 of SEQ ID NO: 317386
cgaggucaucucugaggga

SEQ ID NO: 391824 - RNA, 19 nt, Artificial Sequence
  Description of Artificial Sequence: Synthetic oligonucleotide
  Antisense Strand to SEQ ID NO: 391823
ucccucagagaugaccucg

SEQ ID NO: 391825 - RNA, 19 nt, Artificial Sequence
  Description of Artificial Sequence: Synthetic oligonucleotide
  Sense Strand Starting at position 930 of SEQ ID NO: 317387
gaggucaucucugagggau

SEQ ID NO: 391826 - RNA, 19 nt, Artificial Sequence
  Description of Artificial Sequence: Synthetic oligonucleotide
  Antisense Strand to SEQ ID NO: 391825
aucccucagagaugaccuc

SEQ ID NO: 391827 - RNA, 19 nt, Artificial Sequence
  Description of Artificial Sequence: Synthetic oligonucleotide
  Sense Strand Starting at position 930 of SEQ ID NO: 317393
aucucugagggauguggaa

SEQ ID NO: 391828 - RNA, 19 nt, Artificial Sequence
  Description of Artificial Sequence: Synthetic oligonucleotide
  Antisense Strand to SEQ ID NO: 391827
uuccacaucccucagagau

SEQ ID NO: 391829 - RNA, 19 nt, Artificial Sequence
  Description of Artificial Sequence: Synthetic oligonucleotide
  Sense Strand Starting at position 930 of SEQ ID NO: 317395
cucugagggauguggaaau

SEQ ID NO: 391830 - RNA, 19 nt, Artificial Sequence
  Description of Artificial Sequence: Synthetic oligonucleotide
  Antisense Strand to SEQ ID NO: 391829
auuuccacaucccucagag

SEQ ID NO: 391831 - RNA, 19 nt, Artificial Sequence
  Description of Artificial Sequence: Synthetic oligonucleotide
  Sense Strand Starting at position 930 of SEQ ID NO: 317406
guggaaaugucuucugcag

SEQ ID NO: 391832 - RNA, 19 nt, Artificial Sequence
  Description of Artificial Sequence: Synthetic oligonucleotide
  Antisense Strand to SEQ ID NO: 391831
cugcagaagacauuuccac

SEQ ID NO: 391833 - RNA, 19 nt, Artificial Sequence
  Description of Artificial Sequence: Synthetic oligonucleotide
  Sense Strand Starting at position 930 of SEQ ID NO: 317977
guauccacuguugagaauu

SEQ ID NO: 391834 - RNA, 19 nt, Artificial Sequence
  Description of Artificial Sequence: Synthetic oligonucleotide
  Antisense Strand to SEQ ID NO: 391833
aauucucaacaguggauac

SEQ ID NO: 391835 - RNA, 19 nt, Artificial Sequence
  Description of Artificial Sequence: Synthetic oligonucleotide
  Sense Strand Starting at position 930 of SEQ ID NO: 317998
agcauauggucagcuaguu

SEQ ID NO: 391836 - RNA, 19 nt, Artificial Sequence
  Description of Artificial Sequence: Synthetic oligonucleotide
  Antisense Strand to SEQ ID NO: 391835
aacuagcugaccauaugcu

SEQ ID NO: 391837 - RNA, 19 nt, Artificial Sequence
  Description of Artificial Sequence: Synthetic oligonucleotide
  Sense Strand Starting at position 930 of SEQ ID NO: 318004
uggucagcuaguuauuguu

SEQ ID NO: 391838 - RNA, 19 nt, Artificial Sequence
  Description of Artificial Sequence: Synthetic oligonucleotide
  Antisense Strand to SEQ ID NO: 391837
aacaauaacuagcugacca

SEQ ID NO: 391839 - RNA, 19 nt, Artificial Sequence
  Description of Artificial Sequence: Synthetic oligonucleotide
  Sense Strand Starting at position 930 of SEQ ID NO: 318010
gcuaguuauuguucuuuau

SEQ ID NO: 391840 - RNA, 19 nt, Artificial Sequence
  Description of Artificial Sequence: Synthetic oligonucleotide
  Antisense Strand to SEQ ID NO: 391839
auaaagaacaauaacuagc

SEQ ID NO: 391841 - RNA, 19 nt, Artificial Sequence
  Description of Artificial Sequence: Synthetic oligonucleotide
  Sense Strand Starting at position 930 of SEQ ID NO: 318013
aguuauuguucuuuauccu

SEQ ID NO: 391842 - RNA, 19 nt, Artificial Sequence
  Description of Artificial Sequence: Synthetic oligonucleotide
  Antisense Strand to SEQ ID NO: 391841
aggauaaagaacaauaacu

SEQ ID NO: 391843 - RNA, 19 nt, Artificial Sequence
  Description of Artificial Sequence: Synthetic oligonucleotide
  Sense Strand Starting at position 930 of SEQ ID NO: 318036
ccuguaauuggacauaggu

SEQ ID NO: 391844 - RNA, 19 nt, Artificial Sequence
  Description of Artificial Sequence: Synthetic oligonucleotide
  Antisense Strand to SEQ ID NO: 391843
accuauguccaauuacagg

SEQ ID NO: 391845 - RNA, 19 nt, Artificial Sequence
  Description of Artificial Sequence: Synthetic oligonucleotide
  Sense Strand Starting at position 930 of SEQ ID NO: 318093
ggccauuccuugcuuaaca

SEQ ID NO: 391846 - RNA, 19 nt, Artificial Sequence
  Description of Artificial Sequence: Synthetic oligonucleotide
  Antisense Strand to SEQ ID NO: 391845
uguuaagcaaggaauggcc

SEQ ID NO: 391847 - RNA, 19 nt, Artificial Sequence
  Description of Artificial Sequence: Synthetic oligonucleotide
  Sense Strand Starting at position 930 of SEQ ID NO: 318133
gugcaccuaccagauaauu

SEQ ID NO: 391848 - RNA, 19 nt, Artificial Sequence
  Description of Artificial Sequence: Synthetic oligonucleotide
  Antisense Strand to SEQ ID NO: 391847
aauuaucugguaggugcac

SEQ ID NO: 391849 - RNA, 19 nt, Artificial Sequence
  Description of Artificial Sequence: Synthetic oligonucleotide
  Sense Strand Starting at position 930 of SEQ ID NO: 318143
cagauaauugccuagccga

SEQ ID NO: 391850 - RNA, 19 nt, Artificial Sequence
  Description of Artificial Sequence: Synthetic oligonucleotide
  Antisense Strand to SEQ ID NO: 391849
ucggcuaggcaauuaucug

SEQ ID NO: 391851 - RNA, 19 nt, Artificial Sequence
  Description of Artificial Sequence: Synthetic oligonucleotide
  Sense Strand Starting at position 930 of SEQ ID NO: 318175
aaucuaugggucugcauau

SEQ ID NO: 391852 - RNA, 19 nt, Artificial Sequence
  Description of Artificial Sequence: Synthetic oligonucleotide
  Antisense Strand to SEQ ID NO: 391851
auaugcagacccauagauu

SEQ ID NO: 391853 - RNA, 19 nt, Artificial Sequence
  Description of Artificial Sequence: Synthetic oligonucleotide
  Sense Strand Starting at position 930 of SEQ ID NO: 318197
gcugguagacacugucaaa

SEQ ID NO: 391854 - RNA, 19 nt, Artificial Sequence
  Description of Artificial Sequence: Synthetic oligonucleotide
  Antisense Strand to SEQ ID NO: 391853
uuugacagugucuaccagc

SEQ ID NO: 391855 - RNA, 19 nt, Artificial Sequence
  Description of Artificial Sequence: Synthetic oligonucleotide
  Sense Strand Starting at position 930 of SEQ ID NO: 318221
cuuggucuuucuuugaaca

SEQ ID NO: 391856 - RNA, 19 nt, Artificial Sequence
  Description of Artificial Sequence: Synthetic oligonucleotide
  Antisense Strand to SEQ ID NO: 391855
uguucaaagaaagaccaag

SEQ ID NO: 391857 - RNA, 19 nt, Artificial Sequence
  Description of Artificial Sequence: Synthetic oligonucleotide
  Sense Strand Starting at position 930 of SEQ ID NO: 318295
acaggaaauauaugugguu

SEQ ID NO: 391858 - RNA, 19 nt, Artificial Sequence
  Description of Artificial Sequence: Synthetic oligonucleotide
  Antisense Strand to SEQ ID NO: 391857
aaccacauauauuuccugu

SEQ ID NO: 391859 - RNA, 19 nt, Artificial Sequence
  Description of Artificial Sequence: Synthetic oligonucleotide
  Sense Strand Starting at position 930 of SEQ ID NO: 318296
caggaaauauaugugguua

SEQ ID NO: 391860 - RNA, 19 nt, Artificial Sequence
  Description of Artificial Sequence: Synthetic oligonucleotide
  Antisense Strand to SEQ ID NO: 391859
uaaccacauauauuuccug

SEQ ID NO: 391861 - RNA, 19 nt, Artificial Sequence
  Description of Artificial Sequence: Synthetic oligonucleotide
  Sense Strand Starting at position 930 of SEQ ID NO: 318297
aggaaauauaugugguuau

SEQ ID NO: 391862 - RNA, 19 nt, Artificial Sequence
  Description of Artificial Sequence: Synthetic oligonucleotide
  Antisense Strand to SEQ ID NO: 391861
auaaccacauauauuuccu

SEQ ID NO: 391863 - RNA, 19 nt, Artificial Sequence
  Description of Artificial Sequence: Synthetic oligonucleotide
  Sense Strand Starting at position 930 of SEQ ID NO: 318551
agaggucaagauugcagua

SEQ ID NO: 391864 - RNA, 19 nt, Artificial Sequence
  Description of Artificial Sequence: Synthetic oligonucleotide
  Antisense Strand to SEQ ID NO: 391863
uacugcaaucuugaccucu

SEQ ID NO: 391865 - RNA, 19 nt, Artificial Sequence
  Description of Artificial Sequence: Synthetic oligonucleotide
  Sense Strand Starting at position 930 of SEQ ID NO: 319159
cguguugcaguuugaagaa

SEQ ID NO: 391866 - RNA, 19 nt, Artificial Sequence
  Description of Artificial Sequence: Synthetic oligonucleotide
  Antisense Strand to SEQ ID NO: 391865
uucuucaaacugcaacacg

SEQ ID NO: 391867 - RNA, 19 nt, Artificial Sequence
  Description of Artificial Sequence: Synthetic oligonucleotide
  Sense Strand Starting at position 930 of SEQ ID NO: 319184
aucccuaauggcugguaaa

SEQ ID NO: 391868 - RNA, 19 nt, Artificial Sequence
  Description of Artificial Sequence: Synthetic oligonucleotide
  Antisense Strand to SEQ ID NO: 391867
uuuaccagccauuagggau

SEQ ID NO: 391869 - RNA, 19 nt, Artificial Sequence
  Description of Artificial Sequence: Synthetic oligonucleotide
  Sense Strand Starting at position 930 of SEQ ID NO: 319185
ucccuaauggcugguaaau

SEQ ID NO: 391870 - RNA, 19 nt, Artificial Sequence
  Description of Artificial Sequence: Synthetic oligonucleotide
  Antisense Strand to SEQ ID NO: 391869
auuuaccagccauuaggga

SEQ ID NO: 391871 - RNA, 19 nt, Artificial Sequence
  Description of Artificial Sequence: Synthetic oligonucleotide
  Sense Strand Starting at position 931 of SEQ ID NO: 315250
ggccaaggcagugaguauu

SEQ ID NO: 391872 - RNA, 19 nt, Artificial Sequence
  Description of Artificial Sequence: Synthetic oligonucleotide
  Antisense Strand to SEQ ID NO: 391871
aauacucacugccuuggcc

SEQ ID NO: 391873 - RNA, 19 nt, Artificial Sequence
  Description of Artificial Sequence: Synthetic oligonucleotide
  Sense Strand Starting at position 931 of SEQ ID NO: 315253
caaggcagugaguauuauu

SEQ ID NO: 391874 - RNA, 19 nt, Artificial Sequence
  Description of Artificial Sequence: Synthetic oligonucleotide
  Antisense Strand to SEQ ID NO: 391873
aauaauacucacugccuug

SEQ ID NO: 391875 - RNA, 19 nt, Artificial Sequence
  Description of Artificial Sequence: Synthetic oligonucleotide
  Sense Strand Starting at position 931 of SEQ ID NO: 315377
ccuugccaaccugagaaau

SEQ ID NO: 391876 - RNA, 19 nt, Artificial Sequence
  Description of Artificial Sequence: Synthetic oligonucleotide
  Antisense Strand to SEQ ID NO: 391875
auuucucagguuggcaagg

SEQ ID NO: 391877 - RNA, 19 nt, Artificial Sequence
  Description of Artificial Sequence: Synthetic oligonucleotide
  Sense Strand Starting at position 931 of SEQ ID NO: 315402
caaguaucgucacuguaag

SEQ ID NO: 391878 - RNA, 19 nt, Artificial Sequence
  Description of Artificial Sequence: Synthetic oligonucleotide
  Antisense Strand to SEQ ID NO: 391877
cuuacagugacgauacuug

SEQ ID NO: 391879 - RNA, 19 nt, Artificial Sequence
  Description of Artificial Sequence: Synthetic oligonucleotide
  Sense Strand Starting at position 931 of SEQ ID NO: 315414
cuguaaguaucaguaguaa

SEQ ID NO: 391880 - RNA, 19 nt, Artificial Sequence
  Description of Artificial Sequence: Synthetic oligonucleotide
  Antisense Strand to SEQ ID NO: 391879
uuacuacugauacuuacag

SEQ ID NO: 391881 - RNA, 19 nt, Artificial Sequence
  Description of Artificial Sequence: Synthetic oligonucleotide
  Sense Strand Starting at position 931 of SEQ ID NO: 315457
aguaaagcaucuuuacugu

SEQ ID NO: 391882 - RNA, 19 nt, Artificial Sequence
  Description of Artificial Sequence: Synthetic oligonucleotide
  Antisense Strand to SEQ ID NO: 391881
acaguaaagaugcuuuacu

SEQ ID NO: 391883 - RNA, 19 nt, Artificial Sequence
  Description of Artificial Sequence: Synthetic oligonucleotide
  Sense Strand Starting at position 931 of SEQ ID NO: 315465
aucuuuacugucuagagca

SEQ ID NO: 391884 - RNA, 19 nt, Artificial Sequence
  Description of Artificial Sequence: Synthetic oligonucleotide
  Antisense Strand to SEQ ID NO: 391883
ugcucuagacaguaaagau

SEQ ID NO: 391885 - RNA, 19 nt, Artificial Sequence
  Description of Artificial Sequence: Synthetic oligonucleotide
  Sense Strand Starting at position 931 of SEQ ID NO: 315781
ggagauguugcccaugugu

SEQ ID NO: 391886 - RNA, 19 nt, Artificial Sequence
  Description of Artificial Sequence: Synthetic oligonucleotide
  Antisense Strand to SEQ ID NO: 391885
acacaugggcaacaucucc

SEQ ID NO: 391887 - RNA, 19 nt, Artificial Sequence
  Description of Artificial Sequence: Synthetic oligonucleotide
  Sense Strand Starting at position 931 of SEQ ID NO: 315836
acagaagucuuccuaaaug

SEQ ID NO: 391888 - RNA, 19 nt, Artificial Sequence
  Description of Artificial Sequence: Synthetic oligonucleotide
  Antisense Strand to SEQ ID NO: 391887
cauuuaggaagacuucugu

SEQ ID NO: 391889 - RNA, 19 nt, Artificial Sequence
  Description of Artificial Sequence: Synthetic oligonucleotide
  Sense Strand Starting at position 931 of SEQ ID NO: 315866
auauuuguguugcaacaaa

SEQ ID NO: 391890 - RNA, 19 nt, Artificial Sequence
  Description of Artificial Sequence: Synthetic oligonucleotide
  Antisense Strand to SEQ ID NO: 391889
uuuguugcaacacaaauau

SEQ ID NO: 391891 - RNA, 19 nt, Artificial Sequence
  Description of Artificial Sequence: Synthetic oligonucleotide
  Sense Strand Starting at position 931 of SEQ ID NO: 316015
ucaugucuacuccaggagu

SEQ ID NO: 391892 - RNA, 19 nt, Artificial Sequence
  Description of Artificial Sequence: Synthetic oligonucleotide
  Antisense Strand to SEQ ID NO: 391891
acuccuggaguagacauga

SEQ ID NO: 391893 - RNA, 19 nt, Artificial Sequence
  Description of Artificial Sequence: Synthetic oligonucleotide
  Sense Strand Starting at position 931 of SEQ ID NO: 316017
augucuacuccaggaguaa

SEQ ID NO: 391894 - RNA, 19 nt, Artificial Sequence
  Description of Artificial Sequence: Synthetic oligonucleotide
  Antisense Strand to SEQ ID NO: 391893
uuacuccuggaguagacau

SEQ ID NO: 391895 - RNA, 19 nt, Artificial Sequence
  Description of Artificial Sequence: Synthetic oligonucleotide
  Sense Strand Starting at position 931 of SEQ ID NO: 316018
ugucuacuccaggaguaag

SEQ ID NO: 391896 - RNA, 19 nt, Artificial Sequence
  Description of Artificial Sequence: Synthetic oligonucleotide
  Antisense Strand to SEQ ID NO: 391895
cuuacuccuggaguagaca

SEQ ID NO: 391897 - RNA, 19 nt, Artificial Sequence
  Description of Artificial Sequence: Synthetic oligonucleotide
  Sense Strand Starting at position 931 of SEQ ID NO: 316071
cuugaagucucaccacguu

SEQ ID NO: 391898 - RNA, 19 nt, Artificial Sequence
  Description of Artificial Sequence: Synthetic oligonucleotide
  Antisense Strand to SEQ ID NO: 391897
aacguggugagacuucaag

SEQ ID NO: 391899 - RNA, 19 nt, Artificial Sequence
  Description of Artificial Sequence: Synthetic oligonucleotide
  Sense Strand Starting at position 931 of SEQ ID NO: 316160
gcagauaggcuggauguuu

SEQ ID NO: 391900 - RNA, 19 nt, Artificial Sequence
  Description of Artificial Sequence: Synthetic oligonucleotide
  Antisense Strand to SEQ ID NO: 391899
aaacauccagccuaucugc

SEQ ID NO: 391901 - RNA, 19 nt, Artificial Sequence
  Description of Artificial Sequence: Synthetic oligonucleotide
  Sense Strand Starting at position 931 of SEQ ID NO: 316194
ggauguuggagcuggagaa

SEQ ID NO: 391902 - RNA, 19 nt, Artificial Sequence
  Description of Artificial Sequence: Synthetic oligonucleotide
  Antisense Strand to SEQ ID NO: 391901
uucuccagcuccaacaucc

SEQ ID NO: 391903 - RNA, 19 nt, Artificial Sequence
  Description of Artificial Sequence: Synthetic oligonucleotide
  Sense Strand Starting at position 931 of SEQ ID NO: 316216
caaggucauuucgaauggu

SEQ ID NO: 391904 - RNA, 19 nt, Artificial Sequence
  Description of Artificial Sequence: Synthetic oligonucleotide
  Antisense Strand to SEQ ID NO: 391903
accauucgaaaugaccuug

SEQ ID NO: 391905 - RNA, 19 nt, Artificial Sequence
  Description of Artificial Sequence: Synthetic oligonucleotide
  Sense Strand Starting at position 931 of SEQ ID NO: 316219
ggucauuucgaaugguugu

SEQ ID NO: 391906 - RNA, 19 nt, Artificial Sequence
  Description of Artificial Sequence: Synthetic oligonucleotide
  Antisense Strand to SEQ ID NO: 391905
acaaccauucgaaaugacc

SEQ ID NO: 391907 - RNA, 19 nt, Artificial Sequence
  Description of Artificial Sequence: Synthetic oligonucleotide
  Sense Strand Starting at position 931 of SEQ ID NO: 316220
gucauuucgaaugguugua

SEQ ID NO: 391908 - RNA, 19 nt, Artificial Sequence
  Description of Artificial Sequence: Synthetic oligonucleotide
  Antisense Strand to SEQ ID NO: 391907
uacaaccauucgaaaugac

SEQ ID NO: 391909 - RNA, 19 nt, Artificial Sequence
  Description of Artificial Sequence: Synthetic oligonucleotide
  Sense Strand Starting at position 931 of SEQ ID NO: 316233
guuguaacuguugagaacu

SEQ ID NO: 391910 - RNA, 19 nt, Artificial Sequence
  Description of Artificial Sequence: Synthetic oligonucleotide
  Antisense Strand to SEQ ID NO: 391909
aguucucaacaguuacaac

SEQ ID NO: 391911 - RNA, 19 nt, Artificial Sequence
  Description of Artificial Sequence: Synthetic oligonucleotide
  Sense Strand Starting at position 931 of SEQ ID NO: 316266
gcucuuuggacugagacca

SEQ ID NO: 391912 - RNA, 19 nt, Artificial Sequence
  Description of Artificial Sequence: Synthetic oligonucleotide
  Antisense Strand to SEQ ID NO: 391911
uggucucaguccaaagagc

SEQ ID NO: 391913 - RNA, 19 nt, Artificial Sequence
  Description of Artificial Sequence: Synthetic oligonucleotide
  Sense Strand Starting at position 931 of SEQ ID NO: 316321
ccaucuugacacuguaaug

SEQ ID NO: 391914 - RNA, 19 nt, Artificial Sequence
  Description of Artificial Sequence: Synthetic oligonucleotide
  Antisense Strand to SEQ ID NO: 391913
cauuacagugucaagaugg

SEQ ID NO: 391915 - RNA, 19 nt, Artificial Sequence
  Description of Artificial Sequence: Synthetic oligonucleotide
  Sense Strand Starting at position 931 of SEQ ID NO: 316379
ggaaacauccuuugugccu

SEQ ID NO: 391916 - RNA, 19 nt, Artificial Sequence
  Description of Artificial Sequence: Synthetic oligonucleotide
  Antisense Strand to SEQ ID NO: 391915
aggcacaaaggauguuucc

SEQ ID NO: 391917 - RNA, 19 nt, Artificial Sequence
  Description of Artificial Sequence: Synthetic oligonucleotide
  Sense Strand Starting at position 931 of SEQ ID NO: 316577
uuucuuugucgccaaauug

SEQ ID NO: 391918 - RNA, 19 nt, Artificial Sequence
  Description of Artificial Sequence: Synthetic oligonucleotide
  Antisense Strand to SEQ ID NO: 391917
caauuuggcgacaaagaaa

SEQ ID NO: 391919 - RNA, 19 nt, Artificial Sequence
  Description of Artificial Sequence: Synthetic oligonucleotide
  Sense Strand Starting at position 931 of SEQ ID NO: 317021
cgcagugagucaccuggaa

SEQ ID NO: 391920 - RNA, 19 nt, Artificial Sequence
  Description of Artificial Sequence: Synthetic oligonucleotide
  Antisense Strand to SEQ ID NO: 391919
uuccaggugacucacugcg

SEQ ID NO: 391921 - RNA, 19 nt, Artificial Sequence
  Description of Artificial Sequence: Synthetic oligonucleotide
  Sense Strand Starting at position 931 of SEQ ID NO: 317023
cagugagucaccuggaaag

SEQ ID NO: 391922 - RNA, 19 nt, Artificial Sequence
  Description of Artificial Sequence: Synthetic oligonucleotide
  Antisense Strand to SEQ ID NO: 391921
cuuuccaggugacucacug

SEQ ID NO: 391923 - RNA, 19 nt, Artificial Sequence
  Description of Artificial Sequence: Synthetic oligonucleotide
  Sense Strand Starting at position 931 of SEQ ID NO: 317382
cuagauuccuugucugaau

SEQ ID NO: 391924 - RNA, 19 nt, Artificial Sequence
  Description of Artificial Sequence: Synthetic oligonucleotide
  Antisense Strand to SEQ ID NO: 391923
auucagacaaggaaucuag

SEQ ID NO: 391925 - RNA, 19 nt, Artificial Sequence
  Description of Artificial Sequence: Synthetic oligonucleotide
  Sense Strand Starting at position 931 of SEQ ID NO: 317383
uagauuccuugucugaaug

SEQ ID NO: 391926 - RNA, 19 nt, Artificial Sequence
  Description of Artificial Sequence: Synthetic oligonucleotide
  Antisense Strand to SEQ ID NO: 391925
cauucagacaaggaaucua

SEQ ID NO: 391927 - RNA, 19 nt, Artificial Sequence
  Description of Artificial Sequence: Synthetic oligonucleotide
  Sense Strand Starting at position 931 of SEQ ID NO: 317389
ccuugucugaaugggaaau

SEQ ID NO: 391928 - RNA, 19 nt, Artificial Sequence
  Description of Artificial Sequence: Synthetic oligonucleotide
  Antisense Strand to SEQ ID NO: 391927
auuucccauucagacaagg

SEQ ID NO: 391929 - RNA, 19 nt, Artificial Sequence
  Description of Artificial Sequence: Synthetic oligonucleotide
  Sense Strand Starting at position 931 of SEQ ID NO: 317692
guaggagggcuuuacagau

SEQ ID NO: 391930 - RNA, 19 nt, Artificial Sequence
  Description of Artificial Sequence: Synthetic oligonucleotide
  Antisense Strand to SEQ ID NO: 391929
aucuguaaagcccuccuac

SEQ ID NO: 391931 - RNA, 19 nt, Artificial Sequence
  Description of Artificial Sequence: Synthetic oligonucleotide
  Sense Strand Starting at position 931 of SEQ ID NO: 317705
acagauuaagcaggcuaga

SEQ ID NO: 391932 - RNA, 19 nt, Artificial Sequence
  Description of Artificial Sequence: Synthetic oligonucleotide
  Antisense Strand to SEQ ID NO: 391931
ucuagccugcuuaaucugu

SEQ ID NO: 391933 - RNA, 19 nt, Artificial Sequence
  Description of Artificial Sequence: Synthetic oligonucleotide
  Sense Strand Starting at position 931 of SEQ ID NO: 317940
uuugaauugcuguauguuc

SEQ ID NO: 391934 - RNA, 19 nt, Artificial Sequence
  Description of Artificial Sequence: Synthetic oligonucleotide
  Antisense Strand to SEQ ID NO: 391933
gaacauacagcaauucaaa

SEQ ID NO: 391935 - RNA, 19 nt, Artificial Sequence
  Description of Artificial Sequence: Synthetic oligonucleotide
  Sense Strand Starting at position 931 of SEQ ID NO: 318035
guucuaagucuuggugaag

SEQ ID NO: 391936 - RNA, 19 nt, Artificial Sequence
  Description of Artificial Sequence: Synthetic oligonucleotide
  Antisense Strand to SEQ ID NO: 391935
cuucaccaagacuuagaac

SEQ ID NO: 391937 - RNA, 19 nt, Artificial Sequence
  Description of Artificial Sequence: Synthetic oligonucleotide
  Sense Strand Starting at position 931 of SEQ ID NO: 318371
gaguaugagucaucucaaa

SEQ ID NO: 391938 - RNA, 19 nt, Artificial Sequence
  Description of Artificial Sequence: Synthetic oligonucleotide
  Antisense Strand to SEQ ID NO: 391937
uuugagaugacucauacuc

SEQ ID NO: 391939 - RNA, 19 nt, Artificial Sequence
  Description of Artificial Sequence: Synthetic oligonucleotide
  Sense Strand Starting at position 931 of SEQ ID NO: 318391
gauugauaaggucacgcaa

SEQ ID NO: 391940 - RNA, 19 nt, Artificial Sequence
  Description of Artificial Sequence: Synthetic oligonucleotide
  Antisense Strand to SEQ ID NO: 391939
uugcgugaccuuaucaauc

SEQ ID NO: 391941 - RNA, 19 nt, Artificial Sequence
  Description of Artificial Sequence: Synthetic oligonucleotide
  Sense Strand Starting at position 931 of SEQ ID NO: 318849
agcccuuaucugggcauga

SEQ ID NO: 391942 - RNA, 19 nt, Artificial Sequence
  Description of Artificial Sequence: Synthetic oligonucleotide
  Antisense Strand to SEQ ID NO: 391941
ucaugcccagauaagggcu

SEQ ID NO: 391943 - RNA, 19 nt, Artificial Sequence
  Description of Artificial Sequence: Synthetic oligonucleotide
  Sense Strand Starting at position 931 of SEQ ID NO: 318851
cccuuaucugggcaugaca

SEQ ID NO: 391944 - RNA, 19 nt, Artificial Sequence
  Description of Artificial Sequence: Synthetic oligonucleotide
  Antisense Strand to SEQ ID NO: 391943
ugucaugcccagauaaggg

SEQ ID NO: 391945 - RNA, 19 nt, Artificial Sequence
  Description of Artificial Sequence: Synthetic oligonucleotide
  Sense Strand Starting at position 931 of SEQ ID NO: 318853
cuuaucugggcaugacaga

SEQ ID NO: 391946 - RNA, 19 nt, Artificial Sequence
  Description of Artificial Sequence: Synthetic oligonucleotide
  Antisense Strand to SEQ ID NO: 391945
ucugucaugcccagauaag

SEQ ID NO: 391947 - RNA, 19 nt, Artificial Sequence
  Description of Artificial Sequence: Synthetic oligonucleotide
  Sense Strand Starting at position 931 of SEQ ID NO: 318879
cgcucuugucuucuaguca

SEQ ID NO: 391948 - RNA, 19 nt, Artificial Sequence
  Description of Artificial Sequence: Synthetic oligonucleotide
  Antisense Strand to SEQ ID NO: 391947
ugacuagaagacaagagcg

SEQ ID NO: 391949 - RNA, 19 nt, Artificial Sequence
  Description of Artificial Sequence: Synthetic oligonucleotide
  Sense Strand Starting at position 931 of SEQ ID NO: 318886
gucuucuagucaucucuca

SEQ ID NO: 391950 - RNA, 19 nt, Artificial Sequence
  Description of Artificial Sequence: Synthetic oligonucleotide
  Antisense Strand to SEQ ID NO: 391949
ugagagaugacuagaagac

SEQ ID NO: 391951 - RNA, 19 nt, Artificial Sequence
  Description of Artificial Sequence: Synthetic oligonucleotide
  Sense Strand Starting at position 932 of SEQ ID NO: 315276
gcacuacugggugauggua

SEQ ID NO: 391952 - RNA, 19 nt, Artificial Sequence
  Description of Artificial Sequence: Synthetic oligonucleotide
  Antisense Strand to SEQ ID NO: 391951
uaccaucacccaguagugc

SEQ ID NO: 391953 - RNA, 19 nt, Artificial Sequence
  Description of Artificial Sequence: Synthetic oligonucleotide
  Sense Strand Starting at position 932 of SEQ ID NO: 315491
accucuuguuguccaugau

SEQ ID NO: 391954 - RNA, 19 nt, Artificial Sequence
  Description of Artificial Sequence: Synthetic oligonucleotide
  Antisense Strand to SEQ ID NO: 391953
aucauggacaacaagaggu

SEQ ID NO: 391955 - RNA, 19 nt, Artificial Sequence
  Description of Artificial Sequence: Synthetic oligonucleotide
  Sense Strand Starting at position 932 of SEQ ID NO: 315492
ccucuuguuguccaugaua

SEQ ID NO: 391956 - RNA, 19 nt, Artificial Sequence
  Description of Artificial Sequence: Synthetic oligonucleotide
  Antisense Strand to SEQ ID NO: 391955
uaucauggacaacaagagg

SEQ ID NO: 391957 - RNA, 19 nt, Artificial Sequence
  Description of Artificial Sequence: Synthetic oligonucleotide
  Sense Strand Starting at position 932 of SEQ ID NO: 315494
ucuuguuguccaugauaaa

SEQ ID NO: 391958 - RNA, 19 nt, Artificial Sequence
  Description of Artificial Sequence: Synthetic oligonucleotide
  Antisense Strand to SEQ ID NO: 391957
uuuaucauggacaacaaga

SEQ ID NO: 391959 - RNA, 19 nt, Artificial Sequence
  Description of Artificial Sequence: Synthetic oligonucleotide
  Sense Strand Starting at position 932 of SEQ ID NO: 315495
cuuguuguccaugauaaac

SEQ ID NO: 391960 - RNA, 19 nt, Artificial Sequence
  Description of Artificial Sequence: Synthetic oligonucleotide
  Antisense Strand to SEQ ID NO: 391959
guuuaucauggacaacaag

SEQ ID NO: 391961 - RNA, 19 nt, Artificial Sequence
  Description of Artificial Sequence: Synthetic oligonucleotide
  Sense Strand Starting at position 932 of SEQ ID NO: 315768
ggaaacuucugcuucugaa

SEQ ID NO: 391962 - RNA, 19 nt, Artificial Sequence
  Description of Artificial Sequence: Synthetic oligonucleotide
  Antisense Strand to SEQ ID NO: 391961
uucagaagcagaaguuucc

SEQ ID NO: 391963 - RNA, 19 nt, Artificial Sequence
  Description of Artificial Sequence: Synthetic oligonucleotide
  Sense Strand Starting at position 932 of SEQ ID NO: 315993
acaagaacuuugccuuguu

SEQ ID NO: 391964 - RNA, 19 nt, Artificial Sequence
  Description of Artificial Sequence: Synthetic oligonucleotide
  Antisense Strand to SEQ ID NO: 391963
aacaaggcaaaguucuugu

SEQ ID NO: 391965 - RNA, 19 nt, Artificial Sequence
  Description of Artificial Sequence: Synthetic oligonucleotide
  Sense Strand Starting at position 932 of SEQ ID NO: 316099
cacucaaagugugucaagu

SEQ ID NO: 391966 - RNA, 19 nt, Artificial Sequence
  Description of Artificial Sequence: Synthetic oligonucleotide
  Antisense Strand to SEQ ID NO: 391965
acuugacacacuuugagug

SEQ ID NO: 391967 - RNA, 19 nt, Artificial Sequence
  Description of Artificial Sequence: Synthetic oligonucleotide
  Sense Strand Starting at position 932 of SEQ ID NO: 316105
aagugugucaagugaagga

SEQ ID NO: 391968 - RNA, 19 nt, Artificial Sequence
  Description of Artificial Sequence: Synthetic oligonucleotide
  Antisense Strand to SEQ ID NO: 391967
uccuucacuugacacacuu

SEQ ID NO: 391969 - RNA, 19 nt, Artificial Sequence
  Description of Artificial Sequence: Synthetic oligonucleotide
  Sense Strand Starting at position 932 of SEQ ID NO: 316109
gugucaagugaaggaauga

SEQ ID NO: 391970 - RNA, 19 nt, Artificial Sequence
  Description of Artificial Sequence: Synthetic oligonucleotide
  Antisense Strand to SEQ ID NO: 391969
ucauuccuucacuugacac

SEQ ID NO: 391971 - RNA, 19 nt, Artificial Sequence
  Description of Artificial Sequence: Synthetic oligonucleotide
  Sense Strand Starting at position 932 of SEQ ID NO: 316192
gccugaaugagguguccac

SEQ ID NO: 391972 - RNA, 19 nt, Artificial Sequence
  Description of Artificial Sequence: Synthetic oligonucleotide
  Antisense Strand to SEQ ID NO: 391971
guggacaccucauucaggc

SEQ ID NO: 391973 - RNA, 19 nt, Artificial Sequence
  Description of Artificial Sequence: Synthetic oligonucleotide
  Sense Strand Starting at position 932 of SEQ ID NO: 316231
ccacaugaggaguggucaa

SEQ ID NO: 391974 - RNA, 19 nt, Artificial Sequence
  Description of Artificial Sequence: Synthetic oligonucleotide
  Antisense Strand to SEQ ID NO: 391973
uugaccacuccucaugugg

SEQ ID NO: 391975 - RNA, 19 nt, Artificial Sequence
  Description of Artificial Sequence: Synthetic oligonucleotide
  Sense Strand Starting at position 932 of SEQ ID NO: 316439
gcacguacucacugaaggu

SEQ ID NO: 391976 - RNA, 19 nt, Artificial Sequence
  Description of Artificial Sequence: Synthetic oligonucleotide
  Antisense Strand to SEQ ID NO: 391975
accuucagugaguacgugc

SEQ ID NO: 391977 - RNA, 19 nt, Artificial Sequence
  Description of Artificial Sequence: Synthetic oligonucleotide
  Sense Strand Starting at position 932 of SEQ ID NO: 316452
gaaggugacagguguuuga

SEQ ID NO: 391978 - RNA, 19 nt, Artificial Sequence
  Description of Artificial Sequence: Synthetic oligonucleotide
  Antisense Strand to SEQ ID NO: 391977
ucaaacaccugucaccuuc

SEQ ID NO: 391979 - RNA, 19 nt, Artificial Sequence
  Description of Artificial Sequence: Synthetic oligonucleotide
  Sense Strand Starting at position 932 of SEQ ID NO: 316456
gugacagguguuugaaggu

SEQ ID NO: 391980 - RNA, 19 nt, Artificial Sequence
  Description of Artificial Sequence: Synthetic oligonucleotide
  Antisense Strand to SEQ ID NO: 391979
accuucaaacaccugucac

SEQ ID NO: 391981 - RNA, 19 nt, Artificial Sequence
  Description of Artificial Sequence: Synthetic oligonucleotide
  Sense Strand Starting at position 932 of SEQ ID NO: 316462
gguguuugaagguggacaa

SEQ ID NO: 391982 - RNA, 19 nt, Artificial Sequence
  Description of Artificial Sequence: Synthetic oligonucleotide
  Antisense Strand to SEQ ID NO: 391981
uuguccaccuucaaacacc

SEQ ID NO: 391983 - RNA, 19 nt, Artificial Sequence
  Description of Artificial Sequence: Synthetic oligonucleotide
  Sense Strand Starting at position 932 of SEQ ID NO: 316484
caacgucacccaugaugaa

SEQ ID NO: 391984 - RNA, 19 nt, Artificial Sequence
  Description of Artificial Sequence: Synthetic oligonucleotide
  Antisense Strand to SEQ ID NO: 391983
uucaucaugggugacguug

SEQ ID NO: 391985 - RNA, 19 nt, Artificial Sequence
  Description of Artificial Sequence: Synthetic oligonucleotide
  Sense Strand Starting at position 932 of SEQ ID NO: 316640
ccaccugguagguaucaga

SEQ ID NO: 391986 - RNA, 19 nt, Artificial Sequence
  Description of Artificial Sequence: Synthetic oligonucleotide
  Antisense Strand to SEQ ID NO: 391985
ucugauaccuaccaggugg

SEQ ID NO: 391987 - RNA, 19 nt, Artificial Sequence
  Description of Artificial Sequence: Synthetic oligonucleotide
  Sense Strand Starting at position 932 of SEQ ID NO: 316743
gccugagggcacugaagau

SEQ ID NO: 391988 - RNA, 19 nt, Artificial Sequence
  Description of Artificial Sequence: Synthetic oligonucleotide
  Antisense Strand to SEQ ID NO: 391987
aucuucagugcccucaggc

SEQ ID NO: 391989 - RNA, 19 nt, Artificial Sequence
  Description of Artificial Sequence: Synthetic oligonucleotide
  Sense Strand Starting at position 932 of SEQ ID NO: 316838
guggaaguguugguguaca

SEQ ID NO: 391990 - RNA, 19 nt, Artificial Sequence
  Description of Artificial Sequence: Synthetic oligonucleotide
  Antisense Strand to SEQ ID NO: 391989
uguacaccaacacuuccac

SEQ ID NO: 391991 - RNA, 19 nt, Artificial Sequence
  Description of Artificial Sequence: Synthetic oligonucleotide
  Sense Strand Starting at position 932 of SEQ ID NO: 316843
aguguugguguacacauau

SEQ ID NO: 391992 - RNA, 19 nt, Artificial Sequence
  Description of Artificial Sequence: Synthetic oligonucleotide
  Antisense Strand to SEQ ID NO: 391991
auauguguacaccaacacu

SEQ ID NO: 391993 - RNA, 19 nt, Artificial Sequence
  Description of Artificial Sequence: Synthetic oligonucleotide
  Sense Strand Starting at position 932 of SEQ ID NO: 316981
cgagcacaauucucacuua

SEQ ID NO: 391994 - RNA, 19 nt, Artificial Sequence
  Description of Artificial Sequence: Synthetic oligonucleotide
  Antisense Strand to SEQ ID NO: 391993
uaagugagaauugugcucg

SEQ ID NO: 391995 - RNA, 19 nt, Artificial Sequence
  Description of Artificial Sequence: Synthetic oligonucleotide
  Sense Strand Starting at position 932 of SEQ ID NO: 317659
gcuauaaugcuugcugcau

SEQ ID NO: 391996 - RNA, 19 nt, Artificial Sequence
  Description of Artificial Sequence: Synthetic oligonucleotide
  Antisense Strand to SEQ ID NO: 391995
augcagcaagcauuauagc

SEQ ID NO: 391997 - RNA, 19 nt, Artificial Sequence
  Description of Artificial Sequence: Synthetic oligonucleotide
  Sense Strand Starting at position 932 of SEQ ID NO: 317668
cuugcugcauuucuuagau

SEQ ID NO: 391998 - RNA, 19 nt, Artificial Sequence
  Description of Artificial Sequence: Synthetic oligonucleotide
  Antisense Strand to SEQ ID NO: 391997
aucuaagaaaugcagcaag

SEQ ID NO: 391999 - RNA, 19 nt, Artificial Sequence
  Description of Artificial Sequence: Synthetic oligonucleotide
  Sense Strand Starting at position 932 of SEQ ID NO: 317731
uccugacuucugugucaga

SEQ ID NO: 392000 - RNA, 19 nt, Artificial Sequence
  Description of Artificial Sequence: Synthetic oligonucleotide
  Antisense Strand to SEQ ID NO: 391999
ucugacacagaagucagga

SEQ ID NO: 392001 - RNA, 19 nt, Artificial Sequence
  Description of Artificial Sequence: Synthetic oligonucleotide
  Sense Strand Starting at position 932 of SEQ ID NO: 317732
ccugacuucugugucagaa

SEQ ID NO: 392002 - RNA, 19 nt, Artificial Sequence
  Description of Artificial Sequence: Synthetic oligonucleotide
  Antisense Strand to SEQ ID NO: 392001
uucugacacagaagucagg

SEQ ID NO: 392003 - RNA, 19 nt, Artificial Sequence
  Description of Artificial Sequence: Synthetic oligonucleotide
  Sense Strand Starting at position 932 of SEQ ID NO: 317831
acaguucuaucagucaagu

SEQ ID NO: 392004 - RNA, 19 nt, Artificial Sequence
  Description of Artificial Sequence: Synthetic oligonucleotide
  Antisense Strand to SEQ ID NO: 392003
acuugacugauagaacugu

SEQ ID NO: 392005 - RNA, 19 nt, Artificial Sequence
  Description of Artificial Sequence: Synthetic oligonucleotide
  Sense Strand Starting at position 932 of SEQ ID NO: 317845
caaguuauaugguuguaug

SEQ ID NO: 392006 - RNA, 19 nt, Artificial Sequence
  Description of Artificial Sequence: Synthetic oligonucleotide
  Antisense Strand to SEQ ID NO: 392005
cauacaaccauauaacuug

SEQ ID NO: 392007 - RNA, 19 nt, Artificial Sequence
  Description of Artificial Sequence: Synthetic oligonucleotide
  Sense Strand Starting at position 932 of SEQ ID NO: 317846
aaguuauaugguuguauga

SEQ ID NO: 392008 - RNA, 19 nt, Artificial Sequence
  Description of Artificial Sequence: Synthetic oligonucleotide
  Antisense Strand to SEQ ID NO: 392007
ucauacaaccauauaacuu

SEQ ID NO: 392009 - RNA, 19 nt, Artificial Sequence
  Description of Artificial Sequence: Synthetic oligonucleotide
  Sense Strand Starting at position 932 of SEQ ID NO: 317856
guuguaugaacguaugaag

SEQ ID NO: 392010 - RNA, 19 nt, Artificial Sequence
  Description of Artificial Sequence: Synthetic oligonucleotide
  Antisense Strand to SEQ ID NO: 392009
cuucauacguucauacaac

SEQ ID NO: 392011 - RNA, 19 nt, Artificial Sequence
  Description of Artificial Sequence: Synthetic oligonucleotide
  Sense Strand Starting at position 932 of SEQ ID NO: 317949
uaaggauuggcccaggagu

SEQ ID NO: 392012 - RNA, 19 nt, Artificial Sequence
  Description of Artificial Sequence: Synthetic oligonucleotide
  Antisense Strand to SEQ ID NO: 392011
acuccugggccaauccuua

SEQ ID NO: 392013 - RNA, 19 nt, Artificial Sequence
  Description of Artificial Sequence: Synthetic oligonucleotide
  Sense Strand Starting at position 932 of SEQ ID NO: 317974
gugguuccacauugaaaga

SEQ ID NO: 392014 - RNA, 19 nt, Artificial Sequence
  Description of Artificial Sequence: Synthetic oligonucleotide
  Antisense Strand to SEQ ID NO: 392013
ucuuucaauguggaaccac

SEQ ID NO: 392015 - RNA, 19 nt, Artificial Sequence
  Description of Artificial Sequence: Synthetic oligonucleotide
  Sense Strand Starting at position 932 of SEQ ID NO: 317988
aaagaauucucaguggauu

SEQ ID NO: 392016 - RNA, 19 nt, Artificial Sequence
  Description of Artificial Sequence: Synthetic oligonucleotide
  Antisense Strand to SEQ ID NO: 392015
aauccacugagaauucuuu

SEQ ID NO: 392017 - RNA, 19 nt, Artificial Sequence
  Description of Artificial Sequence: Synthetic oligonucleotide
  Sense Strand Starting at position 932 of SEQ ID NO: 317989
aagaauucucaguggauuc

SEQ ID NO: 392018 - RNA, 19 nt, Artificial Sequence
  Description of Artificial Sequence: Synthetic oligonucleotide
  Antisense Strand to SEQ ID NO: 392017
gaauccacugagaauucuu

SEQ ID NO: 392019 - RNA, 19 nt, Artificial Sequence
  Description of Artificial Sequence: Synthetic oligonucleotide
  Sense Strand Starting at position 932 of SEQ ID NO: 317996
cucaguggauucuccacau

SEQ ID NO: 392020 - RNA, 19 nt, Artificial Sequence
  Description of Artificial Sequence: Synthetic oligonucleotide
  Antisense Strand to SEQ ID NO: 392019
auguggagaauccacugag

SEQ ID NO: 392021 - RNA, 19 nt, Artificial Sequence
  Description of Artificial Sequence: Synthetic oligonucleotide
  Sense Strand Starting at position 932 of SEQ ID NO: 318037
acagaaagaccaugugcuu

SEQ ID NO: 392022 - RNA, 19 nt, Artificial Sequence
  Description of Artificial Sequence: Synthetic oligonucleotide
  Antisense Strand to SEQ ID NO: 392021
aagcacauggucuuucugu

SEQ ID NO: 392023 - RNA, 19 nt, Artificial Sequence
  Description of Artificial Sequence: Synthetic oligonucleotide
  Sense Strand Starting at position 932 of SEQ ID NO: 318624
agguaugcucacuguguga

SEQ ID NO: 392024 - RNA, 19 nt, Artificial Sequence
  Description of Artificial Sequence: Synthetic oligonucleotide
  Antisense Strand to SEQ ID NO: 392023
ucacacagugagcauaccu

SEQ ID NO: 392025 - RNA, 19 nt, Artificial Sequence
  Description of Artificial Sequence: Synthetic oligonucleotide
  Sense Strand Starting at position 932 of SEQ ID NO: 318627
uaugcucacugugugacaa

SEQ ID NO: 392026 - RNA, 19 nt, Artificial Sequence
  Description of Artificial Sequence: Synthetic oligonucleotide
  Antisense Strand to SEQ ID NO: 392025
uugucacacagugagcaua

SEQ ID NO: 392027 - RNA, 19 nt, Artificial Sequence
  Description of Artificial Sequence: Synthetic oligonucleotide
  Sense Strand Starting at position 932 of SEQ ID NO: 318628
augcucacugugugacaau

SEQ ID NO: 392028 - RNA, 19 nt, Artificial Sequence
  Description of Artificial Sequence: Synthetic oligonucleotide
  Antisense Strand to SEQ ID NO: 392027
auugucacacagugagcau

SEQ ID NO: 392029 - RNA, 19 nt, Artificial Sequence
  Description of Artificial Sequence: Synthetic oligonucleotide
  Sense Strand Starting at position 932 of SEQ ID NO: 318842
auaagacuccugugguaau

SEQ ID NO: 392030 - RNA, 19 nt, Artificial Sequence
  Description of Artificial Sequence: Synthetic oligonucleotide
  Antisense Strand to SEQ ID NO: 392029
auuaccacaggagucuuau

SEQ ID NO: 392031 - RNA, 19 nt, Artificial Sequence
  Description of Artificial Sequence: Synthetic oligonucleotide
  Sense Strand Starting at position 933 of SEQ ID NO: 315618
cauccuugcccguaguuua

SEQ ID NO: 392032 - RNA, 19 nt, Artificial Sequence
  Description of Artificial Sequence: Synthetic oligonucleotide
  Antisense Strand to SEQ ID NO: 392031
uaaacuacgggcaaggaug

SEQ ID NO: 392033 - RNA, 19 nt, Artificial Sequence
  Description of Artificial Sequence: Synthetic oligonucleotide
  Sense Strand Starting at position 933 of SEQ ID NO: 315830
aguagagauguguguccau

SEQ ID NO: 392034 - RNA, 19 nt, Artificial Sequence
  Description of Artificial Sequence: Synthetic oligonucleotide
  Antisense Strand to SEQ ID NO: 392033
auggacacacaucucuacu

SEQ ID NO: 392035 - RNA, 19 nt, Artificial Sequence
  Description of Artificial Sequence: Synthetic oligonucleotide
  Sense Strand Starting at position 933 of SEQ ID NO: 315903
cacugaaccaggugugaga

SEQ ID NO: 392036 - RNA, 19 nt, Artificial Sequence
  Description of Artificial Sequence: Synthetic oligonucleotide
  Antisense Strand to SEQ ID NO: 392035
ucucacaccugguucagug

SEQ ID NO: 392037 - RNA, 19 nt, Artificial Sequence
  Description of Artificial Sequence: Synthetic oligonucleotide
  Sense Strand Starting at position 933 of SEQ ID NO: 315910
ccaggugugagauggagau

SEQ ID NO: 392038 - RNA, 19 nt, Artificial Sequence
  Description of Artificial Sequence: Synthetic oligonucleotide
  Antisense Strand to SEQ ID NO: 392037
aucuccaucucacaccugg

SEQ ID NO: 392039 - RNA, 19 nt, Artificial Sequence
  Description of Artificial Sequence: Synthetic oligonucleotide
  Sense Strand Starting at position 933 of SEQ ID NO: 315944
ucuggauugcuacagguau

SEQ ID NO: 392040 - RNA, 19 nt, Artificial Sequence
  Description of Artificial Sequence: Synthetic oligonucleotide
  Antisense Strand to SEQ ID NO: 392039
auaccuguagcaauccaga

SEQ ID NO: 392041 - RNA, 19 nt, Artificial Sequence
  Description of Artificial Sequence: Synthetic oligonucleotide
  Sense Strand Starting at position 933 of SEQ ID NO: 315994
gggagaaagucacaccagu

SEQ ID NO: 392042 - RNA, 19 nt, Artificial Sequence
  Description of Artificial Sequence: Synthetic oligonucleotide
  Antisense Strand to SEQ ID NO: 392041
acuggugugacuuucuccc

SEQ ID NO: 392043 - RNA, 19 nt, Artificial Sequence
  Description of Artificial Sequence: Synthetic oligonucleotide
  Sense Strand Starting at position 933 of SEQ ID NO: 316361
uugaauucuggcuacagca

SEQ ID NO: 392044 - RNA, 19 nt, Artificial Sequence
  Description of Artificial Sequence: Synthetic oligonucleotide
  Antisense Strand to SEQ ID NO: 392043
ugcuguagccagaauucaa

SEQ ID NO: 392045 - RNA, 19 nt, Artificial Sequence
  Description of Artificial Sequence: Synthetic oligonucleotide
  Sense Strand Starting at position 933 of SEQ ID NO: 316407
cucaguuucucacugugaa

SEQ ID NO: 392046 - RNA, 19 nt, Artificial Sequence
  Description of Artificial Sequence: Synthetic oligonucleotide
  Antisense Strand to SEQ ID NO: 392045
uucacagugagaaacugag

SEQ ID NO: 392047 - RNA, 19 nt, Artificial Sequence
  Description of Artificial Sequence: Synthetic oligonucleotide
  Sense Strand Starting at position 933 of SEQ ID NO: 316408
ucaguuucucacugugaaa

SEQ ID NO: 392048 - RNA, 19 nt, Artificial Sequence
  Description of Artificial Sequence: Synthetic oligonucleotide
  Antisense Strand to SEQ ID NO: 392047
uuucacagugagaaacuga

SEQ ID NO: 392049 - RNA, 19 nt, Artificial Sequence
  Description of Artificial Sequence: Synthetic oligonucleotide
  Sense Strand Starting at position 933 of SEQ ID NO: 316410
aguuucucacugugaaaug

SEQ ID NO: 392050 - RNA, 19 nt, Artificial Sequence
  Description of Artificial Sequence: Synthetic oligonucleotide
  Antisense Strand to SEQ ID NO: 392049
cauuucacagugagaaacu

SEQ ID NO: 392051 - RNA, 19 nt, Artificial Sequence
  Description of Artificial Sequence: Synthetic oligonucleotide
  Sense Strand Starting at position 933 of SEQ ID NO: 316435
uggugaagcucgccucaca

SEQ ID NO: 392052 - RNA, 19 nt, Artificial Sequence
  Description of Artificial Sequence: Synthetic oligonucleotide
  Antisense Strand to SEQ ID NO: 392051
ugugaggcgagcuucacca

SEQ ID NO: 392053 - RNA, 19 nt, Artificial Sequence
  Description of Artificial Sequence: Synthetic oligonucleotide
  Sense Strand Starting at position 933 of SEQ ID NO: 316513
cuuccucaucaucgcaaga

SEQ ID NO: 392054 - RNA, 19 nt, Artificial Sequence
  Description of Artificial Sequence: Synthetic oligonucleotide
  Antisense Strand to SEQ ID NO: 392053
ucuugcgaugaugaggaag

SEQ ID NO: 392055 - RNA, 19 nt, Artificial Sequence
  Description of Artificial Sequence: Synthetic oligonucleotide
  Sense Strand Starting at position 933 of SEQ ID NO: 316568
acucguuccauggauguua

SEQ ID NO: 392056 - RNA, 19 nt, Artificial Sequence
  Description of Artificial Sequence: Synthetic oligonucleotide
  Antisense Strand to SEQ ID NO: 392055
uaacauccauggaacgagu

SEQ ID NO: 392057 - RNA, 19 nt, Artificial Sequence
  Description of Artificial Sequence: Synthetic oligonucleotide
  Sense Strand Starting at position 933 of SEQ ID NO: 317113
ucaauagacggcugauaau

SEQ ID NO: 392058 - RNA, 19 nt, Artificial Sequence
  Description of Artificial Sequence: Synthetic oligonucleotide
  Antisense Strand to SEQ ID NO: 392057
auuaucagccgucuauuga

SEQ ID NO: 392059 - RNA, 19 nt, Artificial Sequence
  Description of Artificial Sequence: Synthetic oligonucleotide
  Sense Strand Starting at position 933 of SEQ ID NO: 317124
cugauaaucuaaucuggca

SEQ ID NO: 392060 - RNA, 19 nt, Artificial Sequence
  Description of Artificial Sequence: Synthetic oligonucleotide
  Antisense Strand to SEQ ID NO: 392059
ugccagauuagauuaucag

SEQ ID NO: 392061 - RNA, 19 nt, Artificial Sequence
  Description of Artificial Sequence: Synthetic oligonucleotide
  Sense Strand Starting at position 933 of SEQ ID NO: 317155
gauguaaggcuuugaagau

SEQ ID NO: 392062 - RNA, 19 nt, Artificial Sequence
  Description of Artificial Sequence: Synthetic oligonucleotide
  Antisense Strand to SEQ ID NO: 392061
aucuucaaagccuuacauc

SEQ ID NO: 392063 - RNA, 19 nt, Artificial Sequence
  Description of Artificial Sequence: Synthetic oligonucleotide
  Sense Strand Starting at position 933 of SEQ ID NO: 317198
guggguaucuacuccucaa

SEQ ID NO: 392064 - RNA, 19 nt, Artificial Sequence
  Description of Artificial Sequence: Synthetic oligonucleotide
  Antisense Strand to SEQ ID NO: 392063
uugaggaguagauacccac

SEQ ID NO: 392065 - RNA, 19 nt, Artificial Sequence
  Description of Artificial Sequence: Synthetic oligonucleotide
  Sense Strand Starting at position 933 of SEQ ID NO: 317545
uaguucugagccugugaca

SEQ ID NO: 392066 - RNA, 19 nt, Artificial Sequence
  Description of Artificial Sequence: Synthetic oligonucleotide
  Antisense Strand to SEQ ID NO: 392065
ugucacaggcucagaacua

SEQ ID NO: 392067 - RNA, 19 nt, Artificial Sequence
  Description of Artificial Sequence: Synthetic oligonucleotide
  Sense Strand Starting at position 933 of SEQ ID NO: 317692
ggagauaacuaguucuugu

SEQ ID NO: 392068 - RNA, 19 nt, Artificial Sequence
  Description of Artificial Sequence: Synthetic oligonucleotide
  Antisense Strand to SEQ ID NO: 392067
acaagaacuaguuaucucc

SEQ ID NO: 392069 - RNA, 19 nt, Artificial Sequence
  Description of Artificial Sequence: Synthetic oligonucleotide
  Sense Strand Starting at position 933 of SEQ ID NO: 317695
gauaacuaguucuuguagu

SEQ ID NO: 392070 - RNA, 19 nt, Artificial Sequence
  Description of Artificial Sequence: Synthetic oligonucleotide
  Antisense Strand to SEQ ID NO: 392069
acuacaagaacuaguuauc

SEQ ID NO: 392071 - RNA, 19 nt, Artificial Sequence
  Description of Artificial Sequence: Synthetic oligonucleotide
  Sense Strand Starting at position 933 of SEQ ID NO: 317703
guucuuguaguaugugaug

SEQ ID NO: 392072 - RNA, 19 nt, Artificial Sequence
  Description of Artificial Sequence: Synthetic oligonucleotide
  Antisense Strand to SEQ ID NO: 392071
caucacauacuacaagaac

SEQ ID NO: 392073 - RNA, 19 nt, Artificial Sequence
  Description of Artificial Sequence: Synthetic oligonucleotide
  Sense Strand Starting at position 933 of SEQ ID NO: 317710
uaguaugugaugugauuga

SEQ ID NO: 392074 - RNA, 19 nt, Artificial Sequence
  Description of Artificial Sequence: Synthetic oligonucleotide
  Antisense Strand to SEQ ID NO: 392073
ucaaucacaucacauacua

SEQ ID NO: 392075 - RNA, 19 nt, Artificial Sequence
  Description of Artificial Sequence: Synthetic oligonucleotide
  Sense Strand Starting at position 933 of SEQ ID NO: 317714
augugaugugauugaggug

SEQ ID NO: 392076 - RNA, 19 nt, Artificial Sequence
  Description of Artificial Sequence: Synthetic oligonucleotide
  Antisense Strand to SEQ ID NO: 392075
caccucaaucacaucacau

SEQ ID NO: 392077 - RNA, 19 nt, Artificial Sequence
  Description of Artificial Sequence: Synthetic oligonucleotide
  Sense Strand Starting at position 933 of SEQ ID NO: 317719
augugauugagguggaacu

SEQ ID NO: 392078 - RNA, 19 nt, Artificial Sequence
  Description of Artificial Sequence: Synthetic oligonucleotide
  Antisense Strand to SEQ ID NO: 392077
aguuccaccucaaucacau

SEQ ID NO: 392079 - RNA, 19 nt, Artificial Sequence
  Description of Artificial Sequence: Synthetic oligonucleotide
  Sense Strand Starting at position 933 of SEQ ID NO: 317829
gagugugaugguggugaga

SEQ ID NO: 392080 - RNA, 19 nt, Artificial Sequence
  Description of Artificial Sequence: Synthetic oligonucleotide
  Antisense Strand to SEQ ID NO: 392079
ucucaccaccaucacacuc

SEQ ID NO: 392081 - RNA, 19 nt, Artificial Sequence
  Description of Artificial Sequence: Synthetic oligonucleotide
  Sense Strand Starting at position 933 of SEQ ID NO: 317996
ucucaagcuccagggauua

SEQ ID NO: 392082 - RNA, 19 nt, Artificial Sequence
  Description of Artificial Sequence: Synthetic oligonucleotide
  Antisense Strand to SEQ ID NO: 392081
uaaucccuggagcuugaga

SEQ ID NO: 392083 - RNA, 19 nt, Artificial Sequence
  Description of Artificial Sequence: Synthetic oligonucleotide
  Sense Strand Starting at position 933 of SEQ ID NO: 318076
ugaggaaaucuagguaugu

SEQ ID NO: 392084 - RNA, 19 nt, Artificial Sequence
  Description of Artificial Sequence: Synthetic oligonucleotide
  Antisense Strand to SEQ ID NO: 392083
acauaccuagauuuccuca

SEQ ID NO: 392085 - RNA, 19 nt, Artificial Sequence
  Description of Artificial Sequence: Synthetic oligonucleotide
  Sense Strand Starting at position 933 of SEQ ID NO: 318077
gaggaaaucuagguauguu

SEQ ID NO: 392086 - RNA, 19 nt, Artificial Sequence
  Description of Artificial Sequence: Synthetic oligonucleotide
  Antisense Strand to SEQ ID NO: 392085
aacauaccuagauuuccuc

SEQ ID NO: 392087 - RNA, 19 nt, Artificial Sequence
  Description of Artificial Sequence: Synthetic oligonucleotide
  Sense Strand Starting at position 933 of SEQ ID NO: 318080
gaaaucuagguauguuuaa

SEQ ID NO: 392088 - RNA, 19 nt, Artificial Sequence
  Description of Artificial Sequence: Synthetic oligonucleotide
  Antisense Strand to SEQ ID NO: 392087
uuaaacauaccuagauuuc

SEQ ID NO: 392089 - RNA, 19 nt, Artificial Sequence
  Description of Artificial Sequence: Synthetic oligonucleotide
  Sense Strand Starting at position 933 of SEQ ID NO: 318294
ugacgagguuguucacaca

SEQ ID NO: 392090 - RNA, 19 nt, Artificial Sequence
  Description of Artificial Sequence: Synthetic oligonucleotide
  Antisense Strand to SEQ ID NO: 392089
ugugugaacaaccucguca

SEQ ID NO: 392091 - RNA, 19 nt, Artificial Sequence
  Description of Artificial Sequence: Synthetic oligonucleotide
  Sense Strand Starting at position 933 of SEQ ID NO: 318343
auaaaugacuguuuggaau

SEQ ID NO: 392092 - RNA, 19 nt, Artificial Sequence
  Description of Artificial Sequence: Synthetic oligonucleotide
  Antisense Strand to SEQ ID NO: 392091
auuccaaacagucauuuau

SEQ ID NO: 392093 - RNA, 19 nt, Artificial Sequence
  Description of Artificial Sequence: Synthetic oligonucleotide
  Sense Strand Starting at position 933 of SEQ ID NO: 318357
ggaaucauuuagcagagca

SEQ ID NO: 392094 - RNA, 19 nt, Artificial Sequence
  Description of Artificial Sequence: Synthetic oligonucleotide
  Antisense Strand to SEQ ID NO: 392093
ugcucugcuaaaugauucc

SEQ ID NO: 392095 - RNA, 19 nt, Artificial Sequence
  Description of Artificial Sequence: Synthetic oligonucleotide
  Sense Strand Starting at position 933 of SEQ ID NO: 318607
acccuauucugagugagac

SEQ ID NO: 392096 - RNA, 19 nt, Artificial Sequence
  Description of Artificial Sequence: Synthetic oligonucleotide
  Antisense Strand to SEQ ID NO: 392095
gucucacucagaauagggu

SEQ ID NO: 392097 - RNA, 19 nt, Artificial Sequence
  Description of Artificial Sequence: Synthetic oligonucleotide
  Sense Strand Starting at position 933 of SEQ ID NO: 318608
cccuauucugagugagaca

SEQ ID NO: 392098 - RNA, 19 nt, Artificial Sequence
  Description of Artificial Sequence: Synthetic oligonucleotide
  Antisense Strand to SEQ ID NO: 392097
ugucucacucagaauaggg

SEQ ID NO: 392099 - RNA, 19 nt, Artificial Sequence
  Description of Artificial Sequence: Synthetic oligonucleotide
  Sense Strand Starting at position 933 of SEQ ID NO: 318651
gucuguguacuguaugaaa

SEQ ID NO: 392100 - RNA, 19 nt, Artificial Sequence
  Description of Artificial Sequence: Synthetic oligonucleotide
  Antisense Strand to SEQ ID NO: 392099
uuucauacaguacacagac

SEQ ID NO: 392101 - RNA, 19 nt, Artificial Sequence
  Description of Artificial Sequence: Synthetic oligonucleotide
  Sense Strand Starting at position 933 of SEQ ID NO: 318653
cuguguacuguaugaaauu

SEQ ID NO: 392102 - RNA, 19 nt, Artificial Sequence
  Description of Artificial Sequence: Synthetic oligonucleotide
  Antisense Strand to SEQ ID NO: 392101
aauuucauacaguacacag

SEQ ID NO: 392103 - RNA, 19 nt, Artificial Sequence
  Description of Artificial Sequence: Synthetic oligonucleotide
  Sense Strand Starting at position 933 of SEQ ID NO: 318696
uuuagagcuauaugguaga

SEQ ID NO: 392104 - RNA, 19 nt, Artificial Sequence
  Description of Artificial Sequence: Synthetic oligonucleotide
  Antisense Strand to SEQ ID NO: 392103
ucuaccauauagcucuaaa

SEQ ID NO: 392105 - RNA, 19 nt, Artificial Sequence
  Description of Artificial Sequence: Synthetic oligonucleotide
  Sense Strand Starting at position 933 of SEQ ID NO: 318722
ggaaauuauuaucuguaca

SEQ ID NO: 392106 - RNA, 19 nt, Artificial Sequence
  Description of Artificial Sequence: Synthetic oligonucleotide
  Antisense Strand to SEQ ID NO: 392105
uguacagauaauaauuucc

SEQ ID NO: 392107 - RNA, 19 nt, Artificial Sequence
  Description of Artificial Sequence: Synthetic oligonucleotide
  Sense Strand Starting at position 933 of SEQ ID NO: 318825
cucuucugccuuugcagaa

SEQ ID NO: 392108 - RNA, 19 nt, Artificial Sequence
  Description of Artificial Sequence: Synthetic oligonucleotide
  Antisense Strand to SEQ ID NO: 392107
uucugcaaaggcagaagag

SEQ ID NO: 392109 - RNA, 19 nt, Artificial Sequence
  Description of Artificial Sequence: Synthetic oligonucleotide
  Sense Strand Starting at position 933 of SEQ ID NO: 318903
ucaggcauaucuguuauca

SEQ ID NO: 392110 - RNA, 19 nt, Artificial Sequence
  Description of Artificial Sequence: Synthetic oligonucleotide
  Antisense Strand to SEQ ID NO: 392109
ugauaacagauaugccuga

SEQ ID NO: 392111 - RNA, 19 nt, Artificial Sequence
  Description of Artificial Sequence: Synthetic oligonucleotide
  Sense Strand Starting at position 934 of SEQ ID NO: 315500
ggcauaguccaaggagaaa

SEQ ID NO: 392112 - RNA, 19 nt, Artificial Sequence
  Description of Artificial Sequence: Synthetic oligonucleotide
  Antisense Strand to SEQ ID NO: 392111
uuucuccuuggacuaugcc

SEQ ID NO: 392113 - RNA, 19 nt, Artificial Sequence
  Description of Artificial Sequence: Synthetic oligonucleotide
  Sense Strand Starting at position 934 of SEQ ID NO: 315552
gcccuuagucugcagggaa

SEQ ID NO: 392114 - RNA, 19 nt, Artificial Sequence
  Description of Artificial Sequence: Synthetic oligonucleotide
  Antisense Strand to SEQ ID NO: 392113
uucccugcagacuaagggc

SEQ ID NO: 392115 - RNA, 19 nt, Artificial Sequence
  Description of Artificial Sequence: Synthetic oligonucleotide
  Sense Strand Starting at position 934 of SEQ ID NO: 315555
cuuagucugcagggaaaug

SEQ ID NO: 392116 - RNA, 19 nt, Artificial Sequence
  Description of Artificial Sequence: Synthetic oligonucleotide
  Antisense Strand to SEQ ID NO: 392115
cauuucccugcagacuaag

SEQ ID NO: 392117 - RNA, 19 nt, Artificial Sequence
  Description of Artificial Sequence: Synthetic oligonucleotide
  Sense Strand Starting at position 934 of SEQ ID NO: 315937
ugaugagauucugcucugu

SEQ ID NO: 392118 - RNA, 19 nt, Artificial Sequence
  Description of Artificial Sequence: Synthetic oligonucleotide
  Antisense Strand to SEQ ID NO: 392117
acagagcagaaucucauca

SEQ ID NO: 392119 - RNA, 19 nt, Artificial Sequence
  Description of Artificial Sequence: Synthetic oligonucleotide
  Sense Strand Starting at position 934 of SEQ ID NO: 315939
augagauucugcucuguac

SEQ ID NO: 392120 - RNA, 19 nt, Artificial Sequence
  Description of Artificial Sequence: Synthetic oligonucleotide
  Antisense Strand to SEQ ID NO: 392119
guacagagcagaaucucau

SEQ ID NO: 392121 - RNA, 19 nt, Artificial Sequence
  Description of Artificial Sequence: Synthetic oligonucleotide
  Sense Strand Starting at position 934 of SEQ ID NO: 315941
gagauucugcucuguacca

SEQ ID NO: 392122 - RNA, 19 nt, Artificial Sequence
  Description of Artificial Sequence: Synthetic oligonucleotide
  Antisense Strand to SEQ ID NO: 392121
ugguacagagcagaaucuc

SEQ ID NO: 392123 - RNA, 19 nt, Artificial Sequence
  Description of Artificial Sequence: Synthetic oligonucleotide
  Sense Strand Starting at position 934 of SEQ ID NO: 315942
agauucugcucuguaccau

SEQ ID NO: 392124 - RNA, 19 nt, Artificial Sequence
  Description of Artificial Sequence: Synthetic oligonucleotide
  Antisense Strand to SEQ ID NO: 392123
augguacagagcagaaucu

SEQ ID NO: 392125 - RNA, 19 nt, Artificial Sequence
  Description of Artificial Sequence: Synthetic oligonucleotide
  Sense Strand Starting at position 934 of SEQ ID NO: 315991
ccgagugucagugaggauu

SEQ ID NO: 392126 - RNA, 19 nt, Artificial Sequence
  Description of Artificial Sequence: Synthetic oligonucleotide
  Antisense Strand to SEQ ID NO: 392125
aauccucacugacacucgg

SEQ ID NO: 392127 - RNA, 19 nt, Artificial Sequence
  Description of Artificial Sequence: Synthetic oligonucleotide
  Sense Strand Starting at position 934 of SEQ ID NO: 316133
uccaaauggauucguggau

SEQ ID NO: 392128 - RNA, 19 nt, Artificial Sequence
  Description of Artificial Sequence: Synthetic oligonucleotide
  Antisense Strand to SEQ ID NO: 392127
auccacgaauccauuugga

SEQ ID NO: 392129 - RNA, 19 nt, Artificial Sequence
  Description of Artificial Sequence: Synthetic oligonucleotide
  Sense Strand Starting at position 934 of SEQ ID NO: 316134
ccaaauggauucguggauu

SEQ ID NO: 392130 - RNA, 19 nt, Artificial Sequence
  Description of Artificial Sequence: Synthetic oligonucleotide
  Antisense Strand to SEQ ID NO: 392129
aauccacgaauccauuugg

SEQ ID NO: 392131 - RNA, 19 nt, Artificial Sequence
  Description of Artificial Sequence: Synthetic oligonucleotide
  Sense Strand Starting at position 934 of SEQ ID NO: 316137
aauggauucguggauugua

SEQ ID NO: 392132 - RNA, 19 nt, Artificial Sequence
  Description of Artificial Sequence: Synthetic oligonucleotide
  Antisense Strand to SEQ ID NO: 392131
uacaauccacgaauccauu

SEQ ID NO: 392133 - RNA, 19 nt, Artificial Sequence
  Description of Artificial Sequence: Synthetic oligonucleotide
  Sense Strand Starting at position 934 of SEQ ID NO: 316140
ggauucguggauuguaaau

SEQ ID NO: 392134 - RNA, 19 nt, Artificial Sequence
  Description of Artificial Sequence: Synthetic oligonucleotide
  Antisense Strand to SEQ ID NO: 392133
auuuacaauccacgaaucc

SEQ ID NO: 392135 - RNA, 19 nt, Artificial Sequence
  Description of Artificial Sequence: Synthetic oligonucleotide
  Sense Strand Starting at position 934 of SEQ ID NO: 316146
guggauuguaaauguaagu

SEQ ID NO: 392136 - RNA, 19 nt, Artificial Sequence
  Description of Artificial Sequence: Synthetic oligonucleotide
  Antisense Strand to SEQ ID NO: 392135
acuuacauuuacaauccac

SEQ ID NO: 392137 - RNA, 19 nt, Artificial Sequence
  Description of Artificial Sequence: Synthetic oligonucleotide
  Sense Strand Starting at position 934 of SEQ ID NO: 316234
ggaaguccuguuuggguga

SEQ ID NO: 392138 - RNA, 19 nt, Artificial Sequence
  Description of Artificial Sequence: Synthetic oligonucleotide
  Antisense Strand to SEQ ID NO: 392137
ucacccaaacaggacuucc

SEQ ID NO: 392139 - RNA, 19 nt, Artificial Sequence
  Description of Artificial Sequence: Synthetic oligonucleotide
  Sense Strand Starting at position 934 of SEQ ID NO: 316293
uuaugugggucuguuaaac

SEQ ID NO: 392140 - RNA, 19 nt, Artificial Sequence
  Description of Artificial Sequence: Synthetic oligonucleotide
  Antisense Strand to SEQ ID NO: 392139
guuuaacagacccacauaa

SEQ ID NO: 392141 - RNA, 19 nt, Artificial Sequence
  Description of Artificial Sequence: Synthetic oligonucleotide
  Sense Strand Starting at position 934 of SEQ ID NO: 316304
uguuaaacaugccugaaag

SEQ ID NO: 392142 - RNA, 19 nt, Artificial Sequence
  Description of Artificial Sequence: Synthetic oligonucleotide
  Antisense Strand to SEQ ID NO: 392141
cuuucaggcauguuuaaca

SEQ ID NO: 392143 - RNA, 19 nt, Artificial Sequence
  Description of Artificial Sequence: Synthetic oligonucleotide
  Sense Strand Starting at position 934 of SEQ ID NO: 316640
guguuuagugcucaaugaa

SEQ ID NO: 392144 - RNA, 19 nt, Artificial Sequence
  Description of Artificial Sequence: Synthetic oligonucleotide
  Antisense Strand to SEQ ID NO: 392143
uucauugagcacuaaacac

SEQ ID NO: 392145 - RNA, 19 nt, Artificial Sequence
  Description of Artificial Sequence: Synthetic oligonucleotide
  Sense Strand Starting at position 934 of SEQ ID NO: 316643
uuuagugcucaaugaacac

SEQ ID NO: 392146 - RNA, 19 nt, Artificial Sequence
  Description of Artificial Sequence: Synthetic oligonucleotide
  Antisense Strand to SEQ ID NO: 392145
guguucauugagcacuaaa

SEQ ID NO: 392147 - RNA, 19 nt, Artificial Sequence
  Description of Artificial Sequence: Synthetic oligonucleotide
  Sense Strand Starting at position 934 of SEQ ID NO: 316722
agccaagguccuuaagacu

SEQ ID NO: 392148 - RNA, 19 nt, Artificial Sequence
  Description of Artificial Sequence: Synthetic oligonucleotide
  Antisense Strand to SEQ ID NO: 392147
agucuuaaggaccuuggcu

SEQ ID NO: 392149 - RNA, 19 nt, Artificial Sequence
  Description of Artificial Sequence: Synthetic oligonucleotide
  Sense Strand Starting at position 934 of SEQ ID NO: 316997
ggacgucgagcggauuaga

SEQ ID NO: 392150 - RNA, 19 nt, Artificial Sequence
  Description of Artificial Sequence: Synthetic oligonucleotide
  Antisense Strand to SEQ ID NO: 392149
ucuaauccgcucgacgucc

SEQ ID NO: 392151 - RNA, 19 nt, Artificial Sequence
  Description of Artificial Sequence: Synthetic oligonucleotide
  Sense Strand Starting at position 934 of SEQ ID NO: 317468
ccuggagucccucaacuua

SEQ ID NO: 392152 - RNA, 19 nt, Artificial Sequence
  Description of Artificial Sequence: Synthetic oligonucleotide
  Antisense Strand to SEQ ID NO: 392151
uaaguugagggacuccagg

SEQ ID NO: 392153 - RNA, 19 nt, Artificial Sequence
  Description of Artificial Sequence: Synthetic oligonucleotide
  Sense Strand Starting at position 934 of SEQ ID NO: 317481
aacuuaaucucggccgauu

SEQ ID NO: 392154 - RNA, 19 nt, Artificial Sequence
  Description of Artificial Sequence: Synthetic oligonucleotide
  Antisense Strand to SEQ ID NO: 392153
aaucggccgagauuaaguu

SEQ ID NO: 392155 - RNA, 19 nt, Artificial Sequence
  Description of Artificial Sequence: Synthetic oligonucleotide
  Sense Strand Starting at position 934 of SEQ ID NO: 317767
agauccaucugcuuaggaa

SEQ ID NO: 392156 - RNA, 19 nt, Artificial Sequence
  Description of Artificial Sequence: Synthetic oligonucleotide
  Antisense Strand to SEQ ID NO: 392155
uuccuaagcagauggaucu

SEQ ID NO: 392157 - RNA, 19 nt, Artificial Sequence
  Description of Artificial Sequence: Synthetic oligonucleotide
  Sense Strand Starting at position 934 of SEQ ID NO: 317818
gaacacuggugcuuaccau

SEQ ID NO: 392158 - RNA, 19 nt, Artificial Sequence
  Description of Artificial Sequence: Synthetic oligonucleotide
  Antisense Strand to SEQ ID NO: 392157
augguaagcaccaguguuc

SEQ ID NO: 392159 - RNA, 19 nt, Artificial Sequence
  Description of Artificial Sequence: Synthetic oligonucleotide
  Sense Strand Starting at position 934 of SEQ ID NO: 317855
ggaggucacuuugcauguu

SEQ ID NO: 392160 - RNA, 19 nt, Artificial Sequence
  Description of Artificial Sequence: Synthetic oligonucleotide
  Antisense Strand to SEQ ID NO: 392159
aacaugcaaagugaccucc

SEQ ID NO: 392161 - RNA, 19 nt, Artificial Sequence
  Description of Artificial Sequence: Synthetic oligonucleotide
  Sense Strand Starting at position 934 of SEQ ID NO: 317907
acaggaggguaauacauuu

SEQ ID NO: 392162 - RNA, 19 nt, Artificial Sequence
  Description of Artificial Sequence: Synthetic oligonucleotide
  Antisense Strand to SEQ ID NO: 392161
aaauguauuacccuccugu

SEQ ID NO: 392163 - RNA, 19 nt, Artificial Sequence
  Description of Artificial Sequence: Synthetic oligonucleotide
  Sense Strand Starting at position 934 of SEQ ID NO: 318385
ugcuguagagucuaaugga

SEQ ID NO: 392164 - RNA, 19 nt, Artificial Sequence
  Description of Artificial Sequence: Synthetic oligonucleotide
  Antisense Strand to SEQ ID NO: 392163
uccauuagacucuacagca

SEQ ID NO: 392165 - RNA, 19 nt, Artificial Sequence
  Description of Artificial Sequence: Synthetic oligonucleotide
  Sense Strand Starting at position 934 of SEQ ID NO: 318429
agggcauagugaucucaca

SEQ ID NO: 392166 - RNA, 19 nt, Artificial Sequence
  Description of Artificial Sequence: Synthetic oligonucleotide
  Antisense Strand to SEQ ID NO: 392165
ugugagaucacuaugcccu

SEQ ID NO: 392167 - RNA, 19 nt, Artificial Sequence
  Description of Artificial Sequence: Synthetic oligonucleotide
  Sense Strand Starting at position 934 of SEQ ID NO: 318511
ggaggaauuggucaggcuc

SEQ ID NO: 392168 - RNA, 19 nt, Artificial Sequence
  Description of Artificial Sequence: Synthetic oligonucleotide
  Antisense Strand to SEQ ID NO: 392167
gagccugaccaauuccucc

SEQ ID NO: 392169 - RNA, 19 nt, Artificial Sequence
  Description of Artificial Sequence: Synthetic oligonucleotide
  Sense Strand Starting at position 934 of SEQ ID NO: 318578
ugaaacaugguccaugguu

SEQ ID NO: 392170 - RNA, 19 nt, Artificial Sequence
  Description of Artificial Sequence: Synthetic oligonucleotide
  Antisense Strand to SEQ ID NO: 392169
aaccauggaccauguuuca

SEQ ID NO: 392171 - RNA, 19 nt, Artificial Sequence
  Description of Artificial Sequence: Synthetic oligonucleotide
  Sense Strand Starting at position 934 of SEQ ID NO: 318617
uggugaguuacuugggaag

SEQ ID NO: 392172 - RNA, 19 nt, Artificial Sequence
  Description of Artificial Sequence: Synthetic oligonucleotide
  Antisense Strand to SEQ ID NO: 392171
cuucccaaguaacucacca

SEQ ID NO: 392173 - RNA, 19 nt, Artificial Sequence
  Description of Artificial Sequence: Synthetic oligonucleotide
  Sense Strand Starting at position 934 of SEQ ID NO: 318661
agggaaagugucugucaca

SEQ ID NO: 392174 - RNA, 19 nt, Artificial Sequence
  Description of Artificial Sequence: Synthetic oligonucleotide
  Antisense Strand to SEQ ID NO: 392173
ugugacagacacuuucccu

SEQ ID NO: 392175 - RNA, 19 nt, Artificial Sequence
  Description of Artificial Sequence: Synthetic oligonucleotide
  Sense Strand Starting at position 934 of SEQ ID NO: 318662
gggaaagugucugucacau

SEQ ID NO: 392176 - RNA, 19 nt, Artificial Sequence
  Description of Artificial Sequence: Synthetic oligonucleotide
  Antisense Strand to SEQ ID NO: 392175
augugacagacacuuuccc

SEQ ID NO: 392177 - RNA, 19 nt, Artificial Sequence
  Description of Artificial Sequence: Synthetic oligonucleotide
  Sense Strand Starting at position 934 of SEQ ID NO: 318833
gaaggcucagcuugagaga

SEQ ID NO: 392178 - RNA, 19 nt, Artificial Sequence
  Description of Artificial Sequence: Synthetic oligonucleotide
  Antisense Strand to SEQ ID NO: 392177
ucucucaagcugagccuuc

SEQ ID NO: 392179 - RNA, 19 nt, Artificial Sequence
  Description of Artificial Sequence: Synthetic oligonucleotide
  Sense Strand Starting at position 934 of SEQ ID NO: 318922
acuugaguggcucaaaguu

SEQ ID NO: 392180 - RNA, 19 nt, Artificial Sequence
  Description of Artificial Sequence: Synthetic oligonucleotide
  Antisense Strand to SEQ ID NO: 392179
aacuuugagccacucaagu

SEQ ID NO: 392181 - RNA, 19 nt, Artificial Sequence
  Description of Artificial Sequence: Synthetic oligonucleotide
  Sense Strand Starting at position 934 of SEQ ID NO: 319031
uccacuucugaggguagaa

SEQ ID NO: 392182 - RNA, 19 nt, Artificial Sequence
  Description of Artificial Sequence: Synthetic oligonucleotide
  Antisense Strand to SEQ ID NO: 392181
uucuacccucagaagugga

SEQ ID NO: 392183 - RNA, 19 nt, Artificial Sequence
  Description of Artificial Sequence: Synthetic oligonucleotide
  Sense Strand Starting at position 934 of SEQ ID NO: 319077
gagggacuguccuugaaac

SEQ ID NO: 392184 - RNA, 19 nt, Artificial Sequence
  Description of Artificial Sequence: Synthetic oligonucleotide
  Antisense Strand to SEQ ID NO: 392183
guuucaaggacagucccuc

SEQ ID NO: 392185 - RNA, 19 nt, Artificial Sequence
  Description of Artificial Sequence: Synthetic oligonucleotide
  Sense Strand Starting at position 934 of SEQ ID NO: 319078
agggacuguccuugaaaca

SEQ ID NO: 392186 - RNA, 19 nt, Artificial Sequence
  Description of Artificial Sequence: Synthetic oligonucleotide
  Antisense Strand to SEQ ID NO: 392185
uguuucaaggacagucccu

SEQ ID NO: 392187 - RNA, 19 nt, Artificial Sequence
  Description of Artificial Sequence: Synthetic oligonucleotide
  Sense Strand Starting at position 934 of SEQ ID NO: 319132
aguagaauguagccaguga

SEQ ID NO: 392188 - RNA, 19 nt, Artificial Sequence
  Description of Artificial Sequence: Synthetic oligonucleotide
  Antisense Strand to SEQ ID NO: 392187
ucacuggcuacauucuacu

SEQ ID NO: 392189 - RNA, 19 nt, Artificial Sequence
  Description of Artificial Sequence: Synthetic oligonucleotide
  Sense Strand Starting at position 934 of SEQ ID NO: 319136
gaauguagccagugaggaa

SEQ ID NO: 392190 - RNA, 19 nt, Artificial Sequence
  Description of Artificial Sequence: Synthetic oligonucleotide
  Antisense Strand to SEQ ID NO: 392189
uuccucacuggcuacauuc

SEQ ID NO: 392191 - RNA, 19 nt, Artificial Sequence
  Description of Artificial Sequence: Synthetic oligonucleotide
  Sense Strand Starting at position 935 of SEQ ID NO: 315552
ggcacugugcuagauguua

SEQ ID NO: 392192 - RNA, 19 nt, Artificial Sequence
  Description of Artificial Sequence: Synthetic oligonucleotide
  Antisense Strand to SEQ ID NO: 392191
uaacaucuagcacagugcc

SEQ ID NO: 392193 - RNA, 19 nt, Artificial Sequence
  Description of Artificial Sequence: Synthetic oligonucleotide
  Sense Strand Starting at position 935 of SEQ ID NO: 315591
agucucuguccucaagaaa

SEQ ID NO: 392194 - RNA, 19 nt, Artificial Sequence
  Description of Artificial Sequence: Synthetic oligonucleotide
  Antisense Strand to SEQ ID NO: 392193
uuucuugaggacagagacu

SEQ ID NO: 392195 - RNA, 19 nt, Artificial Sequence
  Description of Artificial Sequence: Synthetic oligonucleotide
  Sense Strand Starting at position 935 of SEQ ID NO: 315640
ugaugcuaugcuugagcaa

SEQ ID NO: 392196 - RNA, 19 nt, Artificial Sequence
  Description of Artificial Sequence: Synthetic oligonucleotide
  Antisense Strand to SEQ ID NO: 392195
uugcucaagcauagcauca

SEQ ID NO: 392197 - RNA, 19 nt, Artificial Sequence
  Description of Artificial Sequence: Synthetic oligonucleotide
  Sense Strand Starting at position 935 of SEQ ID NO: 315641
gaugcuaugcuugagcaaa

SEQ ID NO: 392198 - RNA, 19 nt, Artificial Sequence
  Description of Artificial Sequence: Synthetic oligonucleotide
  Antisense Strand to SEQ ID NO: 392197
uuugcucaagcauagcauc

SEQ ID NO: 392199 - RNA, 19 nt, Artificial Sequence
  Description of Artificial Sequence: Synthetic oligonucleotide
  Sense Strand Starting at position 935 of SEQ ID NO: 315643
ugcuaugcuugagcaaaug

SEQ ID NO: 392200 - RNA, 19 nt, Artificial Sequence
  Description of Artificial Sequence: Synthetic oligonucleotide
  Antisense Strand to SEQ ID NO: 392199
cauuugcucaagcauagca

SEQ ID NO: 392201 - RNA, 19 nt, Artificial Sequence
  Description of Artificial Sequence: Synthetic oligonucleotide
  Sense Strand Starting at position 935 of SEQ ID NO: 315653
gagcaaaugcucugggaaa

SEQ ID NO: 392202 - RNA, 19 nt, Artificial Sequence
  Description of Artificial Sequence: Synthetic oligonucleotide
  Antisense Strand to SEQ ID NO: 392201
uuucccagagcauuugcuc

SEQ ID NO: 392203 - RNA, 19 nt, Artificial Sequence
  Description of Artificial Sequence: Synthetic oligonucleotide
  Sense Strand Starting at position 935 of SEQ ID NO: 315960
cugccagaugccuacagau

SEQ ID NO: 392204 - RNA, 19 nt, Artificial Sequence
  Description of Artificial Sequence: Synthetic oligonucleotide
  Antisense Strand to SEQ ID NO: 392203
aucuguaggcaucuggcag

SEQ ID NO: 392205 - RNA, 19 nt, Artificial Sequence
  Description of Artificial Sequence: Synthetic oligonucleotide
  Sense Strand Starting at position 935 of SEQ ID NO: 315962
gccagaugccuacagauag

SEQ ID NO: 392206 - RNA, 19 nt, Artificial Sequence
  Description of Artificial Sequence: Synthetic oligonucleotide
  Antisense Strand to SEQ ID NO: 392205
cuaucuguaggcaucuggc

SEQ ID NO: 392207 - RNA, 19 nt, Artificial Sequence
  Description of Artificial Sequence: Synthetic oligonucleotide
  Sense Strand Starting at position 935 of SEQ ID NO: 315974
cagauagucccagacgauu

SEQ ID NO: 392208 - RNA, 19 nt, Artificial Sequence
  Description of Artificial Sequence: Synthetic oligonucleotide
  Antisense Strand to SEQ ID NO: 392207
aaucgucugggacuaucug

SEQ ID NO: 392209 - RNA, 19 nt, Artificial Sequence
  Description of Artificial Sequence: Synthetic oligonucleotide
  Sense Strand Starting at position 935 of SEQ ID NO: 316015
agcacuucucuguggguca

SEQ ID NO: 392210 - RNA, 19 nt, Artificial Sequence
  Description of Artificial Sequence: Synthetic oligonucleotide
  Antisense Strand to SEQ ID NO: 392209
ugacccacagagaagugcu

SEQ ID NO: 392211 - RNA, 19 nt, Artificial Sequence
  Description of Artificial Sequence: Synthetic oligonucleotide
  Sense Strand Starting at position 935 of SEQ ID NO: 316036
gaauccagcgucugggaaa

SEQ ID NO: 392212 - RNA, 19 nt, Artificial Sequence
  Description of Artificial Sequence: Synthetic oligonucleotide
  Antisense Strand to SEQ ID NO: 392211
uuucccagacgcuggauuc

SEQ ID NO: 392213 - RNA, 19 nt, Artificial Sequence
  Description of Artificial Sequence: Synthetic oligonucleotide
  Sense Strand Starting at position 935 of SEQ ID NO: 316330
gggagcaugcauuguggaa

SEQ ID NO: 392214 - RNA, 19 nt, Artificial Sequence
  Description of Artificial Sequence: Synthetic oligonucleotide
  Antisense Strand to SEQ ID NO: 392213
uuccacaaugcaugcuccc

SEQ ID NO: 392215 - RNA, 19 nt, Artificial Sequence
  Description of Artificial Sequence: Synthetic oligonucleotide
  Sense Strand Starting at position 935 of SEQ ID NO: 316334
gcaugcauuguggaaucaa

SEQ ID NO: 392216 - RNA, 19 nt, Artificial Sequence
  Description of Artificial Sequence: Synthetic oligonucleotide
  Antisense Strand to SEQ ID NO: 392215
uugauuccacaaugcaugc

SEQ ID NO: 392217 - RNA, 19 nt, Artificial Sequence
  Description of Artificial Sequence: Synthetic oligonucleotide
  Sense Strand Starting at position 935 of SEQ ID NO: 316349
ucaagaucauugucuccga

SEQ ID NO: 392218 - RNA, 19 nt, Artificial Sequence
  Description of Artificial Sequence: Synthetic oligonucleotide
  Antisense Strand to SEQ ID NO: 392217
ucggagacaaugaucuuga

SEQ ID NO: 392219 - RNA, 19 nt, Artificial Sequence
  Description of Artificial Sequence: Synthetic oligonucleotide
  Sense Strand Starting at position 935 of SEQ ID NO: 316350
caagaucauugucuccgaa

SEQ ID NO: 392220 - RNA, 19 nt, Artificial Sequence
  Description of Artificial Sequence: Synthetic oligonucleotide
  Antisense Strand to SEQ ID NO: 392219
uucggagacaaugaucuug

SEQ ID NO: 392221 - RNA, 19 nt, Artificial Sequence
  Description of Artificial Sequence: Synthetic oligonucleotide
  Sense Strand Starting at position 935 of SEQ ID NO: 316352
agaucauugucuccgaaac

SEQ ID NO: 392222 - RNA, 19 nt, Artificial Sequence
  Description of Artificial Sequence: Synthetic oligonucleotide
  Antisense Strand to SEQ ID NO: 392221
guuucggagacaaugaucu

SEQ ID NO: 392223 - RNA, 19 nt, Artificial Sequence
  Description of Artificial Sequence: Synthetic oligonucleotide
  Sense Strand Starting at position 935 of SEQ ID NO: 316353
gaucauugucuccgaaacu

SEQ ID NO: 392224 - RNA, 19 nt, Artificial Sequence
  Description of Artificial Sequence: Synthetic oligonucleotide
  Antisense Strand to SEQ ID NO: 392223
aguuucggagacaaugauc

SEQ ID NO: 392225 - RNA, 19 nt, Artificial Sequence
  Description of Artificial Sequence: Synthetic oligonucleotide
  Sense Strand Starting at position 935 of SEQ ID NO: 316791
acagcugaagggugauaaa

SEQ ID NO: 392226 - RNA, 19 nt, Artificial Sequence
  Description of Artificial Sequence: Synthetic oligonucleotide
  Antisense Strand to SEQ ID NO: 392225
uuuaucacccuucagcugu

SEQ ID NO: 392227 - RNA, 19 nt, Artificial Sequence
  Description of Artificial Sequence: Synthetic oligonucleotide
  Sense Strand Starting at position 935 of SEQ ID NO: 316801
ggugauaaaugagggauaa

SEQ ID NO: 392228 - RNA, 19 nt, Artificial Sequence
  Description of Artificial Sequence: Synthetic oligonucleotide
  Antisense Strand to SEQ ID NO: 392227
uuaucccucauuuaucacc

SEQ ID NO: 392229 - RNA, 19 nt, Artificial Sequence
  Description of Artificial Sequence: Synthetic oligonucleotide
  Sense Strand Starting at position 935 of SEQ ID NO: 316918
auagcugcuacaugagaga

SEQ ID NO: 392230 - RNA, 19 nt, Artificial Sequence
  Description of Artificial Sequence: Synthetic oligonucleotide
  Antisense Strand to SEQ ID NO: 392229
ucucucauguagcagcuau

SEQ ID NO: 392231 - RNA, 19 nt, Artificial Sequence
  Description of Artificial Sequence: Synthetic oligonucleotide
  Sense Strand Starting at position 935 of SEQ ID NO: 316964
gcaacaacaucaguuaaga

SEQ ID NO: 392232 - RNA, 19 nt, Artificial Sequence
  Description of Artificial Sequence: Synthetic oligonucleotide
  Antisense Strand to SEQ ID NO: 392231
ucuuaacugauguuguugc

SEQ ID NO: 392233 - RNA, 19 nt, Artificial Sequence
  Description of Artificial Sequence: Synthetic oligonucleotide
  Sense Strand Starting at position 935 of SEQ ID NO: 317007
acugaacauuuccaggauu

SEQ ID NO: 392234 - RNA, 19 nt, Artificial Sequence
  Description of Artificial Sequence: Synthetic oligonucleotide
  Antisense Strand to SEQ ID NO: 392233
aauccuggaaauguucagu

SEQ ID NO: 392235 - RNA, 19 nt, Artificial Sequence
  Description of Artificial Sequence: Synthetic oligonucleotide
  Sense Strand Starting at position 935 of SEQ ID NO: 317019
caggauuaggguuguacca

SEQ ID NO: 392236 - RNA, 19 nt, Artificial Sequence
  Description of Artificial Sequence: Synthetic oligonucleotide
  Antisense Strand to SEQ ID NO: 392235
ugguacaacccuaauccug

SEQ ID NO: 392237 - RNA, 19 nt, Artificial Sequence
  Description of Artificial Sequence: Synthetic oligonucleotide
  Sense Strand Starting at position 935 of SEQ ID NO: 317043
cagagaagugacugaaugu

SEQ ID NO: 392238 - RNA, 19 nt, Artificial Sequence
  Description of Artificial Sequence: Synthetic oligonucleotide
  Antisense Strand to SEQ ID NO: 392237
acauucagucacuucucug

SEQ ID NO: 392239 - RNA, 19 nt, Artificial Sequence
  Description of Artificial Sequence: Synthetic oligonucleotide
  Sense Strand Starting at position 935 of SEQ ID NO: 317084
gaauguauaugggauagaa

SEQ ID NO: 392240 - RNA, 19 nt, Artificial Sequence
  Description of Artificial Sequence: Synthetic oligonucleotide
  Antisense Strand to SEQ ID NO: 392239
uucuaucccauauacauuc

SEQ ID NO: 392241 - RNA, 19 nt, Artificial Sequence
  Description of Artificial Sequence: Synthetic oligonucleotide
  Sense Strand Starting at position 935 of SEQ ID NO: 317240
ugugaugaacucugcucaa

SEQ ID NO: 392242 - RNA, 19 nt, Artificial Sequence
  Description of Artificial Sequence: Synthetic oligonucleotide
  Antisense Strand to SEQ ID NO: 392241
uugagcagaguucaucaca

SEQ ID NO: 392243 - RNA, 19 nt, Artificial Sequence
  Description of Artificial Sequence: Synthetic oligonucleotide
  Sense Strand Starting at position 935 of SEQ ID NO: 317280
ucaggcuuccugugacuca

SEQ ID NO: 392244 - RNA, 19 nt, Artificial Sequence
  Description of Artificial Sequence: Synthetic oligonucleotide
  Antisense Strand to SEQ ID NO: 392243
ugagucacaggaagccuga

SEQ ID NO: 392245 - RNA, 19 nt, Artificial Sequence
  Description of Artificial Sequence: Synthetic oligonucleotide
  Sense Strand Starting at position 935 of SEQ ID NO: 317625
aaggaaaugcugugucuua

SEQ ID NO: 392246 - RNA, 19 nt, Artificial Sequence
  Description of Artificial Sequence: Synthetic oligonucleotide
  Antisense Strand to SEQ ID NO: 392245
uaagacacagcauuuccuu

SEQ ID NO: 392247 - RNA, 19 nt, Artificial Sequence
  Description of Artificial Sequence: Synthetic oligonucleotide
  Sense Strand Starting at position 935 of SEQ ID NO: 317712
agguaagaacucugcuucu

SEQ ID NO: 392248 - RNA, 19 nt, Artificial Sequence
  Description of Artificial Sequence: Synthetic oligonucleotide
  Antisense Strand to SEQ ID NO: 392247
agaagcagaguucuuaccu

SEQ ID NO: 392249 - RNA, 19 nt, Artificial Sequence
  Description of Artificial Sequence: Synthetic oligonucleotide
  Sense Strand Starting at position 935 of SEQ ID NO: 317723
cugcuucucccacaagaga

SEQ ID NO: 392250 - RNA, 19 nt, Artificial Sequence
  Description of Artificial Sequence: Synthetic oligonucleotide
  Antisense Strand to SEQ ID NO: 392249
ucucuugugggagaagcag

SEQ ID NO: 392251 - RNA, 19 nt, Artificial Sequence
  Description of Artificial Sequence: Synthetic oligonucleotide
  Sense Strand Starting at position 935 of SEQ ID NO: 317888
ucauguuaacaucgugacu

SEQ ID NO: 392252 - RNA, 19 nt, Artificial Sequence
  Description of Artificial Sequence: Synthetic oligonucleotide
  Antisense Strand to SEQ ID NO: 392251
agucacgauguuaacauga

SEQ ID NO: 392253 - RNA, 19 nt, Artificial Sequence
  Description of Artificial Sequence: Synthetic oligonucleotide
  Sense Strand Starting at position 935 of SEQ ID NO: 318114
gagaaaucagccuggguuc

SEQ ID NO: 392254 - RNA, 19 nt, Artificial Sequence
  Description of Artificial Sequence: Synthetic oligonucleotide
  Antisense Strand to SEQ ID NO: 392253
gaacccaggcugauuucuc

SEQ ID NO: 392255 - RNA, 19 nt, Artificial Sequence
  Description of Artificial Sequence: Synthetic oligonucleotide
  Sense Strand Starting at position 935 of SEQ ID NO: 318927
uucucauaacgguguaaau

SEQ ID NO: 392256 - RNA, 19 nt, Artificial Sequence
  Description of Artificial Sequence: Synthetic oligonucleotide
  Antisense Strand to SEQ ID NO: 392255
auuuacaccguuaugagaa

SEQ ID NO: 392257 - RNA, 19 nt, Artificial Sequence
  Description of Artificial Sequence: Synthetic oligonucleotide
  Sense Strand Starting at position 935 of SEQ ID NO: 318929
cucauaacgguguaaauag

SEQ ID NO: 392258 - RNA, 19 nt, Artificial Sequence
  Description of Artificial Sequence: Synthetic oligonucleotide
  Antisense Strand to SEQ ID NO: 392257
cuauuuacaccguuaugag

SEQ ID NO: 392259 - RNA, 19 nt, Artificial Sequence
  Description of Artificial Sequence: Synthetic oligonucleotide
  Sense Strand Starting at position 935 of SEQ ID NO: 319016
gcuugauugccgccuguau

SEQ ID NO: 392260 - RNA, 19 nt, Artificial Sequence
  Description of Artificial Sequence: Synthetic oligonucleotide
  Antisense Strand to SEQ ID NO: 392259
auacaggcggcaaucaagc

SEQ ID NO: 392261 - RNA, 19 nt, Artificial Sequence
  Description of Artificial Sequence: Synthetic oligonucleotide
  Sense Strand Starting at position 935 of SEQ ID NO: 319017
cuugauugccgccuguaua

SEQ ID NO: 392262 - RNA, 19 nt, Artificial Sequence
  Description of Artificial Sequence: Synthetic oligonucleotide
  Antisense Strand to SEQ ID NO: 392261
uauacaggcggcaaucaag

SEQ ID NO: 392263 - RNA, 19 nt, Artificial Sequence
  Description of Artificial Sequence: Synthetic oligonucleotide
  Sense Strand Starting at position 935 of SEQ ID NO: 319029
cuguauaaagucuguguaa

SEQ ID NO: 392264 - RNA, 19 nt, Artificial Sequence
  Description of Artificial Sequence: Synthetic oligonucleotide
  Antisense Strand to SEQ ID NO: 392263
uuacacagacuuuauacag

SEQ ID NO: 392265 - RNA, 19 nt, Artificial Sequence
  Description of Artificial Sequence: Synthetic oligonucleotide
  Sense Strand Starting at position 935 of SEQ ID NO: 319030
uguauaaagucuguguaac

SEQ ID NO: 392266 - RNA, 19 nt, Artificial Sequence
  Description of Artificial Sequence: Synthetic oligonucleotide
  Antisense Strand to SEQ ID NO: 392265
guuacacagacuuuauaca

SEQ ID NO: 392267 - RNA, 19 nt, Artificial Sequence
  Description of Artificial Sequence: Synthetic oligonucleotide
  Sense Strand Starting at position 935 of SEQ ID NO: 319032
uauaaagucuguguaacug

SEQ ID NO: 392268 - RNA, 19 nt, Artificial Sequence
  Description of Artificial Sequence: Synthetic oligonucleotide
  Antisense Strand to SEQ ID NO: 392267
caguuacacagacuuuaua

SEQ ID NO: 392269 - RNA, 19 nt, Artificial Sequence
  Description of Artificial Sequence: Synthetic oligonucleotide
  Sense Strand Starting at position 935 of SEQ ID NO: 319070
guggaauauuaaccucauu

SEQ ID NO: 392270 - RNA, 19 nt, Artificial Sequence
  Description of Artificial Sequence: Synthetic oligonucleotide
  Antisense Strand to SEQ ID NO: 392269
aaugagguuaauauuccac

SEQ ID NO: 392271 - RNA, 19 nt, Artificial Sequence
  Description of Artificial Sequence: Synthetic oligonucleotide
  Sense Strand Starting at position 936 of SEQ ID NO: 315308
acagcugaagggugauaaa

SEQ ID NO: 392272 - RNA, 19 nt, Artificial Sequence
  Description of Artificial Sequence: Synthetic oligonucleotide
  Antisense Strand to SEQ ID NO: 392271
uuuaucacccuucagcugu

SEQ ID NO: 392273 - RNA, 19 nt, Artificial Sequence
  Description of Artificial Sequence: Synthetic oligonucleotide
  Sense Strand Starting at position 936 of SEQ ID NO: 315435
auagcugcuacaugagaga

SEQ ID NO: 392274 - RNA, 19 nt, Artificial Sequence
  Description of Artificial Sequence: Synthetic oligonucleotide
  Antisense Strand to SEQ ID NO: 392273
ucucucauguagcagcuau

SEQ ID NO: 392275 - RNA, 19 nt, Artificial Sequence
  Description of Artificial Sequence: Synthetic oligonucleotide
  Sense Strand Starting at position 936 of SEQ ID NO: 315481
gcaacaacaucaguuaaga

SEQ ID NO: 392276 - RNA, 19 nt, Artificial Sequence
  Description of Artificial Sequence: Synthetic oligonucleotide
  Antisense Strand to SEQ ID NO: 392275
ucuuaacugauguuguugc

SEQ ID NO: 392277 - RNA, 19 nt, Artificial Sequence
  Description of Artificial Sequence: Synthetic oligonucleotide
  Sense Strand Starting at position 936 of SEQ ID NO: 315524
acugaacauuuccaggauu

SEQ ID NO: 392278 - RNA, 19 nt, Artificial Sequence
  Description of Artificial Sequence: Synthetic oligonucleotide
  Antisense Strand to SEQ ID NO: 392277
aauccuggaaauguucagu

SEQ ID NO: 392279 - RNA, 19 nt, Artificial Sequence
  Description of Artificial Sequence: Synthetic oligonucleotide
  Sense Strand Starting at position 936 of SEQ ID NO: 315536
caggauuaggguuguacca

SEQ ID NO: 392280 - RNA, 19 nt, Artificial Sequence
  Description of Artificial Sequence: Synthetic oligonucleotide
  Antisense Strand to SEQ ID NO: 392279
ugguacaacccuaauccug

SEQ ID NO: 392281 - RNA, 19 nt, Artificial Sequence
  Description of Artificial Sequence: Synthetic oligonucleotide
  Sense Strand Starting at position 936 of SEQ ID NO: 315560
cagagaagugacugaaugu

SEQ ID NO: 392282 - RNA, 19 nt, Artificial Sequence
  Description of Artificial Sequence: Synthetic oligonucleotide
  Antisense Strand to SEQ ID NO: 392281
acauucagucacuucucug

SEQ ID NO: 392283 - RNA, 19 nt, Artificial Sequence
  Description of Artificial Sequence: Synthetic oligonucleotide
  Sense Strand Starting at position 936 of SEQ ID NO: 315601
gaauguauaugggauagaa

SEQ ID NO: 392284 - RNA, 19 nt, Artificial Sequence
  Description of Artificial Sequence: Synthetic oligonucleotide
  Antisense Strand to SEQ ID NO: 392283
uucuaucccauauacauuc

SEQ ID NO: 392285 - RNA, 19 nt, Artificial Sequence
  Description of Artificial Sequence: Synthetic oligonucleotide
  Sense Strand Starting at position 936 of SEQ ID NO: 315757
ugugaugaacucugcucaa

SEQ ID NO: 392286 - RNA, 19 nt, Artificial Sequence
  Description of Artificial Sequence: Synthetic oligonucleotide
  Antisense Strand to SEQ ID NO: 392285
uugagcagaguucaucaca

SEQ ID NO: 392287 - RNA, 19 nt, Artificial Sequence
  Description of Artificial Sequence: Synthetic oligonucleotide
  Sense Strand Starting at position 936 of SEQ ID NO: 315797
ucaggcuuccugugacuca

SEQ ID NO: 392288 - RNA, 19 nt, Artificial Sequence
  Description of Artificial Sequence: Synthetic oligonucleotide
  Antisense Strand to SEQ ID NO: 392287
ugagucacaggaagccuga

SEQ ID NO: 392289 - RNA, 19 nt, Artificial Sequence
  Description of Artificial Sequence: Synthetic oligonucleotide
  Sense Strand Starting at position 936 of SEQ ID NO: 316142
aaggaaaugcugugucuua

SEQ ID NO: 392290 - RNA, 19 nt, Artificial Sequence
  Description of Artificial Sequence: Synthetic oligonucleotide
  Antisense Strand to SEQ ID NO: 392289
uaagacacagcauuuccuu

SEQ ID NO: 392291 - RNA, 19 nt, Artificial Sequence
  Description of Artificial Sequence: Synthetic oligonucleotide
  Sense Strand Starting at position 936 of SEQ ID NO: 316229
agguaagaacucugcuucu

SEQ ID NO: 392292 - RNA, 19 nt, Artificial Sequence
  Description of Artificial Sequence: Synthetic oligonucleotide
  Antisense Strand to SEQ ID NO: 392291
agaagcagaguucuuaccu

SEQ ID NO: 392293 - RNA, 19 nt, Artificial Sequence
  Description of Artificial Sequence: Synthetic oligonucleotide
  Sense Strand Starting at position 936 of SEQ ID NO: 316240
cugcuucucccacaagaga

SEQ ID NO: 392294 - RNA, 19 nt, Artificial Sequence
  Description of Artificial Sequence: Synthetic oligonucleotide
  Antisense Strand to SEQ ID NO: 392293
ucucuugugggagaagcag

SEQ ID NO: 392295 - RNA, 19 nt, Artificial Sequence
  Description of Artificial Sequence: Synthetic oligonucleotide
  Sense Strand Starting at position 936 of SEQ ID NO: 316405
ucauguuaacaucgugacu

SEQ ID NO: 392296 - RNA, 19 nt, Artificial Sequence
  Description of Artificial Sequence: Synthetic oligonucleotide
  Antisense Strand to SEQ ID NO: 392295
agucacgauguuaacauga

SEQ ID NO: 392297 - RNA, 19 nt, Artificial Sequence
  Description of Artificial Sequence: Synthetic oligonucleotide
  Sense Strand Starting at position 936 of SEQ ID NO: 316631
gagaaaucagccuggguuc

SEQ ID NO: 392298 - RNA, 19 nt, Artificial Sequence
  Description of Artificial Sequence: Synthetic oligonucleotide
  Antisense Strand to SEQ ID NO: 392297
gaacccaggcugauuucuc

SEQ ID NO: 392299 - RNA, 19 nt, Artificial Sequence
  Description of Artificial Sequence: Synthetic oligonucleotide
  Sense Strand Starting at position 936 of SEQ ID NO: 317444
uucucauaacgguguaaau

SEQ ID NO: 392300 - RNA, 19 nt, Artificial Sequence
  Description of Artificial Sequence: Synthetic oligonucleotide
  Antisense Strand to SEQ ID NO: 392299
auuuacaccguuaugagaa

SEQ ID NO: 392301 - RNA, 19 nt, Artificial Sequence
  Description of Artificial Sequence: Synthetic oligonucleotide
  Sense Strand Starting at position 936 of SEQ ID NO: 317446
cucauaacgguguaaauag

SEQ ID NO: 392302 - RNA, 19 nt, Artificial Sequence
  Description of Artificial Sequence: Synthetic oligonucleotide
  Antisense Strand to SEQ ID NO: 392301
cuauuuacaccguuaugag

SEQ ID NO: 392303 - RNA, 19 nt, Artificial Sequence
  Description of Artificial Sequence: Synthetic oligonucleotide
  Sense Strand Starting at position 936 of SEQ ID NO: 317533
gcuugauugccgccuguau

SEQ ID NO: 392304 - RNA, 19 nt, Artificial Sequence
  Description of Artificial Sequence: Synthetic oligonucleotide
  Antisense Strand to SEQ ID NO: 392303
auacaggcggcaaucaagc

SEQ ID NO: 392305 - RNA, 19 nt, Artificial Sequence
  Description of Artificial Sequence: Synthetic oligonucleotide
  Sense Strand Starting at position 936 of SEQ ID NO: 317534
cuugauugccgccuguaua

SEQ ID NO: 392306 - RNA, 19 nt, Artificial Sequence
  Description of Artificial Sequence: Synthetic oligonucleotide
  Antisense Strand to SEQ ID NO: 392305
uauacaggcggcaaucaag

SEQ ID NO: 392307 - RNA, 19 nt, Artificial Sequence
  Description of Artificial Sequence: Synthetic oligonucleotide
  Sense Strand Starting at position 936 of SEQ ID NO: 317547
uguauaaagucuguguaac

SEQ ID NO: 392308 - RNA, 19 nt, Artificial Sequence
  Description of Artificial Sequence: Synthetic oligonucleotide
  Antisense Strand to SEQ ID NO: 392307
guuacacagacuuuauaca

SEQ ID NO: 392309 - RNA, 19 nt, Artificial Sequence
  Description of Artificial Sequence: Synthetic oligonucleotide
  Sense Strand Starting at position 936 of SEQ ID NO: 317549
uauaaagucuguguaacug

SEQ ID NO: 392310 - RNA, 19 nt, Artificial Sequence
  Description of Artificial Sequence: Synthetic oligonucleotide
  Antisense Strand to SEQ ID NO: 392309
caguuacacagacuuuaua

SEQ ID NO: 392311 - RNA, 19 nt, Artificial Sequence
  Description of Artificial Sequence: Synthetic oligonucleotide
  Sense Strand Starting at position 936 of SEQ ID NO: 317587
guggaauauuaaccucauu

SEQ ID NO: 392312 - RNA, 19 nt, Artificial Sequence
  Description of Artificial Sequence: Synthetic oligonucleotide
  Antisense Strand to SEQ ID NO: 392311
aaugagguuaauauuccac

SEQ ID NO: 392313 - RNA, 19 nt, Artificial Sequence
  Description of Artificial Sequence: Synthetic oligonucleotide
  Sense Strand Starting at position 936 of SEQ ID NO: 317948
aagagaguacucugcuauu

SEQ ID NO: 392314 - RNA, 19 nt, Artificial Sequence
  Description of Artificial Sequence: Synthetic oligonucleotide
  Antisense Strand to SEQ ID NO: 392313
aauagcagaguacucucuu

SEQ ID NO: 392315 - RNA, 19 nt, Artificial Sequence
  Description of Artificial Sequence: Synthetic oligonucleotide
  Sense Strand Starting at position 936 of SEQ ID NO: 317958
ucugcuauucccguggcua

SEQ ID NO: 392316 - RNA, 19 nt, Artificial Sequence
  Description of Artificial Sequence: Synthetic oligonucleotide
  Antisense Strand to SEQ ID NO: 392315
uagccacgggaauagcaga

SEQ ID NO: 392317 - RNA, 19 nt, Artificial Sequence
  Description of Artificial Sequence: Synthetic oligonucleotide
  Sense Strand Starting at position 936 of SEQ ID NO: 318004
uggaguugacaucgaucaa

SEQ ID NO: 392318 - RNA, 19 nt, Artificial Sequence
  Description of Artificial Sequence: Synthetic oligonucleotide
  Antisense Strand to SEQ ID NO: 392317
uugaucgaugucaacucca

SEQ ID NO: 392319 - RNA, 19 nt, Artificial Sequence
  Description of Artificial Sequence: Synthetic oligonucleotide
  Sense Strand Starting at position 936 of SEQ ID NO: 318040
cgccaaguucuggagcuaa

SEQ ID NO: 392320 - RNA, 19 nt, Artificial Sequence
  Description of Artificial Sequence: Synthetic oligonucleotide
  Antisense Strand to SEQ ID NO: 392319
uuagcuccagaacuuggcg

SEQ ID NO: 392321 - RNA, 19 nt, Artificial Sequence
  Description of Artificial Sequence: Synthetic oligonucleotide
  Sense Strand Starting at position 936 of SEQ ID NO: 318149
cugcuuucgagugauucca

SEQ ID NO: 392322 - RNA, 19 nt, Artificial Sequence
  Description of Artificial Sequence: Synthetic oligonucleotide
  Antisense Strand to SEQ ID NO: 392321
uggaaucacucgaaagcag

SEQ ID NO: 392323 - RNA, 19 nt, Artificial Sequence
  Description of Artificial Sequence: Synthetic oligonucleotide
  Sense Strand Starting at position 936 of SEQ ID NO: 318274
uugagauaguguuucucuc

SEQ ID NO: 392324 - RNA, 19 nt, Artificial Sequence
  Description of Artificial Sequence: Synthetic oligonucleotide
  Antisense Strand to SEQ ID NO: 392323
gagagaaacacuaucucaa

SEQ ID NO: 392325 - RNA, 19 nt, Artificial Sequence
  Description of Artificial Sequence: Synthetic oligonucleotide
  Sense Strand Starting at position 936 of SEQ ID NO: 318276
gagauaguguuucucuccu

SEQ ID NO: 392326 - RNA, 19 nt, Artificial Sequence
  Description of Artificial Sequence: Synthetic oligonucleotide
  Antisense Strand to SEQ ID NO: 392325
aggagagaaacacuaucuc

SEQ ID NO: 392327 - RNA, 19 nt, Artificial Sequence
  Description of Artificial Sequence: Synthetic oligonucleotide
  Sense Strand Starting at position 936 of SEQ ID NO: 318389
gcuggauaaagaggaguuu

SEQ ID NO: 392328 - RNA, 19 nt, Artificial Sequence
  Description of Artificial Sequence: Synthetic oligonucleotide
  Antisense Strand to SEQ ID NO: 392327
aaacuccucuuuauccagc

SEQ ID NO: 392329 - RNA, 19 nt, Artificial Sequence
  Description of Artificial Sequence: Synthetic oligonucleotide
  Sense Strand Starting at position 936 of SEQ ID NO: 318489
acaguuauggacuguugaa

SEQ ID NO: 392330 - RNA, 19 nt, Artificial Sequence
  Description of Artificial Sequence: Synthetic oligonucleotide
  Antisense Strand to SEQ ID NO: 392329
uucaacaguccauaacugu

SEQ ID NO: 392331 - RNA, 19 nt, Artificial Sequence
  Description of Artificial Sequence: Synthetic oligonucleotide
  Sense Strand Starting at position 936 of SEQ ID NO: 318783
ggaaguaucucuucucccu

SEQ ID NO: 392332 - RNA, 19 nt, Artificial Sequence
  Description of Artificial Sequence: Synthetic oligonucleotide
  Antisense Strand to SEQ ID NO: 392331
agggagaagagauacuucc

SEQ ID NO: 392333 - RNA, 19 nt, Artificial Sequence
  Description of Artificial Sequence: Synthetic oligonucleotide
  Sense Strand Starting at position 936 of SEQ ID NO: 318887
cauaucacagagugaaugu

SEQ ID NO: 392334 - RNA, 19 nt, Artificial Sequence
  Description of Artificial Sequence: Synthetic oligonucleotide
  Antisense Strand to SEQ ID NO: 392333
acauucacucugugauaug

SEQ ID NO: 392335 - RNA, 19 nt, Artificial Sequence
  Description of Artificial Sequence: Synthetic oligonucleotide
  Sense Strand Starting at position 936 of SEQ ID NO: 318897
agugaauguuggguaaaug

SEQ ID NO: 392336 - RNA, 19 nt, Artificial Sequence
  Description of Artificial Sequence: Synthetic oligonucleotide
  Antisense Strand to SEQ ID NO: 392335
cauuuacccaacauucacu

SEQ ID NO: 392337 - RNA, 19 nt, Artificial Sequence
  Description of Artificial Sequence: Synthetic oligonucleotide
  Sense Strand Starting at position 936 of SEQ ID NO: 318898
gugaauguuggguaaaugu

SEQ ID NO: 392338 - RNA, 19 nt, Artificial Sequence
  Description of Artificial Sequence: Synthetic oligonucleotide
  Antisense Strand to SEQ ID NO: 392337
acauuuacccaacauucac

SEQ ID NO: 392339 - RNA, 19 nt, Artificial Sequence
  Description of Artificial Sequence: Synthetic oligonucleotide
  Sense Strand Starting at position 936 of SEQ ID NO: 318906
uggguaaauguuuguguag

SEQ ID NO: 392340 - RNA, 19 nt, Artificial Sequence
  Description of Artificial Sequence: Synthetic oligonucleotide
  Antisense Strand to SEQ ID NO: 392339
cuacacaaacauuuaccca

SEQ ID NO: 392341 - RNA, 19 nt, Artificial Sequence
  Description of Artificial Sequence: Synthetic oligonucleotide
  Sense Strand Starting at position 936 of SEQ ID NO: 318907
ggguaaauguuuguguaga

SEQ ID NO: 392342 - RNA, 19 nt, Artificial Sequence
  Description of Artificial Sequence: Synthetic oligonucleotide
  Antisense Strand to SEQ ID NO: 392341
ucuacacaaacauuuaccc

SEQ ID NO: 392343 - RNA, 19 nt, Artificial Sequence
  Description of Artificial Sequence: Synthetic oligonucleotide
  Sense Strand Starting at position 936 of SEQ ID NO: 318909
guaaauguuuguguagaua

SEQ ID NO: 392344 - RNA, 19 nt, Artificial Sequence
  Description of Artificial Sequence: Synthetic oligonucleotide
  Antisense Strand to SEQ ID NO: 392343
uaucuacacaaacauuuac

SEQ ID NO: 392345 - RNA, 19 nt, Artificial Sequence
  Description of Artificial Sequence: Synthetic oligonucleotide
  Sense Strand Starting at position 936 of SEQ ID NO: 318918
uguguagauacggaaguaa

SEQ ID NO: 392346 - RNA, 19 nt, Artificial Sequence
  Description of Artificial Sequence: Synthetic oligonucleotide
  Antisense Strand to SEQ ID NO: 392345
uuacuuccguaucuacaca

SEQ ID NO: 392347 - RNA, 19 nt, Artificial Sequence
  Description of Artificial Sequence: Synthetic oligonucleotide
  Sense Strand Starting at position 936 of SEQ ID NO: 318986
ggauucuaggcaugaccuu

SEQ ID NO: 392348 - RNA, 19 nt, Artificial Sequence
  Description of Artificial Sequence: Synthetic oligonucleotide
  Antisense Strand to SEQ ID NO: 392347
aaggucaugccuagaaucc

SEQ ID NO: 392349 - RNA, 19 nt, Artificial Sequence
  Description of Artificial Sequence: Synthetic oligonucleotide
  Sense Strand Starting at position 936 of SEQ ID NO: 319125
cagucaucuguagagggau

SEQ ID NO: 392350 - RNA, 19 nt, Artificial Sequence
  Description of Artificial Sequence: Synthetic oligonucleotide
  Antisense Strand to SEQ ID NO: 392349
aucccucuacagaugacug

SEQ ID NO: 392351 - RNA, 19 nt, Artificial Sequence
  Description of Artificial Sequence: Synthetic oligonucleotide
  Sense Strand Starting at position 937 of SEQ ID NO: 315553
acuauacuguuucuuaguu

SEQ ID NO: 392352 - RNA, 19 nt, Artificial Sequence
  Description of Artificial Sequence: Synthetic oligonucleotide
  Antisense Strand to SEQ ID NO: 392351
aacuaagaaacaguauagu

SEQ ID NO: 392353 - RNA, 19 nt, Artificial Sequence
  Description of Artificial Sequence: Synthetic oligonucleotide
  Sense Strand Starting at position 937 of SEQ ID NO: 315554
cuauacuguuucuuaguuu

SEQ ID NO: 392354 - RNA, 19 nt, Artificial Sequence
  Description of Artificial Sequence: Synthetic oligonucleotide
  Antisense Strand to SEQ ID NO: 392353
aaacuaagaaacaguauag

SEQ ID NO: 392355 - RNA, 19 nt, Artificial Sequence
  Description of Artificial Sequence: Synthetic oligonucleotide
  Sense Strand Starting at position 937 of SEQ ID NO: 315561
guuucuuaguuucugcuaa

SEQ ID NO: 392356 - RNA, 19 nt, Artificial Sequence
  Description of Artificial Sequence: Synthetic oligonucleotide
  Antisense Strand to SEQ ID NO: 392355
uuagcagaaacuaagaaac

SEQ ID NO: 392357 - RNA, 19 nt, Artificial Sequence
  Description of Artificial Sequence: Synthetic oligonucleotide
  Sense Strand Starting at position 937 of SEQ ID NO: 315563
uucuuaguuucugcuaagu

SEQ ID NO: 392358 - RNA, 19 nt, Artificial Sequence
  Description of Artificial Sequence: Synthetic oligonucleotide
  Antisense Strand to SEQ ID NO: 392357
acuuagcagaaacuaagaa

SEQ ID NO: 392359 - RNA, 19 nt, Artificial Sequence
  Description of Artificial Sequence: Synthetic oligonucleotide
  Sense Strand Starting at position 937 of SEQ ID NO: 315580
guauuacucguguaaagua

SEQ ID NO: 392360 - RNA, 19 nt, Artificial Sequence
  Description of Artificial Sequence: Synthetic oligonucleotide
  Antisense Strand to SEQ ID NO: 392359
uacuuuacacgaguaauac

SEQ ID NO: 392361 - RNA, 19 nt, Artificial Sequence
  Description of Artificial Sequence: Synthetic oligonucleotide
  Sense Strand Starting at position 937 of SEQ ID NO: 315981
gccaucauugcaucgcgaa

SEQ ID NO: 392362 - RNA, 19 nt, Artificial Sequence
  Description of Artificial Sequence: Synthetic oligonucleotide
  Antisense Strand to SEQ ID NO: 392361
uucgcgaugcaaugauggc

SEQ ID NO: 392363 - RNA, 19 nt, Artificial Sequence
  Description of Artificial Sequence: Synthetic oligonucleotide
  Sense Strand Starting at position 937 of SEQ ID NO: 316003
cgcucucuccuagauucuu

SEQ ID NO: 392364 - RNA, 19 nt, Artificial Sequence
  Description of Artificial Sequence: Synthetic oligonucleotide
  Antisense Strand to SEQ ID NO: 392363
aagaaucuaggagagagcg

SEQ ID NO: 392365 - RNA, 19 nt, Artificial Sequence
  Description of Artificial Sequence: Synthetic oligonucleotide
  Sense Strand Starting at position 937 of SEQ ID NO: 316087
ugaguagguccacgucuau

SEQ ID NO: 392366 - RNA, 19 nt, Artificial Sequence
  Description of Artificial Sequence: Synthetic oligonucleotide
  Antisense Strand to SEQ ID NO: 392365
auagacguggaccuacuca

SEQ ID NO: 392367 - RNA, 19 nt, Artificial Sequence
  Description of Artificial Sequence: Synthetic oligonucleotide
  Sense Strand Starting at position 937 of SEQ ID NO: 316205
aaagucugcccacguauuu

SEQ ID NO: 392368 - RNA, 19 nt, Artificial Sequence
  Description of Artificial Sequence: Synthetic oligonucleotide
  Antisense Strand to SEQ ID NO: 392367
aaauacgugggcagacuuu

SEQ ID NO: 392369 - RNA, 19 nt, Artificial Sequence
  Description of Artificial Sequence: Synthetic oligonucleotide
  Sense Strand Starting at position 937 of SEQ ID NO: 316278
gcaugcgauggcgcuuaau

SEQ ID NO: 392370 - RNA, 19 nt, Artificial Sequence
  Description of Artificial Sequence: Synthetic oligonucleotide
  Antisense Strand to SEQ ID NO: 392369
auuaagcgccaucgcaugc

SEQ ID NO: 392371 - RNA, 19 nt, Artificial Sequence
  Description of Artificial Sequence: Synthetic oligonucleotide
  Sense Strand Starting at position 937 of SEQ ID NO: 316281
ugcgauggcgcuuaauaau

SEQ ID NO: 392372 - RNA, 19 nt, Artificial Sequence
  Description of Artificial Sequence: Synthetic oligonucleotide
  Antisense Strand to SEQ ID NO: 392371
auuauuaagcgccaucgca

SEQ ID NO: 392373 - RNA, 19 nt, Artificial Sequence
  Description of Artificial Sequence: Synthetic oligonucleotide
  Sense Strand Starting at position 937 of SEQ ID NO: 316293
uaauaaucggcuuggcaaa

SEQ ID NO: 392374 - RNA, 19 nt, Artificial Sequence
  Description of Artificial Sequence: Synthetic oligonucleotide
  Antisense Strand to SEQ ID NO: 392373
uuugccaagccgauuauua

SEQ ID NO: 392375 - RNA, 19 nt, Artificial Sequence
  Description of Artificial Sequence: Synthetic oligonucleotide
  Sense Strand Starting at position 937 of SEQ ID NO: 316641
auauuaaugccucacgauu

SEQ ID NO: 392376 - RNA, 19 nt, Artificial Sequence
  Description of Artificial Sequence: Synthetic oligonucleotide
  Antisense Strand to SEQ ID NO: 392375
aaucgugaggcauuaauau

SEQ ID NO: 392377 - RNA, 19 nt, Artificial Sequence
  Description of Artificial Sequence: Synthetic oligonucleotide
  Sense Strand Starting at position 937 of SEQ ID NO: 317113
cgggaggagucggcgaaua

SEQ ID NO: 392378 - RNA, 19 nt, Artificial Sequence
  Description of Artificial Sequence: Synthetic oligonucleotide
  Antisense Strand to SEQ ID NO: 392377
uauucgccgacuccucccg

SEQ ID NO: 392379 - RNA, 19 nt, Artificial Sequence
  Description of Artificial Sequence: Synthetic oligonucleotide
  Sense Strand Starting at position 937 of SEQ ID NO: 317352
uuacuuuccguuuguaacu

SEQ ID NO: 392380 - RNA, 19 nt, Artificial Sequence
  Description of Artificial Sequence: Synthetic oligonucleotide
  Antisense Strand to SEQ ID NO: 392379
aguuacaaacggaaaguaa

SEQ ID NO: 392381 - RNA, 19 nt, Artificial Sequence
  Description of Artificial Sequence: Synthetic oligonucleotide
  Sense Strand Starting at position 937 of SEQ ID NO: 317359
ccguuuguaacugauggga

SEQ ID NO: 392382 - RNA, 19 nt, Artificial Sequence
  Description of Artificial Sequence: Synthetic oligonucleotide
  Antisense Strand to SEQ ID NO: 392381
ucccaucaguuacaaacgg

SEQ ID NO: 392383 - RNA, 19 nt, Artificial Sequence
  Description of Artificial Sequence: Synthetic oligonucleotide
  Sense Strand Starting at position 937 of SEQ ID NO: 317430
ucaccauaguuugucgagu

SEQ ID NO: 392384 - RNA, 19 nt, Artificial Sequence
  Description of Artificial Sequence: Synthetic oligonucleotide
  Antisense Strand to SEQ ID NO: 392383
acucgacaaacuaugguga

SEQ ID NO: 392385 - RNA, 19 nt, Artificial Sequence
  Description of Artificial Sequence: Synthetic oligonucleotide
  Sense Strand Starting at position 937 of SEQ ID NO: 317435
auaguuugucgagucguua

SEQ ID NO: 392386 - RNA, 19 nt, Artificial Sequence
  Description of Artificial Sequence: Synthetic oligonucleotide
  Antisense Strand to SEQ ID NO: 392385
uaacgacucgacaaacuau

SEQ ID NO: 392387 - RNA, 19 nt, Artificial Sequence
  Description of Artificial Sequence: Synthetic oligonucleotide
  Sense Strand Starting at position 937 of SEQ ID NO: 317436
uaguuugucgagucguuac

SEQ ID NO: 392388 - RNA, 19 nt, Artificial Sequence
  Description of Artificial Sequence: Synthetic oligonucleotide
  Antisense Strand to SEQ ID NO: 392387
guaacgacucgacaaacua

SEQ ID NO: 392389 - RNA, 19 nt, Artificial Sequence
  Description of Artificial Sequence: Synthetic oligonucleotide
  Sense Strand Starting at position 937 of SEQ ID NO: 317493
guaguacuauuagccuauu

SEQ ID NO: 392390 - RNA, 19 nt, Artificial Sequence
  Description of Artificial Sequence: Synthetic oligonucleotide
  Antisense Strand to SEQ ID NO: 392389
aauaggcuaauaguacuac

SEQ ID NO: 392391 - RNA, 19 nt, Artificial Sequence
  Description of Artificial Sequence: Synthetic oligonucleotide
  Sense Strand Starting at position 937 of SEQ ID NO: 317503
uagccuauuuaguagguaa

SEQ ID NO: 392392 - RNA, 19 nt, Artificial Sequence
  Description of Artificial Sequence: Synthetic oligonucleotide
  Antisense Strand to SEQ ID NO: 392391
uuaccuacuaaauaggcua

SEQ ID NO: 392393 - RNA, 19 nt, Artificial Sequence
  Description of Artificial Sequence: Synthetic oligonucleotide
  Sense Strand Starting at position 937 of SEQ ID NO: 317666
ccaggauucuacgucauag

SEQ ID NO: 392394 - RNA, 19 nt, Artificial Sequence
  Description of Artificial Sequence: Synthetic oligonucleotide
  Antisense Strand to SEQ ID NO: 392393
cuaugacguagaauccugg

SEQ ID NO: 392395 - RNA, 19 nt, Artificial Sequence
  Description of Artificial Sequence: Synthetic oligonucleotide
  Sense Strand Starting at position 937 of SEQ ID NO: 317668
aggauucuacgucauagua

SEQ ID NO: 392396 - RNA, 19 nt, Artificial Sequence
  Description of Artificial Sequence: Synthetic oligonucleotide
  Antisense Strand to SEQ ID NO: 392395
uacuaugacguagaauccu

SEQ ID NO: 392397 - RNA, 19 nt, Artificial Sequence
  Description of Artificial Sequence: Synthetic oligonucleotide
  Sense Strand Starting at position 937 of SEQ ID NO: 317780
ggugguaaucuuuacauua

SEQ ID NO: 392398 - RNA, 19 nt, Artificial Sequence
  Description of Artificial Sequence: Synthetic oligonucleotide
  Antisense Strand to SEQ ID NO: 392397
uaauguaaagauuaccacc

SEQ ID NO: 392399 - RNA, 19 nt, Artificial Sequence
  Description of Artificial Sequence: Synthetic oligonucleotide
  Sense Strand Starting at position 937 of SEQ ID NO: 318043
cgccucagucguccaaagu

SEQ ID NO: 392400 - RNA, 19 nt, Artificial Sequence
  Description of Artificial Sequence: Synthetic oligonucleotide
  Antisense Strand to SEQ ID NO: 392399
acuuuggacgacugaggcg

SEQ ID NO: 392401 - RNA, 19 nt, Artificial Sequence
  Description of Artificial Sequence: Synthetic oligonucleotide
  Sense Strand Starting at position 937 of SEQ ID NO: 318044
gccucagucguccaaagug

SEQ ID NO: 392402 - RNA, 19 nt, Artificial Sequence
  Description of Artificial Sequence: Synthetic oligonucleotide
  Antisense Strand to SEQ ID NO: 392401
cacuuuggacgacugaggc

SEQ ID NO: 392403 - RNA, 19 nt, Artificial Sequence
  Description of Artificial Sequence: Synthetic oligonucleotide
  Sense Strand Starting at position 937 of SEQ ID NO: 318154
ugucuuuagguugaccaga

SEQ ID NO: 392404 - RNA, 19 nt, Artificial Sequence
  Description of Artificial Sequence: Synthetic oligonucleotide
  Antisense Strand to SEQ ID NO: 392403
ucuggucaaccuaaagaca

SEQ ID NO: 392405 - RNA, 19 nt, Artificial Sequence
  Description of Artificial Sequence: Synthetic oligonucleotide
  Sense Strand Starting at position 937 of SEQ ID NO: 318156
ucuuuagguugaccagagu

SEQ ID NO: 392406 - RNA, 19 nt, Artificial Sequence
  Description of Artificial Sequence: Synthetic oligonucleotide
  Antisense Strand to SEQ ID NO: 392405
acucuggucaaccuaaaga

SEQ ID NO: 392407 - RNA, 19 nt, Artificial Sequence
  Description of Artificial Sequence: Synthetic oligonucleotide
  Sense Strand Starting at position 937 of SEQ ID NO: 318200
ggaugaagacuuuggaugu

SEQ ID NO: 392408 - RNA, 19 nt, Artificial Sequence
  Description of Artificial Sequence: Synthetic oligonucleotide
  Antisense Strand to SEQ ID NO: 392407
acauccaaagucuucaucc

SEQ ID NO: 392409 - RNA, 19 nt, Artificial Sequence
  Description of Artificial Sequence: Synthetic oligonucleotide
  Sense Strand Starting at position 937 of SEQ ID NO: 318207
gacuuuggaugucuagauc

SEQ ID NO: 392410 - RNA, 19 nt, Artificial Sequence
  Description of Artificial Sequence: Synthetic oligonucleotide
  Antisense Strand to SEQ ID NO: 392409
gaucuagacauccaaaguc

SEQ ID NO: 392411 - RNA, 19 nt, Artificial Sequence
  Description of Artificial Sequence: Synthetic oligonucleotide
  Sense Strand Starting at position 937 of SEQ ID NO: 318372
gugagacugccacaucuca

SEQ ID NO: 392412 - RNA, 19 nt, Artificial Sequence
  Description of Artificial Sequence: Synthetic oligonucleotide
  Antisense Strand to SEQ ID NO: 392411
ugagauguggcagucucac

SEQ ID NO: 392413 - RNA, 19 nt, Artificial Sequence
  Description of Artificial Sequence: Synthetic oligonucleotide
  Sense Strand Starting at position 937 of SEQ ID NO: 318584
acaugauugcaugguuaca

SEQ ID NO: 392414 - RNA, 19 nt, Artificial Sequence
  Description of Artificial Sequence: Synthetic oligonucleotide
  Antisense Strand to SEQ ID NO: 392413
uguaaccaugcaaucaugu

SEQ ID NO: 392415 - RNA, 19 nt, Artificial Sequence
  Description of Artificial Sequence: Synthetic oligonucleotide
  Sense Strand Starting at position 937 of SEQ ID NO: 318586
augauugcaugguuacaaa

SEQ ID NO: 392416 - RNA, 19 nt, Artificial Sequence
  Description of Artificial Sequence: Synthetic oligonucleotide
  Antisense Strand to SEQ ID NO: 392415
uuuguaaccaugcaaucau

SEQ ID NO: 392417 - RNA, 19 nt, Artificial Sequence
  Description of Artificial Sequence: Synthetic oligonucleotide
  Sense Strand Starting at position 937 of SEQ ID NO: 318770
ccauguauuguggauaucu

SEQ ID NO: 392418 - RNA, 19 nt, Artificial Sequence
  Description of Artificial Sequence: Synthetic oligonucleotide
  Antisense Strand to SEQ ID NO: 392417
agauauccacaauacaugg

SEQ ID NO: 392419 - RNA, 19 nt, Artificial Sequence
  Description of Artificial Sequence: Synthetic oligonucleotide
  Sense Strand Starting at position 937 of SEQ ID NO: 318778
uguggauaucuuggaugac

SEQ ID NO: 392420 - RNA, 19 nt, Artificial Sequence
  Description of Artificial Sequence: Synthetic oligonucleotide
  Antisense Strand to SEQ ID NO: 392419
gucauccaagauauccaca

SEQ ID NO: 392421 - RNA, 19 nt, Artificial Sequence
  Description of Artificial Sequence: Synthetic oligonucleotide
  Sense Strand Starting at position 937 of SEQ ID NO: 318779
guggauaucuuggaugaca

SEQ ID NO: 392422 - RNA, 19 nt, Artificial Sequence
  Description of Artificial Sequence: Synthetic oligonucleotide
  Antisense Strand to SEQ ID NO: 392421
ugucauccaagauauccac

SEQ ID NO: 392423 - RNA, 19 nt, Artificial Sequence
  Description of Artificial Sequence: Synthetic oligonucleotide
  Sense Strand Starting at position 937 of SEQ ID NO: 318857
cggaucucacucuguuuga

SEQ ID NO: 392424 - RNA, 19 nt, Artificial Sequence
  Description of Artificial Sequence: Synthetic oligonucleotide
  Antisense Strand to SEQ ID NO: 392423
ucaaacagagugagauccg

SEQ ID NO: 392425 - RNA, 19 nt, Artificial Sequence
  Description of Artificial Sequence: Synthetic oligonucleotide
  Sense Strand Starting at position 937 of SEQ ID NO: 318866
cucuguuugagacggaucu

SEQ ID NO: 392426 - RNA, 19 nt, Artificial Sequence
  Description of Artificial Sequence: Synthetic oligonucleotide
  Antisense Strand to SEQ ID NO: 392425
agauccgucucaaacagag

SEQ ID NO: 392427 - RNA, 19 nt, Artificial Sequence
  Description of Artificial Sequence: Synthetic oligonucleotide
  Sense Strand Starting at position 937 of SEQ ID NO: 318868
cuguuugagacggaucuca

SEQ ID NO: 392428 - RNA, 19 nt, Artificial Sequence
  Description of Artificial Sequence: Synthetic oligonucleotide
  Antisense Strand to SEQ ID NO: 392427
ugagauccgucucaaacag

SEQ ID NO: 392429 - RNA, 19 nt, Artificial Sequence
  Description of Artificial Sequence: Synthetic oligonucleotide
  Sense Strand Starting at position 937 of SEQ ID NO: 319177
uccuuaagugcugguugau

SEQ ID NO: 392430 - RNA, 19 nt, Artificial Sequence
  Description of Artificial Sequence: Synthetic oligonucleotide
  Antisense Strand to SEQ ID NO: 392429
aucaaccagcacuuaagga

SEQ ID NO: 392431 - RNA, 19 nt, Artificial Sequence
  Description of Artificial Sequence: Synthetic oligonucleotide
  Sense Strand Starting at position 938 of SEQ ID NO: 315577
gccaucauugcaucgcgaa

SEQ ID NO: 392432 - RNA, 19 nt, Artificial Sequence
  Description of Artificial Sequence: Synthetic oligonucleotide
  Antisense Strand to SEQ ID NO: 392431
uucgcgaugcaaugauggc

SEQ ID NO: 392433 - RNA, 19 nt, Artificial Sequence
  Description of Artificial Sequence: Synthetic oligonucleotide
  Sense Strand Starting at position 938 of SEQ ID NO: 315599
cgcucucuccuagauucuu

SEQ ID NO: 392434 - RNA, 19 nt, Artificial Sequence
  Description of Artificial Sequence: Synthetic oligonucleotide
  Antisense Strand to SEQ ID NO: 392433
aagaaucuaggagagagcg

SEQ ID NO: 392435 - RNA, 19 nt, Artificial Sequence
  Description of Artificial Sequence: Synthetic oligonucleotide
  Sense Strand Starting at position 938 of SEQ ID NO: 315683
ugaguagguccacgucuau

SEQ ID NO: 392436 - RNA, 19 nt, Artificial Sequence
  Description of Artificial Sequence: Synthetic oligonucleotide
  Antisense Strand to SEQ ID NO: 392435
auagacguggaccuacuca

SEQ ID NO: 392437 - RNA, 19 nt, Artificial Sequence
  Description of Artificial Sequence: Synthetic oligonucleotide
  Sense Strand Starting at position 938 of SEQ ID NO: 315801
aaagucugcccacguauuu

SEQ ID NO: 392438 - RNA, 19 nt, Artificial Sequence
  Description of Artificial Sequence: Synthetic oligonucleotide
  Antisense Strand to SEQ ID NO: 392437
aaauacgugggcagacuuu

SEQ ID NO: 392439 - RNA, 19 nt, Artificial Sequence
  Description of Artificial Sequence: Synthetic oligonucleotide
  Sense Strand Starting at position 938 of SEQ ID NO: 315874
gcaugcgauggcgcuuaau

SEQ ID NO: 392440 - RNA, 19 nt, Artificial Sequence
  Description of Artificial Sequence: Synthetic oligonucleotide
  Antisense Strand to SEQ ID NO: 392439
auuaagcgccaucgcaugc

SEQ ID NO: 392441 - RNA, 19 nt, Artificial Sequence
  Description of Artificial Sequence: Synthetic oligonucleotide
  Sense Strand Starting at position 938 of SEQ ID NO: 315877
ugcgauggcgcuuaauaau

SEQ ID NO: 392442 - RNA, 19 nt, Artificial Sequence
  Description of Artificial Sequence: Synthetic oligonucleotide
  Antisense Strand to SEQ ID NO: 392441
auuauuaagcgccaucgca

SEQ ID NO: 392443 - RNA, 19 nt, Artificial Sequence
  Description of Artificial Sequence: Synthetic oligonucleotide
  Sense Strand Starting at position 938 of SEQ ID NO: 315889
uaauaaucggcuuggcaaa

SEQ ID NO: 392444 - RNA, 19 nt, Artificial Sequence
  Description of Artificial Sequence: Synthetic oligonucleotide
  Antisense Strand to SEQ ID NO: 392443
uuugccaagccgauuauua

SEQ ID NO: 392445 - RNA, 19 nt, Artificial Sequence
  Description of Artificial Sequence: Synthetic oligonucleotide
  Sense Strand Starting at position 938 of SEQ ID NO: 316237
auauuaaugccucacgauu

SEQ ID NO: 392446 - RNA, 19 nt, Artificial Sequence
  Description of Artificial Sequence: Synthetic oligonucleotide
  Antisense Strand to SEQ ID NO: 392445
aaucgugaggcauuaauau

SEQ ID NO: 392447 - RNA, 19 nt, Artificial Sequence
  Description of Artificial Sequence: Synthetic oligonucleotide
  Sense Strand Starting at position 938 of SEQ ID NO: 316709
cgggaggagucggcgaaua

SEQ ID NO: 392448 - RNA, 19 nt, Artificial Sequence
  Description of Artificial Sequence: Synthetic oligonucleotide
  Antisense Strand to SEQ ID NO: 392447
uauucgccgacuccucccg

SEQ ID NO: 392449 - RNA, 19 nt, Artificial Sequence
  Description of Artificial Sequence: Synthetic oligonucleotide
  Sense Strand Starting at position 938 of SEQ ID NO: 316948
uuacuuuccguuuguaacu

SEQ ID NO: 392450 - RNA, 19 nt, Artificial Sequence
  Description of Artificial Sequence: Synthetic oligonucleotide
  Antisense Strand to SEQ ID NO: 392449
aguuacaaacggaaaguaa

SEQ ID NO: 392451 - RNA, 19 nt, Artificial Sequence
  Description of Artificial Sequence: Synthetic oligonucleotide
  Sense Strand Starting at position 938 of SEQ ID NO: 316955
ccguuuguaacugauggga

SEQ ID NO: 392452 - RNA, 19 nt, Artificial Sequence
  Description of Artificial Sequence: Synthetic oligonucleotide
  Antisense Strand to SEQ ID NO: 392451
ucccaucaguuacaaacgg

SEQ ID NO: 392453 - RNA, 19 nt, Artificial Sequence
  Description of Artificial Sequence: Synthetic oligonucleotide
  Sense Strand Starting at position 938 of SEQ ID NO: 317026
ucaccauaguuugucgagu

SEQ ID NO: 392454 - RNA, 19 nt, Artificial Sequence
  Description of Artificial Sequence: Synthetic oligonucleotide
  Antisense Strand to SEQ ID NO: 392453
acucgacaaacuaugguga

SEQ ID NO: 392455 - RNA, 19 nt, Artificial Sequence
  Description of Artificial Sequence: Synthetic oligonucleotide
  Sense Strand Starting at position 938 of SEQ ID NO: 317031
auaguuugucgagucguua

SEQ ID NO: 392456 - RNA, 19 nt, Artificial Sequence
  Description of Artificial Sequence: Synthetic oligonucleotide
  Antisense Strand to SEQ ID NO: 392455
uaacgacucgacaaacuau

SEQ ID NO: 392457 - RNA, 19 nt, Artificial Sequence
  Description of Artificial Sequence: Synthetic oligonucleotide
  Sense Strand Starting at position 938 of SEQ ID NO: 317032
uaguuugucgagucguuac

SEQ ID NO: 392458 - RNA, 19 nt, Artificial Sequence
  Description of Artificial Sequence: Synthetic oligonucleotide
  Antisense Strand to SEQ ID NO: 392457
guaacgacucgacaaacua

SEQ ID NO: 392459 - RNA, 19 nt, Artificial Sequence
  Description of Artificial Sequence: Synthetic oligonucleotide
  Sense Strand Starting at position 938 of SEQ ID NO: 317089
guaguacuauuagccuauu

SEQ ID NO: 392460 - RNA, 19 nt, Artificial Sequence
  Description of Artificial Sequence: Synthetic oligonucleotide
  Antisense Strand to SEQ ID NO: 392459
aauaggcuaauaguacuac

SEQ ID NO: 392461 - RNA, 19 nt, Artificial Sequence
  Description of Artificial Sequence: Synthetic oligonucleotide
  Sense Strand Starting at position 938 of SEQ ID NO: 317099
uagccuauuuaguagguaa

SEQ ID NO: 392462 - RNA, 19 nt, Artificial Sequence
  Description of Artificial Sequence: Synthetic oligonucleotide
  Antisense Strand to SEQ ID NO: 392461
uuaccuacuaaauaggcua

SEQ ID NO: 392463 - RNA, 19 nt, Artificial Sequence
  Description of Artificial Sequence: Synthetic oligonucleotide
  Sense Strand Starting at position 938 of SEQ ID NO: 317262
ccaggauucuacgucauag

SEQ ID NO: 392464 - RNA, 19 nt, Artificial Sequence
  Description of Artificial Sequence: Synthetic oligonucleotide
  Antisense Strand to SEQ ID NO: 392463
cuaugacguagaauccugg

SEQ ID NO: 392465 - RNA, 19 nt, Artificial Sequence
  Description of Artificial Sequence: Synthetic oligonucleotide
  Sense Strand Starting at position 938 of SEQ ID NO: 317264
aggauucuacgucauagua

SEQ ID NO: 392466 - RNA, 19 nt, Artificial Sequence
  Description of Artificial Sequence: Synthetic oligonucleotide
  Antisense Strand to SEQ ID NO: 392465
uacuaugacguagaauccu

SEQ ID NO: 392467 - RNA, 19 nt, Artificial Sequence
  Description of Artificial Sequence: Synthetic oligonucleotide
  Sense Strand Starting at position 938 of SEQ ID NO: 317376
ggugguaaucuuuacauua

SEQ ID NO: 392468 - RNA, 19 nt, Artificial Sequence
  Description of Artificial Sequence: Synthetic oligonucleotide
  Antisense Strand to SEQ ID NO: 392467
uaauguaaagauuaccacc

SEQ ID NO: 392469 - RNA, 19 nt, Artificial Sequence
  Description of Artificial Sequence: Synthetic oligonucleotide
  Sense Strand Starting at position 938 of SEQ ID NO: 317639
cgccucagucguccaaagu

SEQ ID NO: 392470 - RNA, 19 nt, Artificial Sequence
  Description of Artificial Sequence: Synthetic oligonucleotide
  Antisense Strand to SEQ ID NO: 392469
acuuuggacgacugaggcg

SEQ ID NO: 392471 - RNA, 19 nt, Artificial Sequence
  Description of Artificial Sequence: Synthetic oligonucleotide
  Sense Strand Starting at position 938 of SEQ ID NO: 317640
gccucagucguccaaagug

SEQ ID NO: 392472 - RNA, 19 nt, Artificial Sequence
  Description of Artificial Sequence: Synthetic oligonucleotide
  Antisense Strand to SEQ ID NO: 392471
cacuuuggacgacugaggc

SEQ ID NO: 392473 - RNA, 19 nt, Artificial Sequence
  Description of Artificial Sequence: Synthetic oligonucleotide
  Sense Strand Starting at position 938 of SEQ ID NO: 317750
ugucuuuagguugaccaga

SEQ ID NO: 392474 - RNA, 19 nt, Artificial Sequence
  Description of Artificial Sequence: Synthetic oligonucleotide
  Antisense Strand to SEQ ID NO: 392473
ucuggucaaccuaaagaca

SEQ ID NO: 392475 - RNA, 19 nt, Artificial Sequence
  Description of Artificial Sequence: Synthetic oligonucleotide
  Sense Strand Starting at position 938 of SEQ ID NO: 317752
ucuuuagguugaccagagu

SEQ ID NO: 392476 - RNA, 19 nt, Artificial Sequence
  Description of Artificial Sequence: Synthetic oligonucleotide
  Antisense Strand to SEQ ID NO: 392475
acucuggucaaccuaaaga

SEQ ID NO: 392477 - RNA, 19 nt, Artificial Sequence
  Description of Artificial Sequence: Synthetic oligonucleotide
  Sense Strand Starting at position 938 of SEQ ID NO: 317796
ggaugaagacuuuggaugu

SEQ ID NO: 392478 - RNA, 19 nt, Artificial Sequence
  Description of Artificial Sequence: Synthetic oligonucleotide
  Antisense Strand to SEQ ID NO: 392477
acauccaaagucuucaucc

SEQ ID NO: 392479 - RNA, 19 nt, Artificial Sequence
  Description of Artificial Sequence: Synthetic oligonucleotide
  Sense Strand Starting at position 938 of SEQ ID NO: 317803
gacuuuggaugucuagauc

SEQ ID NO: 392480 - RNA, 19 nt, Artificial Sequence
  Description of Artificial Sequence: Synthetic oligonucleotide
  Antisense Strand to SEQ ID NO: 392479
gaucuagacauccaaaguc

SEQ ID NO: 392481 - RNA, 19 nt, Artificial Sequence
  Description of Artificial Sequence: Synthetic oligonucleotide
  Sense Strand Starting at position 938 of SEQ ID NO: 317968
gugagacugccacaucuca

SEQ ID NO: 392482 - RNA, 19 nt, Artificial Sequence
  Description of Artificial Sequence: Synthetic oligonucleotide
  Antisense Strand to SEQ ID NO: 392481
ugagauguggcagucucac

SEQ ID NO: 392483 - RNA, 19 nt, Artificial Sequence
  Description of Artificial Sequence: Synthetic oligonucleotide
  Sense Strand Starting at position 938 of SEQ ID NO: 318180
acaugauugcaugguuaca

SEQ ID NO: 392484 - RNA, 19 nt, Artificial Sequence
  Description of Artificial Sequence: Synthetic oligonucleotide
  Antisense Strand to SEQ ID NO: 392483
uguaaccaugcaaucaugu

SEQ ID NO: 392485 - RNA, 19 nt, Artificial Sequence
  Description of Artificial Sequence: Synthetic oligonucleotide
  Sense Strand Starting at position 938 of SEQ ID NO: 318182
augauugcaugguuacaaa

SEQ ID NO: 392486 - RNA, 19 nt, Artificial Sequence
  Description of Artificial Sequence: Synthetic oligonucleotide
  Antisense Strand to SEQ ID NO: 392485
uuuguaaccaugcaaucau

SEQ ID NO: 392487 - RNA, 19 nt, Artificial Sequence
  Description of Artificial Sequence: Synthetic oligonucleotide
  Sense Strand Starting at position 938 of SEQ ID NO: 318366
ccauguauuguggauaucu

SEQ ID NO: 392488 - RNA, 19 nt, Artificial Sequence
  Description of Artificial Sequence: Synthetic oligonucleotide
  Antisense Strand to SEQ ID NO: 392487
agauauccacaauacaugg

SEQ ID NO: 392489 - RNA, 19 nt, Artificial Sequence
  Description of Artificial Sequence: Synthetic oligonucleotide
  Sense Strand Starting at position 938 of SEQ ID NO: 318374
uguggauaucuuggaugac

SEQ ID NO: 392490 - RNA, 19 nt, Artificial Sequence
  Description of Artificial Sequence: Synthetic oligonucleotide
  Antisense Strand to SEQ ID NO: 392489
gucauccaagauauccaca

SEQ ID NO: 392491 - RNA, 19 nt, Artificial Sequence
  Description of Artificial Sequence: Synthetic oligonucleotide
  Sense Strand Starting at position 938 of SEQ ID NO: 318453
cggaucucacucuguuuga

SEQ ID NO: 392492 - RNA, 19 nt, Artificial Sequence
  Description of Artificial Sequence: Synthetic oligonucleotide
  Antisense Strand to SEQ ID NO: 392491
ucaaacagagugagauccg

SEQ ID NO: 392493 - RNA, 19 nt, Artificial Sequence
  Description of Artificial Sequence: Synthetic oligonucleotide
  Sense Strand Starting at position 938 of SEQ ID NO: 318462
cucuguuugagacggaucu

SEQ ID NO: 392494 - RNA, 19 nt, Artificial Sequence
  Description of Artificial Sequence: Synthetic oligonucleotide
  Antisense Strand to SEQ ID NO: 392493
agauccgucucaaacagag

SEQ ID NO: 392495 - RNA, 19 nt, Artificial Sequence
  Description of Artificial Sequence: Synthetic oligonucleotide
  Sense Strand Starting at position 938 of SEQ ID NO: 318464
cuguuugagacggaucuca

SEQ ID NO: 392496 - RNA, 19 nt, Artificial Sequence
  Description of Artificial Sequence: Synthetic oligonucleotide
  Antisense Strand to SEQ ID NO: 392495
ugagauccgucucaaacag

SEQ ID NO: 392497 - RNA, 19 nt, Artificial Sequence
  Description of Artificial Sequence: Synthetic oligonucleotide
  Sense Strand Starting at position 938 of SEQ ID NO: 318773
uccuuaagugcugguugau

SEQ ID NO: 392498 - RNA, 19 nt, Artificial Sequence
  Description of Artificial Sequence: Synthetic oligonucleotide
  Antisense Strand to SEQ ID NO: 392497
aucaaccagcacuuaagga

SEQ ID NO: 392499 - RNA, 19 nt, Artificial Sequence
  Description of Artificial Sequence: Synthetic oligonucleotide
  Sense Strand Starting at position 938 of SEQ ID NO: 318821
uuaauauuacagugucacu

SEQ ID NO: 392500 - RNA, 19 nt, Artificial Sequence
  Description of Artificial Sequence: Synthetic oligonucleotide
  Antisense Strand to SEQ ID NO: 392499
agugacacuguaauauuaa

SEQ ID NO: 392501 - RNA, 19 nt, Artificial Sequence
  Description of Artificial Sequence: Synthetic oligonucleotide
  Sense Strand Starting at position 938 of SEQ ID NO: 318833
ugucacuuauccguguaca

SEQ ID NO: 392502 - RNA, 19 nt, Artificial Sequence
  Description of Artificial Sequence: Synthetic oligonucleotide
  Antisense Strand to SEQ ID NO: 392501
uguacacggauaagugaca

SEQ ID NO: 392503 - RNA, 19 nt, Artificial Sequence
  Description of Artificial Sequence: Synthetic oligonucleotide
  Sense Strand Starting at position 938 of SEQ ID NO: 318900
cgugcaauugcugaauaag

SEQ ID NO: 392504 - RNA, 19 nt, Artificial Sequence
  Description of Artificial Sequence: Synthetic oligonucleotide
  Antisense Strand to SEQ ID NO: 392503
cuuauucagcaauugcacg

SEQ ID NO: 392505 - RNA, 19 nt, Artificial Sequence
  Description of Artificial Sequence: Synthetic oligonucleotide
  Sense Strand Starting at position 938 of SEQ ID NO: 318909
gcugaauaagagggcauua

SEQ ID NO: 392506 - RNA, 19 nt, Artificial Sequence
  Description of Artificial Sequence: Synthetic oligonucleotide
  Antisense Strand to SEQ ID NO: 392505
uaaugcccucuuauucagc

SEQ ID NO: 392507 - RNA, 19 nt, Artificial Sequence
  Description of Artificial Sequence: Synthetic oligonucleotide
  Sense Strand Starting at position 938 of SEQ ID NO: 318941
ugauguauucuguaaguau

SEQ ID NO: 392508 - RNA, 19 nt, Artificial Sequence
  Description of Artificial Sequence: Synthetic oligonucleotide
  Antisense Strand to SEQ ID NO: 392507
auacuuacagaauacauca

SEQ ID NO: 392509 - RNA, 19 nt, Artificial Sequence
  Description of Artificial Sequence: Synthetic oligonucleotide
  Sense Strand Starting at position 938 of SEQ ID NO: 319211
ggugaaaccucauuagcag

SEQ ID NO: 392510 - RNA, 19 nt, Artificial Sequence
  Description of Artificial Sequence: Synthetic oligonucleotide
  Antisense Strand to SEQ ID NO: 392509
cugcuaaugagguuucacc

SEQ ID NO: 392511 - RNA, 19 nt, Artificial Sequence
  Description of Artificial Sequence: Synthetic oligonucleotide
  Sense Strand Starting at position 939 of SEQ ID NO: 315687
acuauacuguuucuuaguu

SEQ ID NO: 392512 - RNA, 19 nt, Artificial Sequence
  Description of Artificial Sequence: Synthetic oligonucleotide
  Antisense Strand to SEQ ID NO: 392511
aacuaagaaacaguauagu

SEQ ID NO: 392513 - RNA, 19 nt, Artificial Sequence
  Description of Artificial Sequence: Synthetic oligonucleotide
  Sense Strand Starting at position 939 of SEQ ID NO: 315688
cuauacuguuucuuaguuu

SEQ ID NO: 392514 - RNA, 19 nt, Artificial Sequence
  Description of Artificial Sequence: Synthetic oligonucleotide
  Antisense Strand to SEQ ID NO: 392513
aaacuaagaaacaguauag

SEQ ID NO: 392515 - RNA, 19 nt, Artificial Sequence
  Description of Artificial Sequence: Synthetic oligonucleotide
  Sense Strand Starting at position 939 of SEQ ID NO: 315695
guuucuuaguuucugcuaa

SEQ ID NO: 392516 - RNA, 19 nt, Artificial Sequence
  Description of Artificial Sequence: Synthetic oligonucleotide
  Antisense Strand to SEQ ID NO: 392515
uuagcagaaacuaagaaac

SEQ ID NO: 392517 - RNA, 19 nt, Artificial Sequence
  Description of Artificial Sequence: Synthetic oligonucleotide
  Sense Strand Starting at position 939 of SEQ ID NO: 315697
uucuuaguuucugcuaagu

SEQ ID NO: 392518 - RNA, 19 nt, Artificial Sequence
  Description of Artificial Sequence: Synthetic oligonucleotide
  Antisense Strand to SEQ ID NO: 392517
acuuagcagaaacuaagaa

SEQ ID NO: 392519 - RNA, 19 nt, Artificial Sequence
  Description of Artificial Sequence: Synthetic oligonucleotide
  Sense Strand Starting at position 939 of SEQ ID NO: 315714
guauuacucguguaaagua

SEQ ID NO: 392520 - RNA, 19 nt, Artificial Sequence
  Description of Artificial Sequence: Synthetic oligonucleotide
  Antisense Strand to SEQ ID NO: 392519
uacuuuacacgaguaauac

SEQ ID NO: 392521 - RNA, 19 nt, Artificial Sequence
  Description of Artificial Sequence: Synthetic oligonucleotide
  Sense Strand Starting at position 939 of SEQ ID NO: 316115
gccaucauugcaucgcgaa

SEQ ID NO: 392522 - RNA, 19 nt, Artificial Sequence
  Description of Artificial Sequence: Synthetic oligonucleotide
  Antisense Strand to SEQ ID NO: 392521
uucgcgaugcaaugauggc

SEQ ID NO: 392523 - RNA, 19 nt, Artificial Sequence
  Description of Artificial Sequence: Synthetic oligonucleotide
  Sense Strand Starting at position 939 of SEQ ID NO: 316137
cgcucucuccuagauucuu

SEQ ID NO: 392524 - RNA, 19 nt, Artificial Sequence
  Description of Artificial Sequence: Synthetic oligonucleotide
  Antisense Strand to SEQ ID NO: 392523
aagaaucuaggagagagcg

SEQ ID NO: 392525 - RNA, 19 nt, Artificial Sequence
  Description of Artificial Sequence: Synthetic oligonucleotide
  Sense Strand Starting at position 939 of SEQ ID NO: 316221
ugaguagguccacgucuau

SEQ ID NO: 392526 - RNA, 19 nt, Artificial Sequence
  Description of Artificial Sequence: Synthetic oligonucleotide
  Antisense Strand to SEQ ID NO: 392525
auagacguggaccuacuca

SEQ ID NO: 392527 - RNA, 19 nt, Artificial Sequence
  Description of Artificial Sequence: Synthetic oligonucleotide
  Sense Strand Starting at position 939 of SEQ ID NO: 316339
aaagucugcccacguauuu

SEQ ID NO: 392528 - RNA, 19 nt, Artificial Sequence
  Description of Artificial Sequence: Synthetic oligonucleotide
  Antisense Strand to SEQ ID NO: 392527
aaauacgugggcagacuuu

SEQ ID NO: 392529 - RNA, 19 nt, Artificial Sequence
  Description of Artificial Sequence: Synthetic oligonucleotide
  Sense Strand Starting at position 939 of SEQ ID NO: 316412
gcaugcgauggcgcuuaau

SEQ ID NO: 392530 - RNA, 19 nt, Artificial Sequence
  Description of Artificial Sequence: Synthetic oligonucleotide
  Antisense Strand to SEQ ID NO: 392529
auuaagcgccaucgcaugc

SEQ ID NO: 392531 - RNA, 19 nt, Artificial Sequence
  Description of Artificial Sequence: Synthetic oligonucleotide
  Sense Strand Starting at position 939 of SEQ ID NO: 316415
ugcgauggcgcuuaauaau

SEQ ID NO: 392532 - RNA, 19 nt, Artificial Sequence
  Description of Artificial Sequence: Synthetic oligonucleotide
  Antisense Strand to SEQ ID NO: 392531
auuauuaagcgccaucgca

SEQ ID NO: 392533 - RNA, 19 nt, Artificial Sequence
  Description of Artificial Sequence: Synthetic oligonucleotide
  Sense Strand Starting at position 939 of SEQ ID NO: 316427
uaauaaucggcuuggcaaa

SEQ ID NO: 392534 - RNA, 19 nt, Artificial Sequence
  Description of Artificial Sequence: Synthetic oligonucleotide
  Antisense Strand to SEQ ID NO: 392533
uuugccaagccgauuauua

SEQ ID NO: 392535 - RNA, 19 nt, Artificial Sequence
  Description of Artificial Sequence: Synthetic oligonucleotide
  Sense Strand Starting at position 939 of SEQ ID NO: 316775
auauuaaugccucacgauu

SEQ ID NO: 392536 - RNA, 19 nt, Artificial Sequence
  Description of Artificial Sequence: Synthetic oligonucleotide
  Antisense Strand to SEQ ID NO: 392535
aaucgugaggcauuaauau

SEQ ID NO: 392537 - RNA, 19 nt, Artificial Sequence
  Description of Artificial Sequence: Synthetic oligonucleotide
  Sense Strand Starting at position 939 of SEQ ID NO: 317247
cgggaggagucggcgaaua

SEQ ID NO: 392538 - RNA, 19 nt, Artificial Sequence
  Description of Artificial Sequence: Synthetic oligonucleotide
  Antisense Strand to SEQ ID NO: 392537
uauucgccgacuccucccg

SEQ ID NO: 392539 - RNA, 19 nt, Artificial Sequence
  Description of Artificial Sequence: Synthetic oligonucleotide
  Sense Strand Starting at position 939 of SEQ ID NO: 317486
uuacuuuccguuuguaacu

SEQ ID NO: 392540 - RNA, 19 nt, Artificial Sequence
  Description of Artificial Sequence: Synthetic oligonucleotide
  Antisense Strand to SEQ ID NO: 392539
aguuacaaacggaaaguaa

SEQ ID NO: 392541 - RNA, 19 nt, Artificial Sequence
  Description of Artificial Sequence: Synthetic oligonucleotide
  Sense Strand Starting at position 939 of SEQ ID NO: 317493
ccguuuguaacugauggga

SEQ ID NO: 392542 - RNA, 19 nt, Artificial Sequence
  Description of Artificial Sequence: Synthetic oligonucleotide
  Antisense Strand to SEQ ID NO: 392541
ucccaucaguuacaaacgg

SEQ ID NO: 392543 - RNA, 19 nt, Artificial Sequence
  Description of Artificial Sequence: Synthetic oligonucleotide
  Sense Strand Starting at position 939 of SEQ ID NO: 317564
ucaccauaguuugucgagu

SEQ ID NO: 392544 - RNA, 19 nt, Artificial Sequence
  Description of Artificial Sequence: Synthetic oligonucleotide
  Antisense Strand to SEQ ID NO: 392543
acucgacaaacuaugguga

SEQ ID NO: 392545 - RNA, 19 nt, Artificial Sequence
  Description of Artificial Sequence: Synthetic oligonucleotide
  Sense Strand Starting at position 939 of SEQ ID NO: 317569
auaguuugucgagucguua

SEQ ID NO: 392546 - RNA, 19 nt, Artificial Sequence
  Description of Artificial Sequence: Synthetic oligonucleotide
  Antisense Strand to SEQ ID NO: 392545
uaacgacucgacaaacuau

SEQ ID NO: 392547 - RNA, 19 nt, Artificial Sequence
  Description of Artificial Sequence: Synthetic oligonucleotide
  Sense Strand Starting at position 939 of SEQ ID NO: 317570
uaguuugucgagucguuac

SEQ ID NO: 392548 - RNA, 19 nt, Artificial Sequence
  Description of Artificial Sequence: Synthetic oligonucleotide
  Antisense Strand to SEQ ID NO: 392547
guaacgacucgacaaacua

SEQ ID NO: 392549 - RNA, 19 nt, Artificial Sequence
  Description of Artificial Sequence: Synthetic oligonucleotide
  Sense Strand Starting at position 939 of SEQ ID NO: 317627
guaguacuauuagccuauu

SEQ ID NO: 392550 - RNA, 19 nt, Artificial Sequence
  Description of Artificial Sequence: Synthetic oligonucleotide
  Antisense Strand to SEQ ID NO: 392549
aauaggcuaauaguacuac

SEQ ID NO: 392551 - RNA, 19 nt, Artificial Sequence
  Description of Artificial Sequence: Synthetic oligonucleotide
  Sense Strand Starting at position 939 of SEQ ID NO: 317637
uagccuauuuaguagguaa

SEQ ID NO: 392552 - RNA, 19 nt, Artificial Sequence
  Description of Artificial Sequence: Synthetic oligonucleotide
  Antisense Strand to SEQ ID NO: 392551
uuaccuacuaaauaggcua

SEQ ID NO: 392553 - RNA, 19 nt, Artificial Sequence
  Description of Artificial Sequence: Synthetic oligonucleotide
  Sense Strand Starting at position 939 of SEQ ID NO: 317644
uuuaguagguaagacaaau

SEQ ID NO: 392554 - RNA, 19 nt, Artificial Sequence
  Description of Artificial Sequence: Synthetic oligonucleotide
  Antisense Strand to SEQ ID NO: 392553
auuugucuuaccuacuaaa

SEQ ID NO: 392555 - RNA, 19 nt, Artificial Sequence
  Description of Artificial Sequence: Synthetic oligonucleotide
  Sense Strand Starting at position 939 of SEQ ID NO: 317800
ccaggauucuacgucauag

SEQ ID NO: 392556 - RNA, 19 nt, Artificial Sequence
  Description of Artificial Sequence: Synthetic oligonucleotide
  Antisense Strand to SEQ ID NO: 392555
cuaugacguagaauccugg

SEQ ID NO: 392557 - RNA, 19 nt, Artificial Sequence
  Description of Artificial Sequence: Synthetic oligonucleotide
  Sense Strand Starting at position 939 of SEQ ID NO: 317802
aggauucuacgucauagua

SEQ ID NO: 392558 - RNA, 19 nt, Artificial Sequence
  Description of Artificial Sequence: Synthetic oligonucleotide
  Antisense Strand to SEQ ID NO: 392557
uacuaugacguagaauccu

SEQ ID NO: 392559 - RNA, 19 nt, Artificial Sequence
  Description of Artificial Sequence: Synthetic oligonucleotide
  Sense Strand Starting at position 939 of SEQ ID NO: 317914
ggugguaaucuuuacauua

SEQ ID NO: 392560 - RNA, 19 nt, Artificial Sequence
  Description of Artificial Sequence: Synthetic oligonucleotide
  Antisense Strand to SEQ ID NO: 392559
uaauguaaagauuaccacc

SEQ ID NO: 392561 - RNA, 19 nt, Artificial Sequence
  Description of Artificial Sequence: Synthetic oligonucleotide
  Sense Strand Starting at position 939 of SEQ ID NO: 318177
cgccucagucguccaaagu

SEQ ID NO: 392562 - RNA, 19 nt, Artificial Sequence
  Description of Artificial Sequence: Synthetic oligonucleotide
  Antisense Strand to SEQ ID NO: 392561
acuuuggacgacugaggcg

SEQ ID NO: 392563 - RNA, 19 nt, Artificial Sequence
  Description of Artificial Sequence: Synthetic oligonucleotide
  Sense Strand Starting at position 939 of SEQ ID NO: 318178
gccucagucguccaaagug

SEQ ID NO: 392564 - RNA, 19 nt, Artificial Sequence
  Description of Artificial Sequence: Synthetic oligonucleotide
  Antisense Strand to SEQ ID NO: 392563
cacuuuggacgacugaggc

SEQ ID NO: 392565 - RNA, 19 nt, Artificial Sequence
  Description of Artificial Sequence: Synthetic oligonucleotide
  Sense Strand Starting at position 939 of SEQ ID NO: 318288
ugucuuuagguugaccaga

SEQ ID NO: 392566 - RNA, 19 nt, Artificial Sequence
  Description of Artificial Sequence: Synthetic oligonucleotide
  Antisense Strand to SEQ ID NO: 392565
ucuggucaaccuaaagaca

SEQ ID NO: 392567 - RNA, 19 nt, Artificial Sequence
  Description of Artificial Sequence: Synthetic oligonucleotide
  Sense Strand Starting at position 939 of SEQ ID NO: 318290
ucuuuagguugaccagagu

SEQ ID NO: 392568 - RNA, 19 nt, Artificial Sequence
  Description of Artificial Sequence: Synthetic oligonucleotide
  Antisense Strand to SEQ ID NO: 392567
acucuggucaaccuaaaga

SEQ ID NO: 392569 - RNA, 19 nt, Artificial Sequence
  Description of Artificial Sequence: Synthetic oligonucleotide
  Sense Strand Starting at position 939 of SEQ ID NO: 318334
ggaugaagacuuuggaugu

SEQ ID NO: 392570 - RNA, 19 nt, Artificial Sequence
  Description of Artificial Sequence: Synthetic oligonucleotide
  Antisense Strand to SEQ ID NO: 392569
acauccaaagucuucaucc

SEQ ID NO: 392571 - RNA, 19 nt, Artificial Sequence
  Description of Artificial Sequence: Synthetic oligonucleotide
  Sense Strand Starting at position 939 of SEQ ID NO: 318341
gacuuuggaugucuagauc

SEQ ID NO: 392572 - RNA, 19 nt, Artificial Sequence
  Description of Artificial Sequence: Synthetic oligonucleotide
  Antisense Strand to SEQ ID NO: 392571
gaucuagacauccaaaguc

SEQ ID NO: 392573 - RNA, 19 nt, Artificial Sequence
  Description of Artificial Sequence: Synthetic oligonucleotide
  Sense Strand Starting at position 939 of SEQ ID NO: 318506
gugagacugccacaucuca

SEQ ID NO: 392574 - RNA, 19 nt, Artificial Sequence
  Description of Artificial Sequence: Synthetic oligonucleotide
  Antisense Strand to SEQ ID NO: 392573
ugagauguggcagucucac

SEQ ID NO: 392575 - RNA, 19 nt, Artificial Sequence
  Description of Artificial Sequence: Synthetic oligonucleotide
  Sense Strand Starting at position 939 of SEQ ID NO: 318718
acaugauugcaugguuaca

SEQ ID NO: 392576 - RNA, 19 nt, Artificial Sequence
  Description of Artificial Sequence: Synthetic oligonucleotide
  Antisense Strand to SEQ ID NO: 392575
uguaaccaugcaaucaugu

SEQ ID NO: 392577 - RNA, 19 nt, Artificial Sequence
  Description of Artificial Sequence: Synthetic oligonucleotide
  Sense Strand Starting at position 939 of SEQ ID NO: 318720
augauugcaugguuacaaa

SEQ ID NO: 392578 - RNA, 19 nt, Artificial Sequence
  Description of Artificial Sequence: Synthetic oligonucleotide
  Antisense Strand to SEQ ID NO: 392577
uuuguaaccaugcaaucau

SEQ ID NO: 392579 - RNA, 19 nt, Artificial Sequence
  Description of Artificial Sequence: Synthetic oligonucleotide
  Sense Strand Starting at position 939 of SEQ ID NO: 318904
ccauguauuguggauaucu

SEQ ID NO: 392580 - RNA, 19 nt, Artificial Sequence
  Description of Artificial Sequence: Synthetic oligonucleotide
  Antisense Strand to SEQ ID NO: 392579
agauauccacaauacaugg

SEQ ID NO: 392581 - RNA, 19 nt, Artificial Sequence
  Description of Artificial Sequence: Synthetic oligonucleotide
  Sense Strand Starting at position 939 of SEQ ID NO: 318912
uguggauaucuuggaugac

SEQ ID NO: 392582 - RNA, 19 nt, Artificial Sequence
  Description of Artificial Sequence: Synthetic oligonucleotide
  Antisense Strand to SEQ ID NO: 392581
gucauccaagauauccaca

SEQ ID NO: 392583 - RNA, 19 nt, Artificial Sequence
  Description of Artificial Sequence: Synthetic oligonucleotide
  Sense Strand Starting at position 939 of SEQ ID NO: 318913
guggauaucuuggaugaca

SEQ ID NO: 392584 - RNA, 19 nt, Artificial Sequence
  Description of Artificial Sequence: Synthetic oligonucleotide
  Antisense Strand to SEQ ID NO: 392583
ugucauccaagauauccac

SEQ ID NO: 392585 - RNA, 19 nt, Artificial Sequence
  Description of Artificial Sequence: Synthetic oligonucleotide
  Sense Strand Starting at position 939 of SEQ ID NO: 318991
cggaucucacucuguuuga

SEQ ID NO: 392586 - RNA, 19 nt, Artificial Sequence
  Description of Artificial Sequence: Synthetic oligonucleotide
  Antisense Strand to SEQ ID NO: 392585
ucaaacagagugagauccg

SEQ ID NO: 392587 - RNA, 19 nt, Artificial Sequence
  Description of Artificial Sequence: Synthetic oligonucleotide
  Sense Strand Starting at position 939 of SEQ ID NO: 319000
cucuguuugagacggaucu

SEQ ID NO: 392588 - RNA, 19 nt, Artificial Sequence
  Description of Artificial Sequence: Synthetic oligonucleotide
  Antisense Strand to SEQ ID NO: 392587
agauccgucucaaacagag

SEQ ID NO: 392589 - RNA, 19 nt, Artificial Sequence
  Description of Artificial Sequence: Synthetic oligonucleotide
  Sense Strand Starting at position 939 of SEQ ID NO: 319002
cuguuugagacggaucuca

SEQ ID NO: 392590 - RNA, 19 nt, Artificial Sequence
  Description of Artificial Sequence: Synthetic oligonucleotide
  Antisense Strand to SEQ ID NO: 392589
ugagauccgucucaaacag

SEQ ID NO: 392591 - RNA, 19 nt, Artificial Sequence
  Description of Artificial Sequence: Synthetic oligonucleotide
  Sense Strand Starting at position 940 of SEQ ID NO: 315519
gccuaugccucuguuucua

SEQ ID NO: 392592 - RNA, 19 nt, Artificial Sequence
  Description of Artificial Sequence: Synthetic oligonucleotide
  Antisense Strand to SEQ ID NO: 392591
uagaaacagaggcauaggc

SEQ ID NO: 392593 - RNA, 19 nt, Artificial Sequence
  Description of Artificial Sequence: Synthetic oligonucleotide
  Sense Strand Starting at position 940 of SEQ ID NO: 315533
uucuaagugucucuaaguu

SEQ ID NO: 392594 - RNA, 19 nt, Artificial Sequence
  Description of Artificial Sequence: Synthetic oligonucleotide
  Antisense Strand to SEQ ID NO: 392593
aacuuagagacacuuagaa

SEQ ID NO: 392595 - RNA, 19 nt, Artificial Sequence
  Description of Artificial Sequence: Synthetic oligonucleotide
  Sense Strand Starting at position 940 of SEQ ID NO: 315695
acuugagauuuggaaacau

SEQ ID NO: 392596 - RNA, 19 nt, Artificial Sequence
  Description of Artificial Sequence: Synthetic oligonucleotide
  Antisense Strand to SEQ ID NO: 392595
auguuuccaaaucucaagu

SEQ ID NO: 392597 - RNA, 19 nt, Artificial Sequence
  Description of Artificial Sequence: Synthetic oligonucleotide
  Sense Strand Starting at position 940 of SEQ ID NO: 315715
cuacuuguacuugggagga

SEQ ID NO: 392598 - RNA, 19 nt, Artificial Sequence
  Description of Artificial Sequence: Synthetic oligonucleotide
  Antisense Strand to SEQ ID NO: 392597
uccucccaaguacaaguag

SEQ ID NO: 392599 - RNA, 19 nt, Artificial Sequence
  Description of Artificial Sequence: Synthetic oligonucleotide
  Sense Strand Starting at position 940 of SEQ ID NO: 315793
gggcauuccuccugccaua

SEQ ID NO: 392600 - RNA, 19 nt, Artificial Sequence
  Description of Artificial Sequence: Synthetic oligonucleotide
  Antisense Strand to SEQ ID NO: 392599
uauggcaggaggaaugccc

SEQ ID NO: 392601 - RNA, 19 nt, Artificial Sequence
  Description of Artificial Sequence: Synthetic oligonucleotide
  Sense Strand Starting at position 940 of SEQ ID NO: 316005
cagagucaguuucugguua

SEQ ID NO: 392602 - RNA, 19 nt, Artificial Sequence
  Description of Artificial Sequence: Synthetic oligonucleotide
  Antisense Strand to SEQ ID NO: 392601
uaaccagaaacugacucug

SEQ ID NO: 392603 - RNA, 19 nt, Artificial Sequence
  Description of Artificial Sequence: Synthetic oligonucleotide
  Sense Strand Starting at position 940 of SEQ ID NO: 316007
gagucaguuucugguuagu

SEQ ID NO: 392604 - RNA, 19 nt, Artificial Sequence
  Description of Artificial Sequence: Synthetic oligonucleotide
  Antisense Strand to SEQ ID NO: 392603
acuaaccagaaacugacuc

SEQ ID NO: 392605 - RNA, 19 nt, Artificial Sequence
  Description of Artificial Sequence: Synthetic oligonucleotide
  Sense Strand Starting at position 940 of SEQ ID NO: 316009
gucaguuucugguuagugu

SEQ ID NO: 392606 - RNA, 19 nt, Artificial Sequence
  Description of Artificial Sequence: Synthetic oligonucleotide
  Antisense Strand to SEQ ID NO: 392605
acacuaaccagaaacugac

SEQ ID NO: 392607 - RNA, 19 nt, Artificial Sequence
  Description of Artificial Sequence: Synthetic oligonucleotide
  Sense Strand Starting at position 940 of SEQ ID NO: 316018
ugguuagugucaggucagu

SEQ ID NO: 392608 - RNA, 19 nt, Artificial Sequence
  Description of Artificial Sequence: Synthetic oligonucleotide
  Antisense Strand to SEQ ID NO: 392607
acugaccugacacuaacca

SEQ ID NO: 392609 - RNA, 19 nt, Artificial Sequence
  Description of Artificial Sequence: Synthetic oligonucleotide
  Sense Strand Starting at position 940 of SEQ ID NO: 316024
gugucaggucaguguuagu

SEQ ID NO: 392610 - RNA, 19 nt, Artificial Sequence
  Description of Artificial Sequence: Synthetic oligonucleotide
  Antisense Strand to SEQ ID NO: 392609
acuaacacugaccugacac

SEQ ID NO: 392611 - RNA, 19 nt, Artificial Sequence
  Description of Artificial Sequence: Synthetic oligonucleotide
  Sense Strand Starting at position 940 of SEQ ID NO: 316029
aggucaguguuaguuucaa

SEQ ID NO: 392612 - RNA, 19 nt, Artificial Sequence
  Description of Artificial Sequence: Synthetic oligonucleotide
  Antisense Strand to SEQ ID NO: 392611
uugaaacuaacacugaccu

SEQ ID NO: 392613 - RNA, 19 nt, Artificial Sequence
  Description of Artificial Sequence: Synthetic oligonucleotide
  Sense Strand Starting at position 940 of SEQ ID NO: 316087
gugagucccugucucuaau

SEQ ID NO: 392614 - RNA, 19 nt, Artificial Sequence
  Description of Artificial Sequence: Synthetic oligonucleotide
  Antisense Strand to SEQ ID NO: 392613
auuagagacagggacucac

SEQ ID NO: 392615 - RNA, 19 nt, Artificial Sequence
  Description of Artificial Sequence: Synthetic oligonucleotide
  Sense Strand Starting at position 940 of SEQ ID NO: 316141
gucacuggaucucagaacu

SEQ ID NO: 392616 - RNA, 19 nt, Artificial Sequence
  Description of Artificial Sequence: Synthetic oligonucleotide
  Antisense Strand to SEQ ID NO: 392615
aguucugagauccagugac

SEQ ID NO: 392617 - RNA, 19 nt, Artificial Sequence
  Description of Artificial Sequence: Synthetic oligonucleotide
  Sense Strand Starting at position 940 of SEQ ID NO: 316147
ggaucucagaacugcagua

SEQ ID NO: 392618 - RNA, 19 nt, Artificial Sequence
  Description of Artificial Sequence: Synthetic oligonucleotide
  Antisense Strand to SEQ ID NO: 392617
uacugcaguucugagaucc

SEQ ID NO: 392619 - RNA, 19 nt, Artificial Sequence
  Description of Artificial Sequence: Synthetic oligonucleotide
  Sense Strand Starting at position 940 of SEQ ID NO: 316316
ggcucagcugucugagcaa

SEQ ID NO: 392620 - RNA, 19 nt, Artificial Sequence
  Description of Artificial Sequence: Synthetic oligonucleotide
  Antisense Strand to SEQ ID NO: 392619
uugcucagacagcugagcc

SEQ ID NO: 392621 - RNA, 19 nt, Artificial Sequence
  Description of Artificial Sequence: Synthetic oligonucleotide
  Sense Strand Starting at position 940 of SEQ ID NO: 316342
uggccuuccucccucagaa

SEQ ID NO: 392622 - RNA, 19 nt, Artificial Sequence
  Description of Artificial Sequence: Synthetic oligonucleotide
  Antisense Strand to SEQ ID NO: 392621
uucugagggaggaaggcca

SEQ ID NO: 392623 - RNA, 19 nt, Artificial Sequence
  Description of Artificial Sequence: Synthetic oligonucleotide
  Sense Strand Starting at position 940 of SEQ ID NO: 316390
ggacuaauggcucacaucu

SEQ ID NO: 392624 - RNA, 19 nt, Artificial Sequence
  Description of Artificial Sequence: Synthetic oligonucleotide
  Antisense Strand to SEQ ID NO: 392623
agaugugagccauuagucc

SEQ ID NO: 392625 - RNA, 19 nt, Artificial Sequence
  Description of Artificial Sequence: Synthetic oligonucleotide
  Sense Strand Starting at position 940 of SEQ ID NO: 316524
gccucaggcugaguucuua

SEQ ID NO: 392626 - RNA, 19 nt, Artificial Sequence
  Description of Artificial Sequence: Synthetic oligonucleotide
  Antisense Strand to SEQ ID NO: 392625
uaagaacucagccugaggc

SEQ ID NO: 392627 - RNA, 19 nt, Artificial Sequence
  Description of Artificial Sequence: Synthetic oligonucleotide
  Sense Strand Starting at position 940 of SEQ ID NO: 316678
auggcuaggccauaaguga

SEQ ID NO: 392628 - RNA, 19 nt, Artificial Sequence
  Description of Artificial Sequence: Synthetic oligonucleotide
  Antisense Strand to SEQ ID NO: 392627
ucacuuauggccuagccau

SEQ ID NO: 392629 - RNA, 19 nt, Artificial Sequence
  Description of Artificial Sequence: Synthetic oligonucleotide
  Sense Strand Starting at position 940 of SEQ ID NO: 316716
agccauuucggcugcucau

SEQ ID NO: 392630 - RNA, 19 nt, Artificial Sequence
  Description of Artificial Sequence: Synthetic oligonucleotide
  Antisense Strand to SEQ ID NO: 392629
augagcagccgaaauggcu

SEQ ID NO: 392631 - RNA, 19 nt, Artificial Sequence
  Description of Artificial Sequence: Synthetic oligonucleotide
  Sense Strand Starting at position 940 of SEQ ID NO: 317395
ccaagugugccgguguuca

SEQ ID NO: 392632 - RNA, 19 nt, Artificial Sequence
  Description of Artificial Sequence: Synthetic oligonucleotide
  Antisense Strand to SEQ ID NO: 392631
ugaacaccggcacacuugg

SEQ ID NO: 392633 - RNA, 19 nt, Artificial Sequence
  Description of Artificial Sequence: Synthetic oligonucleotide
  Sense Strand Starting at position 940 of SEQ ID NO: 317397
aagugugccgguguucaga

SEQ ID NO: 392634 - RNA, 19 nt, Artificial Sequence
  Description of Artificial Sequence: Synthetic oligonucleotide
  Antisense Strand to SEQ ID NO: 392633
ucugaacaccggcacacuu

SEQ ID NO: 392635 - RNA, 19 nt, Artificial Sequence
  Description of Artificial Sequence: Synthetic oligonucleotide
  Sense Strand Starting at position 940 of SEQ ID NO: 317681
gugguucuugccuguguca

SEQ ID NO: 392636 - RNA, 19 nt, Artificial Sequence
  Description of Artificial Sequence: Synthetic oligonucleotide
  Antisense Strand to SEQ ID NO: 392635
ugacacaggcaagaaccac

SEQ ID NO: 392637 - RNA, 19 nt, Artificial Sequence
  Description of Artificial Sequence: Synthetic oligonucleotide
  Sense Strand Starting at position 940 of SEQ ID NO: 317683
gguucuugccugugucaca

SEQ ID NO: 392638 - RNA, 19 nt, Artificial Sequence
  Description of Artificial Sequence: Synthetic oligonucleotide
  Antisense Strand to SEQ ID NO: 392637
ugugacacaggcaagaacc

SEQ ID NO: 392639 - RNA, 19 nt, Artificial Sequence
  Description of Artificial Sequence: Synthetic oligonucleotide
  Sense Strand Starting at position 940 of SEQ ID NO: 318028
gcugguugcucaggaugaa

SEQ ID NO: 392640 - RNA, 19 nt, Artificial Sequence
  Description of Artificial Sequence: Synthetic oligonucleotide
  Antisense Strand to SEQ ID NO: 392639
uucauccugagcaaccagc

SEQ ID NO: 392641 - RNA, 19 nt, Artificial Sequence
  Description of Artificial Sequence: Synthetic oligonucleotide
  Sense Strand Starting at position 940 of SEQ ID NO: 318153
cugguuugugucuggaagu

SEQ ID NO: 392642 - RNA, 19 nt, Artificial Sequence
  Description of Artificial Sequence: Synthetic oligonucleotide
  Antisense Strand to SEQ ID NO: 392641
acuuccagacacaaaccag

SEQ ID NO: 392643 - RNA, 19 nt, Artificial Sequence
  Description of Artificial Sequence: Synthetic oligonucleotide
  Sense Strand Starting at position 940 of SEQ ID NO: 318154
ugguuugugucuggaaguc

SEQ ID NO: 392644 - RNA, 19 nt, Artificial Sequence
  Description of Artificial Sequence: Synthetic oligonucleotide
  Antisense Strand to SEQ ID NO: 392643
gacuuccagacacaaacca

SEQ ID NO: 392645 - RNA, 19 nt, Artificial Sequence
  Description of Artificial Sequence: Synthetic oligonucleotide
  Sense Strand Starting at position 940 of SEQ ID NO: 318176
ggcucagccugaugaggua

SEQ ID NO: 392646 - RNA, 19 nt, Artificial Sequence
  Description of Artificial Sequence: Synthetic oligonucleotide
  Antisense Strand to SEQ ID NO: 392645
uaccucaucaggcugagcc

SEQ ID NO: 392647 - RNA, 19 nt, Artificial Sequence
  Description of Artificial Sequence: Synthetic oligonucleotide
  Sense Strand Starting at position 940 of SEQ ID NO: 318179
ucagccugaugagguauaa

SEQ ID NO: 392648 - RNA, 19 nt, Artificial Sequence
  Description of Artificial Sequence: Synthetic oligonucleotide
  Antisense Strand to SEQ ID NO: 392647
uuauaccucaucaggcuga

SEQ ID NO: 392649 - RNA, 19 nt, Artificial Sequence
  Description of Artificial Sequence: Synthetic oligonucleotide
  Sense Strand Starting at position 940 of SEQ ID NO: 318340
ggguaccacucauuagagu

SEQ ID NO: 392650 - RNA, 19 nt, Artificial Sequence
  Description of Artificial Sequence: Synthetic oligonucleotide
  Antisense Strand to SEQ ID NO: 392649
acucuaaugagugguaccc

SEQ ID NO: 392651 - RNA, 19 nt, Artificial Sequence
  Description of Artificial Sequence: Synthetic oligonucleotide
  Sense Strand Starting at position 940 of SEQ ID NO: 318341
gguaccacucauuagaguu

SEQ ID NO: 392652 - RNA, 19 nt, Artificial Sequence
  Description of Artificial Sequence: Synthetic oligonucleotide
  Antisense Strand to SEQ ID NO: 392651
aacucuaaugagugguacc

SEQ ID NO: 392653 - RNA, 19 nt, Artificial Sequence
  Description of Artificial Sequence: Synthetic oligonucleotide
  Sense Strand Starting at position 940 of SEQ ID NO: 318349
ucauuagaguuuccaaagu

SEQ ID NO: 392654 - RNA, 19 nt, Artificial Sequence
  Description of Artificial Sequence: Synthetic oligonucleotide
  Antisense Strand to SEQ ID NO: 392653
acuuuggaaacucuaauga

SEQ ID NO: 392655 - RNA, 19 nt, Artificial Sequence
  Description of Artificial Sequence: Synthetic oligonucleotide
  Sense Strand Starting at position 940 of SEQ ID NO: 318393
ggaggcaggcucggugaua

SEQ ID NO: 392656 - RNA, 19 nt, Artificial Sequence
  Description of Artificial Sequence: Synthetic oligonucleotide
  Antisense Strand to SEQ ID NO: 392655
uaucaccgagccugccucc

SEQ ID NO: 392657 - RNA, 19 nt, Artificial Sequence
  Description of Artificial Sequence: Synthetic oligonucleotide
  Sense Strand Starting at position 940 of SEQ ID NO: 318555
guaggcuauucugugacca

SEQ ID NO: 392658 - RNA, 19 nt, Artificial Sequence
  Description of Artificial Sequence: Synthetic oligonucleotide
  Antisense Strand to SEQ ID NO: 392657
uggucacagaauagccuac

SEQ ID NO: 392659 - RNA, 19 nt, Artificial Sequence
  Description of Artificial Sequence: Synthetic oligonucleotide
  Sense Strand Starting at position 940 of SEQ ID NO: 318592
ggcaguugugcccaaagga

SEQ ID NO: 392660 - RNA, 19 nt, Artificial Sequence
  Description of Artificial Sequence: Synthetic oligonucleotide
  Antisense Strand to SEQ ID NO: 392659
uccuuugggcacaacugcc

SEQ ID NO: 392661 - RNA, 19 nt, Artificial Sequence
  Description of Artificial Sequence: Synthetic oligonucleotide
  Sense Strand Starting at position 940 of SEQ ID NO: 318761
ucugcuuugaccuguggau

SEQ ID NO: 392662 - RNA, 19 nt, Artificial Sequence
  Description of Artificial Sequence: Synthetic oligonucleotide
  Antisense Strand to SEQ ID NO: 392661
auccacaggucaaagcaga

SEQ ID NO: 392663 - RNA, 19 nt, Artificial Sequence
  Description of Artificial Sequence: Synthetic oligonucleotide
  Sense Strand Starting at position 940 of SEQ ID NO: 318814
guuuccugaucuguuguua

SEQ ID NO: 392664 - RNA, 19 nt, Artificial Sequence
  Description of Artificial Sequence: Synthetic oligonucleotide
  Antisense Strand to SEQ ID NO: 392663
uaacaacagaucaggaaac

SEQ ID NO: 392665 - RNA, 19 nt, Artificial Sequence
  Description of Artificial Sequence: Synthetic oligonucleotide
  Sense Strand Starting at position 940 of SEQ ID NO: 318818
ccugaucuguuguuaacag

SEQ ID NO: 392666 - RNA, 19 nt, Artificial Sequence
  Description of Artificial Sequence: Synthetic oligonucleotide
  Antisense Strand to SEQ ID NO: 392665
cuguuaacaacagaucagg

SEQ ID NO: 392667 - RNA, 19 nt, Artificial Sequence
  Description of Artificial Sequence: Synthetic oligonucleotide
  Sense Strand Starting at position 940 of SEQ ID NO: 318819
cugaucuguuguuaacagu

SEQ ID NO: 392668 - RNA, 19 nt, Artificial Sequence
  Description of Artificial Sequence: Synthetic oligonucleotide
  Antisense Strand to SEQ ID NO: 392667
acuguuaacaacagaucag

SEQ ID NO: 392669 - RNA, 19 nt, Artificial Sequence
  Description of Artificial Sequence: Synthetic oligonucleotide
  Sense Strand Starting at position 941 of SEQ ID NO: 315412
cuggaugauucugaccuca

SEQ ID NO: 392670 - RNA, 19 nt, Artificial Sequence
  Description of Artificial Sequence: Synthetic oligonucleotide
  Antisense Strand to SEQ ID NO: 392669
ugaggucagaaucauccag

SEQ ID NO: 392671 - RNA, 19 nt, Artificial Sequence
  Description of Artificial Sequence: Synthetic oligonucleotide
  Sense Strand Starting at position 941 of SEQ ID NO: 315489
aagcaaagucugugggagu

SEQ ID NO: 392672 - RNA, 19 nt, Artificial Sequence
  Description of Artificial Sequence: Synthetic oligonucleotide
  Antisense Strand to SEQ ID NO: 392671
acucccacagacuuugcuu

SEQ ID NO: 392673 - RNA, 19 nt, Artificial Sequence
  Description of Artificial Sequence: Synthetic oligonucleotide
  Sense Strand Starting at position 941 of SEQ ID NO: 315490
agcaaagucugugggagua

SEQ ID NO: 392674 - RNA, 19 nt, Artificial Sequence
  Description of Artificial Sequence: Synthetic oligonucleotide
  Antisense Strand to SEQ ID NO: 392673
uacucccacagacuuugcu

SEQ ID NO: 392675 - RNA, 19 nt, Artificial Sequence
  Description of Artificial Sequence: Synthetic oligonucleotide
  Sense Strand Starting at position 941 of SEQ ID NO: 315548
ugucaucuuccagggagaa

SEQ ID NO: 392676 - RNA, 19 nt, Artificial Sequence
  Description of Artificial Sequence: Synthetic oligonucleotide
  Antisense Strand to SEQ ID NO: 392675
uucucccuggaagaugaca

SEQ ID NO: 392677 - RNA, 19 nt, Artificial Sequence
  Description of Artificial Sequence: Synthetic oligonucleotide
  Sense Strand Starting at position 941 of SEQ ID NO: 315568
cagccauggugcucacaga

SEQ ID NO: 392678 - RNA, 19 nt, Artificial Sequence
  Description of Artificial Sequence: Synthetic oligonucleotide
  Antisense Strand to SEQ ID NO: 392677
ucugugagcaccauggcug

SEQ ID NO: 392679 - RNA, 19 nt, Artificial Sequence
  Description of Artificial Sequence: Synthetic oligonucleotide
  Sense Strand Starting at position 941 of SEQ ID NO: 315569
agccauggugcucacagaa

SEQ ID NO: 392680 - RNA, 19 nt, Artificial Sequence
  Description of Artificial Sequence: Synthetic oligonucleotide
  Antisense Strand to SEQ ID NO: 392679
uucugugagcaccauggcu

SEQ ID NO: 392681 - RNA, 19 nt, Artificial Sequence
  Description of Artificial Sequence: Synthetic oligonucleotide
  Sense Strand Starting at position 941 of SEQ ID NO: 316457
gcgacuuucggcguaggga

SEQ ID NO: 392682 - RNA, 19 nt, Artificial Sequence
  Description of Artificial Sequence: Synthetic oligonucleotide
  Antisense Strand to SEQ ID NO: 392681
ucccuacgccgaaagucgc

SEQ ID NO: 392683 - RNA, 19 nt, Artificial Sequence
  Description of Artificial Sequence: Synthetic oligonucleotide
  Sense Strand Starting at position 941 of SEQ ID NO: 318141
gggcgggauuucuguguuu

SEQ ID NO: 392684 - RNA, 19 nt, Artificial Sequence
  Description of Artificial Sequence: Synthetic oligonucleotide
  Antisense Strand to SEQ ID NO: 392683
aaacacagaaaucccgccc

SEQ ID NO: 392685 - RNA, 19 nt, Artificial Sequence
  Description of Artificial Sequence: Synthetic oligonucleotide
  Sense Strand Starting at position 941 of SEQ ID NO: 318143
gcgggauuucuguguuugg

SEQ ID NO: 392686 - RNA, 19 nt, Artificial Sequence
  Description of Artificial Sequence: Synthetic oligonucleotide
  Antisense Strand to SEQ ID NO: 392685
ccaaacacagaaaucccgc

SEQ ID NO: 392687 - RNA, 19 nt, Artificial Sequence
  Description of Artificial Sequence: Synthetic oligonucleotide
  Sense Strand Starting at position 941 of SEQ ID NO: 318309
gcaugaggcccugggaaau

SEQ ID NO: 392688 - RNA, 19 nt, Artificial Sequence
  Description of Artificial Sequence: Synthetic oligonucleotide
  Antisense Strand to SEQ ID NO: 392687
auuucccagggccucaugc

SEQ ID NO: 392689 - RNA, 19 nt, Artificial Sequence
  Description of Artificial Sequence: Synthetic oligonucleotide
  Sense Strand Starting at position 941 of SEQ ID NO: 318321
gggaaaugagucugggcua

SEQ ID NO: 392690 - RNA, 19 nt, Artificial Sequence
  Description of Artificial Sequence: Synthetic oligonucleotide
  Antisense Strand to SEQ ID NO: 392689
uagcccagacucauuuccc

SEQ ID NO: 392691 - RNA, 19 nt, Artificial Sequence
  Description of Artificial Sequence: Synthetic oligonucleotide
  Sense Strand Starting at position 941 of SEQ ID NO: 318322
ggaaaugagucugggcuaa

SEQ ID NO: 392692 - RNA, 19 nt, Artificial Sequence
  Description of Artificial Sequence: Synthetic oligonucleotide
  Antisense Strand to SEQ ID NO: 392691
uuagcccagacucauuucc

SEQ ID NO: 392693 - RNA, 19 nt, Artificial Sequence
  Description of Artificial Sequence: Synthetic oligonucleotide
  Sense Strand Starting at position 941 of SEQ ID NO: 318326
augagucugggcuaagcaa

SEQ ID NO: 392694 - RNA, 19 nt, Artificial Sequence
  Description of Artificial Sequence: Synthetic oligonucleotide
  Antisense Strand to SEQ ID NO: 392693
uugcuuagcccagacucau

SEQ ID NO: 392695 - RNA, 19 nt, Artificial Sequence
  Description of Artificial Sequence: Synthetic oligonucleotide
  Sense Strand Starting at position 941 of SEQ ID NO: 318359
ccgcuuaccaguugugugu

SEQ ID NO: 392696 - RNA, 19 nt, Artificial Sequence
  Description of Artificial Sequence: Synthetic oligonucleotide
  Antisense Strand to SEQ ID NO: 392695
acacacaacugguaagcgg

SEQ ID NO: 392697 - RNA, 19 nt, Artificial Sequence
  Description of Artificial Sequence: Synthetic oligonucleotide
  Sense Strand Starting at position 941 of SEQ ID NO: 318457
gggcaauguuaacuuuacu

SEQ ID NO: 392698 - RNA, 19 nt, Artificial Sequence
  Description of Artificial Sequence: Synthetic oligonucleotide
  Antisense Strand to SEQ ID NO: 392697
aguaaaguuaacauugccc

SEQ ID NO: 392699 - RNA, 19 nt, Artificial Sequence
  Description of Artificial Sequence: Synthetic oligonucleotide
  Sense Strand Starting at position 941 of SEQ ID NO: 318527
caagacucagccuguggau

SEQ ID NO: 392700 - RNA, 19 nt, Artificial Sequence
  Description of Artificial Sequence: Synthetic oligonucleotide
  Antisense Strand to SEQ ID NO: 392699
auccacaggcugagucuug

SEQ ID NO: 392701 - RNA, 19 nt, Artificial Sequence
  Description of Artificial Sequence: Synthetic oligonucleotide
  Sense Strand Starting at position 941 of SEQ ID NO: 318529
agacucagccuguggauau

SEQ ID NO: 392702 - RNA, 19 nt, Artificial Sequence
  Description of Artificial Sequence: Synthetic oligonucleotide
  Antisense Strand to SEQ ID NO: 392701
auauccacaggcugagucu

SEQ ID NO: 392703 - RNA, 19 nt, Artificial Sequence
  Description of Artificial Sequence: Synthetic oligonucleotide
  Sense Strand Starting at position 941 of SEQ ID NO: 318530
gacucagccuguggauauu

SEQ ID NO: 392704 - RNA, 19 nt, Artificial Sequence
  Description of Artificial Sequence: Synthetic oligonucleotide
  Antisense Strand to SEQ ID NO: 392703
aauauccacaggcugaguc

SEQ ID NO: 392705 - RNA, 19 nt, Artificial Sequence
  Description of Artificial Sequence: Synthetic oligonucleotide
  Sense Strand Starting at position 941 of SEQ ID NO: 318698
uguauuucuucugcugcua

SEQ ID NO: 392706 - RNA, 19 nt, Artificial Sequence
  Description of Artificial Sequence: Synthetic oligonucleotide
  Antisense Strand to SEQ ID NO: 392705
uagcagcagaagaaauaca

SEQ ID NO: 392707 - RNA, 19 nt, Artificial Sequence
  Description of Artificial Sequence: Synthetic oligonucleotide
  Sense Strand Starting at position 941 of SEQ ID NO: 319093
guucaagggcugugcuauu

SEQ ID NO: 392708 - RNA, 19 nt, Artificial Sequence
  Description of Artificial Sequence: Synthetic oligonucleotide
  Antisense Strand to SEQ ID NO: 392707
aauagcacagcccuugaac

SEQ ID NO: 392709 - RNA, 19 nt, Artificial Sequence
  Description of Artificial Sequence: Synthetic oligonucleotide
  Sense Strand Starting at position 941 of SEQ ID NO: 319100
ggcugugcuauuugagaca

SEQ ID NO: 392710 - RNA, 19 nt, Artificial Sequence
  Description of Artificial Sequence: Synthetic oligonucleotide
  Antisense Strand to SEQ ID NO: 392709
ugucucaaauagcacagcc

SEQ ID NO: 392711 - RNA, 19 nt, Artificial Sequence
  Description of Artificial Sequence: Synthetic oligonucleotide
  Sense Strand Starting at position 941 of SEQ ID NO: 319103
ugugcuauuugagacaguu

SEQ ID NO: 392712 - RNA, 19 nt, Artificial Sequence
  Description of Artificial Sequence: Synthetic oligonucleotide
  Antisense Strand to SEQ ID NO: 392711
aacugucucaaauagcaca

SEQ ID NO: 392713 - RNA, 19 nt, Artificial Sequence
  Description of Artificial Sequence: Synthetic oligonucleotide
  Sense Strand Starting at position 941 of SEQ ID NO: 319111
uugagacaguuuccuccaa

SEQ ID NO: 392714 - RNA, 19 nt, Artificial Sequence
  Description of Artificial Sequence: Synthetic oligonucleotide
  Antisense Strand to SEQ ID NO: 392713
uuggaggaaacugucucaa

SEQ ID NO: 392715 - RNA, 19 nt, Artificial Sequence
  Description of Artificial Sequence: Synthetic oligonucleotide
  Sense Strand Starting at position 941 of SEQ ID NO: 319112
ugagacaguuuccuccaaa

SEQ ID NO: 392716 - RNA, 19 nt, Artificial Sequence
  Description of Artificial Sequence: Synthetic oligonucleotide
  Antisense Strand to SEQ ID NO: 392715
uuuggaggaaacugucuca

SEQ ID NO: 392717 - RNA, 19 nt, Artificial Sequence
  Description of Artificial Sequence: Synthetic oligonucleotide
  Sense Strand Starting at position 941 of SEQ ID NO: 319145
acaggaacugucugcuaga

SEQ ID NO: 392718 - RNA, 19 nt, Artificial Sequence
  Description of Artificial Sequence: Synthetic oligonucleotide
  Antisense Strand to SEQ ID NO: 392717
ucuagcagacaguuccugu

SEQ ID NO: 392719 - RNA, 19 nt, Artificial Sequence
  Description of Artificial Sequence: Synthetic oligonucleotide
  Sense Strand Starting at position 941 of SEQ ID NO: 319148
ggaacugucugcuagacuc

SEQ ID NO: 392720 - RNA, 19 nt, Artificial Sequence
  Description of Artificial Sequence: Synthetic oligonucleotide
  Antisense Strand to SEQ ID NO: 392719
gagucuagcagacaguucc

SEQ ID NO: 392721 - RNA, 19 nt, Artificial Sequence
  Description of Artificial Sequence: Synthetic oligonucleotide
  Sense Strand Starting at position 941 of SEQ ID NO: 319156
cugcuagacuccuggucuu

SEQ ID NO: 392722 - RNA, 19 nt, Artificial Sequence
  Description of Artificial Sequence: Synthetic oligonucleotide
  Antisense Strand to SEQ ID NO: 392721
aagaccaggagucuagcag

SEQ ID NO: 392723 - RNA, 19 nt, Artificial Sequence
  Description of Artificial Sequence: Synthetic oligonucleotide
  Sense Strand Starting at position 941 of SEQ ID NO: 319211
cuuccucugccaggaucau

SEQ ID NO: 392724 - RNA, 19 nt, Artificial Sequence
  Description of Artificial Sequence: Synthetic oligonucleotide
  Antisense Strand to SEQ ID NO: 392723
augauccuggcagaggaag

SEQ ID NO: 392725 - RNA, 19 nt, Artificial Sequence
  Description of Artificial Sequence: Synthetic oligonucleotide
  Sense Strand Starting at position 941 of SEQ ID NO: 319212
uuccucugccaggaucaua

SEQ ID NO: 392726 - RNA, 19 nt, Artificial Sequence
  Description of Artificial Sequence: Synthetic oligonucleotide
  Antisense Strand to SEQ ID NO: 392725
uaugauccuggcagaggaa

SEQ ID NO: 392727 - RNA, 19 nt, Artificial Sequence
  Description of Artificial Sequence: Synthetic oligonucleotide
  Sense Strand Starting at position 942 of SEQ ID NO: 315396
uuaucuuccugguuuaaga

SEQ ID NO: 392728 - RNA, 19 nt, Artificial Sequence
  Description of Artificial Sequence: Synthetic oligonucleotide
  Antisense Strand to SEQ ID NO: 392727
ucuuaaaccaggaagauaa

SEQ ID NO: 392729 - RNA, 19 nt, Artificial Sequence
  Description of Artificial Sequence: Synthetic oligonucleotide
  Sense Strand Starting at position 942 of SEQ ID NO: 315398
aucuuccugguuuaagaua

SEQ ID NO: 392730 - RNA, 19 nt, Artificial Sequence
  Description of Artificial Sequence: Synthetic oligonucleotide
  Antisense Strand to SEQ ID NO: 392729
uaucuuaaaccaggaagau

SEQ ID NO: 392731 - RNA, 19 nt, Artificial Sequence
  Description of Artificial Sequence: Synthetic oligonucleotide
  Sense Strand Starting at position 942 of SEQ ID NO: 315459
ggaauagacuucuuucuuc

SEQ ID NO: 392732 - RNA, 19 nt, Artificial Sequence
  Description of Artificial Sequence: Synthetic oligonucleotide
  Antisense Strand to SEQ ID NO: 392731
gaagaaagaagucuauucc

SEQ ID NO: 392733 - RNA, 19 nt, Artificial Sequence
  Description of Artificial Sequence: Synthetic oligonucleotide
  Sense Strand Starting at position 942 of SEQ ID NO: 315573
gugagauuccuggauguuu

SEQ ID NO: 392734 - RNA, 19 nt, Artificial Sequence
  Description of Artificial Sequence: Synthetic oligonucleotide
  Antisense Strand to SEQ ID NO: 392733
aaacauccaggaaucucac

SEQ ID NO: 392735 - RNA, 19 nt, Artificial Sequence
  Description of Artificial Sequence: Synthetic oligonucleotide
  Sense Strand Starting at position 942 of SEQ ID NO: 315612
gaccacugaugugauauaa

SEQ ID NO: 392736 - RNA, 19 nt, Artificial Sequence
  Description of Artificial Sequence: Synthetic oligonucleotide
  Antisense Strand to SEQ ID NO: 392735
uuauaucacaucagugguc

SEQ ID NO: 392737 - RNA, 19 nt, Artificial Sequence
  Description of Artificial Sequence: Synthetic oligonucleotide
  Sense Strand Starting at position 942 of SEQ ID NO: 315623
ugauauaaagcuuguaucu

SEQ ID NO: 392738 - RNA, 19 nt, Artificial Sequence
  Description of Artificial Sequence: Synthetic oligonucleotide
  Antisense Strand to SEQ ID NO: 392737
agauacaagcuuuauauca

SEQ ID NO: 392739 - RNA, 19 nt, Artificial Sequence
  Description of Artificial Sequence: Synthetic oligonucleotide
  Sense Strand Starting at position 942 of SEQ ID NO: 315680
auuucuagaucuggaacuu

SEQ ID NO: 392740 - RNA, 19 nt, Artificial Sequence
  Description of Artificial Sequence: Synthetic oligonucleotide
  Antisense Strand to SEQ ID NO: 392739
aaguuccagaucuagaaau

SEQ ID NO: 392741 - RNA, 19 nt, Artificial Sequence
  Description of Artificial Sequence: Synthetic oligonucleotide
  Sense Strand Starting at position 942 of SEQ ID NO: 315789
augauccucccacgauaua

SEQ ID NO: 392742 - RNA, 19 nt, Artificial Sequence
  Description of Artificial Sequence: Synthetic oligonucleotide
  Antisense Strand to SEQ ID NO: 392741
uauaucgugggaggaucau

SEQ ID NO: 392743 - RNA, 19 nt, Artificial Sequence
  Description of Artificial Sequence: Synthetic oligonucleotide
  Sense Strand Starting at position 942 of SEQ ID NO: 315790
ugauccucccacgauauau

SEQ ID NO: 392744 - RNA, 19 nt, Artificial Sequence
  Description of Artificial Sequence: Synthetic oligonucleotide
  Antisense Strand to SEQ ID NO: 392743
auauaucgugggaggauca

SEQ ID NO: 392745 - RNA, 19 nt, Artificial Sequence
  Description of Artificial Sequence: Synthetic oligonucleotide
  Sense Strand Starting at position 942 of SEQ ID NO: 316002
acuguauucccucauguuu

SEQ ID NO: 392746 - RNA, 19 nt, Artificial Sequence
  Description of Artificial Sequence: Synthetic oligonucleotide
  Antisense Strand to SEQ ID NO: 392745
aaacaugagggaauacagu

SEQ ID NO: 392747 - RNA, 19 nt, Artificial Sequence
  Description of Artificial Sequence: Synthetic oligonucleotide
  Sense Strand Starting at position 942 of SEQ ID NO: 316332
aguggcagagcuugaacua

SEQ ID NO: 392748 - RNA, 19 nt, Artificial Sequence
  Description of Artificial Sequence: Synthetic oligonucleotide
  Antisense Strand to SEQ ID NO: 392747
uaguucaagcucugccacu

SEQ ID NO: 392749 - RNA, 19 nt, Artificial Sequence
  Description of Artificial Sequence: Synthetic oligonucleotide
  Sense Strand Starting at position 942 of SEQ ID NO: 316333
guggcagagcuugaacuaa

SEQ ID NO: 392750 - RNA, 19 nt, Artificial Sequence
  Description of Artificial Sequence: Synthetic oligonucleotide
  Antisense Strand to SEQ ID NO: 392749
uuaguucaagcucugccac

SEQ ID NO: 392751 - RNA, 19 nt, Artificial Sequence
  Description of Artificial Sequence: Synthetic oligonucleotide
  Sense Strand Starting at position 942 of SEQ ID NO: 316540
uuugaacgcuuucccaaua

SEQ ID NO: 392752 - RNA, 19 nt, Artificial Sequence
  Description of Artificial Sequence: Synthetic oligonucleotide
  Antisense Strand to SEQ ID NO: 392751
uauugggaaagcguucaaa

SEQ ID NO: 392753 - RNA, 19 nt, Artificial Sequence
  Description of Artificial Sequence: Synthetic oligonucleotide
  Sense Strand Starting at position 942 of SEQ ID NO: 317035
cugucaucaccacauugua

SEQ ID NO: 392754 - RNA, 19 nt, Artificial Sequence
  Description of Artificial Sequence: Synthetic oligonucleotide
  Antisense Strand to SEQ ID NO: 392753
uacaauguggugaugacag

SEQ ID NO: 392755 - RNA, 19 nt, Artificial Sequence
  Description of Artificial Sequence: Synthetic oligonucleotide
  Sense Strand Starting at position 942 of SEQ ID NO: 317520
ucgcuauucgcccuccuau

SEQ ID NO: 392756 - RNA, 19 nt, Artificial Sequence
  Description of Artificial Sequence: Synthetic oligonucleotide
  Antisense Strand to SEQ ID NO: 392755
auaggagggcgaauagcga

SEQ ID NO: 392757 - RNA, 19 nt, Artificial Sequence
  Description of Artificial Sequence: Synthetic oligonucleotide
  Sense Strand Starting at position 942 of SEQ ID NO: 317521
cgcuauucgcccuccuaua

SEQ ID NO: 392758 - RNA, 19 nt, Artificial Sequence
  Description of Artificial Sequence: Synthetic oligonucleotide
  Antisense Strand to SEQ ID NO: 392757
uauaggagggcgaauagcg

SEQ ID NO: 392759 - RNA, 19 nt, Artificial Sequence
  Description of Artificial Sequence: Synthetic oligonucleotide
  Sense Strand Starting at position 942 of SEQ ID NO: 317614
gaacacuauugcuccggua

SEQ ID NO: 392760 - RNA, 19 nt, Artificial Sequence
  Description of Artificial Sequence: Synthetic oligonucleotide
  Antisense Strand to SEQ ID NO: 392759
uaccggagcaauaguguuc

SEQ ID NO: 392761 - RNA, 19 nt, Artificial Sequence
  Description of Artificial Sequence: Synthetic oligonucleotide
  Sense Strand Starting at position 942 of SEQ ID NO: 317616
acacuauugcuccgguauc

SEQ ID NO: 392762 - RNA, 19 nt, Artificial Sequence
  Description of Artificial Sequence: Synthetic oligonucleotide
  Antisense Strand to SEQ ID NO: 392761
gauaccggagcaauagugu

SEQ ID NO: 392763 - RNA, 19 nt, Artificial Sequence
  Description of Artificial Sequence: Synthetic oligonucleotide
  Sense Strand Starting at position 942 of SEQ ID NO: 317965
ggaguagauuuauagcuau

SEQ ID NO: 392764 - RNA, 19 nt, Artificial Sequence
  Description of Artificial Sequence: Synthetic oligonucleotide
  Antisense Strand to SEQ ID NO: 392763
auagcuauaaaucuacucc

SEQ ID NO: 392765 - RNA, 19 nt, Artificial Sequence
  Description of Artificial Sequence: Synthetic oligonucleotide
  Sense Strand Starting at position 942 of SEQ ID NO: 318272
gagacaaagucgucagucu

SEQ ID NO: 392766 - RNA, 19 nt, Artificial Sequence
  Description of Artificial Sequence: Synthetic oligonucleotide
  Antisense Strand to SEQ ID NO: 392765
agacugacgacuuugucuc

SEQ ID NO: 392767 - RNA, 19 nt, Artificial Sequence
  Description of Artificial Sequence: Synthetic oligonucleotide
  Sense Strand Starting at position 942 of SEQ ID NO: 318283
gucagucucccagggauua

SEQ ID NO: 392768 - RNA, 19 nt, Artificial Sequence
  Description of Artificial Sequence: Synthetic oligonucleotide
  Antisense Strand to SEQ ID NO: 392767
uaaucccugggagacugac

SEQ ID NO: 392769 - RNA, 19 nt, Artificial Sequence
  Description of Artificial Sequence: Synthetic oligonucleotide
  Sense Strand Starting at position 942 of SEQ ID NO: 318284
ucagucucccagggauuau

SEQ ID NO: 392770 - RNA, 19 nt, Artificial Sequence
  Description of Artificial Sequence: Synthetic oligonucleotide
  Antisense Strand to SEQ ID NO: 392769
auaaucccugggagacuga

SEQ ID NO: 392771 - RNA, 19 nt, Artificial Sequence
  Description of Artificial Sequence: Synthetic oligonucleotide
  Sense Strand Starting at position 942 of SEQ ID NO: 318519
agguaaugcucccuugcuu

SEQ ID NO: 392772 - RNA, 19 nt, Artificial Sequence
  Description of Artificial Sequence: Synthetic oligonucleotide
  Antisense Strand to SEQ ID NO: 392771
aagcaagggagcauuaccu

SEQ ID NO: 392773 - RNA, 19 nt, Artificial Sequence
  Description of Artificial Sequence: Synthetic oligonucleotide
  Sense Strand Starting at position 942 of SEQ ID NO: 318639
gcucguauuaguuggugaa

SEQ ID NO: 392774 - RNA, 19 nt, Artificial Sequence
  Description of Artificial Sequence: Synthetic oligonucleotide
  Antisense Strand to SEQ ID NO: 392773
uucaccaacuaauacgagc

SEQ ID NO: 392775 - RNA, 19 nt, Artificial Sequence
  Description of Artificial Sequence: Synthetic oligonucleotide
  Sense Strand Starting at position 942 of SEQ ID NO: 318640
cucguauuaguuggugaaa

SEQ ID NO: 392776 - RNA, 19 nt, Artificial Sequence
  Description of Artificial Sequence: Synthetic oligonucleotide
  Antisense Strand to SEQ ID NO: 392775
uuucaccaacuaauacgag

SEQ ID NO: 392777 - RNA, 19 nt, Artificial Sequence
  Description of Artificial Sequence: Synthetic oligonucleotide
  Sense Strand Starting at position 942 of SEQ ID NO: 318666
ucaggaaguuauuacaaua

SEQ ID NO: 392778 - RNA, 19 nt, Artificial Sequence
  Description of Artificial Sequence: Synthetic oligonucleotide
  Antisense Strand to SEQ ID NO: 392777
uauuguaauaacuuccuga

SEQ ID NO: 392779 - RNA, 19 nt, Artificial Sequence
  Description of Artificial Sequence: Synthetic oligonucleotide
  Sense Strand Starting at position 942 of SEQ ID NO: 318683
uaauccagccauggugaua

SEQ ID NO: 392780 - RNA, 19 nt, Artificial Sequence
  Description of Artificial Sequence: Synthetic oligonucleotide
  Antisense Strand to SEQ ID NO: 392779
uaucaccauggcuggauua

SEQ ID NO: 392781 - RNA, 19 nt, Artificial Sequence
  Description of Artificial Sequence: Synthetic oligonucleotide
  Sense Strand Starting at position 942 of SEQ ID NO: 318719
gguggaaaucgaggugaug

SEQ ID NO: 392782 - RNA, 19 nt, Artificial Sequence
  Description of Artificial Sequence: Synthetic oligonucleotide
  Antisense Strand to SEQ ID NO: 392781
caucaccucgauuuccacc

SEQ ID NO: 392783 - RNA, 19 nt, Artificial Sequence
  Description of Artificial Sequence: Synthetic oligonucleotide
  Sense Strand Starting at position 942 of SEQ ID NO: 318721
uggaaaucgaggugaugaa

SEQ ID NO: 392784 - RNA, 19 nt, Artificial Sequence
  Description of Artificial Sequence: Synthetic oligonucleotide
  Antisense Strand to SEQ ID NO: 392783
uucaucaccucgauuucca

SEQ ID NO: 392785 - RNA, 19 nt, Artificial Sequence
  Description of Artificial Sequence: Synthetic oligonucleotide
  Sense Strand Starting at position 942 of SEQ ID NO: 318745
caaugaauucugugcguau

SEQ ID NO: 392786 - RNA, 19 nt, Artificial Sequence
  Description of Artificial Sequence: Synthetic oligonucleotide
  Antisense Strand to SEQ ID NO: 392785
auacgcacagaauucauug

SEQ ID NO: 392787 - RNA, 19 nt, Artificial Sequence
  Description of Artificial Sequence: Synthetic oligonucleotide
  Sense Strand Starting at position 942 of SEQ ID NO: 318746
aaugaauucugugcguauu

SEQ ID NO: 392788 - RNA, 19 nt, Artificial Sequence
  Description of Artificial Sequence: Synthetic oligonucleotide
  Antisense Strand to SEQ ID NO: 392787
aauacgcacagaauucauu

SEQ ID NO: 392789 - RNA, 19 nt, Artificial Sequence
  Description of Artificial Sequence: Synthetic oligonucleotide
  Sense Strand Starting at position 942 of SEQ ID NO: 318747
augaauucugugcguauuu

SEQ ID NO: 392790 - RNA, 19 nt, Artificial Sequence
  Description of Artificial Sequence: Synthetic oligonucleotide
  Antisense Strand to SEQ ID NO: 392789
aaauacgcacagaauucau

SEQ ID NO: 392791 - RNA, 19 nt, Artificial Sequence
  Description of Artificial Sequence: Synthetic oligonucleotide
  Sense Strand Starting at position 942 of SEQ ID NO: 318808
gugugaggucaaaggcguu

SEQ ID NO: 392792 - RNA, 19 nt, Artificial Sequence
  Description of Artificial Sequence: Synthetic oligonucleotide
  Antisense Strand to SEQ ID NO: 392791
aacgccuuugaccucacac

SEQ ID NO: 392793 - RNA, 19 nt, Artificial Sequence
  Description of Artificial Sequence: Synthetic oligonucleotide
  Sense Strand Starting at position 942 of SEQ ID NO: 318827
uugagcaacuuguaagaaa

SEQ ID NO: 392794 - RNA, 19 nt, Artificial Sequence
  Description of Artificial Sequence: Synthetic oligonucleotide
  Antisense Strand to SEQ ID NO: 392793
uuucuuacaaguugcucaa

SEQ ID NO: 392795 - RNA, 19 nt, Artificial Sequence
  Description of Artificial Sequence: Synthetic oligonucleotide
  Sense Strand Starting at position 942 of SEQ ID NO: 319025
guaagaaucuaguuuaaag

SEQ ID NO: 392796 - RNA, 19 nt, Artificial Sequence
  Description of Artificial Sequence: Synthetic oligonucleotide
  Antisense Strand to SEQ ID NO: 392795
cuuuaaacuagauucuuac

SEQ ID NO: 392797 - RNA, 19 nt, Artificial Sequence
  Description of Artificial Sequence: Synthetic oligonucleotide
  Sense Strand Starting at position 942 of SEQ ID NO: 319055
aagcauaaagguugaagau

SEQ ID NO: 392798 - RNA, 19 nt, Artificial Sequence
  Description of Artificial Sequence: Synthetic oligonucleotide
  Antisense Strand to SEQ ID NO: 392797
aucuucaaccuuuaugcuu

SEQ ID NO: 392799 - RNA, 19 nt, Artificial Sequence
  Description of Artificial Sequence: Synthetic oligonucleotide
  Sense Strand Starting at position 942 of SEQ ID NO: 319116
ucugauuagcagcgguuau

SEQ ID NO: 392800 - RNA, 19 nt, Artificial Sequence
  Description of Artificial Sequence: Synthetic oligonucleotide
  Antisense Strand to SEQ ID NO: 392799
auaaccgcugcuaaucaga

SEQ ID NO: 392801 - RNA, 19 nt, Artificial Sequence
  Description of Artificial Sequence: Synthetic oligonucleotide
  Sense Strand Starting at position 942 of SEQ ID NO: 319126
agcgguuaugaguggguuu

SEQ ID NO: 392802 - RNA, 19 nt, Artificial Sequence
  Description of Artificial Sequence: Synthetic oligonucleotide
  Antisense Strand to SEQ ID NO: 392801
aaacccacucauaaccgcu

SEQ ID NO: 392803 - RNA, 19 nt, Artificial Sequence
  Description of Artificial Sequence: Synthetic oligonucleotide
  Sense Strand Starting at position 942 of SEQ ID NO: 319163
gcuucuaaguuguuuacua

SEQ ID NO: 392804 - RNA, 19 nt, Artificial Sequence
  Description of Artificial Sequence: Synthetic oligonucleotide
  Antisense Strand to SEQ ID NO: 392803
uaguaaacaacuuagaagc

SEQ ID NO: 392805 - RNA, 19 nt, Artificial Sequence
  Description of Artificial Sequence: Synthetic oligonucleotide
  Sense Strand Starting at position 942 of SEQ ID NO: 319164
cuucuaaguuguuuacuaa

SEQ ID NO: 392806 - RNA, 19 nt, Artificial Sequence
  Description of Artificial Sequence: Synthetic oligonucleotide
  Antisense Strand to SEQ ID NO: 392805
uuaguaaacaacuuagaag

SEQ ID NO: 392807 - RNA, 19 nt, Artificial Sequence
  Description of Artificial Sequence: Synthetic oligonucleotide
  Sense Strand Starting at position 943 of SEQ ID NO: 315609
uuguauuuguaugaaacag

SEQ ID NO: 392808 - RNA, 19 nt, Artificial Sequence
  Description of Artificial Sequence: Synthetic oligonucleotide
  Antisense Strand to SEQ ID NO: 392807
cuguuucauacaaauacaa

SEQ ID NO: 392809 - RNA, 19 nt, Artificial Sequence
  Description of Artificial Sequence: Synthetic oligonucleotide
  Sense Strand Starting at position 943 of SEQ ID NO: 315943
gagagcaacgucuggauaa

SEQ ID NO: 392810 - RNA, 19 nt, Artificial Sequence
  Description of Artificial Sequence: Synthetic oligonucleotide
  Antisense Strand to SEQ ID NO: 392809
uuauccagacguugcucuc

SEQ ID NO: 392811 - RNA, 19 nt, Artificial Sequence
  Description of Artificial Sequence: Synthetic oligonucleotide
  Sense Strand Starting at position 943 of SEQ ID NO: 316046
gaacuaaggcaauggugua

SEQ ID NO: 392812 - RNA, 19 nt, Artificial Sequence
  Description of Artificial Sequence: Synthetic oligonucleotide
  Antisense Strand to SEQ ID NO: 392811
uacaccauugccuuaguuc

SEQ ID NO: 392813 - RNA, 19 nt, Artificial Sequence
  Description of Artificial Sequence: Synthetic oligonucleotide
  Sense Strand Starting at position 943 of SEQ ID NO: 316078
ggagacagcuucuugggaa

SEQ ID NO: 392814 - RNA, 19 nt, Artificial Sequence
  Description of Artificial Sequence: Synthetic oligonucleotide
  Antisense Strand to SEQ ID NO: 392813
uucccaagaagcugucucc

SEQ ID NO: 392815 - RNA, 19 nt, Artificial Sequence
  Description of Artificial Sequence: Synthetic oligonucleotide
  Sense Strand Starting at position 943 of SEQ ID NO: 316181
cuggcaucugcugugcuaa

SEQ ID NO: 392816 - RNA, 19 nt, Artificial Sequence
  Description of Artificial Sequence: Synthetic oligonucleotide
  Antisense Strand to SEQ ID NO: 392815
uuagcacagcagaugccag

SEQ ID NO: 392817 - RNA, 19 nt, Artificial Sequence
  Description of Artificial Sequence: Synthetic oligonucleotide
  Sense Strand Starting at position 943 of SEQ ID NO: 316331
acagaaguuccuugccuua

SEQ ID NO: 392818 - RNA, 19 nt, Artificial Sequence
  Description of Artificial Sequence: Synthetic oligonucleotide
  Antisense Strand to SEQ ID NO: 392817
uaaggcaaggaacuucugu

SEQ ID NO: 392819 - RNA, 19 nt, Artificial Sequence
  Description of Artificial Sequence: Synthetic oligonucleotide
  Sense Strand Starting at position 943 of SEQ ID NO: 316333
agaaguuccuugccuuagu

SEQ ID NO: 392820 - RNA, 19 nt, Artificial Sequence
  Description of Artificial Sequence: Synthetic oligonucleotide
  Antisense Strand to SEQ ID NO: 392819
acuaaggcaaggaacuucu

SEQ ID NO: 392821 - RNA, 19 nt, Artificial Sequence
  Description of Artificial Sequence: Synthetic oligonucleotide
  Sense Strand Starting at position 943 of SEQ ID NO: 316336
aguuccuugccuuagucaa

SEQ ID NO: 392822 - RNA, 19 nt, Artificial Sequence
  Description of Artificial Sequence: Synthetic oligonucleotide
  Antisense Strand to SEQ ID NO: 392821
uugacuaaggcaaggaacu

SEQ ID NO: 392823 - RNA, 19 nt, Artificial Sequence
  Description of Artificial Sequence: Synthetic oligonucleotide
  Sense Strand Starting at position 943 of SEQ ID NO: 316366
cccgucuguucuuccaaca

SEQ ID NO: 392824 - RNA, 19 nt, Artificial Sequence
  Description of Artificial Sequence: Synthetic oligonucleotide
  Antisense Strand to SEQ ID NO: 392823
uguuggaagaacagacggg

SEQ ID NO: 392825 - RNA, 19 nt, Artificial Sequence
  Description of Artificial Sequence: Synthetic oligonucleotide
  Sense Strand Starting at position 943 of SEQ ID NO: 316371
cuguucuuccaacacagua

SEQ ID NO: 392826 - RNA, 19 nt, Artificial Sequence
  Description of Artificial Sequence: Synthetic oligonucleotide
  Antisense Strand to SEQ ID NO: 392825
uacuguguuggaagaacag

SEQ ID NO: 392827 - RNA, 19 nt, Artificial Sequence
  Description of Artificial Sequence: Synthetic oligonucleotide
  Sense Strand Starting at position 943 of SEQ ID NO: 316423
ccuccagucgguuacgaaa

SEQ ID NO: 392828 - RNA, 19 nt, Artificial Sequence
  Description of Artificial Sequence: Synthetic oligonucleotide
  Antisense Strand to SEQ ID NO: 392827
uuucguaaccgacuggagg

SEQ ID NO: 392829 - RNA, 19 nt, Artificial Sequence
  Description of Artificial Sequence: Synthetic oligonucleotide
  Sense Strand Starting at position 943 of SEQ ID NO: 316470
gauuguauuguuuggucca

SEQ ID NO: 392830 - RNA, 19 nt, Artificial Sequence
  Description of Artificial Sequence: Synthetic oligonucleotide
  Antisense Strand to SEQ ID NO: 392829
uggaccaaacaauacaauc

SEQ ID NO: 392831 - RNA, 19 nt, Artificial Sequence
  Description of Artificial Sequence: Synthetic oligonucleotide
  Sense Strand Starting at position 943 of SEQ ID NO: 316472
uuguauuguuugguccaaa

SEQ ID NO: 392832 - RNA, 19 nt, Artificial Sequence
  Description of Artificial Sequence: Synthetic oligonucleotide
  Antisense Strand to SEQ ID NO: 392831
uuuggaccaaacaauacaa

SEQ ID NO: 392833 - RNA, 19 nt, Artificial Sequence
  Description of Artificial Sequence: Synthetic oligonucleotide
  Sense Strand Starting at position 943 of SEQ ID NO: 316473
uguauuguuugguccaaag

SEQ ID NO: 392834 - RNA, 19 nt, Artificial Sequence
  Description of Artificial Sequence: Synthetic oligonucleotide
  Antisense Strand to SEQ ID NO: 392833
cuuuggaccaaacaauaca

SEQ ID NO: 392835 - RNA, 19 nt, Artificial Sequence
  Description of Artificial Sequence: Synthetic oligonucleotide
  Sense Strand Starting at position 943 of SEQ ID NO: 316475
uauuguuugguccaaagag

SEQ ID NO: 392836 - RNA, 19 nt, Artificial Sequence
  Description of Artificial Sequence: Synthetic oligonucleotide
  Antisense Strand to SEQ ID NO: 392835
cucuuuggaccaaacaaua

SEQ ID NO: 392837 - RNA, 19 nt, Artificial Sequence
  Description of Artificial Sequence: Synthetic oligonucleotide
  Sense Strand Starting at position 943 of SEQ ID NO: 316514
acagaaucgcagcaauugu

SEQ ID NO: 392838 - RNA, 19 nt, Artificial Sequence
  Description of Artificial Sequence: Synthetic oligonucleotide
  Antisense Strand to SEQ ID NO: 392837
acaauugcugcgauucugu

SEQ ID NO: 392839 - RNA, 19 nt, Artificial Sequence
  Description of Artificial Sequence: Synthetic oligonucleotide
  Sense Strand Starting at position 943 of SEQ ID NO: 317406
cggcuucugggauaguagu

SEQ ID NO: 392840 - RNA, 19 nt, Artificial Sequence
  Description of Artificial Sequence: Synthetic oligonucleotide
  Antisense Strand to SEQ ID NO: 392839
acuacuaucccagaagccg

SEQ ID NO: 392841 - RNA, 19 nt, Artificial Sequence
  Description of Artificial Sequence: Synthetic oligonucleotide
  Sense Strand Starting at position 943 of SEQ ID NO: 317559
acguauugucaagagccgu

SEQ ID NO: 392842 - RNA, 19 nt, Artificial Sequence
  Description of Artificial Sequence: Synthetic oligonucleotide
  Antisense Strand to SEQ ID NO: 392841
acggcucuugacaauacgu

SEQ ID NO: 392843 - RNA, 19 nt, Artificial Sequence
  Description of Artificial Sequence: Synthetic oligonucleotide
  Sense Strand Starting at position 943 of SEQ ID NO: 317581
ggacuggugcugugguaga

SEQ ID NO: 392844 - RNA, 19 nt, Artificial Sequence
  Description of Artificial Sequence: Synthetic oligonucleotide
  Antisense Strand to SEQ ID NO: 392843
ucuaccacagcaccagucc

SEQ ID NO: 392845 - RNA, 19 nt, Artificial Sequence
  Description of Artificial Sequence: Synthetic oligonucleotide
  Sense Strand Starting at position 943 of SEQ ID NO: 317586
ggugcugugguagagauga

SEQ ID NO: 392846 - RNA, 19 nt, Artificial Sequence
  Description of Artificial Sequence: Synthetic oligonucleotide
  Antisense Strand to SEQ ID NO: 392845
ucaucucuaccacagcacc

SEQ ID NO: 392847 - RNA, 19 nt, Artificial Sequence
  Description of Artificial Sequence: Synthetic oligonucleotide
  Sense Strand Starting at position 943 of SEQ ID NO: 317729
gcuuucgagcuuuggaaca

SEQ ID NO: 392848 - RNA, 19 nt, Artificial Sequence
  Description of Artificial Sequence: Synthetic oligonucleotide
  Antisense Strand to SEQ ID NO: 392847
uguuccaaagcucgaaagc

SEQ ID NO: 392849 - RNA, 19 nt, Artificial Sequence
  Description of Artificial Sequence: Synthetic oligonucleotide
  Sense Strand Starting at position 943 of SEQ ID NO: 317734
cgagcuuuggaacagaauc

SEQ ID NO: 392850 - RNA, 19 nt, Artificial Sequence
  Description of Artificial Sequence: Synthetic oligonucleotide
  Antisense Strand to SEQ ID NO: 392849
gauucuguuccaaagcucg

SEQ ID NO: 392851 - RNA, 19 nt, Artificial Sequence
  Description of Artificial Sequence: Synthetic oligonucleotide
  Sense Strand Starting at position 943 of SEQ ID NO: 318075
gguucaaucgcuugaccug

SEQ ID NO: 392852 - RNA, 19 nt, Artificial Sequence
  Description of Artificial Sequence: Synthetic oligonucleotide
  Antisense Strand to SEQ ID NO: 392851
caggucaagcgauugaacc

SEQ ID NO: 392853 - RNA, 19 nt, Artificial Sequence
  Description of Artificial Sequence: Synthetic oligonucleotide
  Sense Strand Starting at position 943 of SEQ ID NO: 318208
uggagauagugagugcaaa

SEQ ID NO: 392854 - RNA, 19 nt, Artificial Sequence
  Description of Artificial Sequence: Synthetic oligonucleotide
  Antisense Strand to SEQ ID NO: 392853
uuugcacucacuaucucca

SEQ ID NO: 392855 - RNA, 19 nt, Artificial Sequence
  Description of Artificial Sequence: Synthetic oligonucleotide
  Sense Strand Starting at position 943 of SEQ ID NO: 318256
uguagucuuccaggagaca

SEQ ID NO: 392856 - RNA, 19 nt, Artificial Sequence
  Description of Artificial Sequence: Synthetic oligonucleotide
  Antisense Strand to SEQ ID NO: 392855
ugucuccuggaagacuaca

SEQ ID NO: 392857 - RNA, 19 nt, Artificial Sequence
  Description of Artificial Sequence: Synthetic oligonucleotide
  Sense Strand Starting at position 943 of SEQ ID NO: 318257
guagucuuccaggagacag

SEQ ID NO: 392858 - RNA, 19 nt, Artificial Sequence
  Description of Artificial Sequence: Synthetic oligonucleotide
  Antisense Strand to SEQ ID NO: 392857
cugucuccuggaagacuac

SEQ ID NO: 392859 - RNA, 19 nt, Artificial Sequence
  Description of Artificial Sequence: Synthetic oligonucleotide
  Sense Strand Starting at position 943 of SEQ ID NO: 318276
gugauuguggcuuggagca

SEQ ID NO: 392860 - RNA, 19 nt, Artificial Sequence
  Description of Artificial Sequence: Synthetic oligonucleotide
  Antisense Strand to SEQ ID NO: 392859
ugcuccaagccacaaucac

SEQ ID NO: 392861 - RNA, 19 nt, Artificial Sequence
  Description of Artificial Sequence: Synthetic oligonucleotide
  Sense Strand Starting at position 943 of SEQ ID NO: 318401
gcaugaggacgucgaauau

SEQ ID NO: 392862 - RNA, 19 nt, Artificial Sequence
  Description of Artificial Sequence: Synthetic oligonucleotide
  Antisense Strand to SEQ ID NO: 392861
auauucgacguccucaugc

SEQ ID NO: 392863 - RNA, 19 nt, Artificial Sequence
  Description of Artificial Sequence: Synthetic oligonucleotide
  Sense Strand Starting at position 943 of SEQ ID NO: 318405
gaggacgucgaauaugauu

SEQ ID NO: 392864 - RNA, 19 nt, Artificial Sequence
  Description of Artificial Sequence: Synthetic oligonucleotide
  Antisense Strand to SEQ ID NO: 392863
aaucauauucgacguccuc

SEQ ID NO: 392865 - RNA, 19 nt, Artificial Sequence
  Description of Artificial Sequence: Synthetic oligonucleotide
  Sense Strand Starting at position 943 of SEQ ID NO: 318497
agguucagguccguguuaa

SEQ ID NO: 392866 - RNA, 19 nt, Artificial Sequence
  Description of Artificial Sequence: Synthetic oligonucleotide
  Antisense Strand to SEQ ID NO: 392865
uuaacacggaccugaaccu

SEQ ID NO: 392867 - RNA, 19 nt, Artificial Sequence
  Description of Artificial Sequence: Synthetic oligonucleotide
  Sense Strand Starting at position 943 of SEQ ID NO: 318529
gccuuugacucguucugga

SEQ ID NO: 392868 - RNA, 19 nt, Artificial Sequence
  Description of Artificial Sequence: Synthetic oligonucleotide
  Antisense Strand to SEQ ID NO: 392867
uccagaacgagucaaaggc

SEQ ID NO: 392869 - RNA, 19 nt, Artificial Sequence
  Description of Artificial Sequence: Synthetic oligonucleotide
  Sense Strand Starting at position 943 of SEQ ID NO: 318534
ugacucguucuggaugaaa

SEQ ID NO: 392870 - RNA, 19 nt, Artificial Sequence
  Description of Artificial Sequence: Synthetic oligonucleotide
  Antisense Strand to SEQ ID NO: 392869
uuucauccagaacgaguca

SEQ ID NO: 392871 - RNA, 19 nt, Artificial Sequence
  Description of Artificial Sequence: Synthetic oligonucleotide
  Sense Strand Starting at position 943 of SEQ ID NO: 318536
acucguucuggaugaaaug

SEQ ID NO: 392872 - RNA, 19 nt, Artificial Sequence
  Description of Artificial Sequence: Synthetic oligonucleotide
  Antisense Strand to SEQ ID NO: 392871
cauuucauccagaacgagu

SEQ ID NO: 392873 - RNA, 19 nt, Artificial Sequence
  Description of Artificial Sequence: Synthetic oligonucleotide
  Sense Strand Starting at position 943 of SEQ ID NO: 318537
cucguucuggaugaaaugu

SEQ ID NO: 392874 - RNA, 19 nt, Artificial Sequence
  Description of Artificial Sequence: Synthetic oligonucleotide
  Antisense Strand to SEQ ID NO: 392873
acauuucauccagaacgag

SEQ ID NO: 392875 - RNA, 19 nt, Artificial Sequence
  Description of Artificial Sequence: Synthetic oligonucleotide
  Sense Strand Starting at position 943 of SEQ ID NO: 318902
gugggugggaucugggauu

SEQ ID NO: 392876 - RNA, 19 nt, Artificial Sequence
  Description of Artificial Sequence: Synthetic oligonucleotide
  Antisense Strand to SEQ ID NO: 392875
aaucccagaucccacccac

SEQ ID NO: 392877 - RNA, 19 nt, Artificial Sequence
  Description of Artificial Sequence: Synthetic oligonucleotide
  Sense Strand Starting at position 943 of SEQ ID NO: 318987
agacuuagucaagggccua

SEQ ID NO: 392878 - RNA, 19 nt, Artificial Sequence
  Description of Artificial Sequence: Synthetic oligonucleotide
  Antisense Strand to SEQ ID NO: 392877
uaggcccuugacuaagucu

SEQ ID NO: 392879 - RNA, 19 nt, Artificial Sequence
  Description of Artificial Sequence: Synthetic oligonucleotide
  Sense Strand Starting at position 943 of SEQ ID NO: 319103
cagugauggauggaugcau

SEQ ID NO: 392880 - RNA, 19 nt, Artificial Sequence
  Description of Artificial Sequence: Synthetic oligonucleotide
  Antisense Strand to SEQ ID NO: 392879
augcauccauccaucacug

SEQ ID NO: 392881 - RNA, 19 nt, Artificial Sequence
  Description of Artificial Sequence: Synthetic oligonucleotide
  Sense Strand Starting at position 943 of SEQ ID NO: 319125
uaaagaugauguguguaca

SEQ ID NO: 392882 - RNA, 19 nt, Artificial Sequence
  Description of Artificial Sequence: Synthetic oligonucleotide
  Antisense Strand to SEQ ID NO: 392881
uguacacacaucaucuuua

SEQ ID NO: 392883 - RNA, 19 nt, Artificial Sequence
  Description of Artificial Sequence: Synthetic oligonucleotide
  Sense Strand Starting at position 943 of SEQ ID NO: 319126
aaagaugauguguguacau

SEQ ID NO: 392884 - RNA, 19 nt, Artificial Sequence
  Description of Artificial Sequence: Synthetic oligonucleotide
  Antisense Strand to SEQ ID NO: 392883
auguacacacaucaucuuu

SEQ ID NO: 392885 - RNA, 19 nt, Artificial Sequence
  Description of Artificial Sequence: Synthetic oligonucleotide
  Sense Strand Starting at position 943 of SEQ ID NO: 319128
agaugauguguguacauac

SEQ ID NO: 392886 - RNA, 19 nt, Artificial Sequence
  Description of Artificial Sequence: Synthetic oligonucleotide
  Antisense Strand to SEQ ID NO: 392885
guauguacacacaucaucu

SEQ ID NO: 392887 - RNA, 19 nt, Artificial Sequence
  Description of Artificial Sequence: Synthetic oligonucleotide
  Sense Strand Starting at position 944 of SEQ ID NO: 315462
ugcggugauuuauucuuau

SEQ ID NO: 392888 - RNA, 19 nt, Artificial Sequence
  Description of Artificial Sequence: Synthetic oligonucleotide
  Antisense Strand to SEQ ID NO: 392887
auaagaauaaaucaccgca

SEQ ID NO: 392889 - RNA, 19 nt, Artificial Sequence
  Description of Artificial Sequence: Synthetic oligonucleotide
  Sense Strand Starting at position 944 of SEQ ID NO: 315486
gccaguauuguuccugucu

SEQ ID NO: 392890 - RNA, 19 nt, Artificial Sequence
  Description of Artificial Sequence: Synthetic oligonucleotide
  Antisense Strand to SEQ ID NO: 392889
agacaggaacaauacuggc

SEQ ID NO: 392891 - RNA, 19 nt, Artificial Sequence
  Description of Artificial Sequence: Synthetic oligonucleotide
  Sense Strand Starting at position 944 of SEQ ID NO: 315499
cugucuuaaccuggccaga

SEQ ID NO: 392892 - RNA, 19 nt, Artificial Sequence
  Description of Artificial Sequence: Synthetic oligonucleotide
  Antisense Strand to SEQ ID NO: 392891
ucuggccagguuaagacag

SEQ ID NO: 392893 - RNA, 19 nt, Artificial Sequence
  Description of Artificial Sequence: Synthetic oligonucleotide
  Sense Strand Starting at position 944 of SEQ ID NO: 315501
gucuuaaccuggccagaaa

SEQ ID NO: 392894 - RNA, 19 nt, Artificial Sequence
  Description of Artificial Sequence: Synthetic oligonucleotide
  Antisense Strand to SEQ ID NO: 392893
uuucuggccagguuaagac

SEQ ID NO: 392895 - RNA, 19 nt, Artificial Sequence
  Description of Artificial Sequence: Synthetic oligonucleotide
  Sense Strand Starting at position 944 of SEQ ID NO: 317224
ggaaguaacaugugagcau

SEQ ID NO: 392896 - RNA, 19 nt, Artificial Sequence
  Description of Artificial Sequence: Synthetic oligonucleotide
  Antisense Strand to SEQ ID NO: 392895
augcucacauguuacuucc

SEQ ID NO: 392897 - RNA, 19 nt, Artificial Sequence
  Description of Artificial Sequence: Synthetic oligonucleotide
  Sense Strand Starting at position 944 of SEQ ID NO: 317228
guaacaugugagcauggau

SEQ ID NO: 392898 - RNA, 19 nt, Artificial Sequence
  Description of Artificial Sequence: Synthetic oligonucleotide
  Antisense Strand to SEQ ID NO: 392897
auccaugcucacauguuac

SEQ ID NO: 392899 - RNA, 19 nt, Artificial Sequence
  Description of Artificial Sequence: Synthetic oligonucleotide
  Sense Strand Starting at position 944 of SEQ ID NO: 317347
gcgcucuccgcguucuuaa

SEQ ID NO: 392900 - RNA, 19 nt, Artificial Sequence
  Description of Artificial Sequence: Synthetic oligonucleotide
  Antisense Strand to SEQ ID NO: 392899
uuaagaacgcggagagcgc

SEQ ID NO: 392901 - RNA, 19 nt, Artificial Sequence
  Description of Artificial Sequence: Synthetic oligonucleotide
  Sense Strand Starting at position 944 of SEQ ID NO: 317348
cgcucuccgcguucuuaaa

SEQ ID NO: 392902 - RNA, 19 nt, Artificial Sequence
  Description of Artificial Sequence: Synthetic oligonucleotide
  Antisense Strand to SEQ ID NO: 392901
uuuaagaacgcggagagcg

SEQ ID NO: 392903 - RNA, 19 nt, Artificial Sequence
  Description of Artificial Sequence: Synthetic oligonucleotide
  Sense Strand Starting at position 944 of SEQ ID NO: 317525
cccguuguucgagcucuua

SEQ ID NO: 392904 - RNA, 19 nt, Artificial Sequence
  Description of Artificial Sequence: Synthetic oligonucleotide
  Antisense Strand to SEQ ID NO: 392903
uaagagcucgaacaacggg

SEQ ID NO: 392905 - RNA, 19 nt, Artificial Sequence
  Description of Artificial Sequence: Synthetic oligonucleotide
  Sense Strand Starting at position 944 of SEQ ID NO: 317527
cguuguucgagcucuuaaa

SEQ ID NO: 392906 - RNA, 19 nt, Artificial Sequence
  Description of Artificial Sequence: Synthetic oligonucleotide
  Antisense Strand to SEQ ID NO: 392905
uuuaagagcucgaacaacg

SEQ ID NO: 392907 - RNA, 19 nt, Artificial Sequence
  Description of Artificial Sequence: Synthetic oligonucleotide
  Sense Strand Starting at position 944 of SEQ ID NO: 317799
cggcuacauugagauuuaa

SEQ ID NO: 392908 - RNA, 19 nt, Artificial Sequence
  Description of Artificial Sequence: Synthetic oligonucleotide
  Antisense Strand to SEQ ID NO: 392907
uuaaaucucaauguagccg

SEQ ID NO: 392909 - RNA, 19 nt, Artificial Sequence
  Description of Artificial Sequence: Synthetic oligonucleotide
  Sense Strand Starting at position 944 of SEQ ID NO: 318034
gcaggaagugcgccucuua

SEQ ID NO: 392910 - RNA, 19 nt, Artificial Sequence
  Description of Artificial Sequence: Synthetic oligonucleotide
  Antisense Strand to SEQ ID NO: 392909
uaagaggcgcacuuccugc

SEQ ID NO: 392911 - RNA, 19 nt, Artificial Sequence
  Description of Artificial Sequence: Synthetic oligonucleotide
  Sense Strand Starting at position 944 of SEQ ID NO: 318087
gacugauuuccuggcagcu

SEQ ID NO: 392912 - RNA, 19 nt, Artificial Sequence
  Description of Artificial Sequence: Synthetic oligonucleotide
  Antisense Strand to SEQ ID NO: 392911
agcugccaggaaaucaguc

SEQ ID NO: 392913 - RNA, 19 nt, Artificial Sequence
  Description of Artificial Sequence: Synthetic oligonucleotide
  Sense Strand Starting at position 944 of SEQ ID NO: 318161
gaggacuaggcuuaucugu

SEQ ID NO: 392914 - RNA, 19 nt, Artificial Sequence
  Description of Artificial Sequence: Synthetic oligonucleotide
  Antisense Strand to SEQ ID NO: 392913
acagauaagccuaguccuc

SEQ ID NO: 392915 - RNA, 19 nt, Artificial Sequence
  Description of Artificial Sequence: Synthetic oligonucleotide
  Sense Strand Starting at position 944 of SEQ ID NO: 318163
ggacuaggcuuaucuguaa

SEQ ID NO: 392916 - RNA, 19 nt, Artificial Sequence
  Description of Artificial Sequence: Synthetic oligonucleotide
  Antisense Strand to SEQ ID NO: 392915
uuacagauaagccuagucc

SEQ ID NO: 392917 - RNA, 19 nt, Artificial Sequence
  Description of Artificial Sequence: Synthetic oligonucleotide
  Sense Strand Starting at position 944 of SEQ ID NO: 318166
cuaggcuuaucuguaauga

SEQ ID NO: 392918 - RNA, 19 nt, Artificial Sequence
  Description of Artificial Sequence: Synthetic oligonucleotide
  Antisense Strand to SEQ ID NO: 392917
ucauuacagauaagccuag

SEQ ID NO: 392919 - RNA, 19 nt, Artificial Sequence
  Description of Artificial Sequence: Synthetic oligonucleotide
  Sense Strand Starting at position 944 of SEQ ID NO: 318167
uaggcuuaucuguaaugag

SEQ ID NO: 392920 - RNA, 19 nt, Artificial Sequence
  Description of Artificial Sequence: Synthetic oligonucleotide
  Antisense Strand to SEQ ID NO: 392919
cucauuacagauaagccua

SEQ ID NO: 392921 - RNA, 19 nt, Artificial Sequence
  Description of Artificial Sequence: Synthetic oligonucleotide
  Sense Strand Starting at position 944 of SEQ ID NO: 318208
agaagaucuuuaucgcuua

SEQ ID NO: 392922 - RNA, 19 nt, Artificial Sequence
  Description of Artificial Sequence: Synthetic oligonucleotide
  Antisense Strand to SEQ ID NO: 392921
uaagcgauaaagaucuucu

SEQ ID NO: 392923 - RNA, 19 nt, Artificial Sequence
  Description of Artificial Sequence: Synthetic oligonucleotide
  Sense Strand Starting at position 944 of SEQ ID NO: 318211
agaucuuuaucgcuuagac

SEQ ID NO: 392924 - RNA, 19 nt, Artificial Sequence
  Description of Artificial Sequence: Synthetic oligonucleotide
  Antisense Strand to SEQ ID NO: 392923
gucuaagcgauaaagaucu

SEQ ID NO: 392925 - RNA, 19 nt, Artificial Sequence
  Description of Artificial Sequence: Synthetic oligonucleotide
  Sense Strand Starting at position 944 of SEQ ID NO: 318213
aucuuuaucgcuuagacuu

SEQ ID NO: 392926 - RNA, 19 nt, Artificial Sequence
  Description of Artificial Sequence: Synthetic oligonucleotide
  Antisense Strand to SEQ ID NO: 392925
aagucuaagcgauaaagau

SEQ ID NO: 392927 - RNA, 19 nt, Artificial Sequence
  Description of Artificial Sequence: Synthetic oligonucleotide
  Sense Strand Starting at position 944 of SEQ ID NO: 318282
cgggcuuucgaguaaaugu

SEQ ID NO: 392928 - RNA, 19 nt, Artificial Sequence
  Description of Artificial Sequence: Synthetic oligonucleotide
  Antisense Strand to SEQ ID NO: 392927
acauuuacucgaaagcccg

SEQ ID NO: 392929 - RNA, 19 nt, Artificial Sequence
  Description of Artificial Sequence: Synthetic oligonucleotide
  Sense Strand Starting at position 944 of SEQ ID NO: 318290
cgaguaaauguguaacuga

SEQ ID NO: 392930 - RNA, 19 nt, Artificial Sequence
  Description of Artificial Sequence: Synthetic oligonucleotide
  Antisense Strand to SEQ ID NO: 392929
ucaguuacacauuuacucg

SEQ ID NO: 392931 - RNA, 19 nt, Artificial Sequence
  Description of Artificial Sequence: Synthetic oligonucleotide
  Sense Strand Starting at position 944 of SEQ ID NO: 318299
guguaacugagccaaggua

SEQ ID NO: 392932 - RNA, 19 nt, Artificial Sequence
  Description of Artificial Sequence: Synthetic oligonucleotide
  Antisense Strand to SEQ ID NO: 392931
uaccuuggcucaguuacac

SEQ ID NO: 392933 - RNA, 19 nt, Artificial Sequence
  Description of Artificial Sequence: Synthetic oligonucleotide
  Sense Strand Starting at position 944 of SEQ ID NO: 318316
uaauuagccguuugacauu

SEQ ID NO: 392934 - RNA, 19 nt, Artificial Sequence
  Description of Artificial Sequence: Synthetic oligonucleotide
  Antisense Strand to SEQ ID NO: 392933
aaugucaaacggcuaauua

SEQ ID NO: 392935 - RNA, 19 nt, Artificial Sequence
  Description of Artificial Sequence: Synthetic oligonucleotide
  Sense Strand Starting at position 944 of SEQ ID NO: 318730
aaacgugucccugcuguuu

SEQ ID NO: 392936 - RNA, 19 nt, Artificial Sequence
  Description of Artificial Sequence: Synthetic oligonucleotide
  Antisense Strand to SEQ ID NO: 392935
aaacagcagggacacguuu

SEQ ID NO: 392937 - RNA, 19 nt, Artificial Sequence
  Description of Artificial Sequence: Synthetic oligonucleotide
  Sense Strand Starting at position 944 of SEQ ID NO: 318815
aguacagauggucggagau

SEQ ID NO: 392938 - RNA, 19 nt, Artificial Sequence
  Description of Artificial Sequence: Synthetic oligonucleotide
  Antisense Strand to SEQ ID NO: 392937
aucuccgaccaucuguacu

SEQ ID NO: 392939 - RNA, 19 nt, Artificial Sequence
  Description of Artificial Sequence: Synthetic oligonucleotide
  Sense Strand Starting at position 944 of SEQ ID NO: 318840
guucgaugugauuaaggaa

SEQ ID NO: 392940 - RNA, 19 nt, Artificial Sequence
  Description of Artificial Sequence: Synthetic oligonucleotide
  Antisense Strand to SEQ ID NO: 392939
uuccuuaaucacaucgaac

SEQ ID NO: 392941 - RNA, 19 nt, Artificial Sequence
  Description of Artificial Sequence: Synthetic oligonucleotide
  Sense Strand Starting at position 944 of SEQ ID NO: 318957
gcucuaucuuuagcagaac

SEQ ID NO: 392942 - RNA, 19 nt, Artificial Sequence
  Description of Artificial Sequence: Synthetic oligonucleotide
  Antisense Strand to SEQ ID NO: 392941
guucugcuaaagauagagc

SEQ ID NO: 392943 - RNA, 19 nt, Artificial Sequence
  Description of Artificial Sequence: Synthetic oligonucleotide
  Sense Strand Starting at position 944 of SEQ ID NO: 319013
gaguuuguuugcuuuggaa

SEQ ID NO: 392944 - RNA, 19 nt, Artificial Sequence
  Description of Artificial Sequence: Synthetic oligonucleotide
  Antisense Strand to SEQ ID NO: 392943
uuccaaagcaaacaaacuc

SEQ ID NO: 392945 - RNA, 19 nt, Artificial Sequence
  Description of Artificial Sequence: Synthetic oligonucleotide
  Sense Strand Starting at position 944 of SEQ ID NO: 319052
uuggaauccugacuucuuu

SEQ ID NO: 392946 - RNA, 19 nt, Artificial Sequence
  Description of Artificial Sequence: Synthetic oligonucleotide
  Antisense Strand to SEQ ID NO: 392945
aaagaagucaggauuccaa

SEQ ID NO: 392947 - RNA, 19 nt, Artificial Sequence
  Description of Artificial Sequence: Synthetic oligonucleotide
  Sense Strand Starting at position 944 of SEQ ID NO: 319073
aaaggauugcgagggccau

SEQ ID NO: 392948 - RNA, 19 nt, Artificial Sequence
  Description of Artificial Sequence: Synthetic oligonucleotide
  Antisense Strand to SEQ ID NO: 392947
auggcccucgcaauccuuu

SEQ ID NO: 392949 - RNA, 19 nt, Artificial Sequence
  Description of Artificial Sequence: Synthetic oligonucleotide
  Sense Strand Starting at position 944 of SEQ ID NO: 319101
aaguguuguaaugagggau

SEQ ID NO: 392950 - RNA, 19 nt, Artificial Sequence
  Description of Artificial Sequence: Synthetic oligonucleotide
  Antisense Strand to SEQ ID NO: 392949
aucccucauuacaacacuu

SEQ ID NO: 392951 - RNA, 19 nt, Artificial Sequence
  Description of Artificial Sequence: Synthetic oligonucleotide
  Sense Strand Starting at position 944 of SEQ ID NO: 319104
uguuguaaugagggauauu

SEQ ID NO: 392952 - RNA, 19 nt, Artificial Sequence
  Description of Artificial Sequence: Synthetic oligonucleotide
  Antisense Strand to SEQ ID NO: 392951
aauaucccucauuacaaca

SEQ ID NO: 392953 - RNA, 19 nt, Artificial Sequence
  Description of Artificial Sequence: Synthetic oligonucleotide
  Sense Strand Starting at position 944 of SEQ ID NO: 319105
guuguaaugagggauauuc

SEQ ID NO: 392954 - RNA, 19 nt, Artificial Sequence
  Description of Artificial Sequence: Synthetic oligonucleotide
  Antisense Strand to SEQ ID NO: 392953
gaauaucccucauuacaac

SEQ ID NO: 392955 - RNA, 19 nt, Artificial Sequence
  Description of Artificial Sequence: Synthetic oligonucleotide
  Sense Strand Starting at position 944 of SEQ ID NO: 319113
gagggauauucguuccuca

SEQ ID NO: 392956 - RNA, 19 nt, Artificial Sequence
  Description of Artificial Sequence: Synthetic oligonucleotide
  Antisense Strand to SEQ ID NO: 392955
ugaggaacgaauaucccuc

SEQ ID NO: 392957 - RNA, 19 nt, Artificial Sequence
  Description of Artificial Sequence: Synthetic oligonucleotide
  Sense Strand Starting at position 944 of SEQ ID NO: 319116
ggauauucguuccucaagu

SEQ ID NO: 392958 - RNA, 19 nt, Artificial Sequence
  Description of Artificial Sequence: Synthetic oligonucleotide
  Antisense Strand to SEQ ID NO: 392957
acuugaggaacgaauaucc

SEQ ID NO: 392959 - RNA, 19 nt, Artificial Sequence
  Description of Artificial Sequence: Synthetic oligonucleotide
  Sense Strand Starting at position 944 of SEQ ID NO: 319117
gauauucguuccucaaguu

SEQ ID NO: 392960 - RNA, 19 nt, Artificial Sequence
  Description of Artificial Sequence: Synthetic oligonucleotide
  Antisense Strand to SEQ ID NO: 392959
aacuugaggaacgaauauc

SEQ ID NO: 392961 - RNA, 19 nt, Artificial Sequence
  Description of Artificial Sequence: Synthetic oligonucleotide
  Sense Strand Starting at position 944 of SEQ ID NO: 319118
auauucguuccucaaguua

SEQ ID NO: 392962 - RNA, 19 nt, Artificial Sequence
  Description of Artificial Sequence: Synthetic oligonucleotide
  Antisense Strand to SEQ ID NO: 392961
uaacuugaggaacgaauau

SEQ ID NO: 392963 - RNA, 19 nt, Artificial Sequence
  Description of Artificial Sequence: Synthetic oligonucleotide
  Sense Strand Starting at position 944 of SEQ ID NO: 319161
cuucuuaaugucgagugau

SEQ ID NO: 392964 - RNA, 19 nt, Artificial Sequence
  Description of Artificial Sequence: Synthetic oligonucleotide
  Antisense Strand to SEQ ID NO: 392963
aucacucgacauuaagaag

SEQ ID NO: 392965 - RNA, 19 nt, Artificial Sequence
  Description of Artificial Sequence: Synthetic oligonucleotide
  Sense Strand Starting at position 944 of SEQ ID NO: 319164
cuuaaugucgagugauaaa

SEQ ID NO: 392966 - RNA, 19 nt, Artificial Sequence
  Description of Artificial Sequence: Synthetic oligonucleotide
  Antisense Strand to SEQ ID NO: 392965
uuuaucacucgacauuaag

SEQ ID NO: 392967 - RNA, 19 nt, Artificial Sequence
  Description of Artificial Sequence: Synthetic oligonucleotide
  Sense Strand Starting at position 945 of SEQ ID NO: 315290
acccaugucuguuuggaga

SEQ ID NO: 392968 - RNA, 19 nt, Artificial Sequence
  Description of Artificial Sequence: Synthetic oligonucleotide
  Antisense Strand to SEQ ID NO: 392967
ucuccaaacagacaugggu

SEQ ID NO: 392969 - RNA, 19 nt, Artificial Sequence
  Description of Artificial Sequence: Synthetic oligonucleotide
  Sense Strand Starting at position 945 of SEQ ID NO: 315313
uggagugucacaugggacu

SEQ ID NO: 392970 - RNA, 19 nt, Artificial Sequence
  Description of Artificial Sequence: Synthetic oligonucleotide
  Antisense Strand to SEQ ID NO: 392969
agucccaugugacacucca

SEQ ID NO: 392971 - RNA, 19 nt, Artificial Sequence
  Description of Artificial Sequence: Synthetic oligonucleotide
  Sense Strand Starting at position 945 of SEQ ID NO: 315315
gagugucacaugggacuuu

SEQ ID NO: 392972 - RNA, 19 nt, Artificial Sequence
  Description of Artificial Sequence: Synthetic oligonucleotide
  Antisense Strand to SEQ ID NO: 392971
aaagucccaugugacacuc

SEQ ID NO: 392973 - RNA, 19 nt, Artificial Sequence
  Description of Artificial Sequence: Synthetic oligonucleotide
  Sense Strand Starting at position 945 of SEQ ID NO: 315526
gaagaauuccgcugacccu

SEQ ID NO: 392974 - RNA, 19 nt, Artificial Sequence
  Description of Artificial Sequence: Synthetic oligonucleotide
  Antisense Strand to SEQ ID NO: 392973
agggucagcggaauucuuc

SEQ ID NO: 392975 - RNA, 19 nt, Artificial Sequence
  Description of Artificial Sequence: Synthetic oligonucleotide
  Sense Strand Starting at position 945 of SEQ ID NO: 315550
agauuagcuuuagccucaa

SEQ ID NO: 392976 - RNA, 19 nt, Artificial Sequence
  Description of Artificial Sequence: Synthetic oligonucleotide
  Antisense Strand to SEQ ID NO: 392975
uugaggcuaaagcuaaucu

SEQ ID NO: 392977 - RNA, 19 nt, Artificial Sequence
  Description of Artificial Sequence: Synthetic oligonucleotide
  Sense Strand Starting at position 945 of SEQ ID NO: 315565
ucaaguuucuugcugagaa

SEQ ID NO: 392978 - RNA, 19 nt, Artificial Sequence
  Description of Artificial Sequence: Synthetic oligonucleotide
  Antisense Strand to SEQ ID NO: 392977
uucucagcaagaaacuuga

SEQ ID NO: 392979 - RNA, 19 nt, Artificial Sequence
  Description of Artificial Sequence: Synthetic oligonucleotide
  Sense Strand Starting at position 945 of SEQ ID NO: 315567
aaguuucuugcugagaaug

SEQ ID NO: 392980 - RNA, 19 nt, Artificial Sequence
  Description of Artificial Sequence: Synthetic oligonucleotide
  Antisense Strand to SEQ ID NO: 392979
cauucucagcaagaaacuu

SEQ ID NO: 392981 - RNA, 19 nt, Artificial Sequence
  Description of Artificial Sequence: Synthetic oligonucleotide
  Sense Strand Starting at position 945 of SEQ ID NO: 315638
uagccugggcccugaaaua

SEQ ID NO: 392982 - RNA, 19 nt, Artificial Sequence
  Description of Artificial Sequence: Synthetic oligonucleotide
  Antisense Strand to SEQ ID NO: 392981
uauuucagggcccaggcua

SEQ ID NO: 392983 - RNA, 19 nt, Artificial Sequence
  Description of Artificial Sequence: Synthetic oligonucleotide
  Sense Strand Starting at position 945 of SEQ ID NO: 315648
ccugaaauagugcgggaaa

SEQ ID NO: 392984 - RNA, 19 nt, Artificial Sequence
  Description of Artificial Sequence: Synthetic oligonucleotide
  Antisense Strand to SEQ ID NO: 392983
uuucccgcacuauuucagg

SEQ ID NO: 392985 - RNA, 19 nt, Artificial Sequence
  Description of Artificial Sequence: Synthetic oligonucleotide
  Sense Strand Starting at position 945 of SEQ ID NO: 315709
cguggaaaucccuaacgga

SEQ ID NO: 392986 - RNA, 19 nt, Artificial Sequence
  Description of Artificial Sequence: Synthetic oligonucleotide
  Antisense Strand to SEQ ID NO: 392985
uccguuagggauuuccacg

SEQ ID NO: 392987 - RNA, 19 nt, Artificial Sequence
  Description of Artificial Sequence: Synthetic oligonucleotide
  Sense Strand Starting at position 945 of SEQ ID NO: 315832
ugugaugguuaccuccaca

SEQ ID NO: 392988 - RNA, 19 nt, Artificial Sequence
  Description of Artificial Sequence: Synthetic oligonucleotide
  Antisense Strand to SEQ ID NO: 392987
uguggagguaaccaucaca

SEQ ID NO: 392989 - RNA, 19 nt, Artificial Sequence
  Description of Artificial Sequence: Synthetic oligonucleotide
  Sense Strand Starting at position 945 of SEQ ID NO: 315863
gcuccuuaggacugaggaa

SEQ ID NO: 392990 - RNA, 19 nt, Artificial Sequence
  Description of Artificial Sequence: Synthetic oligonucleotide
  Antisense Strand to SEQ ID NO: 392989
uuccucaguccuaaggagc

SEQ ID NO: 392991 - RNA, 19 nt, Artificial Sequence
  Description of Artificial Sequence: Synthetic oligonucleotide
  Sense Strand Starting at position 945 of SEQ ID NO: 316658
gcauguaaaugucucagaa

SEQ ID NO: 392992 - RNA, 19 nt, Artificial Sequence
  Description of Artificial Sequence: Synthetic oligonucleotide
  Antisense Strand to SEQ ID NO: 392991
uucugagacauuuacaugc

SEQ ID NO: 392993 - RNA, 19 nt, Artificial Sequence
  Description of Artificial Sequence: Synthetic oligonucleotide
  Sense Strand Starting at position 945 of SEQ ID NO: 316709
aguuguacccuaugaaauc

SEQ ID NO: 392994 - RNA, 19 nt, Artificial Sequence
  Description of Artificial Sequence: Synthetic oligonucleotide
  Antisense Strand to SEQ ID NO: 392993
gauuucauaggguacaacu

SEQ ID NO: 392995 - RNA, 19 nt, Artificial Sequence
  Description of Artificial Sequence: Synthetic oligonucleotide
  Sense Strand Starting at position 945 of SEQ ID NO: 316756
uauugacgauuugauauga

SEQ ID NO: 392996 - RNA, 19 nt, Artificial Sequence
  Description of Artificial Sequence: Synthetic oligonucleotide
  Antisense Strand to SEQ ID NO: 392995
ucauaucaaaucgucaaua

SEQ ID NO: 392997 - RNA, 19 nt, Artificial Sequence
  Description of Artificial Sequence: Synthetic oligonucleotide
  Sense Strand Starting at position 945 of SEQ ID NO: 316782
cauuauguacguuacagaa

SEQ ID NO: 392998 - RNA, 19 nt, Artificial Sequence
  Description of Artificial Sequence: Synthetic oligonucleotide
  Antisense Strand to SEQ ID NO: 392997
uucuguaacguacauaaug

SEQ ID NO: 392999 - RNA, 19 nt, Artificial Sequence
  Description of Artificial Sequence: Synthetic oligonucleotide
  Sense Strand Starting at position 945 of SEQ ID NO: 316917
uggauauguagucaggguu

SEQ ID NO: 393000 - RNA, 19 nt, Artificial Sequence
  Description of Artificial Sequence: Synthetic oligonucleotide
  Antisense Strand to SEQ ID NO: 392999
aacccugacuacauaucca

SEQ ID NO: 393001 - RNA, 19 nt, Artificial Sequence
  Description of Artificial Sequence: Synthetic oligonucleotide
  Sense Strand Starting at position 945 of SEQ ID NO: 316923
uguagucaggguuagcaga

SEQ ID NO: 393002 - RNA, 19 nt, Artificial Sequence
  Description of Artificial Sequence: Synthetic oligonucleotide
  Antisense Strand to SEQ ID NO: 393001
ucugcuaacccugacuaca

SEQ ID NO: 393003 - RNA, 19 nt, Artificial Sequence
  Description of Artificial Sequence: Synthetic oligonucleotide
  Sense Strand Starting at position 945 of SEQ ID NO: 317319
guggaaguugcacaauauu

SEQ ID NO: 393004 - RNA, 19 nt, Artificial Sequence
  Description of Artificial Sequence: Synthetic oligonucleotide
  Antisense Strand to SEQ ID NO: 393003
aauauugugcaacuuccac

SEQ ID NO: 393005 - RNA, 19 nt, Artificial Sequence
  Description of Artificial Sequence: Synthetic oligonucleotide
  Sense Strand Starting at position 945 of SEQ ID NO: 317397
gagagaaacugggcuucua

SEQ ID NO: 393006 - RNA, 19 nt, Artificial Sequence
  Description of Artificial Sequence: Synthetic oligonucleotide
  Antisense Strand to SEQ ID NO: 393005
uagaagcccaguuucucuc

SEQ ID NO: 393007 - RNA, 19 nt, Artificial Sequence
  Description of Artificial Sequence: Synthetic oligonucleotide
  Sense Strand Starting at position 945 of SEQ ID NO: 317411
uucuacuguucuccugaga

SEQ ID NO: 393008 - RNA, 19 nt, Artificial Sequence
  Description of Artificial Sequence: Synthetic oligonucleotide
  Antisense Strand to SEQ ID NO: 393007
ucucaggagaacaguagaa

SEQ ID NO: 393009 - RNA, 19 nt, Artificial Sequence
  Description of Artificial Sequence: Synthetic oligonucleotide
  Sense Strand Starting at position 945 of SEQ ID NO: 317434
gcuguuguaauuugaauug

SEQ ID NO: 393010 - RNA, 19 nt, Artificial Sequence
  Description of Artificial Sequence: Synthetic oligonucleotide
  Antisense Strand to SEQ ID NO: 393009
caauucaaauuacaacagc

SEQ ID NO: 393011 - RNA, 19 nt, Artificial Sequence
  Description of Artificial Sequence: Synthetic oligonucleotide
  Sense Strand Starting at position 945 of SEQ ID NO: 317484
ggagaaauuucagagggua

SEQ ID NO: 393012 - RNA, 19 nt, Artificial Sequence
  Description of Artificial Sequence: Synthetic oligonucleotide
  Antisense Strand to SEQ ID NO: 393011
uacccucugaaauuucucc

SEQ ID NO: 393013 - RNA, 19 nt, Artificial Sequence
  Description of Artificial Sequence: Synthetic oligonucleotide
  Sense Strand Starting at position 945 of SEQ ID NO: 317695
ugucuuuaauacuugagga

SEQ ID NO: 393014 - RNA, 19 nt, Artificial Sequence
  Description of Artificial Sequence: Synthetic oligonucleotide
  Antisense Strand to SEQ ID NO: 393013
uccucaaguauuaaagaca

SEQ ID NO: 393015 - RNA, 19 nt, Artificial Sequence
  Description of Artificial Sequence: Synthetic oligonucleotide
  Sense Strand Starting at position 945 of SEQ ID NO: 317696
gucuuuaauacuugaggag

SEQ ID NO: 393016 - RNA, 19 nt, Artificial Sequence
  Description of Artificial Sequence: Synthetic oligonucleotide
  Antisense Strand to SEQ ID NO: 393015
cuccucaaguauuaaagac

SEQ ID NO: 393017 - RNA, 19 nt, Artificial Sequence
  Description of Artificial Sequence: Synthetic oligonucleotide
  Sense Strand Starting at position 945 of SEQ ID NO: 318113
guuauuuagguauguuucu

SEQ ID NO: 393018 - RNA, 19 nt, Artificial Sequence
  Description of Artificial Sequence: Synthetic oligonucleotide
  Antisense Strand to SEQ ID NO: 393017
agaaacauaccuaaauaac

SEQ ID NO: 393019 - RNA, 19 nt, Artificial Sequence
  Description of Artificial Sequence: Synthetic oligonucleotide
  Sense Strand Starting at position 945 of SEQ ID NO: 318142
ugguauuauguggacauua

SEQ ID NO: 393020 - RNA, 19 nt, Artificial Sequence
  Description of Artificial Sequence: Synthetic oligonucleotide
  Antisense Strand to SEQ ID NO: 393019
uaauguccacauaauacca

SEQ ID NO: 393021 - RNA, 19 nt, Artificial Sequence
  Description of Artificial Sequence: Synthetic oligonucleotide
  Sense Strand Starting at position 945 of SEQ ID NO: 318144
guauuauguggacauuaua

SEQ ID NO: 393022 - RNA, 19 nt, Artificial Sequence
  Description of Artificial Sequence: Synthetic oligonucleotide
  Antisense Strand to SEQ ID NO: 393021
uauaauguccacauaauac

SEQ ID NO: 393023 - RNA, 19 nt, Artificial Sequence
  Description of Artificial Sequence: Synthetic oligonucleotide
  Sense Strand Starting at position 945 of SEQ ID NO: 318172
aagguuucgaggcaaggau

SEQ ID NO: 393024 - RNA, 19 nt, Artificial Sequence
  Description of Artificial Sequence: Synthetic oligonucleotide
  Antisense Strand to SEQ ID NO: 393023
auccuugccucgaaaccuu

SEQ ID NO: 393025 - RNA, 19 nt, Artificial Sequence
  Description of Artificial Sequence: Synthetic oligonucleotide
  Sense Strand Starting at position 945 of SEQ ID NO: 318283
augagcucccauuaaagua

SEQ ID NO: 393026 - RNA, 19 nt, Artificial Sequence
  Description of Artificial Sequence: Synthetic oligonucleotide
  Antisense Strand to SEQ ID NO: 393025
uacuuuaaugggagcucau

SEQ ID NO: 393027 - RNA, 19 nt, Artificial Sequence
  Description of Artificial Sequence: Synthetic oligonucleotide
  Sense Strand Starting at position 945 of SEQ ID NO: 318427
uguugaugaccauguggaa

SEQ ID NO: 393028 - RNA, 19 nt, Artificial Sequence
  Description of Artificial Sequence: Synthetic oligonucleotide
  Antisense Strand to SEQ ID NO: 393027
uuccacauggucaucaaca

SEQ ID NO: 393029 - RNA, 19 nt, Artificial Sequence
  Description of Artificial Sequence: Synthetic oligonucleotide
  Sense Strand Starting at position 945 of SEQ ID NO: 318565
guaggaagcaaucaugucu

SEQ ID NO: 393030 - RNA, 19 nt, Artificial Sequence
  Description of Artificial Sequence: Synthetic oligonucleotide
  Antisense Strand to SEQ ID NO: 393029
agacaugauugcuuccuac

SEQ ID NO: 393031 - RNA, 19 nt, Artificial Sequence
  Description of Artificial Sequence: Synthetic oligonucleotide
  Sense Strand Starting at position 945 of SEQ ID NO: 318603
ucccuuugaguuugugaaa

SEQ ID NO: 393032 - RNA, 19 nt, Artificial Sequence
  Description of Artificial Sequence: Synthetic oligonucleotide
  Antisense Strand to SEQ ID NO: 393031
uuucacaaacucaaaggga

SEQ ID NO: 393033 - RNA, 19 nt, Artificial Sequence
  Description of Artificial Sequence: Synthetic oligonucleotide
  Sense Strand Starting at position 945 of SEQ ID NO: 318604
cccuuugaguuugugaaau

SEQ ID NO: 393034 - RNA, 19 nt, Artificial Sequence
  Description of Artificial Sequence: Synthetic oligonucleotide
  Antisense Strand to SEQ ID NO: 393033
auuucacaaacucaaaggg

SEQ ID NO: 393035 - RNA, 19 nt, Artificial Sequence
  Description of Artificial Sequence: Synthetic oligonucleotide
  Sense Strand Starting at position 945 of SEQ ID NO: 318623
ugggccugcccucagauau

SEQ ID NO: 393036 - RNA, 19 nt, Artificial Sequence
  Description of Artificial Sequence: Synthetic oligonucleotide
  Antisense Strand to SEQ ID NO: 393035
auaucugagggcaggccca

SEQ ID NO: 393037 - RNA, 19 nt, Artificial Sequence
  Description of Artificial Sequence: Synthetic oligonucleotide
  Sense Strand Starting at position 945 of SEQ ID NO: 318630
gcccucagauauguuuaga

SEQ ID NO: 393038 - RNA, 19 nt, Artificial Sequence
  Description of Artificial Sequence: Synthetic oligonucleotide
  Antisense Strand to SEQ ID NO: 393037
ucuaaacauaucugagggc

SEQ ID NO: 393039 - RNA, 19 nt, Artificial Sequence
  Description of Artificial Sequence: Synthetic oligonucleotide
  Sense Strand Starting at position 945 of SEQ ID NO: 318661
acuaucugccacugugaaa

SEQ ID NO: 393040 - RNA, 19 nt, Artificial Sequence
  Description of Artificial Sequence: Synthetic oligonucleotide
  Antisense Strand to SEQ ID NO: 393039
uuucacaguggcagauagu

SEQ ID NO: 393041 - RNA, 19 nt, Artificial Sequence
  Description of Artificial Sequence: Synthetic oligonucleotide
  Sense Strand Starting at position 945 of SEQ ID NO: 318975
aagcucaaggcauggauua

SEQ ID NO: 393042 - RNA, 19 nt, Artificial Sequence
  Description of Artificial Sequence: Synthetic oligonucleotide
  Antisense Strand to SEQ ID NO: 393041
uaauccaugccuugagcuu

SEQ ID NO: 393043 - RNA, 19 nt, Artificial Sequence
  Description of Artificial Sequence: Synthetic oligonucleotide
  Sense Strand Starting at position 945 of SEQ ID NO: 318976
agcucaaggcauggauuaa

SEQ ID NO: 393044 - RNA, 19 nt, Artificial Sequence
  Description of Artificial Sequence: Synthetic oligonucleotide
  Antisense Strand to SEQ ID NO: 393043
uuaauccaugccuugagcu

SEQ ID NO: 393045 - RNA, 19 nt, Artificial Sequence
  Description of Artificial Sequence: Synthetic oligonucleotide
  Sense Strand Starting at position 945 of SEQ ID NO: 319162
uuguuauaaguuuaaggac

SEQ ID NO: 393046 - RNA, 19 nt, Artificial Sequence
  Description of Artificial Sequence: Synthetic oligonucleotide
  Antisense Strand to SEQ ID NO: 393045
guccuuaaacuuauaacaa

SEQ ID NO: 393047 - RNA, 19 nt, Artificial Sequence
  Description of Artificial Sequence: Synthetic oligonucleotide
  Sense Strand Starting at position 946 of SEQ ID NO: 315238
ugccucuguggagguauaa

SEQ ID NO: 393048 - RNA, 19 nt, Artificial Sequence
  Description of Artificial Sequence: Synthetic oligonucleotide
  Antisense Strand to SEQ ID NO: 393047
uuauaccuccacagaggca

SEQ ID NO: 393049 - RNA, 19 nt, Artificial Sequence
  Description of Artificial Sequence: Synthetic oligonucleotide
  Sense Strand Starting at position 946 of SEQ ID NO: 315425
uuaagaacuuugucuugga

SEQ ID NO: 393050 - RNA, 19 nt, Artificial Sequence
  Description of Artificial Sequence: Synthetic oligonucleotide
  Antisense Strand to SEQ ID NO: 393049
uccaagacaaaguucuuaa

SEQ ID NO: 393051 - RNA, 19 nt, Artificial Sequence
  Description of Artificial Sequence: Synthetic oligonucleotide
  Sense Strand Starting at position 946 of SEQ ID NO: 315429
gaacuuugucuuggaacca

SEQ ID NO: 393052 - RNA, 19 nt, Artificial Sequence
  Description of Artificial Sequence: Synthetic oligonucleotide
  Antisense Strand to SEQ ID NO: 393051
ugguuccaagacaaaguuc

SEQ ID NO: 393053 - RNA, 19 nt, Artificial Sequence
  Description of Artificial Sequence: Synthetic oligonucleotide
  Sense Strand Starting at position 946 of SEQ ID NO: 315468
acagaaacagcguacaauu

SEQ ID NO: 393054 - RNA, 19 nt, Artificial Sequence
  Description of Artificial Sequence: Synthetic oligonucleotide
  Antisense Strand to SEQ ID NO: 393053
aauuguacgcuguuucugu

SEQ ID NO: 393055 - RNA, 19 nt, Artificial Sequence
  Description of Artificial Sequence: Synthetic oligonucleotide
  Sense Strand Starting at position 946 of SEQ ID NO: 315505
auacuauacucuguguaaa

SEQ ID NO: 393056 - RNA, 19 nt, Artificial Sequence
  Description of Artificial Sequence: Synthetic oligonucleotide
  Antisense Strand to SEQ ID NO: 393055
uuuacacagaguauaguau

SEQ ID NO: 393057 - RNA, 19 nt, Artificial Sequence
  Description of Artificial Sequence: Synthetic oligonucleotide
  Sense Strand Starting at position 946 of SEQ ID NO: 315507
acuauacucuguguaaauc

SEQ ID NO: 393058 - RNA, 19 nt, Artificial Sequence
  Description of Artificial Sequence: Synthetic oligonucleotide
  Antisense Strand to SEQ ID NO: 393057
gauuuacacagaguauagu

SEQ ID NO: 393059 - RNA, 19 nt, Artificial Sequence
  Description of Artificial Sequence: Synthetic oligonucleotide
  Sense Strand Starting at position 946 of SEQ ID NO: 315508
cuauacucuguguaaauca

SEQ ID NO: 393060 - RNA, 19 nt, Artificial Sequence
  Description of Artificial Sequence: Synthetic oligonucleotide
  Antisense Strand to SEQ ID NO: 393059
ugauuuacacagaguauag

SEQ ID NO: 393061 - RNA, 19 nt, Artificial Sequence
  Description of Artificial Sequence: Synthetic oligonucleotide
  Sense Strand Starting at position 946 of SEQ ID NO: 315555
gguaaacugucaguggaaa

SEQ ID NO: 393062 - RNA, 19 nt, Artificial Sequence
  Description of Artificial Sequence: Synthetic oligonucleotide
  Antisense Strand to SEQ ID NO: 393061
uuuccacugacaguuuacc

SEQ ID NO: 393063 - RNA, 19 nt, Artificial Sequence
  Description of Artificial Sequence: Synthetic oligonucleotide
  Sense Strand Starting at position 946 of SEQ ID NO: 315556
guaaacugucaguggaaau

SEQ ID NO: 393064 - RNA, 19 nt, Artificial Sequence
  Description of Artificial Sequence: Synthetic oligonucleotide
  Antisense Strand to SEQ ID NO: 393063
auuuccacugacaguuuac

SEQ ID NO: 393065 - RNA, 19 nt, Artificial Sequence
  Description of Artificial Sequence: Synthetic oligonucleotide
  Sense Strand Starting at position 946 of SEQ ID NO: 315568
uggaaauucucagcccaga

SEQ ID NO: 393066 - RNA, 19 nt, Artificial Sequence
  Description of Artificial Sequence: Synthetic oligonucleotide
  Antisense Strand to SEQ ID NO: 393065
ucugggcugagaauuucca

SEQ ID NO: 393067 - RNA, 19 nt, Artificial Sequence
  Description of Artificial Sequence: Synthetic oligonucleotide
  Sense Strand Starting at position 946 of SEQ ID NO: 315689
ucaagaaaugugcacacau

SEQ ID NO: 393068 - RNA, 19 nt, Artificial Sequence
  Description of Artificial Sequence: Synthetic oligonucleotide
  Antisense Strand to SEQ ID NO: 393067
augugugcacauuucuuga

SEQ ID NO: 393069 - RNA, 19 nt, Artificial Sequence
  Description of Artificial Sequence: Synthetic oligonucleotide
  Sense Strand Starting at position 946 of SEQ ID NO: 315926
auuucucuugcaugaggca

SEQ ID NO: 393070 - RNA, 19 nt, Artificial Sequence
  Description of Artificial Sequence: Synthetic oligonucleotide
  Antisense Strand to SEQ ID NO: 393069
ugccucaugcaagagaaau

SEQ ID NO: 393071 - RNA, 19 nt, Artificial Sequence
  Description of Artificial Sequence: Synthetic oligonucleotide
  Sense Strand Starting at position 946 of SEQ ID NO: 315988
aggcuucuagucuggcaua

SEQ ID NO: 393072 - RNA, 19 nt, Artificial Sequence
  Description of Artificial Sequence: Synthetic oligonucleotide
  Antisense Strand to SEQ ID NO: 393071
uaugccagacuagaagccu

SEQ ID NO: 393073 - RNA, 19 nt, Artificial Sequence
  Description of Artificial Sequence: Synthetic oligonucleotide
  Sense Strand Starting at position 946 of SEQ ID NO: 315999
cuggcauaccugggaagaa

SEQ ID NO: 393074 - RNA, 19 nt, Artificial Sequence
  Description of Artificial Sequence: Synthetic oligonucleotide
  Antisense Strand to SEQ ID NO: 393073
uucuucccagguaugccag

SEQ ID NO: 393075 - RNA, 19 nt, Artificial Sequence
  Description of Artificial Sequence: Synthetic oligonucleotide
  Sense Strand Starting at position 946 of SEQ ID NO: 316000
uggcauaccugggaagaaa

SEQ ID NO: 393076 - RNA, 19 nt, Artificial Sequence
  Description of Artificial Sequence: Synthetic oligonucleotide
  Antisense Strand to SEQ ID NO: 393075
uuucuucccagguaugcca

SEQ ID NO: 393077 - RNA, 19 nt, Artificial Sequence
  Description of Artificial Sequence: Synthetic oligonucleotide
  Sense Strand Starting at position 946 of SEQ ID NO: 316033
ucccaaauaugacaggaaa

SEQ ID NO: 393078 - RNA, 19 nt, Artificial Sequence
  Description of Artificial Sequence: Synthetic oligonucleotide
  Antisense Strand to SEQ ID NO: 393077
uuuccugucauauuuggga

SEQ ID NO: 393079 - RNA, 19 nt, Artificial Sequence
  Description of Artificial Sequence: Synthetic oligonucleotide
  Sense Strand Starting at position 946 of SEQ ID NO: 316121
gcacacaguccaugaaauc

SEQ ID NO: 393080 - RNA, 19 nt, Artificial Sequence
  Description of Artificial Sequence: Synthetic oligonucleotide
  Antisense Strand to SEQ ID NO: 393079
gauuucauggacugugugc

SEQ ID NO: 393081 - RNA, 19 nt, Artificial Sequence
  Description of Artificial Sequence: Synthetic oligonucleotide
  Sense Strand Starting at position 946 of SEQ ID NO: 316138
ucagguauuuaacacguaa

SEQ ID NO: 393082 - RNA, 19 nt, Artificial Sequence
  Description of Artificial Sequence: Synthetic oligonucleotide
  Antisense Strand to SEQ ID NO: 393081
uuacguguuaaauaccuga

SEQ ID NO: 393083 - RNA, 19 nt, Artificial Sequence
  Description of Artificial Sequence: Synthetic oligonucleotide
  Sense Strand Starting at position 946 of SEQ ID NO: 316354
guggaaggccaugagaagu

SEQ ID NO: 393084 - RNA, 19 nt, Artificial Sequence
  Description of Artificial Sequence: Synthetic oligonucleotide
  Antisense Strand to SEQ ID NO: 393083
acuucucauggccuuccac

SEQ ID NO: 393085 - RNA, 19 nt, Artificial Sequence
  Description of Artificial Sequence: Synthetic oligonucleotide
  Sense Strand Starting at position 946 of SEQ ID NO: 316409
uaggguuucugggcucaca

SEQ ID NO: 393086 - RNA, 19 nt, Artificial Sequence
  Description of Artificial Sequence: Synthetic oligonucleotide
  Antisense Strand to SEQ ID NO: 393085
ugugagcccagaaacccua

SEQ ID NO: 393087 - RNA, 19 nt, Artificial Sequence
  Description of Artificial Sequence: Synthetic oligonucleotide
  Sense Strand Starting at position 946 of SEQ ID NO: 316481
cuacgaggguucccagaga

SEQ ID NO: 393088 - RNA, 19 nt, Artificial Sequence
  Description of Artificial Sequence: Synthetic oligonucleotide
  Antisense Strand to SEQ ID NO: 393087
ucucugggaacccucguag

SEQ ID NO: 393089 - RNA, 19 nt, Artificial Sequence
  Description of Artificial Sequence: Synthetic oligonucleotide
  Sense Strand Starting at position 946 of SEQ ID NO: 317234
cgucgaacuccugggaacu

SEQ ID NO: 393090 - RNA, 19 nt, Artificial Sequence
  Description of Artificial Sequence: Synthetic oligonucleotide
  Antisense Strand to SEQ ID NO: 393089
aguucccaggaguucgacg

SEQ ID NO: 393091 - RNA, 19 nt, Artificial Sequence
  Description of Artificial Sequence: Synthetic oligonucleotide
  Sense Strand Starting at position 946 of SEQ ID NO: 317454
ggguuucucccacagcaga

SEQ ID NO: 393092 - RNA, 19 nt, Artificial Sequence
  Description of Artificial Sequence: Synthetic oligonucleotide
  Antisense Strand to SEQ ID NO: 393091
ucugcugugggagaaaccc

SEQ ID NO: 393093 - RNA, 19 nt, Artificial Sequence
  Description of Artificial Sequence: Synthetic oligonucleotide
  Sense Strand Starting at position 946 of SEQ ID NO: 317750
aaagguuccuguguaggaa

SEQ ID NO: 393094 - RNA, 19 nt, Artificial Sequence
  Description of Artificial Sequence: Synthetic oligonucleotide
  Antisense Strand to SEQ ID NO: 393093
uuccuacacaggaaccuuu

SEQ ID NO: 393095 - RNA, 19 nt, Artificial Sequence
  Description of Artificial Sequence: Synthetic oligonucleotide
  Sense Strand Starting at position 946 of SEQ ID NO: 317965
gagggcagcuugguagaau

SEQ ID NO: 393096 - RNA, 19 nt, Artificial Sequence
  Description of Artificial Sequence: Synthetic oligonucleotide
  Antisense Strand to SEQ ID NO: 393095
auucuaccaagcugcccuc

SEQ ID NO: 393097 - RNA, 19 nt, Artificial Sequence
  Description of Artificial Sequence: Synthetic oligonucleotide
  Sense Strand Starting at position 946 of SEQ ID NO: 318015
ucagaagguuugcuuucuu

SEQ ID NO: 393098 - RNA, 19 nt, Artificial Sequence
  Description of Artificial Sequence: Synthetic oligonucleotide
  Antisense Strand to SEQ ID NO: 393097
aagaaagcaaaccuucuga

SEQ ID NO: 393099 - RNA, 19 nt, Artificial Sequence
  Description of Artificial Sequence: Synthetic oligonucleotide
  Sense Strand Starting at position 946 of SEQ ID NO: 318207
aggcgaccucgggaaguau

SEQ ID NO: 393100 - RNA, 19 nt, Artificial Sequence
  Description of Artificial Sequence: Synthetic oligonucleotide
  Antisense Strand to SEQ ID NO: 393099
auacuucccgaggucgccu

SEQ ID NO: 393101 - RNA, 19 nt, Artificial Sequence
  Description of Artificial Sequence: Synthetic oligonucleotide
  Sense Strand Starting at position 946 of SEQ ID NO: 318225
uuaaacauuugcccguaua

SEQ ID NO: 393102 - RNA, 19 nt, Artificial Sequence
  Description of Artificial Sequence: Synthetic oligonucleotide
  Antisense Strand to SEQ ID NO: 393101
uauacgggcaaauguuuaa

SEQ ID NO: 393103 - RNA, 19 nt, Artificial Sequence
  Description of Artificial Sequence: Synthetic oligonucleotide
  Sense Strand Starting at position 946 of SEQ ID NO: 318475
uccugucaucuccacgaga

SEQ ID NO: 393104 - RNA, 19 nt, Artificial Sequence
  Description of Artificial Sequence: Synthetic oligonucleotide
  Antisense Strand to SEQ ID NO: 393103
ucucguggagaugacagga

SEQ ID NO: 393105 - RNA, 19 nt, Artificial Sequence
  Description of Artificial Sequence: Synthetic oligonucleotide
  Sense Strand Starting at position 946 of SEQ ID NO: 318477
cugucaucuccacgagaua

SEQ ID NO: 393106 - RNA, 19 nt, Artificial Sequence
  Description of Artificial Sequence: Synthetic oligonucleotide
  Antisense Strand to SEQ ID NO: 393105
uaucucguggagaugacag

SEQ ID NO: 393107 - RNA, 19 nt, Artificial Sequence
  Description of Artificial Sequence: Synthetic oligonucleotide
  Sense Strand Starting at position 946 of SEQ ID NO: 318478
ugucaucuccacgagauag

SEQ ID NO: 393108 - RNA, 19 nt, Artificial Sequence
  Description of Artificial Sequence: Synthetic oligonucleotide
  Antisense Strand to SEQ ID NO: 393107
cuaucucguggagaugaca

SEQ ID NO: 393109 - RNA, 19 nt, Artificial Sequence
  Description of Artificial Sequence: Synthetic oligonucleotide
  Sense Strand Starting at position 946 of SEQ ID NO: 318488
acgagauagccauaaaugu

SEQ ID NO: 393110 - RNA, 19 nt, Artificial Sequence
  Description of Artificial Sequence: Synthetic oligonucleotide
  Antisense Strand to SEQ ID NO: 393109
acauuuauggcuaucucgu

SEQ ID NO: 393111 - RNA, 19 nt, Artificial Sequence
  Description of Artificial Sequence: Synthetic oligonucleotide
  Sense Strand Starting at position 946 of SEQ ID NO: 318497
ccauaaauguguuccagua

SEQ ID NO: 393112 - RNA, 19 nt, Artificial Sequence
  Description of Artificial Sequence: Synthetic oligonucleotide
  Antisense Strand to SEQ ID NO: 393111
uacuggaacacauuuaugg

SEQ ID NO: 393113 - RNA, 19 nt, Artificial Sequence
  Description of Artificial Sequence: Synthetic oligonucleotide
  Sense Strand Starting at position 946 of SEQ ID NO: 318642
gcuggauuacaaggcuuua

SEQ ID NO: 393114 - RNA, 19 nt, Artificial Sequence
  Description of Artificial Sequence: Synthetic oligonucleotide
  Antisense Strand to SEQ ID NO: 393113
uaaagccuuguaauccagc

SEQ ID NO: 393115 - RNA, 19 nt, Artificial Sequence
  Description of Artificial Sequence: Synthetic oligonucleotide
  Sense Strand Starting at position 946 of SEQ ID NO: 318869
agaugcacuuaugaauaaa

SEQ ID NO: 393116 - RNA, 19 nt, Artificial Sequence
  Description of Artificial Sequence: Synthetic oligonucleotide
  Antisense Strand to SEQ ID NO: 393115
uuuauucauaagugcaucu

SEQ ID NO: 393117 - RNA, 19 nt, Artificial Sequence
  Description of Artificial Sequence: Synthetic oligonucleotide
  Sense Strand Starting at position 946 of SEQ ID NO: 318918
ugaugaugaucauaauuga

SEQ ID NO: 393118 - RNA, 19 nt, Artificial Sequence
  Description of Artificial Sequence: Synthetic oligonucleotide
  Antisense Strand to SEQ ID NO: 393117
ucaauuaugaucaucauca

SEQ ID NO: 393119 - RNA, 19 nt, Artificial Sequence
  Description of Artificial Sequence: Synthetic oligonucleotide
  Sense Strand Starting at position 946 of SEQ ID NO: 318978
caccguuucccuugagaaa

SEQ ID NO: 393120 - RNA, 19 nt, Artificial Sequence
  Description of Artificial Sequence: Synthetic oligonucleotide
  Antisense Strand to SEQ ID NO: 393119
uuucucaagggaaacggug

SEQ ID NO: 393121 - RNA, 19 nt, Artificial Sequence
  Description of Artificial Sequence: Synthetic oligonucleotide
  Sense Strand Starting at position 946 of SEQ ID NO: 319071
agcuaauuaucuguuuaga

SEQ ID NO: 393122 - RNA, 19 nt, Artificial Sequence
  Description of Artificial Sequence: Synthetic oligonucleotide
  Antisense Strand to SEQ ID NO: 393121
ucuaaacagauaauuagcu

SEQ ID NO: 393123 - RNA, 19 nt, Artificial Sequence
  Description of Artificial Sequence: Synthetic oligonucleotide
  Sense Strand Starting at position 946 of SEQ ID NO: 319104
guuguugagacucaguuaa

SEQ ID NO: 393124 - RNA, 19 nt, Artificial Sequence
  Description of Artificial Sequence: Synthetic oligonucleotide
  Antisense Strand to SEQ ID NO: 393123
uuaacugagucucaacaac

SEQ ID NO: 393125 - RNA, 19 nt, Artificial Sequence
  Description of Artificial Sequence: Synthetic oligonucleotide
  Sense Strand Starting at position 946 of SEQ ID NO: 319106
uguugagacucaguuaaau

SEQ ID NO: 393126 - RNA, 19 nt, Artificial Sequence
  Description of Artificial Sequence: Synthetic oligonucleotide
  Antisense Strand to SEQ ID NO: 393125
auuuaacugagucucaaca

SEQ ID NO: 393127 - RNA, 19 nt, Artificial Sequence
  Description of Artificial Sequence: Synthetic oligonucleotide
  Sense Strand Starting at position 947 of SEQ ID NO: 315269
cacaaauuaggguguuaua

SEQ ID NO: 393128 - RNA, 19 nt, Artificial Sequence
  Description of Artificial Sequence: Synthetic oligonucleotide
  Antisense Strand to SEQ ID NO: 393127
uauaacacccuaauuugug

SEQ ID NO: 393129 - RNA, 19 nt, Artificial Sequence
  Description of Artificial Sequence: Synthetic oligonucleotide
  Sense Strand Starting at position 947 of SEQ ID NO: 315280
guguuauaacacuauaagc

SEQ ID NO: 393130 - RNA, 19 nt, Artificial Sequence
  Description of Artificial Sequence: Synthetic oligonucleotide
  Antisense Strand to SEQ ID NO: 393129
gcuuauaguguuauaacac

SEQ ID NO: 393131 - RNA, 19 nt, Artificial Sequence
  Description of Artificial Sequence: Synthetic oligonucleotide
  Sense Strand Starting at position 947 of SEQ ID NO: 315303
aaaggaagcuguuuaaaug

SEQ ID NO: 393132 - RNA, 19 nt, Artificial Sequence
  Description of Artificial Sequence: Synthetic oligonucleotide
  Antisense Strand to SEQ ID NO: 393131
cauuuaaacagcuuccuuu

SEQ ID NO: 393133 - RNA, 19 nt, Artificial Sequence
  Description of Artificial Sequence: Synthetic oligonucleotide
  Sense Strand Starting at position 947 of SEQ ID NO: 315312
uguuuaaaugaguagcaca

SEQ ID NO: 393134 - RNA, 19 nt, Artificial Sequence
  Description of Artificial Sequence: Synthetic oligonucleotide
  Antisense Strand to SEQ ID NO: 393133
ugugcuacucauuuaaaca

SEQ ID NO: 393135 - RNA, 19 nt, Artificial Sequence
  Description of Artificial Sequence: Synthetic oligonucleotide
  Sense Strand Starting at position 947 of SEQ ID NO: 315346
agugucuaccucuacaaca

SEQ ID NO: 393136 - RNA, 19 nt, Artificial Sequence
  Description of Artificial Sequence: Synthetic oligonucleotide
  Antisense Strand to SEQ ID NO: 393135
uguuguagagguagacacu

SEQ ID NO: 393137 - RNA, 19 nt, Artificial Sequence
  Description of Artificial Sequence: Synthetic oligonucleotide
  Sense Strand Starting at position 947 of SEQ ID NO: 315414
gccuacacugcuuaaguuu

SEQ ID NO: 393138 - RNA, 19 nt, Artificial Sequence
  Description of Artificial Sequence: Synthetic oligonucleotide
  Antisense Strand to SEQ ID NO: 393137
aaacuuaagcaguguaggc

SEQ ID NO: 393139 - RNA, 19 nt, Artificial Sequence
  Description of Artificial Sequence: Synthetic oligonucleotide
  Sense Strand Starting at position 947 of SEQ ID NO: 315621
uccacagagcuuugccuaa

SEQ ID NO: 393140 - RNA, 19 nt, Artificial Sequence
  Description of Artificial Sequence: Synthetic oligonucleotide
  Antisense Strand to SEQ ID NO: 393139
uuaggcaaagcucugugga

SEQ ID NO: 393141 - RNA, 19 nt, Artificial Sequence
  Description of Artificial Sequence: Synthetic oligonucleotide
  Sense Strand Starting at position 947 of SEQ ID NO: 315647
ugccucuguggagguauaa

SEQ ID NO: 393142 - RNA, 19 nt, Artificial Sequence
  Description of Artificial Sequence: Synthetic oligonucleotide
  Antisense Strand to SEQ ID NO: 393141
uuauaccuccacagaggca

SEQ ID NO: 393143 - RNA, 19 nt, Artificial Sequence
  Description of Artificial Sequence: Synthetic oligonucleotide
  Sense Strand Starting at position 947 of SEQ ID NO: 315834
uuaagaacuuugucuugga

SEQ ID NO: 393144 - RNA, 19 nt, Artificial Sequence
  Description of Artificial Sequence: Synthetic oligonucleotide
  Antisense Strand to SEQ ID NO: 393143
uccaagacaaaguucuuaa

SEQ ID NO: 393145 - RNA, 19 nt, Artificial Sequence
  Description of Artificial Sequence: Synthetic oligonucleotide
  Sense Strand Starting at position 947 of SEQ ID NO: 315838
gaacuuugucuuggaacca

SEQ ID NO: 393146 - RNA, 19 nt, Artificial Sequence
  Description of Artificial Sequence: Synthetic oligonucleotide
  Antisense Strand to SEQ ID NO: 393145
ugguuccaagacaaaguuc

SEQ ID NO: 393147 - RNA, 19 nt, Artificial Sequence
  Description of Artificial Sequence: Synthetic oligonucleotide
  Sense Strand Starting at position 947 of SEQ ID NO: 315877
acagaaacagcguacaauu

SEQ ID NO: 393148 - RNA, 19 nt, Artificial Sequence
  Description of Artificial Sequence: Synthetic oligonucleotide
  Antisense Strand to SEQ ID NO: 393147
aauuguacgcuguuucugu

SEQ ID NO: 393149 - RNA, 19 nt, Artificial Sequence
  Description of Artificial Sequence: Synthetic oligonucleotide
  Sense Strand Starting at position 947 of SEQ ID NO: 315914
auacuauacucuguguaaa

SEQ ID NO: 393150 - RNA, 19 nt, Artificial Sequence
  Description of Artificial Sequence: Synthetic oligonucleotide
  Antisense Strand to SEQ ID NO: 393149
uuuacacagaguauaguau

SEQ ID NO: 393151 - RNA, 19 nt, Artificial Sequence
  Description of Artificial Sequence: Synthetic oligonucleotide
  Sense Strand Starting at position 947 of SEQ ID NO: 315916
acuauacucuguguaaauc

SEQ ID NO: 393152 - RNA, 19 nt, Artificial Sequence
  Description of Artificial Sequence: Synthetic oligonucleotide
  Antisense Strand to SEQ ID NO: 393151
gauuuacacagaguauagu

SEQ ID NO: 393153 - RNA, 19 nt, Artificial Sequence
  Description of Artificial Sequence: Synthetic oligonucleotide
  Sense Strand Starting at position 947 of SEQ ID NO: 315917
cuauacucuguguaaauca

SEQ ID NO: 393154 - RNA, 19 nt, Artificial Sequence
  Description of Artificial Sequence: Synthetic oligonucleotide
  Antisense Strand to SEQ ID NO: 393153
ugauuuacacagaguauag

SEQ ID NO: 393155 - RNA, 19 nt, Artificial Sequence
  Description of Artificial Sequence: Synthetic oligonucleotide
  Sense Strand Starting at position 947 of SEQ ID NO: 315964
gguaaacugucaguggaaa

SEQ ID NO: 393156 - RNA, 19 nt, Artificial Sequence
  Description of Artificial Sequence: Synthetic oligonucleotide
  Antisense Strand to SEQ ID NO: 393155
uuuccacugacaguuuacc

SEQ ID NO: 393157 - RNA, 19 nt, Artificial Sequence
  Description of Artificial Sequence: Synthetic oligonucleotide
  Sense Strand Starting at position 947 of SEQ ID NO: 315965
guaaacugucaguggaaau

SEQ ID NO: 393158 - RNA, 19 nt, Artificial Sequence
  Description of Artificial Sequence: Synthetic oligonucleotide
  Antisense Strand to SEQ ID NO: 393157
auuuccacugacaguuuac

SEQ ID NO: 393159 - RNA, 19 nt, Artificial Sequence
  Description of Artificial Sequence: Synthetic oligonucleotide
  Sense Strand Starting at position 947 of SEQ ID NO: 315977
uggaaauucucagcccaga

SEQ ID NO: 393160 - RNA, 19 nt, Artificial Sequence
  Description of Artificial Sequence: Synthetic oligonucleotide
  Antisense Strand to SEQ ID NO: 393159
ucugggcugagaauuucca

SEQ ID NO: 393161 - RNA, 19 nt, Artificial Sequence
  Description of Artificial Sequence: Synthetic oligonucleotide
  Sense Strand Starting at position 947 of SEQ ID NO: 316098
ucaagaaaugugcacacau

SEQ ID NO: 393162 - RNA, 19 nt, Artificial Sequence
  Description of Artificial Sequence: Synthetic oligonucleotide
  Antisense Strand to SEQ ID NO: 393161
augugugcacauuucuuga

SEQ ID NO: 393163 - RNA, 19 nt, Artificial Sequence
  Description of Artificial Sequence: Synthetic oligonucleotide
  Sense Strand Starting at position 947 of SEQ ID NO: 316335
auuucucuugcaugaggca

SEQ ID NO: 393164 - RNA, 19 nt, Artificial Sequence
  Description of Artificial Sequence: Synthetic oligonucleotide
  Antisense Strand to SEQ ID NO: 393163
ugccucaugcaagagaaau

SEQ ID NO: 393165 - RNA, 19 nt, Artificial Sequence
  Description of Artificial Sequence: Synthetic oligonucleotide
  Sense Strand Starting at position 947 of SEQ ID NO: 316397
aggcuucuagucuggcaua

SEQ ID NO: 393166 - RNA, 19 nt, Artificial Sequence
  Description of Artificial Sequence: Synthetic oligonucleotide
  Antisense Strand to SEQ ID NO: 393165
uaugccagacuagaagccu

SEQ ID NO: 393167 - RNA, 19 nt, Artificial Sequence
  Description of Artificial Sequence: Synthetic oligonucleotide
  Sense Strand Starting at position 947 of SEQ ID NO: 316408
cuggcauaccugggaagaa

SEQ ID NO: 393168 - RNA, 19 nt, Artificial Sequence
  Description of Artificial Sequence: Synthetic oligonucleotide
  Antisense Strand to SEQ ID NO: 393167
uucuucccagguaugccag

SEQ ID NO: 393169 - RNA, 19 nt, Artificial Sequence
  Description of Artificial Sequence: Synthetic oligonucleotide
  Sense Strand Starting at position 947 of SEQ ID NO: 316442
ucccaaauaugacaggaaa

SEQ ID NO: 393170 - RNA, 19 nt, Artificial Sequence
  Description of Artificial Sequence: Synthetic oligonucleotide
  Antisense Strand to SEQ ID NO: 393169
uuuccugucauauuuggga

SEQ ID NO: 393171 - RNA, 19 nt, Artificial Sequence
  Description of Artificial Sequence: Synthetic oligonucleotide
  Sense Strand Starting at position 947 of SEQ ID NO: 316530
gcacacaguccaugaaauc

SEQ ID NO: 393172 - RNA, 19 nt, Artificial Sequence
  Description of Artificial Sequence: Synthetic oligonucleotide
  Antisense Strand to SEQ ID NO: 393171
gauuucauggacugugugc

SEQ ID NO: 393173 - RNA, 19 nt, Artificial Sequence
  Description of Artificial Sequence: Synthetic oligonucleotide
  Sense Strand Starting at position 947 of SEQ ID NO: 316547
ucagguauuuaacacguaa

SEQ ID NO: 393174 - RNA, 19 nt, Artificial Sequence
  Description of Artificial Sequence: Synthetic oligonucleotide
  Antisense Strand to SEQ ID NO: 393173
uuacguguuaaauaccuga

SEQ ID NO: 393175 - RNA, 19 nt, Artificial Sequence
  Description of Artificial Sequence: Synthetic oligonucleotide
  Sense Strand Starting at position 947 of SEQ ID NO: 316763
guggaaggccaugagaagu

SEQ ID NO: 393176 - RNA, 19 nt, Artificial Sequence
  Description of Artificial Sequence: Synthetic oligonucleotide
  Antisense Strand to SEQ ID NO: 393175
acuucucauggccuuccac

SEQ ID NO: 393177 - RNA, 19 nt, Artificial Sequence
  Description of Artificial Sequence: Synthetic oligonucleotide
  Sense Strand Starting at position 947 of SEQ ID NO: 316818
uaggguuucugggcucaca

SEQ ID NO: 393178 - RNA, 19 nt, Artificial Sequence
  Description of Artificial Sequence: Synthetic oligonucleotide
  Antisense Strand to SEQ ID NO: 393177
ugugagcccagaaacccua

SEQ ID NO: 393179 - RNA, 19 nt, Artificial Sequence
  Description of Artificial Sequence: Synthetic oligonucleotide
  Sense Strand Starting at position 947 of SEQ ID NO: 316890
cuacgaggguucccagaga

SEQ ID NO: 393180 - RNA, 19 nt, Artificial Sequence
  Description of Artificial Sequence: Synthetic oligonucleotide
  Antisense Strand to SEQ ID NO: 393179
ucucugggaacccucguag

SEQ ID NO: 393181 - RNA, 19 nt, Artificial Sequence
  Description of Artificial Sequence: Synthetic oligonucleotide
  Sense Strand Starting at position 947 of SEQ ID NO: 317643
cgucgaacuccugggaacu

SEQ ID NO: 393182 - RNA, 19 nt, Artificial Sequence
  Description of Artificial Sequence: Synthetic oligonucleotide
  Antisense Strand to SEQ ID NO: 393181
aguucccaggaguucgacg

SEQ ID NO: 393183 - RNA, 19 nt, Artificial Sequence
  Description of Artificial Sequence: Synthetic oligonucleotide
  Sense Strand Starting at position 947 of SEQ ID NO: 317863
ggguuucucccacagcaga

SEQ ID NO: 393184 - RNA, 19 nt, Artificial Sequence
  Description of Artificial Sequence: Synthetic oligonucleotide
  Antisense Strand to SEQ ID NO: 393183
ucugcugugggagaaaccc

SEQ ID NO: 393185 - RNA, 19 nt, Artificial Sequence
  Description of Artificial Sequence: Synthetic oligonucleotide
  Sense Strand Starting at position 947 of SEQ ID NO: 318159
aaagguuccuguguaggaa

SEQ ID NO: 393186 - RNA, 19 nt, Artificial Sequence
  Description of Artificial Sequence: Synthetic oligonucleotide
  Antisense Strand to SEQ ID NO: 393185
uuccuacacaggaaccuuu

SEQ ID NO: 393187 - RNA, 19 nt, Artificial Sequence
  Description of Artificial Sequence: Synthetic oligonucleotide
  Sense Strand Starting at position 947 of SEQ ID NO: 318374
gagggcagcuugguagaau

SEQ ID NO: 393188 - RNA, 19 nt, Artificial Sequence
  Description of Artificial Sequence: Synthetic oligonucleotide
  Antisense Strand to SEQ ID NO: 393187
auucuaccaagcugcccuc

SEQ ID NO: 393189 - RNA, 19 nt, Artificial Sequence
  Description of Artificial Sequence: Synthetic oligonucleotide
  Sense Strand Starting at position 947 of SEQ ID NO: 318424
ucagaagguuugcuuucuu

SEQ ID NO: 393190 - RNA, 19 nt, Artificial Sequence
  Description of Artificial Sequence: Synthetic oligonucleotide
  Antisense Strand to SEQ ID NO: 393189
aagaaagcaaaccuucuga

SEQ ID NO: 393191 - RNA, 19 nt, Artificial Sequence
  Description of Artificial Sequence: Synthetic oligonucleotide
  Sense Strand Starting at position 947 of SEQ ID NO: 318616
aggcgaccucgggaaguau

SEQ ID NO: 393192 - RNA, 19 nt, Artificial Sequence
  Description of Artificial Sequence: Synthetic oligonucleotide
  Antisense Strand to SEQ ID NO: 393191
auacuucccgaggucgccu

SEQ ID NO: 393193 - RNA, 19 nt, Artificial Sequence
  Description of Artificial Sequence: Synthetic oligonucleotide
  Sense Strand Starting at position 947 of SEQ ID NO: 318634
uuaaacauuugcccguaua

SEQ ID NO: 393194 - RNA, 19 nt, Artificial Sequence
  Description of Artificial Sequence: Synthetic oligonucleotide
  Antisense Strand to SEQ ID NO: 393193
uauacgggcaaauguuuaa

SEQ ID NO: 393195 - RNA, 19 nt, Artificial Sequence
  Description of Artificial Sequence: Synthetic oligonucleotide
  Sense Strand Starting at position 947 of SEQ ID NO: 318884
uccugucaucuccacgaga

SEQ ID NO: 393196 - RNA, 19 nt, Artificial Sequence
  Description of Artificial Sequence: Synthetic oligonucleotide
  Antisense Strand to SEQ ID NO: 393195
ucucguggagaugacagga

SEQ ID NO: 393197 - RNA, 19 nt, Artificial Sequence
  Description of Artificial Sequence: Synthetic oligonucleotide
  Sense Strand Starting at position 947 of SEQ ID NO: 318886
cugucaucuccacgagaua

SEQ ID NO: 393198 - RNA, 19 nt, Artificial Sequence
  Description of Artificial Sequence: Synthetic oligonucleotide
  Antisense Strand to SEQ ID NO: 393197
uaucucguggagaugacag

SEQ ID NO: 393199 - RNA, 19 nt, Artificial Sequence
  Description of Artificial Sequence: Synthetic oligonucleotide
  Sense Strand Starting at position 947 of SEQ ID NO: 318887
ugucaucuccacgagauag

SEQ ID NO: 393200 - RNA, 19 nt, Artificial Sequence
  Description of Artificial Sequence: Synthetic oligonucleotide
  Antisense Strand to SEQ ID NO: 393199
cuaucucguggagaugaca

SEQ ID NO: 393201 - RNA, 19 nt, Artificial Sequence
  Description of Artificial Sequence: Synthetic oligonucleotide
  Sense Strand Starting at position 947 of SEQ ID NO: 318897
acgagauagccauaaaugu

SEQ ID NO: 393202 - RNA, 19 nt, Artificial Sequence
  Description of Artificial Sequence: Synthetic oligonucleotide
  Antisense Strand to SEQ ID NO: 393201
acauuuauggcuaucucgu

SEQ ID NO: 393203 - RNA, 19 nt, Artificial Sequence
  Description of Artificial Sequence: Synthetic oligonucleotide
  Sense Strand Starting at position 947 of SEQ ID NO: 318906
ccauaaauguguuccagua

SEQ ID NO: 393204 - RNA, 19 nt, Artificial Sequence
  Description of Artificial Sequence: Synthetic oligonucleotide
  Antisense Strand to SEQ ID NO: 393203
uacuggaacacauuuaugg

SEQ ID NO: 393205 - RNA, 19 nt, Artificial Sequence
  Description of Artificial Sequence: Synthetic oligonucleotide
  Sense Strand Starting at position 947 of SEQ ID NO: 319051
gcuggauuacaaggcuuua

SEQ ID NO: 393206 - RNA, 19 nt, Artificial Sequence
  Description of Artificial Sequence: Synthetic oligonucleotide
  Antisense Strand to SEQ ID NO: 393205
uaaagccuuguaauccagc

SEQ ID NO: 393207 - RNA, 19 nt, Artificial Sequence
  Description of Artificial Sequence: Synthetic oligonucleotide
  Sense Strand Starting at position 948 of SEQ ID NO: 315246
agcacugaucucuaaguua

SEQ ID NO: 393208 - RNA, 19 nt, Artificial Sequence
  Description of Artificial Sequence: Synthetic oligonucleotide
  Antisense Strand to SEQ ID NO: 393207
uaacuuagagaucagugcu

SEQ ID NO: 393209 - RNA, 19 nt, Artificial Sequence
  Description of Artificial Sequence: Synthetic oligonucleotide
  Sense Strand Starting at position 948 of SEQ ID NO: 315470
ucaagauuaaggugugggu

SEQ ID NO: 393210 - RNA, 19 nt, Artificial Sequence
  Description of Artificial Sequence: Synthetic oligonucleotide
  Antisense Strand to SEQ ID NO: 393209
acccacaccuuaaucuuga

SEQ ID NO: 393211 - RNA, 19 nt, Artificial Sequence
  Description of Artificial Sequence: Synthetic oligonucleotide
  Sense Strand Starting at position 948 of SEQ ID NO: 315507
uguagaaaucaugaaugcu

SEQ ID NO: 393212 - RNA, 19 nt, Artificial Sequence
  Description of Artificial Sequence: Synthetic oligonucleotide
  Antisense Strand to SEQ ID NO: 393211
agcauucaugauuucuaca

SEQ ID NO: 393213 - RNA, 19 nt, Artificial Sequence
  Description of Artificial Sequence: Synthetic oligonucleotide
  Sense Strand Starting at position 948 of SEQ ID NO: 315516
caugaaugcuuccuaggga

SEQ ID NO: 393214 - RNA, 19 nt, Artificial Sequence
  Description of Artificial Sequence: Synthetic oligonucleotide
  Antisense Strand to SEQ ID NO: 393213
ucccuaggaagcauucaug

SEQ ID NO: 393215 - RNA, 19 nt, Artificial Sequence
  Description of Artificial Sequence: Synthetic oligonucleotide
  Sense Strand Starting at position 948 of SEQ ID NO: 315519
gaaugcuuccuagggaaag

SEQ ID NO: 393216 - RNA, 19 nt, Artificial Sequence
  Description of Artificial Sequence: Synthetic oligonucleotide
  Antisense Strand to SEQ ID NO: 393215
cuuucccuaggaagcauuc

SEQ ID NO: 393217 - RNA, 19 nt, Artificial Sequence
  Description of Artificial Sequence: Synthetic oligonucleotide
  Sense Strand Starting at position 948 of SEQ ID NO: 315521
augcuuccuagggaaagua

SEQ ID NO: 393218 - RNA, 19 nt, Artificial Sequence
  Description of Artificial Sequence: Synthetic oligonucleotide
  Antisense Strand to SEQ ID NO: 393217
uacuuucccuaggaagcau

SEQ ID NO: 393219 - RNA, 19 nt, Artificial Sequence
  Description of Artificial Sequence: Synthetic oligonucleotide
  Sense Strand Starting at position 948 of SEQ ID NO: 315601
ucgacacuauucccugaaa

SEQ ID NO: 393220 - RNA, 19 nt, Artificial Sequence
  Description of Artificial Sequence: Synthetic oligonucleotide
  Antisense Strand to SEQ ID NO: 393219
uuucagggaauagugucga

SEQ ID NO: 393221 - RNA, 19 nt, Artificial Sequence
  Description of Artificial Sequence: Synthetic oligonucleotide
  Sense Strand Starting at position 948 of SEQ ID NO: 315602
cgacacuauucccugaaag

SEQ ID NO: 393222 - RNA, 19 nt, Artificial Sequence
  Description of Artificial Sequence: Synthetic oligonucleotide
  Antisense Strand to SEQ ID NO: 393221
cuuucagggaauagugucg

SEQ ID NO: 393223 - RNA, 19 nt, Artificial Sequence
  Description of Artificial Sequence: Synthetic oligonucleotide
  Sense Strand Starting at position 948 of SEQ ID NO: 315719
ucccuuuaggcacaaauga

SEQ ID NO: 393224 - RNA, 19 nt, Artificial Sequence
  Description of Artificial Sequence: Synthetic oligonucleotide
  Antisense Strand to SEQ ID NO: 393223
ucauuugugccuaaaggga

SEQ ID NO: 393225 - RNA, 19 nt, Artificial Sequence
  Description of Artificial Sequence: Synthetic oligonucleotide
  Sense Strand Starting at position 948 of SEQ ID NO: 315782
ucuacagaauaggauuaaa

SEQ ID NO: 393226 - RNA, 19 nt, Artificial Sequence
  Description of Artificial Sequence: Synthetic oligonucleotide
  Antisense Strand to SEQ ID NO: 393225
uuuaauccuauucuguaga

SEQ ID NO: 393227 - RNA, 19 nt, Artificial Sequence
  Description of Artificial Sequence: Synthetic oligonucleotide
  Sense Strand Starting at position 948 of SEQ ID NO: 315800
agacacacagcgugaaaua

SEQ ID NO: 393228 - RNA, 19 nt, Artificial Sequence
  Description of Artificial Sequence: Synthetic oligonucleotide
  Antisense Strand to SEQ ID NO: 393227
uauuucacgcugugugucu

SEQ ID NO: 393229 - RNA, 19 nt, Artificial Sequence
  Description of Artificial Sequence: Synthetic oligonucleotide
  Sense Strand Starting at position 948 of SEQ ID NO: 315801
gacacacagcgugaaauaa

SEQ ID NO: 393230 - RNA, 19 nt, Artificial Sequence
  Description of Artificial Sequence: Synthetic oligonucleotide
  Antisense Strand to SEQ ID NO: 393229
uuauuucacgcuguguguc

SEQ ID NO: 393231 - RNA, 19 nt, Artificial Sequence
  Description of Artificial Sequence: Synthetic oligonucleotide
  Sense Strand Starting at position 948 of SEQ ID NO: 315856
ggaagugaaugcuuugaac

SEQ ID NO: 393232 - RNA, 19 nt, Artificial Sequence
  Description of Artificial Sequence: Synthetic oligonucleotide
  Antisense Strand to SEQ ID NO: 393231
guucaaagcauucacuucc

SEQ ID NO: 393233 - RNA, 19 nt, Artificial Sequence
  Description of Artificial Sequence: Synthetic oligonucleotide
  Sense Strand Starting at position 948 of SEQ ID NO: 315971
aucagaagagcuugaacga

SEQ ID NO: 393234 - RNA, 19 nt, Artificial Sequence
  Description of Artificial Sequence: Synthetic oligonucleotide
  Antisense Strand to SEQ ID NO: 393233
ucguucaagcucuucugau

SEQ ID NO: 393235 - RNA, 19 nt, Artificial Sequence
  Description of Artificial Sequence: Synthetic oligonucleotide
  Sense Strand Starting at position 948 of SEQ ID NO: 316014
agcuuuagccuccagauga

SEQ ID NO: 393236 - RNA, 19 nt, Artificial Sequence
  Description of Artificial Sequence: Synthetic oligonucleotide
  Antisense Strand to SEQ ID NO: 393235
ucaucuggaggcuaaagcu

SEQ ID NO: 393237 - RNA, 19 nt, Artificial Sequence
  Description of Artificial Sequence: Synthetic oligonucleotide
  Sense Strand Starting at position 948 of SEQ ID NO: 316081
gaaucugauucgguggacu

SEQ ID NO: 393238 - RNA, 19 nt, Artificial Sequence
  Description of Artificial Sequence: Synthetic oligonucleotide
  Antisense Strand to SEQ ID NO: 393237
aguccaccgaaucagauuc

SEQ ID NO: 393239 - RNA, 19 nt, Artificial Sequence
  Description of Artificial Sequence: Synthetic oligonucleotide
  Sense Strand Starting at position 948 of SEQ ID NO: 316083
aucugauucgguggacuga

SEQ ID NO: 393240 - RNA, 19 nt, Artificial Sequence
  Description of Artificial Sequence: Synthetic oligonucleotide
  Antisense Strand to SEQ ID NO: 393239
ucaguccaccgaaucagau

SEQ ID NO: 393241 - RNA, 19 nt, Artificial Sequence
  Description of Artificial Sequence: Synthetic oligonucleotide
  Sense Strand Starting at position 948 of SEQ ID NO: 316164
agcugauagcuccagguuu

SEQ ID NO: 393242 - RNA, 19 nt, Artificial Sequence
  Description of Artificial Sequence: Synthetic oligonucleotide
  Antisense Strand to SEQ ID NO: 393241
aaaccuggagcuaucagcu

SEQ ID NO: 393243 - RNA, 19 nt, Artificial Sequence
  Description of Artificial Sequence: Synthetic oligonucleotide
  Sense Strand Starting at position 948 of SEQ ID NO: 316166
cugauagcuccagguuucu

SEQ ID NO: 393244 - RNA, 19 nt, Artificial Sequence
  Description of Artificial Sequence: Synthetic oligonucleotide
  Antisense Strand to SEQ ID NO: 393243
agaaaccuggagcuaucag

SEQ ID NO: 393245 - RNA, 19 nt, Artificial Sequence
  Description of Artificial Sequence: Synthetic oligonucleotide
  Sense Strand Starting at position 948 of SEQ ID NO: 316299
guauauguagcagaaauga

SEQ ID NO: 393246 - RNA, 19 nt, Artificial Sequence
  Description of Artificial Sequence: Synthetic oligonucleotide
  Antisense Strand to SEQ ID NO: 393245
ucauuucugcuacauauac

SEQ ID NO: 393247 - RNA, 19 nt, Artificial Sequence
  Description of Artificial Sequence: Synthetic oligonucleotide
  Sense Strand Starting at position 948 of SEQ ID NO: 316310
agaaaugaacccugccaau

SEQ ID NO: 393248 - RNA, 19 nt, Artificial Sequence
  Description of Artificial Sequence: Synthetic oligonucleotide
  Antisense Strand to SEQ ID NO: 393247
auuggcaggguucauuucu

SEQ ID NO: 393249 - RNA, 19 nt, Artificial Sequence
  Description of Artificial Sequence: Synthetic oligonucleotide
  Sense Strand Starting at position 948 of SEQ ID NO: 316325
caauguuuacuaugaggac

SEQ ID NO: 393250 - RNA, 19 nt, Artificial Sequence
  Description of Artificial Sequence: Synthetic oligonucleotide
  Antisense Strand to SEQ ID NO: 393249
guccucauaguaaacauug

SEQ ID NO: 393251 - RNA, 19 nt, Artificial Sequence
  Description of Artificial Sequence: Synthetic oligonucleotide
  Sense Strand Starting at position 948 of SEQ ID NO: 316357
augcuacucgaguggauuu

SEQ ID NO: 393252 - RNA, 19 nt, Artificial Sequence
  Description of Artificial Sequence: Synthetic oligonucleotide
  Antisense Strand to SEQ ID NO: 393251
aaauccacucgaguagcau

SEQ ID NO: 393253 - RNA, 19 nt, Artificial Sequence
  Description of Artificial Sequence: Synthetic oligonucleotide
  Sense Strand Starting at position 948 of SEQ ID NO: 317533
aggaaucuucagggcgaga

SEQ ID NO: 393254 - RNA, 19 nt, Artificial Sequence
  Description of Artificial Sequence: Synthetic oligonucleotide
  Antisense Strand to SEQ ID NO: 393253
ucucgcccugaagauuccu

SEQ ID NO: 393255 - RNA, 19 nt, Artificial Sequence
  Description of Artificial Sequence: Synthetic oligonucleotide
  Sense Strand Starting at position 948 of SEQ ID NO: 317544
gggcgagauuuccaaacca

SEQ ID NO: 393256 - RNA, 19 nt, Artificial Sequence
  Description of Artificial Sequence: Synthetic oligonucleotide
  Antisense Strand to SEQ ID NO: 393255
ugguuuggaaaucucgccc

SEQ ID NO: 393257 - RNA, 19 nt, Artificial Sequence
  Description of Artificial Sequence: Synthetic oligonucleotide
  Sense Strand Starting at position 948 of SEQ ID NO: 317917
aucccuuagacuugggagu

SEQ ID NO: 393258 - RNA, 19 nt, Artificial Sequence
  Description of Artificial Sequence: Synthetic oligonucleotide
  Antisense Strand to SEQ ID NO: 393257
acucccaagucuaagggau

SEQ ID NO: 393259 - RNA, 19 nt, Artificial Sequence
  Description of Artificial Sequence: Synthetic oligonucleotide
  Sense Strand Starting at position 948 of SEQ ID NO: 317918
ucccuuagacuugggaguu

SEQ ID NO: 393260 - RNA, 19 nt, Artificial Sequence
  Description of Artificial Sequence: Synthetic oligonucleotide
  Antisense Strand to SEQ ID NO: 393259
aacucccaagucuaaggga

SEQ ID NO: 393261 - RNA, 19 nt, Artificial Sequence
  Description of Artificial Sequence: Synthetic oligonucleotide
  Sense Strand Starting at position 948 of SEQ ID NO: 317983
gccagagaaccuugggauc

SEQ ID NO: 393262 - RNA, 19 nt, Artificial Sequence
  Description of Artificial Sequence: Synthetic oligonucleotide
  Antisense Strand to SEQ ID NO: 393261
gaucccaagguucucuggc

SEQ ID NO: 393263 - RNA, 19 nt, Artificial Sequence
  Description of Artificial Sequence: Synthetic oligonucleotide
  Sense Strand Starting at position 948 of SEQ ID NO: 318123
ggcagcauuccaggauagu

SEQ ID NO: 393264 - RNA, 19 nt, Artificial Sequence
  Description of Artificial Sequence: Synthetic oligonucleotide
  Antisense Strand to SEQ ID NO: 393263
acuauccuggaaugcugcc

SEQ ID NO: 393265 - RNA, 19 nt, Artificial Sequence
  Description of Artificial Sequence: Synthetic oligonucleotide
  Sense Strand Starting at position 948 of SEQ ID NO: 318124
gcagcauuccaggauagug

SEQ ID NO: 393266 - RNA, 19 nt, Artificial Sequence
  Description of Artificial Sequence: Synthetic oligonucleotide
  Antisense Strand to SEQ ID NO: 393265
cacuauccuggaaugcugc

SEQ ID NO: 393267 - RNA, 19 nt, Artificial Sequence
  Description of Artificial Sequence: Synthetic oligonucleotide
  Sense Strand Starting at position 948 of SEQ ID NO: 318684
auggcucaccuuuguaauu

SEQ ID NO: 393268 - RNA, 19 nt, Artificial Sequence
  Description of Artificial Sequence: Synthetic oligonucleotide
  Antisense Strand to SEQ ID NO: 393267
aauuacaaaggugagccau

SEQ ID NO: 393269 - RNA, 19 nt, Artificial Sequence
  Description of Artificial Sequence: Synthetic oligonucleotide
  Sense Strand Starting at position 948 of SEQ ID NO: 318745
aggaguuuagccugggcaa

SEQ ID NO: 393270 - RNA, 19 nt, Artificial Sequence
  Description of Artificial Sequence: Synthetic oligonucleotide
  Antisense Strand to SEQ ID NO: 393269
uugcccaggcuaaacuccu

SEQ ID NO: 393271 - RNA, 19 nt, Artificial Sequence
  Description of Artificial Sequence: Synthetic oligonucleotide
  Sense Strand Starting at position 948 of SEQ ID NO: 318746
ggaguuuagccugggcaau

SEQ ID NO: 393272 - RNA, 19 nt, Artificial Sequence
  Description of Artificial Sequence: Synthetic oligonucleotide
  Antisense Strand to SEQ ID NO: 393271
auugcccaggcuaaacucc

SEQ ID NO: 393273 - RNA, 19 nt, Artificial Sequence
  Description of Artificial Sequence: Synthetic oligonucleotide
  Sense Strand Starting at position 948 of SEQ ID NO: 318748
aguuuagccugggcaauau

SEQ ID NO: 393274 - RNA, 19 nt, Artificial Sequence
  Description of Artificial Sequence: Synthetic oligonucleotide
  Antisense Strand to SEQ ID NO: 393273
auauugcccaggcuaaacu

SEQ ID NO: 393275 - RNA, 19 nt, Artificial Sequence
  Description of Artificial Sequence: Synthetic oligonucleotide
  Sense Strand Starting at position 948 of SEQ ID NO: 318935
gcaagaccgucuccggaaa

SEQ ID NO: 393276 - RNA, 19 nt, Artificial Sequence
  Description of Artificial Sequence: Synthetic oligonucleotide
  Antisense Strand to SEQ ID NO: 393275
uuuccggagacggucuugc

SEQ ID NO: 393277 - RNA, 19 nt, Artificial Sequence
  Description of Artificial Sequence: Synthetic oligonucleotide
  Sense Strand Starting at position 948 of SEQ ID NO: 319071
ggaacaaaguuccuuggua

SEQ ID NO: 393278 - RNA, 19 nt, Artificial Sequence
  Description of Artificial Sequence: Synthetic oligonucleotide
  Antisense Strand to SEQ ID NO: 393277
uaccaaggaacuuuguucc

SEQ ID NO: 393279 - RNA, 19 nt, Artificial Sequence
  Description of Artificial Sequence: Synthetic oligonucleotide
  Sense Strand Starting at position 948 of SEQ ID NO: 319072
gaacaaaguuccuugguaa

SEQ ID NO: 393280 - RNA, 19 nt, Artificial Sequence
  Description of Artificial Sequence: Synthetic oligonucleotide
  Antisense Strand to SEQ ID NO: 393279
uuaccaaggaacuuuguuc

SEQ ID NO: 393281 - RNA, 19 nt, Artificial Sequence
  Description of Artificial Sequence: Synthetic oligonucleotide
  Sense Strand Starting at position 948 of SEQ ID NO: 319162
aucucaagcuuauugggau

SEQ ID NO: 393282 - RNA, 19 nt, Artificial Sequence
  Description of Artificial Sequence: Synthetic oligonucleotide
  Antisense Strand to SEQ ID NO: 393281
aucccaauaagcuugagau

SEQ ID NO: 393283 - RNA, 19 nt, Artificial Sequence
  Description of Artificial Sequence: Synthetic oligonucleotide
  Sense Strand Starting at position 948 of SEQ ID NO: 319198
gagucaaguagccaugaga

SEQ ID NO: 393284 - RNA, 19 nt, Artificial Sequence
  Description of Artificial Sequence: Synthetic oligonucleotide
  Antisense Strand to SEQ ID NO: 393283
ucucauggcuacuugacuc

SEQ ID NO: 393285 - RNA, 19 nt, Artificial Sequence
  Description of Artificial Sequence: Synthetic oligonucleotide
  Sense Strand Starting at position 948 of SEQ ID NO: 319201
ucaaguagccaugagauug

SEQ ID NO: 393286 - RNA, 19 nt, Artificial Sequence
  Description of Artificial Sequence: Synthetic oligonucleotide
  Antisense Strand to SEQ ID NO: 393285
caaucucauggcuacuuga

SEQ ID NO: 393287 - RNA, 19 nt, Artificial Sequence
  Description of Artificial Sequence: Synthetic oligonucleotide
  Sense Strand Starting at position 949 of SEQ ID NO: 315412
gccaaucccuaacagagaa

SEQ ID NO: 393288 - RNA, 19 nt, Artificial Sequence
  Description of Artificial Sequence: Synthetic oligonucleotide
  Antisense Strand to SEQ ID NO: 393287
uucucuguuagggauuggc

SEQ ID NO: 393289 - RNA, 19 nt, Artificial Sequence
  Description of Artificial Sequence: Synthetic oligonucleotide
  Sense Strand Starting at position 949 of SEQ ID NO: 315445
uccuuucucugagauaagc

SEQ ID NO: 393290 - RNA, 19 nt, Artificial Sequence
  Description of Artificial Sequence: Synthetic oligonucleotide
  Antisense Strand to SEQ ID NO: 393289
gcuuaucucagagaaagga

SEQ ID NO: 393291 - RNA, 19 nt, Artificial Sequence
  Description of Artificial Sequence: Synthetic oligonucleotide
  Sense Strand Starting at position 949 of SEQ ID NO: 316022
acgggccuucugcaaauau

SEQ ID NO: 393292 - RNA, 19 nt, Artificial Sequence
  Description of Artificial Sequence: Synthetic oligonucleotide
  Antisense Strand to SEQ ID NO: 393291
auauuugcagaaggcccgu

SEQ ID NO: 393293 - RNA, 19 nt, Artificial Sequence
  Description of Artificial Sequence: Synthetic oligonucleotide
  Sense Strand Starting at position 949 of SEQ ID NO: 316143
cuuguugaaugcuuacaaa

SEQ ID NO: 393294 - RNA, 19 nt, Artificial Sequence
  Description of Artificial Sequence: Synthetic oligonucleotide
  Antisense Strand to SEQ ID NO: 393293
uuuguaagcauucaacaag

SEQ ID NO: 393295 - RNA, 19 nt, Artificial Sequence
  Description of Artificial Sequence: Synthetic oligonucleotide
  Sense Strand Starting at position 949 of SEQ ID NO: 316146
guugaaugcuuacaaagga

SEQ ID NO: 393296 - RNA, 19 nt, Artificial Sequence
  Description of Artificial Sequence: Synthetic oligonucleotide
  Antisense Strand to SEQ ID NO: 393295
uccuuuguaagcauucaac

SEQ ID NO: 393297 - RNA, 19 nt, Artificial Sequence
  Description of Artificial Sequence: Synthetic oligonucleotide
  Sense Strand Starting at position 949 of SEQ ID NO: 316285
ccgugaauccuuuaccauc

SEQ ID NO: 393298 - RNA, 19 nt, Artificial Sequence
  Description of Artificial Sequence: Synthetic oligonucleotide
  Antisense Strand to SEQ ID NO: 393297
gaugguaaaggauucacgg

SEQ ID NO: 393299 - RNA, 19 nt, Artificial Sequence
  Description of Artificial Sequence: Synthetic oligonucleotide
  Sense Strand Starting at position 949 of SEQ ID NO: 316673
gcuugaaucucggcuggaa

SEQ ID NO: 393300 - RNA, 19 nt, Artificial Sequence
  Description of Artificial Sequence: Synthetic oligonucleotide
  Antisense Strand to SEQ ID NO: 393299
uuccagccgagauucaagc

SEQ ID NO: 393301 - RNA, 19 nt, Artificial Sequence
  Description of Artificial Sequence: Synthetic oligonucleotide
  Sense Strand Starting at position 949 of SEQ ID NO: 317442
cggagagacuggucagucu

SEQ ID NO: 393302 - RNA, 19 nt, Artificial Sequence
  Description of Artificial Sequence: Synthetic oligonucleotide
  Antisense Strand to SEQ ID NO: 393301
agacugaccagucucuccg

SEQ ID NO: 393303 - RNA, 19 nt, Artificial Sequence
  Description of Artificial Sequence: Synthetic oligonucleotide
  Sense Strand Starting at position 949 of SEQ ID NO: 317928
ugaagauccucagagcacu

SEQ ID NO: 393304 - RNA, 19 nt, Artificial Sequence
  Description of Artificial Sequence: Synthetic oligonucleotide
  Antisense Strand to SEQ ID NO: 393303
agugcucugaggaucuuca

SEQ ID NO: 393305 - RNA, 19 nt, Artificial Sequence
  Description of Artificial Sequence: Synthetic oligonucleotide
  Sense Strand Starting at position 949 of SEQ ID NO: 317967
ccguuagacaucugauagg

SEQ ID NO: 393306 - RNA, 19 nt, Artificial Sequence
  Description of Artificial Sequence: Synthetic oligonucleotide
  Antisense Strand to SEQ ID NO: 393305
ccuaucagaugucuaacgg

SEQ ID NO: 393307 - RNA, 19 nt, Artificial Sequence
  Description of Artificial Sequence: Synthetic oligonucleotide
  Sense Strand Starting at position 949 of SEQ ID NO: 317991
gguuguauuugguuugauc

SEQ ID NO: 393308 - RNA, 19 nt, Artificial Sequence
  Description of Artificial Sequence: Synthetic oligonucleotide
  Antisense Strand to SEQ ID NO: 393307
gaucaaaccaaauacaacc

SEQ ID NO: 393309 - RNA, 19 nt, Artificial Sequence
  Description of Artificial Sequence: Synthetic oligonucleotide
  Sense Strand Starting at position 949 of SEQ ID NO: 317994
uguauuugguuugaucagu

SEQ ID NO: 393310 - RNA, 19 nt, Artificial Sequence
  Description of Artificial Sequence: Synthetic oligonucleotide
  Antisense Strand to SEQ ID NO: 393309
acugaucaaaccaaauaca

SEQ ID NO: 393311 - RNA, 19 nt, Artificial Sequence
  Description of Artificial Sequence: Synthetic oligonucleotide
  Sense Strand Starting at position 949 of SEQ ID NO: 318007
aucaguauuugugggucau

SEQ ID NO: 393312 - RNA, 19 nt, Artificial Sequence
  Description of Artificial Sequence: Synthetic oligonucleotide
  Antisense Strand to SEQ ID NO: 393311
augacccacaaauacugau

SEQ ID NO: 393313 - RNA, 19 nt, Artificial Sequence
  Description of Artificial Sequence: Synthetic oligonucleotide
  Sense Strand Starting at position 949 of SEQ ID NO: 318008
ucaguauuugugggucauu

SEQ ID NO: 393314 - RNA, 19 nt, Artificial Sequence
  Description of Artificial Sequence: Synthetic oligonucleotide
  Antisense Strand to SEQ ID NO: 393313
aaugacccacaaauacuga

SEQ ID NO: 393315 - RNA, 19 nt, Artificial Sequence
  Description of Artificial Sequence: Synthetic oligonucleotide
  Sense Strand Starting at position 949 of SEQ ID NO: 318018
ugggucauuuauugcaaau

SEQ ID NO: 393316 - RNA, 19 nt, Artificial Sequence
  Description of Artificial Sequence: Synthetic oligonucleotide
  Antisense Strand to SEQ ID NO: 393315
auuugcaauaaaugaccca

SEQ ID NO: 393317 - RNA, 19 nt, Artificial Sequence
  Description of Artificial Sequence: Synthetic oligonucleotide
  Sense Strand Starting at position 949 of SEQ ID NO: 318020
ggucauuuauugcaaaugu

SEQ ID NO: 393318 - RNA, 19 nt, Artificial Sequence
  Description of Artificial Sequence: Synthetic oligonucleotide
  Antisense Strand to SEQ ID NO: 393317
acauuugcaauaaaugacc

SEQ ID NO: 393319 - RNA, 19 nt, Artificial Sequence
  Description of Artificial Sequence: Synthetic oligonucleotide
  Sense Strand Starting at position 949 of SEQ ID NO: 318051
gguggagauuuccaccaga

SEQ ID NO: 393320 - RNA, 19 nt, Artificial Sequence
  Description of Artificial Sequence: Synthetic oligonucleotide
  Antisense Strand to SEQ ID NO: 393319
ucugguggaaaucuccacc

SEQ ID NO: 393321 - RNA, 19 nt, Artificial Sequence
  Description of Artificial Sequence: Synthetic oligonucleotide
  Sense Strand Starting at position 949 of SEQ ID NO: 318067
agauuucucugugggagau

SEQ ID NO: 393322 - RNA, 19 nt, Artificial Sequence
  Description of Artificial Sequence: Synthetic oligonucleotide
  Antisense Strand to SEQ ID NO: 393321
aucucccacagagaaaucu

SEQ ID NO: 393323 - RNA, 19 nt, Artificial Sequence
  Description of Artificial Sequence: Synthetic oligonucleotide
  Sense Strand Starting at position 949 of SEQ ID NO: 318069
auuucucugugggagauga

SEQ ID NO: 393324 - RNA, 19 nt, Artificial Sequence
  Description of Artificial Sequence: Synthetic oligonucleotide
  Antisense Strand to SEQ ID NO: 393323
ucaucucccacagagaaau

SEQ ID NO: 393325 - RNA, 19 nt, Artificial Sequence
  Description of Artificial Sequence: Synthetic oligonucleotide
  Sense Strand Starting at position 949 of SEQ ID NO: 318092
accaacagcgauuaucaga

SEQ ID NO: 393326 - RNA, 19 nt, Artificial Sequence
  Description of Artificial Sequence: Synthetic oligonucleotide
  Antisense Strand to SEQ ID NO: 393325
ucugauaaucgcuguuggu

SEQ ID NO: 393327 - RNA, 19 nt, Artificial Sequence
  Description of Artificial Sequence: Synthetic oligonucleotide
  Sense Strand Starting at position 949 of SEQ ID NO: 318097
cagcgauuaucagagaggu

SEQ ID NO: 393328 - RNA, 19 nt, Artificial Sequence
  Description of Artificial Sequence: Synthetic oligonucleotide
  Antisense Strand to SEQ ID NO: 393327
accucucugauaaucgcug

SEQ ID NO: 393329 - RNA, 19 nt, Artificial Sequence
  Description of Artificial Sequence: Synthetic oligonucleotide
  Sense Strand Starting at position 949 of SEQ ID NO: 318099
gcgauuaucagagaggucu

SEQ ID NO: 393330 - RNA, 19 nt, Artificial Sequence
  Description of Artificial Sequence: Synthetic oligonucleotide
  Antisense Strand to SEQ ID NO: 393329
agaccucucugauaaucgc

SEQ ID NO: 393331 - RNA, 19 nt, Artificial Sequence
  Description of Artificial Sequence: Synthetic oligonucleotide
  Sense Strand Starting at position 949 of SEQ ID NO: 318190
auucgaauuugcuacuaua

SEQ ID NO: 393332 - RNA, 19 nt, Artificial Sequence
  Description of Artificial Sequence: Synthetic oligonucleotide
  Antisense Strand to SEQ ID NO: 393331
uauaguagcaaauucgaau

SEQ ID NO: 393333 - RNA, 19 nt, Artificial Sequence
  Description of Artificial Sequence: Synthetic oligonucleotide
  Sense Strand Starting at position 949 of SEQ ID NO: 318193
cgaauuugcuacuauauac

SEQ ID NO: 393334 - RNA, 19 nt, Artificial Sequence
  Description of Artificial Sequence: Synthetic oligonucleotide
  Antisense Strand to SEQ ID NO: 393333
guauauaguagcaaauucg

SEQ ID NO: 393335 - RNA, 19 nt, Artificial Sequence
  Description of Artificial Sequence: Synthetic oligonucleotide
  Sense Strand Starting at position 949 of SEQ ID NO: 318203
acuauauaccuuugaggug

SEQ ID NO: 393336 - RNA, 19 nt, Artificial Sequence
  Description of Artificial Sequence: Synthetic oligonucleotide
  Antisense Strand to SEQ ID NO: 393335
caccucaaagguauauagu

SEQ ID NO: 393337 - RNA, 19 nt, Artificial Sequence
  Description of Artificial Sequence: Synthetic oligonucleotide
  Sense Strand Starting at position 949 of SEQ ID NO: 318254
gcuuucucuccuugauuga

SEQ ID NO: 393338 - RNA, 19 nt, Artificial Sequence
  Description of Artificial Sequence: Synthetic oligonucleotide
  Antisense Strand to SEQ ID NO: 393337
ucaaucaaggagagaaagc

SEQ ID NO: 393339 - RNA, 19 nt, Artificial Sequence
  Description of Artificial Sequence: Synthetic oligonucleotide
  Sense Strand Starting at position 949 of SEQ ID NO: 318264
cuugauugauggcucucaa

SEQ ID NO: 393340 - RNA, 19 nt, Artificial Sequence
  Description of Artificial Sequence: Synthetic oligonucleotide
  Antisense Strand to SEQ ID NO: 393339
uugagagccaucaaucaag

SEQ ID NO: 393341 - RNA, 19 nt, Artificial Sequence
  Description of Artificial Sequence: Synthetic oligonucleotide
  Sense Strand Starting at position 949 of SEQ ID NO: 318287
acacacuuggcucagauau

SEQ ID NO: 393342 - RNA, 19 nt, Artificial Sequence
  Description of Artificial Sequence: Synthetic oligonucleotide
  Antisense Strand to SEQ ID NO: 393341
auaucugagccaagugugu

SEQ ID NO: 393343 - RNA, 19 nt, Artificial Sequence
  Description of Artificial Sequence: Synthetic oligonucleotide
  Sense Strand Starting at position 949 of SEQ ID NO: 318289
acacuuggcucagauaugu

SEQ ID NO: 393344 - RNA, 19 nt, Artificial Sequence
  Description of Artificial Sequence: Synthetic oligonucleotide
  Antisense Strand to SEQ ID NO: 393343
acauaucugagccaagugu

SEQ ID NO: 393345 - RNA, 19 nt, Artificial Sequence
  Description of Artificial Sequence: Synthetic oligonucleotide
  Sense Strand Starting at position 949 of SEQ ID NO: 318298
ucagauauguuagccauau

SEQ ID NO: 393346 - RNA, 19 nt, Artificial Sequence
  Description of Artificial Sequence: Synthetic oligonucleotide
  Antisense Strand to SEQ ID NO: 393345
auauggcuaacauaucuga

SEQ ID NO: 393347 - RNA, 19 nt, Artificial Sequence
  Description of Artificial Sequence: Synthetic oligonucleotide
  Sense Strand Starting at position 949 of SEQ ID NO: 318467
gccuuaauggcucgucagu

SEQ ID NO: 393348 - RNA, 19 nt, Artificial Sequence
  Description of Artificial Sequence: Synthetic oligonucleotide
  Antisense Strand to SEQ ID NO: 393347
acugacgagccauuaaggc

SEQ ID NO: 393349 - RNA, 19 nt, Artificial Sequence
  Description of Artificial Sequence: Synthetic oligonucleotide
  Sense Strand Starting at position 949 of SEQ ID NO: 318750
cucuacauggguuagucaa

SEQ ID NO: 393350 - RNA, 19 nt, Artificial Sequence
  Description of Artificial Sequence: Synthetic oligonucleotide
  Antisense Strand to SEQ ID NO: 393349
uugacuaacccauguagag

SEQ ID NO: 393351 - RNA, 19 nt, Artificial Sequence
  Description of Artificial Sequence: Synthetic oligonucleotide
  Sense Strand Starting at position 949 of SEQ ID NO: 318823
guugauccgcuguguacau

SEQ ID NO: 393352 - RNA, 19 nt, Artificial Sequence
  Description of Artificial Sequence: Synthetic oligonucleotide
  Antisense Strand to SEQ ID NO: 393351
auguacacagcggaucaac

SEQ ID NO: 393353 - RNA, 19 nt, Artificial Sequence
  Description of Artificial Sequence: Synthetic oligonucleotide
  Sense Strand Starting at position 949 of SEQ ID NO: 318907
ugcugucuuccacaugaac

SEQ ID NO: 393354 - RNA, 19 nt, Artificial Sequence
  Description of Artificial Sequence: Synthetic oligonucleotide
  Antisense Strand to SEQ ID NO: 393353
guucauguggaagacagca

SEQ ID NO: 393355 - RNA, 19 nt, Artificial Sequence
  Description of Artificial Sequence: Synthetic oligonucleotide
  Sense Strand Starting at position 949 of SEQ ID NO: 318928
cgcuuucaugcgcacauga

SEQ ID NO: 393356 - RNA, 19 nt, Artificial Sequence
  Description of Artificial Sequence: Synthetic oligonucleotide
  Antisense Strand to SEQ ID NO: 393355
ucaugugcgcaugaaagcg

SEQ ID NO: 393357 - RNA, 19 nt, Artificial Sequence
  Description of Artificial Sequence: Synthetic oligonucleotide
  Sense Strand Starting at position 949 of SEQ ID NO: 318941
acaugagacccuggcagau

SEQ ID NO: 393358 - RNA, 19 nt, Artificial Sequence
  Description of Artificial Sequence: Synthetic oligonucleotide
  Antisense Strand to SEQ ID NO: 393357
aucugccagggucucaugu

SEQ ID NO: 393359 - RNA, 19 nt, Artificial Sequence
  Description of Artificial Sequence: Synthetic oligonucleotide
  Sense Strand Starting at position 949 of SEQ ID NO: 318977
cagcucuaguucuagcaga

SEQ ID NO: 393360 - RNA, 19 nt, Artificial Sequence
  Description of Artificial Sequence: Synthetic oligonucleotide
  Antisense Strand to SEQ ID NO: 393359
ucugcuagaacuagagcug

SEQ ID NO: 393361 - RNA, 19 nt, Artificial Sequence
  Description of Artificial Sequence: Synthetic oligonucleotide
  Sense Strand Starting at position 949 of SEQ ID NO: 319048
gcaggauugggccacaugu

SEQ ID NO: 393362 - RNA, 19 nt, Artificial Sequence
  Description of Artificial Sequence: Synthetic oligonucleotide
  Antisense Strand to SEQ ID NO: 393361
acauguggcccaauccugc

SEQ ID NO: 393363 - RNA, 19 nt, Artificial Sequence
  Description of Artificial Sequence: Synthetic oligonucleotide
  Sense Strand Starting at position 949 of SEQ ID NO: 319106
ggguucacucguggacaca

SEQ ID NO: 393364 - RNA, 19 nt, Artificial Sequence
  Description of Artificial Sequence: Synthetic oligonucleotide
  Antisense Strand to SEQ ID NO: 393363
uguguccacgagugaaccc

SEQ ID NO: 393365 - RNA, 19 nt, Artificial Sequence
  Description of Artificial Sequence: Synthetic oligonucleotide
  Sense Strand Starting at position 949 of SEQ ID NO: 319160
ggaucccuucucugucaca

SEQ ID NO: 393366 - RNA, 19 nt, Artificial Sequence
  Description of Artificial Sequence: Synthetic oligonucleotide
  Antisense Strand to SEQ ID NO: 393365
ugugacagagaagggaucc

SEQ ID NO: 393367 - RNA, 19 nt, Artificial Sequence
  Description of Artificial Sequence: Synthetic oligonucleotide
  Sense Strand Starting at position 950 of SEQ ID NO: 315441
uuaggaaguuuacuuugua

SEQ ID NO: 393368 - RNA, 19 nt, Artificial Sequence
  Description of Artificial Sequence: Synthetic oligonucleotide
  Antisense Strand to SEQ ID NO: 393367
uacaaaguaaacuuccuaa

SEQ ID NO: 393369 - RNA, 19 nt, Artificial Sequence
  Description of Artificial Sequence: Synthetic oligonucleotide
  Sense Strand Starting at position 950 of SEQ ID NO: 315444
ggaaguuuacuuuguacau

SEQ ID NO: 393370 - RNA, 19 nt, Artificial Sequence
  Description of Artificial Sequence: Synthetic oligonucleotide
  Antisense Strand to SEQ ID NO: 393369
auguacaaaguaaacuucc

SEQ ID NO: 393371 - RNA, 19 nt, Artificial Sequence
  Description of Artificial Sequence: Synthetic oligonucleotide
  Sense Strand Starting at position 950 of SEQ ID NO: 315633
gaguaaagauaggagaauu

SEQ ID NO: 393372 - RNA, 19 nt, Artificial Sequence
  Description of Artificial Sequence: Synthetic oligonucleotide
  Antisense Strand to SEQ ID NO: 393371
aauucuccuaucuuuacuc

SEQ ID NO: 393373 - RNA, 19 nt, Artificial Sequence
  Description of Artificial Sequence: Synthetic oligonucleotide
  Sense Strand Starting at position 950 of SEQ ID NO: 315677
aucuuucuaugagucucau

SEQ ID NO: 393374 - RNA, 19 nt, Artificial Sequence
  Description of Artificial Sequence: Synthetic oligonucleotide
  Antisense Strand to SEQ ID NO: 393373
augagacucauagaaagau

SEQ ID NO: 393375 - RNA, 19 nt, Artificial Sequence
  Description of Artificial Sequence: Synthetic oligonucleotide
  Sense Strand Starting at position 950 of SEQ ID NO: 315683
cuaugagucucaucuggaa

SEQ ID NO: 393376 - RNA, 19 nt, Artificial Sequence
  Description of Artificial Sequence: Synthetic oligonucleotide
  Antisense Strand to SEQ ID NO: 393375
uuccagaugagacucauag

SEQ ID NO: 393377 - RNA, 19 nt, Artificial Sequence
  Description of Artificial Sequence: Synthetic oligonucleotide
  Sense Strand Starting at position 950 of SEQ ID NO: 315687
gagucucaucuggaagcca

SEQ ID NO: 393378 - RNA, 19 nt, Artificial Sequence
  Description of Artificial Sequence: Synthetic oligonucleotide
  Antisense Strand to SEQ ID NO: 393377
uggcuuccagaugagacuc

SEQ ID NO: 393379 - RNA, 19 nt, Artificial Sequence
  Description of Artificial Sequence: Synthetic oligonucleotide
  Sense Strand Starting at position 950 of SEQ ID NO: 315899
uugucaagaguaugaauaa

SEQ ID NO: 393380 - RNA, 19 nt, Artificial Sequence
  Description of Artificial Sequence: Synthetic oligonucleotide
  Antisense Strand to SEQ ID NO: 393379
uuauucauacucuugacaa

SEQ ID NO: 393381 - RNA, 19 nt, Artificial Sequence
  Description of Artificial Sequence: Synthetic oligonucleotide
  Sense Strand Starting at position 950 of SEQ ID NO: 315932
ggaaauauuaacggucuuu

SEQ ID NO: 393382 - RNA, 19 nt, Artificial Sequence
  Description of Artificial Sequence: Synthetic oligonucleotide
  Antisense Strand to SEQ ID NO: 393381
aaagaccguuaauauuucc

SEQ ID NO: 393383 - RNA, 19 nt, Artificial Sequence
  Description of Artificial Sequence: Synthetic oligonucleotide
  Sense Strand Starting at position 950 of SEQ ID NO: 315938
auuaacggucuuuaaacau

SEQ ID NO: 393384 - RNA, 19 nt, Artificial Sequence
  Description of Artificial Sequence: Synthetic oligonucleotide
  Antisense Strand to SEQ ID NO: 393383
auguuuaaagaccguuaau

SEQ ID NO: 393385 - RNA, 19 nt, Artificial Sequence
  Description of Artificial Sequence: Synthetic oligonucleotide
  Sense Strand Starting at position 950 of SEQ ID NO: 316083
guaccaucaucaccauagu

SEQ ID NO: 393386 - RNA, 19 nt, Artificial Sequence
  Description of Artificial Sequence: Synthetic oligonucleotide
  Antisense Strand to SEQ ID NO: 393385
acuauggugaugaugguac

SEQ ID NO: 393387 - RNA, 19 nt, Artificial Sequence
  Description of Artificial Sequence: Synthetic oligonucleotide
  Sense Strand Starting at position 950 of SEQ ID NO: 316206
ccuguuaucuacuucugac

SEQ ID NO: 393388 - RNA, 19 nt, Artificial Sequence
  Description of Artificial Sequence: Synthetic oligonucleotide
  Antisense Strand to SEQ ID NO: 393387
gucagaaguagauaacagg

SEQ ID NO: 393389 - RNA, 19 nt, Artificial Sequence
  Description of Artificial Sequence: Synthetic oligonucleotide
  Sense Strand Starting at position 950 of SEQ ID NO: 316244
ugaacuuuccuaugaaugg

SEQ ID NO: 393390 - RNA, 19 nt, Artificial Sequence
  Description of Artificial Sequence: Synthetic oligonucleotide
  Antisense Strand to SEQ ID NO: 393389
ccauucauaggaaaguuca

SEQ ID NO: 393391 - RNA, 19 nt, Artificial Sequence
  Description of Artificial Sequence: Synthetic oligonucleotide
  Sense Strand Starting at position 950 of SEQ ID NO: 316264
aucauaucauaugugaugu

SEQ ID NO: 393392 - RNA, 19 nt, Artificial Sequence
  Description of Artificial Sequence: Synthetic oligonucleotide
  Antisense Strand to SEQ ID NO: 393391
acaucacauaugauaugau

SEQ ID NO: 393393 - RNA, 19 nt, Artificial Sequence
  Description of Artificial Sequence: Synthetic oligonucleotide
  Sense Strand Starting at position 950 of SEQ ID NO: 316355
uuaagcaugugaucaauac

SEQ ID NO: 393394 - RNA, 19 nt, Artificial Sequence
  Description of Artificial Sequence: Synthetic oligonucleotide
  Antisense Strand to SEQ ID NO: 393393
guauugaucacaugcuuaa

SEQ ID NO: 393395 - RNA, 19 nt, Artificial Sequence
  Description of Artificial Sequence: Synthetic oligonucleotide
  Sense Strand Starting at position 950 of SEQ ID NO: 316554
auaugagaacucuguuuau

SEQ ID NO: 393396 - RNA, 19 nt, Artificial Sequence
  Description of Artificial Sequence: Synthetic oligonucleotide
  Antisense Strand to SEQ ID NO: 393395
auaaacagaguucucauau

SEQ ID NO: 393397 - RNA, 19 nt, Artificial Sequence
  Description of Artificial Sequence: Synthetic oligonucleotide
  Sense Strand Starting at position 950 of SEQ ID NO: 316557
ugagaacucuguuuaucau

SEQ ID NO: 393398 - RNA, 19 nt, Artificial Sequence
  Description of Artificial Sequence: Synthetic oligonucleotide
  Antisense Strand to SEQ ID NO: 393397
augauaaacagaguucuca

SEQ ID NO: 393399 - RNA, 19 nt, Artificial Sequence
  Description of Artificial Sequence: Synthetic oligonucleotide
  Sense Strand Starting at position 950 of SEQ ID NO: 316624
uuccauaagcaguauauga

SEQ ID NO: 393400 - RNA, 19 nt, Artificial Sequence
  Description of Artificial Sequence: Synthetic oligonucleotide
  Antisense Strand to SEQ ID NO: 393399
ucauauacugcuuauggaa

SEQ ID NO: 393401 - RNA, 19 nt, Artificial Sequence
  Description of Artificial Sequence: Synthetic oligonucleotide
  Sense Strand Starting at position 950 of SEQ ID NO: 316755
auacuaaaguugucaggca

SEQ ID NO: 393402 - RNA, 19 nt, Artificial Sequence
  Description of Artificial Sequence: Synthetic oligonucleotide
  Antisense Strand to SEQ ID NO: 393401
ugccugacaacuuuaguau

SEQ ID NO: 393403 - RNA, 19 nt, Artificial Sequence
  Description of Artificial Sequence: Synthetic oligonucleotide
  Sense Strand Starting at position 950 of SEQ ID NO: 317234
caucuuguccuauguggga

SEQ ID NO: 393404 - RNA, 19 nt, Artificial Sequence
  Description of Artificial Sequence: Synthetic oligonucleotide
  Antisense Strand to SEQ ID NO: 393403
ucccacauaggacaagaug

SEQ ID NO: 393405 - RNA, 19 nt, Artificial Sequence
  Description of Artificial Sequence: Synthetic oligonucleotide
  Sense Strand Starting at position 950 of SEQ ID NO: 317441
auacgcgauacgcaaauuu

SEQ ID NO: 393406 - RNA, 19 nt, Artificial Sequence
  Description of Artificial Sequence: Synthetic oligonucleotide
  Antisense Strand to SEQ ID NO: 393405
aaauuugcguaucgcguau

SEQ ID NO: 393407 - RNA, 19 nt, Artificial Sequence
  Description of Artificial Sequence: Synthetic oligonucleotide
  Sense Strand Starting at position 950 of SEQ ID NO: 317480
gucuuaucaguuuaaugau

SEQ ID NO: 393408 - RNA, 19 nt, Artificial Sequence
  Description of Artificial Sequence: Synthetic oligonucleotide
  Antisense Strand to SEQ ID NO: 393407
aucauuaaacugauaagac

SEQ ID NO: 393409 - RNA, 19 nt, Artificial Sequence
  Description of Artificial Sequence: Synthetic oligonucleotide
  Sense Strand Starting at position 950 of SEQ ID NO: 317492
uaaugaugguguccuuuaa

SEQ ID NO: 393410 - RNA, 19 nt, Artificial Sequence
  Description of Artificial Sequence: Synthetic oligonucleotide
  Antisense Strand to SEQ ID NO: 393409
uuaaaggacaccaucauua

SEQ ID NO: 393411 - RNA, 19 nt, Artificial Sequence
  Description of Artificial Sequence: Synthetic oligonucleotide
  Sense Strand Starting at position 950 of SEQ ID NO: 317496
gaugguguccuuuaaggua

SEQ ID NO: 393412 - RNA, 19 nt, Artificial Sequence
  Description of Artificial Sequence: Synthetic oligonucleotide
  Antisense Strand to SEQ ID NO: 393411
uaccuuaaaggacaccauc

SEQ ID NO: 393413 - RNA, 19 nt, Artificial Sequence
  Description of Artificial Sequence: Synthetic oligonucleotide
  Sense Strand Starting at position 950 of SEQ ID NO: 317701
uuguauguggcaugaaaua

SEQ ID NO: 393414 - RNA, 19 nt, Artificial Sequence
  Description of Artificial Sequence: Synthetic oligonucleotide
  Antisense Strand to SEQ ID NO: 393413
uauuucaugccacauacaa

SEQ ID NO: 393415 - RNA, 19 nt, Artificial Sequence
  Description of Artificial Sequence: Synthetic oligonucleotide
  Sense Strand Starting at position 950 of SEQ ID NO: 317710
gcaugaaauagagguccaa

SEQ ID NO: 393416 - RNA, 19 nt, Artificial Sequence
  Description of Artificial Sequence: Synthetic oligonucleotide
  Antisense Strand to SEQ ID NO: 393415
uuggaccucuauuucaugc

SEQ ID NO: 393417 - RNA, 19 nt, Artificial Sequence
  Description of Artificial Sequence: Synthetic oligonucleotide
  Sense Strand Starting at position 950 of SEQ ID NO: 317745
guagaaaucuacuugccua

SEQ ID NO: 393418 - RNA, 19 nt, Artificial Sequence
  Description of Artificial Sequence: Synthetic oligonucleotide
  Antisense Strand to SEQ ID NO: 393417
uaggcaaguagauuucuac

SEQ ID NO: 393419 - RNA, 19 nt, Artificial Sequence
  Description of Artificial Sequence: Synthetic oligonucleotide
  Sense Strand Starting at position 950 of SEQ ID NO: 317826
gucaguugaccacagaugu

SEQ ID NO: 393420 - RNA, 19 nt, Artificial Sequence
  Description of Artificial Sequence: Synthetic oligonucleotide
  Antisense Strand to SEQ ID NO: 393419
acaucuguggucaacugac

SEQ ID NO: 393421 - RNA, 19 nt, Artificial Sequence
  Description of Artificial Sequence: Synthetic oligonucleotide
  Sense Strand Starting at position 950 of SEQ ID NO: 317929
uuaagaugcuaagucauga

SEQ ID NO: 393422 - RNA, 19 nt, Artificial Sequence
  Description of Artificial Sequence: Synthetic oligonucleotide
  Antisense Strand to SEQ ID NO: 393421
ucaugacuuagcaucuuaa

SEQ ID NO: 393423 - RNA, 19 nt, Artificial Sequence
  Description of Artificial Sequence: Synthetic oligonucleotide
  Sense Strand Starting at position 950 of SEQ ID NO: 317990
aaaggugaauugucuuugu

SEQ ID NO: 393424 - RNA, 19 nt, Artificial Sequence
  Description of Artificial Sequence: Synthetic oligonucleotide
  Antisense Strand to SEQ ID NO: 393423
acaaagacaauucaccuuu

SEQ ID NO: 393425 - RNA, 19 nt, Artificial Sequence
  Description of Artificial Sequence: Synthetic oligonucleotide
  Sense Strand Starting at position 950 of SEQ ID NO: 318044
gggucuaugcgauacuacu

SEQ ID NO: 393426 - RNA, 19 nt, Artificial Sequence
  Description of Artificial Sequence: Synthetic oligonucleotide
  Antisense Strand to SEQ ID NO: 393425
aguaguaucgcauagaccc

SEQ ID NO: 393427 - RNA, 19 nt, Artificial Sequence
  Description of Artificial Sequence: Synthetic oligonucleotide
  Sense Strand Starting at position 950 of SEQ ID NO: 318050
augcgauacuacuugaauu

SEQ ID NO: 393428 - RNA, 19 nt, Artificial Sequence
  Description of Artificial Sequence: Synthetic oligonucleotide
  Antisense Strand to SEQ ID NO: 393427
aauucaaguaguaucgcau

SEQ ID NO: 393429 - RNA, 19 nt, Artificial Sequence
  Description of Artificial Sequence: Synthetic oligonucleotide
  Sense Strand Starting at position 950 of SEQ ID NO: 318078
guuugcccauuucuacaua

SEQ ID NO: 393430 - RNA, 19 nt, Artificial Sequence
  Description of Artificial Sequence: Synthetic oligonucleotide
  Antisense Strand to SEQ ID NO: 393429
uauguagaaaugggcaaac

SEQ ID NO: 393431 - RNA, 19 nt, Artificial Sequence
  Description of Artificial Sequence: Synthetic oligonucleotide
  Sense Strand Starting at position 950 of SEQ ID NO: 318108
gguucugacagggauugua

SEQ ID NO: 393432 - RNA, 19 nt, Artificial Sequence
  Description of Artificial Sequence: Synthetic oligonucleotide
  Antisense Strand to SEQ ID NO: 393431
uacaaucccugucagaacc

SEQ ID NO: 393433 - RNA, 19 nt, Artificial Sequence
  Description of Artificial Sequence: Synthetic oligonucleotide
  Sense Strand Starting at position 950 of SEQ ID NO: 318190
cuauaaacacgagaugcuu

SEQ ID NO: 393434 - RNA, 19 nt, Artificial Sequence
  Description of Artificial Sequence: Synthetic oligonucleotide
  Antisense Strand to SEQ ID NO: 393433
aagcaucucguguuuauag

SEQ ID NO: 393435 - RNA, 19 nt, Artificial Sequence
  Description of Artificial Sequence: Synthetic oligonucleotide
  Sense Strand Starting at position 950 of SEQ ID NO: 318198
acgagaugcuuuccacuua

SEQ ID NO: 393436 - RNA, 19 nt, Artificial Sequence
  Description of Artificial Sequence: Synthetic oligonucleotide
  Antisense Strand to SEQ ID NO: 393435
uaaguggaaagcaucucgu

SEQ ID NO: 393437 - RNA, 19 nt, Artificial Sequence
  Description of Artificial Sequence: Synthetic oligonucleotide
  Sense Strand Starting at position 950 of SEQ ID NO: 318482
agauuauguuaucugcuaa

SEQ ID NO: 393438 - RNA, 19 nt, Artificial Sequence
  Description of Artificial Sequence: Synthetic oligonucleotide
  Antisense Strand to SEQ ID NO: 393437
uuagcagauaacauaaucu

SEQ ID NO: 393439 - RNA, 19 nt, Artificial Sequence
  Description of Artificial Sequence: Synthetic oligonucleotide
  Sense Strand Starting at position 950 of SEQ ID NO: 318601
agcagauagcauugagaug

SEQ ID NO: 393440 - RNA, 19 nt, Artificial Sequence
  Description of Artificial Sequence: Synthetic oligonucleotide
  Antisense Strand to SEQ ID NO: 393439
caucucaaugcuaucugcu

SEQ ID NO: 393441 - RNA, 19 nt, Artificial Sequence
  Description of Artificial Sequence: Synthetic oligonucleotide
  Sense Strand Starting at position 950 of SEQ ID NO: 319088
ugcauagcauuauuuguaa

SEQ ID NO: 393442 - RNA, 19 nt, Artificial Sequence
  Description of Artificial Sequence: Synthetic oligonucleotide
  Antisense Strand to SEQ ID NO: 393441
uuacaaauaaugcuaugca

SEQ ID NO: 393443 - RNA, 19 nt, Artificial Sequence
  Description of Artificial Sequence: Synthetic oligonucleotide
  Sense Strand Starting at position 950 of SEQ ID NO: 319150
ugcaacuuugaaugaaaug

SEQ ID NO: 393444 - RNA, 19 nt, Artificial Sequence
  Description of Artificial Sequence: Synthetic oligonucleotide
  Antisense Strand to SEQ ID NO: 393443
cauuucauucaaaguugca

SEQ ID NO: 393445 - RNA, 19 nt, Artificial Sequence
  Description of Artificial Sequence: Synthetic oligonucleotide
  Sense Strand Starting at position 950 of SEQ ID NO: 319217
guuaaauuccuauggcaug

SEQ ID NO: 393446 - RNA, 19 nt, Artificial Sequence
  Description of Artificial Sequence: Synthetic oligonucleotide
  Antisense Strand to SEQ ID NO: 393445
caugccauaggaauuuaac

SEQ ID NO: 393447 - RNA, 19 nt, Artificial Sequence
  Description of Artificial Sequence: Synthetic oligonucleotide
  Sense Strand Starting at position 951 of SEQ ID NO: 315251
aggaguucucaauauguug

SEQ ID NO: 393448 - RNA, 19 nt, Artificial Sequence
  Description of Artificial Sequence: Synthetic oligonucleotide
  Antisense Strand to SEQ ID NO: 393447
caacauauugagaacuccu

SEQ ID NO: 393449 - RNA, 19 nt, Artificial Sequence
  Description of Artificial Sequence: Synthetic oligonucleotide
  Sense Strand Starting at position 951 of SEQ ID NO: 315668
cucacucgugcccagaaga

SEQ ID NO: 393450 - RNA, 19 nt, Artificial Sequence
  Description of Artificial Sequence: Synthetic oligonucleotide
  Antisense Strand to SEQ ID NO: 393449
ucuucugggcacgagugag

SEQ ID NO: 393451 - RNA, 19 nt, Artificial Sequence
  Description of Artificial Sequence: Synthetic oligonucleotide
  Sense Strand Starting at position 951 of SEQ ID NO: 316083
gaagaaagagcccgugagu

SEQ ID NO: 393452 - RNA, 19 nt, Artificial Sequence
  Description of Artificial Sequence: Synthetic oligonucleotide
  Antisense Strand to SEQ ID NO: 393451
acucacgggcucuuucuuc

SEQ ID NO: 393453 - RNA, 19 nt, Artificial Sequence
  Description of Artificial Sequence: Synthetic oligonucleotide
  Sense Strand Starting at position 951 of SEQ ID NO: 316105
uggcaucucugcuccaaga

SEQ ID NO: 393454 - RNA, 19 nt, Artificial Sequence
  Description of Artificial Sequence: Synthetic oligonucleotide
  Antisense Strand to SEQ ID NO: 393453
ucuuggagcagagaugcca

SEQ ID NO: 393455 - RNA, 19 nt, Artificial Sequence
  Description of Artificial Sequence: Synthetic oligonucleotide
  Sense Strand Starting at position 951 of SEQ ID NO: 316107
gcaucucugcuccaagaag

SEQ ID NO: 393456 - RNA, 19 nt, Artificial Sequence
  Description of Artificial Sequence: Synthetic oligonucleotide
  Antisense Strand to SEQ ID NO: 393455
cuucuuggagcagagaugc

SEQ ID NO: 393457 - RNA, 19 nt, Artificial Sequence
  Description of Artificial Sequence: Synthetic oligonucleotide
  Sense Strand Starting at position 951 of SEQ ID NO: 316229
gcacgugucgagaguggau

SEQ ID NO: 393458 - RNA, 19 nt, Artificial Sequence
  Description of Artificial Sequence: Synthetic oligonucleotide
  Antisense Strand to SEQ ID NO: 393457
auccacucucgacacgugc

SEQ ID NO: 393459 - RNA, 19 nt, Artificial Sequence
  Description of Artificial Sequence: Synthetic oligonucleotide
  Sense Strand Starting at position 951 of SEQ ID NO: 316321
agaacuaggugucuagaaa

SEQ ID NO: 393460 - RNA, 19 nt, Artificial Sequence
  Description of Artificial Sequence: Synthetic oligonucleotide
  Antisense Strand to SEQ ID NO: 393459
uuucuagacaccuaguucu

SEQ ID NO: 393461 - RNA, 19 nt, Artificial Sequence
  Description of Artificial Sequence: Synthetic oligonucleotide
  Sense Strand Starting at position 951 of SEQ ID NO: 316445
caguguggaucuucuuacu

SEQ ID NO: 393462 - RNA, 19 nt, Artificial Sequence
  Description of Artificial Sequence: Synthetic oligonucleotide
  Antisense Strand to SEQ ID NO: 393461
aguaagaagauccacacug

SEQ ID NO: 393463 - RNA, 19 nt, Artificial Sequence
  Description of Artificial Sequence: Synthetic oligonucleotide
  Sense Strand Starting at position 951 of SEQ ID NO: 316529
acaggaucccgguagcuuu

SEQ ID NO: 393464 - RNA, 19 nt, Artificial Sequence
  Description of Artificial Sequence: Synthetic oligonucleotide
  Antisense Strand to SEQ ID NO: 393463
aaagcuaccgggauccugu

SEQ ID NO: 393465 - RNA, 19 nt, Artificial Sequence
  Description of Artificial Sequence: Synthetic oligonucleotide
  Sense Strand Starting at position 951 of SEQ ID NO: 316541
uagcuuugucaauggugga

SEQ ID NO: 393466 - RNA, 19 nt, Artificial Sequence
  Description of Artificial Sequence: Synthetic oligonucleotide
  Antisense Strand to SEQ ID NO: 393465
uccaccauugacaaagcua

SEQ ID NO: 393467 - RNA, 19 nt, Artificial Sequence
  Description of Artificial Sequence: Synthetic oligonucleotide
  Sense Strand Starting at position 951 of SEQ ID NO: 316542
agcuuugucaaugguggaa

SEQ ID NO: 393468 - RNA, 19 nt, Artificial Sequence
  Description of Artificial Sequence: Synthetic oligonucleotide
  Antisense Strand to SEQ ID NO: 393467
uuccaccauugacaaagcu

SEQ ID NO: 393469 - RNA, 19 nt, Artificial Sequence
  Description of Artificial Sequence: Synthetic oligonucleotide
  Sense Strand Starting at position 951 of SEQ ID NO: 316897
cucgcugaccaaugagagu

SEQ ID NO: 393470 - RNA, 19 nt, Artificial Sequence
  Description of Artificial Sequence: Synthetic oligonucleotide
  Antisense Strand to SEQ ID NO: 393469
acucucauuggucagcgag

SEQ ID NO: 393471 - RNA, 19 nt, Artificial Sequence
  Description of Artificial Sequence: Synthetic oligonucleotide
  Sense Strand Starting at position 951 of SEQ ID NO: 317092
ggagauauuugccacggac

SEQ ID NO: 393472 - RNA, 19 nt, Artificial Sequence
  Description of Artificial Sequence: Synthetic oligonucleotide
  Antisense Strand to SEQ ID NO: 393471
guccguggcaaauaucucc

SEQ ID NO: 393473 - RNA, 19 nt, Artificial Sequence
  Description of Artificial Sequence: Synthetic oligonucleotide
  Sense Strand Starting at position 951 of SEQ ID NO: 317327
cguagagaauguguggaau

SEQ ID NO: 393474 - RNA, 19 nt, Artificial Sequence
  Description of Artificial Sequence: Synthetic oligonucleotide
  Antisense Strand to SEQ ID NO: 393473
auuccacacauucucuacg

SEQ ID NO: 393475 - RNA, 19 nt, Artificial Sequence
  Description of Artificial Sequence: Synthetic oligonucleotide
  Sense Strand Starting at position 951 of SEQ ID NO: 317361
cccauaaguccgccgguuu

SEQ ID NO: 393476 - RNA, 19 nt, Artificial Sequence
  Description of Artificial Sequence: Synthetic oligonucleotide
  Antisense Strand to SEQ ID NO: 393475
aaaccggcggacuuauggg

SEQ ID NO: 393477 - RNA, 19 nt, Artificial Sequence
  Description of Artificial Sequence: Synthetic oligonucleotide
  Sense Strand Starting at position 951 of SEQ ID NO: 317447
acauaaguucuaugaugau

SEQ ID NO: 393478 - RNA, 19 nt, Artificial Sequence
  Description of Artificial Sequence: Synthetic oligonucleotide
  Antisense Strand to SEQ ID NO: 393477
aucaucauagaacuuaugu

SEQ ID NO: 393479 - RNA, 19 nt, Artificial Sequence
  Description of Artificial Sequence: Synthetic oligonucleotide
  Sense Strand Starting at position 951 of SEQ ID NO: 317450
uaaguucuaugaugauuug

SEQ ID NO: 393480 - RNA, 19 nt, Artificial Sequence
  Description of Artificial Sequence: Synthetic oligonucleotide
  Antisense Strand to SEQ ID NO: 393479
caaaucaucauagaacuua

SEQ ID NO: 393481 - RNA, 19 nt, Artificial Sequence
  Description of Artificial Sequence: Synthetic oligonucleotide
  Sense Strand Starting at position 951 of SEQ ID NO: 317456
cuaugaugauuugguuuaa

SEQ ID NO: 393482 - RNA, 19 nt, Artificial Sequence
  Description of Artificial Sequence: Synthetic oligonucleotide
  Antisense Strand to SEQ ID NO: 393481
uuaaaccaaaucaucauag

SEQ ID NO: 393483 - RNA, 19 nt, Artificial Sequence
  Description of Artificial Sequence: Synthetic oligonucleotide
  Sense Strand Starting at position 951 of SEQ ID NO: 317812
gccaaagcauuaucaggaa

SEQ ID NO: 393484 - RNA, 19 nt, Artificial Sequence
  Description of Artificial Sequence: Synthetic oligonucleotide
  Antisense Strand to SEQ ID NO: 393483
uuccugauaaugcuuuggc

SEQ ID NO: 393485 - RNA, 19 nt, Artificial Sequence
  Description of Artificial Sequence: Synthetic oligonucleotide
  Sense Strand Starting at position 951 of SEQ ID NO: 317866
aggccuuugagaggauauu

SEQ ID NO: 393486 - RNA, 19 nt, Artificial Sequence
  Description of Artificial Sequence: Synthetic oligonucleotide
  Antisense Strand to SEQ ID NO: 393485
aauauccucucaaaggccu

SEQ ID NO: 393487 - RNA, 19 nt, Artificial Sequence
  Description of Artificial Sequence: Synthetic oligonucleotide
  Sense Strand Starting at position 951 of SEQ ID NO: 317985
ggaccugcuggcugaaaca

SEQ ID NO: 393488 - RNA, 19 nt, Artificial Sequence
  Description of Artificial Sequence: Synthetic oligonucleotide
  Antisense Strand to SEQ ID NO: 393487
uguuucagccagcaggucc

SEQ ID NO: 393489 - RNA, 19 nt, Artificial Sequence
  Description of Artificial Sequence: Synthetic oligonucleotide
  Sense Strand Starting at position 951 of SEQ ID NO: 318043
guaguaagggacugaggua

SEQ ID NO: 393490 - RNA, 19 nt, Artificial Sequence
  Description of Artificial Sequence: Synthetic oligonucleotide
  Antisense Strand to SEQ ID NO: 393489
uaccucagucccuuacuac

SEQ ID NO: 393491 - RNA, 19 nt, Artificial Sequence
  Description of Artificial Sequence: Synthetic oligonucleotide
  Sense Strand Starting at position 951 of SEQ ID NO: 318137
auuggugaugcucauacuu

SEQ ID NO: 393492 - RNA, 19 nt, Artificial Sequence
  Description of Artificial Sequence: Synthetic oligonucleotide
  Antisense Strand to SEQ ID NO: 393491
aaguaugagcaucaccaau

SEQ ID NO: 393493 - RNA, 19 nt, Artificial Sequence
  Description of Artificial Sequence: Synthetic oligonucleotide
  Sense Strand Starting at position 951 of SEQ ID NO: 318175
gcaggauccugacuagucu

SEQ ID NO: 393494 - RNA, 19 nt, Artificial Sequence
  Description of Artificial Sequence: Synthetic oligonucleotide
  Antisense Strand to SEQ ID NO: 393493
agacuagucaggauccugc

SEQ ID NO: 393495 - RNA, 19 nt, Artificial Sequence
  Description of Artificial Sequence: Synthetic oligonucleotide
  Sense Strand Starting at position 951 of SEQ ID NO: 318182
ccugacuagucuuuaucua

SEQ ID NO: 393496 - RNA, 19 nt, Artificial Sequence
  Description of Artificial Sequence: Synthetic oligonucleotide
  Antisense Strand to SEQ ID NO: 393495
uagauaaagacuagucagg

SEQ ID NO: 393497 - RNA, 19 nt, Artificial Sequence
  Description of Artificial Sequence: Synthetic oligonucleotide
  Sense Strand Starting at position 951 of SEQ ID NO: 318183
cugacuagucuuuaucuau

SEQ ID NO: 393498 - RNA, 19 nt, Artificial Sequence
  Description of Artificial Sequence: Synthetic oligonucleotide
  Antisense Strand to SEQ ID NO: 393497
auagauaaagacuagucag

SEQ ID NO: 393499 - RNA, 19 nt, Artificial Sequence
  Description of Artificial Sequence: Synthetic oligonucleotide
  Sense Strand Starting at position 951 of SEQ ID NO: 318313
gcuguaucgcuauccaggu

SEQ ID NO: 393500 - RNA, 19 nt, Artificial Sequence
  Description of Artificial Sequence: Synthetic oligonucleotide
  Antisense Strand to SEQ ID NO: 393499
accuggauagcgauacagc

SEQ ID NO: 393501 - RNA, 19 nt, Artificial Sequence
  Description of Artificial Sequence: Synthetic oligonucleotide
  Sense Strand Starting at position 951 of SEQ ID NO: 318396
ugcaguguacugcaugaga

SEQ ID NO: 393502 - RNA, 19 nt, Artificial Sequence
  Description of Artificial Sequence: Synthetic oligonucleotide
  Antisense Strand to SEQ ID NO: 393501
ucucaugcaguacacugca

SEQ ID NO: 393503 - RNA, 19 nt, Artificial Sequence
  Description of Artificial Sequence: Synthetic oligonucleotide
  Sense Strand Starting at position 951 of SEQ ID NO: 318398
caguguacugcaugagaaa

SEQ ID NO: 393504 - RNA, 19 nt, Artificial Sequence
  Description of Artificial Sequence: Synthetic oligonucleotide
  Antisense Strand to SEQ ID NO: 393503
uuucucaugcaguacacug

SEQ ID NO: 393505 - RNA, 19 nt, Artificial Sequence
  Description of Artificial Sequence: Synthetic oligonucleotide
  Sense Strand Starting at position 951 of SEQ ID NO: 318399
aguguacugcaugagaaag

SEQ ID NO: 393506 - RNA, 19 nt, Artificial Sequence
  Description of Artificial Sequence: Synthetic oligonucleotide
  Antisense Strand to SEQ ID NO: 393505
cuuucucaugcaguacacu

SEQ ID NO: 393507 - RNA, 19 nt, Artificial Sequence
  Description of Artificial Sequence: Synthetic oligonucleotide
  Sense Strand Starting at position 951 of SEQ ID NO: 318584
ugccacuauuuccucagua

SEQ ID NO: 393508 - RNA, 19 nt, Artificial Sequence
  Description of Artificial Sequence: Synthetic oligonucleotide
  Antisense Strand to SEQ ID NO: 393507
uacugaggaaauaguggca

SEQ ID NO: 393509 - RNA, 19 nt, Artificial Sequence
  Description of Artificial Sequence: Synthetic oligonucleotide
  Sense Strand Starting at position 951 of SEQ ID NO: 318585
gccacuauuuccucaguac

SEQ ID NO: 393510 - RNA, 19 nt, Artificial Sequence
  Description of Artificial Sequence: Synthetic oligonucleotide
  Antisense Strand to SEQ ID NO: 393509
guacugaggaaauaguggc

SEQ ID NO: 393511 - RNA, 19 nt, Artificial Sequence
  Description of Artificial Sequence: Synthetic oligonucleotide
  Sense Strand Starting at position 951 of SEQ ID NO: 318643
guccuacaggucuagugau

SEQ ID NO: 393512 - RNA, 19 nt, Artificial Sequence
  Description of Artificial Sequence: Synthetic oligonucleotide
  Antisense Strand to SEQ ID NO: 393511
aucacuagaccuguaggac

SEQ ID NO: 393513 - RNA, 19 nt, Artificial Sequence
  Description of Artificial Sequence: Synthetic oligonucleotide
  Sense Strand Starting at position 951 of SEQ ID NO: 318656
agugauggcucccucaaug

SEQ ID NO: 393514 - RNA, 19 nt, Artificial Sequence
  Description of Artificial Sequence: Synthetic oligonucleotide
  Antisense Strand to SEQ ID NO: 393513
cauugagggagccaucacu

SEQ ID NO: 393515 - RNA, 19 nt, Artificial Sequence
  Description of Artificial Sequence: Synthetic oligonucleotide
  Sense Strand Starting at position 951 of SEQ ID NO: 318761
ccaccagugucaccaagaa

SEQ ID NO: 393516 - RNA, 19 nt, Artificial Sequence
  Description of Artificial Sequence: Synthetic oligonucleotide
  Antisense Strand to SEQ ID NO: 393515
uucuuggugacacuggugg

SEQ ID NO: 393517 - RNA, 19 nt, Artificial Sequence
  Description of Artificial Sequence: Synthetic oligonucleotide
  Sense Strand Starting at position 951 of SEQ ID NO: 318811
cagcuagugcccuagaugu

SEQ ID NO: 393518 - RNA, 19 nt, Artificial Sequence
  Description of Artificial Sequence: Synthetic oligonucleotide
  Antisense Strand to SEQ ID NO: 393517
acaucuagggcacuagcug

SEQ ID NO: 393519 - RNA, 19 nt, Artificial Sequence
  Description of Artificial Sequence: Synthetic oligonucleotide
  Sense Strand Starting at position 951 of SEQ ID NO: 318819
gcccuagaugucuacgacu

SEQ ID NO: 393520 - RNA, 19 nt, Artificial Sequence
  Description of Artificial Sequence: Synthetic oligonucleotide
  Antisense Strand to SEQ ID NO: 393519
agucguagacaucuagggc

SEQ ID NO: 393521 - RNA, 19 nt, Artificial Sequence
  Description of Artificial Sequence: Synthetic oligonucleotide
  Sense Strand Starting at position 951 of SEQ ID NO: 318821
ccuagaugucuacgacuug

SEQ ID NO: 393522 - RNA, 19 nt, Artificial Sequence
  Description of Artificial Sequence: Synthetic oligonucleotide
  Antisense Strand to SEQ ID NO: 393521
caagucguagacaucuagg

SEQ ID NO: 393523 - RNA, 19 nt, Artificial Sequence
  Description of Artificial Sequence: Synthetic oligonucleotide
  Sense Strand Starting at position 951 of SEQ ID NO: 319044
cugaaauauuugggacuac

SEQ ID NO: 393524 - RNA, 19 nt, Artificial Sequence
  Description of Artificial Sequence: Synthetic oligonucleotide
  Antisense Strand to SEQ ID NO: 393523
guagucccaaauauuucag

SEQ ID NO: 393525 - RNA, 19 nt, Artificial Sequence
  Description of Artificial Sequence: Synthetic oligonucleotide
  Sense Strand Starting at position 951 of SEQ ID NO: 319045
ugaaauauuugggacuaca

SEQ ID NO: 393526 - RNA, 19 nt, Artificial Sequence
  Description of Artificial Sequence: Synthetic oligonucleotide
  Antisense Strand to SEQ ID NO: 393525
uguagucccaaauauuuca

SEQ ID NO: 393527 - RNA, 19 nt, Artificial Sequence
  Description of Artificial Sequence: Synthetic oligonucleotide
  Sense Strand Starting at position 952 of SEQ ID NO: 315299
accauuuagguccguuuaa

SEQ ID NO: 393528 - RNA, 19 nt, Artificial Sequence
  Description of Artificial Sequence: Synthetic oligonucleotide
  Antisense Strand to SEQ ID NO: 393527
uuaaacggaccuaaauggu

SEQ ID NO: 393529 - RNA, 19 nt, Artificial Sequence
  Description of Artificial Sequence: Synthetic oligonucleotide
  Sense Strand Starting at position 952 of SEQ ID NO: 315300
ccauuuagguccguuuaaa

SEQ ID NO: 393530 - RNA, 19 nt, Artificial Sequence
  Description of Artificial Sequence: Synthetic oligonucleotide
  Antisense Strand to SEQ ID NO: 393529
uuuaaacggaccuaaaugg

SEQ ID NO: 393531 - RNA, 19 nt, Artificial Sequence
  Description of Artificial Sequence: Synthetic oligonucleotide
  Sense Strand Starting at position 952 of SEQ ID NO: 315326
ccugcaaacgcuuaaaucu

SEQ ID NO: 393532 - RNA, 19 nt, Artificial Sequence
  Description of Artificial Sequence: Synthetic oligonucleotide
  Antisense Strand to SEQ ID NO: 393531
agauuuaagcguuugcagg

SEQ ID NO: 393533 - RNA, 19 nt, Artificial Sequence
  Description of Artificial Sequence: Synthetic oligonucleotide
  Sense Strand Starting at position 952 of SEQ ID NO: 315336
cuuaaaucugcggguucca

SEQ ID NO: 393534 - RNA, 19 nt, Artificial Sequence
  Description of Artificial Sequence: Synthetic oligonucleotide
  Antisense Strand to SEQ ID NO: 393533
uggaacccgcagauuuaag

SEQ ID NO: 393535 - RNA, 19 nt, Artificial Sequence
  Description of Artificial Sequence: Synthetic oligonucleotide
  Sense Strand Starting at position 952 of SEQ ID NO: 315345
gcggguuccacugacuuau

SEQ ID NO: 393536 - RNA, 19 nt, Artificial Sequence
  Description of Artificial Sequence: Synthetic oligonucleotide
  Antisense Strand to SEQ ID NO: 393535
auaagucaguggaacccgc

SEQ ID NO: 393537 - RNA, 19 nt, Artificial Sequence
  Description of Artificial Sequence: Synthetic oligonucleotide
  Sense Strand Starting at position 952 of SEQ ID NO: 315347
ggguuccacugacuuauau

SEQ ID NO: 393538 - RNA, 19 nt, Artificial Sequence
  Description of Artificial Sequence: Synthetic oligonucleotide
  Antisense Strand to SEQ ID NO: 393537
auauaagucaguggaaccc

SEQ ID NO: 393539 - RNA, 19 nt, Artificial Sequence
  Description of Artificial Sequence: Synthetic oligonucleotide
  Sense Strand Starting at position 952 of SEQ ID NO: 315356
ugacuuauauccuaagagg

SEQ ID NO: 393540 - RNA, 19 nt, Artificial Sequence
  Description of Artificial Sequence: Synthetic oligonucleotide
  Antisense Strand to SEQ ID NO: 393539
ccucuuaggauauaaguca

SEQ ID NO: 393541 - RNA, 19 nt, Artificial Sequence
  Description of Artificial Sequence: Synthetic oligonucleotide
  Sense Strand Starting at position 952 of SEQ ID NO: 315359
cuuauauccuaagaggaga

SEQ ID NO: 393542 - RNA, 19 nt, Artificial Sequence
  Description of Artificial Sequence: Synthetic oligonucleotide
  Antisense Strand to SEQ ID NO: 393541
ucuccucuuaggauauaag

SEQ ID NO: 393543 - RNA, 19 nt, Artificial Sequence
  Description of Artificial Sequence: Synthetic oligonucleotide
  Sense Strand Starting at position 952 of SEQ ID NO: 315446
accuaauaguuucuggaag

SEQ ID NO: 393544 - RNA, 19 nt, Artificial Sequence
  Description of Artificial Sequence: Synthetic oligonucleotide
  Antisense Strand to SEQ ID NO: 393543
cuuccagaaacuauuaggu

SEQ ID NO: 393545 - RNA, 19 nt, Artificial Sequence
  Description of Artificial Sequence: Synthetic oligonucleotide
  Sense Strand Starting at position 952 of SEQ ID NO: 315532
cuuccaggauaugaacaau

SEQ ID NO: 393546 - RNA, 19 nt, Artificial Sequence
  Description of Artificial Sequence: Synthetic oligonucleotide
  Antisense Strand to SEQ ID NO: 393545
auuguucauauccuggaag

SEQ ID NO: 393547 - RNA, 19 nt, Artificial Sequence
  Description of Artificial Sequence: Synthetic oligonucleotide
  Sense Strand Starting at position 952 of SEQ ID NO: 315574
gcauguauuucugcugcuu

SEQ ID NO: 393548 - RNA, 19 nt, Artificial Sequence
  Description of Artificial Sequence: Synthetic oligonucleotide
  Antisense Strand to SEQ ID NO: 393547
aagcagcagaaauacaugc

SEQ ID NO: 393549 - RNA, 19 nt, Artificial Sequence
  Description of Artificial Sequence: Synthetic oligonucleotide
  Sense Strand Starting at position 952 of SEQ ID NO: 315592
uguccugaguucuuaagac

SEQ ID NO: 393550 - RNA, 19 nt, Artificial Sequence
  Description of Artificial Sequence: Synthetic oligonucleotide
  Antisense Strand to SEQ ID NO: 393549
gucuuaagaacucaggaca

SEQ ID NO: 393551 - RNA, 19 nt, Artificial Sequence
  Description of Artificial Sequence: Synthetic oligonucleotide
  Sense Strand Starting at position 952 of SEQ ID NO: 315611
uucuaauauucugaagaag

SEQ ID NO: 393552 - RNA, 19 nt, Artificial Sequence
  Description of Artificial Sequence: Synthetic oligonucleotide
  Antisense Strand to SEQ ID NO: 393551
cuucuucagaauauuagaa

SEQ ID NO: 393553 - RNA, 19 nt, Artificial Sequence
  Description of Artificial Sequence: Synthetic oligonucleotide
  Sense Strand Starting at position 952 of SEQ ID NO: 315781
agcuuaauugagcaagacu

SEQ ID NO: 393554 - RNA, 19 nt, Artificial Sequence
  Description of Artificial Sequence: Synthetic oligonucleotide
  Antisense Strand to SEQ ID NO: 393553
agucuugcucaauuaagcu

SEQ ID NO: 393555 - RNA, 19 nt, Artificial Sequence
  Description of Artificial Sequence: Synthetic oligonucleotide
  Sense Strand Starting at position 952 of SEQ ID NO: 315784
uuaauugagcaagacugua

SEQ ID NO: 393556 - RNA, 19 nt, Artificial Sequence
  Description of Artificial Sequence: Synthetic oligonucleotide
  Antisense Strand to SEQ ID NO: 393555
uacagucuugcucaauuaa

SEQ ID NO: 393557 - RNA, 19 nt, Artificial Sequence
  Description of Artificial Sequence: Synthetic oligonucleotide
  Sense Strand Starting at position 952 of SEQ ID NO: 315840
gugccuauuucucuagaac

SEQ ID NO: 393558 - RNA, 19 nt, Artificial Sequence
  Description of Artificial Sequence: Synthetic oligonucleotide
  Antisense Strand to SEQ ID NO: 393557
guucuagagaaauaggcac

SEQ ID NO: 393559 - RNA, 19 nt, Artificial Sequence
  Description of Artificial Sequence: Synthetic oligonucleotide
  Sense Strand Starting at position 952 of SEQ ID NO: 315952
gugauacacuaucagauuu

SEQ ID NO: 393560 - RNA, 19 nt, Artificial Sequence
  Description of Artificial Sequence: Synthetic oligonucleotide
  Antisense Strand to SEQ ID NO: 393559
aaaucugauaguguaucac

SEQ ID NO: 393561 - RNA, 19 nt, Artificial Sequence
  Description of Artificial Sequence: Synthetic oligonucleotide
  Sense Strand Starting at position 952 of SEQ ID NO: 316006
aagguaaagcacugauucu

SEQ ID NO: 393562 - RNA, 19 nt, Artificial Sequence
  Description of Artificial Sequence: Synthetic oligonucleotide
  Antisense Strand to SEQ ID NO: 393561
agaaucagugcuuuaccuu

SEQ ID NO: 393563 - RNA, 19 nt, Artificial Sequence
  Description of Artificial Sequence: Synthetic oligonucleotide
  Sense Strand Starting at position 952 of SEQ ID NO: 316205
agaggugacguguaugaau

SEQ ID NO: 393564 - RNA, 19 nt, Artificial Sequence
  Description of Artificial Sequence: Synthetic oligonucleotide
  Antisense Strand to SEQ ID NO: 393563
auucauacacgucaccucu

SEQ ID NO: 393565 - RNA, 19 nt, Artificial Sequence
  Description of Artificial Sequence: Synthetic oligonucleotide
  Sense Strand Starting at position 952 of SEQ ID NO: 316207
aggugacguguaugaauua

SEQ ID NO: 393566 - RNA, 19 nt, Artificial Sequence
  Description of Artificial Sequence: Synthetic oligonucleotide
  Antisense Strand to SEQ ID NO: 393565
uaauucauacacgucaccu

SEQ ID NO: 393567 - RNA, 19 nt, Artificial Sequence
  Description of Artificial Sequence: Synthetic oligonucleotide
  Sense Strand Starting at position 952 of SEQ ID NO: 316218
augaauuacgcuuauggac

SEQ ID NO: 393568 - RNA, 19 nt, Artificial Sequence
  Description of Artificial Sequence: Synthetic oligonucleotide
  Antisense Strand to SEQ ID NO: 393567
guccauaagcguaauucau

SEQ ID NO: 393569 - RNA, 19 nt, Artificial Sequence
  Description of Artificial Sequence: Synthetic oligonucleotide
  Sense Strand Starting at position 952 of SEQ ID NO: 316235
acguauuaguuucuaauga

SEQ ID NO: 393570 - RNA, 19 nt, Artificial Sequence
  Description of Artificial Sequence: Synthetic oligonucleotide
  Antisense Strand to SEQ ID NO: 393569
ucauuagaaacuaauacgu

SEQ ID NO: 393571 - RNA, 19 nt, Artificial Sequence
  Description of Artificial Sequence: Synthetic oligonucleotide
  Sense Strand Starting at position 952 of SEQ ID NO: 316372
ugguuuccgaagcagagaa

SEQ ID NO: 393572 - RNA, 19 nt, Artificial Sequence
  Description of Artificial Sequence: Synthetic oligonucleotide
  Antisense Strand to SEQ ID NO: 393571
uucucugcuucggaaacca

SEQ ID NO: 393573 - RNA, 19 nt, Artificial Sequence
  Description of Artificial Sequence: Synthetic oligonucleotide
  Sense Strand Starting at position 952 of SEQ ID NO: 316415
guacuugggccucaaguaa

SEQ ID NO: 393574 - RNA, 19 nt, Artificial Sequence
  Description of Artificial Sequence: Synthetic oligonucleotide
  Antisense Strand to SEQ ID NO: 393573
uuacuugaggcccaaguac

SEQ ID NO: 393575 - RNA, 19 nt, Artificial Sequence
  Description of Artificial Sequence: Synthetic oligonucleotide
  Sense Strand Starting at position 952 of SEQ ID NO: 316435
ggcauucuucgaggagaac

SEQ ID NO: 393576 - RNA, 19 nt, Artificial Sequence
  Description of Artificial Sequence: Synthetic oligonucleotide
  Antisense Strand to SEQ ID NO: 393575
guucuccucgaagaaugcc

SEQ ID NO: 393577 - RNA, 19 nt, Artificial Sequence
  Description of Artificial Sequence: Synthetic oligonucleotide
  Sense Strand Starting at position 952 of SEQ ID NO: 316741
gcuccuagagcagagauau

SEQ ID NO: 393578 - RNA, 19 nt, Artificial Sequence
  Description of Artificial Sequence: Synthetic oligonucleotide
  Antisense Strand to SEQ ID NO: 393577
auaucucugcucuaggagc

SEQ ID NO: 393579 - RNA, 19 nt, Artificial Sequence
  Description of Artificial Sequence: Synthetic oligonucleotide
  Sense Strand Starting at position 952 of SEQ ID NO: 317759
aguguuuguauacagggaa

SEQ ID NO: 393580 - RNA, 19 nt, Artificial Sequence
  Description of Artificial Sequence: Synthetic oligonucleotide
  Antisense Strand to SEQ ID NO: 393579
uucccuguauacaaacacu

SEQ ID NO: 393581 - RNA, 19 nt, Artificial Sequence
  Description of Artificial Sequence: Synthetic oligonucleotide
  Sense Strand Starting at position 952 of SEQ ID NO: 317777
aaauguggaaggcguuaaa

SEQ ID NO: 393582 - RNA, 19 nt, Artificial Sequence
  Description of Artificial Sequence: Synthetic oligonucleotide
  Antisense Strand to SEQ ID NO: 393581
uuuaacgccuuccacauuu

SEQ ID NO: 393583 - RNA, 19 nt, Artificial Sequence
  Description of Artificial Sequence: Synthetic oligonucleotide
  Sense Strand Starting at position 952 of SEQ ID NO: 317940
agaagucacuucguuagag

SEQ ID NO: 393584 - RNA, 19 nt, Artificial Sequence
  Description of Artificial Sequence: Synthetic oligonucleotide
  Antisense Strand to SEQ ID NO: 393583
cucuaacgaagugacuucu

SEQ ID NO: 393585 - RNA, 19 nt, Artificial Sequence
  Description of Artificial Sequence: Synthetic oligonucleotide
  Sense Strand Starting at position 952 of SEQ ID NO: 317941
gaagucacuucguuagagu

SEQ ID NO: 393586 - RNA, 19 nt, Artificial Sequence
  Description of Artificial Sequence: Synthetic oligonucleotide
  Antisense Strand to SEQ ID NO: 393585
acucuaacgaagugacuuc

SEQ ID NO: 393587 - RNA, 19 nt, Artificial Sequence
  Description of Artificial Sequence: Synthetic oligonucleotide
  Sense Strand Starting at position 952 of SEQ ID NO: 317942
aagucacuucguuagagua

SEQ ID NO: 393588 - RNA, 19 nt, Artificial Sequence
  Description of Artificial Sequence: Synthetic oligonucleotide
  Antisense Strand to SEQ ID NO: 393587
uacucuaacgaagugacuu

SEQ ID NO: 393589 - RNA, 19 nt, Artificial Sequence
  Description of Artificial Sequence: Synthetic oligonucleotide
  Sense Strand Starting at position 952 of SEQ ID NO: 318036
agugcuuggucacccauuu

SEQ ID NO: 393590 - RNA, 19 nt, Artificial Sequence
  Description of Artificial Sequence: Synthetic oligonucleotide
  Antisense Strand to SEQ ID NO: 393589
aaaugggugaccaagcacu

SEQ ID NO: 393591 - RNA, 19 nt, Artificial Sequence
  Description of Artificial Sequence: Synthetic oligonucleotide
  Sense Strand Starting at position 952 of SEQ ID NO: 318718
aguggaacuccguaucaaa

SEQ ID NO: 393592 - RNA, 19 nt, Artificial Sequence
  Description of Artificial Sequence: Synthetic oligonucleotide
  Antisense Strand to SEQ ID NO: 393591
uuugauacggaguuccacu

SEQ ID NO: 393593 - RNA, 19 nt, Artificial Sequence
  Description of Artificial Sequence: Synthetic oligonucleotide
  Sense Strand Starting at position 952 of SEQ ID NO: 318811
uuuagaucccucuggcaca

SEQ ID NO: 393594 - RNA, 19 nt, Artificial Sequence
  Description of Artificial Sequence: Synthetic oligonucleotide
  Antisense Strand to SEQ ID NO: 393593
ugugccagagggaucuaaa

SEQ ID NO: 393595 - RNA, 19 nt, Artificial Sequence
  Description of Artificial Sequence: Synthetic oligonucleotide
  Sense Strand Starting at position 952 of SEQ ID NO: 318831
ggguccuaaccauggacaa

SEQ ID NO: 393596 - RNA, 19 nt, Artificial Sequence
  Description of Artificial Sequence: Synthetic oligonucleotide
  Antisense Strand to SEQ ID NO: 393595
uuguccaugguuaggaccc

SEQ ID NO: 393597 - RNA, 19 nt, Artificial Sequence
  Description of Artificial Sequence: Synthetic oligonucleotide
  Sense Strand Starting at position 952 of SEQ ID NO: 318832
gguccuaaccauggacaaa

SEQ ID NO: 393598 - RNA, 19 nt, Artificial Sequence
  Description of Artificial Sequence: Synthetic oligonucleotide
  Antisense Strand to SEQ ID NO: 393597
uuuguccaugguuaggacc

SEQ ID NO: 393599 - RNA, 19 nt, Artificial Sequence
  Description of Artificial Sequence: Synthetic oligonucleotide
  Sense Strand Starting at position 952 of SEQ ID NO: 318962
cacucuguucugggaaagu

SEQ ID NO: 393600 - RNA, 19 nt, Artificial Sequence
  Description of Artificial Sequence: Synthetic oligonucleotide
  Antisense Strand to SEQ ID NO: 393599
acuuucccagaacagagug

SEQ ID NO: 393601 - RNA, 19 nt, Artificial Sequence
  Description of Artificial Sequence: Synthetic oligonucleotide
  Sense Strand Starting at position 952 of SEQ ID NO: 319068
gcuagaagugcagagauaa

SEQ ID NO: 393602 - RNA, 19 nt, Artificial Sequence
  Description of Artificial Sequence: Synthetic oligonucleotide
  Antisense Strand to SEQ ID NO: 393601
uuaucucugcacuucuagc

SEQ ID NO: 393603 - RNA, 19 nt, Artificial Sequence
  Description of Artificial Sequence: Synthetic oligonucleotide
  Sense Strand Starting at position 952 of SEQ ID NO: 319106
uuuagcuguucuuuauuga

SEQ ID NO: 393604 - RNA, 19 nt, Artificial Sequence
  Description of Artificial Sequence: Synthetic oligonucleotide
  Antisense Strand to SEQ ID NO: 393603
ucaauaaagaacagcuaaa

SEQ ID NO: 393605 - RNA, 19 nt, Artificial Sequence
  Description of Artificial Sequence: Synthetic oligonucleotide
  Sense Strand Starting at position 952 of SEQ ID NO: 319109
agcuguucuuuauugacau

SEQ ID NO: 393606 - RNA, 19 nt, Artificial Sequence
  Description of Artificial Sequence: Synthetic oligonucleotide
  Antisense Strand to SEQ ID NO: 393605
augucaauaaagaacagcu

SEQ ID NO: 393607 - RNA, 19 nt, Artificial Sequence
  Description of Artificial Sequence: Synthetic oligonucleotide
  Sense Strand Starting at position 953 of SEQ ID NO: 315433
ugaagaacgcuacaauucu

SEQ ID NO: 393608 - RNA, 19 nt, Artificial Sequence
  Description of Artificial Sequence: Synthetic oligonucleotide
  Antisense Strand to SEQ ID NO: 393607
agaauuguagcguucuuca

SEQ ID NO: 393609 - RNA, 19 nt, Artificial Sequence
  Description of Artificial Sequence: Synthetic oligonucleotide
  Sense Strand Starting at position 953 of SEQ ID NO: 315484
uucggaaaucguuacacca

SEQ ID NO: 393610 - RNA, 19 nt, Artificial Sequence
  Description of Artificial Sequence: Synthetic oligonucleotide
  Antisense Strand to SEQ ID NO: 393609
ugguguaacgauuuccgaa

SEQ ID NO: 393611 - RNA, 19 nt, Artificial Sequence
  Description of Artificial Sequence: Synthetic oligonucleotide
  Sense Strand Starting at position 953 of SEQ ID NO: 315517
agagauaacgacgacguua

SEQ ID NO: 393612 - RNA, 19 nt, Artificial Sequence
  Description of Artificial Sequence: Synthetic oligonucleotide
  Antisense Strand to SEQ ID NO: 393611
uaacgucgucguuaucucu

SEQ ID NO: 393613 - RNA, 19 nt, Artificial Sequence
  Description of Artificial Sequence: Synthetic oligonucleotide
  Sense Strand Starting at position 953 of SEQ ID NO: 315574
cuguuaaacgauuaaugac

SEQ ID NO: 393614 - RNA, 19 nt, Artificial Sequence
  Description of Artificial Sequence: Synthetic oligonucleotide
  Antisense Strand to SEQ ID NO: 393613
gucauuaaucguuuaacag

SEQ ID NO: 393615 - RNA, 19 nt, Artificial Sequence
  Description of Artificial Sequence: Synthetic oligonucleotide
  Sense Strand Starting at position 953 of SEQ ID NO: 315725
uuccaaaugucaguaauca

SEQ ID NO: 393616 - RNA, 19 nt, Artificial Sequence
  Description of Artificial Sequence: Synthetic oligonucleotide
  Antisense Strand to SEQ ID NO: 393615
ugauuacugacauuuggaa

SEQ ID NO: 393617 - RNA, 19 nt, Artificial Sequence
  Description of Artificial Sequence: Synthetic oligonucleotide
  Sense Strand Starting at position 953 of SEQ ID NO: 315726
uccaaaugucaguaaucac

SEQ ID NO: 393618 - RNA, 19 nt, Artificial Sequence
  Description of Artificial Sequence: Synthetic oligonucleotide
  Antisense Strand to SEQ ID NO: 393617
gugauuacugacauuugga

SEQ ID NO: 393619 - RNA, 19 nt, Artificial Sequence
  Description of Artificial Sequence: Synthetic oligonucleotide
  Sense Strand Starting at position 953 of SEQ ID NO: 315792
uaacauuuaucggguauuu

SEQ ID NO: 393620 - RNA, 19 nt, Artificial Sequence
  Description of Artificial Sequence: Synthetic oligonucleotide
  Antisense Strand to SEQ ID NO: 393619
aaauacccgauaaauguua

SEQ ID NO: 393621 - RNA, 19 nt, Artificial Sequence
  Description of Artificial Sequence: Synthetic oligonucleotide
  Sense Strand Starting at position 953 of SEQ ID NO: 315822
agcacuguucuuuauauau

SEQ ID NO: 393622 - RNA, 19 nt, Artificial Sequence
  Description of Artificial Sequence: Synthetic oligonucleotide
  Antisense Strand to SEQ ID NO: 393621
auauauaaagaacagugcu

SEQ ID NO: 393623 - RNA, 19 nt, Artificial Sequence
  Description of Artificial Sequence: Synthetic oligonucleotide
  Sense Strand Starting at position 953 of SEQ ID NO: 315953
ggacuuuaauuauugaagu

SEQ ID NO: 393624 - RNA, 19 nt, Artificial Sequence
  Description of Artificial Sequence: Synthetic oligonucleotide
  Antisense Strand to SEQ ID NO: 393623
acuucaauaauuaaagucc

SEQ ID NO: 393625 - RNA, 19 nt, Artificial Sequence
  Description of Artificial Sequence: Synthetic oligonucleotide
  Sense Strand Starting at position 953 of SEQ ID NO: 316279
gacgucuuuccugaagaag

SEQ ID NO: 393626 - RNA, 19 nt, Artificial Sequence
  Description of Artificial Sequence: Synthetic oligonucleotide
  Antisense Strand to SEQ ID NO: 393625
cuucuucaggaaagacguc

SEQ ID NO: 393627 - RNA, 19 nt, Artificial Sequence
  Description of Artificial Sequence: Synthetic oligonucleotide
  Sense Strand Starting at position 953 of SEQ ID NO: 316582
gggucucugaguuauuaaa

SEQ ID NO: 393628 - RNA, 19 nt, Artificial Sequence
  Description of Artificial Sequence: Synthetic oligonucleotide
  Antisense Strand to SEQ ID NO: 393627
uuuaauaacucagagaccc

SEQ ID NO: 393629 - RNA, 19 nt, Artificial Sequence
  Description of Artificial Sequence: Synthetic oligonucleotide
  Sense Strand Starting at position 953 of SEQ ID NO: 316584
gucucugaguuauuaaaca

SEQ ID NO: 393630 - RNA, 19 nt, Artificial Sequence
  Description of Artificial Sequence: Synthetic oligonucleotide
  Antisense Strand to SEQ ID NO: 393629
uguuuaauaacucagagac

SEQ ID NO: 393631 - RNA, 19 nt, Artificial Sequence
  Description of Artificial Sequence: Synthetic oligonucleotide
  Sense Strand Starting at position 953 of SEQ ID NO: 316611
agggucauauagccacaaa

SEQ ID NO: 393632 - RNA, 19 nt, Artificial Sequence
  Description of Artificial Sequence: Synthetic oligonucleotide
  Antisense Strand to SEQ ID NO: 393631
uuuguggcuauaugacccu

SEQ ID NO: 393633 - RNA, 19 nt, Artificial Sequence
  Description of Artificial Sequence: Synthetic oligonucleotide
  Sense Strand Starting at position 953 of SEQ ID NO: 316614
gucauauagccacaaagua

SEQ ID NO: 393634 - RNA, 19 nt, Artificial Sequence
  Description of Artificial Sequence: Synthetic oligonucleotide
  Antisense Strand to SEQ ID NO: 393633
uacuuuguggcuauaugac

SEQ ID NO: 393635 - RNA, 19 nt, Artificial Sequence
  Description of Artificial Sequence: Synthetic oligonucleotide
  Sense Strand Starting at position 953 of SEQ ID NO: 317520
cagggaagguccuucucaa

SEQ ID NO: 393636 - RNA, 19 nt, Artificial Sequence
  Description of Artificial Sequence: Synthetic oligonucleotide
  Antisense Strand to SEQ ID NO: 393635
uugagaaggaccuucccug

SEQ ID NO: 393637 - RNA, 19 nt, Artificial Sequence
  Description of Artificial Sequence: Synthetic oligonucleotide
  Sense Strand Starting at position 953 of SEQ ID NO: 317587
gucccaaggugaucccaau

SEQ ID NO: 393638 - RNA, 19 nt, Artificial Sequence
  Description of Artificial Sequence: Synthetic oligonucleotide
  Antisense Strand to SEQ ID NO: 393637
auugggaucaccuugggac

SEQ ID NO: 393639 - RNA, 19 nt, Artificial Sequence
  Description of Artificial Sequence: Synthetic oligonucleotide
  Sense Strand Starting at position 953 of SEQ ID NO: 317597
gaucccaaucgagagcuuu

SEQ ID NO: 393640 - RNA, 19 nt, Artificial Sequence
  Description of Artificial Sequence: Synthetic oligonucleotide
  Antisense Strand to SEQ ID NO: 393639
aaagcucucgauugggauc

SEQ ID NO: 393641 - RNA, 19 nt, Artificial Sequence
  Description of Artificial Sequence: Synthetic oligonucleotide
  Sense Strand Starting at position 953 of SEQ ID NO: 317731
cagcauuacccugagugaa

SEQ ID NO: 393642 - RNA, 19 nt, Artificial Sequence
  Description of Artificial Sequence: Synthetic oligonucleotide
  Antisense Strand to SEQ ID NO: 393641
uucacucaggguaaugcug

SEQ ID NO: 393643 - RNA, 19 nt, Artificial Sequence
  Description of Artificial Sequence: Synthetic oligonucleotide
  Sense Strand Starting at position 953 of SEQ ID NO: 317733
gcauuacccugagugaaau

SEQ ID NO: 393644 - RNA, 19 nt, Artificial Sequence
  Description of Artificial Sequence: Synthetic oligonucleotide
  Antisense Strand to SEQ ID NO: 393643
auuucacucaggguaaugc

SEQ ID NO: 393645 - RNA, 19 nt, Artificial Sequence
  Description of Artificial Sequence: Synthetic oligonucleotide
  Sense Strand Starting at position 953 of SEQ ID NO: 317734
cauuacccugagugaaaug

SEQ ID NO: 393646 - RNA, 19 nt, Artificial Sequence
  Description of Artificial Sequence: Synthetic oligonucleotide
  Antisense Strand to SEQ ID NO: 393645
cauuucacucaggguaaug

SEQ ID NO: 393647 - RNA, 19 nt, Artificial Sequence
  Description of Artificial Sequence: Synthetic oligonucleotide
  Sense Strand Starting at position 953 of SEQ ID NO: 317805
ggaagaacuguuuguaacg

SEQ ID NO: 393648 - RNA, 19 nt, Artificial Sequence
  Description of Artificial Sequence: Synthetic oligonucleotide
  Antisense Strand to SEQ ID NO: 393647
cguuacaaacaguucuucc

SEQ ID NO: 393649 - RNA, 19 nt, Artificial Sequence
  Description of Artificial Sequence: Synthetic oligonucleotide
  Sense Strand Starting at position 953 of SEQ ID NO: 317863
gugaaaggaguuugcaaac

SEQ ID NO: 393650 - RNA, 19 nt, Artificial Sequence
  Description of Artificial Sequence: Synthetic oligonucleotide
  Antisense Strand to SEQ ID NO: 393649
guuugcaaacuccuuucac

SEQ ID NO: 393651 - RNA, 19 nt, Artificial Sequence
  Description of Artificial Sequence: Synthetic oligonucleotide
  Sense Strand Starting at position 953 of SEQ ID NO: 317976
ucuuuauuaacgggagaga

SEQ ID NO: 393652 - RNA, 19 nt, Artificial Sequence
  Description of Artificial Sequence: Synthetic oligonucleotide
  Antisense Strand to SEQ ID NO: 393651
ucucucccguuaauaaaga

SEQ ID NO: 393653 - RNA, 19 nt, Artificial Sequence
  Description of Artificial Sequence: Synthetic oligonucleotide
  Sense Strand Starting at position 953 of SEQ ID NO: 318056
uaaacucaggagugcaaau

SEQ ID NO: 393654 - RNA, 19 nt, Artificial Sequence
  Description of Artificial Sequence: Synthetic oligonucleotide
  Antisense Strand to SEQ ID NO: 393653
auuugcacuccugaguuua

SEQ ID NO: 393655 - RNA, 19 nt, Artificial Sequence
  Description of Artificial Sequence: Synthetic oligonucleotide
  Sense Strand Starting at position 953 of SEQ ID NO: 318063
aggagugcaaauggauauu

SEQ ID NO: 393656 - RNA, 19 nt, Artificial Sequence
  Description of Artificial Sequence: Synthetic oligonucleotide
  Antisense Strand to SEQ ID NO: 393655
aauauccauuugcacuccu

SEQ ID NO: 393657 - RNA, 19 nt, Artificial Sequence
  Description of Artificial Sequence: Synthetic oligonucleotide
  Sense Strand Starting at position 953 of SEQ ID NO: 318141
agauucucuccguaucuau

SEQ ID NO: 393658 - RNA, 19 nt, Artificial Sequence
  Description of Artificial Sequence: Synthetic oligonucleotide
  Antisense Strand to SEQ ID NO: 393657
auagauacggagagaaucu

SEQ ID NO: 393659 - RNA, 19 nt, Artificial Sequence
  Description of Artificial Sequence: Synthetic oligonucleotide
  Sense Strand Starting at position 953 of SEQ ID NO: 318150
ccguaucuaucacccauuu

SEQ ID NO: 393660 - RNA, 19 nt, Artificial Sequence
  Description of Artificial Sequence: Synthetic oligonucleotide
  Antisense Strand to SEQ ID NO: 393659
aaaugggugauagauacgg

SEQ ID NO: 393661 - RNA, 19 nt, Artificial Sequence
  Description of Artificial Sequence: Synthetic oligonucleotide
  Sense Strand Starting at position 953 of SEQ ID NO: 318173
gcauuagcaccugaagaua

SEQ ID NO: 393662 - RNA, 19 nt, Artificial Sequence
  Description of Artificial Sequence: Synthetic oligonucleotide
  Antisense Strand to SEQ ID NO: 393661
uaucuucaggugcuaaugc

SEQ ID NO: 393663 - RNA, 19 nt, Artificial Sequence
  Description of Artificial Sequence: Synthetic oligonucleotide
  Sense Strand Starting at position 953 of SEQ ID NO: 318219
cuugaaacauaugugacau

SEQ ID NO: 393664 - RNA, 19 nt, Artificial Sequence
  Description of Artificial Sequence: Synthetic oligonucleotide
  Antisense Strand to SEQ ID NO: 393663
augucacauauguuucaag

SEQ ID NO: 393665 - RNA, 19 nt, Artificial Sequence
  Description of Artificial Sequence: Synthetic oligonucleotide
  Sense Strand Starting at position 953 of SEQ ID NO: 318480
agcuaaaugcauuggacau

SEQ ID NO: 393666 - RNA, 19 nt, Artificial Sequence
  Description of Artificial Sequence: Synthetic oligonucleotide
  Antisense Strand to SEQ ID NO: 393665
auguccaaugcauuuagcu

SEQ ID NO: 393667 - RNA, 19 nt, Artificial Sequence
  Description of Artificial Sequence: Synthetic oligonucleotide
  Sense Strand Starting at position 953 of SEQ ID NO: 318509
acaaauauguugcccuaga

SEQ ID NO: 393668 - RNA, 19 nt, Artificial Sequence
  Description of Artificial Sequence: Synthetic oligonucleotide
  Antisense Strand to SEQ ID NO: 393667
ucuagggcaacauauuugu

SEQ ID NO: 393669 - RNA, 19 nt, Artificial Sequence
  Description of Artificial Sequence: Synthetic oligonucleotide
  Sense Strand Starting at position 953 of SEQ ID NO: 318591
acaucaguugcauaaugua

SEQ ID NO: 393670 - RNA, 19 nt, Artificial Sequence
  Description of Artificial Sequence: Synthetic oligonucleotide
  Antisense Strand to SEQ ID NO: 393669
uacauuaugcaacugaugu

SEQ ID NO: 393671 - RNA, 19 nt, Artificial Sequence
  Description of Artificial Sequence: Synthetic oligonucleotide
  Sense Strand Starting at position 953 of SEQ ID NO: 318663
agaauaauuucuuaggacu

SEQ ID NO: 393672 - RNA, 19 nt, Artificial Sequence
  Description of Artificial Sequence: Synthetic oligonucleotide
  Antisense Strand to SEQ ID NO: 393671
aguccuaagaaauuauucu

SEQ ID NO: 393673 - RNA, 19 nt, Artificial Sequence
  Description of Artificial Sequence: Synthetic oligonucleotide
  Sense Strand Starting at position 953 of SEQ ID NO: 318821
aguacagcugcguuaguua

SEQ ID NO: 393674 - RNA, 19 nt, Artificial Sequence
  Description of Artificial Sequence: Synthetic oligonucleotide
  Antisense Strand to SEQ ID NO: 393673
uaacuaacgcagcuguacu

SEQ ID NO: 393675 - RNA, 19 nt, Artificial Sequence
  Description of Artificial Sequence: Synthetic oligonucleotide
  Sense Strand Starting at position 953 of SEQ ID NO: 318832
guuaguuaucaguaagaug

SEQ ID NO: 393676 - RNA, 19 nt, Artificial Sequence
  Description of Artificial Sequence: Synthetic oligonucleotide
  Antisense Strand to SEQ ID NO: 393675
caucuuacugauaacuaac

SEQ ID NO: 393677 - RNA, 19 nt, Artificial Sequence
  Description of Artificial Sequence: Synthetic oligonucleotide
  Sense Strand Starting at position 953 of SEQ ID NO: 318840
ucaguaagaugcuuugaag

SEQ ID NO: 393678 - RNA, 19 nt, Artificial Sequence
  Description of Artificial Sequence: Synthetic oligonucleotide
  Antisense Strand to SEQ ID NO: 393677
cuucaaagcaucuuacuga

SEQ ID NO: 393679 - RNA, 19 nt, Artificial Sequence
  Description of Artificial Sequence: Synthetic oligonucleotide
  Sense Strand Starting at position 953 of SEQ ID NO: 318860
uaaaguguuagguaaguga

SEQ ID NO: 393680 - RNA, 19 nt, Artificial Sequence
  Description of Artificial Sequence: Synthetic oligonucleotide
  Antisense Strand to SEQ ID NO: 393679
ucacuuaccuaacacuuua

SEQ ID NO: 393681 - RNA, 19 nt, Artificial Sequence
  Description of Artificial Sequence: Synthetic oligonucleotide
  Sense Strand Starting at position 953 of SEQ ID NO: 318864
guguuagguaagugaaaga

SEQ ID NO: 393682 - RNA, 19 nt, Artificial Sequence
  Description of Artificial Sequence: Synthetic oligonucleotide
  Antisense Strand to SEQ ID NO: 393681
ucuuucacuuaccuaacac

SEQ ID NO: 393683 - RNA, 19 nt, Artificial Sequence
  Description of Artificial Sequence: Synthetic oligonucleotide
  Sense Strand Starting at position 953 of SEQ ID NO: 319126
gagggaauucugcaagcuu

SEQ ID NO: 393684 - RNA, 19 nt, Artificial Sequence
  Description of Artificial Sequence: Synthetic oligonucleotide
  Antisense Strand to SEQ ID NO: 393683
aagcuugcagaauucccuc

SEQ ID NO: 393685 - RNA, 19 nt, Artificial Sequence
  Description of Artificial Sequence: Synthetic oligonucleotide
  Sense Strand Starting at position 953 of SEQ ID NO: 319150
aguuucagagguugaagaa

SEQ ID NO: 393686 - RNA, 19 nt, Artificial Sequence
  Description of Artificial Sequence: Synthetic oligonucleotide
  Antisense Strand to SEQ ID NO: 393685
uucuucaaccucugaaacu

SEQ ID NO: 393687 - RNA, 19 nt, Artificial Sequence
  Description of Artificial Sequence: Synthetic oligonucleotide
  Sense Strand Starting at position 954 of SEQ ID NO: 315491
gcucgaaaccaugaaagca

SEQ ID NO: 393688 - RNA, 19 nt, Artificial Sequence
  Description of Artificial Sequence: Synthetic oligonucleotide
  Antisense Strand to SEQ ID NO: 393687
ugcuuucaugguuucgagc

SEQ ID NO: 393689 - RNA, 19 nt, Artificial Sequence
  Description of Artificial Sequence: Synthetic oligonucleotide
  Sense Strand Starting at position 954 of SEQ ID NO: 315564
aggaucuccugguugauua

SEQ ID NO: 393690 - RNA, 19 nt, Artificial Sequence
  Description of Artificial Sequence: Synthetic oligonucleotide
  Antisense Strand to SEQ ID NO: 393689
uaaucaaccaggagauccu

SEQ ID NO: 393691 - RNA, 19 nt, Artificial Sequence
  Description of Artificial Sequence: Synthetic oligonucleotide
  Sense Strand Starting at position 954 of SEQ ID NO: 315571
ccugguugauuagggagua

SEQ ID NO: 393692 - RNA, 19 nt, Artificial Sequence
  Description of Artificial Sequence: Synthetic oligonucleotide
  Antisense Strand to SEQ ID NO: 393691
uacucccuaaucaaccagg

SEQ ID NO: 393693 - RNA, 19 nt, Artificial Sequence
  Description of Artificial Sequence: Synthetic oligonucleotide
  Sense Strand Starting at position 954 of SEQ ID NO: 315724
uccgguaucugugaaguuu

SEQ ID NO: 393694 - RNA, 19 nt, Artificial Sequence
  Description of Artificial Sequence: Synthetic oligonucleotide
  Antisense Strand to SEQ ID NO: 393693
aaacuucacagauaccgga

SEQ ID NO: 393695 - RNA, 19 nt, Artificial Sequence
  Description of Artificial Sequence: Synthetic oligonucleotide
  Sense Strand Starting at position 954 of SEQ ID NO: 315786
gcccuagucgaguaaaguu

SEQ ID NO: 393696 - RNA, 19 nt, Artificial Sequence
  Description of Artificial Sequence: Synthetic oligonucleotide
  Antisense Strand to SEQ ID NO: 393695
aacuuuacucgacuagggc

SEQ ID NO: 393697 - RNA, 19 nt, Artificial Sequence
  Description of Artificial Sequence: Synthetic oligonucleotide
  Sense Strand Starting at position 954 of SEQ ID NO: 316003
gucugaucuccgcacucca

SEQ ID NO: 393698 - RNA, 19 nt, Artificial Sequence
  Description of Artificial Sequence: Synthetic oligonucleotide
  Antisense Strand to SEQ ID NO: 393697
uggagugcggagaucagac

SEQ ID NO: 393699 - RNA, 19 nt, Artificial Sequence
  Description of Artificial Sequence: Synthetic oligonucleotide
  Sense Strand Starting at position 954 of SEQ ID NO: 317636
gcaggccuagacuaagaau

SEQ ID NO: 393700 - RNA, 19 nt, Artificial Sequence
  Description of Artificial Sequence: Synthetic oligonucleotide
  Antisense Strand to SEQ ID NO: 393699
auucuuagucuaggccugc

SEQ ID NO: 393701 - RNA, 19 nt, Artificial Sequence
  Description of Artificial Sequence: Synthetic oligonucleotide
  Sense Strand Starting at position 954 of SEQ ID NO: 317732
cagugcagucuccgagagu

SEQ ID NO: 393702 - RNA, 19 nt, Artificial Sequence
  Description of Artificial Sequence: Synthetic oligonucleotide
  Antisense Strand to SEQ ID NO: 393701
acucucggagacugcacug

SEQ ID NO: 393703 - RNA, 19 nt, Artificial Sequence
  Description of Artificial Sequence: Synthetic oligonucleotide
  Sense Strand Starting at position 954 of SEQ ID NO: 317875
cccauuugaugggaagcua

SEQ ID NO: 393704 - RNA, 19 nt, Artificial Sequence
  Description of Artificial Sequence: Synthetic oligonucleotide
  Antisense Strand to SEQ ID NO: 393703
uagcuucccaucaaauggg

SEQ ID NO: 393705 - RNA, 19 nt, Artificial Sequence
  Description of Artificial Sequence: Synthetic oligonucleotide
  Sense Strand Starting at position 954 of SEQ ID NO: 317911
gggagcucuugucuccaaa

SEQ ID NO: 393706 - RNA, 19 nt, Artificial Sequence
  Description of Artificial Sequence: Synthetic oligonucleotide
  Antisense Strand to SEQ ID NO: 393705
uuuggagacaagagcuccc

SEQ ID NO: 393707 - RNA, 19 nt, Artificial Sequence
  Description of Artificial Sequence: Synthetic oligonucleotide
  Sense Strand Starting at position 954 of SEQ ID NO: 318141
cuguaagaagcuuauacua

SEQ ID NO: 393708 - RNA, 19 nt, Artificial Sequence
  Description of Artificial Sequence: Synthetic oligonucleotide
  Antisense Strand to SEQ ID NO: 393707
uaguauaagcuucuuacag

SEQ ID NO: 393709 - RNA, 19 nt, Artificial Sequence
  Description of Artificial Sequence: Synthetic oligonucleotide
  Sense Strand Starting at position 954 of SEQ ID NO: 318143
guaagaagcuuauacuaga

SEQ ID NO: 393710 - RNA, 19 nt, Artificial Sequence
  Description of Artificial Sequence: Synthetic oligonucleotide
  Antisense Strand to SEQ ID NO: 393709
ucuaguauaagcuucuuac

SEQ ID NO: 393711 - RNA, 19 nt, Artificial Sequence
  Description of Artificial Sequence: Synthetic oligonucleotide
  Sense Strand Starting at position 954 of SEQ ID NO: 318374
gaaggagacuucgcagaga

SEQ ID NO: 393712 - RNA, 19 nt, Artificial Sequence
  Description of Artificial Sequence: Synthetic oligonucleotide
  Antisense Strand to SEQ ID NO: 393711
ucucugcgaagucuccuuc

SEQ ID NO: 393713 - RNA, 19 nt, Artificial Sequence
  Description of Artificial Sequence: Synthetic oligonucleotide
  Sense Strand Starting at position 954 of SEQ ID NO: 318457
gaaugagcagucugcaaag

SEQ ID NO: 393714 - RNA, 19 nt, Artificial Sequence
  Description of Artificial Sequence: Synthetic oligonucleotide
  Antisense Strand to SEQ ID NO: 393713
cuuugcagacugcucauuc

SEQ ID NO: 393715 - RNA, 19 nt, Artificial Sequence
  Description of Artificial Sequence: Synthetic oligonucleotide
  Sense Strand Starting at position 954 of SEQ ID NO: 318494
gcagaagaguuguuucuuc

SEQ ID NO: 393716 - RNA, 19 nt, Artificial Sequence
  Description of Artificial Sequence: Synthetic oligonucleotide
  Antisense Strand to SEQ ID NO: 393715
gaagaaacaacucuucugc

SEQ ID NO: 393717 - RNA, 19 nt, Artificial Sequence
  Description of Artificial Sequence: Synthetic oligonucleotide
  Sense Strand Starting at position 954 of SEQ ID NO: 318498
aagaguuguuucuucugaa

SEQ ID NO: 393718 - RNA, 19 nt, Artificial Sequence
  Description of Artificial Sequence: Synthetic oligonucleotide
  Antisense Strand to SEQ ID NO: 393717
uucagaagaaacaacucuu

SEQ ID NO: 393719 - RNA, 19 nt, Artificial Sequence
  Description of Artificial Sequence: Synthetic oligonucleotide
  Sense Strand Starting at position 954 of SEQ ID NO: 318499
agaguuguuucuucugaaa

SEQ ID NO: 393720 - RNA, 19 nt, Artificial Sequence
  Description of Artificial Sequence: Synthetic oligonucleotide
  Antisense Strand to SEQ ID NO: 393719
uuucagaagaaacaacucu

SEQ ID NO: 393721 - RNA, 19 nt, Artificial Sequence
  Description of Artificial Sequence: Synthetic oligonucleotide
  Sense Strand Starting at position 954 of SEQ ID NO: 318501
aguuguuucuucugaaagu

SEQ ID NO: 393722 - RNA, 19 nt, Artificial Sequence
  Description of Artificial Sequence: Synthetic oligonucleotide
  Antisense Strand to SEQ ID NO: 393721
acuuucagaagaaacaacu

SEQ ID NO: 393723 - RNA, 19 nt, Artificial Sequence
  Description of Artificial Sequence: Synthetic oligonucleotide
  Sense Strand Starting at position 954 of SEQ ID NO: 318502
guuguuucuucugaaaguu

SEQ ID NO: 393724 - RNA, 19 nt, Artificial Sequence
  Description of Artificial Sequence: Synthetic oligonucleotide
  Antisense Strand to SEQ ID NO: 393723
aacuuucagaagaaacaac

SEQ ID NO: 393725 - RNA, 19 nt, Artificial Sequence
  Description of Artificial Sequence: Synthetic oligonucleotide
  Sense Strand Starting at position 954 of SEQ ID NO: 318524
acuccacucccaugggaaa

SEQ ID NO: 393726 - RNA, 19 nt, Artificial Sequence
  Description of Artificial Sequence: Synthetic oligonucleotide
  Antisense Strand to SEQ ID NO: 393725
uuucccaugggaguggagu

SEQ ID NO: 393727 - RNA, 19 nt, Artificial Sequence
  Description of Artificial Sequence: Synthetic oligonucleotide
  Sense Strand Starting at position 954 of SEQ ID NO: 318525
cuccacucccaugggaaau

SEQ ID NO: 393728 - RNA, 19 nt, Artificial Sequence
  Description of Artificial Sequence: Synthetic oligonucleotide
  Antisense Strand to SEQ ID NO: 393727
auuucccaugggaguggag

SEQ ID NO: 393729 - RNA, 19 nt, Artificial Sequence
  Description of Artificial Sequence: Synthetic oligonucleotide
  Sense Strand Starting at position 954 of SEQ ID NO: 318705
gggacuagcucaggucaaa

SEQ ID NO: 393730 - RNA, 19 nt, Artificial Sequence
  Description of Artificial Sequence: Synthetic oligonucleotide
  Antisense Strand to SEQ ID NO: 393729
uuugaccugagcuaguccc

SEQ ID NO: 393731 - RNA, 19 nt, Artificial Sequence
  Description of Artificial Sequence: Synthetic oligonucleotide
  Sense Strand Starting at position 954 of SEQ ID NO: 318889
gggacauguuggucugagu

SEQ ID NO: 393732 - RNA, 19 nt, Artificial Sequence
  Description of Artificial Sequence: Synthetic oligonucleotide
  Antisense Strand to SEQ ID NO: 393731
acucagaccaacauguccc

SEQ ID NO: 393733 - RNA, 19 nt, Artificial Sequence
  Description of Artificial Sequence: Synthetic oligonucleotide
  Sense Strand Starting at position 954 of SEQ ID NO: 318892
acauguuggucugaguaua

SEQ ID NO: 393734 - RNA, 19 nt, Artificial Sequence
  Description of Artificial Sequence: Synthetic oligonucleotide
  Antisense Strand to SEQ ID NO: 393733
uauacucagaccaacaugu

SEQ ID NO: 393735 - RNA, 19 nt, Artificial Sequence
  Description of Artificial Sequence: Synthetic oligonucleotide
  Sense Strand Starting at position 954 of SEQ ID NO: 318973
ugugguaaggguugcacaa

SEQ ID NO: 393736 - RNA, 19 nt, Artificial Sequence
  Description of Artificial Sequence: Synthetic oligonucleotide
  Antisense Strand to SEQ ID NO: 393735
uugugcaacccuuaccaca

SEQ ID NO: 393737 - RNA, 19 nt, Artificial Sequence
  Description of Artificial Sequence: Synthetic oligonucleotide
  Sense Strand Starting at position 954 of SEQ ID NO: 319072
gcugucuaauaucugcauu

SEQ ID NO: 393738 - RNA, 19 nt, Artificial Sequence
  Description of Artificial Sequence: Synthetic oligonucleotide
  Antisense Strand to SEQ ID NO: 393737
aaugcagauauuagacagc

SEQ ID NO: 393739 - RNA, 19 nt, Artificial Sequence
  Description of Artificial Sequence: Synthetic oligonucleotide
  Sense Strand Starting at position 954 of SEQ ID NO: 319100
ggugguaaauuccugagua

SEQ ID NO: 393740 - RNA, 19 nt, Artificial Sequence
  Description of Artificial Sequence: Synthetic oligonucleotide
  Antisense Strand to SEQ ID NO: 393739
uacucaggaauuuaccacc

SEQ ID NO: 393741 - RNA, 19 nt, Artificial Sequence
  Description of Artificial Sequence: Synthetic oligonucleotide
  Sense Strand Starting at position 954 of SEQ ID NO: 319101
gugguaaauuccugaguag

SEQ ID NO: 393742 - RNA, 19 nt, Artificial Sequence
  Description of Artificial Sequence: Synthetic oligonucleotide
  Antisense Strand to SEQ ID NO: 393741
cuacucaggaauuuaccac

SEQ ID NO: 393743 - RNA, 19 nt, Artificial Sequence
  Description of Artificial Sequence: Synthetic oligonucleotide
  Sense Strand Starting at position 954 of SEQ ID NO: 319102
ugguaaauuccugaguagc

SEQ ID NO: 393744 - RNA, 19 nt, Artificial Sequence
  Description of Artificial Sequence: Synthetic oligonucleotide
  Antisense Strand to SEQ ID NO: 393743
gcuacucaggaauuuacca

SEQ ID NO: 393745 - RNA, 19 nt, Artificial Sequence
  Description of Artificial Sequence: Synthetic oligonucleotide
  Sense Strand Starting at position 954 of SEQ ID NO: 319104
guaaauuccugaguagcac

SEQ ID NO: 393746 - RNA, 19 nt, Artificial Sequence
  Description of Artificial Sequence: Synthetic oligonucleotide
  Antisense Strand to SEQ ID NO: 393745
gugcuacucaggaauuuac

SEQ ID NO: 393747 - RNA, 19 nt, Artificial Sequence
  Description of Artificial Sequence: Synthetic oligonucleotide
  Sense Strand Starting at position 954 of SEQ ID NO: 319141
auggaaucaugcuaauuug

SEQ ID NO: 393748 - RNA, 19 nt, Artificial Sequence
  Description of Artificial Sequence: Synthetic oligonucleotide
  Antisense Strand to SEQ ID NO: 393747
caaauuagcaugauuccau

SEQ ID NO: 393749 - RNA, 19 nt, Artificial Sequence
  Description of Artificial Sequence: Synthetic oligonucleotide
  Sense Strand Starting at position 954 of SEQ ID NO: 319156
uuugaaaugcagcaauuaa

SEQ ID NO: 393750 - RNA, 19 nt, Artificial Sequence
  Description of Artificial Sequence: Synthetic oligonucleotide
  Antisense Strand to SEQ ID NO: 393749
uuaauugcugcauuucaaa

SEQ ID NO: 393751 - RNA, 19 nt, Artificial Sequence
  Description of Artificial Sequence: Synthetic oligonucleotide
  Sense Strand Starting at position 955 of SEQ ID NO: 315627
gcucgaaaccaugaaagca

SEQ ID NO: 393752 - RNA, 19 nt, Artificial Sequence
  Description of Artificial Sequence: Synthetic oligonucleotide
  Antisense Strand to SEQ ID NO: 393751
ugcuuucaugguuucgagc

SEQ ID NO: 393753 - RNA, 19 nt, Artificial Sequence
  Description of Artificial Sequence: Synthetic oligonucleotide
  Sense Strand Starting at position 955 of SEQ ID NO: 315700
aggaucuccugguugauua

SEQ ID NO: 393754 - RNA, 19 nt, Artificial Sequence
  Description of Artificial Sequence: Synthetic oligonucleotide
  Antisense Strand to SEQ ID NO: 393753
uaaucaaccaggagauccu

SEQ ID NO: 393755 - RNA, 19 nt, Artificial Sequence
  Description of Artificial Sequence: Synthetic oligonucleotide
  Sense Strand Starting at position 955 of SEQ ID NO: 315707
ccugguugauuagggagua

SEQ ID NO: 393756 - RNA, 19 nt, Artificial Sequence
  Description of Artificial Sequence: Synthetic oligonucleotide
  Antisense Strand to SEQ ID NO: 393755
uacucccuaaucaaccagg

SEQ ID NO: 393757 - RNA, 19 nt, Artificial Sequence
  Description of Artificial Sequence: Synthetic oligonucleotide
  Sense Strand Starting at position 955 of SEQ ID NO: 315860
uccgguaucugugaaguuu

SEQ ID NO: 393758 - RNA, 19 nt, Artificial Sequence
  Description of Artificial Sequence: Synthetic oligonucleotide
  Antisense Strand to SEQ ID NO: 393757
aaacuucacagauaccgga

SEQ ID NO: 393759 - RNA, 19 nt, Artificial Sequence
  Description of Artificial Sequence: Synthetic oligonucleotide
  Sense Strand Starting at position 955 of SEQ ID NO: 315922
gcccuagucgaguaaaguu

SEQ ID NO: 393760 - RNA, 19 nt, Artificial Sequence
  Description of Artificial Sequence: Synthetic oligonucleotide
  Antisense Strand to SEQ ID NO: 393759
aacuuuacucgacuagggc

SEQ ID NO: 393761 - RNA, 19 nt, Artificial Sequence
  Description of Artificial Sequence: Synthetic oligonucleotide
  Sense Strand Starting at position 955 of SEQ ID NO: 316139
gucugaucuccgcacucca

SEQ ID NO: 393762 - RNA, 19 nt, Artificial Sequence
  Description of Artificial Sequence: Synthetic oligonucleotide
  Antisense Strand to SEQ ID NO: 393761
uggagugcggagaucagac

SEQ ID NO: 393763 - RNA, 19 nt, Artificial Sequence
  Description of Artificial Sequence: Synthetic oligonucleotide
  Sense Strand Starting at position 955 of SEQ ID NO: 317772
gcaggccuagacuaagaau

SEQ ID NO: 393764 - RNA, 19 nt, Artificial Sequence
  Description of Artificial Sequence: Synthetic oligonucleotide
  Antisense Strand to SEQ ID NO: 393763
auucuuagucuaggccugc

SEQ ID NO: 393765 - RNA, 19 nt, Artificial Sequence
  Description of Artificial Sequence: Synthetic oligonucleotide
  Sense Strand Starting at position 955 of SEQ ID NO: 317868
cagugcagucuccgagagu

SEQ ID NO: 393766 - RNA, 19 nt, Artificial Sequence
  Description of Artificial Sequence: Synthetic oligonucleotide
  Antisense Strand to SEQ ID NO: 393765
acucucggagacugcacug

SEQ ID NO: 393767 - RNA, 19 nt, Artificial Sequence
  Description of Artificial Sequence: Synthetic oligonucleotide
  Sense Strand Starting at position 955 of SEQ ID NO: 318011
cccauuugaugggaagcua

SEQ ID NO: 393768 - RNA, 19 nt, Artificial Sequence
  Description of Artificial Sequence: Synthetic oligonucleotide
  Antisense Strand to SEQ ID NO: 393767
uagcuucccaucaaauggg

SEQ ID NO: 393769 - RNA, 19 nt, Artificial Sequence
  Description of Artificial Sequence: Synthetic oligonucleotide
  Sense Strand Starting at position 955 of SEQ ID NO: 318047
gggagcucuugucuccaaa

SEQ ID NO: 393770 - RNA, 19 nt, Artificial Sequence
  Description of Artificial Sequence: Synthetic oligonucleotide
  Antisense Strand to SEQ ID NO: 393769
uuuggagacaagagcuccc

SEQ ID NO: 393771 - RNA, 19 nt, Artificial Sequence
  Description of Artificial Sequence: Synthetic oligonucleotide
  Sense Strand Starting at position 955 of SEQ ID NO: 318277
cuguaagaagcuuauacua

SEQ ID NO: 393772 - RNA, 19 nt, Artificial Sequence
  Description of Artificial Sequence: Synthetic oligonucleotide
  Antisense Strand to SEQ ID NO: 393771
uaguauaagcuucuuacag

SEQ ID NO: 393773 - RNA, 19 nt, Artificial Sequence
  Description of Artificial Sequence: Synthetic oligonucleotide
  Sense Strand Starting at position 955 of SEQ ID NO: 318279
guaagaagcuuauacuaga

SEQ ID NO: 393774 - RNA, 19 nt, Artificial Sequence
  Description of Artificial Sequence: Synthetic oligonucleotide
  Antisense Strand to SEQ ID NO: 393773
ucuaguauaagcuucuuac

SEQ ID NO: 393775 - RNA, 19 nt, Artificial Sequence
  Description of Artificial Sequence: Synthetic oligonucleotide
  Sense Strand Starting at position 955 of SEQ ID NO: 318510
gaaggagacuucgcagaga

SEQ ID NO: 393776 - RNA, 19 nt, Artificial Sequence
  Description of Artificial Sequence: Synthetic oligonucleotide
  Antisense Strand to SEQ ID NO: 393775
ucucugcgaagucuccuuc

SEQ ID NO: 393777 - RNA, 19 nt, Artificial Sequence
  Description of Artificial Sequence: Synthetic oligonucleotide
  Sense Strand Starting at position 955 of SEQ ID NO: 318593
gaaugagcagucugcaaag

SEQ ID NO: 393778 - RNA, 19 nt, Artificial Sequence
  Description of Artificial Sequence: Synthetic oligonucleotide
  Antisense Strand to SEQ ID NO: 393777
cuuugcagacugcucauuc

SEQ ID NO: 393779 - RNA, 19 nt, Artificial Sequence
  Description of Artificial Sequence: Synthetic oligonucleotide
  Sense Strand Starting at position 955 of SEQ ID NO: 318630
gcagaagaguuguuucuuc

SEQ ID NO: 393780 - RNA, 19 nt, Artificial Sequence
  Description of Artificial Sequence: Synthetic oligonucleotide
  Antisense Strand to SEQ ID NO: 393779
gaagaaacaacucuucugc

SEQ ID NO: 393781 - RNA, 19 nt, Artificial Sequence
  Description of Artificial Sequence: Synthetic oligonucleotide
  Sense Strand Starting at position 955 of SEQ ID NO: 318634
aagaguuguuucuucugaa

SEQ ID NO: 393782 - RNA, 19 nt, Artificial Sequence
  Description of Artificial Sequence: Synthetic oligonucleotide
  Antisense Strand to SEQ ID NO: 393781
uucagaagaaacaacucuu

SEQ ID NO: 393783 - RNA, 19 nt, Artificial Sequence
  Description of Artificial Sequence: Synthetic oligonucleotide
  Sense Strand Starting at position 955 of SEQ ID NO: 318635
agaguuguuucuucugaaa

SEQ ID NO: 393784 - RNA, 19 nt, Artificial Sequence
  Description of Artificial Sequence: Synthetic oligonucleotide
  Antisense Strand to SEQ ID NO: 393783
uuucagaagaaacaacucu

SEQ ID NO: 393785 - RNA, 19 nt, Artificial Sequence
  Description of Artificial Sequence: Synthetic oligonucleotide
  Sense Strand Starting at position 955 of SEQ ID NO: 318637
aguuguuucuucugaaagu

SEQ ID NO: 393786 - RNA, 19 nt, Artificial Sequence
  Description of Artificial Sequence: Synthetic oligonucleotide
  Antisense Strand to SEQ ID NO: 393785
acuuucagaagaaacaacu

SEQ ID NO: 393787 - RNA, 19 nt, Artificial Sequence
  Description of Artificial Sequence: Synthetic oligonucleotide
  Sense Strand Starting at position 955 of SEQ ID NO: 318638
guuguuucuucugaaaguu

SEQ ID NO: 393788 - RNA, 19 nt, Artificial Sequence
  Description of Artificial Sequence: Synthetic oligonucleotide
  Antisense Strand to SEQ ID NO: 393787
aacuuucagaagaaacaac

SEQ ID NO: 393789 - RNA, 19 nt, Artificial Sequence
  Description of Artificial Sequence: Synthetic oligonucleotide
  Sense Strand Starting at position 955 of SEQ ID NO: 318660
acuccacucccaugggaaa

SEQ ID NO: 393790 - RNA, 19 nt, Artificial Sequence
  Description of Artificial Sequence: Synthetic oligonucleotide
  Antisense Strand to SEQ ID NO: 393789
uuucccaugggaguggagu

SEQ ID NO: 393791 - RNA, 19 nt, Artificial Sequence
  Description of Artificial Sequence: Synthetic oligonucleotide
  Sense Strand Starting at position 955 of SEQ ID NO: 318661
cuccacucccaugggaaau

SEQ ID NO: 393792 - RNA, 19 nt, Artificial Sequence
  Description of Artificial Sequence: Synthetic oligonucleotide
  Antisense Strand to SEQ ID NO: 393791
auuucccaugggaguggag

SEQ ID NO: 393793 - RNA, 19 nt, Artificial Sequence
  Description of Artificial Sequence: Synthetic oligonucleotide
  Sense Strand Starting at position 955 of SEQ ID NO: 318841
gggacuagcucaggucaaa

SEQ ID NO: 393794 - RNA, 19 nt, Artificial Sequence
  Description of Artificial Sequence: Synthetic oligonucleotide
  Antisense Strand to SEQ ID NO: 393793
uuugaccugagcuaguccc

SEQ ID NO: 393795 - RNA, 19 nt, Artificial Sequence
  Description of Artificial Sequence: Synthetic oligonucleotide
  Sense Strand Starting at position 955 of SEQ ID NO: 319025
gggacauguuggucugagu

SEQ ID NO: 393796 - RNA, 19 nt, Artificial Sequence
  Description of Artificial Sequence: Synthetic oligonucleotide
  Antisense Strand to SEQ ID NO: 393795
acucagaccaacauguccc

SEQ ID NO: 393797 - RNA, 19 nt, Artificial Sequence
  Description of Artificial Sequence: Synthetic oligonucleotide
  Sense Strand Starting at position 955 of SEQ ID NO: 319028
acauguuggucugaguaua

SEQ ID NO: 393798 - RNA, 19 nt, Artificial Sequence
  Description of Artificial Sequence: Synthetic oligonucleotide
  Antisense Strand to SEQ ID NO: 393797
uauacucagaccaacaugu

SEQ ID NO: 393799 - RNA, 19 nt, Artificial Sequence
  Description of Artificial Sequence: Synthetic oligonucleotide
  Sense Strand Starting at position 955 of SEQ ID NO: 319109
ugugguaaggguugcacaa

SEQ ID NO: 393800 - RNA, 19 nt, Artificial Sequence
  Description of Artificial Sequence: Synthetic oligonucleotide
  Antisense Strand to SEQ ID NO: 393799
uugugcaacccuuaccaca

SEQ ID NO: 393801 - RNA, 19 nt, Artificial Sequence
  Description of Artificial Sequence: Synthetic oligonucleotide
  Sense Strand Starting at position 955 of SEQ ID NO: 319208
gcugucuaauaucugcauu

SEQ ID NO: 393802 - RNA, 19 nt, Artificial Sequence
  Description of Artificial Sequence: Synthetic oligonucleotide
  Antisense Strand to SEQ ID NO: 393801
aaugcagauauuagacagc

SEQ ID NO: 393803 - RNA, 19 nt, Artificial Sequence
  Description of Artificial Sequence: Synthetic oligonucleotide
  Sense Strand Starting at position 956 of SEQ ID NO: 315719
gcucgaaaccaugaaagca

SEQ ID NO: 393804 - RNA, 19 nt, Artificial Sequence
  Description of Artificial Sequence: Synthetic oligonucleotide
  Antisense Strand to SEQ ID NO: 393803
ugcuuucaugguuucgagc

SEQ ID NO: 393805 - RNA, 19 nt, Artificial Sequence
  Description of Artificial Sequence: Synthetic oligonucleotide
  Sense Strand Starting at position 956 of SEQ ID NO: 315792
aggaucuccugguugauua

SEQ ID NO: 393806 - RNA, 19 nt, Artificial Sequence
  Description of Artificial Sequence: Synthetic oligonucleotide
  Antisense Strand to SEQ ID NO: 393805
uaaucaaccaggagauccu

SEQ ID NO: 393807 - RNA, 19 nt, Artificial Sequence
  Description of Artificial Sequence: Synthetic oligonucleotide
  Sense Strand Starting at position 956 of SEQ ID NO: 315799
ccugguugauuagggagua

SEQ ID NO: 393808 - RNA, 19 nt, Artificial Sequence
  Description of Artificial Sequence: Synthetic oligonucleotide
  Antisense Strand to SEQ ID NO: 393807
uacucccuaaucaaccagg

SEQ ID NO: 393809 - RNA, 19 nt, Artificial Sequence
  Description of Artificial Sequence: Synthetic oligonucleotide
  Sense Strand Starting at position 956 of SEQ ID NO: 315952
uccgguaucugugaaguuu

SEQ ID NO: 393810 - RNA, 19 nt, Artificial Sequence
  Description of Artificial Sequence: Synthetic oligonucleotide
  Antisense Strand to SEQ ID NO: 393809
aaacuucacagauaccgga

SEQ ID NO: 393811 - RNA, 19 nt, Artificial Sequence
  Description of Artificial Sequence: Synthetic oligonucleotide
  Sense Strand Starting at position 956 of SEQ ID NO: 316014
gcccuagucgaguaaaguu

SEQ ID NO: 393812 - RNA, 19 nt, Artificial Sequence
  Description of Artificial Sequence: Synthetic oligonucleotide
  Antisense Strand to SEQ ID NO: 393811
aacuuuacucgacuagggc

SEQ ID NO: 393813 - RNA, 19 nt, Artificial Sequence
  Description of Artificial Sequence: Synthetic oligonucleotide
  Sense Strand Starting at position 956 of SEQ ID NO: 316231
gucugaucuccgcacucca

SEQ ID NO: 393814 - RNA, 19 nt, Artificial Sequence
  Description of Artificial Sequence: Synthetic oligonucleotide
  Antisense Strand to SEQ ID NO: 393813
uggagugcggagaucagac

SEQ ID NO: 393815 - RNA, 19 nt, Artificial Sequence
  Description of Artificial Sequence: Synthetic oligonucleotide
  Sense Strand Starting at position 956 of SEQ ID NO: 317864
gcaggccuagacuaagaau

SEQ ID NO: 393816 - RNA, 19 nt, Artificial Sequence
  Description of Artificial Sequence: Synthetic oligonucleotide
  Antisense Strand to SEQ ID NO: 393815
auucuuagucuaggccugc

SEQ ID NO: 393817 - RNA, 19 nt, Artificial Sequence
  Description of Artificial Sequence: Synthetic oligonucleotide
  Sense Strand Starting at position 956 of SEQ ID NO: 317960
cagugcagucuccgagagu

SEQ ID NO: 393818 - RNA, 19 nt, Artificial Sequence
  Description of Artificial Sequence: Synthetic oligonucleotide
  Antisense Strand to SEQ ID NO: 393817
acucucggagacugcacug

SEQ ID NO: 393819 - RNA, 19 nt, Artificial Sequence
  Description of Artificial Sequence: Synthetic oligonucleotide
  Sense Strand Starting at position 956 of SEQ ID NO: 318103
cccauuugaugggaagcua

SEQ ID NO: 393820 - RNA, 19 nt, Artificial Sequence
  Description of Artificial Sequence: Synthetic oligonucleotide
  Antisense Strand to SEQ ID NO: 393819
uagcuucccaucaaauggg

SEQ ID NO: 393821 - RNA, 19 nt, Artificial Sequence
  Description of Artificial Sequence: Synthetic oligonucleotide
  Sense Strand Starting at position 956 of SEQ ID NO: 318139
gggagcucuugucuccaaa

SEQ ID NO: 393822 - RNA, 19 nt, Artificial Sequence
  Description of Artificial Sequence: Synthetic oligonucleotide
  Antisense Strand to SEQ ID NO: 393821
uuuggagacaagagcuccc

SEQ ID NO: 393823 - RNA, 19 nt, Artificial Sequence
  Description of Artificial Sequence: Synthetic oligonucleotide
  Sense Strand Starting at position 956 of SEQ ID NO: 318369
cuguaagaagcuuauacua

SEQ ID NO: 393824 - RNA, 19 nt, Artificial Sequence
  Description of Artificial Sequence: Synthetic oligonucleotide
  Antisense Strand to SEQ ID NO: 393823
uaguauaagcuucuuacag

SEQ ID NO: 393825 - RNA, 19 nt, Artificial Sequence
  Description of Artificial Sequence: Synthetic oligonucleotide
  Sense Strand Starting at position 956 of SEQ ID NO: 318371
guaagaagcuuauacuaga

SEQ ID NO: 393826 - RNA, 19 nt, Artificial Sequence
  Description of Artificial Sequence: Synthetic oligonucleotide
  Antisense Strand to SEQ ID NO: 393825
ucuaguauaagcuucuuac

SEQ ID NO: 393827 - RNA, 19 nt, Artificial Sequence
  Description of Artificial Sequence: Synthetic oligonucleotide
  Sense Strand Starting at position 956 of SEQ ID NO: 318602
gaaggagacuucgcagaga

SEQ ID NO: 393828 - RNA, 19 nt, Artificial Sequence
  Description of Artificial Sequence: Synthetic oligonucleotide
  Antisense Strand to SEQ ID NO: 393827
ucucugcgaagucuccuuc

SEQ ID NO: 393829 - RNA, 19 nt, Artificial Sequence
  Description of Artificial Sequence: Synthetic oligonucleotide
  Sense Strand Starting at position 956 of SEQ ID NO: 318685
gaaugagcagucugcaaag

SEQ ID NO: 393830 - RNA, 19 nt, Artificial Sequence
  Description of Artificial Sequence: Synthetic oligonucleotide
  Antisense Strand to SEQ ID NO: 393829
cuuugcagacugcucauuc

SEQ ID NO: 393831 - RNA, 19 nt, Artificial Sequence
  Description of Artificial Sequence: Synthetic oligonucleotide
  Sense Strand Starting at position 956 of SEQ ID NO: 318722
gcagaagaguuguuucuuc

SEQ ID NO: 393832 - RNA, 19 nt, Artificial Sequence
  Description of Artificial Sequence: Synthetic oligonucleotide
  Antisense Strand to SEQ ID NO: 393831
gaagaaacaacucuucugc

SEQ ID NO: 393833 - RNA, 19 nt, Artificial Sequence
  Description of Artificial Sequence: Synthetic oligonucleotide
  Sense Strand Starting at position 956 of SEQ ID NO: 318726
aagaguuguuucuucugaa

SEQ ID NO: 393834 - RNA, 19 nt, Artificial Sequence
  Description of Artificial Sequence: Synthetic oligonucleotide
  Antisense Strand to SEQ ID NO: 393833
uucagaagaaacaacucuu

SEQ ID NO: 393835 - RNA, 19 nt, Artificial Sequence
  Description of Artificial Sequence: Synthetic oligonucleotide
  Sense Strand Starting at position 956 of SEQ ID NO: 318727
agaguuguuucuucugaaa

SEQ ID NO: 393836 - RNA, 19 nt, Artificial Sequence
  Description of Artificial Sequence: Synthetic oligonucleotide
  Antisense Strand to SEQ ID NO: 393835
uuucagaagaaacaacucu

SEQ ID NO: 393837 - RNA, 19 nt, Artificial Sequence
  Description of Artificial Sequence: Synthetic oligonucleotide
  Sense Strand Starting at position 956 of SEQ ID NO: 318729
aguuguuucuucugaaagu

SEQ ID NO: 393838 - RNA, 19 nt, Artificial Sequence
  Description of Artificial Sequence: Synthetic oligonucleotide
  Antisense Strand to SEQ ID NO: 393837
acuuucagaagaaacaacu

SEQ ID NO: 393839 - RNA, 19 nt, Artificial Sequence
  Description of Artificial Sequence: Synthetic oligonucleotide
  Sense Strand Starting at position 956 of SEQ ID NO: 318730
guuguuucuucugaaaguu

SEQ ID NO: 393840 - RNA, 19 nt, Artificial Sequence
  Description of Artificial Sequence: Synthetic oligonucleotide
  Antisense Strand to SEQ ID NO: 393839
aacuuucagaagaaacaac

SEQ ID NO: 393841 - RNA, 19 nt, Artificial Sequence
  Description of Artificial Sequence: Synthetic oligonucleotide
  Sense Strand Starting at position 956 of SEQ ID NO: 318752
acuccacucccaugggaaa

SEQ ID NO: 393842 - RNA, 19 nt, Artificial Sequence
  Description of Artificial Sequence: Synthetic oligonucleotide
  Antisense Strand to SEQ ID NO: 393841
uuucccaugggaguggagu

SEQ ID NO: 393843 - RNA, 19 nt, Artificial Sequence
  Description of Artificial Sequence: Synthetic oligonucleotide
  Sense Strand Starting at position 956 of SEQ ID NO: 318753
cuccacucccaugggaaau

SEQ ID NO: 393844 - RNA, 19 nt, Artificial Sequence
  Description of Artificial Sequence: Synthetic oligonucleotide
  Antisense Strand to SEQ ID NO: 393843
auuucccaugggaguggag

SEQ ID NO: 393845 - RNA, 19 nt, Artificial Sequence
  Description of Artificial Sequence: Synthetic oligonucleotide
  Sense Strand Starting at position 956 of SEQ ID NO: 318933
gggacuagcucaggucaaa

SEQ ID NO: 393846 - RNA, 19 nt, Artificial Sequence
  Description of Artificial Sequence: Synthetic oligonucleotide
  Antisense Strand to SEQ ID NO: 393845
uuugaccugagcuaguccc

SEQ ID NO: 393847 - RNA, 19 nt, Artificial Sequence
  Description of Artificial Sequence: Synthetic oligonucleotide
  Sense Strand Starting at position 956 of SEQ ID NO: 319117
gggacauguuggucugagu

SEQ ID NO: 393848 - RNA, 19 nt, Artificial Sequence
  Description of Artificial Sequence: Synthetic oligonucleotide
  Antisense Strand to SEQ ID NO: 393847
acucagaccaacauguccc

SEQ ID NO: 393849 - RNA, 19 nt, Artificial Sequence
  Description of Artificial Sequence: Synthetic oligonucleotide
  Sense Strand Starting at position 956 of SEQ ID NO: 319120
acauguuggucugaguaua

SEQ ID NO: 393850 - RNA, 19 nt, Artificial Sequence
  Description of Artificial Sequence: Synthetic oligonucleotide
  Antisense Strand to SEQ ID NO: 393849
uauacucagaccaacaugu

SEQ ID NO: 393851 - RNA, 19 nt, Artificial Sequence
  Description of Artificial Sequence: Synthetic oligonucleotide
  Sense Strand Starting at position 956 of SEQ ID NO: 319201
ugugguaaggguugcacaa

SEQ ID NO: 393852 - RNA, 19 nt, Artificial Sequence
  Description of Artificial Sequence: Synthetic oligonucleotide
  Antisense Strand to SEQ ID NO: 393851
uugugcaacccuuaccaca

SEQ ID NO: 393853 - RNA, 19 nt, Artificial Sequence
  Description of Artificial Sequence: Synthetic oligonucleotide
  Sense Strand Starting at position 957 of SEQ ID NO: 315308
ugcucuuuagccuguauuu

SEQ ID NO: 393854 - RNA, 19 nt, Artificial Sequence
  Description of Artificial Sequence: Synthetic oligonucleotide
  Antisense Strand to SEQ ID NO: 393853
aaauacaggcuaaagagca

SEQ ID NO: 393855 - RNA, 19 nt, Artificial Sequence
  Description of Artificial Sequence: Synthetic oligonucleotide
  Sense Strand Starting at position 957 of SEQ ID NO: 315837
gcucgaaaccaugaaagca

SEQ ID NO: 393856 - RNA, 19 nt, Artificial Sequence
  Description of Artificial Sequence: Synthetic oligonucleotide
  Antisense Strand to SEQ ID NO: 393855
ugcuuucaugguuucgagc

SEQ ID NO: 393857 - RNA, 19 nt, Artificial Sequence
  Description of Artificial Sequence: Synthetic oligonucleotide
  Sense Strand Starting at position 957 of SEQ ID NO: 315910
aggaucuccugguugauua

SEQ ID NO: 393858 - RNA, 19 nt, Artificial Sequence
  Description of Artificial Sequence: Synthetic oligonucleotide
  Antisense Strand to SEQ ID NO: 393857
uaaucaaccaggagauccu

SEQ ID NO: 393859 - RNA, 19 nt, Artificial Sequence
  Description of Artificial Sequence: Synthetic oligonucleotide
  Sense Strand Starting at position 957 of SEQ ID NO: 315917
ccugguugauuagggagua

SEQ ID NO: 393860 - RNA, 19 nt, Artificial Sequence
  Description of Artificial Sequence: Synthetic oligonucleotide
  Antisense Strand to SEQ ID NO: 393859
uacucccuaaucaaccagg

SEQ ID NO: 393861 - RNA, 19 nt, Artificial Sequence
  Description of Artificial Sequence: Synthetic oligonucleotide
  Sense Strand Starting at position 957 of SEQ ID NO: 316070
uccgguaucugugaaguuu

SEQ ID NO: 393862 - RNA, 19 nt, Artificial Sequence
  Description of Artificial Sequence: Synthetic oligonucleotide
  Antisense Strand to SEQ ID NO: 393861
aaacuucacagauaccgga

SEQ ID NO: 393863 - RNA, 19 nt, Artificial Sequence
  Description of Artificial Sequence: Synthetic oligonucleotide
  Sense Strand Starting at position 957 of SEQ ID NO: 316132
gcccuagucgaguaaaguu

SEQ ID NO: 393864 - RNA, 19 nt, Artificial Sequence
  Description of Artificial Sequence: Synthetic oligonucleotide
  Antisense Strand to SEQ ID NO: 393863
aacuuuacucgacuagggc

SEQ ID NO: 393865 - RNA, 19 nt, Artificial Sequence
  Description of Artificial Sequence: Synthetic oligonucleotide
  Sense Strand Starting at position 957 of SEQ ID NO: 316349
gucugaucuccgcacucca

SEQ ID NO: 393866 - RNA, 19 nt, Artificial Sequence
  Description of Artificial Sequence: Synthetic oligonucleotide
  Antisense Strand to SEQ ID NO: 393865
uggagugcggagaucagac

SEQ ID NO: 393867 - RNA, 19 nt, Artificial Sequence
  Description of Artificial Sequence: Synthetic oligonucleotide
  Sense Strand Starting at position 957 of SEQ ID NO: 317982
gcaggccuagacuaagaau

SEQ ID NO: 393868 - RNA, 19 nt, Artificial Sequence
  Description of Artificial Sequence: Synthetic oligonucleotide
  Antisense Strand to SEQ ID NO: 393867
auucuuagucuaggccugc

SEQ ID NO: 393869 - RNA, 19 nt, Artificial Sequence
  Description of Artificial Sequence: Synthetic oligonucleotide
  Sense Strand Starting at position 957 of SEQ ID NO: 318078
cagugcagucuccgagagu

SEQ ID NO: 393870 - RNA, 19 nt, Artificial Sequence
  Description of Artificial Sequence: Synthetic oligonucleotide
  Antisense Strand to SEQ ID NO: 393869
acucucggagacugcacug

SEQ ID NO: 393871 - RNA, 19 nt, Artificial Sequence
  Description of Artificial Sequence: Synthetic oligonucleotide
  Sense Strand Starting at position 957 of SEQ ID NO: 318221
cccauuugaugggaagcua

SEQ ID NO: 393872 - RNA, 19 nt, Artificial Sequence
  Description of Artificial Sequence: Synthetic oligonucleotide
  Antisense Strand to SEQ ID NO: 393871
uagcuucccaucaaauggg

SEQ ID NO: 393873 - RNA, 19 nt, Artificial Sequence
  Description of Artificial Sequence: Synthetic oligonucleotide
  Sense Strand Starting at position 957 of SEQ ID NO: 318257
gggagcucuugucuccaaa

SEQ ID NO: 393874 - RNA, 19 nt, Artificial Sequence
  Description of Artificial Sequence: Synthetic oligonucleotide
  Antisense Strand to SEQ ID NO: 393873
uuuggagacaagagcuccc

SEQ ID NO: 393875 - RNA, 19 nt, Artificial Sequence
  Description of Artificial Sequence: Synthetic oligonucleotide
  Sense Strand Starting at position 957 of SEQ ID NO: 318487
cuguaagaagcuuauacua

SEQ ID NO: 393876 - RNA, 19 nt, Artificial Sequence
  Description of Artificial Sequence: Synthetic oligonucleotide
  Antisense Strand to SEQ ID NO: 393875
uaguauaagcuucuuacag

SEQ ID NO: 393877 - RNA, 19 nt, Artificial Sequence
  Description of Artificial Sequence: Synthetic oligonucleotide
  Sense Strand Starting at position 957 of SEQ ID NO: 318489
guaagaagcuuauacuaga

SEQ ID NO: 393878 - RNA, 19 nt, Artificial Sequence
  Description of Artificial Sequence: Synthetic oligonucleotide
  Antisense Strand to SEQ ID NO: 393877
ucuaguauaagcuucuuac

SEQ ID NO: 393879 - RNA, 19 nt, Artificial Sequence
  Description of Artificial Sequence: Synthetic oligonucleotide
  Sense Strand Starting at position 957 of SEQ ID NO: 318720
gaaggagacuucgcagaga

SEQ ID NO: 393880 - RNA, 19 nt, Artificial Sequence
  Description of Artificial Sequence: Synthetic oligonucleotide
  Antisense Strand to SEQ ID NO: 393879
ucucugcgaagucuccuuc

SEQ ID NO: 393881 - RNA, 19 nt, Artificial Sequence
  Description of Artificial Sequence: Synthetic oligonucleotide
  Sense Strand Starting at position 957 of SEQ ID NO: 318803
gaaugagcagucugcaaag

SEQ ID NO: 393882 - RNA, 19 nt, Artificial Sequence
  Description of Artificial Sequence: Synthetic oligonucleotide
  Antisense Strand to SEQ ID NO: 393881
cuuugcagacugcucauuc

SEQ ID NO: 393883 - RNA, 19 nt, Artificial Sequence
  Description of Artificial Sequence: Synthetic oligonucleotide
  Sense Strand Starting at position 957 of SEQ ID NO: 318840
gcagaagaguuguuucuuc

SEQ ID NO: 393884 - RNA, 19 nt, Artificial Sequence
  Description of Artificial Sequence: Synthetic oligonucleotide
  Antisense Strand to SEQ ID NO: 393883
gaagaaacaacucuucugc

SEQ ID NO: 393885 - RNA, 19 nt, Artificial Sequence
  Description of Artificial Sequence: Synthetic oligonucleotide
  Sense Strand Starting at position 957 of SEQ ID NO: 318844
aagaguuguuucuucugaa

SEQ ID NO: 393886 - RNA, 19 nt, Artificial Sequence
  Description of Artificial Sequence: Synthetic oligonucleotide
  Antisense Strand to SEQ ID NO: 393885
uucagaagaaacaacucuu

SEQ ID NO: 393887 - RNA, 19 nt, Artificial Sequence
  Description of Artificial Sequence: Synthetic oligonucleotide
  Sense Strand Starting at position 957 of SEQ ID NO: 318845
agaguuguuucuucugaaa

SEQ ID NO: 393888 - RNA, 19 nt, Artificial Sequence
  Description of Artificial Sequence: Synthetic oligonucleotide
  Antisense Strand to SEQ ID NO: 393887
uuucagaagaaacaacucu

SEQ ID NO: 393889 - RNA, 19 nt, Artificial Sequence
  Description of Artificial Sequence: Synthetic oligonucleotide
  Sense Strand Starting at position 957 of SEQ ID NO: 318847
aguuguuucuucugaaagu

SEQ ID NO: 393890 - RNA, 19 nt, Artificial Sequence
  Description of Artificial Sequence: Synthetic oligonucleotide
  Antisense Strand to SEQ ID NO: 393889
acuuucagaagaaacaacu

SEQ ID NO: 393891 - RNA, 19 nt, Artificial Sequence
  Description of Artificial Sequence: Synthetic oligonucleotide
  Sense Strand Starting at position 957 of SEQ ID NO: 318848
guuguuucuucugaaaguu

SEQ ID NO: 393892 - RNA, 19 nt, Artificial Sequence
  Description of Artificial Sequence: Synthetic oligonucleotide
  Antisense Strand to SEQ ID NO: 393891
aacuuucagaagaaacaac

SEQ ID NO: 393893 - RNA, 19 nt, Artificial Sequence
  Description of Artificial Sequence: Synthetic oligonucleotide
  Sense Strand Starting at position 957 of SEQ ID NO: 318870
acuccacucccaugggaaa

SEQ ID NO: 393894 - RNA, 19 nt, Artificial Sequence
  Description of Artificial Sequence: Synthetic oligonucleotide
  Antisense Strand to SEQ ID NO: 393893
uuucccaugggaguggagu

SEQ ID NO: 393895 - RNA, 19 nt, Artificial Sequence
  Description of Artificial Sequence: Synthetic oligonucleotide
  Sense Strand Starting at position 957 of SEQ ID NO: 318871
cuccacucccaugggaaau

SEQ ID NO: 393896 - RNA, 19 nt, Artificial Sequence
  Description of Artificial Sequence: Synthetic oligonucleotide
  Antisense Strand to SEQ ID NO: 393895
auuucccaugggaguggag

SEQ ID NO: 393897 - RNA, 19 nt, Artificial Sequence
  Description of Artificial Sequence: Synthetic oligonucleotide
  Sense Strand Starting at position 957 of SEQ ID NO: 319051
gggacuagcucaggucaaa

SEQ ID NO: 393898 - RNA, 19 nt, Artificial Sequence
  Description of Artificial Sequence: Synthetic oligonucleotide
  Antisense Strand to SEQ ID NO: 393897
uuugaccugagcuaguccc

SEQ ID NO: 393899 - RNA, 19 nt, Artificial Sequence
  Description of Artificial Sequence: Synthetic oligonucleotide
  Sense Strand Starting at position 958 of SEQ ID NO: 315337
ugaaauugccaauaaugug

SEQ ID NO: 393900 - RNA, 19 nt, Artificial Sequence
  Description of Artificial Sequence: Synthetic oligonucleotide
  Antisense Strand to SEQ ID NO: 393899
cacauuauuggcaauuuca

SEQ ID NO: 393901 - RNA, 19 nt, Artificial Sequence
  Description of Artificial Sequence: Synthetic oligonucleotide
  Sense Strand Starting at position 958 of SEQ ID NO: 315496
aggacaauaugcuccaaau

SEQ ID NO: 393902 - RNA, 19 nt, Artificial Sequence
  Description of Artificial Sequence: Synthetic oligonucleotide
  Antisense Strand to SEQ ID NO: 393901
auuuggagcauauuguccu

SEQ ID NO: 393903 - RNA, 19 nt, Artificial Sequence
  Description of Artificial Sequence: Synthetic oligonucleotide
  Sense Strand Starting at position 958 of SEQ ID NO: 315607
guuuaaagcuacuuaauug

SEQ ID NO: 393904 - RNA, 19 nt, Artificial Sequence
  Description of Artificial Sequence: Synthetic oligonucleotide
  Antisense Strand to SEQ ID NO: 393903
caauuaaguagcuuuaaac

SEQ ID NO: 393905 - RNA, 19 nt, Artificial Sequence
  Description of Artificial Sequence: Synthetic oligonucleotide
  Sense Strand Starting at position 958 of SEQ ID NO: 315832
uucuaaggguucuuugauc

SEQ ID NO: 393906 - RNA, 19 nt, Artificial Sequence
  Description of Artificial Sequence: Synthetic oligonucleotide
  Antisense Strand to SEQ ID NO: 393905
gaucaaagaacccuuagaa

SEQ ID NO: 393907 - RNA, 19 nt, Artificial Sequence
  Description of Artificial Sequence: Synthetic oligonucleotide
  Sense Strand Starting at position 958 of SEQ ID NO: 315954
augagcagucuugaguauu

SEQ ID NO: 393908 - RNA, 19 nt, Artificial Sequence
  Description of Artificial Sequence: Synthetic oligonucleotide
  Antisense Strand to SEQ ID NO: 393907
aauacucaagacugcucau

SEQ ID NO: 393909 - RNA, 19 nt, Artificial Sequence
  Description of Artificial Sequence: Synthetic oligonucleotide
  Sense Strand Starting at position 958 of SEQ ID NO: 315960
agucuugaguauucccaga

SEQ ID NO: 393910 - RNA, 19 nt, Artificial Sequence
  Description of Artificial Sequence: Synthetic oligonucleotide
  Antisense Strand to SEQ ID NO: 393909
ucugggaauacucaagacu

SEQ ID NO: 393911 - RNA, 19 nt, Artificial Sequence
  Description of Artificial Sequence: Synthetic oligonucleotide
  Sense Strand Starting at position 958 of SEQ ID NO: 315965
ugaguauucccagaggugu

SEQ ID NO: 393912 - RNA, 19 nt, Artificial Sequence
  Description of Artificial Sequence: Synthetic oligonucleotide
  Antisense Strand to SEQ ID NO: 393911
acaccucugggaauacuca

SEQ ID NO: 393913 - RNA, 19 nt, Artificial Sequence
  Description of Artificial Sequence: Synthetic oligonucleotide
  Sense Strand Starting at position 958 of SEQ ID NO: 316006
gugaaaggcaacugauuga

SEQ ID NO: 393914 - RNA, 19 nt, Artificial Sequence
  Description of Artificial Sequence: Synthetic oligonucleotide
  Antisense Strand to SEQ ID NO: 393913
ucaaucaguugccuuucac

SEQ ID NO: 393915 - RNA, 19 nt, Artificial Sequence
  Description of Artificial Sequence: Synthetic oligonucleotide
  Sense Strand Starting at position 958 of SEQ ID NO: 316083
acuuaacaaguuugaaagu

SEQ ID NO: 393916 - RNA, 19 nt, Artificial Sequence
  Description of Artificial Sequence: Synthetic oligonucleotide
  Antisense Strand to SEQ ID NO: 393915
acuuucaaacuuguuaagu

SEQ ID NO: 393917 - RNA, 19 nt, Artificial Sequence
  Description of Artificial Sequence: Synthetic oligonucleotide
  Sense Strand Starting at position 958 of SEQ ID NO: 316152
gucucuacccagugaagga

SEQ ID NO: 393918 - RNA, 19 nt, Artificial Sequence
  Description of Artificial Sequence: Synthetic oligonucleotide
  Antisense Strand to SEQ ID NO: 393917
uccuucacuggguagagac

SEQ ID NO: 393919 - RNA, 19 nt, Artificial Sequence
  Description of Artificial Sequence: Synthetic oligonucleotide
  Sense Strand Starting at position 958 of SEQ ID NO: 316168
ggaguucagcgguccuguu

SEQ ID NO: 393920 - RNA, 19 nt, Artificial Sequence
  Description of Artificial Sequence: Synthetic oligonucleotide
  Antisense Strand to SEQ ID NO: 393919
aacaggaccgcugaacucc

SEQ ID NO: 393921 - RNA, 19 nt, Artificial Sequence
  Description of Artificial Sequence: Synthetic oligonucleotide
  Sense Strand Starting at position 958 of SEQ ID NO: 316170
aguucagcgguccuguuau

SEQ ID NO: 393922 - RNA, 19 nt, Artificial Sequence
  Description of Artificial Sequence: Synthetic oligonucleotide
  Antisense Strand to SEQ ID NO: 393921
auaacaggaccgcugaacu

SEQ ID NO: 393923 - RNA, 19 nt, Artificial Sequence
  Description of Artificial Sequence: Synthetic oligonucleotide
  Sense Strand Starting at position 958 of SEQ ID NO: 316195
uuuauuuaacgcuguaguu

SEQ ID NO: 393924 - RNA, 19 nt, Artificial Sequence
  Description of Artificial Sequence: Synthetic oligonucleotide
  Antisense Strand to SEQ ID NO: 393923
aacuacagcguuaaauaaa

SEQ ID NO: 393925 - RNA, 19 nt, Artificial Sequence
  Description of Artificial Sequence: Synthetic oligonucleotide
  Sense Strand Starting at position 958 of SEQ ID NO: 316280
acuacucaucuuuggaagu

SEQ ID NO: 393926 - RNA, 19 nt, Artificial Sequence
  Description of Artificial Sequence: Synthetic oligonucleotide
  Antisense Strand to SEQ ID NO: 393925
acuuccaaagaugaguagu

SEQ ID NO: 393927 - RNA, 19 nt, Artificial Sequence
  Description of Artificial Sequence: Synthetic oligonucleotide
  Sense Strand Starting at position 958 of SEQ ID NO: 316287
aucuuuggaaguugaagau

SEQ ID NO: 393928 - RNA, 19 nt, Artificial Sequence
  Description of Artificial Sequence: Synthetic oligonucleotide
  Antisense Strand to SEQ ID NO: 393927
aucuucaacuuccaaagau

SEQ ID NO: 393929 - RNA, 19 nt, Artificial Sequence
  Description of Artificial Sequence: Synthetic oligonucleotide
  Sense Strand Starting at position 958 of SEQ ID NO: 316384
uacagaucgccuggauaag

SEQ ID NO: 393930 - RNA, 19 nt, Artificial Sequence
  Description of Artificial Sequence: Synthetic oligonucleotide
  Antisense Strand to SEQ ID NO: 393929
cuuauccaggcgaucugua

SEQ ID NO: 393931 - RNA, 19 nt, Artificial Sequence
  Description of Artificial Sequence: Synthetic oligonucleotide
  Sense Strand Starting at position 958 of SEQ ID NO: 317416
ucuccagcgccauuguuau

SEQ ID NO: 393932 - RNA, 19 nt, Artificial Sequence
  Description of Artificial Sequence: Synthetic oligonucleotide
  Antisense Strand to SEQ ID NO: 393931
auaacaauggcgcuggaga

SEQ ID NO: 393933 - RNA, 19 nt, Artificial Sequence
  Description of Artificial Sequence: Synthetic oligonucleotide
  Sense Strand Starting at position 958 of SEQ ID NO: 317603
ggcuuuauuagagggaacu

SEQ ID NO: 393934 - RNA, 19 nt, Artificial Sequence
  Description of Artificial Sequence: Synthetic oligonucleotide
  Antisense Strand to SEQ ID NO: 393933
aguucccucuaauaaagcc

SEQ ID NO: 393935 - RNA, 19 nt, Artificial Sequence
  Description of Artificial Sequence: Synthetic oligonucleotide
  Sense Strand Starting at position 958 of SEQ ID NO: 317604
gcuuuauuagagggaacuu

SEQ ID NO: 393936 - RNA, 19 nt, Artificial Sequence
  Description of Artificial Sequence: Synthetic oligonucleotide
  Antisense Strand to SEQ ID NO: 393935
aaguucccucuaauaaagc

SEQ ID NO: 393937 - RNA, 19 nt, Artificial Sequence
  Description of Artificial Sequence: Synthetic oligonucleotide
  Sense Strand Starting at position 958 of SEQ ID NO: 317613
gagggaacuugucuagcac

SEQ ID NO: 393938 - RNA, 19 nt, Artificial Sequence
  Description of Artificial Sequence: Synthetic oligonucleotide
  Antisense Strand to SEQ ID NO: 393937
gugcuagacaaguucccuc

SEQ ID NO: 393939 - RNA, 19 nt, Artificial Sequence
  Description of Artificial Sequence: Synthetic oligonucleotide
  Sense Strand Starting at position 958 of SEQ ID NO: 317620
cuugucuagcacgagagaa

SEQ ID NO: 393940 - RNA, 19 nt, Artificial Sequence
  Description of Artificial Sequence: Synthetic oligonucleotide
  Antisense Strand to SEQ ID NO: 393939
uucucucgugcuagacaag

SEQ ID NO: 393941 - RNA, 19 nt, Artificial Sequence
  Description of Artificial Sequence: Synthetic oligonucleotide
  Sense Strand Starting at position 958 of SEQ ID NO: 317902
auucuuacacucgagucuu

SEQ ID NO: 393942 - RNA, 19 nt, Artificial Sequence
  Description of Artificial Sequence: Synthetic oligonucleotide
  Antisense Strand to SEQ ID NO: 393941
aagacucgaguguaagaau

SEQ ID NO: 393943 - RNA, 19 nt, Artificial Sequence
  Description of Artificial Sequence: Synthetic oligonucleotide
  Sense Strand Starting at position 958 of SEQ ID NO: 318160
acgugaguuguugaacaca

SEQ ID NO: 393944 - RNA, 19 nt, Artificial Sequence
  Description of Artificial Sequence: Synthetic oligonucleotide
  Antisense Strand to SEQ ID NO: 393943
uguguucaacaacucacgu

SEQ ID NO: 393945 - RNA, 19 nt, Artificial Sequence
  Description of Artificial Sequence: Synthetic oligonucleotide
  Sense Strand Starting at position 958 of SEQ ID NO: 318163
ugaguuguugaacacaauu

SEQ ID NO: 393946 - RNA, 19 nt, Artificial Sequence
  Description of Artificial Sequence: Synthetic oligonucleotide
  Antisense Strand to SEQ ID NO: 393945
aauuguguucaacaacuca

SEQ ID NO: 393947 - RNA, 19 nt, Artificial Sequence
  Description of Artificial Sequence: Synthetic oligonucleotide
  Sense Strand Starting at position 958 of SEQ ID NO: 318413
uguuguaagggcgagaaua

SEQ ID NO: 393948 - RNA, 19 nt, Artificial Sequence
  Description of Artificial Sequence: Synthetic oligonucleotide
  Antisense Strand to SEQ ID NO: 393947
uauucucgcccuuacaaca

SEQ ID NO: 393949 - RNA, 19 nt, Artificial Sequence
  Description of Artificial Sequence: Synthetic oligonucleotide
  Sense Strand Starting at position 958 of SEQ ID NO: 318415
uuguaagggcgagaauauu

SEQ ID NO: 393950 - RNA, 19 nt, Artificial Sequence
  Description of Artificial Sequence: Synthetic oligonucleotide
  Antisense Strand to SEQ ID NO: 393949
aauauucucgcccuuacaa

SEQ ID NO: 393951 - RNA, 19 nt, Artificial Sequence
  Description of Artificial Sequence: Synthetic oligonucleotide
  Sense Strand Starting at position 958 of SEQ ID NO: 318424
cgagaauauugucuuugaa

SEQ ID NO: 393952 - RNA, 19 nt, Artificial Sequence
  Description of Artificial Sequence: Synthetic oligonucleotide
  Antisense Strand to SEQ ID NO: 393951
uucaaagacaauauucucg

SEQ ID NO: 393953 - RNA, 19 nt, Artificial Sequence
  Description of Artificial Sequence: Synthetic oligonucleotide
  Sense Strand Starting at position 958 of SEQ ID NO: 318426
agaauauugucuuugaagu

SEQ ID NO: 393954 - RNA, 19 nt, Artificial Sequence
  Description of Artificial Sequence: Synthetic oligonucleotide
  Antisense Strand to SEQ ID NO: 393953
acuucaaagacaauauucu

SEQ ID NO: 393955 - RNA, 19 nt, Artificial Sequence
  Description of Artificial Sequence: Synthetic oligonucleotide
  Sense Strand Starting at position 958 of SEQ ID NO: 318427
gaauauugucuuugaagug

SEQ ID NO: 393956 - RNA, 19 nt, Artificial Sequence
  Description of Artificial Sequence: Synthetic oligonucleotide
  Antisense Strand to SEQ ID NO: 393955
cacuucaaagacaauauuc

SEQ ID NO: 393957 - RNA, 19 nt, Artificial Sequence
  Description of Artificial Sequence: Synthetic oligonucleotide
  Sense Strand Starting at position 958 of SEQ ID NO: 318560
augugucauacguaaauga

SEQ ID NO: 393958 - RNA, 19 nt, Artificial Sequence
  Description of Artificial Sequence: Synthetic oligonucleotide
  Antisense Strand to SEQ ID NO: 393957
ucauuuacguaugacacau

SEQ ID NO: 393959 - RNA, 19 nt, Artificial Sequence
  Description of Artificial Sequence: Synthetic oligonucleotide
  Sense Strand Starting at position 958 of SEQ ID NO: 318573
aaaugauaccuguggcauu

SEQ ID NO: 393960 - RNA, 19 nt, Artificial Sequence
  Description of Artificial Sequence: Synthetic oligonucleotide
  Antisense Strand to SEQ ID NO: 393959
aaugccacagguaucauuu

SEQ ID NO: 393961 - RNA, 19 nt, Artificial Sequence
  Description of Artificial Sequence: Synthetic oligonucleotide
  Sense Strand Starting at position 958 of SEQ ID NO: 318630
ugguaauagcucugggaca

SEQ ID NO: 393962 - RNA, 19 nt, Artificial Sequence
  Description of Artificial Sequence: Synthetic oligonucleotide
  Antisense Strand to SEQ ID NO: 393961
ugucccagagcuauuacca

SEQ ID NO: 393963 - RNA, 19 nt, Artificial Sequence
  Description of Artificial Sequence: Synthetic oligonucleotide
  Sense Strand Starting at position 958 of SEQ ID NO: 318690
uugucaugucaacaguaug

SEQ ID NO: 393964 - RNA, 19 nt, Artificial Sequence
  Description of Artificial Sequence: Synthetic oligonucleotide
  Antisense Strand to SEQ ID NO: 393963
cauacuguugacaugacaa

SEQ ID NO: 393965 - RNA, 19 nt, Artificial Sequence
  Description of Artificial Sequence: Synthetic oligonucleotide
  Sense Strand Starting at position 958 of SEQ ID NO: 318896
caugguaguguuuauauaa

SEQ ID NO: 393966 - RNA, 19 nt, Artificial Sequence
  Description of Artificial Sequence: Synthetic oligonucleotide
  Antisense Strand to SEQ ID NO: 393965
uuauauaaacacuaccaug

SEQ ID NO: 393967 - RNA, 19 nt, Artificial Sequence
  Description of Artificial Sequence: Synthetic oligonucleotide
  Sense Strand Starting at position 958 of SEQ ID NO: 318988
augcuaugucauuacuuga

SEQ ID NO: 393968 - RNA, 19 nt, Artificial Sequence
  Description of Artificial Sequence: Synthetic oligonucleotide
  Antisense Strand to SEQ ID NO: 393967
ucaaguaaugacauagcau

SEQ ID NO: 393969 - RNA, 19 nt, Artificial Sequence
  Description of Artificial Sequence: Synthetic oligonucleotide
  Sense Strand Starting at position 958 of SEQ ID NO: 319008
agucuaaaguucuuuaacu

SEQ ID NO: 393970 - RNA, 19 nt, Artificial Sequence
  Description of Artificial Sequence: Synthetic oligonucleotide
  Antisense Strand to SEQ ID NO: 393969
aguuaaagaacuuuagacu

SEQ ID NO: 393971 - RNA, 19 nt, Artificial Sequence
  Description of Artificial Sequence: Synthetic oligonucleotide
  Sense Strand Starting at position 958 of SEQ ID NO: 319138
guguguugccaucuuggua

SEQ ID NO: 393972 - RNA, 19 nt, Artificial Sequence
  Description of Artificial Sequence: Synthetic oligonucleotide
  Antisense Strand to SEQ ID NO: 393971
uaccaagauggcaacacac

SEQ ID NO: 393973 - RNA, 19 nt, Artificial Sequence
  Description of Artificial Sequence: Synthetic oligonucleotide
  Sense Strand Starting at position 958 of SEQ ID NO: 319146
ccaucuugguaucugauca

SEQ ID NO: 393974 - RNA, 19 nt, Artificial Sequence
  Description of Artificial Sequence: Synthetic oligonucleotide
  Antisense Strand to SEQ ID NO: 393973
ugaucagauaccaagaugg

SEQ ID NO: 393975 - RNA, 19 nt, Artificial Sequence
  Description of Artificial Sequence: Synthetic oligonucleotide
  Sense Strand Starting at position 958 of SEQ ID NO: 319151
uugguaucugaucacuuua

SEQ ID NO: 393976 - RNA, 19 nt, Artificial Sequence
  Description of Artificial Sequence: Synthetic oligonucleotide
  Antisense Strand to SEQ ID NO: 393975
uaaagugaucagauaccaa

SEQ ID NO: 393977 - RNA, 19 nt, Artificial Sequence
  Description of Artificial Sequence: Synthetic oligonucleotide
  Sense Strand Starting at position 958 of SEQ ID NO: 319153
gguaucugaucacuuuauu

SEQ ID NO: 393978 - RNA, 19 nt, Artificial Sequence
  Description of Artificial Sequence: Synthetic oligonucleotide
  Antisense Strand to SEQ ID NO: 393977
aauaaagugaucagauacc

SEQ ID NO: 393979 - RNA, 19 nt, Artificial Sequence
  Description of Artificial Sequence: Synthetic oligonucleotide
  Sense Strand Starting at position 959 of SEQ ID NO: 315245
aggguauggucagcucuau

SEQ ID NO: 393980 - RNA, 19 nt, Artificial Sequence
  Description of Artificial Sequence: Synthetic oligonucleotide
  Antisense Strand to SEQ ID NO: 393979
auagagcugaccauacccu

SEQ ID NO: 393981 - RNA, 19 nt, Artificial Sequence
  Description of Artificial Sequence: Synthetic oligonucleotide
  Sense Strand Starting at position 959 of SEQ ID NO: 315249
uauggucagcucuaugaaa

SEQ ID NO: 393982 - RNA, 19 nt, Artificial Sequence
  Description of Artificial Sequence: Synthetic oligonucleotide
  Antisense Strand to SEQ ID NO: 393981
uuucauagagcugaccaua

SEQ ID NO: 393983 - RNA, 19 nt, Artificial Sequence
  Description of Artificial Sequence: Synthetic oligonucleotide
  Sense Strand Starting at position 959 of SEQ ID NO: 315251
uggucagcucuaugaaacu

SEQ ID NO: 393984 - RNA, 19 nt, Artificial Sequence
  Description of Artificial Sequence: Synthetic oligonucleotide
  Antisense Strand to SEQ ID NO: 393983
aguuucauagagcugacca

SEQ ID NO: 393985 - RNA, 19 nt, Artificial Sequence
  Description of Artificial Sequence: Synthetic oligonucleotide
  Sense Strand Starting at position 959 of SEQ ID NO: 315257
gcucuaugaaacugggauc

SEQ ID NO: 393986 - RNA, 19 nt, Artificial Sequence
  Description of Artificial Sequence: Synthetic oligonucleotide
  Antisense Strand to SEQ ID NO: 393985
gaucccaguuucauagagc

SEQ ID NO: 393987 - RNA, 19 nt, Artificial Sequence
  Description of Artificial Sequence: Synthetic oligonucleotide
  Sense Strand Starting at position 959 of SEQ ID NO: 315260
cuaugaaacugggaucuau

SEQ ID NO: 393988 - RNA, 19 nt, Artificial Sequence
  Description of Artificial Sequence: Synthetic oligonucleotide
  Antisense Strand to SEQ ID NO: 393987
auagaucccaguuucauag

SEQ ID NO: 393989 - RNA, 19 nt, Artificial Sequence
  Description of Artificial Sequence: Synthetic oligonucleotide
  Sense Strand Starting at position 959 of SEQ ID NO: 315322
aguggaucuucuucugaaa

SEQ ID NO: 393990 - RNA, 19 nt, Artificial Sequence
  Description of Artificial Sequence: Synthetic oligonucleotide
  Antisense Strand to SEQ ID NO: 393989
uuucagaagaagauccacu

SEQ ID NO: 393991 - RNA, 19 nt, Artificial Sequence
  Description of Artificial Sequence: Synthetic oligonucleotide
  Sense Strand Starting at position 959 of SEQ ID NO: 315416
caucuuaggcaaugaguau

SEQ ID NO: 393992 - RNA, 19 nt, Artificial Sequence
  Description of Artificial Sequence: Synthetic oligonucleotide
  Antisense Strand to SEQ ID NO: 393991
auacucauugccuaagaug

SEQ ID NO: 393993 - RNA, 19 nt, Artificial Sequence
  Description of Artificial Sequence: Synthetic oligonucleotide
  Sense Strand Starting at position 959 of SEQ ID NO: 315425
caaugaguaucagcagaca

SEQ ID NO: 393994 - RNA, 19 nt, Artificial Sequence
  Description of Artificial Sequence: Synthetic oligonucleotide
  Antisense Strand to SEQ ID NO: 393993
ugucugcugauacucauug

SEQ ID NO: 393995 - RNA, 19 nt, Artificial Sequence
  Description of Artificial Sequence: Synthetic oligonucleotide
  Sense Strand Starting at position 959 of SEQ ID NO: 315623
agccuucucccagagcaga

SEQ ID NO: 393996 - RNA, 19 nt, Artificial Sequence
  Description of Artificial Sequence: Synthetic oligonucleotide
  Antisense Strand to SEQ ID NO: 393995
ucugcucugggagaaggcu

SEQ ID NO: 393997 - RNA, 19 nt, Artificial Sequence
  Description of Artificial Sequence: Synthetic oligonucleotide
  Sense Strand Starting at position 959 of SEQ ID NO: 315914
ggaagaauccaccgaugcu

SEQ ID NO: 393998 - RNA, 19 nt, Artificial Sequence
  Description of Artificial Sequence: Synthetic oligonucleotide
  Antisense Strand to SEQ ID NO: 393997
agcaucgguggauucuucc

SEQ ID NO: 393999 - RNA, 19 nt, Artificial Sequence
  Description of Artificial Sequence: Synthetic oligonucleotide
  Sense Strand Starting at position 959 of SEQ ID NO: 315926
cgaugcucucuggaggagu

SEQ ID NO: 394000 - RNA, 19 nt, Artificial Sequence
  Description of Artificial Sequence: Synthetic oligonucleotide
  Antisense Strand to SEQ ID NO: 393999
acuccuccagagagcaucg

SEQ ID NO: 394001 - RNA, 19 nt, Artificial Sequence
  Description of Artificial Sequence: Synthetic oligonucleotide
  Sense Strand Starting at position 959 of SEQ ID NO: 315974
gggccuuucucugcccaga

SEQ ID NO: 394002 - RNA, 19 nt, Artificial Sequence
  Description of Artificial Sequence: Synthetic oligonucleotide
  Antisense Strand to SEQ ID NO: 394001
ucugggcagagaaaggccc

SEQ ID NO: 394003 - RNA, 19 nt, Artificial Sequence
  Description of Artificial Sequence: Synthetic oligonucleotide
  Sense Strand Starting at position 959 of SEQ ID NO: 316752
gcgacaagccaagagauua

SEQ ID NO: 394004 - RNA, 19 nt, Artificial Sequence
  Description of Artificial Sequence: Synthetic oligonucleotide
  Antisense Strand to SEQ ID NO: 394003
uaaucucuuggcuugucgc

SEQ ID NO: 394005 - RNA, 19 nt, Artificial Sequence
  Description of Artificial Sequence: Synthetic oligonucleotide
  Sense Strand Starting at position 959 of SEQ ID NO: 316763
agagauuaagccggguacu

SEQ ID NO: 394006 - RNA, 19 nt, Artificial Sequence
  Description of Artificial Sequence: Synthetic oligonucleotide
  Antisense Strand to SEQ ID NO: 394005
aguacccggcuuaaucucu

SEQ ID NO: 394007 - RNA, 19 nt, Artificial Sequence
  Description of Artificial Sequence: Synthetic oligonucleotide
  Sense Strand Starting at position 959 of SEQ ID NO: 316764
gagauuaagccggguacuu

SEQ ID NO: 394008 - RNA, 19 nt, Artificial Sequence
  Description of Artificial Sequence: Synthetic oligonucleotide
  Antisense Strand to SEQ ID NO: 394007
aaguacccggcuuaaucuc

SEQ ID NO: 394009 - RNA, 19 nt, Artificial Sequence
  Description of Artificial Sequence: Synthetic oligonucleotide
  Sense Strand Starting at position 959 of SEQ ID NO: 317629
ggcggucagaccuagggaa

SEQ ID NO: 394010 - RNA, 19 nt, Artificial Sequence
  Description of Artificial Sequence: Synthetic oligonucleotide
  Antisense Strand to SEQ ID NO: 394009
uucccuaggucugaccgcc

SEQ ID NO: 394011 - RNA, 19 nt, Artificial Sequence
  Description of Artificial Sequence: Synthetic oligonucleotide
  Sense Strand Starting at position 959 of SEQ ID NO: 317909
ccacuaucuccaggacagu

SEQ ID NO: 394012 - RNA, 19 nt, Artificial Sequence
  Description of Artificial Sequence: Synthetic oligonucleotide
  Antisense Strand to SEQ ID NO: 394011
acuguccuggagauagugg

SEQ ID NO: 394013 - RNA, 19 nt, Artificial Sequence
  Description of Artificial Sequence: Synthetic oligonucleotide
  Sense Strand Starting at position 959 of SEQ ID NO: 317981
cuggcaauuagguguaucu

SEQ ID NO: 394014 - RNA, 19 nt, Artificial Sequence
  Description of Artificial Sequence: Synthetic oligonucleotide
  Antisense Strand to SEQ ID NO: 394013
agauacaccuaauugccag

SEQ ID NO: 394015 - RNA, 19 nt, Artificial Sequence
  Description of Artificial Sequence: Synthetic oligonucleotide
  Sense Strand Starting at position 959 of SEQ ID NO: 317994
guaucuggacaaugagcua

SEQ ID NO: 394016 - RNA, 19 nt, Artificial Sequence
  Description of Artificial Sequence: Synthetic oligonucleotide
  Antisense Strand to SEQ ID NO: 394015
uagcucauuguccagauac

SEQ ID NO: 394017 - RNA, 19 nt, Artificial Sequence
  Description of Artificial Sequence: Synthetic oligonucleotide
  Sense Strand Starting at position 959 of SEQ ID NO: 318007
gagcuaucugaggacaugu

SEQ ID NO: 394018 - RNA, 19 nt, Artificial Sequence
  Description of Artificial Sequence: Synthetic oligonucleotide
  Antisense Strand to SEQ ID NO: 394017
acauguccucagauagcuc

SEQ ID NO: 394019 - RNA, 19 nt, Artificial Sequence
  Description of Artificial Sequence: Synthetic oligonucleotide
  Sense Strand Starting at position 959 of SEQ ID NO: 318076
ccaaguugugagugaguga

SEQ ID NO: 394020 - RNA, 19 nt, Artificial Sequence
  Description of Artificial Sequence: Synthetic oligonucleotide
  Antisense Strand to SEQ ID NO: 394019
ucacucacucacaacuugg

SEQ ID NO: 394021 - RNA, 19 nt, Artificial Sequence
  Description of Artificial Sequence: Synthetic oligonucleotide
  Sense Strand Starting at position 959 of SEQ ID NO: 318149
aggcaugcugguuaauuga

SEQ ID NO: 394022 - RNA, 19 nt, Artificial Sequence
  Description of Artificial Sequence: Synthetic oligonucleotide
  Antisense Strand to SEQ ID NO: 394021
ucaauuaaccagcaugccu

SEQ ID NO: 394023 - RNA, 19 nt, Artificial Sequence
  Description of Artificial Sequence: Synthetic oligonucleotide
  Sense Strand Starting at position 959 of SEQ ID NO: 318204
cguggucuuguucauuuau

SEQ ID NO: 394024 - RNA, 19 nt, Artificial Sequence
  Description of Artificial Sequence: Synthetic oligonucleotide
  Antisense Strand to SEQ ID NO: 394023
auaaaugaacaagaccacg

SEQ ID NO: 394025 - RNA, 19 nt, Artificial Sequence
  Description of Artificial Sequence: Synthetic oligonucleotide
  Sense Strand Starting at position 959 of SEQ ID NO: 318221
auggcuguucagugagcau

SEQ ID NO: 394026 - RNA, 19 nt, Artificial Sequence
  Description of Artificial Sequence: Synthetic oligonucleotide
  Antisense Strand to SEQ ID NO: 394025
augcucacugaacagccau

SEQ ID NO: 394027 - RNA, 19 nt, Artificial Sequence
  Description of Artificial Sequence: Synthetic oligonucleotide
  Sense Strand Starting at position 959 of SEQ ID NO: 318244
uugagauaauaaucugcau

SEQ ID NO: 394028 - RNA, 19 nt, Artificial Sequence
  Description of Artificial Sequence: Synthetic oligonucleotide
  Antisense Strand to SEQ ID NO: 394027
augcagauuauuaucucaa

SEQ ID NO: 394029 - RNA, 19 nt, Artificial Sequence
  Description of Artificial Sequence: Synthetic oligonucleotide
  Sense Strand Starting at position 959 of SEQ ID NO: 318250
uaauaaucugcaugucggu

SEQ ID NO: 394030 - RNA, 19 nt, Artificial Sequence
  Description of Artificial Sequence: Synthetic oligonucleotide
  Antisense Strand to SEQ ID NO: 394029
accgacaugcagauuauua

SEQ ID NO: 394031 - RNA, 19 nt, Artificial Sequence
  Description of Artificial Sequence: Synthetic oligonucleotide
  Sense Strand Starting at position 959 of SEQ ID NO: 318495
acugcaucccaaggacaua

SEQ ID NO: 394032 - RNA, 19 nt, Artificial Sequence
  Description of Artificial Sequence: Synthetic oligonucleotide
  Antisense Strand to SEQ ID NO: 394031
uauguccuugggaugcagu

SEQ ID NO: 394033 - RNA, 19 nt, Artificial Sequence
  Description of Artificial Sequence: Synthetic oligonucleotide
  Sense Strand Starting at position 959 of SEQ ID NO: 318515
cucagaguuuaagaaauag

SEQ ID NO: 394034 - RNA, 19 nt, Artificial Sequence
  Description of Artificial Sequence: Synthetic oligonucleotide
  Antisense Strand to SEQ ID NO: 394033
cuauuucuuaaacucugag

SEQ ID NO: 394035 - RNA, 19 nt, Artificial Sequence
  Description of Artificial Sequence: Synthetic oligonucleotide
  Sense Strand Starting at position 959 of SEQ ID NO: 318527
gaaauaguuguugaauguu

SEQ ID NO: 394036 - RNA, 19 nt, Artificial Sequence
  Description of Artificial Sequence: Synthetic oligonucleotide
  Antisense Strand to SEQ ID NO: 394035
aacauucaacaacuauuuc

SEQ ID NO: 394037 - RNA, 19 nt, Artificial Sequence
  Description of Artificial Sequence: Synthetic oligonucleotide
  Sense Strand Starting at position 959 of SEQ ID NO: 318530
auaguuguugaauguuuga

SEQ ID NO: 394038 - RNA, 19 nt, Artificial Sequence
  Description of Artificial Sequence: Synthetic oligonucleotide
  Antisense Strand to SEQ ID NO: 394037
ucaaacauucaacaacuau

SEQ ID NO: 394039 - RNA, 19 nt, Artificial Sequence
  Description of Artificial Sequence: Synthetic oligonucleotide
  Sense Strand Starting at position 959 of SEQ ID NO: 318533
guuguugaauguuugaaug

SEQ ID NO: 394040 - RNA, 19 nt, Artificial Sequence
  Description of Artificial Sequence: Synthetic oligonucleotide
  Antisense Strand to SEQ ID NO: 394039
cauucaaacauucaacaac

SEQ ID NO: 394041 - RNA, 19 nt, Artificial Sequence
  Description of Artificial Sequence: Synthetic oligonucleotide
  Sense Strand Starting at position 959 of SEQ ID NO: 318615
cagggauuguaagucauca

SEQ ID NO: 394042 - RNA, 19 nt, Artificial Sequence
  Description of Artificial Sequence: Synthetic oligonucleotide
  Antisense Strand to SEQ ID NO: 394041
ugaugacuuacaaucccug

SEQ ID NO: 394043 - RNA, 19 nt, Artificial Sequence
  Description of Artificial Sequence: Synthetic oligonucleotide
  Sense Strand Starting at position 959 of SEQ ID NO: 318714
gcucucuuaggagaccaua

SEQ ID NO: 394044 - RNA, 19 nt, Artificial Sequence
  Description of Artificial Sequence: Synthetic oligonucleotide
  Antisense Strand to SEQ ID NO: 394043
uauggucuccuaagagagc

SEQ ID NO: 394045 - RNA, 19 nt, Artificial Sequence
  Description of Artificial Sequence: Synthetic oligonucleotide
  Sense Strand Starting at position 959 of SEQ ID NO: 318747
gaagaaagcucugaaagga

SEQ ID NO: 394046 - RNA, 19 nt, Artificial Sequence
  Description of Artificial Sequence: Synthetic oligonucleotide
  Antisense Strand to SEQ ID NO: 394045
uccuuucagagcuuucuuc

SEQ ID NO: 394047 - RNA, 19 nt, Artificial Sequence
  Description of Artificial Sequence: Synthetic oligonucleotide
  Sense Strand Starting at position 959 of SEQ ID NO: 318929
augagaucaucgguggcaa

SEQ ID NO: 394048 - RNA, 19 nt, Artificial Sequence
  Description of Artificial Sequence: Synthetic oligonucleotide
  Antisense Strand to SEQ ID NO: 394047
uugccaccgaugaucucau

SEQ ID NO: 394049 - RNA, 19 nt, Artificial Sequence
  Description of Artificial Sequence: Synthetic oligonucleotide
  Sense Strand Starting at position 959 of SEQ ID NO: 318930
ugagaucaucgguggcaag

SEQ ID NO: 394050 - RNA, 19 nt, Artificial Sequence
  Description of Artificial Sequence: Synthetic oligonucleotide
  Antisense Strand to SEQ ID NO: 394049
cuugccaccgaugaucuca

SEQ ID NO: 394051 - RNA, 19 nt, Artificial Sequence
  Description of Artificial Sequence: Synthetic oligonucleotide
  Sense Strand Starting at position 959 of SEQ ID NO: 318931
gagaucaucgguggcaaga

SEQ ID NO: 394052 - RNA, 19 nt, Artificial Sequence
  Description of Artificial Sequence: Synthetic oligonucleotide
  Antisense Strand to SEQ ID NO: 394051
ucuugccaccgaugaucuc

SEQ ID NO: 394053 - RNA, 19 nt, Artificial Sequence
  Description of Artificial Sequence: Synthetic oligonucleotide
  Sense Strand Starting at position 959 of SEQ ID NO: 319142
cugacuaugguccagcuua

SEQ ID NO: 394054 - RNA, 19 nt, Artificial Sequence
  Description of Artificial Sequence: Synthetic oligonucleotide
  Antisense Strand to SEQ ID NO: 394053
uaagcuggaccauagucag

SEQ ID NO: 394055 - RNA, 19 nt, Artificial Sequence
  Description of Artificial Sequence: Synthetic oligonucleotide
  Sense Strand Starting at position 959 of SEQ ID NO: 319173
cugucauaauucuuccagu

SEQ ID NO: 394056 - RNA, 19 nt, Artificial Sequence
  Description of Artificial Sequence: Synthetic oligonucleotide
  Antisense Strand to SEQ ID NO: 394055
acuggaagaauuaugacag

SEQ ID NO: 394057 - RNA, 19 nt, Artificial Sequence
  Description of Artificial Sequence: Synthetic oligonucleotide
  Sense Strand Starting at position 959 of SEQ ID NO: 319174
ugucauaauucuuccaguu

SEQ ID NO: 394058 - RNA, 19 nt, Artificial Sequence
  Description of Artificial Sequence: Synthetic oligonucleotide
  Antisense Strand to SEQ ID NO: 394057
aacuggaagaauuaugaca

SEQ ID NO: 394059 - RNA, 19 nt, Artificial Sequence
  Description of Artificial Sequence: Synthetic oligonucleotide
  Sense Strand Starting at position 960 of SEQ ID NO: 315270
gcugauacucaauggauac

SEQ ID NO: 394060 - RNA, 19 nt, Artificial Sequence
  Description of Artificial Sequence: Synthetic oligonucleotide
  Antisense Strand to SEQ ID NO: 394059
guauccauugaguaucagc

SEQ ID NO: 394061 - RNA, 19 nt, Artificial Sequence
  Description of Artificial Sequence: Synthetic oligonucleotide
  Sense Strand Starting at position 960 of SEQ ID NO: 315316
ggugccuaucauuacucua

SEQ ID NO: 394062 - RNA, 19 nt, Artificial Sequence
  Description of Artificial Sequence: Synthetic oligonucleotide
  Antisense Strand to SEQ ID NO: 394061
uagaguaaugauaggcacc

SEQ ID NO: 394063 - RNA, 19 nt, Artificial Sequence
  Description of Artificial Sequence: Synthetic oligonucleotide
  Sense Strand Starting at position 960 of SEQ ID NO: 315436
gauugugaacgcuaagcuu

SEQ ID NO: 394064 - RNA, 19 nt, Artificial Sequence
  Description of Artificial Sequence: Synthetic oligonucleotide
  Antisense Strand to SEQ ID NO: 394063
aagcuuagcguucacaauc

SEQ ID NO: 394065 - RNA, 19 nt, Artificial Sequence
  Description of Artificial Sequence: Synthetic oligonucleotide
  Sense Strand Starting at position 960 of SEQ ID NO: 315628
gagacaagaguccguucuu

SEQ ID NO: 394066 - RNA, 19 nt, Artificial Sequence
  Description of Artificial Sequence: Synthetic oligonucleotide
  Antisense Strand to SEQ ID NO: 394065
aagaacggacucuugucuc

SEQ ID NO: 394067 - RNA, 19 nt, Artificial Sequence
  Description of Artificial Sequence: Synthetic oligonucleotide
  Sense Strand Starting at position 960 of SEQ ID NO: 315629
agacaagaguccguucuuu

SEQ ID NO: 394068 - RNA, 19 nt, Artificial Sequence
  Description of Artificial Sequence: Synthetic oligonucleotide
  Antisense Strand to SEQ ID NO: 394067
aaagaacggacucuugucu

SEQ ID NO: 394069 - RNA, 19 nt, Artificial Sequence
  Description of Artificial Sequence: Synthetic oligonucleotide
  Sense Strand Starting at position 960 of SEQ ID NO: 315633
aagaguccguucuuuagga

SEQ ID NO: 394070 - RNA, 19 nt, Artificial Sequence
  Description of Artificial Sequence: Synthetic oligonucleotide
  Antisense Strand to SEQ ID NO: 394069
uccuaaagaacggacucuu

SEQ ID NO: 394071 - RNA, 19 nt, Artificial Sequence
  Description of Artificial Sequence: Synthetic oligonucleotide
  Sense Strand Starting at position 960 of SEQ ID NO: 315634
agaguccguucuuuaggaa

SEQ ID NO: 394072 - RNA, 19 nt, Artificial Sequence
  Description of Artificial Sequence: Synthetic oligonucleotide
  Antisense Strand to SEQ ID NO: 394071
uuccuaaagaacggacucu

SEQ ID NO: 394073 - RNA, 19 nt, Artificial Sequence
  Description of Artificial Sequence: Synthetic oligonucleotide
  Sense Strand Starting at position 960 of SEQ ID NO: 315635
gaguccguucuuuaggaaa

SEQ ID NO: 394074 - RNA, 19 nt, Artificial Sequence
  Description of Artificial Sequence: Synthetic oligonucleotide
  Antisense Strand to SEQ ID NO: 394073
uuuccuaaagaacggacuc

SEQ ID NO: 394075 - RNA, 19 nt, Artificial Sequence
  Description of Artificial Sequence: Synthetic oligonucleotide
  Sense Strand Starting at position 960 of SEQ ID NO: 315703
aucaacuaagguuguaaga

SEQ ID NO: 394076 - RNA, 19 nt, Artificial Sequence
  Description of Artificial Sequence: Synthetic oligonucleotide
  Antisense Strand to SEQ ID NO: 394075
ucuuacaaccuuaguugau

SEQ ID NO: 394077 - RNA, 19 nt, Artificial Sequence
  Description of Artificial Sequence: Synthetic oligonucleotide
  Sense Strand Starting at position 960 of SEQ ID NO: 315802
cuccuaauucggugacacu

SEQ ID NO: 394078 - RNA, 19 nt, Artificial Sequence
  Description of Artificial Sequence: Synthetic oligonucleotide
  Antisense Strand to SEQ ID NO: 394077
agugucaccgaauuaggag

SEQ ID NO: 394079 - RNA, 19 nt, Artificial Sequence
  Description of Artificial Sequence: Synthetic oligonucleotide
  Sense Strand Starting at position 960 of SEQ ID NO: 315803
uccuaauucggugacacua

SEQ ID NO: 394080 - RNA, 19 nt, Artificial Sequence
  Description of Artificial Sequence: Synthetic oligonucleotide
  Antisense Strand to SEQ ID NO: 394079
uagugucaccgaauuagga

SEQ ID NO: 394081 - RNA, 19 nt, Artificial Sequence
  Description of Artificial Sequence: Synthetic oligonucleotide
  Sense Strand Starting at position 960 of SEQ ID NO: 315823
accacaauaugugugauaa

SEQ ID NO: 394082 - RNA, 19 nt, Artificial Sequence
  Description of Artificial Sequence: Synthetic oligonucleotide
  Antisense Strand to SEQ ID NO: 394081
uuaucacacauauuguggu

SEQ ID NO: 394083 - RNA, 19 nt, Artificial Sequence
  Description of Artificial Sequence: Synthetic oligonucleotide
  Sense Strand Starting at position 960 of SEQ ID NO: 315824
ccacaauaugugugauaag

SEQ ID NO: 394084 - RNA, 19 nt, Artificial Sequence
  Description of Artificial Sequence: Synthetic oligonucleotide
  Antisense Strand to SEQ ID NO: 394083
cuuaucacacauauugugg

SEQ ID NO: 394085 - RNA, 19 nt, Artificial Sequence
  Description of Artificial Sequence: Synthetic oligonucleotide
  Sense Strand Starting at position 960 of SEQ ID NO: 315856
uucuuauggcuuuaaggga

SEQ ID NO: 394086 - RNA, 19 nt, Artificial Sequence
  Description of Artificial Sequence: Synthetic oligonucleotide
  Antisense Strand to SEQ ID NO: 394085
ucccuuaaagccauaagaa

SEQ ID NO: 394087 - RNA, 19 nt, Artificial Sequence
  Description of Artificial Sequence: Synthetic oligonucleotide
  Sense Strand Starting at position 960 of SEQ ID NO: 316009
cuagaaauuuaauacagug

SEQ ID NO: 394088 - RNA, 19 nt, Artificial Sequence
  Description of Artificial Sequence: Synthetic oligonucleotide
  Antisense Strand to SEQ ID NO: 394087
cacuguauuaaauuucuag

SEQ ID NO: 394089 - RNA, 19 nt, Artificial Sequence
  Description of Artificial Sequence: Synthetic oligonucleotide
  Sense Strand Starting at position 960 of SEQ ID NO: 316229
gcucaaauauuugcuguca

SEQ ID NO: 394090 - RNA, 19 nt, Artificial Sequence
  Description of Artificial Sequence: Synthetic oligonucleotide
  Antisense Strand to SEQ ID NO: 394089
ugacagcaaauauuugagc

SEQ ID NO: 394091 - RNA, 19 nt, Artificial Sequence
  Description of Artificial Sequence: Synthetic oligonucleotide
  Sense Strand Starting at position 960 of SEQ ID NO: 316356
ccaucuuuccucgauuaag

SEQ ID NO: 394092 - RNA, 19 nt, Artificial Sequence
  Description of Artificial Sequence: Synthetic oligonucleotide
  Antisense Strand to SEQ ID NO: 394091
cuuaaucgaggaaagaugg

SEQ ID NO: 394093 - RNA, 19 nt, Artificial Sequence
  Description of Artificial Sequence: Synthetic oligonucleotide
  Sense Strand Starting at position 960 of SEQ ID NO: 316362
uuccucgauuaaguugaaa

SEQ ID NO: 394094 - RNA, 19 nt, Artificial Sequence
  Description of Artificial Sequence: Synthetic oligonucleotide
  Antisense Strand to SEQ ID NO: 394093
uuucaacuuaaucgaggaa

SEQ ID NO: 394095 - RNA, 19 nt, Artificial Sequence
  Description of Artificial Sequence: Synthetic oligonucleotide
  Sense Strand Starting at position 960 of SEQ ID NO: 316399
ccguaacaugccuaggaca

SEQ ID NO: 394096 - RNA, 19 nt, Artificial Sequence
  Description of Artificial Sequence: Synthetic oligonucleotide
  Antisense Strand to SEQ ID NO: 394095
uguccuaggcauguuacgg

SEQ ID NO: 394097 - RNA, 19 nt, Artificial Sequence
  Description of Artificial Sequence: Synthetic oligonucleotide
  Sense Strand Starting at position 960 of SEQ ID NO: 316401
guaacaugccuaggacaaa

SEQ ID NO: 394098 - RNA, 19 nt, Artificial Sequence
  Description of Artificial Sequence: Synthetic oligonucleotide
  Antisense Strand to SEQ ID NO: 394097
uuuguccuaggcauguuac

SEQ ID NO: 394099 - RNA, 19 nt, Artificial Sequence
  Description of Artificial Sequence: Synthetic oligonucleotide
  Sense Strand Starting at position 960 of SEQ ID NO: 316509
cucaguugccgucagggaa

SEQ ID NO: 394100 - RNA, 19 nt, Artificial Sequence
  Description of Artificial Sequence: Synthetic oligonucleotide
  Antisense Strand to SEQ ID NO: 394099
uucccugacggcaacugag

SEQ ID NO: 394101 - RNA, 19 nt, Artificial Sequence
  Description of Artificial Sequence: Synthetic oligonucleotide
  Sense Strand Starting at position 960 of SEQ ID NO: 317327
gaucucgugcuacaaacau

SEQ ID NO: 394102 - RNA, 19 nt, Artificial Sequence
  Description of Artificial Sequence: Synthetic oligonucleotide
  Antisense Strand to SEQ ID NO: 394101
auguuuguagcacgagauc

SEQ ID NO: 394103 - RNA, 19 nt, Artificial Sequence
  Description of Artificial Sequence: Synthetic oligonucleotide
  Sense Strand Starting at position 960 of SEQ ID NO: 317370
aucuuugaggcucauacaa

SEQ ID NO: 394104 - RNA, 19 nt, Artificial Sequence
  Description of Artificial Sequence: Synthetic oligonucleotide
  Antisense Strand to SEQ ID NO: 394103
uuguaugagccucaaagau

SEQ ID NO: 394105 - RNA, 19 nt, Artificial Sequence
  Description of Artificial Sequence: Synthetic oligonucleotide
  Sense Strand Starting at position 960 of SEQ ID NO: 317613
ggucuagcucaacacagaa

SEQ ID NO: 394106 - RNA, 19 nt, Artificial Sequence
  Description of Artificial Sequence: Synthetic oligonucleotide
  Antisense Strand to SEQ ID NO: 394105
uucuguguugagcuagacc

SEQ ID NO: 394107 - RNA, 19 nt, Artificial Sequence
  Description of Artificial Sequence: Synthetic oligonucleotide
  Sense Strand Starting at position 960 of SEQ ID NO: 317669
ugccaauauguguuaucgu

SEQ ID NO: 394108 - RNA, 19 nt, Artificial Sequence
  Description of Artificial Sequence: Synthetic oligonucleotide
  Antisense Strand to SEQ ID NO: 394107
acgauaacacauauuggca

SEQ ID NO: 394109 - RNA, 19 nt, Artificial Sequence
  Description of Artificial Sequence: Synthetic oligonucleotide
  Sense Strand Starting at position 960 of SEQ ID NO: 317686
guucuaguagacugcaaau

SEQ ID NO: 394110 - RNA, 19 nt, Artificial Sequence
  Description of Artificial Sequence: Synthetic oligonucleotide
  Antisense Strand to SEQ ID NO: 394109
auuugcagucuacuagaac

SEQ ID NO: 394111 - RNA, 19 nt, Artificial Sequence
  Description of Artificial Sequence: Synthetic oligonucleotide
  Sense Strand Starting at position 960 of SEQ ID NO: 317688
ucuaguagacugcaaauga

SEQ ID NO: 394112 - RNA, 19 nt, Artificial Sequence
  Description of Artificial Sequence: Synthetic oligonucleotide
  Antisense Strand to SEQ ID NO: 394111
ucauuugcagucuacuaga

SEQ ID NO: 394113 - RNA, 19 nt, Artificial Sequence
  Description of Artificial Sequence: Synthetic oligonucleotide
  Sense Strand Starting at position 960 of SEQ ID NO: 317753
cuuugucuggcagaggaga

SEQ ID NO: 394114 - RNA, 19 nt, Artificial Sequence
  Description of Artificial Sequence: Synthetic oligonucleotide
  Antisense Strand to SEQ ID NO: 394113
ucuccucugccagacaaag

SEQ ID NO: 394115 - RNA, 19 nt, Artificial Sequence
  Description of Artificial Sequence: Synthetic oligonucleotide
  Sense Strand Starting at position 960 of SEQ ID NO: 317795
gcuaaagccucucugaacu

SEQ ID NO: 394116 - RNA, 19 nt, Artificial Sequence
  Description of Artificial Sequence: Synthetic oligonucleotide
  Antisense Strand to SEQ ID NO: 394115
aguucagagaggcuuuagc

SEQ ID NO: 394117 - RNA, 19 nt, Artificial Sequence
  Description of Artificial Sequence: Synthetic oligonucleotide
  Sense Strand Starting at position 960 of SEQ ID NO: 317820
uagagaagaugugauaaag

SEQ ID NO: 394118 - RNA, 19 nt, Artificial Sequence
  Description of Artificial Sequence: Synthetic oligonucleotide
  Antisense Strand to SEQ ID NO: 394117
cuuuaucacaucuucucua

SEQ ID NO: 394119 - RNA, 19 nt, Artificial Sequence
  Description of Artificial Sequence: Synthetic oligonucleotide
  Sense Strand Starting at position 960 of SEQ ID NO: 317848
guagaacucuucuuguaag

SEQ ID NO: 394120 - RNA, 19 nt, Artificial Sequence
  Description of Artificial Sequence: Synthetic oligonucleotide
  Antisense Strand to SEQ ID NO: 394119
cuuacaagaagaguucuac

SEQ ID NO: 394121 - RNA, 19 nt, Artificial Sequence
  Description of Artificial Sequence: Synthetic oligonucleotide
  Sense Strand Starting at position 960 of SEQ ID NO: 318273
cagucucaacccugagaug

SEQ ID NO: 394122 - RNA, 19 nt, Artificial Sequence
  Description of Artificial Sequence: Synthetic oligonucleotide
  Antisense Strand to SEQ ID NO: 394121
caucucaggguugagacug

SEQ ID NO: 394123 - RNA, 19 nt, Artificial Sequence
  Description of Artificial Sequence: Synthetic oligonucleotide
  Sense Strand Starting at position 960 of SEQ ID NO: 318374
cucuauguguauucugaaa

SEQ ID NO: 394124 - RNA, 19 nt, Artificial Sequence
  Description of Artificial Sequence: Synthetic oligonucleotide
  Antisense Strand to SEQ ID NO: 394123
uuucagaauacacauagag

SEQ ID NO: 394125 - RNA, 19 nt, Artificial Sequence
  Description of Artificial Sequence: Synthetic oligonucleotide
  Sense Strand Starting at position 960 of SEQ ID NO: 318552
acaucagaccucugcaguu

SEQ ID NO: 394126 - RNA, 19 nt, Artificial Sequence
  Description of Artificial Sequence: Synthetic oligonucleotide
  Antisense Strand to SEQ ID NO: 394125
aacugcagaggucugaugu

SEQ ID NO: 394127 - RNA, 19 nt, Artificial Sequence
  Description of Artificial Sequence: Synthetic oligonucleotide
  Sense Strand Starting at position 960 of SEQ ID NO: 318588
gaaagcucuuccuccaggu

SEQ ID NO: 394128 - RNA, 19 nt, Artificial Sequence
  Description of Artificial Sequence: Synthetic oligonucleotide
  Antisense Strand to SEQ ID NO: 394127
accuggaggaagagcuuuc

SEQ ID NO: 394129 - RNA, 19 nt, Artificial Sequence
  Description of Artificial Sequence: Synthetic oligonucleotide
  Sense Strand Starting at position 960 of SEQ ID NO: 318636
uggucuugacuuuaaagua

SEQ ID NO: 394130 - RNA, 19 nt, Artificial Sequence
  Description of Artificial Sequence: Synthetic oligonucleotide
  Antisense Strand to SEQ ID NO: 394129
uacuuuaaagucaagacca

SEQ ID NO: 394131 - RNA, 19 nt, Artificial Sequence
  Description of Artificial Sequence: Synthetic oligonucleotide
  Sense Strand Starting at position 960 of SEQ ID NO: 319007
ccuggugucaaguaauggu

SEQ ID NO: 394132 - RNA, 19 nt, Artificial Sequence
  Description of Artificial Sequence: Synthetic oligonucleotide
  Antisense Strand to SEQ ID NO: 394131
accauuacuugacaccagg

SEQ ID NO: 394133 - RNA, 19 nt, Artificial Sequence
  Description of Artificial Sequence: Synthetic oligonucleotide
  Sense Strand Starting at position 960 of SEQ ID NO: 319156
ugcgauaucccugauucuu

SEQ ID NO: 394134 - RNA, 19 nt, Artificial Sequence
  Description of Artificial Sequence: Synthetic oligonucleotide
  Antisense Strand to SEQ ID NO: 394133
aagaaucagggauaucgca

SEQ ID NO: 394135 - RNA, 19 nt, Artificial Sequence
  Description of Artificial Sequence: Synthetic oligonucleotide
  Sense Strand Starting at position 960 of SEQ ID NO: 319158
cgauaucccugauucuuga

SEQ ID NO: 394136 - RNA, 19 nt, Artificial Sequence
  Description of Artificial Sequence: Synthetic oligonucleotide
  Antisense Strand to SEQ ID NO: 394135
ucaagaaucagggauaucg

SEQ ID NO: 394137 - RNA, 19 nt, Artificial Sequence
  Description of Artificial Sequence: Synthetic oligonucleotide
  Sense Strand Starting at position 960 of SEQ ID NO: 319198
gugcucaauguguacaauu

SEQ ID NO: 394138 - RNA, 19 nt, Artificial Sequence
  Description of Artificial Sequence: Synthetic oligonucleotide
  Antisense Strand to SEQ ID NO: 394137
aauuguacacauugagcac

SEQ ID NO: 394139 - RNA, 19 nt, Artificial Sequence
  Description of Artificial Sequence: Synthetic oligonucleotide
  Sense Strand Starting at position 961 of SEQ ID NO: 315254
cuggcuaagucauuucuuu

SEQ ID NO: 394140 - RNA, 19 nt, Artificial Sequence
  Description of Artificial Sequence: Synthetic oligonucleotide
  Antisense Strand to SEQ ID NO: 394139
aaagaaaugacuuagccag

SEQ ID NO: 394141 - RNA, 19 nt, Artificial Sequence
  Description of Artificial Sequence: Synthetic oligonucleotide
  Sense Strand Starting at position 961 of SEQ ID NO: 315329
aacuuucggguuugaaaga

SEQ ID NO: 394142 - RNA, 19 nt, Artificial Sequence
  Description of Artificial Sequence: Synthetic oligonucleotide
  Antisense Strand to SEQ ID NO: 394141
ucuuucaaacccgaaaguu

SEQ ID NO: 394143 - RNA, 19 nt, Artificial Sequence
  Description of Artificial Sequence: Synthetic oligonucleotide
  Sense Strand Starting at position 961 of SEQ ID NO: 315468
gcacauaaagguuaacauu

SEQ ID NO: 394144 - RNA, 19 nt, Artificial Sequence
  Description of Artificial Sequence: Synthetic oligonucleotide
  Antisense Strand to SEQ ID NO: 394143
aauguuaaccuuuaugugc

SEQ ID NO: 394145 - RNA, 19 nt, Artificial Sequence
  Description of Artificial Sequence: Synthetic oligonucleotide
  Sense Strand Starting at position 961 of SEQ ID NO: 315476
agguuaacauuagugaaug

SEQ ID NO: 394146 - RNA, 19 nt, Artificial Sequence
  Description of Artificial Sequence: Synthetic oligonucleotide
  Antisense Strand to SEQ ID NO: 394145
cauucacuaauguuaaccu

SEQ ID NO: 394147 - RNA, 19 nt, Artificial Sequence
  Description of Artificial Sequence: Synthetic oligonucleotide
  Sense Strand Starting at position 961 of SEQ ID NO: 315481
aacauuagugaauguguga

SEQ ID NO: 394148 - RNA, 19 nt, Artificial Sequence
  Description of Artificial Sequence: Synthetic oligonucleotide
  Antisense Strand to SEQ ID NO: 394147
ucacacauucacuaauguu

SEQ ID NO: 394149 - RNA, 19 nt, Artificial Sequence
  Description of Artificial Sequence: Synthetic oligonucleotide
  Sense Strand Starting at position 961 of SEQ ID NO: 315484
auuagugaaugugugacaa

SEQ ID NO: 394150 - RNA, 19 nt, Artificial Sequence
  Description of Artificial Sequence: Synthetic oligonucleotide
  Antisense Strand to SEQ ID NO: 394149
uugucacacauucacuaau

SEQ ID NO: 394151 - RNA, 19 nt, Artificial Sequence
  Description of Artificial Sequence: Synthetic oligonucleotide
  Sense Strand Starting at position 961 of SEQ ID NO: 315577
uagggaagcuuaucaauug

SEQ ID NO: 394152 - RNA, 19 nt, Artificial Sequence
  Description of Artificial Sequence: Synthetic oligonucleotide
  Antisense Strand to SEQ ID NO: 394151
caauugauaagcuucccua

SEQ ID NO: 394153 - RNA, 19 nt, Artificial Sequence
  Description of Artificial Sequence: Synthetic oligonucleotide
  Sense Strand Starting at position 961 of SEQ ID NO: 315731
uguaauaugaagggauugu

SEQ ID NO: 394154 - RNA, 19 nt, Artificial Sequence
  Description of Artificial Sequence: Synthetic oligonucleotide
  Antisense Strand to SEQ ID NO: 394153
acaaucccuucauauuaca

SEQ ID NO: 394155 - RNA, 19 nt, Artificial Sequence
  Description of Artificial Sequence: Synthetic oligonucleotide
  Sense Strand Starting at position 961 of SEQ ID NO: 315830
uguaaauucuacucaguga

SEQ ID NO: 394156 - RNA, 19 nt, Artificial Sequence
  Description of Artificial Sequence: Synthetic oligonucleotide
  Antisense Strand to SEQ ID NO: 394155
ucacugaguagaauuuaca

SEQ ID NO: 394157 - RNA, 19 nt, Artificial Sequence
  Description of Artificial Sequence: Synthetic oligonucleotide
  Sense Strand Starting at position 961 of SEQ ID NO: 315861
gucccuuuaggccacaauu

SEQ ID NO: 394158 - RNA, 19 nt, Artificial Sequence
  Description of Artificial Sequence: Synthetic oligonucleotide
  Antisense Strand to SEQ ID NO: 394157
aauuguggccuaaagggac

SEQ ID NO: 394159 - RNA, 19 nt, Artificial Sequence
  Description of Artificial Sequence: Synthetic oligonucleotide
  Sense Strand Starting at position 961 of SEQ ID NO: 316046
gcaaauaauccucagggca

SEQ ID NO: 394160 - RNA, 19 nt, Artificial Sequence
  Description of Artificial Sequence: Synthetic oligonucleotide
  Antisense Strand to SEQ ID NO: 394159
ugcccugaggauuauuugc

SEQ ID NO: 394161 - RNA, 19 nt, Artificial Sequence
  Description of Artificial Sequence: Synthetic oligonucleotide
  Sense Strand Starting at position 961 of SEQ ID NO: 316054
uccucagggcaaugugaaa

SEQ ID NO: 394162 - RNA, 19 nt, Artificial Sequence
  Description of Artificial Sequence: Synthetic oligonucleotide
  Antisense Strand to SEQ ID NO: 394161
uuucacauugcccugagga

SEQ ID NO: 394163 - RNA, 19 nt, Artificial Sequence
  Description of Artificial Sequence: Synthetic oligonucleotide
  Sense Strand Starting at position 961 of SEQ ID NO: 316470
uuguacagucuaggacaua

SEQ ID NO: 394164 - RNA, 19 nt, Artificial Sequence
  Description of Artificial Sequence: Synthetic oligonucleotide
  Antisense Strand to SEQ ID NO: 394163
uauguccuagacuguacaa

SEQ ID NO: 394165 - RNA, 19 nt, Artificial Sequence
  Description of Artificial Sequence: Synthetic oligonucleotide
  Sense Strand Starting at position 961 of SEQ ID NO: 316518
ccaggaaauuaagcucagu

SEQ ID NO: 394166 - RNA, 19 nt, Artificial Sequence
  Description of Artificial Sequence: Synthetic oligonucleotide
  Antisense Strand to SEQ ID NO: 394165
acugagcuuaauuuccugg

SEQ ID NO: 394167 - RNA, 19 nt, Artificial Sequence
  Description of Artificial Sequence: Synthetic oligonucleotide
  Sense Strand Starting at position 961 of SEQ ID NO: 316600
cguggacuccgcguucaaa

SEQ ID NO: 394168 - RNA, 19 nt, Artificial Sequence
  Description of Artificial Sequence: Synthetic oligonucleotide
  Antisense Strand to SEQ ID NO: 394167
uuugaacgcggaguccacg

SEQ ID NO: 394169 - RNA, 19 nt, Artificial Sequence
  Description of Artificial Sequence: Synthetic oligonucleotide
  Sense Strand Starting at position 961 of SEQ ID NO: 317311
acugucuugaucgaagguu

SEQ ID NO: 394170 - RNA, 19 nt, Artificial Sequence
  Description of Artificial Sequence: Synthetic oligonucleotide
  Antisense Strand to SEQ ID NO: 394169
aaccuucgaucaagacagu

SEQ ID NO: 394171 - RNA, 19 nt, Artificial Sequence
  Description of Artificial Sequence: Synthetic oligonucleotide
  Sense Strand Starting at position 961 of SEQ ID NO: 317714
gggagaguccgagggaguu

SEQ ID NO: 394172 - RNA, 19 nt, Artificial Sequence
  Description of Artificial Sequence: Synthetic oligonucleotide
  Antisense Strand to SEQ ID NO: 394171
aacucccucggacucuccc

SEQ ID NO: 394173 - RNA, 19 nt, Artificial Sequence
  Description of Artificial Sequence: Synthetic oligonucleotide
  Sense Strand Starting at position 961 of SEQ ID NO: 317715
ggagaguccgagggaguuu

SEQ ID NO: 394174 - RNA, 19 nt, Artificial Sequence
  Description of Artificial Sequence: Synthetic oligonucleotide
  Antisense Strand to SEQ ID NO: 394173
aaacucccucggacucucc

SEQ ID NO: 394175 - RNA, 19 nt, Artificial Sequence
  Description of Artificial Sequence: Synthetic oligonucleotide
  Sense Strand Starting at position 961 of SEQ ID NO: 317805
ggagguuucgcgguaguuu

SEQ ID NO: 394176 - RNA, 19 nt, Artificial Sequence
  Description of Artificial Sequence: Synthetic oligonucleotide
  Antisense Strand to SEQ ID NO: 394175
aaacuaccgcgaaaccucc

SEQ ID NO: 394177 - RNA, 19 nt, Artificial Sequence
  Description of Artificial Sequence: Synthetic oligonucleotide
  Sense Strand Starting at position 961 of SEQ ID NO: 317845
uggaaagugccaugaaaug

SEQ ID NO: 394178 - RNA, 19 nt, Artificial Sequence
  Description of Artificial Sequence: Synthetic oligonucleotide
  Antisense Strand to SEQ ID NO: 394177
cauuucauggcacuuucca

SEQ ID NO: 394179 - RNA, 19 nt, Artificial Sequence
  Description of Artificial Sequence: Synthetic oligonucleotide
  Sense Strand Starting at position 961 of SEQ ID NO: 317880
caguuagauguguagaauc

SEQ ID NO: 394180 - RNA, 19 nt, Artificial Sequence
  Description of Artificial Sequence: Synthetic oligonucleotide
  Antisense Strand to SEQ ID NO: 394179
gauucuacacaucuaacug

SEQ ID NO: 394181 - RNA, 19 nt, Artificial Sequence
  Description of Artificial Sequence: Synthetic oligonucleotide
  Sense Strand Starting at position 961 of SEQ ID NO: 317896
aucccaaguuguucuagaa

SEQ ID NO: 394182 - RNA, 19 nt, Artificial Sequence
  Description of Artificial Sequence: Synthetic oligonucleotide
  Antisense Strand to SEQ ID NO: 394181
uucuagaacaacuugggau

SEQ ID NO: 394183 - RNA, 19 nt, Artificial Sequence
  Description of Artificial Sequence: Synthetic oligonucleotide
  Sense Strand Starting at position 961 of SEQ ID NO: 317933
gaaguaaucuaacuggucu

SEQ ID NO: 394184 - RNA, 19 nt, Artificial Sequence
  Description of Artificial Sequence: Synthetic oligonucleotide
  Antisense Strand to SEQ ID NO: 394183
agaccaguuagauuacuuc

SEQ ID NO: 394185 - RNA, 19 nt, Artificial Sequence
  Description of Artificial Sequence: Synthetic oligonucleotide
  Sense Strand Starting at position 961 of SEQ ID NO: 318083
ccgauucuaccuuggaaac

SEQ ID NO: 394186 - RNA, 19 nt, Artificial Sequence
  Description of Artificial Sequence: Synthetic oligonucleotide
  Antisense Strand to SEQ ID NO: 394185
guuuccaagguagaaucgg

SEQ ID NO: 394187 - RNA, 19 nt, Artificial Sequence
  Description of Artificial Sequence: Synthetic oligonucleotide
  Sense Strand Starting at position 961 of SEQ ID NO: 318084
cgauucuaccuuggaaaca

SEQ ID NO: 394188 - RNA, 19 nt, Artificial Sequence
  Description of Artificial Sequence: Synthetic oligonucleotide
  Antisense Strand to SEQ ID NO: 394187
uguuuccaagguagaaucg

SEQ ID NO: 394189 - RNA, 19 nt, Artificial Sequence
  Description of Artificial Sequence: Synthetic oligonucleotide
  Sense Strand Starting at position 961 of SEQ ID NO: 318135
caagaugagccauguugga

SEQ ID NO: 394190 - RNA, 19 nt, Artificial Sequence
  Description of Artificial Sequence: Synthetic oligonucleotide
  Antisense Strand to SEQ ID NO: 394189
uccaacauggcucaucuug

SEQ ID NO: 394191 - RNA, 19 nt, Artificial Sequence
  Description of Artificial Sequence: Synthetic oligonucleotide
  Sense Strand Starting at position 961 of SEQ ID NO: 318208
augcuagaugcuggaaauu

SEQ ID NO: 394192 - RNA, 19 nt, Artificial Sequence
  Description of Artificial Sequence: Synthetic oligonucleotide
  Antisense Strand to SEQ ID NO: 394191
aauuuccagcaucuagcau

SEQ ID NO: 394193 - RNA, 19 nt, Artificial Sequence
  Description of Artificial Sequence: Synthetic oligonucleotide
  Sense Strand Starting at position 961 of SEQ ID NO: 318217
gcuggaaauuaauugguga

SEQ ID NO: 394194 - RNA, 19 nt, Artificial Sequence
  Description of Artificial Sequence: Synthetic oligonucleotide
  Antisense Strand to SEQ ID NO: 394193
ucaccaauuaauuuccagc

SEQ ID NO: 394195 - RNA, 19 nt, Artificial Sequence
  Description of Artificial Sequence: Synthetic oligonucleotide
  Sense Strand Starting at position 961 of SEQ ID NO: 318237
caagaugaagucuggucuu

SEQ ID NO: 394196 - RNA, 19 nt, Artificial Sequence
  Description of Artificial Sequence: Synthetic oligonucleotide
  Antisense Strand to SEQ ID NO: 394195
aagaccagacuucaucuug

SEQ ID NO: 394197 - RNA, 19 nt, Artificial Sequence
  Description of Artificial Sequence: Synthetic oligonucleotide
  Sense Strand Starting at position 961 of SEQ ID NO: 318240
gaugaagucuggucuuaga

SEQ ID NO: 394198 - RNA, 19 nt, Artificial Sequence
  Description of Artificial Sequence: Synthetic oligonucleotide
  Antisense Strand to SEQ ID NO: 394197
ucuaagaccagacuucauc

SEQ ID NO: 394199 - RNA, 19 nt, Artificial Sequence
  Description of Artificial Sequence: Synthetic oligonucleotide
  Sense Strand Starting at position 961 of SEQ ID NO: 318293
agccauggaacacgugaaa

SEQ ID NO: 394200 - RNA, 19 nt, Artificial Sequence
  Description of Artificial Sequence: Synthetic oligonucleotide
  Antisense Strand to SEQ ID NO: 394199
uuucacguguuccauggcu

SEQ ID NO: 394201 - RNA, 19 nt, Artificial Sequence
  Description of Artificial Sequence: Synthetic oligonucleotide
  Sense Strand Starting at position 961 of SEQ ID NO: 318465
gcacauguggcucauggaa

SEQ ID NO: 394202 - RNA, 19 nt, Artificial Sequence
  Description of Artificial Sequence: Synthetic oligonucleotide
  Antisense Strand to SEQ ID NO: 394201
uuccaugagccacaugugc

SEQ ID NO: 394203 - RNA, 19 nt, Artificial Sequence
  Description of Artificial Sequence: Synthetic oligonucleotide
  Sense Strand Starting at position 961 of SEQ ID NO: 318473
ggcucauggaauugagaau

SEQ ID NO: 394204 - RNA, 19 nt, Artificial Sequence
  Description of Artificial Sequence: Synthetic oligonucleotide
  Antisense Strand to SEQ ID NO: 394203
auucucaauuccaugagcc

SEQ ID NO: 394205 - RNA, 19 nt, Artificial Sequence
  Description of Artificial Sequence: Synthetic oligonucleotide
  Sense Strand Starting at position 961 of SEQ ID NO: 318845
ggagcuggaaguugaaauu

SEQ ID NO: 394206 - RNA, 19 nt, Artificial Sequence
  Description of Artificial Sequence: Synthetic oligonucleotide
  Antisense Strand to SEQ ID NO: 394205
aauuucaacuuccagcucc

SEQ ID NO: 394207 - RNA, 19 nt, Artificial Sequence
  Description of Artificial Sequence: Synthetic oligonucleotide
  Sense Strand Starting at position 961 of SEQ ID NO: 318857
ugaaauuuaugugaacucu

SEQ ID NO: 394208 - RNA, 19 nt, Artificial Sequence
  Description of Artificial Sequence: Synthetic oligonucleotide
  Antisense Strand to SEQ ID NO: 394207
agaguucacauaaauuuca

SEQ ID NO: 394209 - RNA, 19 nt, Artificial Sequence
  Description of Artificial Sequence: Synthetic oligonucleotide
  Sense Strand Starting at position 961 of SEQ ID NO: 318913
uuugaaacauucuuugggu

SEQ ID NO: 394210 - RNA, 19 nt, Artificial Sequence
  Description of Artificial Sequence: Synthetic oligonucleotide
  Antisense Strand to SEQ ID NO: 394209
acccaaagaauguuucaaa

SEQ ID NO: 394211 - RNA, 19 nt, Artificial Sequence
  Description of Artificial Sequence: Synthetic oligonucleotide
  Sense Strand Starting at position 961 of SEQ ID NO: 318915
ugaaacauucuuuggguga

SEQ ID NO: 394212 - RNA, 19 nt, Artificial Sequence
  Description of Artificial Sequence: Synthetic oligonucleotide
  Antisense Strand to SEQ ID NO: 394211
ucacccaaagaauguuuca

SEQ ID NO: 394213 - RNA, 19 nt, Artificial Sequence
  Description of Artificial Sequence: Synthetic oligonucleotide
  Sense Strand Starting at position 961 of SEQ ID NO: 318919
acauucuuugggugauaca

SEQ ID NO: 394214 - RNA, 19 nt, Artificial Sequence
  Description of Artificial Sequence: Synthetic oligonucleotide
  Antisense Strand to SEQ ID NO: 394213
uguaucacccaaagaaugu

SEQ ID NO: 394215 - RNA, 19 nt, Artificial Sequence
  Description of Artificial Sequence: Synthetic oligonucleotide
  Sense Strand Starting at position 961 of SEQ ID NO: 318977
accucuagagauugaguaa

SEQ ID NO: 394216 - RNA, 19 nt, Artificial Sequence
  Description of Artificial Sequence: Synthetic oligonucleotide
  Antisense Strand to SEQ ID NO: 394215
uuacucaaucucuagaggu

SEQ ID NO: 394217 - RNA, 19 nt, Artificial Sequence
  Description of Artificial Sequence: Synthetic oligonucleotide
  Sense Strand Starting at position 961 of SEQ ID NO: 319150
aggaauauccuaugguauu

SEQ ID NO: 394218 - RNA, 19 nt, Artificial Sequence
  Description of Artificial Sequence: Synthetic oligonucleotide
  Antisense Strand to SEQ ID NO: 394217
aauaccauaggauauuccu

SEQ ID NO: 394219 - RNA, 19 nt, Artificial Sequence
  Description of Artificial Sequence: Synthetic oligonucleotide
  Sense Strand Starting at position 962 of SEQ ID NO: 315279
cauggauucugagucagac

SEQ ID NO: 394220 - RNA, 19 nt, Artificial Sequence
  Description of Artificial Sequence: Synthetic oligonucleotide
  Antisense Strand to SEQ ID NO: 394219
gucugacucagaauccaug

SEQ ID NO: 394221 - RNA, 19 nt, Artificial Sequence
  Description of Artificial Sequence: Synthetic oligonucleotide
  Sense Strand Starting at position 962 of SEQ ID NO: 315385
aggugagaaauuggcagau

SEQ ID NO: 394222 - RNA, 19 nt, Artificial Sequence
  Description of Artificial Sequence: Synthetic oligonucleotide
  Antisense Strand to SEQ ID NO: 394221
aucugccaauuucucaccu

SEQ ID NO: 394223 - RNA, 19 nt, Artificial Sequence
  Description of Artificial Sequence: Synthetic oligonucleotide
  Sense Strand Starting at position 962 of SEQ ID NO: 315389
gagaaauuggcagaugugu

SEQ ID NO: 394224 - RNA, 19 nt, Artificial Sequence
  Description of Artificial Sequence: Synthetic oligonucleotide
  Antisense Strand to SEQ ID NO: 394223
acacaucugccaauuucuc

SEQ ID NO: 394225 - RNA, 19 nt, Artificial Sequence
  Description of Artificial Sequence: Synthetic oligonucleotide
  Sense Strand Starting at position 962 of SEQ ID NO: 315391
gaaauuggcagauguguua

SEQ ID NO: 394226 - RNA, 19 nt, Artificial Sequence
  Description of Artificial Sequence: Synthetic oligonucleotide
  Antisense Strand to SEQ ID NO: 394225
uaacacaucugccaauuuc

SEQ ID NO: 394227 - RNA, 19 nt, Artificial Sequence
  Description of Artificial Sequence: Synthetic oligonucleotide
  Sense Strand Starting at position 962 of SEQ ID NO: 315402
auguguuauaaaggagauu

SEQ ID NO: 394228 - RNA, 19 nt, Artificial Sequence
  Description of Artificial Sequence: Synthetic oligonucleotide
  Antisense Strand to SEQ ID NO: 394227
aaucuccuuuauaacacau

SEQ ID NO: 394229 - RNA, 19 nt, Artificial Sequence
  Description of Artificial Sequence: Synthetic oligonucleotide
  Sense Strand Starting at position 962 of SEQ ID NO: 315496
ucaacucucugguugaaca

SEQ ID NO: 394230 - RNA, 19 nt, Artificial Sequence
  Description of Artificial Sequence: Synthetic oligonucleotide
  Antisense Strand to SEQ ID NO: 394229
uguucaaccagagaguuga

SEQ ID NO: 394231 - RNA, 19 nt, Artificial Sequence
  Description of Artificial Sequence: Synthetic oligonucleotide
  Sense Strand Starting at position 962 of SEQ ID NO: 315652
aggagcuuuacagguuaca

SEQ ID NO: 394232 - RNA, 19 nt, Artificial Sequence
  Description of Artificial Sequence: Synthetic oligonucleotide
  Antisense Strand to SEQ ID NO: 394231
uguaaccuguaaagcuccu

SEQ ID NO: 394233 - RNA, 19 nt, Artificial Sequence
  Description of Artificial Sequence: Synthetic oligonucleotide
  Sense Strand Starting at position 962 of SEQ ID NO: 315979
uuacuaaccgaaggucaua

SEQ ID NO: 394234 - RNA, 19 nt, Artificial Sequence
  Description of Artificial Sequence: Synthetic oligonucleotide
  Antisense Strand to SEQ ID NO: 394233
uaugaccuucgguuaguaa

SEQ ID NO: 394235 - RNA, 19 nt, Artificial Sequence
  Description of Artificial Sequence: Synthetic oligonucleotide
  Sense Strand Starting at position 962 of SEQ ID NO: 316098
acagcuuuccuggaucauu

SEQ ID NO: 394236 - RNA, 19 nt, Artificial Sequence
  Description of Artificial Sequence: Synthetic oligonucleotide
  Antisense Strand to SEQ ID NO: 394235
aaugauccaggaaagcugu

SEQ ID NO: 394237 - RNA, 19 nt, Artificial Sequence
  Description of Artificial Sequence: Synthetic oligonucleotide
  Sense Strand Starting at position 962 of SEQ ID NO: 316162
cacucuagacgucacugau

SEQ ID NO: 394238 - RNA, 19 nt, Artificial Sequence
  Description of Artificial Sequence: Synthetic oligonucleotide
  Antisense Strand to SEQ ID NO: 394237
aucagugacgucuagagug

SEQ ID NO: 394239 - RNA, 19 nt, Artificial Sequence
  Description of Artificial Sequence: Synthetic oligonucleotide
  Sense Strand Starting at position 962 of SEQ ID NO: 316166
cuagacgucacugaugaca

SEQ ID NO: 394240 - RNA, 19 nt, Artificial Sequence
  Description of Artificial Sequence: Synthetic oligonucleotide
  Antisense Strand to SEQ ID NO: 394239
ugucaucagugacgucuag

SEQ ID NO: 394241 - RNA, 19 nt, Artificial Sequence
  Description of Artificial Sequence: Synthetic oligonucleotide
  Sense Strand Starting at position 962 of SEQ ID NO: 316246
gagucagugggacagguau

SEQ ID NO: 394242 - RNA, 19 nt, Artificial Sequence
  Description of Artificial Sequence: Synthetic oligonucleotide
  Antisense Strand to SEQ ID NO: 394241
auaccugucccacugacuc

SEQ ID NO: 394243 - RNA, 19 nt, Artificial Sequence
  Description of Artificial Sequence: Synthetic oligonucleotide
  Sense Strand Starting at position 962 of SEQ ID NO: 316248
gucagugggacagguauua

SEQ ID NO: 394244 - RNA, 19 nt, Artificial Sequence
  Description of Artificial Sequence: Synthetic oligonucleotide
  Antisense Strand to SEQ ID NO: 394243
uaauaccugucccacugac

SEQ ID NO: 394245 - RNA, 19 nt, Artificial Sequence
  Description of Artificial Sequence: Synthetic oligonucleotide
  Sense Strand Starting at position 962 of SEQ ID NO: 316386
gugcaucugcucuugagca

SEQ ID NO: 394246 - RNA, 19 nt, Artificial Sequence
  Description of Artificial Sequence: Synthetic oligonucleotide
  Antisense Strand to SEQ ID NO: 394245
ugcucaagagcagaugcac

SEQ ID NO: 394247 - RNA, 19 nt, Artificial Sequence
  Description of Artificial Sequence: Synthetic oligonucleotide
  Sense Strand Starting at position 962 of SEQ ID NO: 316533
ccugaucucuguuuaagag

SEQ ID NO: 394248 - RNA, 19 nt, Artificial Sequence
  Description of Artificial Sequence: Synthetic oligonucleotide
  Antisense Strand to SEQ ID NO: 394247
cucuuaaacagagaucagg

SEQ ID NO: 394249 - RNA, 19 nt, Artificial Sequence
  Description of Artificial Sequence: Synthetic oligonucleotide
  Sense Strand Starting at position 962 of SEQ ID NO: 316543
guuuaagagacaugagcaa

SEQ ID NO: 394250 - RNA, 19 nt, Artificial Sequence
  Description of Artificial Sequence: Synthetic oligonucleotide
  Antisense Strand to SEQ ID NO: 394249
uugcucaugucucuuaaac

SEQ ID NO: 394251 - RNA, 19 nt, Artificial Sequence
  Description of Artificial Sequence: Synthetic oligonucleotide
  Sense Strand Starting at position 962 of SEQ ID NO: 316558
gcaauuguuagagaagagu

SEQ ID NO: 394252 - RNA, 19 nt, Artificial Sequence
  Description of Artificial Sequence: Synthetic oligonucleotide
  Antisense Strand to SEQ ID NO: 394251
acucuucucuaacaauugc

SEQ ID NO: 394253 - RNA, 19 nt, Artificial Sequence
  Description of Artificial Sequence: Synthetic oligonucleotide
  Sense Strand Starting at position 962 of SEQ ID NO: 316573
gagugaagguguguuagag

SEQ ID NO: 394254 - RNA, 19 nt, Artificial Sequence
  Description of Artificial Sequence: Synthetic oligonucleotide
  Antisense Strand to SEQ ID NO: 394253
cucuaacacaccuucacuc

SEQ ID NO: 394255 - RNA, 19 nt, Artificial Sequence
  Description of Artificial Sequence: Synthetic oligonucleotide
  Sense Strand Starting at position 962 of SEQ ID NO: 316579
agguguguuagagaggagu

SEQ ID NO: 394256 - RNA, 19 nt, Artificial Sequence
  Description of Artificial Sequence: Synthetic oligonucleotide
  Antisense Strand to SEQ ID NO: 394255
acuccucucuaacacaccu

SEQ ID NO: 394257 - RNA, 19 nt, Artificial Sequence
  Description of Artificial Sequence: Synthetic oligonucleotide
  Sense Strand Starting at position 962 of SEQ ID NO: 316636
ugagaauaaucagaagaaa

SEQ ID NO: 394258 - RNA, 19 nt, Artificial Sequence
  Description of Artificial Sequence: Synthetic oligonucleotide
  Antisense Strand to SEQ ID NO: 394257
uuucuucugauuauucuca

SEQ ID NO: 394259 - RNA, 19 nt, Artificial Sequence
  Description of Artificial Sequence: Synthetic oligonucleotide
  Sense Strand Starting at position 962 of SEQ ID NO: 316653
aaugaaagagccuguaaag

SEQ ID NO: 394260 - RNA, 19 nt, Artificial Sequence
  Description of Artificial Sequence: Synthetic oligonucleotide
  Antisense Strand to SEQ ID NO: 394259
cuuuacaggcucuuucauu

SEQ ID NO: 394261 - RNA, 19 nt, Artificial Sequence
  Description of Artificial Sequence: Synthetic oligonucleotide
  Sense Strand Starting at position 962 of SEQ ID NO: 316712
ugauaaaguguccacccaa

SEQ ID NO: 394262 - RNA, 19 nt, Artificial Sequence
  Description of Artificial Sequence: Synthetic oligonucleotide
  Antisense Strand to SEQ ID NO: 394261
uuggguggacacuuuauca

SEQ ID NO: 394263 - RNA, 19 nt, Artificial Sequence
  Description of Artificial Sequence: Synthetic oligonucleotide
  Sense Strand Starting at position 962 of SEQ ID NO: 316738
uccggugucacuguuuagu

SEQ ID NO: 394264 - RNA, 19 nt, Artificial Sequence
  Description of Artificial Sequence: Synthetic oligonucleotide
  Antisense Strand to SEQ ID NO: 394263
acuaaacagugacaccgga

SEQ ID NO: 394265 - RNA, 19 nt, Artificial Sequence
  Description of Artificial Sequence: Synthetic oligonucleotide
  Sense Strand Starting at position 962 of SEQ ID NO: 316749
uguuuagugcuugacacaa

SEQ ID NO: 394266 - RNA, 19 nt, Artificial Sequence
  Description of Artificial Sequence: Synthetic oligonucleotide
  Antisense Strand to SEQ ID NO: 394265
uugugucaagcacuaaaca

SEQ ID NO: 394267 - RNA, 19 nt, Artificial Sequence
  Description of Artificial Sequence: Synthetic oligonucleotide
  Sense Strand Starting at position 962 of SEQ ID NO: 316796
gaugucauuguuuggaaua

SEQ ID NO: 394268 - RNA, 19 nt, Artificial Sequence
  Description of Artificial Sequence: Synthetic oligonucleotide
  Antisense Strand to SEQ ID NO: 394267
uauuccaaacaaugacauc

SEQ ID NO: 394269 - RNA, 19 nt, Artificial Sequence
  Description of Artificial Sequence: Synthetic oligonucleotide
  Sense Strand Starting at position 962 of SEQ ID NO: 316837
uugggauuggaucgcagaa

SEQ ID NO: 394270 - RNA, 19 nt, Artificial Sequence
  Description of Artificial Sequence: Synthetic oligonucleotide
  Antisense Strand to SEQ ID NO: 394269
uucugcgauccaaucccaa

SEQ ID NO: 394271 - RNA, 19 nt, Artificial Sequence
  Description of Artificial Sequence: Synthetic oligonucleotide
  Sense Strand Starting at position 962 of SEQ ID NO: 317345
cgcacuuaccuugaagaaa

SEQ ID NO: 394272 - RNA, 19 nt, Artificial Sequence
  Description of Artificial Sequence: Synthetic oligonucleotide
  Antisense Strand to SEQ ID NO: 394271
uuucuucaagguaagugcg

SEQ ID NO: 394273 - RNA, 19 nt, Artificial Sequence
  Description of Artificial Sequence: Synthetic oligonucleotide
  Sense Strand Starting at position 962 of SEQ ID NO: 317630
agaguuucgagucagauuc

SEQ ID NO: 394274 - RNA, 19 nt, Artificial Sequence
  Description of Artificial Sequence: Synthetic oligonucleotide
  Antisense Strand to SEQ ID NO: 394273
gaaucugacucgaaacucu

SEQ ID NO: 394275 - RNA, 19 nt, Artificial Sequence
  Description of Artificial Sequence: Synthetic oligonucleotide
  Sense Strand Starting at position 962 of SEQ ID NO: 317920
uuugauaugugaucacucu

SEQ ID NO: 394276 - RNA, 19 nt, Artificial Sequence
  Description of Artificial Sequence: Synthetic oligonucleotide
  Antisense Strand to SEQ ID NO: 394275
agagugaucacauaucaaa

SEQ ID NO: 394277 - RNA, 19 nt, Artificial Sequence
  Description of Artificial Sequence: Synthetic oligonucleotide
  Sense Strand Starting at position 962 of SEQ ID NO: 317921
uugauaugugaucacucuu

SEQ ID NO: 394278 - RNA, 19 nt, Artificial Sequence
  Description of Artificial Sequence: Synthetic oligonucleotide
  Antisense Strand to SEQ ID NO: 394277
aagagugaucacauaucaa

SEQ ID NO: 394279 - RNA, 19 nt, Artificial Sequence
  Description of Artificial Sequence: Synthetic oligonucleotide
  Sense Strand Starting at position 962 of SEQ ID NO: 317928
gugaucacucuugauaucu

SEQ ID NO: 394280 - RNA, 19 nt, Artificial Sequence
  Description of Artificial Sequence: Synthetic oligonucleotide
  Antisense Strand to SEQ ID NO: 394279
agauaucaagagugaucac

SEQ ID NO: 394281 - RNA, 19 nt, Artificial Sequence
  Description of Artificial Sequence: Synthetic oligonucleotide
  Sense Strand Starting at position 962 of SEQ ID NO: 318400
gauaguucuggauguggag

SEQ ID NO: 394282 - RNA, 19 nt, Artificial Sequence
  Description of Artificial Sequence: Synthetic oligonucleotide
  Antisense Strand to SEQ ID NO: 394281
cuccacauccagaacuauc

SEQ ID NO: 394283 - RNA, 19 nt, Artificial Sequence
  Description of Artificial Sequence: Synthetic oligonucleotide
  Sense Strand Starting at position 962 of SEQ ID NO: 318470
gccugagugaaccaguaau

SEQ ID NO: 394284 - RNA, 19 nt, Artificial Sequence
  Description of Artificial Sequence: Synthetic oligonucleotide
  Antisense Strand to SEQ ID NO: 394283
auuacugguucacucaggc

SEQ ID NO: 394285 - RNA, 19 nt, Artificial Sequence
  Description of Artificial Sequence: Synthetic oligonucleotide
  Sense Strand Starting at position 962 of SEQ ID NO: 318505
cuaguuggacaagguaauu

SEQ ID NO: 394286 - RNA, 19 nt, Artificial Sequence
  Description of Artificial Sequence: Synthetic oligonucleotide
  Antisense Strand to SEQ ID NO: 394285
aauuaccuuguccaacuag

SEQ ID NO: 394287 - RNA, 19 nt, Artificial Sequence
  Description of Artificial Sequence: Synthetic oligonucleotide
  Sense Strand Starting at position 962 of SEQ ID NO: 318522
uuagguuuaaggugacaaa

SEQ ID NO: 394288 - RNA, 19 nt, Artificial Sequence
  Description of Artificial Sequence: Synthetic oligonucleotide
  Antisense Strand to SEQ ID NO: 394287
uuugucaccuuaaaccuaa

SEQ ID NO: 394289 - RNA, 19 nt, Artificial Sequence
  Description of Artificial Sequence: Synthetic oligonucleotide
  Sense Strand Starting at position 962 of SEQ ID NO: 318782
gugggugaggcugaaugaa

SEQ ID NO: 394290 - RNA, 19 nt, Artificial Sequence
  Description of Artificial Sequence: Synthetic oligonucleotide
  Antisense Strand to SEQ ID NO: 394289
uucauucagccucacccac

SEQ ID NO: 394291 - RNA, 19 nt, Artificial Sequence
  Description of Artificial Sequence: Synthetic oligonucleotide
  Sense Strand Starting at position 962 of SEQ ID NO: 318800
auggaugaaucaccgacua

SEQ ID NO: 394292 - RNA, 19 nt, Artificial Sequence
  Description of Artificial Sequence: Synthetic oligonucleotide
  Antisense Strand to SEQ ID NO: 394291
uagucggugauucauccau

SEQ ID NO: 394293 - RNA, 19 nt, Artificial Sequence
  Description of Artificial Sequence: Synthetic oligonucleotide
  Sense Strand Starting at position 962 of SEQ ID NO: 318948
gcacuuugagcucaggaaa

SEQ ID NO: 394294 - RNA, 19 nt, Artificial Sequence
  Description of Artificial Sequence: Synthetic oligonucleotide
  Antisense Strand to SEQ ID NO: 394293
uuuccugagcucaaagugc

SEQ ID NO: 394295 - RNA, 19 nt, Artificial Sequence
  Description of Artificial Sequence: Synthetic oligonucleotide
  Sense Strand Starting at position 962 of SEQ ID NO: 319125
uaguguuuaguggaaucuu

SEQ ID NO: 394296 - RNA, 19 nt, Artificial Sequence
  Description of Artificial Sequence: Synthetic oligonucleotide
  Antisense Strand to SEQ ID NO: 394295
aagauuccacuaaacacua

SEQ ID NO: 394297 - RNA, 19 nt, Artificial Sequence
  Description of Artificial Sequence: Synthetic oligonucleotide
  Sense Strand Starting at position 962 of SEQ ID NO: 319194
auacaaguugcccaguaaa

SEQ ID NO: 394298 - RNA, 19 nt, Artificial Sequence
  Description of Artificial Sequence: Synthetic oligonucleotide
  Antisense Strand to SEQ ID NO: 394297
uuuacugggcaacuuguau

SEQ ID NO: 394299 - RNA, 19 nt, Artificial Sequence
  Description of Artificial Sequence: Synthetic oligonucleotide
  Sense Strand Starting at position 963 of SEQ ID NO: 315613
uugaauauuagugggacuu

SEQ ID NO: 394300 - RNA, 19 nt, Artificial Sequence
  Description of Artificial Sequence: Synthetic oligonucleotide
  Antisense Strand to SEQ ID NO: 394299
aagucccacuaauauucaa

SEQ ID NO: 394301 - RNA, 19 nt, Artificial Sequence
  Description of Artificial Sequence: Synthetic oligonucleotide
  Sense Strand Starting at position 963 of SEQ ID NO: 315614
ugaauauuagugggacuuu

SEQ ID NO: 394302 - RNA, 19 nt, Artificial Sequence
  Description of Artificial Sequence: Synthetic oligonucleotide
  Antisense Strand to SEQ ID NO: 394301
aaagucccacuaauauuca

SEQ ID NO: 394303 - RNA, 19 nt, Artificial Sequence
  Description of Artificial Sequence: Synthetic oligonucleotide
  Sense Strand Starting at position 963 of SEQ ID NO: 315638
uuuccugucuuauugggaa

SEQ ID NO: 394304 - RNA, 19 nt, Artificial Sequence
  Description of Artificial Sequence: Synthetic oligonucleotide
  Antisense Strand to SEQ ID NO: 394303
uucccaauaagacaggaaa

SEQ ID NO: 394305 - RNA, 19 nt, Artificial Sequence
  Description of Artificial Sequence: Synthetic oligonucleotide
  Sense Strand Starting at position 963 of SEQ ID NO: 315704
gccugaacagagugcuaga

SEQ ID NO: 394306 - RNA, 19 nt, Artificial Sequence
  Description of Artificial Sequence: Synthetic oligonucleotide
  Antisense Strand to SEQ ID NO: 394305
ucuagcacucuguucaggc

SEQ ID NO: 394307 - RNA, 19 nt, Artificial Sequence
  Description of Artificial Sequence: Synthetic oligonucleotide
  Sense Strand Starting at position 963 of SEQ ID NO: 315707
ugaacagagugcuagauuu

SEQ ID NO: 394308 - RNA, 19 nt, Artificial Sequence
  Description of Artificial Sequence: Synthetic oligonucleotide
  Antisense Strand to SEQ ID NO: 394307
aaaucuagcacucuguuca

SEQ ID NO: 394309 - RNA, 19 nt, Artificial Sequence
  Description of Artificial Sequence: Synthetic oligonucleotide
  Sense Strand Starting at position 963 of SEQ ID NO: 315771
ucuggagaauuccuggcaa

SEQ ID NO: 394310 - RNA, 19 nt, Artificial Sequence
  Description of Artificial Sequence: Synthetic oligonucleotide
  Antisense Strand to SEQ ID NO: 394309
uugccaggaauucuccaga

SEQ ID NO: 394311 - RNA, 19 nt, Artificial Sequence
  Description of Artificial Sequence: Synthetic oligonucleotide
  Sense Strand Starting at position 963 of SEQ ID NO: 315873
ccugguauacuuuaguguu

SEQ ID NO: 394312 - RNA, 19 nt, Artificial Sequence
  Description of Artificial Sequence: Synthetic oligonucleotide
  Antisense Strand to SEQ ID NO: 394311
aacacuaaaguauaccagg

SEQ ID NO: 394313 - RNA, 19 nt, Artificial Sequence
  Description of Artificial Sequence: Synthetic oligonucleotide
  Sense Strand Starting at position 963 of SEQ ID NO: 315879
auacuuuaguguucuauca

SEQ ID NO: 394314 - RNA, 19 nt, Artificial Sequence
  Description of Artificial Sequence: Synthetic oligonucleotide
  Antisense Strand to SEQ ID NO: 394313
ugauagaacacuaaaguau

SEQ ID NO: 394315 - RNA, 19 nt, Artificial Sequence
  Description of Artificial Sequence: Synthetic oligonucleotide
  Sense Strand Starting at position 963 of SEQ ID NO: 315887
guguucuaucaaugggaga

SEQ ID NO: 394316 - RNA, 19 nt, Artificial Sequence
  Description of Artificial Sequence: Synthetic oligonucleotide
  Antisense Strand to SEQ ID NO: 394315
ucucccauugauagaacac

SEQ ID NO: 394317 - RNA, 19 nt, Artificial Sequence
  Description of Artificial Sequence: Synthetic oligonucleotide
  Sense Strand Starting at position 963 of SEQ ID NO: 315888
uguucuaucaaugggagag

SEQ ID NO: 394318 - RNA, 19 nt, Artificial Sequence
  Description of Artificial Sequence: Synthetic oligonucleotide
  Antisense Strand to SEQ ID NO: 394317
cucucccauugauagaaca

SEQ ID NO: 394319 - RNA, 19 nt, Artificial Sequence
  Description of Artificial Sequence: Synthetic oligonucleotide
  Sense Strand Starting at position 963 of SEQ ID NO: 315980
cuucuacugccaggaauga

SEQ ID NO: 394320 - RNA, 19 nt, Artificial Sequence
  Description of Artificial Sequence: Synthetic oligonucleotide
  Antisense Strand to SEQ ID NO: 394319
ucauuccuggcaguagaag

SEQ ID NO: 394321 - RNA, 19 nt, Artificial Sequence
  Description of Artificial Sequence: Synthetic oligonucleotide
  Sense Strand Starting at position 963 of SEQ ID NO: 316442
acuugaauccugcacagca

SEQ ID NO: 394322 - RNA, 19 nt, Artificial Sequence
  Description of Artificial Sequence: Synthetic oligonucleotide
  Antisense Strand to SEQ ID NO: 394321
ugcugugcaggauucaagu

SEQ ID NO: 394323 - RNA, 19 nt, Artificial Sequence
  Description of Artificial Sequence: Synthetic oligonucleotide
  Sense Strand Starting at position 963 of SEQ ID NO: 316581
ucuccaguccucgaugcaa

SEQ ID NO: 394324 - RNA, 19 nt, Artificial Sequence
  Description of Artificial Sequence: Synthetic oligonucleotide
  Antisense Strand to SEQ ID NO: 394323
uugcaucgaggacuggaga

SEQ ID NO: 394325 - RNA, 19 nt, Artificial Sequence
  Description of Artificial Sequence: Synthetic oligonucleotide
  Sense Strand Starting at position 963 of SEQ ID NO: 316592
cgaugcaaucugcaaagaa

SEQ ID NO: 394326 - RNA, 19 nt, Artificial Sequence
  Description of Artificial Sequence: Synthetic oligonucleotide
  Antisense Strand to SEQ ID NO: 394325
uucuuugcagauugcaucg

SEQ ID NO: 394327 - RNA, 19 nt, Artificial Sequence
  Description of Artificial Sequence: Synthetic oligonucleotide
  Sense Strand Starting at position 963 of SEQ ID NO: 316602
ugcaaagaaggcuguauua

SEQ ID NO: 394328 - RNA, 19 nt, Artificial Sequence
  Description of Artificial Sequence: Synthetic oligonucleotide
  Antisense Strand to SEQ ID NO: 394327
uaauacagccuucuuugca

SEQ ID NO: 394329 - RNA, 19 nt, Artificial Sequence
  Description of Artificial Sequence: Synthetic oligonucleotide
  Sense Strand Starting at position 963 of SEQ ID NO: 316667
agguuaacagcuuaucaag

SEQ ID NO: 394330 - RNA, 19 nt, Artificial Sequence
  Description of Artificial Sequence: Synthetic oligonucleotide
  Antisense Strand to SEQ ID NO: 394329
cuugauaagcuguuaaccu

SEQ ID NO: 394331 - RNA, 19 nt, Artificial Sequence
  Description of Artificial Sequence: Synthetic oligonucleotide
  Sense Strand Starting at position 963 of SEQ ID NO: 316673
acagcuuaucaagggucaa

SEQ ID NO: 394332 - RNA, 19 nt, Artificial Sequence
  Description of Artificial Sequence: Synthetic oligonucleotide
  Antisense Strand to SEQ ID NO: 394331
uugacccuugauaagcugu

SEQ ID NO: 394333 - RNA, 19 nt, Artificial Sequence
  Description of Artificial Sequence: Synthetic oligonucleotide
  Sense Strand Starting at position 963 of SEQ ID NO: 316802
uuccaagaguuucugaagu

SEQ ID NO: 394334 - RNA, 19 nt, Artificial Sequence
  Description of Artificial Sequence: Synthetic oligonucleotide
  Antisense Strand to SEQ ID NO: 394333
acuucagaaacucuuggaa

SEQ ID NO: 394335 - RNA, 19 nt, Artificial Sequence
  Description of Artificial Sequence: Synthetic oligonucleotide
  Sense Strand Starting at position 963 of SEQ ID NO: 316914
ucaagugaauaguccagau

SEQ ID NO: 394336 - RNA, 19 nt, Artificial Sequence
  Description of Artificial Sequence: Synthetic oligonucleotide
  Antisense Strand to SEQ ID NO: 394335
aucuggacuauucacuuga

SEQ ID NO: 394337 - RNA, 19 nt, Artificial Sequence
  Description of Artificial Sequence: Synthetic oligonucleotide
  Sense Strand Starting at position 963 of SEQ ID NO: 317386
gugguuugucuacaggagu

SEQ ID NO: 394338 - RNA, 19 nt, Artificial Sequence
  Description of Artificial Sequence: Synthetic oligonucleotide
  Antisense Strand to SEQ ID NO: 394337
acuccuguagacaaaccac

SEQ ID NO: 394339 - RNA, 19 nt, Artificial Sequence
  Description of Artificial Sequence: Synthetic oligonucleotide
  Sense Strand Starting at position 963 of SEQ ID NO: 317389
guuugucuacaggaguacu

SEQ ID NO: 394340 - RNA, 19 nt, Artificial Sequence
  Description of Artificial Sequence: Synthetic oligonucleotide
  Antisense Strand to SEQ ID NO: 394339
aguacuccuguagacaaac

SEQ ID NO: 394341 - RNA, 19 nt, Artificial Sequence
  Description of Artificial Sequence: Synthetic oligonucleotide
  Sense Strand Starting at position 963 of SEQ ID NO: 317392
ugucuacaggaguacuuaa

SEQ ID NO: 394342 - RNA, 19 nt, Artificial Sequence
  Description of Artificial Sequence: Synthetic oligonucleotide
  Antisense Strand to SEQ ID NO: 394341
uuaaguacuccuguagaca

SEQ ID NO: 394343 - RNA, 19 nt, Artificial Sequence
  Description of Artificial Sequence: Synthetic oligonucleotide
  Sense Strand Starting at position 963 of SEQ ID NO: 317482
uuuccauggagauguuaag

SEQ ID NO: 394344 - RNA, 19 nt, Artificial Sequence
  Description of Artificial Sequence: Synthetic oligonucleotide
  Antisense Strand to SEQ ID NO: 394343
cuuaacaucuccauggaaa

SEQ ID NO: 394345 - RNA, 19 nt, Artificial Sequence
  Description of Artificial Sequence: Synthetic oligonucleotide
  Sense Strand Starting at position 963 of SEQ ID NO: 317504
auuaacugucaccagucaa

SEQ ID NO: 394346 - RNA, 19 nt, Artificial Sequence
  Description of Artificial Sequence: Synthetic oligonucleotide
  Antisense Strand to SEQ ID NO: 394345
uugacuggugacaguuaau

SEQ ID NO: 394347 - RNA, 19 nt, Artificial Sequence
  Description of Artificial Sequence: Synthetic oligonucleotide
  Sense Strand Starting at position 963 of SEQ ID NO: 317701
caauaaauguucguuuaug

SEQ ID NO: 394348 - RNA, 19 nt, Artificial Sequence
  Description of Artificial Sequence: Synthetic oligonucleotide
  Antisense Strand to SEQ ID NO: 394347
cauaaacgaacauuuauug

SEQ ID NO: 394349 - RNA, 19 nt, Artificial Sequence
  Description of Artificial Sequence: Synthetic oligonucleotide
  Sense Strand Starting at position 963 of SEQ ID NO: 318220
aagguacaaugauucugau

SEQ ID NO: 394350 - RNA, 19 nt, Artificial Sequence
  Description of Artificial Sequence: Synthetic oligonucleotide
  Antisense Strand to SEQ ID NO: 394349
aucagaaucauuguaccuu

SEQ ID NO: 394351 - RNA, 19 nt, Artificial Sequence
  Description of Artificial Sequence: Synthetic oligonucleotide
  Sense Strand Starting at position 963 of SEQ ID NO: 318251
cauguaggguucccuuuaa

SEQ ID NO: 394352 - RNA, 19 nt, Artificial Sequence
  Description of Artificial Sequence: Synthetic oligonucleotide
  Antisense Strand to SEQ ID NO: 394351
uuaaagggaacccuacaug

SEQ ID NO: 394353 - RNA, 19 nt, Artificial Sequence
  Description of Artificial Sequence: Synthetic oligonucleotide
  Sense Strand Starting at position 963 of SEQ ID NO: 318351
ggaguuugcguacugucuu

SEQ ID NO: 394354 - RNA, 19 nt, Artificial Sequence
  Description of Artificial Sequence: Synthetic oligonucleotide
  Antisense Strand to SEQ ID NO: 394353
aagacaguacgcaaacucc

SEQ ID NO: 394355 - RNA, 19 nt, Artificial Sequence
  Description of Artificial Sequence: Synthetic oligonucleotide
  Sense Strand Starting at position 963 of SEQ ID NO: 318422
gauggauaauacuucuagu

SEQ ID NO: 394356 - RNA, 19 nt, Artificial Sequence
  Description of Artificial Sequence: Synthetic oligonucleotide
  Antisense Strand to SEQ ID NO: 394355
acuagaaguauuauccauc

SEQ ID NO: 394357 - RNA, 19 nt, Artificial Sequence
  Description of Artificial Sequence: Synthetic oligonucleotide
  Sense Strand Starting at position 963 of SEQ ID NO: 318444
gacaauguccugugagagu

SEQ ID NO: 394358 - RNA, 19 nt, Artificial Sequence
  Description of Artificial Sequence: Synthetic oligonucleotide
  Antisense Strand to SEQ ID NO: 394357
acucucacaggacauuguc

SEQ ID NO: 394359 - RNA, 19 nt, Artificial Sequence
  Description of Artificial Sequence: Synthetic oligonucleotide
  Sense Strand Starting at position 963 of SEQ ID NO: 318481
gagagucacuaagauuuaa

SEQ ID NO: 394360 - RNA, 19 nt, Artificial Sequence
  Description of Artificial Sequence: Synthetic oligonucleotide
  Antisense Strand to SEQ ID NO: 394359
uuaaaucuuagugacucuc

SEQ ID NO: 394361 - RNA, 19 nt, Artificial Sequence
  Description of Artificial Sequence: Synthetic oligonucleotide
  Sense Strand Starting at position 963 of SEQ ID NO: 318607
uuuaguguugcacacauua

SEQ ID NO: 394362 - RNA, 19 nt, Artificial Sequence
  Description of Artificial Sequence: Synthetic oligonucleotide
  Antisense Strand to SEQ ID NO: 394361
uaaugugugcaacacuaaa

SEQ ID NO: 394363 - RNA, 19 nt, Artificial Sequence
  Description of Artificial Sequence: Synthetic oligonucleotide
  Sense Strand Starting at position 963 of SEQ ID NO: 318671
uuauaagaauuggacugaa

SEQ ID NO: 394364 - RNA, 19 nt, Artificial Sequence
  Description of Artificial Sequence: Synthetic oligonucleotide
  Antisense Strand to SEQ ID NO: 394363
uucaguccaauucuuauaa

SEQ ID NO: 394365 - RNA, 19 nt, Artificial Sequence
  Description of Artificial Sequence: Synthetic oligonucleotide
  Sense Strand Starting at position 963 of SEQ ID NO: 318709
uaugaugaagucuaaguuu

SEQ ID NO: 394366 - RNA, 19 nt, Artificial Sequence
  Description of Artificial Sequence: Synthetic oligonucleotide
  Antisense Strand to SEQ ID NO: 394365
aaacuuagacuucaucaua

SEQ ID NO: 394367 - RNA, 19 nt, Artificial Sequence
  Description of Artificial Sequence: Synthetic oligonucleotide
  Sense Strand Starting at position 963 of SEQ ID NO: 318712
gaugaagucuaaguuuguc

SEQ ID NO: 394368 - RNA, 19 nt, Artificial Sequence
  Description of Artificial Sequence: Synthetic oligonucleotide
  Antisense Strand to SEQ ID NO: 394367
gacaaacuuagacuucauc

SEQ ID NO: 394369 - RNA, 19 nt, Artificial Sequence
  Description of Artificial Sequence: Synthetic oligonucleotide
  Sense Strand Starting at position 963 of SEQ ID NO: 318715
gaagucuaaguuugucuau

SEQ ID NO: 394370 - RNA, 19 nt, Artificial Sequence
  Description of Artificial Sequence: Synthetic oligonucleotide
  Antisense Strand to SEQ ID NO: 394369
auagacaaacuuagacuuc

SEQ ID NO: 394371 - RNA, 19 nt, Artificial Sequence
  Description of Artificial Sequence: Synthetic oligonucleotide
  Sense Strand Starting at position 963 of SEQ ID NO: 318717
agucuaaguuugucuauca

SEQ ID NO: 394372 - RNA, 19 nt, Artificial Sequence
  Description of Artificial Sequence: Synthetic oligonucleotide
  Antisense Strand to SEQ ID NO: 394371
ugauagacaaacuuagacu

SEQ ID NO: 394373 - RNA, 19 nt, Artificial Sequence
  Description of Artificial Sequence: Synthetic oligonucleotide
  Sense Strand Starting at position 963 of SEQ ID NO: 318857
aaauguugucaaugacagu

SEQ ID NO: 394374 - RNA, 19 nt, Artificial Sequence
  Description of Artificial Sequence: Synthetic oligonucleotide
  Antisense Strand to SEQ ID NO: 394373
acugucauugacaacauuu

SEQ ID NO: 394375 - RNA, 19 nt, Artificial Sequence
  Description of Artificial Sequence: Synthetic oligonucleotide
  Sense Strand Starting at position 963 of SEQ ID NO: 318878
ccacucugacuuggaguaa

SEQ ID NO: 394376 - RNA, 19 nt, Artificial Sequence
  Description of Artificial Sequence: Synthetic oligonucleotide
  Antisense Strand to SEQ ID NO: 394375
uuacuccaagucagagugg

SEQ ID NO: 394377 - RNA, 19 nt, Artificial Sequence
  Description of Artificial Sequence: Synthetic oligonucleotide
  Sense Strand Starting at position 963 of SEQ ID NO: 318911
guccucuacgugggaacaa

SEQ ID NO: 394378 - RNA, 19 nt, Artificial Sequence
  Description of Artificial Sequence: Synthetic oligonucleotide
  Antisense Strand to SEQ ID NO: 394377
uuguucccacguagaggac

SEQ ID NO: 394379 - RNA, 19 nt, Artificial Sequence
  Description of Artificial Sequence: Synthetic oligonucleotide
  Sense Strand Starting at position 964 of SEQ ID NO: 315308
gcaaccgagcuaugaucau

SEQ ID NO: 394380 - RNA, 19 nt, Artificial Sequence
  Description of Artificial Sequence: Synthetic oligonucleotide
  Antisense Strand to SEQ ID NO: 394379
augaucauagcucgguugc

SEQ ID NO: 394381 - RNA, 19 nt, Artificial Sequence
  Description of Artificial Sequence: Synthetic oligonucleotide
  Sense Strand Starting at position 964 of SEQ ID NO: 315355
gugagauccuguuccuuua

SEQ ID NO: 394382 - RNA, 19 nt, Artificial Sequence
  Description of Artificial Sequence: Synthetic oligonucleotide
  Antisense Strand to SEQ ID NO: 394381
uaaaggaacaggaucucac

SEQ ID NO: 394383 - RNA, 19 nt, Artificial Sequence
  Description of Artificial Sequence: Synthetic oligonucleotide
  Sense Strand Starting at position 964 of SEQ ID NO: 315405
aaguuugcauuguucugaa

SEQ ID NO: 394384 - RNA, 19 nt, Artificial Sequence
  Description of Artificial Sequence: Synthetic oligonucleotide
  Antisense Strand to SEQ ID NO: 394383
uucagaacaaugcaaacuu

SEQ ID NO: 394385 - RNA, 19 nt, Artificial Sequence
  Description of Artificial Sequence: Synthetic oligonucleotide
  Sense Strand Starting at position 964 of SEQ ID NO: 315697
gcucuaagccuuuguacca

SEQ ID NO: 394386 - RNA, 19 nt, Artificial Sequence
  Description of Artificial Sequence: Synthetic oligonucleotide
  Antisense Strand to SEQ ID NO: 394385
ugguacaaaggcuuagagc

SEQ ID NO: 394387 - RNA, 19 nt, Artificial Sequence
  Description of Artificial Sequence: Synthetic oligonucleotide
  Sense Strand Starting at position 964 of SEQ ID NO: 315778
ucagaagucuccucgagug

SEQ ID NO: 394388 - RNA, 19 nt, Artificial Sequence
  Description of Artificial Sequence: Synthetic oligonucleotide
  Antisense Strand to SEQ ID NO: 394387
cacucgaggagacuucuga

SEQ ID NO: 394389 - RNA, 19 nt, Artificial Sequence
  Description of Artificial Sequence: Synthetic oligonucleotide
  Sense Strand Starting at position 964 of SEQ ID NO: 315780
agaagucuccucgagugua

SEQ ID NO: 394390 - RNA, 19 nt, Artificial Sequence
  Description of Artificial Sequence: Synthetic oligonucleotide
  Antisense Strand to SEQ ID NO: 394389
uacacucgaggagacuucu

SEQ ID NO: 394391 - RNA, 19 nt, Artificial Sequence
  Description of Artificial Sequence: Synthetic oligonucleotide
  Sense Strand Starting at position 964 of SEQ ID NO: 315783
agucuccucgaguguagaa

SEQ ID NO: 394392 - RNA, 19 nt, Artificial Sequence
  Description of Artificial Sequence: Synthetic oligonucleotide
  Antisense Strand to SEQ ID NO: 394391
uucuacacucgaggagacu

SEQ ID NO: 394393 - RNA, 19 nt, Artificial Sequence
  Description of Artificial Sequence: Synthetic oligonucleotide
  Sense Strand Starting at position 964 of SEQ ID NO: 315795
uguagaagcuuccucaacu

SEQ ID NO: 394394 - RNA, 19 nt, Artificial Sequence
  Description of Artificial Sequence: Synthetic oligonucleotide
  Antisense Strand to SEQ ID NO: 394393
aguugaggaagcuucuaca

SEQ ID NO: 394395 - RNA, 19 nt, Artificial Sequence
  Description of Artificial Sequence: Synthetic oligonucleotide
  Sense Strand Starting at position 964 of SEQ ID NO: 315796
guagaagcuuccucaacuc

SEQ ID NO: 394396 - RNA, 19 nt, Artificial Sequence
  Description of Artificial Sequence: Synthetic oligonucleotide
  Antisense Strand to SEQ ID NO: 394395
gaguugaggaagcuucuac

SEQ ID NO: 394397 - RNA, 19 nt, Artificial Sequence
  Description of Artificial Sequence: Synthetic oligonucleotide
  Sense Strand Starting at position 964 of SEQ ID NO: 315912
ggcagagucucuccacuca

SEQ ID NO: 394398 - RNA, 19 nt, Artificial Sequence
  Description of Artificial Sequence: Synthetic oligonucleotide
  Antisense Strand to SEQ ID NO: 394397
ugaguggagagacucugcc

SEQ ID NO: 394399 - RNA, 19 nt, Artificial Sequence
  Description of Artificial Sequence: Synthetic oligonucleotide
  Sense Strand Starting at position 964 of SEQ ID NO: 315950
agcagaaacgcucaaugaa

SEQ ID NO: 394400 - RNA, 19 nt, Artificial Sequence
  Description of Artificial Sequence: Synthetic oligonucleotide
  Antisense Strand to SEQ ID NO: 394399
uucauugagcguuucugcu

SEQ ID NO: 394401 - RNA, 19 nt, Artificial Sequence
  Description of Artificial Sequence: Synthetic oligonucleotide
  Sense Strand Starting at position 964 of SEQ ID NO: 315962
caaugaacgugccuugaau

SEQ ID NO: 394402 - RNA, 19 nt, Artificial Sequence
  Description of Artificial Sequence: Synthetic oligonucleotide
  Antisense Strand to SEQ ID NO: 394401
auucaaggcacguucauug

SEQ ID NO: 394403 - RNA, 19 nt, Artificial Sequence
  Description of Artificial Sequence: Synthetic oligonucleotide
  Sense Strand Starting at position 964 of SEQ ID NO: 316266
ugaggccaauccucuauaa

SEQ ID NO: 394404 - RNA, 19 nt, Artificial Sequence
  Description of Artificial Sequence: Synthetic oligonucleotide
  Antisense Strand to SEQ ID NO: 394403
uuauagaggauuggccuca

SEQ ID NO: 394405 - RNA, 19 nt, Artificial Sequence
  Description of Artificial Sequence: Synthetic oligonucleotide
  Sense Strand Starting at position 964 of SEQ ID NO: 316268
aggccaauccucuauaagu

SEQ ID NO: 394406 - RNA, 19 nt, Artificial Sequence
  Description of Artificial Sequence: Synthetic oligonucleotide
  Antisense Strand to SEQ ID NO: 394405
acuuauagaggauuggccu

SEQ ID NO: 394407 - RNA, 19 nt, Artificial Sequence
  Description of Artificial Sequence: Synthetic oligonucleotide
  Sense Strand Starting at position 964 of SEQ ID NO: 316426
aagggugucacuugacuga

SEQ ID NO: 394408 - RNA, 19 nt, Artificial Sequence
  Description of Artificial Sequence: Synthetic oligonucleotide
  Antisense Strand to SEQ ID NO: 394407
ucagucaagugacacccuu

SEQ ID NO: 394409 - RNA, 19 nt, Artificial Sequence
  Description of Artificial Sequence: Synthetic oligonucleotide
  Sense Strand Starting at position 964 of SEQ ID NO: 316429
ggugucacuugacugaagu

SEQ ID NO: 394410 - RNA, 19 nt, Artificial Sequence
  Description of Artificial Sequence: Synthetic oligonucleotide
  Antisense Strand to SEQ ID NO: 394409
acuucagucaagugacacc

SEQ ID NO: 394411 - RNA, 19 nt, Artificial Sequence
  Description of Artificial Sequence: Synthetic oligonucleotide
  Sense Strand Starting at position 964 of SEQ ID NO: 316430
gugucacuugacugaagua

SEQ ID NO: 394412 - RNA, 19 nt, Artificial Sequence
  Description of Artificial Sequence: Synthetic oligonucleotide
  Antisense Strand to SEQ ID NO: 394411
uacuucagucaagugacac

SEQ ID NO: 394413 - RNA, 19 nt, Artificial Sequence
  Description of Artificial Sequence: Synthetic oligonucleotide
  Sense Strand Starting at position 964 of SEQ ID NO: 316569
gaggaaugcgcauggcaua

SEQ ID NO: 394414 - RNA, 19 nt, Artificial Sequence
  Description of Artificial Sequence: Synthetic oligonucleotide
  Antisense Strand to SEQ ID NO: 394413
uaugccaugcgcauuccuc

SEQ ID NO: 394415 - RNA, 19 nt, Artificial Sequence
  Description of Artificial Sequence: Synthetic oligonucleotide
  Sense Strand Starting at position 964 of SEQ ID NO: 316600
gcacguuuccgccaaacac

SEQ ID NO: 394416 - RNA, 19 nt, Artificial Sequence
  Description of Artificial Sequence: Synthetic oligonucleotide
  Antisense Strand to SEQ ID NO: 394415
guguuuggcggaaacgugc

SEQ ID NO: 394417 - RNA, 19 nt, Artificial Sequence
  Description of Artificial Sequence: Synthetic oligonucleotide
  Sense Strand Starting at position 964 of SEQ ID NO: 317385
aggagaggcacucgguaau

SEQ ID NO: 394418 - RNA, 19 nt, Artificial Sequence
  Description of Artificial Sequence: Synthetic oligonucleotide
  Antisense Strand to SEQ ID NO: 394417
auuaccgagugccucuccu

SEQ ID NO: 394419 - RNA, 19 nt, Artificial Sequence
  Description of Artificial Sequence: Synthetic oligonucleotide
  Sense Strand Starting at position 964 of SEQ ID NO: 317391
ggcacucgguaaucgagaa

SEQ ID NO: 394420 - RNA, 19 nt, Artificial Sequence
  Description of Artificial Sequence: Synthetic oligonucleotide
  Antisense Strand to SEQ ID NO: 394419
uucucgauuaccgagugcc

SEQ ID NO: 394421 - RNA, 19 nt, Artificial Sequence
  Description of Artificial Sequence: Synthetic oligonucleotide
  Sense Strand Starting at position 964 of SEQ ID NO: 317395
cucgguaaucgagaagaac

SEQ ID NO: 394422 - RNA, 19 nt, Artificial Sequence
  Description of Artificial Sequence: Synthetic oligonucleotide
  Antisense Strand to SEQ ID NO: 394421
guucuucucgauuaccgag

SEQ ID NO: 394423 - RNA, 19 nt, Artificial Sequence
  Description of Artificial Sequence: Synthetic oligonucleotide
  Sense Strand Starting at position 964 of SEQ ID NO: 317598
uggacagucccugaaccuu

SEQ ID NO: 394424 - RNA, 19 nt, Artificial Sequence
  Description of Artificial Sequence: Synthetic oligonucleotide
  Antisense Strand to SEQ ID NO: 394423
aagguucagggacugucca

SEQ ID NO: 394425 - RNA, 19 nt, Artificial Sequence
  Description of Artificial Sequence: Synthetic oligonucleotide
  Sense Strand Starting at position 964 of SEQ ID NO: 317633
guguguaaauuccgaguuc

SEQ ID NO: 394426 - RNA, 19 nt, Artificial Sequence
  Description of Artificial Sequence: Synthetic oligonucleotide
  Antisense Strand to SEQ ID NO: 394425
gaacucggaauuuacacac

SEQ ID NO: 394427 - RNA, 19 nt, Artificial Sequence
  Description of Artificial Sequence: Synthetic oligonucleotide
  Sense Strand Starting at position 964 of SEQ ID NO: 317687
aacugauaauauccgguuu

SEQ ID NO: 394428 - RNA, 19 nt, Artificial Sequence
  Description of Artificial Sequence: Synthetic oligonucleotide
  Antisense Strand to SEQ ID NO: 394427
aaaccggauauuaucaguu

SEQ ID NO: 394429 - RNA, 19 nt, Artificial Sequence
  Description of Artificial Sequence: Synthetic oligonucleotide
  Sense Strand Starting at position 964 of SEQ ID NO: 317698
uccgguuugguccaaggua

SEQ ID NO: 394430 - RNA, 19 nt, Artificial Sequence
  Description of Artificial Sequence: Synthetic oligonucleotide
  Antisense Strand to SEQ ID NO: 394429
uaccuuggaccaaaccgga

SEQ ID NO: 394431 - RNA, 19 nt, Artificial Sequence
  Description of Artificial Sequence: Synthetic oligonucleotide
  Sense Strand Starting at position 964 of SEQ ID NO: 317744
gcgcuaucacaguggaacu

SEQ ID NO: 394432 - RNA, 19 nt, Artificial Sequence
  Description of Artificial Sequence: Synthetic oligonucleotide
  Antisense Strand to SEQ ID NO: 394431
aguuccacugugauagcgc

SEQ ID NO: 394433 - RNA, 19 nt, Artificial Sequence
  Description of Artificial Sequence: Synthetic oligonucleotide
  Sense Strand Starting at position 964 of SEQ ID NO: 317755
guggaacuuggacauguua

SEQ ID NO: 394434 - RNA, 19 nt, Artificial Sequence
  Description of Artificial Sequence: Synthetic oligonucleotide
  Antisense Strand to SEQ ID NO: 394433
uaacauguccaaguuccac

SEQ ID NO: 394435 - RNA, 19 nt, Artificial Sequence
  Description of Artificial Sequence: Synthetic oligonucleotide
  Sense Strand Starting at position 964 of SEQ ID NO: 317810
agacacuaauucuagagaa

SEQ ID NO: 394436 - RNA, 19 nt, Artificial Sequence
  Description of Artificial Sequence: Synthetic oligonucleotide
  Antisense Strand to SEQ ID NO: 394435
uucucuagaauuagugucu

SEQ ID NO: 394437 - RNA, 19 nt, Artificial Sequence
  Description of Artificial Sequence: Synthetic oligonucleotide
  Sense Strand Starting at position 964 of SEQ ID NO: 317849
aaagcuaugugugaagaua

SEQ ID NO: 394438 - RNA, 19 nt, Artificial Sequence
  Description of Artificial Sequence: Synthetic oligonucleotide
  Antisense Strand to SEQ ID NO: 394437
uaucuucacacauagcuuu

SEQ ID NO: 394439 - RNA, 19 nt, Artificial Sequence
  Description of Artificial Sequence: Synthetic oligonucleotide
  Sense Strand Starting at position 964 of SEQ ID NO: 317938
agagaacgcugcuacacau

SEQ ID NO: 394440 - RNA, 19 nt, Artificial Sequence
  Description of Artificial Sequence: Synthetic oligonucleotide
  Antisense Strand to SEQ ID NO: 394439
auguguagcagcguucucu

SEQ ID NO: 394441 - RNA, 19 nt, Artificial Sequence
  Description of Artificial Sequence: Synthetic oligonucleotide
  Sense Strand Starting at position 964 of SEQ ID NO: 317985
ugaacuagauaguuacuga

SEQ ID NO: 394442 - RNA, 19 nt, Artificial Sequence
  Description of Artificial Sequence: Synthetic oligonucleotide
  Antisense Strand to SEQ ID NO: 394441
ucaguaacuaucuaguuca

SEQ ID NO: 394443 - RNA, 19 nt, Artificial Sequence
  Description of Artificial Sequence: Synthetic oligonucleotide
  Sense Strand Starting at position 964 of SEQ ID NO: 317988
acuagauaguuacugaauu

SEQ ID NO: 394444 - RNA, 19 nt, Artificial Sequence
  Description of Artificial Sequence: Synthetic oligonucleotide
  Antisense Strand to SEQ ID NO: 394443
aauucaguaacuaucuagu

SEQ ID NO: 394445 - RNA, 19 nt, Artificial Sequence
  Description of Artificial Sequence: Synthetic oligonucleotide
  Sense Strand Starting at position 964 of SEQ ID NO: 317989
cuagauaguuacugaauuu

SEQ ID NO: 394446 - RNA, 19 nt, Artificial Sequence
  Description of Artificial Sequence: Synthetic oligonucleotide
  Antisense Strand to SEQ ID NO: 394445
aaauucaguaacuaucuag

SEQ ID NO: 394447 - RNA, 19 nt, Artificial Sequence
  Description of Artificial Sequence: Synthetic oligonucleotide
  Sense Strand Starting at position 964 of SEQ ID NO: 319145
agcagaacauaauguauga

SEQ ID NO: 394448 - RNA, 19 nt, Artificial Sequence
  Description of Artificial Sequence: Synthetic oligonucleotide
  Antisense Strand to SEQ ID NO: 394447
ucauacauuauguucugcu

SEQ ID NO: 394449 - RNA, 19 nt, Artificial Sequence
  Description of Artificial Sequence: Synthetic oligonucleotide
  Sense Strand Starting at position 964 of SEQ ID NO: 319158
guaugaucuuauuuacgca

SEQ ID NO: 394450 - RNA, 19 nt, Artificial Sequence
  Description of Artificial Sequence: Synthetic oligonucleotide
  Antisense Strand to SEQ ID NO: 394449
ugcguaaauaagaucauac

SEQ ID NO: 394451 - RNA, 19 nt, Artificial Sequence
  Description of Artificial Sequence: Synthetic oligonucleotide
  Sense Strand Starting at position 964 of SEQ ID NO: 319215
ugccaugugcacuauuacu

SEQ ID NO: 394452 - RNA, 19 nt, Artificial Sequence
  Description of Artificial Sequence: Synthetic oligonucleotide
  Antisense Strand to SEQ ID NO: 394451
aguaauagugcacauggca

SEQ ID NO: 394453 - RNA, 19 nt, Artificial Sequence
  Description of Artificial Sequence: Synthetic oligonucleotide
  Sense Strand Starting at position 965 of SEQ ID NO: 317578
gccaacucccguuaucaaa

SEQ ID NO: 394454 - RNA, 19 nt, Artificial Sequence
  Description of Artificial Sequence: Synthetic oligonucleotide
  Antisense Strand to SEQ ID NO: 394453
uuugauaacgggaguuggc

SEQ ID NO: 394455 - RNA, 19 nt, Artificial Sequence
  Description of Artificial Sequence: Synthetic oligonucleotide
  Sense Strand Starting at position 965 of SEQ ID NO: 317743
gcuacucugucuucucuga

SEQ ID NO: 394456 - RNA, 19 nt, Artificial Sequence
  Description of Artificial Sequence: Synthetic oligonucleotide
  Antisense Strand to SEQ ID NO: 394455
ucagagaagacagaguagc

SEQ ID NO: 394457 - RNA, 19 nt, Artificial Sequence
  Description of Artificial Sequence: Synthetic oligonucleotide
  Sense Strand Starting at position 965 of SEQ ID NO: 317747
cucugucuucucugaccga

SEQ ID NO: 394458 - RNA, 19 nt, Artificial Sequence
  Description of Artificial Sequence: Synthetic oligonucleotide
  Antisense Strand to SEQ ID NO: 394457
ucggucagagaagacagag

SEQ ID NO: 394459 - RNA, 19 nt, Artificial Sequence
  Description of Artificial Sequence: Synthetic oligonucleotide
  Sense Strand Starting at position 965 of SEQ ID NO: 317803
guacuccaagucugagaua

SEQ ID NO: 394460 - RNA, 19 nt, Artificial Sequence
  Description of Artificial Sequence: Synthetic oligonucleotide
  Antisense Strand to SEQ ID NO: 394459
uaucucagacuuggaguac

SEQ ID NO: 394461 - RNA, 19 nt, Artificial Sequence
  Description of Artificial Sequence: Synthetic oligonucleotide
  Sense Strand Starting at position 965 of SEQ ID NO: 317814
cugagauacuguuccgacu

SEQ ID NO: 394462 - RNA, 19 nt, Artificial Sequence
  Description of Artificial Sequence: Synthetic oligonucleotide
  Antisense Strand to SEQ ID NO: 394461
agucggaacaguaucucag

SEQ ID NO: 394463 - RNA, 19 nt, Artificial Sequence
  Description of Artificial Sequence: Synthetic oligonucleotide
  Sense Strand Starting at position 965 of SEQ ID NO: 317816
gagauacuguuccgacuag

SEQ ID NO: 394464 - RNA, 19 nt, Artificial Sequence
  Description of Artificial Sequence: Synthetic oligonucleotide
  Antisense Strand to SEQ ID NO: 394463
cuagucggaacaguaucuc

SEQ ID NO: 394465 - RNA, 19 nt, Artificial Sequence
  Description of Artificial Sequence: Synthetic oligonucleotide
  Sense Strand Starting at position 965 of SEQ ID NO: 317820
uacuguuccgacuaggaaa

SEQ ID NO: 394466 - RNA, 19 nt, Artificial Sequence
  Description of Artificial Sequence: Synthetic oligonucleotide
  Antisense Strand to SEQ ID NO: 394465
uuuccuagucggaacagua

SEQ ID NO: 394467 - RNA, 19 nt, Artificial Sequence
  Description of Artificial Sequence: Synthetic oligonucleotide
  Sense Strand Starting at position 965 of SEQ ID NO: 317930
cggauuacaucccaaucca

SEQ ID NO: 394468 - RNA, 19 nt, Artificial Sequence
  Description of Artificial Sequence: Synthetic oligonucleotide
  Antisense Strand to SEQ ID NO: 394467
uggauugggauguaauccg

SEQ ID NO: 394469 - RNA, 19 nt, Artificial Sequence
  Description of Artificial Sequence: Synthetic oligonucleotide
  Sense Strand Starting at position 965 of SEQ ID NO: 318132
ccgccaaggcuuuaucagu

SEQ ID NO: 394470 - RNA, 19 nt, Artificial Sequence
  Description of Artificial Sequence: Synthetic oligonucleotide
  Antisense Strand to SEQ ID NO: 394469
acugauaaagccuuggcgg

SEQ ID NO: 394471 - RNA, 19 nt, Artificial Sequence
  Description of Artificial Sequence: Synthetic oligonucleotide
  Sense Strand Starting at position 965 of SEQ ID NO: 318180
cuccgcucgcgauugguua

SEQ ID NO: 394472 - RNA, 19 nt, Artificial Sequence
  Description of Artificial Sequence: Synthetic oligonucleotide
  Antisense Strand to SEQ ID NO: 394471
uaaccaaucgcgagcggag

SEQ ID NO: 394473 - RNA, 19 nt, Artificial Sequence
  Description of Artificial Sequence: Synthetic oligonucleotide
  Sense Strand Starting at position 965 of SEQ ID NO: 318184
gcucgcgauugguuauuua

SEQ ID NO: 394474 - RNA, 19 nt, Artificial Sequence
  Description of Artificial Sequence: Synthetic oligonucleotide
  Antisense Strand to SEQ ID NO: 394473
uaaauaaccaaucgcgagc

SEQ ID NO: 394475 - RNA, 19 nt, Artificial Sequence
  Description of Artificial Sequence: Synthetic oligonucleotide
  Sense Strand Starting at position 965 of SEQ ID NO: 318187
cgcgauugguuauuuauag

SEQ ID NO: 394476 - RNA, 19 nt, Artificial Sequence
  Description of Artificial Sequence: Synthetic oligonucleotide
  Antisense Strand to SEQ ID NO: 394475
cuauaaauaaccaaucgcg

SEQ ID NO: 394477 - RNA, 19 nt, Artificial Sequence
  Description of Artificial Sequence: Synthetic oligonucleotide
  Sense Strand Starting at position 965 of SEQ ID NO: 318343
aauauaguucuuuguuggu

SEQ ID NO: 394478 - RNA, 19 nt, Artificial Sequence
  Description of Artificial Sequence: Synthetic oligonucleotide
  Antisense Strand to SEQ ID NO: 394477
accaacaaagaacuauauu

SEQ ID NO: 394479 - RNA, 19 nt, Artificial Sequence
  Description of Artificial Sequence: Synthetic oligonucleotide
  Sense Strand Starting at position 965 of SEQ ID NO: 318372
gggucugacuccucgguuu

SEQ ID NO: 394480 - RNA, 19 nt, Artificial Sequence
  Description of Artificial Sequence: Synthetic oligonucleotide
  Antisense Strand to SEQ ID NO: 394479
aaaccgaggagucagaccc

SEQ ID NO: 394481 - RNA, 19 nt, Artificial Sequence
  Description of Artificial Sequence: Synthetic oligonucleotide
  Sense Strand Starting at position 965 of SEQ ID NO: 318590
ccgggcaaucgcuagacuu

SEQ ID NO: 394482 - RNA, 19 nt, Artificial Sequence
  Description of Artificial Sequence: Synthetic oligonucleotide
  Antisense Strand to SEQ ID NO: 394481
aagucuagcgauugcccgg

SEQ ID NO: 394483 - RNA, 19 nt, Artificial Sequence
  Description of Artificial Sequence: Synthetic oligonucleotide
  Sense Strand Starting at position 965 of SEQ ID NO: 318873
cgcugcguuugcuaguuaa

SEQ ID NO: 394484 - RNA, 19 nt, Artificial Sequence
  Description of Artificial Sequence: Synthetic oligonucleotide
  Antisense Strand to SEQ ID NO: 394483
uuaacuagcaaacgcagcg

SEQ ID NO: 394485 - RNA, 19 nt, Artificial Sequence
  Description of Artificial Sequence: Synthetic oligonucleotide
  Sense Strand Starting at position 965 of SEQ ID NO: 318876
ugcguuugcuaguuaaccu

SEQ ID NO: 394486 - RNA, 19 nt, Artificial Sequence
  Description of Artificial Sequence: Synthetic oligonucleotide
  Antisense Strand to SEQ ID NO: 394485
agguuaacuagcaaacgca

SEQ ID NO: 394487 - RNA, 19 nt, Artificial Sequence
  Description of Artificial Sequence: Synthetic oligonucleotide
  Sense Strand Starting at position 965 of SEQ ID NO: 318934
gcgugaaguccuugggcac

SEQ ID NO: 394488 - RNA, 19 nt, Artificial Sequence
  Description of Artificial Sequence: Synthetic oligonucleotide
  Antisense Strand to SEQ ID NO: 394487
gugcccaaggacuucacgc

SEQ ID NO: 394489 - RNA, 19 nt, Artificial Sequence
  Description of Artificial Sequence: Synthetic oligonucleotide
  Sense Strand Starting at position 965 of SEQ ID NO: 318935
cgugaaguccuugggcaca

SEQ ID NO: 394490 - RNA, 19 nt, Artificial Sequence
  Description of Artificial Sequence: Synthetic oligonucleotide
  Antisense Strand to SEQ ID NO: 394489
ugugcccaaggacuucacg

SEQ ID NO: 394491 - RNA, 19 nt, Artificial Sequence
  Description of Artificial Sequence: Synthetic oligonucleotide
  Sense Strand Starting at position 965 of SEQ ID NO: 319059
cugucagagugcuuggaug

SEQ ID NO: 394492 - RNA, 19 nt, Artificial Sequence
  Description of Artificial Sequence: Synthetic oligonucleotide
  Antisense Strand to SEQ ID NO: 394491
cauccaagcacucugacag

SEQ ID NO: 394493 - RNA, 19 nt, Artificial Sequence
  Description of Artificial Sequence: Synthetic oligonucleotide
  Sense Strand Starting at position 965 of SEQ ID NO: 319061
gucagagugcuuggauguu

SEQ ID NO: 394494 - RNA, 19 nt, Artificial Sequence
  Description of Artificial Sequence: Synthetic oligonucleotide
  Antisense Strand to SEQ ID NO: 394493
aacauccaagcacucugac

SEQ ID NO: 394495 - RNA, 19 nt, Artificial Sequence
  Description of Artificial Sequence: Synthetic oligonucleotide
  Sense Strand Starting at position 965 of SEQ ID NO: 319067
gugcuuggauguuaugaag

SEQ ID NO: 394496 - RNA, 19 nt, Artificial Sequence
  Description of Artificial Sequence: Synthetic oligonucleotide
  Antisense Strand to SEQ ID NO: 394495
cuucauaacauccaagcac

SEQ ID NO: 394497 - RNA, 19 nt, Artificial Sequence
  Description of Artificial Sequence: Synthetic oligonucleotide
  Sense Strand Starting at position 965 of SEQ ID NO: 319070
cuuggauguuaugaagcuu

SEQ ID NO: 394498 - RNA, 19 nt, Artificial Sequence
  Description of Artificial Sequence: Synthetic oligonucleotide
  Antisense Strand to SEQ ID NO: 394497
aagcuucauaacauccaag

SEQ ID NO: 394499 - RNA, 19 nt, Artificial Sequence
  Description of Artificial Sequence: Synthetic oligonucleotide
  Sense Strand Starting at position 965 of SEQ ID NO: 319134
uggagagaacccugucaac

SEQ ID NO: 394500 - RNA, 19 nt, Artificial Sequence
  Description of Artificial Sequence: Synthetic oligonucleotide
  Antisense Strand to SEQ ID NO: 394499
guugacaggguucucucca

SEQ ID NO: 394501 - RNA, 19 nt, Artificial Sequence
  Description of Artificial Sequence: Synthetic oligonucleotide
  Sense Strand Starting at position 965 of SEQ ID NO: 319137
agagaacccugucaacauc

SEQ ID NO: 394502 - RNA, 19 nt, Artificial Sequence
  Description of Artificial Sequence: Synthetic oligonucleotide
  Antisense Strand to SEQ ID NO: 394501
gauguugacaggguucucu

SEQ ID NO: 394503 - RNA, 19 nt, Artificial Sequence
  Description of Artificial Sequence: Synthetic oligonucleotide
  Sense Strand Starting at position 965 of SEQ ID NO: 319162
auguguaauguccaccaag

SEQ ID NO: 394504 - RNA, 19 nt, Artificial Sequence
  Description of Artificial Sequence: Synthetic oligonucleotide
  Antisense Strand to SEQ ID NO: 394503
cuugguggacauuacacau

SEQ ID NO: 394505 - RNA, 19 nt, Artificial Sequence
  Description of Artificial Sequence: Synthetic oligonucleotide
  Sense Strand Starting at position 966 of SEQ ID NO: 315354
guuggcaucaaaugguuau

SEQ ID NO: 394506 - RNA, 19 nt, Artificial Sequence
  Description of Artificial Sequence: Synthetic oligonucleotide
  Antisense Strand to SEQ ID NO: 394505
auaaccauuugaugccaac

SEQ ID NO: 394507 - RNA, 19 nt, Artificial Sequence
  Description of Artificial Sequence: Synthetic oligonucleotide
  Sense Strand Starting at position 966 of SEQ ID NO: 315357
ggcaucaaaugguuauuga

SEQ ID NO: 394508 - RNA, 19 nt, Artificial Sequence
  Description of Artificial Sequence: Synthetic oligonucleotide
  Antisense Strand to SEQ ID NO: 394507
ucaauaaccauuugaugcc

SEQ ID NO: 394509 - RNA, 19 nt, Artificial Sequence
  Description of Artificial Sequence: Synthetic oligonucleotide
  Sense Strand Starting at position 966 of SEQ ID NO: 315358
gcaucaaaugguuauugau

SEQ ID NO: 394510 - RNA, 19 nt, Artificial Sequence
  Description of Artificial Sequence: Synthetic oligonucleotide
  Antisense Strand to SEQ ID NO: 394509
aucaauaaccauuugaugc

SEQ ID NO: 394511 - RNA, 19 nt, Artificial Sequence
  Description of Artificial Sequence: Synthetic oligonucleotide
  Sense Strand Starting at position 966 of SEQ ID NO: 315393
uguugauuucccggcccaa

SEQ ID NO: 394512 - RNA, 19 nt, Artificial Sequence
  Description of Artificial Sequence: Synthetic oligonucleotide
  Antisense Strand to SEQ ID NO: 394511
uugggccgggaaaucaaca

SEQ ID NO: 394513 - RNA, 19 nt, Artificial Sequence
  Description of Artificial Sequence: Synthetic oligonucleotide
  Sense Strand Starting at position 966 of SEQ ID NO: 315411
agaagcaagucuuuauucu

SEQ ID NO: 394514 - RNA, 19 nt, Artificial Sequence
  Description of Artificial Sequence: Synthetic oligonucleotide
  Antisense Strand to SEQ ID NO: 394513
agaauaaagacuugcuucu

SEQ ID NO: 394515 - RNA, 19 nt, Artificial Sequence
  Description of Artificial Sequence: Synthetic oligonucleotide
  Sense Strand Starting at position 966 of SEQ ID NO: 315415
gcaagucuuuauucuuaag

SEQ ID NO: 394516 - RNA, 19 nt, Artificial Sequence
  Description of Artificial Sequence: Synthetic oligonucleotide
  Antisense Strand to SEQ ID NO: 394515
cuuaagaauaaagacuugc

SEQ ID NO: 394517 - RNA, 19 nt, Artificial Sequence
  Description of Artificial Sequence: Synthetic oligonucleotide
  Sense Strand Starting at position 966 of SEQ ID NO: 315506
gccaccauguuauuaggaa

SEQ ID NO: 394518 - RNA, 19 nt, Artificial Sequence
  Description of Artificial Sequence: Synthetic oligonucleotide
  Antisense Strand to SEQ ID NO: 394517
uuccuaauaacaugguggc

SEQ ID NO: 394519 - RNA, 19 nt, Artificial Sequence
  Description of Artificial Sequence: Synthetic oligonucleotide
  Sense Strand Starting at position 966 of SEQ ID NO: 315588
aggcuaaugcuccaaugaa

SEQ ID NO: 394520 - RNA, 19 nt, Artificial Sequence
  Description of Artificial Sequence: Synthetic oligonucleotide
  Antisense Strand to SEQ ID NO: 394519
uucauuggagcauuagccu

SEQ ID NO: 394521 - RNA, 19 nt, Artificial Sequence
  Description of Artificial Sequence: Synthetic oligonucleotide
  Sense Strand Starting at position 966 of SEQ ID NO: 315791
cugugucagcaucagauaa

SEQ ID NO: 394522 - RNA, 19 nt, Artificial Sequence
  Description of Artificial Sequence: Synthetic oligonucleotide
  Antisense Strand to SEQ ID NO: 394521
uuaucugaugcugacacag

SEQ ID NO: 394523 - RNA, 19 nt, Artificial Sequence
  Description of Artificial Sequence: Synthetic oligonucleotide
  Sense Strand Starting at position 966 of SEQ ID NO: 315886
cgggcugaacugcaagaua

SEQ ID NO: 394524 - RNA, 19 nt, Artificial Sequence
  Description of Artificial Sequence: Synthetic oligonucleotide
  Antisense Strand to SEQ ID NO: 394523
uaucuugcaguucagcccg

SEQ ID NO: 394525 - RNA, 19 nt, Artificial Sequence
  Description of Artificial Sequence: Synthetic oligonucleotide
  Sense Strand Starting at position 966 of SEQ ID NO: 316067
uugaacuggugguuuauga

SEQ ID NO: 394526 - RNA, 19 nt, Artificial Sequence
  Description of Artificial Sequence: Synthetic oligonucleotide
  Antisense Strand to SEQ ID NO: 394525
ucauaaaccaccaguucaa

SEQ ID NO: 394527 - RNA, 19 nt, Artificial Sequence
  Description of Artificial Sequence: Synthetic oligonucleotide
  Sense Strand Starting at position 966 of SEQ ID NO: 316269
gucaaauugcccuacuuga

SEQ ID NO: 394528 - RNA, 19 nt, Artificial Sequence
  Description of Artificial Sequence: Synthetic oligonucleotide
  Antisense Strand to SEQ ID NO: 394527
ucaaguagggcaauuugac

SEQ ID NO: 394529 - RNA, 19 nt, Artificial Sequence
  Description of Artificial Sequence: Synthetic oligonucleotide
  Sense Strand Starting at position 966 of SEQ ID NO: 316274
auugcccuacuugaagaau

SEQ ID NO: 394530 - RNA, 19 nt, Artificial Sequence
  Description of Artificial Sequence: Synthetic oligonucleotide
  Antisense Strand to SEQ ID NO: 394529
auucuucaaguagggcaau

SEQ ID NO: 394531 - RNA, 19 nt, Artificial Sequence
  Description of Artificial Sequence: Synthetic oligonucleotide
  Sense Strand Starting at position 966 of SEQ ID NO: 316277
gcccuacuugaagaauguu

SEQ ID NO: 394532 - RNA, 19 nt, Artificial Sequence
  Description of Artificial Sequence: Synthetic oligonucleotide
  Antisense Strand to SEQ ID NO: 394531
aacauucuucaaguagggc

SEQ ID NO: 394533 - RNA, 19 nt, Artificial Sequence
  Description of Artificial Sequence: Synthetic oligonucleotide
  Sense Strand Starting at position 966 of SEQ ID NO: 316368
agacuauaagguugguaag

SEQ ID NO: 394534 - RNA, 19 nt, Artificial Sequence
  Description of Artificial Sequence: Synthetic oligonucleotide
  Antisense Strand to SEQ ID NO: 394533
cuuaccaaccuuauagucu

SEQ ID NO: 394535 - RNA, 19 nt, Artificial Sequence
  Description of Artificial Sequence: Synthetic oligonucleotide
  Sense Strand Starting at position 966 of SEQ ID NO: 316530
guuuauuuccaacgucuuu

SEQ ID NO: 394536 - RNA, 19 nt, Artificial Sequence
  Description of Artificial Sequence: Synthetic oligonucleotide
  Antisense Strand to SEQ ID NO: 394535
aaagacguuggaaauaaac

SEQ ID NO: 394537 - RNA, 19 nt, Artificial Sequence
  Description of Artificial Sequence: Synthetic oligonucleotide
  Sense Strand Starting at position 966 of SEQ ID NO: 317261
aauauaugcgagugaacuu

SEQ ID NO: 394538 - RNA, 19 nt, Artificial Sequence
  Description of Artificial Sequence: Synthetic oligonucleotide
  Antisense Strand to SEQ ID NO: 394537
aaguucacucgcauauauu

SEQ ID NO: 394539 - RNA, 19 nt, Artificial Sequence
  Description of Artificial Sequence: Synthetic oligonucleotide
  Sense Strand Starting at position 966 of SEQ ID NO: 317262
auauaugcgagugaacuuu

SEQ ID NO: 394540 - RNA, 19 nt, Artificial Sequence
  Description of Artificial Sequence: Synthetic oligonucleotide
  Antisense Strand to SEQ ID NO: 394539
aaaguucacucgcauauau

SEQ ID NO: 394541 - RNA, 19 nt, Artificial Sequence
  Description of Artificial Sequence: Synthetic oligonucleotide
  Sense Strand Starting at position 966 of SEQ ID NO: 317340
cucccaggauucucacaga

SEQ ID NO: 394542 - RNA, 19 nt, Artificial Sequence
  Description of Artificial Sequence: Synthetic oligonucleotide
  Antisense Strand to SEQ ID NO: 394541
ucugugagaauccugggag

SEQ ID NO: 394543 - RNA, 19 nt, Artificial Sequence
  Description of Artificial Sequence: Synthetic oligonucleotide
  Sense Strand Starting at position 966 of SEQ ID NO: 317651
ugcgccuuucugucuguua

SEQ ID NO: 394544 - RNA, 19 nt, Artificial Sequence
  Description of Artificial Sequence: Synthetic oligonucleotide
  Antisense Strand to SEQ ID NO: 394543
uaacagacagaaaggcgca

SEQ ID NO: 394545 - RNA, 19 nt, Artificial Sequence
  Description of Artificial Sequence: Synthetic oligonucleotide
  Sense Strand Starting at position 966 of SEQ ID NO: 317718
agcccuaaacuguagaaca

SEQ ID NO: 394546 - RNA, 19 nt, Artificial Sequence
  Description of Artificial Sequence: Synthetic oligonucleotide
  Antisense Strand to SEQ ID NO: 394545
uguucuacaguuuagggcu

SEQ ID NO: 394547 - RNA, 19 nt, Artificial Sequence
  Description of Artificial Sequence: Synthetic oligonucleotide
  Sense Strand Starting at position 966 of SEQ ID NO: 317757
aaaggcuuggguugggaaa

SEQ ID NO: 394548 - RNA, 19 nt, Artificial Sequence
  Description of Artificial Sequence: Synthetic oligonucleotide
  Antisense Strand to SEQ ID NO: 394547
uuucccaacccaagccuuu

SEQ ID NO: 394549 - RNA, 19 nt, Artificial Sequence
  Description of Artificial Sequence: Synthetic oligonucleotide
  Sense Strand Starting at position 966 of SEQ ID NO: 317908
cauauagaguagucaggaa

SEQ ID NO: 394550 - RNA, 19 nt, Artificial Sequence
  Description of Artificial Sequence: Synthetic oligonucleotide
  Antisense Strand to SEQ ID NO: 394549
uuccugacuacucuauaug

SEQ ID NO: 394551 - RNA, 19 nt, Artificial Sequence
  Description of Artificial Sequence: Synthetic oligonucleotide
  Sense Strand Starting at position 966 of SEQ ID NO: 317993
acaguauaguggucaagag

SEQ ID NO: 394552 - RNA, 19 nt, Artificial Sequence
  Description of Artificial Sequence: Synthetic oligonucleotide
  Antisense Strand to SEQ ID NO: 394551
cucuugaccacuauacugu

SEQ ID NO: 394553 - RNA, 19 nt, Artificial Sequence
  Description of Artificial Sequence: Synthetic oligonucleotide
  Sense Strand Starting at position 966 of SEQ ID NO: 318069
cuguguguucugggauaag

SEQ ID NO: 394554 - RNA, 19 nt, Artificial Sequence
  Description of Artificial Sequence: Synthetic oligonucleotide
  Antisense Strand to SEQ ID NO: 394553
cuuaucccagaacacacag

SEQ ID NO: 394555 - RNA, 19 nt, Artificial Sequence
  Description of Artificial Sequence: Synthetic oligonucleotide
  Sense Strand Starting at position 966 of SEQ ID NO: 318072
uguguucugggauaaguau

SEQ ID NO: 394556 - RNA, 19 nt, Artificial Sequence
  Description of Artificial Sequence: Synthetic oligonucleotide
  Antisense Strand to SEQ ID NO: 394555
auacuuaucccagaacaca

SEQ ID NO: 394557 - RNA, 19 nt, Artificial Sequence
  Description of Artificial Sequence: Synthetic oligonucleotide
  Sense Strand Starting at position 966 of SEQ ID NO: 318184
uauggugcuggguaaauau

SEQ ID NO: 394558 - RNA, 19 nt, Artificial Sequence
  Description of Artificial Sequence: Synthetic oligonucleotide
  Antisense Strand to SEQ ID NO: 394557
auauuuacccagcaccaua

SEQ ID NO: 394559 - RNA, 19 nt, Artificial Sequence
  Description of Artificial Sequence: Synthetic oligonucleotide
  Sense Strand Starting at position 966 of SEQ ID NO: 318207
gaacaaauguuagcuguga

SEQ ID NO: 394560 - RNA, 19 nt, Artificial Sequence
  Description of Artificial Sequence: Synthetic oligonucleotide
  Antisense Strand to SEQ ID NO: 394559
ucacagcuaacauuuguuc

SEQ ID NO: 394561 - RNA, 19 nt, Artificial Sequence
  Description of Artificial Sequence: Synthetic oligonucleotide
  Sense Strand Starting at position 966 of SEQ ID NO: 318211
aaauguuagcugugacuca

SEQ ID NO: 394562 - RNA, 19 nt, Artificial Sequence
  Description of Artificial Sequence: Synthetic oligonucleotide
  Antisense Strand to SEQ ID NO: 394561
ugagucacagcuaacauuu

SEQ ID NO: 394563 - RNA, 19 nt, Artificial Sequence
  Description of Artificial Sequence: Synthetic oligonucleotide
  Sense Strand Starting at position 966 of SEQ ID NO: 318328
augaaaguccaaugugaaa

SEQ ID NO: 394564 - RNA, 19 nt, Artificial Sequence
  Description of Artificial Sequence: Synthetic oligonucleotide
  Antisense Strand to SEQ ID NO: 394563
uuucacauuggacuuucau

SEQ ID NO: 394565 - RNA, 19 nt, Artificial Sequence
  Description of Artificial Sequence: Synthetic oligonucleotide
  Sense Strand Starting at position 966 of SEQ ID NO: 318448
uuuguaaacugguuuaagu

SEQ ID NO: 394566 - RNA, 19 nt, Artificial Sequence
  Description of Artificial Sequence: Synthetic oligonucleotide
  Antisense Strand to SEQ ID NO: 394565
acuuaaaccaguuuacaaa

SEQ ID NO: 394567 - RNA, 19 nt, Artificial Sequence
  Description of Artificial Sequence: Synthetic oligonucleotide
  Sense Strand Starting at position 966 of SEQ ID NO: 318450
uguaaacugguuuaaguau

SEQ ID NO: 394568 - RNA, 19 nt, Artificial Sequence
  Description of Artificial Sequence: Synthetic oligonucleotide
  Antisense Strand to SEQ ID NO: 394567
auacuuaaaccaguuuaca

SEQ ID NO: 394569 - RNA, 19 nt, Artificial Sequence
  Description of Artificial Sequence: Synthetic oligonucleotide
  Sense Strand Starting at position 966 of SEQ ID NO: 318456
cugguuuaaguaugacagu

SEQ ID NO: 394570 - RNA, 19 nt, Artificial Sequence
  Description of Artificial Sequence: Synthetic oligonucleotide
  Antisense Strand to SEQ ID NO: 394569
acugucauacuuaaaccag

SEQ ID NO: 394571 - RNA, 19 nt, Artificial Sequence
  Description of Artificial Sequence: Synthetic oligonucleotide
  Sense Strand Starting at position 966 of SEQ ID NO: 318596
agaagagucuuuccagcca

SEQ ID NO: 394572 - RNA, 19 nt, Artificial Sequence
  Description of Artificial Sequence: Synthetic oligonucleotide
  Antisense Strand to SEQ ID NO: 394571
uggcuggaaagacucuucu

SEQ ID NO: 394573 - RNA, 19 nt, Artificial Sequence
  Description of Artificial Sequence: Synthetic oligonucleotide
  Sense Strand Starting at position 966 of SEQ ID NO: 318714
gcacaacuuguuuaaagga

SEQ ID NO: 394574 - RNA, 19 nt, Artificial Sequence
  Description of Artificial Sequence: Synthetic oligonucleotide
  Antisense Strand to SEQ ID NO: 394573
uccuuuaaacaaguugugc

SEQ ID NO: 394575 - RNA, 19 nt, Artificial Sequence
  Description of Artificial Sequence: Synthetic oligonucleotide
  Sense Strand Starting at position 966 of SEQ ID NO: 318721
uuguuuaaaggaugcaaca

SEQ ID NO: 394576 - RNA, 19 nt, Artificial Sequence
  Description of Artificial Sequence: Synthetic oligonucleotide
  Antisense Strand to SEQ ID NO: 394575
uguugcauccuuuaaacaa

SEQ ID NO: 394577 - RNA, 19 nt, Artificial Sequence
  Description of Artificial Sequence: Synthetic oligonucleotide
  Sense Strand Starting at position 966 of SEQ ID NO: 318800
uguagcauuuacuuguaau

SEQ ID NO: 394578 - RNA, 19 nt, Artificial Sequence
  Description of Artificial Sequence: Synthetic oligonucleotide
  Antisense Strand to SEQ ID NO: 394577
auuacaaguaaaugcuaca

SEQ ID NO: 394579 - RNA, 19 nt, Artificial Sequence
  Description of Artificial Sequence: Synthetic oligonucleotide
  Sense Strand Starting at position 966 of SEQ ID NO: 318858
gggagagucuccuugccca

SEQ ID NO: 394580 - RNA, 19 nt, Artificial Sequence
  Description of Artificial Sequence: Synthetic oligonucleotide
  Antisense Strand to SEQ ID NO: 394579
ugggcaaggagacucuccc

SEQ ID NO: 394581 - RNA, 19 nt, Artificial Sequence
  Description of Artificial Sequence: Synthetic oligonucleotide
  Sense Strand Starting at position 966 of SEQ ID NO: 319018
gcacuugugguguaacaug

SEQ ID NO: 394582 - RNA, 19 nt, Artificial Sequence
  Description of Artificial Sequence: Synthetic oligonucleotide
  Antisense Strand to SEQ ID NO: 394581
cauguuacaccacaagugc

SEQ ID NO: 394583 - RNA, 19 nt, Artificial Sequence
  Description of Artificial Sequence: Synthetic oligonucleotide
  Sense Strand Starting at position 966 of SEQ ID NO: 319169
gaaucuguguuuguuauuu

SEQ ID NO: 394584 - RNA, 19 nt, Artificial Sequence
  Description of Artificial Sequence: Synthetic oligonucleotide
  Antisense Strand to SEQ ID NO: 394583
aaauaacaaacacagauuc

SEQ ID NO: 394585 - RNA, 19 nt, Artificial Sequence
  Description of Artificial Sequence: Synthetic oligonucleotide
  Sense Strand Starting at position 967 of SEQ ID NO: 315293
auaaaucaguagccaaaga

SEQ ID NO: 394586 - RNA, 19 nt, Artificial Sequence
  Description of Artificial Sequence: Synthetic oligonucleotide
  Antisense Strand to SEQ ID NO: 394585
ucuuuggcuacugauuuau

SEQ ID NO: 394587 - RNA, 19 nt, Artificial Sequence
  Description of Artificial Sequence: Synthetic oligonucleotide
  Sense Strand Starting at position 967 of SEQ ID NO: 315397
ugggaauccuacucauauc

SEQ ID NO: 394588 - RNA, 19 nt, Artificial Sequence
  Description of Artificial Sequence: Synthetic oligonucleotide
  Antisense Strand to SEQ ID NO: 394587
gauaugaguaggauuccca

SEQ ID NO: 394589 - RNA, 19 nt, Artificial Sequence
  Description of Artificial Sequence: Synthetic oligonucleotide
  Sense Strand Starting at position 967 of SEQ ID NO: 315559
ccuccucauuuguuagcua

SEQ ID NO: 394590 - RNA, 19 nt, Artificial Sequence
  Description of Artificial Sequence: Synthetic oligonucleotide
  Antisense Strand to SEQ ID NO: 394589
uagcuaacaaaugaggagg

SEQ ID NO: 394591 - RNA, 19 nt, Artificial Sequence
  Description of Artificial Sequence: Synthetic oligonucleotide
  Sense Strand Starting at position 967 of SEQ ID NO: 315830
agucacuguuuaucaggaa

SEQ ID NO: 394592 - RNA, 19 nt, Artificial Sequence
  Description of Artificial Sequence: Synthetic oligonucleotide
  Antisense Strand to SEQ ID NO: 394591
uuccugauaaacagugacu

SEQ ID NO: 394593 - RNA, 19 nt, Artificial Sequence
  Description of Artificial Sequence: Synthetic oligonucleotide
  Sense Strand Starting at position 967 of SEQ ID NO: 315837
guuuaucaggaaugauaua

SEQ ID NO: 394594 - RNA, 19 nt, Artificial Sequence
  Description of Artificial Sequence: Synthetic oligonucleotide
  Antisense Strand to SEQ ID NO: 394593
uauaucauuccugauaaac

SEQ ID NO: 394595 - RNA, 19 nt, Artificial Sequence
  Description of Artificial Sequence: Synthetic oligonucleotide
  Sense Strand Starting at position 967 of SEQ ID NO: 315853
auaguacuaugauugcaau

SEQ ID NO: 394596 - RNA, 19 nt, Artificial Sequence
  Description of Artificial Sequence: Synthetic oligonucleotide
  Antisense Strand to SEQ ID NO: 394595
auugcaaucauaguacuau

SEQ ID NO: 394597 - RNA, 19 nt, Artificial Sequence
  Description of Artificial Sequence: Synthetic oligonucleotide
  Sense Strand Starting at position 967 of SEQ ID NO: 315975
gauucuacuuagguagaac

SEQ ID NO: 394598 - RNA, 19 nt, Artificial Sequence
  Description of Artificial Sequence: Synthetic oligonucleotide
  Antisense Strand to SEQ ID NO: 394597
guucuaccuaaguagaauc

SEQ ID NO: 394599 - RNA, 19 nt, Artificial Sequence
  Description of Artificial Sequence: Synthetic oligonucleotide
  Sense Strand Starting at position 967 of SEQ ID NO: 316012
gagcuaaggauguaguaga

SEQ ID NO: 394600 - RNA, 19 nt, Artificial Sequence
  Description of Artificial Sequence: Synthetic oligonucleotide
  Antisense Strand to SEQ ID NO: 394599
ucuacuacauccuuagcuc

SEQ ID NO: 394601 - RNA, 19 nt, Artificial Sequence
  Description of Artificial Sequence: Synthetic oligonucleotide
  Sense Strand Starting at position 967 of SEQ ID NO: 316045
gcacgaagagcacaauaua

SEQ ID NO: 394602 - RNA, 19 nt, Artificial Sequence
  Description of Artificial Sequence: Synthetic oligonucleotide
  Antisense Strand to SEQ ID NO: 394601
uauauugugcucuucgugc

SEQ ID NO: 394603 - RNA, 19 nt, Artificial Sequence
  Description of Artificial Sequence: Synthetic oligonucleotide
  Sense Strand Starting at position 967 of SEQ ID NO: 316161
aagaacuguugcucuauga

SEQ ID NO: 394604 - RNA, 19 nt, Artificial Sequence
  Description of Artificial Sequence: Synthetic oligonucleotide
  Antisense Strand to SEQ ID NO: 394603
ucauagagcaacaguucuu

SEQ ID NO: 394605 - RNA, 19 nt, Artificial Sequence
  Description of Artificial Sequence: Synthetic oligonucleotide
  Sense Strand Starting at position 967 of SEQ ID NO: 316170
ugcucuaugagccagaaag

SEQ ID NO: 394606 - RNA, 19 nt, Artificial Sequence
  Description of Artificial Sequence: Synthetic oligonucleotide
  Antisense Strand to SEQ ID NO: 394605
cuuucuggcucauagagca

SEQ ID NO: 394607 - RNA, 19 nt, Artificial Sequence
  Description of Artificial Sequence: Synthetic oligonucleotide
  Sense Strand Starting at position 967 of SEQ ID NO: 316265
uuguuauuaacagguggaa

SEQ ID NO: 394608 - RNA, 19 nt, Artificial Sequence
  Description of Artificial Sequence: Synthetic oligonucleotide
  Antisense Strand to SEQ ID NO: 394607
uuccaccuguuaauaacaa

SEQ ID NO: 394609 - RNA, 19 nt, Artificial Sequence
  Description of Artificial Sequence: Synthetic oligonucleotide
  Sense Strand Starting at position 967 of SEQ ID NO: 316300
acaguuugucuuuaaacag

SEQ ID NO: 394610 - RNA, 19 nt, Artificial Sequence
  Description of Artificial Sequence: Synthetic oligonucleotide
  Antisense Strand to SEQ ID NO: 394609
cuguuuaaagacaaacugu

SEQ ID NO: 394611 - RNA, 19 nt, Artificial Sequence
  Description of Artificial Sequence: Synthetic oligonucleotide
  Sense Strand Starting at position 967 of SEQ ID NO: 316367
cauaucagucuuggagaau

SEQ ID NO: 394612 - RNA, 19 nt, Artificial Sequence
  Description of Artificial Sequence: Synthetic oligonucleotide
  Antisense Strand to SEQ ID NO: 394611
auucuccaagacugauaug

SEQ ID NO: 394613 - RNA, 19 nt, Artificial Sequence
  Description of Artificial Sequence: Synthetic oligonucleotide
  Sense Strand Starting at position 967 of SEQ ID NO: 316505
ugauaugaauugguagcaa

SEQ ID NO: 394614 - RNA, 19 nt, Artificial Sequence
  Description of Artificial Sequence: Synthetic oligonucleotide
  Antisense Strand to SEQ ID NO: 394613
uugcuaccaauucauauca

SEQ ID NO: 394615 - RNA, 19 nt, Artificial Sequence
  Description of Artificial Sequence: Synthetic oligonucleotide
  Sense Strand Starting at position 967 of SEQ ID NO: 316517
guagcaaaggucuauggga

SEQ ID NO: 394616 - RNA, 19 nt, Artificial Sequence
  Description of Artificial Sequence: Synthetic oligonucleotide
  Antisense Strand to SEQ ID NO: 394615
ucccauagaccuuugcuac

SEQ ID NO: 394617 - RNA, 19 nt, Artificial Sequence
  Description of Artificial Sequence: Synthetic oligonucleotide
  Sense Strand Starting at position 967 of SEQ ID NO: 316620
acucuaguauuaucauuag

SEQ ID NO: 394618 - RNA, 19 nt, Artificial Sequence
  Description of Artificial Sequence: Synthetic oligonucleotide
  Antisense Strand to SEQ ID NO: 394617
cuaaugauaauacuagagu

SEQ ID NO: 394619 - RNA, 19 nt, Artificial Sequence
  Description of Artificial Sequence: Synthetic oligonucleotide
  Sense Strand Starting at position 967 of SEQ ID NO: 316623
cuaguauuaucauuaguga

SEQ ID NO: 394620 - RNA, 19 nt, Artificial Sequence
  Description of Artificial Sequence: Synthetic oligonucleotide
  Antisense Strand to SEQ ID NO: 394619
ucacuaaugauaauacuag

SEQ ID NO: 394621 - RNA, 19 nt, Artificial Sequence
  Description of Artificial Sequence: Synthetic oligonucleotide
  Sense Strand Starting at position 967 of SEQ ID NO: 316898
auaagaaauugcccuggau

SEQ ID NO: 394622 - RNA, 19 nt, Artificial Sequence
  Description of Artificial Sequence: Synthetic oligonucleotide
  Antisense Strand to SEQ ID NO: 394621
auccagggcaauuucuuau

SEQ ID NO: 394623 - RNA, 19 nt, Artificial Sequence
  Description of Artificial Sequence: Synthetic oligonucleotide
  Sense Strand Starting at position 967 of SEQ ID NO: 317286
ggccaaagucaagaugguu

SEQ ID NO: 394624 - RNA, 19 nt, Artificial Sequence
  Description of Artificial Sequence: Synthetic oligonucleotide
  Antisense Strand to SEQ ID NO: 394623
aaccaucuugacuuuggcc

SEQ ID NO: 394625 - RNA, 19 nt, Artificial Sequence
  Description of Artificial Sequence: Synthetic oligonucleotide
  Sense Strand Starting at position 967 of SEQ ID NO: 317400
guuuaagaccagugagaca

SEQ ID NO: 394626 - RNA, 19 nt, Artificial Sequence
  Description of Artificial Sequence: Synthetic oligonucleotide
  Antisense Strand to SEQ ID NO: 394625
ugucucacuggucuuaaac

SEQ ID NO: 394627 - RNA, 19 nt, Artificial Sequence
  Description of Artificial Sequence: Synthetic oligonucleotide
  Sense Strand Starting at position 967 of SEQ ID NO: 317441
cuguuaauucuguaagaaa

SEQ ID NO: 394628 - RNA, 19 nt, Artificial Sequence
  Description of Artificial Sequence: Synthetic oligonucleotide
  Antisense Strand to SEQ ID NO: 394627
uuucuuacagaauuaacag

SEQ ID NO: 394629 - RNA, 19 nt, Artificial Sequence
  Description of Artificial Sequence: Synthetic oligonucleotide
  Sense Strand Starting at position 967 of SEQ ID NO: 317676
cuccacuccuguguuauuu

SEQ ID NO: 394630 - RNA, 19 nt, Artificial Sequence
  Description of Artificial Sequence: Synthetic oligonucleotide
  Antisense Strand to SEQ ID NO: 394629
aaauaacacaggaguggag

SEQ ID NO: 394631 - RNA, 19 nt, Artificial Sequence
  Description of Artificial Sequence: Synthetic oligonucleotide
  Sense Strand Starting at position 967 of SEQ ID NO: 317730
guuaaacgacuugauacau

SEQ ID NO: 394632 - RNA, 19 nt, Artificial Sequence
  Description of Artificial Sequence: Synthetic oligonucleotide
  Antisense Strand to SEQ ID NO: 394631
auguaucaagucguuuaac

SEQ ID NO: 394633 - RNA, 19 nt, Artificial Sequence
  Description of Artificial Sequence: Synthetic oligonucleotide
  Sense Strand Starting at position 967 of SEQ ID NO: 317741
ugauacauuacauguggga

SEQ ID NO: 394634 - RNA, 19 nt, Artificial Sequence
  Description of Artificial Sequence: Synthetic oligonucleotide
  Antisense Strand to SEQ ID NO: 394633
ucccacauguaauguauca

SEQ ID NO: 394635 - RNA, 19 nt, Artificial Sequence
  Description of Artificial Sequence: Synthetic oligonucleotide
  Sense Strand Starting at position 967 of SEQ ID NO: 317743
auacauuacaugugggagu

SEQ ID NO: 394636 - RNA, 19 nt, Artificial Sequence
  Description of Artificial Sequence: Synthetic oligonucleotide
  Antisense Strand to SEQ ID NO: 394635
acucccacauguaauguau

SEQ ID NO: 394637 - RNA, 19 nt, Artificial Sequence
  Description of Artificial Sequence: Synthetic oligonucleotide
  Sense Strand Starting at position 967 of SEQ ID NO: 317865
gauagacccugaguaugua

SEQ ID NO: 394638 - RNA, 19 nt, Artificial Sequence
  Description of Artificial Sequence: Synthetic oligonucleotide
  Antisense Strand to SEQ ID NO: 394637
uacauacucagggucuauc

SEQ ID NO: 394639 - RNA, 19 nt, Artificial Sequence
  Description of Artificial Sequence: Synthetic oligonucleotide
  Sense Strand Starting at position 967 of SEQ ID NO: 317868
agacccugaguauguauua

SEQ ID NO: 394640 - RNA, 19 nt, Artificial Sequence
  Description of Artificial Sequence: Synthetic oligonucleotide
  Antisense Strand to SEQ ID NO: 394639
uaauacauacucagggucu

SEQ ID NO: 394641 - RNA, 19 nt, Artificial Sequence
  Description of Artificial Sequence: Synthetic oligonucleotide
  Sense Strand Starting at position 967 of SEQ ID NO: 318007
uuuggagugacauagccaa

SEQ ID NO: 394642 - RNA, 19 nt, Artificial Sequence
  Description of Artificial Sequence: Synthetic oligonucleotide
  Antisense Strand to SEQ ID NO: 394641
uuggcuaugucacuccaaa

SEQ ID NO: 394643 - RNA, 19 nt, Artificial Sequence
  Description of Artificial Sequence: Synthetic oligonucleotide
  Sense Strand Starting at position 967 of SEQ ID NO: 318225
agauauacacagugccaaa

SEQ ID NO: 394644 - RNA, 19 nt, Artificial Sequence
  Description of Artificial Sequence: Synthetic oligonucleotide
  Antisense Strand to SEQ ID NO: 394643
uuuggcacuguguauaucu

SEQ ID NO: 394645 - RNA, 19 nt, Artificial Sequence
  Description of Artificial Sequence: Synthetic oligonucleotide
  Sense Strand Starting at position 967 of SEQ ID NO: 318255
ugauuucugcccugagcug

SEQ ID NO: 394646 - RNA, 19 nt, Artificial Sequence
  Description of Artificial Sequence: Synthetic oligonucleotide
  Antisense Strand to SEQ ID NO: 394645
cagcucagggcagaaauca

SEQ ID NO: 394647 - RNA, 19 nt, Artificial Sequence
  Description of Artificial Sequence: Synthetic oligonucleotide
  Sense Strand Starting at position 967 of SEQ ID NO: 318296
gaggucauauuguuaaaga

SEQ ID NO: 394648 - RNA, 19 nt, Artificial Sequence
  Description of Artificial Sequence: Synthetic oligonucleotide
  Antisense Strand to SEQ ID NO: 394647
ucuuuaacaauaugaccuc

SEQ ID NO: 394649 - RNA, 19 nt, Artificial Sequence
  Description of Artificial Sequence: Synthetic oligonucleotide
  Sense Strand Starting at position 967 of SEQ ID NO: 318363
caccuaggauuccuugaga

SEQ ID NO: 394650 - RNA, 19 nt, Artificial Sequence
  Description of Artificial Sequence: Synthetic oligonucleotide
  Antisense Strand to SEQ ID NO: 394649
ucucaaggaauccuaggug

SEQ ID NO: 394651 - RNA, 19 nt, Artificial Sequence
  Description of Artificial Sequence: Synthetic oligonucleotide
  Sense Strand Starting at position 967 of SEQ ID NO: 318789
ugguaagaguuucuauuaa

SEQ ID NO: 394652 - RNA, 19 nt, Artificial Sequence
  Description of Artificial Sequence: Synthetic oligonucleotide
  Antisense Strand to SEQ ID NO: 394651
uuaauagaaacucuuacca

SEQ ID NO: 394653 - RNA, 19 nt, Artificial Sequence
  Description of Artificial Sequence: Synthetic oligonucleotide
  Sense Strand Starting at position 967 of SEQ ID NO: 318849
acaacaagcuugcuggaau

SEQ ID NO: 394654 - RNA, 19 nt, Artificial Sequence
  Description of Artificial Sequence: Synthetic oligonucleotide
  Antisense Strand to SEQ ID NO: 394653
auuccagcaagcuuguugu

SEQ ID NO: 394655 - RNA, 19 nt, Artificial Sequence
  Description of Artificial Sequence: Synthetic oligonucleotide
  Sense Strand Starting at position 967 of SEQ ID NO: 318852
acaagcuugcuggaauaga

SEQ ID NO: 394656 - RNA, 19 nt, Artificial Sequence
  Description of Artificial Sequence: Synthetic oligonucleotide
  Antisense Strand to SEQ ID NO: 394655
ucuauuccagcaagcuugu

SEQ ID NO: 394657 - RNA, 19 nt, Artificial Sequence
  Description of Artificial Sequence: Synthetic oligonucleotide
  Sense Strand Starting at position 967 of SEQ ID NO: 318925
caauguuaggacuaaagcu

SEQ ID NO: 394658 - RNA, 19 nt, Artificial Sequence
  Description of Artificial Sequence: Synthetic oligonucleotide
  Antisense Strand to SEQ ID NO: 394657
agcuuuaguccuaacauug

SEQ ID NO: 394659 - RNA, 19 nt, Artificial Sequence
  Description of Artificial Sequence: Synthetic oligonucleotide
  Sense Strand Starting at position 967 of SEQ ID NO: 318945
acguccuugaaguaaggaa

SEQ ID NO: 394660 - RNA, 19 nt, Artificial Sequence
  Description of Artificial Sequence: Synthetic oligonucleotide
  Antisense Strand to SEQ ID NO: 394659
uuccuuacuucaaggacgu

SEQ ID NO: 394661 - RNA, 19 nt, Artificial Sequence
  Description of Artificial Sequence: Synthetic oligonucleotide
  Sense Strand Starting at position 967 of SEQ ID NO: 318966
aaacgagggaucuggguaa

SEQ ID NO: 394662 - RNA, 19 nt, Artificial Sequence
  Description of Artificial Sequence: Synthetic oligonucleotide
  Antisense Strand to SEQ ID NO: 394661
uuacccagaucccucguuu

SEQ ID NO: 394663 - RNA, 19 nt, Artificial Sequence
  Description of Artificial Sequence: Synthetic oligonucleotide
  Sense Strand Starting at position 967 of SEQ ID NO: 318969
cgagggaucuggguaaggu

SEQ ID NO: 394664 - RNA, 19 nt, Artificial Sequence
  Description of Artificial Sequence: Synthetic oligonucleotide
  Antisense Strand to SEQ ID NO: 394663
accuuacccagaucccucg

SEQ ID NO: 394665 - RNA, 19 nt, Artificial Sequence
  Description of Artificial Sequence: Synthetic oligonucleotide
  Sense Strand Starting at position 968 of SEQ ID NO: 315398
ugagaagcaguagguuaaa

SEQ ID NO: 394666 - RNA, 19 nt, Artificial Sequence
  Description of Artificial Sequence: Synthetic oligonucleotide
  Antisense Strand to SEQ ID NO: 394665
uuuaaccuacugcuucuca

SEQ ID NO: 394667 - RNA, 19 nt, Artificial Sequence
  Description of Artificial Sequence: Synthetic oligonucleotide
  Sense Strand Starting at position 968 of SEQ ID NO: 315574
cuaauucuccaggauugua

SEQ ID NO: 394668 - RNA, 19 nt, Artificial Sequence
  Description of Artificial Sequence: Synthetic oligonucleotide
  Antisense Strand to SEQ ID NO: 394667
uacaauccuggagaauuag

SEQ ID NO: 394669 - RNA, 19 nt, Artificial Sequence
  Description of Artificial Sequence: Synthetic oligonucleotide
  Sense Strand Starting at position 968 of SEQ ID NO: 315582
ccaggauuguacucagaau

SEQ ID NO: 394670 - RNA, 19 nt, Artificial Sequence
  Description of Artificial Sequence: Synthetic oligonucleotide
  Antisense Strand to SEQ ID NO: 394669
auucugaguacaauccugg

SEQ ID NO: 394671 - RNA, 19 nt, Artificial Sequence
  Description of Artificial Sequence: Synthetic oligonucleotide
  Sense Strand Starting at position 968 of SEQ ID NO: 315629
acagguaaauaugcucaua

SEQ ID NO: 394672 - RNA, 19 nt, Artificial Sequence
  Description of Artificial Sequence: Synthetic oligonucleotide
  Antisense Strand to SEQ ID NO: 394671
uaugagcauauuuaccugu

SEQ ID NO: 394673 - RNA, 19 nt, Artificial Sequence
  Description of Artificial Sequence: Synthetic oligonucleotide
  Sense Strand Starting at position 968 of SEQ ID NO: 315631
agguaaauaugcucauaaa

SEQ ID NO: 394674 - RNA, 19 nt, Artificial Sequence
  Description of Artificial Sequence: Synthetic oligonucleotide
  Antisense Strand to SEQ ID NO: 394673
uuuaugagcauauuuaccu

SEQ ID NO: 394675 - RNA, 19 nt, Artificial Sequence
  Description of Artificial Sequence: Synthetic oligonucleotide
  Sense Strand Starting at position 968 of SEQ ID NO: 315684
guuaaauaauguuccagaa

SEQ ID NO: 394676 - RNA, 19 nt, Artificial Sequence
  Description of Artificial Sequence: Synthetic oligonucleotide
  Antisense Strand to SEQ ID NO: 394675
uucuggaacauuauuuaac

SEQ ID NO: 394677 - RNA, 19 nt, Artificial Sequence
  Description of Artificial Sequence: Synthetic oligonucleotide
  Sense Strand Starting at position 968 of SEQ ID NO: 315791
aguagauauucuccugacu

SEQ ID NO: 394678 - RNA, 19 nt, Artificial Sequence
  Description of Artificial Sequence: Synthetic oligonucleotide
  Antisense Strand to SEQ ID NO: 394677
agucaggagaauaucuacu

SEQ ID NO: 394679 - RNA, 19 nt, Artificial Sequence
  Description of Artificial Sequence: Synthetic oligonucleotide
  Sense Strand Starting at position 968 of SEQ ID NO: 315796
auauucuccugacuggauu

SEQ ID NO: 394680 - RNA, 19 nt, Artificial Sequence
  Description of Artificial Sequence: Synthetic oligonucleotide
  Antisense Strand to SEQ ID NO: 394679
aauccagucaggagaauau

SEQ ID NO: 394681 - RNA, 19 nt, Artificial Sequence
  Description of Artificial Sequence: Synthetic oligonucleotide
  Sense Strand Starting at position 968 of SEQ ID NO: 315809
uggauuauccugcaggcaa

SEQ ID NO: 394682 - RNA, 19 nt, Artificial Sequence
  Description of Artificial Sequence: Synthetic oligonucleotide
  Antisense Strand to SEQ ID NO: 394681
uugccugcaggauaaucca

SEQ ID NO: 394683 - RNA, 19 nt, Artificial Sequence
  Description of Artificial Sequence: Synthetic oligonucleotide
  Sense Strand Starting at position 968 of SEQ ID NO: 316003
acaagcagucaagauaguu

SEQ ID NO: 394684 - RNA, 19 nt, Artificial Sequence
  Description of Artificial Sequence: Synthetic oligonucleotide
  Antisense Strand to SEQ ID NO: 394683
aacuaucuugacugcuugu

SEQ ID NO: 394685 - RNA, 19 nt, Artificial Sequence
  Description of Artificial Sequence: Synthetic oligonucleotide
  Sense Strand Starting at position 968 of SEQ ID NO: 316092
agucaaacuccuuaguaug

SEQ ID NO: 394686 - RNA, 19 nt, Artificial Sequence
  Description of Artificial Sequence: Synthetic oligonucleotide
  Antisense Strand to SEQ ID NO: 394685
cauacuaaggaguuugacu

SEQ ID NO: 394687 - RNA, 19 nt, Artificial Sequence
  Description of Artificial Sequence: Synthetic oligonucleotide
  Sense Strand Starting at position 968 of SEQ ID NO: 316260
uuguccuuucuagauauuc

SEQ ID NO: 394688 - RNA, 19 nt, Artificial Sequence
  Description of Artificial Sequence: Synthetic oligonucleotide
  Antisense Strand to SEQ ID NO: 394687
gaauaucuagaaaggacaa

SEQ ID NO: 394689 - RNA, 19 nt, Artificial Sequence
  Description of Artificial Sequence: Synthetic oligonucleotide
  Sense Strand Starting at position 968 of SEQ ID NO: 316331
gcuaccuucccagagauga

SEQ ID NO: 394690 - RNA, 19 nt, Artificial Sequence
  Description of Artificial Sequence: Synthetic oligonucleotide
  Antisense Strand to SEQ ID NO: 394689
ucaucucugggaagguagc

SEQ ID NO: 394691 - RNA, 19 nt, Artificial Sequence
  Description of Artificial Sequence: Synthetic oligonucleotide
  Sense Strand Starting at position 968 of SEQ ID NO: 316592
guugaauuagcacaugaac

SEQ ID NO: 394692 - RNA, 19 nt, Artificial Sequence
  Description of Artificial Sequence: Synthetic oligonucleotide
  Antisense Strand to SEQ ID NO: 394691
guucaugugcuaauucaac

SEQ ID NO: 394693 - RNA, 19 nt, Artificial Sequence
  Description of Artificial Sequence: Synthetic oligonucleotide
  Sense Strand Starting at position 968 of SEQ ID NO: 316975
cugagaugucacuaaagcu

SEQ ID NO: 394694 - RNA, 19 nt, Artificial Sequence
  Description of Artificial Sequence: Synthetic oligonucleotide
  Antisense Strand to SEQ ID NO: 394693
agcuuuagugacaucucag

SEQ ID NO: 394695 - RNA, 19 nt, Artificial Sequence
  Description of Artificial Sequence: Synthetic oligonucleotide
  Sense Strand Starting at position 968 of SEQ ID NO: 317101
uguaucacugucuauuaaa

SEQ ID NO: 394696 - RNA, 19 nt, Artificial Sequence
  Description of Artificial Sequence: Synthetic oligonucleotide
  Antisense Strand to SEQ ID NO: 394695
uuuaauagacagugauaca

SEQ ID NO: 394697 - RNA, 19 nt, Artificial Sequence
  Description of Artificial Sequence: Synthetic oligonucleotide
  Sense Strand Starting at position 968 of SEQ ID NO: 317233
gucuacuaagguggaauua

SEQ ID NO: 394698 - RNA, 19 nt, Artificial Sequence
  Description of Artificial Sequence: Synthetic oligonucleotide
  Antisense Strand to SEQ ID NO: 394697
uaauuccaccuuaguagac

SEQ ID NO: 394699 - RNA, 19 nt, Artificial Sequence
  Description of Artificial Sequence: Synthetic oligonucleotide
  Sense Strand Starting at position 968 of SEQ ID NO: 317264
ugaggacuuuguuuaaccu

SEQ ID NO: 394700 - RNA, 19 nt, Artificial Sequence
  Description of Artificial Sequence: Synthetic oligonucleotide
  Antisense Strand to SEQ ID NO: 394699
agguuaaacaaaguccuca

SEQ ID NO: 394701 - RNA, 19 nt, Artificial Sequence
  Description of Artificial Sequence: Synthetic oligonucleotide
  Sense Strand Starting at position 968 of SEQ ID NO: 317300
uuuccuugucgauaaauau

SEQ ID NO: 394702 - RNA, 19 nt, Artificial Sequence
  Description of Artificial Sequence: Synthetic oligonucleotide
  Antisense Strand to SEQ ID NO: 394701
auauuuaucgacaaggaaa

SEQ ID NO: 394703 - RNA, 19 nt, Artificial Sequence
  Description of Artificial Sequence: Synthetic oligonucleotide
  Sense Strand Starting at position 968 of SEQ ID NO: 317475
uagaaagguuguguagauu

SEQ ID NO: 394704 - RNA, 19 nt, Artificial Sequence
  Description of Artificial Sequence: Synthetic oligonucleotide
  Antisense Strand to SEQ ID NO: 394703
aaucuacacaaccuuucua

SEQ ID NO: 394705 - RNA, 19 nt, Artificial Sequence
  Description of Artificial Sequence: Synthetic oligonucleotide
  Sense Strand Starting at position 968 of SEQ ID NO: 317502
cugauaucaacguaaguga

SEQ ID NO: 394706 - RNA, 19 nt, Artificial Sequence
  Description of Artificial Sequence: Synthetic oligonucleotide
  Antisense Strand to SEQ ID NO: 394705
ucacuuacguugauaucag

SEQ ID NO: 394707 - RNA, 19 nt, Artificial Sequence
  Description of Artificial Sequence: Synthetic oligonucleotide
  Sense Strand Starting at position 968 of SEQ ID NO: 317558
uuugauuugugugcuucua

SEQ ID NO: 394708 - RNA, 19 nt, Artificial Sequence
  Description of Artificial Sequence: Synthetic oligonucleotide
  Antisense Strand to SEQ ID NO: 394707
uagaagcacacaaaucaaa

SEQ ID NO: 394709 - RNA, 19 nt, Artificial Sequence
  Description of Artificial Sequence: Synthetic oligonucleotide
  Sense Strand Starting at position 968 of SEQ ID NO: 317560
ugauuugugugcuucuacu

SEQ ID NO: 394710 - RNA, 19 nt, Artificial Sequence
  Description of Artificial Sequence: Synthetic oligonucleotide
  Antisense Strand to SEQ ID NO: 394709
aguagaagcacacaaauca

SEQ ID NO: 394711 - RNA, 19 nt, Artificial Sequence
  Description of Artificial Sequence: Synthetic oligonucleotide
  Sense Strand Starting at position 968 of SEQ ID NO: 317612
ugucaucaccacuaugauc

SEQ ID NO: 394712 - RNA, 19 nt, Artificial Sequence
  Description of Artificial Sequence: Synthetic oligonucleotide
  Antisense Strand to SEQ ID NO: 394711
gaucauaguggugaugaca

SEQ ID NO: 394713 - RNA, 19 nt, Artificial Sequence
  Description of Artificial Sequence: Synthetic oligonucleotide
  Sense Strand Starting at position 968 of SEQ ID NO: 317683
gguccuacucguucgugua

SEQ ID NO: 394714 - RNA, 19 nt, Artificial Sequence
  Description of Artificial Sequence: Synthetic oligonucleotide
  Antisense Strand to SEQ ID NO: 394713
uacacgaacgaguaggacc

SEQ ID NO: 394715 - RNA, 19 nt, Artificial Sequence
  Description of Artificial Sequence: Synthetic oligonucleotide
  Sense Strand Starting at position 968 of SEQ ID NO: 318042
aacaguugccaugaacgaa

SEQ ID NO: 394716 - RNA, 19 nt, Artificial Sequence
  Description of Artificial Sequence: Synthetic oligonucleotide
  Antisense Strand to SEQ ID NO: 394715
uucguucauggcaacuguu

SEQ ID NO: 394717 - RNA, 19 nt, Artificial Sequence
  Description of Artificial Sequence: Synthetic oligonucleotide
  Sense Strand Starting at position 968 of SEQ ID NO: 318144
uucucaugugaguacaaua

SEQ ID NO: 394718 - RNA, 19 nt, Artificial Sequence
  Description of Artificial Sequence: Synthetic oligonucleotide
  Antisense Strand to SEQ ID NO: 394717
uauuguacucacaugagaa

SEQ ID NO: 394719 - RNA, 19 nt, Artificial Sequence
  Description of Artificial Sequence: Synthetic oligonucleotide
  Sense Strand Starting at position 968 of SEQ ID NO: 318188
aucauuuguuuggcugagu

SEQ ID NO: 394720 - RNA, 19 nt, Artificial Sequence
  Description of Artificial Sequence: Synthetic oligonucleotide
  Antisense Strand to SEQ ID NO: 394719
acucagccaaacaaaugau

SEQ ID NO: 394721 - RNA, 19 nt, Artificial Sequence
  Description of Artificial Sequence: Synthetic oligonucleotide
  Sense Strand Starting at position 968 of SEQ ID NO: 318380
aguuguaucccagaucuau

SEQ ID NO: 394722 - RNA, 19 nt, Artificial Sequence
  Description of Artificial Sequence: Synthetic oligonucleotide
  Antisense Strand to SEQ ID NO: 394721
auagaucugggauacaacu

SEQ ID NO: 394723 - RNA, 19 nt, Artificial Sequence
  Description of Artificial Sequence: Synthetic oligonucleotide
  Sense Strand Starting at position 968 of SEQ ID NO: 318394
ucuauuaugccagaauguc

SEQ ID NO: 394724 - RNA, 19 nt, Artificial Sequence
  Description of Artificial Sequence: Synthetic oligonucleotide
  Antisense Strand to SEQ ID NO: 394723
gacauucuggcauaauaga

SEQ ID NO: 394725 - RNA, 19 nt, Artificial Sequence
  Description of Artificial Sequence: Synthetic oligonucleotide
  Sense Strand Starting at position 968 of SEQ ID NO: 318400
augccagaaugucugagaa

SEQ ID NO: 394726 - RNA, 19 nt, Artificial Sequence
  Description of Artificial Sequence: Synthetic oligonucleotide
  Antisense Strand to SEQ ID NO: 394725
uucucagacauucuggcau

SEQ ID NO: 394727 - RNA, 19 nt, Artificial Sequence
  Description of Artificial Sequence: Synthetic oligonucleotide
  Sense Strand Starting at position 968 of SEQ ID NO: 318455
uuuggcugacuguaagauu

SEQ ID NO: 394728 - RNA, 19 nt, Artificial Sequence
  Description of Artificial Sequence: Synthetic oligonucleotide
  Antisense Strand to SEQ ID NO: 394727
aaucuuacagucagccaaa

SEQ ID NO: 394729 - RNA, 19 nt, Artificial Sequence
  Description of Artificial Sequence: Synthetic oligonucleotide
  Sense Strand Starting at position 968 of SEQ ID NO: 318583
ccuuauuuaucccaggaga

SEQ ID NO: 394730 - RNA, 19 nt, Artificial Sequence
  Description of Artificial Sequence: Synthetic oligonucleotide
  Antisense Strand to SEQ ID NO: 394729
ucuccugggauaaauaagg

SEQ ID NO: 394731 - RNA, 19 nt, Artificial Sequence
  Description of Artificial Sequence: Synthetic oligonucleotide
  Sense Strand Starting at position 968 of SEQ ID NO: 318621
gaggaagugacugggcuau

SEQ ID NO: 394732 - RNA, 19 nt, Artificial Sequence
  Description of Artificial Sequence: Synthetic oligonucleotide
  Antisense Strand to SEQ ID NO: 394731
auagcccagucacuuccuc

SEQ ID NO: 394733 - RNA, 19 nt, Artificial Sequence
  Description of Artificial Sequence: Synthetic oligonucleotide
  Sense Strand Starting at position 968 of SEQ ID NO: 318689
cugcaaaugccauaaauga

SEQ ID NO: 394734 - RNA, 19 nt, Artificial Sequence
  Description of Artificial Sequence: Synthetic oligonucleotide
  Antisense Strand to SEQ ID NO: 394733
ucauuuauggcauuugcag

SEQ ID NO: 394735 - RNA, 19 nt, Artificial Sequence
  Description of Artificial Sequence: Synthetic oligonucleotide
  Sense Strand Starting at position 968 of SEQ ID NO: 318898
cucagaauugauggucagu

SEQ ID NO: 394736 - RNA, 19 nt, Artificial Sequence
  Description of Artificial Sequence: Synthetic oligonucleotide
  Antisense Strand to SEQ ID NO: 394735
acugaccaucaauucugag

SEQ ID NO: 394737 - RNA, 19 nt, Artificial Sequence
  Description of Artificial Sequence: Synthetic oligonucleotide
  Sense Strand Starting at position 968 of SEQ ID NO: 318930
cucuauguggccuauaaca

SEQ ID NO: 394738 - RNA, 19 nt, Artificial Sequence
  Description of Artificial Sequence: Synthetic oligonucleotide
  Antisense Strand to SEQ ID NO: 394737
uguuauaggccacauagag

SEQ ID NO: 394739 - RNA, 19 nt, Artificial Sequence
  Description of Artificial Sequence: Synthetic oligonucleotide
  Sense Strand Starting at position 968 of SEQ ID NO: 318932
cuauguggccuauaacacu

SEQ ID NO: 394740 - RNA, 19 nt, Artificial Sequence
  Description of Artificial Sequence: Synthetic oligonucleotide
  Antisense Strand to SEQ ID NO: 394739
aguguuauaggccacauag

SEQ ID NO: 394741 - RNA, 19 nt, Artificial Sequence
  Description of Artificial Sequence: Synthetic oligonucleotide
  Sense Strand Starting at position 968 of SEQ ID NO: 318938
ggccuauaacacugagaac

SEQ ID NO: 394742 - RNA, 19 nt, Artificial Sequence
  Description of Artificial Sequence: Synthetic oligonucleotide
  Antisense Strand to SEQ ID NO: 394741
guucucaguguuauaggcc

SEQ ID NO: 394743 - RNA, 19 nt, Artificial Sequence
  Description of Artificial Sequence: Synthetic oligonucleotide
  Sense Strand Starting at position 968 of SEQ ID NO: 319151
uuuggcaaaguuuaucaga

SEQ ID NO: 394744 - RNA, 19 nt, Artificial Sequence
  Description of Artificial Sequence: Synthetic oligonucleotide
  Antisense Strand to SEQ ID NO: 394743
ucugauaaacuuugccaaa

SEQ ID NO: 394745 - RNA, 19 nt, Artificial Sequence
  Description of Artificial Sequence: Synthetic oligonucleotide
  Sense Strand Starting at position 969 of SEQ ID NO: 315369
cuuaaauagagguggguua

SEQ ID NO: 394746 - RNA, 19 nt, Artificial Sequence
  Description of Artificial Sequence: Synthetic oligonucleotide
  Antisense Strand to SEQ ID NO: 394745
uaacccaccucuauuuaag

SEQ ID NO: 394747 - RNA, 19 nt, Artificial Sequence
  Description of Artificial Sequence: Synthetic oligonucleotide
  Sense Strand Starting at position 969 of SEQ ID NO: 315371
uaaauagagguggguuaua

SEQ ID NO: 394748 - RNA, 19 nt, Artificial Sequence
  Description of Artificial Sequence: Synthetic oligonucleotide
  Antisense Strand to SEQ ID NO: 394747
uauaacccaccucuauuua

SEQ ID NO: 394749 - RNA, 19 nt, Artificial Sequence
  Description of Artificial Sequence: Synthetic oligonucleotide
  Sense Strand Starting at position 969 of SEQ ID NO: 315615
cuagcagccgaugaagauu

SEQ ID NO: 394750 - RNA, 19 nt, Artificial Sequence
  Description of Artificial Sequence: Synthetic oligonucleotide
  Antisense Strand to SEQ ID NO: 394749
aaucuucaucggcugcuag

SEQ ID NO: 394751 - RNA, 19 nt, Artificial Sequence
  Description of Artificial Sequence: Synthetic oligonucleotide
  Sense Strand Starting at position 969 of SEQ ID NO: 315626
ugaagauucuuugccacaa

SEQ ID NO: 394752 - RNA, 19 nt, Artificial Sequence
  Description of Artificial Sequence: Synthetic oligonucleotide
  Antisense Strand to SEQ ID NO: 394751
uuguggcaaagaaucuuca

SEQ ID NO: 394753 - RNA, 19 nt, Artificial Sequence
  Description of Artificial Sequence: Synthetic oligonucleotide
  Sense Strand Starting at position 969 of SEQ ID NO: 315723
gcugaaauacugcaauaag

SEQ ID NO: 394754 - RNA, 19 nt, Artificial Sequence
  Description of Artificial Sequence: Synthetic oligonucleotide
  Antisense Strand to SEQ ID NO: 394753
cuuauugcaguauuucagc

SEQ ID NO: 394755 - RNA, 19 nt, Artificial Sequence
  Description of Artificial Sequence: Synthetic oligonucleotide
  Sense Strand Starting at position 969 of SEQ ID NO: 315838
auccaagaucacuggucaa

SEQ ID NO: 394756 - RNA, 19 nt, Artificial Sequence
  Description of Artificial Sequence: Synthetic oligonucleotide
  Antisense Strand to SEQ ID NO: 394755
uugaccagugaucuuggau

SEQ ID NO: 394757 - RNA, 19 nt, Artificial Sequence
  Description of Artificial Sequence: Synthetic oligonucleotide
  Sense Strand Starting at position 969 of SEQ ID NO: 315971
aggaucuacuaugugucaa

SEQ ID NO: 394758 - RNA, 19 nt, Artificial Sequence
  Description of Artificial Sequence: Synthetic oligonucleotide
  Antisense Strand to SEQ ID NO: 394757
uugacacauaguagauccu

SEQ ID NO: 394759 - RNA, 19 nt, Artificial Sequence
  Description of Artificial Sequence: Synthetic oligonucleotide
  Sense Strand Starting at position 969 of SEQ ID NO: 315972
ggaucuacuaugugucaag

SEQ ID NO: 394760 - RNA, 19 nt, Artificial Sequence
  Description of Artificial Sequence: Synthetic oligonucleotide
  Antisense Strand to SEQ ID NO: 394759
cuugacacauaguagaucc

SEQ ID NO: 394761 - RNA, 19 nt, Artificial Sequence
  Description of Artificial Sequence: Synthetic oligonucleotide
  Sense Strand Starting at position 969 of SEQ ID NO: 316101
gauacaugcuauguaggga

SEQ ID NO: 394762 - RNA, 19 nt, Artificial Sequence
  Description of Artificial Sequence: Synthetic oligonucleotide
  Antisense Strand to SEQ ID NO: 394761
ucccuacauagcauguauc

SEQ ID NO: 394763 - RNA, 19 nt, Artificial Sequence
  Description of Artificial Sequence: Synthetic oligonucleotide
  Sense Strand Starting at position 969 of SEQ ID NO: 316568
uaggaagucuuugcugaag

SEQ ID NO: 394764 - RNA, 19 nt, Artificial Sequence
  Description of Artificial Sequence: Synthetic oligonucleotide
  Antisense Strand to SEQ ID NO: 394763
cuucagcaaagacuuccua

SEQ ID NO: 394765 - RNA, 19 nt, Artificial Sequence
  Description of Artificial Sequence: Synthetic oligonucleotide
  Sense Strand Starting at position 969 of SEQ ID NO: 316571
gaagucuuugcugaagaca

SEQ ID NO: 394766 - RNA, 19 nt, Artificial Sequence
  Description of Artificial Sequence: Synthetic oligonucleotide
  Antisense Strand to SEQ ID NO: 394765
ugucuucagcaaagacuuc

SEQ ID NO: 394767 - RNA, 19 nt, Artificial Sequence
  Description of Artificial Sequence: Synthetic oligonucleotide
  Sense Strand Starting at position 969 of SEQ ID NO: 316612
ggcucucacccugaauaaa

SEQ ID NO: 394768 - RNA, 19 nt, Artificial Sequence
  Description of Artificial Sequence: Synthetic oligonucleotide
  Antisense Strand to SEQ ID NO: 394767
uuuauucagggugagagcc

SEQ ID NO: 394769 - RNA, 19 nt, Artificial Sequence
  Description of Artificial Sequence: Synthetic oligonucleotide
  Sense Strand Starting at position 969 of SEQ ID NO: 316622
cugaauaaaccaugaguuc

SEQ ID NO: 394770 - RNA, 19 nt, Artificial Sequence
  Description of Artificial Sequence: Synthetic oligonucleotide
  Antisense Strand to SEQ ID NO: 394769
gaacucaugguuuauucag

SEQ ID NO: 394771 - RNA, 19 nt, Artificial Sequence
  Description of Artificial Sequence: Synthetic oligonucleotide
  Sense Strand Starting at position 969 of SEQ ID NO: 316713
ggaagauguccuuggugau

SEQ ID NO: 394772 - RNA, 19 nt, Artificial Sequence
  Description of Artificial Sequence: Synthetic oligonucleotide
  Antisense Strand to SEQ ID NO: 394771
aucaccaaggacaucuucc

SEQ ID NO: 394773 - RNA, 19 nt, Artificial Sequence
  Description of Artificial Sequence: Synthetic oligonucleotide
  Sense Strand Starting at position 969 of SEQ ID NO: 316717
gauguccuuggugaucuua

SEQ ID NO: 394774 - RNA, 19 nt, Artificial Sequence
  Description of Artificial Sequence: Synthetic oligonucleotide
  Antisense Strand to SEQ ID NO: 394773
uaagaucaccaaggacauc

SEQ ID NO: 394775 - RNA, 19 nt, Artificial Sequence
  Description of Artificial Sequence: Synthetic oligonucleotide
  Sense Strand Starting at position 969 of SEQ ID NO: 316845
gaugccacaguuuagauau

SEQ ID NO: 394776 - RNA, 19 nt, Artificial Sequence
  Description of Artificial Sequence: Synthetic oligonucleotide
  Antisense Strand to SEQ ID NO: 394775
auaucuaaacuguggcauc

SEQ ID NO: 394777 - RNA, 19 nt, Artificial Sequence
  Description of Artificial Sequence: Synthetic oligonucleotide
  Sense Strand Starting at position 969 of SEQ ID NO: 316879
uuuggucuccaagaacuca

SEQ ID NO: 394778 - RNA, 19 nt, Artificial Sequence
  Description of Artificial Sequence: Synthetic oligonucleotide
  Antisense Strand to SEQ ID NO: 394777
ugaguucuuggagaccaaa

SEQ ID NO: 394779 - RNA, 19 nt, Artificial Sequence
  Description of Artificial Sequence: Synthetic oligonucleotide
  Sense Strand Starting at position 969 of SEQ ID NO: 316896
caucguauugcuuugcuca

SEQ ID NO: 394780 - RNA, 19 nt, Artificial Sequence
  Description of Artificial Sequence: Synthetic oligonucleotide
  Antisense Strand to SEQ ID NO: 394779
ugagcaaagcaauacgaug

SEQ ID NO: 394781 - RNA, 19 nt, Artificial Sequence
  Description of Artificial Sequence: Synthetic oligonucleotide
  Sense Strand Starting at position 969 of SEQ ID NO: 317077
agauuugauugauaauccu

SEQ ID NO: 394782 - RNA, 19 nt, Artificial Sequence
  Description of Artificial Sequence: Synthetic oligonucleotide
  Antisense Strand to SEQ ID NO: 394781
aggauuaucaaucaaaucu

SEQ ID NO: 394783 - RNA, 19 nt, Artificial Sequence
  Description of Artificial Sequence: Synthetic oligonucleotide
  Sense Strand Starting at position 969 of SEQ ID NO: 317080
uuugauugauaauccugau

SEQ ID NO: 394784 - RNA, 19 nt, Artificial Sequence
  Description of Artificial Sequence: Synthetic oligonucleotide
  Antisense Strand to SEQ ID NO: 394783
aucaggauuaucaaucaaa

SEQ ID NO: 394785 - RNA, 19 nt, Artificial Sequence
  Description of Artificial Sequence: Synthetic oligonucleotide
  Sense Strand Starting at position 969 of SEQ ID NO: 317113
gagaaugauucuguacuca

SEQ ID NO: 394786 - RNA, 19 nt, Artificial Sequence
  Description of Artificial Sequence: Synthetic oligonucleotide
  Antisense Strand to SEQ ID NO: 394785
ugaguacagaaucauucuc

SEQ ID NO: 394787 - RNA, 19 nt, Artificial Sequence
  Description of Artificial Sequence: Synthetic oligonucleotide
  Sense Strand Starting at position 969 of SEQ ID NO: 317296
ucuuguucuccagacagag

SEQ ID NO: 394788 - RNA, 19 nt, Artificial Sequence
  Description of Artificial Sequence: Synthetic oligonucleotide
  Antisense Strand to SEQ ID NO: 394787
cucugucuggagaacaaga

SEQ ID NO: 394789 - RNA, 19 nt, Artificial Sequence
  Description of Artificial Sequence: Synthetic oligonucleotide
  Sense Strand Starting at position 969 of SEQ ID NO: 317379
gcugaagugaggcaaagua

SEQ ID NO: 394790 - RNA, 19 nt, Artificial Sequence
  Description of Artificial Sequence: Synthetic oligonucleotide
  Antisense Strand to SEQ ID NO: 394789
uacuuugccucacuucagc

SEQ ID NO: 394791 - RNA, 19 nt, Artificial Sequence
  Description of Artificial Sequence: Synthetic oligonucleotide
  Sense Strand Starting at position 969 of SEQ ID NO: 317410
uuuguagagccagauacuu

SEQ ID NO: 394792 - RNA, 19 nt, Artificial Sequence
  Description of Artificial Sequence: Synthetic oligonucleotide
  Antisense Strand to SEQ ID NO: 394791
aaguaucuggcucuacaaa

SEQ ID NO: 394793 - RNA, 19 nt, Artificial Sequence
  Description of Artificial Sequence: Synthetic oligonucleotide
  Sense Strand Starting at position 969 of SEQ ID NO: 317415
agagccagauacuuuaaau

SEQ ID NO: 394794 - RNA, 19 nt, Artificial Sequence
  Description of Artificial Sequence: Synthetic oligonucleotide
  Antisense Strand to SEQ ID NO: 394793
auuuaaaguaucuggcucu

SEQ ID NO: 394795 - RNA, 19 nt, Artificial Sequence
  Description of Artificial Sequence: Synthetic oligonucleotide
  Sense Strand Starting at position 969 of SEQ ID NO: 317477
uggucagagccacacauua

SEQ ID NO: 394796 - RNA, 19 nt, Artificial Sequence
  Description of Artificial Sequence: Synthetic oligonucleotide
  Antisense Strand to SEQ ID NO: 394795
uaauguguggcucugacca

SEQ ID NO: 394797 - RNA, 19 nt, Artificial Sequence
  Description of Artificial Sequence: Synthetic oligonucleotide
  Sense Strand Starting at position 969 of SEQ ID NO: 317652
gcaugaagggaugguuaua

SEQ ID NO: 394798 - RNA, 19 nt, Artificial Sequence
  Description of Artificial Sequence: Synthetic oligonucleotide
  Antisense Strand to SEQ ID NO: 394797
uauaaccaucccuucaugc

SEQ ID NO: 394799 - RNA, 19 nt, Artificial Sequence
  Description of Artificial Sequence: Synthetic oligonucleotide
  Sense Strand Starting at position 969 of SEQ ID NO: 317731
uagggaagcuuccuacaga

SEQ ID NO: 394800 - RNA, 19 nt, Artificial Sequence
  Description of Artificial Sequence: Synthetic oligonucleotide
  Antisense Strand to SEQ ID NO: 394799
ucuguaggaagcuucccua

SEQ ID NO: 394801 - RNA, 19 nt, Artificial Sequence
  Description of Artificial Sequence: Synthetic oligonucleotide
  Sense Strand Starting at position 969 of SEQ ID NO: 317793
acaauaaagucaccuguuu

SEQ ID NO: 394802 - RNA, 19 nt, Artificial Sequence
  Description of Artificial Sequence: Synthetic oligonucleotide
  Antisense Strand to SEQ ID NO: 394801
aaacaggugacuuuauugu

SEQ ID NO: 394803 - RNA, 19 nt, Artificial Sequence
  Description of Artificial Sequence: Synthetic oligonucleotide
  Sense Strand Starting at position 969 of SEQ ID NO: 317899
gaaacaugucagcaggucu

SEQ ID NO: 394804 - RNA, 19 nt, Artificial Sequence
  Description of Artificial Sequence: Synthetic oligonucleotide
  Antisense Strand to SEQ ID NO: 394803
agaccugcugacauguuuc

SEQ ID NO: 394805 - RNA, 19 nt, Artificial Sequence
  Description of Artificial Sequence: Synthetic oligonucleotide
  Sense Strand Starting at position 969 of SEQ ID NO: 318082
guaggccucuuacuuauuu

SEQ ID NO: 394806 - RNA, 19 nt, Artificial Sequence
  Description of Artificial Sequence: Synthetic oligonucleotide
  Antisense Strand to SEQ ID NO: 394805
aaauaaguaagaggccuac

SEQ ID NO: 394807 - RNA, 19 nt, Artificial Sequence
  Description of Artificial Sequence: Synthetic oligonucleotide
  Sense Strand Starting at position 969 of SEQ ID NO: 318201
augaauagguuuccaagca

SEQ ID NO: 394808 - RNA, 19 nt, Artificial Sequence
  Description of Artificial Sequence: Synthetic oligonucleotide
  Antisense Strand to SEQ ID NO: 394807
ugcuuggaaaccuauucau

SEQ ID NO: 394809 - RNA, 19 nt, Artificial Sequence
  Description of Artificial Sequence: Synthetic oligonucleotide
  Sense Strand Starting at position 969 of SEQ ID NO: 318224
aguauaugugauuaguuga

SEQ ID NO: 394810 - RNA, 19 nt, Artificial Sequence
  Description of Artificial Sequence: Synthetic oligonucleotide
  Antisense Strand to SEQ ID NO: 394809
ucaacuaaucacauauacu

SEQ ID NO: 394811 - RNA, 19 nt, Artificial Sequence
  Description of Artificial Sequence: Synthetic oligonucleotide
  Sense Strand Starting at position 969 of SEQ ID NO: 318425
aggcaaacagugugauuaa

SEQ ID NO: 394812 - RNA, 19 nt, Artificial Sequence
  Description of Artificial Sequence: Synthetic oligonucleotide
  Antisense Strand to SEQ ID NO: 394811
uuaaucacacuguuugccu

SEQ ID NO: 394813 - RNA, 19 nt, Artificial Sequence
  Description of Artificial Sequence: Synthetic oligonucleotide
  Sense Strand Starting at position 969 of SEQ ID NO: 318868
acaauuugauccugggaga

SEQ ID NO: 394814 - RNA, 19 nt, Artificial Sequence
  Description of Artificial Sequence: Synthetic oligonucleotide
  Antisense Strand to SEQ ID NO: 394813
ucucccaggaucaaauugu

SEQ ID NO: 394815 - RNA, 19 nt, Artificial Sequence
  Description of Artificial Sequence: Synthetic oligonucleotide
  Sense Strand Starting at position 969 of SEQ ID NO: 318871
auuugauccugggagacuu

SEQ ID NO: 394816 - RNA, 19 nt, Artificial Sequence
  Description of Artificial Sequence: Synthetic oligonucleotide
  Antisense Strand to SEQ ID NO: 394815
aagucucccaggaucaaau

SEQ ID NO: 394817 - RNA, 19 nt, Artificial Sequence
  Description of Artificial Sequence: Synthetic oligonucleotide
  Sense Strand Starting at position 969 of SEQ ID NO: 318879
cugggagacuucuccuuua

SEQ ID NO: 394818 - RNA, 19 nt, Artificial Sequence
  Description of Artificial Sequence: Synthetic oligonucleotide
  Antisense Strand to SEQ ID NO: 394817
uaaaggagaagucucccag

SEQ ID NO: 394819 - RNA, 19 nt, Artificial Sequence
  Description of Artificial Sequence: Synthetic oligonucleotide
  Sense Strand Starting at position 969 of SEQ ID NO: 318882
ggagacuucuccuuuaagg

SEQ ID NO: 394820 - RNA, 19 nt, Artificial Sequence
  Description of Artificial Sequence: Synthetic oligonucleotide
  Antisense Strand to SEQ ID NO: 394819
ccuuaaaggagaagucucc

SEQ ID NO: 394821 - RNA, 19 nt, Artificial Sequence
  Description of Artificial Sequence: Synthetic oligonucleotide
  Sense Strand Starting at position 969 of SEQ ID NO: 318884
agacuucuccuuuaagggu

SEQ ID NO: 394822 - RNA, 19 nt, Artificial Sequence
  Description of Artificial Sequence: Synthetic oligonucleotide
  Antisense Strand to SEQ ID NO: 394821
acccuuaaaggagaagucu

SEQ ID NO: 394823 - RNA, 19 nt, Artificial Sequence
  Description of Artificial Sequence: Synthetic oligonucleotide
  Sense Strand Starting at position 969 of SEQ ID NO: 319062
aguagugagcacuacuacu

SEQ ID NO: 394824 - RNA, 19 nt, Artificial Sequence
  Description of Artificial Sequence: Synthetic oligonucleotide
  Antisense Strand to SEQ ID NO: 394823
aguaguagugcucacuacu

SEQ ID NO: 394825 - RNA, 19 nt, Artificial Sequence
  Description of Artificial Sequence: Synthetic oligonucleotide
  Sense Strand Starting at position 970 of SEQ ID NO: 315383
cagagaugguacuuugcca

SEQ ID NO: 394826 - RNA, 19 nt, Artificial Sequence
  Description of Artificial Sequence: Synthetic oligonucleotide
  Antisense Strand to SEQ ID NO: 394825
uggcaaaguaccaucucug

SEQ ID NO: 394827 - RNA, 19 nt, Artificial Sequence
  Description of Artificial Sequence: Synthetic oligonucleotide
  Sense Strand Starting at position 970 of SEQ ID NO: 315922
gagcuucuugaaggacuuu

SEQ ID NO: 394828 - RNA, 19 nt, Artificial Sequence
  Description of Artificial Sequence: Synthetic oligonucleotide
  Antisense Strand to SEQ ID NO: 394827
aaaguccuucaagaagcuc

SEQ ID NO: 394829 - RNA, 19 nt, Artificial Sequence
  Description of Artificial Sequence: Synthetic oligonucleotide
  Sense Strand Starting at position 970 of SEQ ID NO: 315933
aggacuuuccaaugguguu

SEQ ID NO: 394830 - RNA, 19 nt, Artificial Sequence
  Description of Artificial Sequence: Synthetic oligonucleotide
  Antisense Strand to SEQ ID NO: 394829
aacaccauuggaaaguccu

SEQ ID NO: 394831 - RNA, 19 nt, Artificial Sequence
  Description of Artificial Sequence: Synthetic oligonucleotide
  Sense Strand Starting at position 970 of SEQ ID NO: 315934
ggacuuuccaaugguguuu

SEQ ID NO: 394832 - RNA, 19 nt, Artificial Sequence
  Description of Artificial Sequence: Synthetic oligonucleotide
  Antisense Strand to SEQ ID NO: 394831
aaacaccauuggaaagucc

SEQ ID NO: 394833 - RNA, 19 nt, Artificial Sequence
  Description of Artificial Sequence: Synthetic oligonucleotide
  Sense Strand Starting at position 970 of SEQ ID NO: 315961
gcguuuggcacuguuaaau

SEQ ID NO: 394834 - RNA, 19 nt, Artificial Sequence
  Description of Artificial Sequence: Synthetic oligonucleotide
  Antisense Strand to SEQ ID NO: 394833
auuuaacagugccaaacgc

SEQ ID NO: 394835 - RNA, 19 nt, Artificial Sequence
  Description of Artificial Sequence: Synthetic oligonucleotide
  Sense Strand Starting at position 970 of SEQ ID NO: 316067
gcaggcuuuguggaauauc

SEQ ID NO: 394836 - RNA, 19 nt, Artificial Sequence
  Description of Artificial Sequence: Synthetic oligonucleotide
  Antisense Strand to SEQ ID NO: 394835
gauauuccacaaagccugc

SEQ ID NO: 394837 - RNA, 19 nt, Artificial Sequence
  Description of Artificial Sequence: Synthetic oligonucleotide
  Sense Strand Starting at position 970 of SEQ ID NO: 316078
ggaauaucuggagguugua

SEQ ID NO: 394838 - RNA, 19 nt, Artificial Sequence
  Description of Artificial Sequence: Synthetic oligonucleotide
  Antisense Strand to SEQ ID NO: 394837
uacaaccuccagauauucc

SEQ ID NO: 394839 - RNA, 19 nt, Artificial Sequence
  Description of Artificial Sequence: Synthetic oligonucleotide
  Sense Strand Starting at position 970 of SEQ ID NO: 316081
auaucuggagguuguagaa

SEQ ID NO: 394840 - RNA, 19 nt, Artificial Sequence
  Description of Artificial Sequence: Synthetic oligonucleotide
  Antisense Strand to SEQ ID NO: 394839
uucuacaaccuccagauau

SEQ ID NO: 394841 - RNA, 19 nt, Artificial Sequence
  Description of Artificial Sequence: Synthetic oligonucleotide
  Sense Strand Starting at position 970 of SEQ ID NO: 316115
uugggacagacuuagugua

SEQ ID NO: 394842 - RNA, 19 nt, Artificial Sequence
  Description of Artificial Sequence: Synthetic oligonucleotide
  Antisense Strand to SEQ ID NO: 394841
uacacuaagucugucccaa

SEQ ID NO: 394843 - RNA, 19 nt, Artificial Sequence
  Description of Artificial Sequence: Synthetic oligonucleotide
  Sense Strand Starting at position 970 of SEQ ID NO: 316117
gggacagacuuaguguagu

SEQ ID NO: 394844 - RNA, 19 nt, Artificial Sequence
  Description of Artificial Sequence: Synthetic oligonucleotide
  Antisense Strand to SEQ ID NO: 394843
acuacacuaagucuguccc

SEQ ID NO: 394845 - RNA, 19 nt, Artificial Sequence
  Description of Artificial Sequence: Synthetic oligonucleotide
  Sense Strand Starting at position 970 of SEQ ID NO: 316188
acgagacaauuccuacagu

SEQ ID NO: 394846 - RNA, 19 nt, Artificial Sequence
  Description of Artificial Sequence: Synthetic oligonucleotide
  Antisense Strand to SEQ ID NO: 394845
acuguaggaauugucucgu

SEQ ID NO: 394847 - RNA, 19 nt, Artificial Sequence
  Description of Artificial Sequence: Synthetic oligonucleotide
  Sense Strand Starting at position 970 of SEQ ID NO: 316204
agucaaugccuugaaauca

SEQ ID NO: 394848 - RNA, 19 nt, Artificial Sequence
  Description of Artificial Sequence: Synthetic oligonucleotide
  Antisense Strand to SEQ ID NO: 394847
ugauuucaaggcauugacu

SEQ ID NO: 394849 - RNA, 19 nt, Artificial Sequence
  Description of Artificial Sequence: Synthetic oligonucleotide
  Sense Strand Starting at position 970 of SEQ ID NO: 316384
cgugguggacugcaauuaa

SEQ ID NO: 394850 - RNA, 19 nt, Artificial Sequence
  Description of Artificial Sequence: Synthetic oligonucleotide
  Antisense Strand to SEQ ID NO: 394849
uuaauugcaguccaccacg

SEQ ID NO: 394851 - RNA, 19 nt, Artificial Sequence
  Description of Artificial Sequence: Synthetic oligonucleotide
  Sense Strand Starting at position 970 of SEQ ID NO: 316645
cucauaaaugcuggaagga

SEQ ID NO: 394852 - RNA, 19 nt, Artificial Sequence
  Description of Artificial Sequence: Synthetic oligonucleotide
  Antisense Strand to SEQ ID NO: 394851
uccuuccagcauuuaugag

SEQ ID NO: 394853 - RNA, 19 nt, Artificial Sequence
  Description of Artificial Sequence: Synthetic oligonucleotide
  Sense Strand Starting at position 970 of SEQ ID NO: 317574
gagggaaacugcuuggauu

SEQ ID NO: 394854 - RNA, 19 nt, Artificial Sequence
  Description of Artificial Sequence: Synthetic oligonucleotide
  Antisense Strand to SEQ ID NO: 394853
aauccaagcaguuucccuc

SEQ ID NO: 394855 - RNA, 19 nt, Artificial Sequence
  Description of Artificial Sequence: Synthetic oligonucleotide
  Sense Strand Starting at position 970 of SEQ ID NO: 317576
gggaaacugcuuggauucu

SEQ ID NO: 394856 - RNA, 19 nt, Artificial Sequence
  Description of Artificial Sequence: Synthetic oligonucleotide
  Antisense Strand to SEQ ID NO: 394855
agaauccaagcaguuuccc

SEQ ID NO: 394857 - RNA, 19 nt, Artificial Sequence
  Description of Artificial Sequence: Synthetic oligonucleotide
  Sense Strand Starting at position 970 of SEQ ID NO: 317599
gcauuagggcugugauuuc

SEQ ID NO: 394858 - RNA, 19 nt, Artificial Sequence
  Description of Artificial Sequence: Synthetic oligonucleotide
  Antisense Strand to SEQ ID NO: 394857
gaaaucacagcccuaaugc

SEQ ID NO: 394859 - RNA, 19 nt, Artificial Sequence
  Description of Artificial Sequence: Synthetic oligonucleotide
  Sense Strand Starting at position 970 of SEQ ID NO: 317863
uaagauaaggccugagagu

SEQ ID NO: 394860 - RNA, 19 nt, Artificial Sequence
  Description of Artificial Sequence: Synthetic oligonucleotide
  Antisense Strand to SEQ ID NO: 394859
acucucaggccuuaucuua

SEQ ID NO: 394861 - RNA, 19 nt, Artificial Sequence
  Description of Artificial Sequence: Synthetic oligonucleotide
  Sense Strand Starting at position 970 of SEQ ID NO: 317896
aagcaaguaggucauugau

SEQ ID NO: 394862 - RNA, 19 nt, Artificial Sequence
  Description of Artificial Sequence: Synthetic oligonucleotide
  Antisense Strand to SEQ ID NO: 394861
aucaaugaccuacuugcuu

SEQ ID NO: 394863 - RNA, 19 nt, Artificial Sequence
  Description of Artificial Sequence: Synthetic oligonucleotide
  Sense Strand Starting at position 970 of SEQ ID NO: 317898
gcaaguaggucauugauac

SEQ ID NO: 394864 - RNA, 19 nt, Artificial Sequence
  Description of Artificial Sequence: Synthetic oligonucleotide
  Antisense Strand to SEQ ID NO: 394863
guaucaaugaccuacuugc

SEQ ID NO: 394865 - RNA, 19 nt, Artificial Sequence
  Description of Artificial Sequence: Synthetic oligonucleotide
  Sense Strand Starting at position 970 of SEQ ID NO: 317899
caaguaggucauugauaca

SEQ ID NO: 394866 - RNA, 19 nt, Artificial Sequence
  Description of Artificial Sequence: Synthetic oligonucleotide
  Antisense Strand to SEQ ID NO: 394865
uguaucaaugaccuacuug

SEQ ID NO: 394867 - RNA, 19 nt, Artificial Sequence
  Description of Artificial Sequence: Synthetic oligonucleotide
  Sense Strand Starting at position 970 of SEQ ID NO: 317917
auugauaaccacugugcga

SEQ ID NO: 394868 - RNA, 19 nt, Artificial Sequence
  Description of Artificial Sequence: Synthetic oligonucleotide
  Antisense Strand to SEQ ID NO: 394867
ucgcacagugguuaucaau

SEQ ID NO: 394869 - RNA, 19 nt, Artificial Sequence
  Description of Artificial Sequence: Synthetic oligonucleotide
  Sense Strand Starting at position 970 of SEQ ID NO: 318350
ggcuaagauagccauuguu

SEQ ID NO: 394870 - RNA, 19 nt, Artificial Sequence
  Description of Artificial Sequence: Synthetic oligonucleotide
  Antisense Strand to SEQ ID NO: 394869
aacaauggcuaucuuagcc

SEQ ID NO: 394871 - RNA, 19 nt, Artificial Sequence
  Description of Artificial Sequence: Synthetic oligonucleotide
  Sense Strand Starting at position 970 of SEQ ID NO: 318564
gcaugugccaguucugcau

SEQ ID NO: 394872 - RNA, 19 nt, Artificial Sequence
  Description of Artificial Sequence: Synthetic oligonucleotide
  Antisense Strand to SEQ ID NO: 394871
augcagaacuggcacaugc

SEQ ID NO: 394873 - RNA, 19 nt, Artificial Sequence
  Description of Artificial Sequence: Synthetic oligonucleotide
  Sense Strand Starting at position 970 of SEQ ID NO: 318614
gugccaucucuggaaagau

SEQ ID NO: 394874 - RNA, 19 nt, Artificial Sequence
  Description of Artificial Sequence: Synthetic oligonucleotide
  Antisense Strand to SEQ ID NO: 394873
aucuuuccagagauggcac

SEQ ID NO: 394875 - RNA, 19 nt, Artificial Sequence
  Description of Artificial Sequence: Synthetic oligonucleotide
  Sense Strand Starting at position 970 of SEQ ID NO: 318626
gaaagauccugucuuacug

SEQ ID NO: 394876 - RNA, 19 nt, Artificial Sequence
  Description of Artificial Sequence: Synthetic oligonucleotide
  Antisense Strand to SEQ ID NO: 394875
caguaagacaggaucuuuc

SEQ ID NO: 394877 - RNA, 19 nt, Artificial Sequence
  Description of Artificial Sequence: Synthetic oligonucleotide
  Sense Strand Starting at position 970 of SEQ ID NO: 318817
aagggaaugugugcuauau

SEQ ID NO: 394878 - RNA, 19 nt, Artificial Sequence
  Description of Artificial Sequence: Synthetic oligonucleotide
  Antisense Strand to SEQ ID NO: 394877
auauagcacacauucccuu

SEQ ID NO: 394879 - RNA, 19 nt, Artificial Sequence
  Description of Artificial Sequence: Synthetic oligonucleotide
  Sense Strand Starting at position 970 of SEQ ID NO: 318821
gaaugugugcuauauugga

SEQ ID NO: 394880 - RNA, 19 nt, Artificial Sequence
  Description of Artificial Sequence: Synthetic oligonucleotide
  Antisense Strand to SEQ ID NO: 394879
uccaauauagcacacauuc

SEQ ID NO: 394881 - RNA, 19 nt, Artificial Sequence
  Description of Artificial Sequence: Synthetic oligonucleotide
  Sense Strand Starting at position 970 of SEQ ID NO: 318825
gugugcuauauuggaugaa

SEQ ID NO: 394882 - RNA, 19 nt, Artificial Sequence
  Description of Artificial Sequence: Synthetic oligonucleotide
  Antisense Strand to SEQ ID NO: 394881
uucauccaauauagcacac

SEQ ID NO: 394883 - RNA, 19 nt, Artificial Sequence
  Description of Artificial Sequence: Synthetic oligonucleotide
  Sense Strand Starting at position 970 of SEQ ID NO: 318828
ugcuauauuggaugaaguu

SEQ ID NO: 394884 - RNA, 19 nt, Artificial Sequence
  Description of Artificial Sequence: Synthetic oligonucleotide
  Antisense Strand to SEQ ID NO: 394883
aacuucauccaauauagca

SEQ ID NO: 394885 - RNA, 19 nt, Artificial Sequence
  Description of Artificial Sequence: Synthetic oligonucleotide
  Sense Strand Starting at position 970 of SEQ ID NO: 318829
gcuauauuggaugaaguua

SEQ ID NO: 394886 - RNA, 19 nt, Artificial Sequence
  Description of Artificial Sequence: Synthetic oligonucleotide
  Antisense Strand to SEQ ID NO: 394885
uaacuucauccaauauagc

SEQ ID NO: 394887 - RNA, 19 nt, Artificial Sequence
  Description of Artificial Sequence: Synthetic oligonucleotide
  Sense Strand Starting at position 970 of SEQ ID NO: 318843
aguuacaugccagggagaa

SEQ ID NO: 394888 - RNA, 19 nt, Artificial Sequence
  Description of Artificial Sequence: Synthetic oligonucleotide
  Antisense Strand to SEQ ID NO: 394887
uucucccuggcauguaacu

SEQ ID NO: 394889 - RNA, 19 nt, Artificial Sequence
  Description of Artificial Sequence: Synthetic oligonucleotide
  Sense Strand Starting at position 970 of SEQ ID NO: 318844
guuacaugccagggagaaa

SEQ ID NO: 394890 - RNA, 19 nt, Artificial Sequence
  Description of Artificial Sequence: Synthetic oligonucleotide
  Antisense Strand to SEQ ID NO: 394889
uuucucccuggcauguaac

SEQ ID NO: 394891 - RNA, 19 nt, Artificial Sequence
  Description of Artificial Sequence: Synthetic oligonucleotide
  Sense Strand Starting at position 970 of SEQ ID NO: 318886
ggaguugggaggugguuaa

SEQ ID NO: 394892 - RNA, 19 nt, Artificial Sequence
  Description of Artificial Sequence: Synthetic oligonucleotide
  Antisense Strand to SEQ ID NO: 394891
uuaaccaccucccaacucc

SEQ ID NO: 394893 - RNA, 19 nt, Artificial Sequence
  Description of Artificial Sequence: Synthetic oligonucleotide
  Sense Strand Starting at position 970 of SEQ ID NO: 318890
uugggaggugguuaaucuu

SEQ ID NO: 394894 - RNA, 19 nt, Artificial Sequence
  Description of Artificial Sequence: Synthetic oligonucleotide
  Antisense Strand to SEQ ID NO: 394893
aagauuaaccaccucccaa

SEQ ID NO: 394895 - RNA, 19 nt, Artificial Sequence
  Description of Artificial Sequence: Synthetic oligonucleotide
  Sense Strand Starting at position 970 of SEQ ID NO: 318893
ggaggugguuaaucuuaaa

SEQ ID NO: 394896 - RNA, 19 nt, Artificial Sequence
  Description of Artificial Sequence: Synthetic oligonucleotide
  Antisense Strand to SEQ ID NO: 394895
uuuaagauuaaccaccucc

SEQ ID NO: 394897 - RNA, 19 nt, Artificial Sequence
  Description of Artificial Sequence: Synthetic oligonucleotide
  Sense Strand Starting at position 970 of SEQ ID NO: 318928
ggccucucucgggagguaa

SEQ ID NO: 394898 - RNA, 19 nt, Artificial Sequence
  Description of Artificial Sequence: Synthetic oligonucleotide
  Antisense Strand to SEQ ID NO: 394897
uuaccucccgagagaggcc

SEQ ID NO: 394899 - RNA, 19 nt, Artificial Sequence
  Description of Artificial Sequence: Synthetic oligonucleotide
  Sense Strand Starting at position 970 of SEQ ID NO: 318930
ccucucucgggagguaaua

SEQ ID NO: 394900 - RNA, 19 nt, Artificial Sequence
  Description of Artificial Sequence: Synthetic oligonucleotide
  Antisense Strand to SEQ ID NO: 394899
uauuaccucccgagagagg

SEQ ID NO: 394901 - RNA, 19 nt, Artificial Sequence
  Description of Artificial Sequence: Synthetic oligonucleotide
  Sense Strand Starting at position 970 of SEQ ID NO: 318932
ucucucgggagguaauauu

SEQ ID NO: 394902 - RNA, 19 nt, Artificial Sequence
  Description of Artificial Sequence: Synthetic oligonucleotide
  Antisense Strand to SEQ ID NO: 394901
aauauuaccucccgagaga

SEQ ID NO: 394903 - RNA, 19 nt, Artificial Sequence
  Description of Artificial Sequence: Synthetic oligonucleotide
  Sense Strand Starting at position 970 of SEQ ID NO: 318974
gagccaaguggacauguau

SEQ ID NO: 394904 - RNA, 19 nt, Artificial Sequence
  Description of Artificial Sequence: Synthetic oligonucleotide
  Antisense Strand to SEQ ID NO: 394903
auacauguccacuuggcuc

SEQ ID NO: 394905 - RNA, 19 nt, Artificial Sequence
  Description of Artificial Sequence: Synthetic oligonucleotide
  Sense Strand Starting at position 971 of SEQ ID NO: 315360
acaacuaaguccuucugga

SEQ ID NO: 394906 - RNA, 19 nt, Artificial Sequence
  Description of Artificial Sequence: Synthetic oligonucleotide
  Antisense Strand to SEQ ID NO: 394905
uccagaaggacuuaguugu

SEQ ID NO: 394907 - RNA, 19 nt, Artificial Sequence
  Description of Artificial Sequence: Synthetic oligonucleotide
  Sense Strand Starting at position 971 of SEQ ID NO: 315396
ccaagacauguguauaugu

SEQ ID NO: 394908 - RNA, 19 nt, Artificial Sequence
  Description of Artificial Sequence: Synthetic oligonucleotide
  Antisense Strand to SEQ ID NO: 394907
acauauacacaugucuugg

SEQ ID NO: 394909 - RNA, 19 nt, Artificial Sequence
  Description of Artificial Sequence: Synthetic oligonucleotide
  Sense Strand Starting at position 971 of SEQ ID NO: 315410
uauguaguuccaugguaaa

SEQ ID NO: 394910 - RNA, 19 nt, Artificial Sequence
  Description of Artificial Sequence: Synthetic oligonucleotide
  Antisense Strand to SEQ ID NO: 394909
uuuaccauggaacuacaua

SEQ ID NO: 394911 - RNA, 19 nt, Artificial Sequence
  Description of Artificial Sequence: Synthetic oligonucleotide
  Sense Strand Starting at position 971 of SEQ ID NO: 315443
accagugagucuccaauag

SEQ ID NO: 394912 - RNA, 19 nt, Artificial Sequence
  Description of Artificial Sequence: Synthetic oligonucleotide
  Antisense Strand to SEQ ID NO: 394911
cuauuggagacucacuggu

SEQ ID NO: 394913 - RNA, 19 nt, Artificial Sequence
  Description of Artificial Sequence: Synthetic oligonucleotide
  Sense Strand Starting at position 971 of SEQ ID NO: 315482
gcacuaagaaagugguaaa

SEQ ID NO: 394914 - RNA, 19 nt, Artificial Sequence
  Description of Artificial Sequence: Synthetic oligonucleotide
  Antisense Strand to SEQ ID NO: 394913
uuuaccacuuucuuagugc

SEQ ID NO: 394915 - RNA, 19 nt, Artificial Sequence
  Description of Artificial Sequence: Synthetic oligonucleotide
  Sense Strand Starting at position 971 of SEQ ID NO: 315522
ggagaaacuuuggcccauu

SEQ ID NO: 394916 - RNA, 19 nt, Artificial Sequence
  Description of Artificial Sequence: Synthetic oligonucleotide
  Antisense Strand to SEQ ID NO: 394915
aaugggccaaaguuucucc

SEQ ID NO: 394917 - RNA, 19 nt, Artificial Sequence
  Description of Artificial Sequence: Synthetic oligonucleotide
  Sense Strand Starting at position 971 of SEQ ID NO: 315861
gggagaaugugagcucaac

SEQ ID NO: 394918 - RNA, 19 nt, Artificial Sequence
  Description of Artificial Sequence: Synthetic oligonucleotide
  Antisense Strand to SEQ ID NO: 394917
guugagcucacauucuccc

SEQ ID NO: 394919 - RNA, 19 nt, Artificial Sequence
  Description of Artificial Sequence: Synthetic oligonucleotide
  Sense Strand Starting at position 971 of SEQ ID NO: 315908
uuacauccugcccaggaaa

SEQ ID NO: 394920 - RNA, 19 nt, Artificial Sequence
  Description of Artificial Sequence: Synthetic oligonucleotide
  Antisense Strand to SEQ ID NO: 394919
uuuccugggcaggauguaa

SEQ ID NO: 394921 - RNA, 19 nt, Artificial Sequence
  Description of Artificial Sequence: Synthetic oligonucleotide
  Sense Strand Starting at position 971 of SEQ ID NO: 315921
aggaaagaauuguuagcca

SEQ ID NO: 394922 - RNA, 19 nt, Artificial Sequence
  Description of Artificial Sequence: Synthetic oligonucleotide
  Antisense Strand to SEQ ID NO: 394921
uggcuaacaauucuuuccu

SEQ ID NO: 394923 - RNA, 19 nt, Artificial Sequence
  Description of Artificial Sequence: Synthetic oligonucleotide
  Sense Strand Starting at position 971 of SEQ ID NO: 315981
cucauaauugaggguuauu

SEQ ID NO: 394924 - RNA, 19 nt, Artificial Sequence
  Description of Artificial Sequence: Synthetic oligonucleotide
  Antisense Strand to SEQ ID NO: 394923
aauaacccucaauuaugag

SEQ ID NO: 394925 - RNA, 19 nt, Artificial Sequence
  Description of Artificial Sequence: Synthetic oligonucleotide
  Sense Strand Starting at position 971 of SEQ ID NO: 315990
gaggguuauuuauaagaaa

SEQ ID NO: 394926 - RNA, 19 nt, Artificial Sequence
  Description of Artificial Sequence: Synthetic oligonucleotide
  Antisense Strand to SEQ ID NO: 394925
uuucuuauaaauaacccuc

SEQ ID NO: 394927 - RNA, 19 nt, Artificial Sequence
  Description of Artificial Sequence: Synthetic oligonucleotide
  Sense Strand Starting at position 971 of SEQ ID NO: 316011
ugaagcauguuuccaaucu

SEQ ID NO: 394928 - RNA, 19 nt, Artificial Sequence
  Description of Artificial Sequence: Synthetic oligonucleotide
  Antisense Strand to SEQ ID NO: 394927
agauuggaaacaugcuuca

SEQ ID NO: 394929 - RNA, 19 nt, Artificial Sequence
  Description of Artificial Sequence: Synthetic oligonucleotide
  Sense Strand Starting at position 971 of SEQ ID NO: 316083
uguuauugaucucucuuac

SEQ ID NO: 394930 - RNA, 19 nt, Artificial Sequence
  Description of Artificial Sequence: Synthetic oligonucleotide
  Antisense Strand to SEQ ID NO: 394929
guaagagagaucaauaaca

SEQ ID NO: 394931 - RNA, 19 nt, Artificial Sequence
  Description of Artificial Sequence: Synthetic oligonucleotide
  Sense Strand Starting at position 971 of SEQ ID NO: 316214
auaaucuguccacaguaau

SEQ ID NO: 394932 - RNA, 19 nt, Artificial Sequence
  Description of Artificial Sequence: Synthetic oligonucleotide
  Antisense Strand to SEQ ID NO: 394931
auuacuguggacagauuau

SEQ ID NO: 394933 - RNA, 19 nt, Artificial Sequence
  Description of Artificial Sequence: Synthetic oligonucleotide
  Sense Strand Starting at position 971 of SEQ ID NO: 316224
cacaguaaugcucggacaa

SEQ ID NO: 394934 - RNA, 19 nt, Artificial Sequence
  Description of Artificial Sequence: Synthetic oligonucleotide
  Antisense Strand to SEQ ID NO: 394933
uuguccgagcauuacugug

SEQ ID NO: 394935 - RNA, 19 nt, Artificial Sequence
  Description of Artificial Sequence: Synthetic oligonucleotide
  Sense Strand Starting at position 971 of SEQ ID NO: 316225
acaguaaugcucggacaac

SEQ ID NO: 394936 - RNA, 19 nt, Artificial Sequence
  Description of Artificial Sequence: Synthetic oligonucleotide
  Antisense Strand to SEQ ID NO: 394935
guuguccgagcauuacugu

SEQ ID NO: 394937 - RNA, 19 nt, Artificial Sequence
  Description of Artificial Sequence: Synthetic oligonucleotide
  Sense Strand Starting at position 971 of SEQ ID NO: 316234
cucggacaacucugagcaa

SEQ ID NO: 394938 - RNA, 19 nt, Artificial Sequence
  Description of Artificial Sequence: Synthetic oligonucleotide
  Antisense Strand to SEQ ID NO: 394937
uugcucagaguuguccgag

SEQ ID NO: 394939 - RNA, 19 nt, Artificial Sequence
  Description of Artificial Sequence: Synthetic oligonucleotide
  Sense Strand Starting at position 971 of SEQ ID NO: 316276
aggcucgcucacuaaagua

SEQ ID NO: 394940 - RNA, 19 nt, Artificial Sequence
  Description of Artificial Sequence: Synthetic oligonucleotide
  Antisense Strand to SEQ ID NO: 394939
uacuuuagugagcgagccu

SEQ ID NO: 394941 - RNA, 19 nt, Artificial Sequence
  Description of Artificial Sequence: Synthetic oligonucleotide
  Sense Strand Starting at position 971 of SEQ ID NO: 316294
agcaauuacacgcaugaga

SEQ ID NO: 394942 - RNA, 19 nt, Artificial Sequence
  Description of Artificial Sequence: Synthetic oligonucleotide
  Antisense Strand to SEQ ID NO: 394941
ucucaugcguguaauugcu

SEQ ID NO: 394943 - RNA, 19 nt, Artificial Sequence
  Description of Artificial Sequence: Synthetic oligonucleotide
  Sense Strand Starting at position 971 of SEQ ID NO: 316296
caauuacacgcaugagaag

SEQ ID NO: 394944 - RNA, 19 nt, Artificial Sequence
  Description of Artificial Sequence: Synthetic oligonucleotide
  Antisense Strand to SEQ ID NO: 394943
cuucucaugcguguaauug

SEQ ID NO: 394945 - RNA, 19 nt, Artificial Sequence
  Description of Artificial Sequence: Synthetic oligonucleotide
  Sense Strand Starting at position 971 of SEQ ID NO: 317560
cuaaauccucccgggaauu

SEQ ID NO: 394946 - RNA, 19 nt, Artificial Sequence
  Description of Artificial Sequence: Synthetic oligonucleotide
  Antisense Strand to SEQ ID NO: 394945
aauucccgggaggauuuag

SEQ ID NO: 394947 - RNA, 19 nt, Artificial Sequence
  Description of Artificial Sequence: Synthetic oligonucleotide
  Sense Strand Starting at position 971 of SEQ ID NO: 317646
agggaaacucccuguggga

SEQ ID NO: 394948 - RNA, 19 nt, Artificial Sequence
  Description of Artificial Sequence: Synthetic oligonucleotide
  Antisense Strand to SEQ ID NO: 394947
ucccacagggaguuucccu

SEQ ID NO: 394949 - RNA, 19 nt, Artificial Sequence
  Description of Artificial Sequence: Synthetic oligonucleotide
  Sense Strand Starting at position 971 of SEQ ID NO: 317741
aggcucuuccaguauuauc

SEQ ID NO: 394950 - RNA, 19 nt, Artificial Sequence
  Description of Artificial Sequence: Synthetic oligonucleotide
  Antisense Strand to SEQ ID NO: 394949
gauaauacuggaagagccu

SEQ ID NO: 394951 - RNA, 19 nt, Artificial Sequence
  Description of Artificial Sequence: Synthetic oligonucleotide
  Sense Strand Starting at position 971 of SEQ ID NO: 317812
aggaccaauucucugcaaa

SEQ ID NO: 394952 - RNA, 19 nt, Artificial Sequence
  Description of Artificial Sequence: Synthetic oligonucleotide
  Antisense Strand to SEQ ID NO: 394951
uuugcagagaauugguccu

SEQ ID NO: 394953 - RNA, 19 nt, Artificial Sequence
  Description of Artificial Sequence: Synthetic oligonucleotide
  Sense Strand Starting at position 971 of SEQ ID NO: 318028
auguguaaaucuuugacua

SEQ ID NO: 394954 - RNA, 19 nt, Artificial Sequence
  Description of Artificial Sequence: Synthetic oligonucleotide
  Antisense Strand to SEQ ID NO: 394953
uagucaaagauuuacacau

SEQ ID NO: 394955 - RNA, 19 nt, Artificial Sequence
  Description of Artificial Sequence: Synthetic oligonucleotide
  Sense Strand Starting at position 971 of SEQ ID NO: 318029
uguguaaaucuuugacuaa

SEQ ID NO: 394956 - RNA, 19 nt, Artificial Sequence
  Description of Artificial Sequence: Synthetic oligonucleotide
  Antisense Strand to SEQ ID NO: 394955
uuagucaaagauuuacaca

SEQ ID NO: 394957 - RNA, 19 nt, Artificial Sequence
  Description of Artificial Sequence: Synthetic oligonucleotide
  Sense Strand Starting at position 971 of SEQ ID NO: 318032
guaaaucuuugacuaauug

SEQ ID NO: 394958 - RNA, 19 nt, Artificial Sequence
  Description of Artificial Sequence: Synthetic oligonucleotide
  Antisense Strand to SEQ ID NO: 394957
caauuagucaaagauuuac

SEQ ID NO: 394959 - RNA, 19 nt, Artificial Sequence
  Description of Artificial Sequence: Synthetic oligonucleotide
  Sense Strand Starting at position 971 of SEQ ID NO: 318072
ucuuuacagugaguaaacu

SEQ ID NO: 394960 - RNA, 19 nt, Artificial Sequence
  Description of Artificial Sequence: Synthetic oligonucleotide
  Antisense Strand to SEQ ID NO: 394959
aguuuacucacuguaaaga

SEQ ID NO: 394961 - RNA, 19 nt, Artificial Sequence
  Description of Artificial Sequence: Synthetic oligonucleotide
  Sense Strand Starting at position 971 of SEQ ID NO: 318080
gugaguaaacugcaugaau

SEQ ID NO: 394962 - RNA, 19 nt, Artificial Sequence
  Description of Artificial Sequence: Synthetic oligonucleotide
  Antisense Strand to SEQ ID NO: 394961
auucaugcaguuuacucac

SEQ ID NO: 394963 - RNA, 19 nt, Artificial Sequence
  Description of Artificial Sequence: Synthetic oligonucleotide
  Sense Strand Starting at position 971 of SEQ ID NO: 318094
ugaauaauacccugguaug

SEQ ID NO: 394964 - RNA, 19 nt, Artificial Sequence
  Description of Artificial Sequence: Synthetic oligonucleotide
  Antisense Strand to SEQ ID NO: 394963
cauaccaggguauuauuca

SEQ ID NO: 394965 - RNA, 19 nt, Artificial Sequence
  Description of Artificial Sequence: Synthetic oligonucleotide
  Sense Strand Starting at position 971 of SEQ ID NO: 318095
gaauaauacccugguaugu

SEQ ID NO: 394966 - RNA, 19 nt, Artificial Sequence
  Description of Artificial Sequence: Synthetic oligonucleotide
  Antisense Strand to SEQ ID NO: 394965
acauaccaggguauuauuc

SEQ ID NO: 394967 - RNA, 19 nt, Artificial Sequence
  Description of Artificial Sequence: Synthetic oligonucleotide
  Sense Strand Starting at position 971 of SEQ ID NO: 318168
ggaagaaacugugacuuaa

SEQ ID NO: 394968 - RNA, 19 nt, Artificial Sequence
  Description of Artificial Sequence: Synthetic oligonucleotide
  Antisense Strand to SEQ ID NO: 394967
uuaagucacaguuucuucc

SEQ ID NO: 394969 - RNA, 19 nt, Artificial Sequence
  Description of Artificial Sequence: Synthetic oligonucleotide
  Sense Strand Starting at position 971 of SEQ ID NO: 318180
gacuuaaucgggcagggua

SEQ ID NO: 394970 - RNA, 19 nt, Artificial Sequence
  Description of Artificial Sequence: Synthetic oligonucleotide
  Antisense Strand to SEQ ID NO: 394969
uacccugcccgauuaaguc

SEQ ID NO: 394971 - RNA, 19 nt, Artificial Sequence
  Description of Artificial Sequence: Synthetic oligonucleotide
  Sense Strand Starting at position 971 of SEQ ID NO: 318265
uagugauggccucagaccu

SEQ ID NO: 394972 - RNA, 19 nt, Artificial Sequence
  Description of Artificial Sequence: Synthetic oligonucleotide
  Antisense Strand to SEQ ID NO: 394971
aggucugaggccaucacua

SEQ ID NO: 394973 - RNA, 19 nt, Artificial Sequence
  Description of Artificial Sequence: Synthetic oligonucleotide
  Sense Strand Starting at position 971 of SEQ ID NO: 318434
cccagagaauggucagagu

SEQ ID NO: 394974 - RNA, 19 nt, Artificial Sequence
  Description of Artificial Sequence: Synthetic oligonucleotide
  Antisense Strand to SEQ ID NO: 394973
acucugaccauucucuggg

SEQ ID NO: 394975 - RNA, 19 nt, Artificial Sequence
  Description of Artificial Sequence: Synthetic oligonucleotide
  Sense Strand Starting at position 971 of SEQ ID NO: 318516
ccaugugaucuuuacacuu

SEQ ID NO: 394976 - RNA, 19 nt, Artificial Sequence
  Description of Artificial Sequence: Synthetic oligonucleotide
  Antisense Strand to SEQ ID NO: 394975
aaguguaaagaucacaugg

SEQ ID NO: 394977 - RNA, 19 nt, Artificial Sequence
  Description of Artificial Sequence: Synthetic oligonucleotide
  Sense Strand Starting at position 971 of SEQ ID NO: 318524
ucuuuacacuuguuggaua

SEQ ID NO: 394978 - RNA, 19 nt, Artificial Sequence
  Description of Artificial Sequence: Synthetic oligonucleotide
  Antisense Strand to SEQ ID NO: 394977
uauccaacaaguguaaaga

SEQ ID NO: 394979 - RNA, 19 nt, Artificial Sequence
  Description of Artificial Sequence: Synthetic oligonucleotide
  Sense Strand Starting at position 971 of SEQ ID NO: 318526
uuuacacuuguuggauaaa

SEQ ID NO: 394980 - RNA, 19 nt, Artificial Sequence
  Description of Artificial Sequence: Synthetic oligonucleotide
  Antisense Strand to SEQ ID NO: 394979
uuuauccaacaaguguaaa

SEQ ID NO: 394981 - RNA, 19 nt, Artificial Sequence
  Description of Artificial Sequence: Synthetic oligonucleotide
  Sense Strand Starting at position 971 of SEQ ID NO: 318650
uuacucaggccagaaacuu

SEQ ID NO: 394982 - RNA, 19 nt, Artificial Sequence
  Description of Artificial Sequence: Synthetic oligonucleotide
  Antisense Strand to SEQ ID NO: 394981
aaguuucuggccugaguaa

SEQ ID NO: 394983 - RNA, 19 nt, Artificial Sequence
  Description of Artificial Sequence: Synthetic oligonucleotide
  Sense Strand Starting at position 971 of SEQ ID NO: 318792
agaguaucaacguguuaca

SEQ ID NO: 394984 - RNA, 19 nt, Artificial Sequence
  Description of Artificial Sequence: Synthetic oligonucleotide
  Antisense Strand to SEQ ID NO: 394983
uguaacacguugauacucu

SEQ ID NO: 394985 - RNA, 19 nt, Artificial Sequence
  Description of Artificial Sequence: Synthetic oligonucleotide
  Sense Strand Starting at position 972 of SEQ ID NO: 315245
uuugcagauucugacucaa

SEQ ID NO: 394986 - RNA, 19 nt, Artificial Sequence
  Description of Artificial Sequence: Synthetic oligonucleotide
  Antisense Strand to SEQ ID NO: 394985
uugagucagaaucugcaaa

SEQ ID NO: 394987 - RNA, 19 nt, Artificial Sequence
  Description of Artificial Sequence: Synthetic oligonucleotide
  Sense Strand Starting at position 972 of SEQ ID NO: 315247
ugcagauucugacucaacu

SEQ ID NO: 394988 - RNA, 19 nt, Artificial Sequence
  Description of Artificial Sequence: Synthetic oligonucleotide
  Antisense Strand to SEQ ID NO: 394987
aguugagucagaaucugca

SEQ ID NO: 394989 - RNA, 19 nt, Artificial Sequence
  Description of Artificial Sequence: Synthetic oligonucleotide
  Sense Strand Starting at position 972 of SEQ ID NO: 315265
uuccauaucucacgaugaa

SEQ ID NO: 394990 - RNA, 19 nt, Artificial Sequence
  Description of Artificial Sequence: Synthetic oligonucleotide
  Antisense Strand to SEQ ID NO: 394989
uucaucgugagauauggaa

SEQ ID NO: 394991 - RNA, 19 nt, Artificial Sequence
  Description of Artificial Sequence: Synthetic oligonucleotide
  Sense Strand Starting at position 972 of SEQ ID NO: 315278
gaugaagucugggcucagu

SEQ ID NO: 394992 - RNA, 19 nt, Artificial Sequence
  Description of Artificial Sequence: Synthetic oligonucleotide
  Antisense Strand to SEQ ID NO: 394991
acugagcccagacuucauc

SEQ ID NO: 394993 - RNA, 19 nt, Artificial Sequence
  Description of Artificial Sequence: Synthetic oligonucleotide
  Sense Strand Starting at position 972 of SEQ ID NO: 315288
gggcucaguccugaucacu

SEQ ID NO: 394994 - RNA, 19 nt, Artificial Sequence
  Description of Artificial Sequence: Synthetic oligonucleotide
  Antisense Strand to SEQ ID NO: 394993
agugaucaggacugagccc

SEQ ID NO: 394995 - RNA, 19 nt, Artificial Sequence
  Description of Artificial Sequence: Synthetic oligonucleotide
  Sense Strand Starting at position 972 of SEQ ID NO: 315547
uuugauuucucccuugucu

SEQ ID NO: 394996 - RNA, 19 nt, Artificial Sequence
  Description of Artificial Sequence: Synthetic oligonucleotide
  Antisense Strand to SEQ ID NO: 394995
agacaagggagaaaucaaa

SEQ ID NO: 394997 - RNA, 19 nt, Artificial Sequence
  Description of Artificial Sequence: Synthetic oligonucleotide
  Sense Strand Starting at position 972 of SEQ ID NO: 315549
ugauuucucccuugucucu

SEQ ID NO: 394998 - RNA, 19 nt, Artificial Sequence
  Description of Artificial Sequence: Synthetic oligonucleotide
  Antisense Strand to SEQ ID NO: 394997
agagacaagggagaaauca

SEQ ID NO: 394999 - RNA, 19 nt, Artificial Sequence
  Description of Artificial Sequence: Synthetic oligonucleotide
  Sense Strand Starting at position 972 of SEQ ID NO: 315619
uuauuucucuuugagaacg

SEQ ID NO: 395000 - RNA, 19 nt, Artificial Sequence
  Description of Artificial Sequence: Synthetic oligonucleotide
  Antisense Strand to SEQ ID NO: 394999
cguucucaaagagaaauaa

SEQ ID NO: 395001 - RNA, 19 nt, Artificial Sequence
  Description of Artificial Sequence: Synthetic oligonucleotide
  Sense Strand Starting at position 972 of SEQ ID NO: 315627
cuuugagaacgcugcaaug

SEQ ID NO: 395002 - RNA, 19 nt, Artificial Sequence
  Description of Artificial Sequence: Synthetic oligonucleotide
  Antisense Strand to SEQ ID NO: 395001
cauugcagcguucucaaag

SEQ ID NO: 395003 - RNA, 19 nt, Artificial Sequence
  Description of Artificial Sequence: Synthetic oligonucleotide
  Sense Strand Starting at position 972 of SEQ ID NO: 316014
cugaauuugugauguccuc

SEQ ID NO: 395004 - RNA, 19 nt, Artificial Sequence
  Description of Artificial Sequence: Synthetic oligonucleotide
  Antisense Strand to SEQ ID NO: 395003
gaggacaucacaaauucag

SEQ ID NO: 395005 - RNA, 19 nt, Artificial Sequence
  Description of Artificial Sequence: Synthetic oligonucleotide
  Sense Strand Starting at position 972 of SEQ ID NO: 316029
ccucuuguaccggaugaga

SEQ ID NO: 395006 - RNA, 19 nt, Artificial Sequence
  Description of Artificial Sequence: Synthetic oligonucleotide
  Antisense Strand to SEQ ID NO: 395005
ucucauccgguacaagagg

SEQ ID NO: 395007 - RNA, 19 nt, Artificial Sequence
  Description of Artificial Sequence: Synthetic oligonucleotide
  Sense Strand Starting at position 972 of SEQ ID NO: 316109
agcagugaugcucaaccca

SEQ ID NO: 395008 - RNA, 19 nt, Artificial Sequence
  Description of Artificial Sequence: Synthetic oligonucleotide
  Antisense Strand to SEQ ID NO: 395007
uggguugagcaucacugcu

SEQ ID NO: 395009 - RNA, 19 nt, Artificial Sequence
  Description of Artificial Sequence: Synthetic oligonucleotide
  Sense Strand Starting at position 972 of SEQ ID NO: 316382
aaggguguuugcuaaauaa

SEQ ID NO: 395010 - RNA, 19 nt, Artificial Sequence
  Description of Artificial Sequence: Synthetic oligonucleotide
  Antisense Strand to SEQ ID NO: 395009
uuauuuagcaaacacccuu

SEQ ID NO: 395011 - RNA, 19 nt, Artificial Sequence
  Description of Artificial Sequence: Synthetic oligonucleotide
  Sense Strand Starting at position 972 of SEQ ID NO: 316508
ggucaugaguguuugagaa

SEQ ID NO: 395012 - RNA, 19 nt, Artificial Sequence
  Description of Artificial Sequence: Synthetic oligonucleotide
  Antisense Strand to SEQ ID NO: 395011
uucucaaacacucaugacc

SEQ ID NO: 395013 - RNA, 19 nt, Artificial Sequence
  Description of Artificial Sequence: Synthetic oligonucleotide
  Sense Strand Starting at position 972 of SEQ ID NO: 316510
ucaugaguguuugagaaga

SEQ ID NO: 395014 - RNA, 19 nt, Artificial Sequence
  Description of Artificial Sequence: Synthetic oligonucleotide
  Antisense Strand to SEQ ID NO: 395013
ucuucucaaacacucauga

SEQ ID NO: 395015 - RNA, 19 nt, Artificial Sequence
  Description of Artificial Sequence: Synthetic oligonucleotide
  Sense Strand Starting at position 972 of SEQ ID NO: 316515
aguguuugagaagaggcaa

SEQ ID NO: 395016 - RNA, 19 nt, Artificial Sequence
  Description of Artificial Sequence: Synthetic oligonucleotide
  Antisense Strand to SEQ ID NO: 395015
uugccucuucucaaacacu

SEQ ID NO: 395017 - RNA, 19 nt, Artificial Sequence
  Description of Artificial Sequence: Synthetic oligonucleotide
  Sense Strand Starting at position 972 of SEQ ID NO: 316527
gaggcaagccugggaagau

SEQ ID NO: 395018 - RNA, 19 nt, Artificial Sequence
  Description of Artificial Sequence: Synthetic oligonucleotide
  Antisense Strand to SEQ ID NO: 395017
aucuucccaggcuugccuc

SEQ ID NO: 395019 - RNA, 19 nt, Artificial Sequence
  Description of Artificial Sequence: Synthetic oligonucleotide
  Sense Strand Starting at position 972 of SEQ ID NO: 316652
gcucaucuguggcccagau

SEQ ID NO: 395020 - RNA, 19 nt, Artificial Sequence
  Description of Artificial Sequence: Synthetic oligonucleotide
  Antisense Strand to SEQ ID NO: 395019
aucugggccacagaugagc

SEQ ID NO: 395021 - RNA, 19 nt, Artificial Sequence
  Description of Artificial Sequence: Synthetic oligonucleotide
  Sense Strand Starting at position 972 of SEQ ID NO: 317395
cgcggagauacccguguuu

SEQ ID NO: 395022 - RNA, 19 nt, Artificial Sequence
  Description of Artificial Sequence: Synthetic oligonucleotide
  Antisense Strand to SEQ ID NO: 395021
aaacacggguaucuccgcg

SEQ ID NO: 395023 - RNA, 19 nt, Artificial Sequence
  Description of Artificial Sequence: Synthetic oligonucleotide
  Sense Strand Starting at position 972 of SEQ ID NO: 317397
cggagauacccguguuucu

SEQ ID NO: 395024 - RNA, 19 nt, Artificial Sequence
  Description of Artificial Sequence: Synthetic oligonucleotide
  Antisense Strand to SEQ ID NO: 395023
agaaacacggguaucuccg

SEQ ID NO: 395025 - RNA, 19 nt, Artificial Sequence
  Description of Artificial Sequence: Synthetic oligonucleotide
  Sense Strand Starting at position 972 of SEQ ID NO: 317421
ccagcuuuacugugcuaga

SEQ ID NO: 395026 - RNA, 19 nt, Artificial Sequence
  Description of Artificial Sequence: Synthetic oligonucleotide
  Antisense Strand to SEQ ID NO: 395025
ucuagcacaguaaagcugg

SEQ ID NO: 395027 - RNA, 19 nt, Artificial Sequence
  Description of Artificial Sequence: Synthetic oligonucleotide
  Sense Strand Starting at position 972 of SEQ ID NO: 317422
cagcuuuacugugcuagag

SEQ ID NO: 395028 - RNA, 19 nt, Artificial Sequence
  Description of Artificial Sequence: Synthetic oligonucleotide
  Antisense Strand to SEQ ID NO: 395027
cucuagcacaguaaagcug

SEQ ID NO: 395029 - RNA, 19 nt, Artificial Sequence
  Description of Artificial Sequence: Synthetic oligonucleotide
  Sense Strand Starting at position 972 of SEQ ID NO: 317521
gcaggaagucucgagccuu

SEQ ID NO: 395030 - RNA, 19 nt, Artificial Sequence
  Description of Artificial Sequence: Synthetic oligonucleotide
  Antisense Strand to SEQ ID NO: 395029
aaggcucgagacuuccugc

SEQ ID NO: 395031 - RNA, 19 nt, Artificial Sequence
  Description of Artificial Sequence: Synthetic oligonucleotide
  Sense Strand Starting at position 972 of SEQ ID NO: 317650
gggugcauucuggguggau

SEQ ID NO: 395032 - RNA, 19 nt, Artificial Sequence
  Description of Artificial Sequence: Synthetic oligonucleotide
  Antisense Strand to SEQ ID NO: 395031
auccacccagaaugcaccc

SEQ ID NO: 395033 - RNA, 19 nt, Artificial Sequence
  Description of Artificial Sequence: Synthetic oligonucleotide
  Sense Strand Starting at position 972 of SEQ ID NO: 317651
ggugcauucuggguggauu

SEQ ID NO: 395034 - RNA, 19 nt, Artificial Sequence
  Description of Artificial Sequence: Synthetic oligonucleotide
  Antisense Strand to SEQ ID NO: 395033
aauccacccagaaugcacc

SEQ ID NO: 395035 - RNA, 19 nt, Artificial Sequence
  Description of Artificial Sequence: Synthetic oligonucleotide
  Sense Strand Starting at position 972 of SEQ ID NO: 317662
gguggauucccuuggcaug

SEQ ID NO: 395036 - RNA, 19 nt, Artificial Sequence
  Description of Artificial Sequence: Synthetic oligonucleotide
  Antisense Strand to SEQ ID NO: 395035
caugccaagggaauccacc

SEQ ID NO: 395037 - RNA, 19 nt, Artificial Sequence
  Description of Artificial Sequence: Synthetic oligonucleotide
  Sense Strand Starting at position 972 of SEQ ID NO: 317797
ggguauugaggauggcaau

SEQ ID NO: 395038 - RNA, 19 nt, Artificial Sequence
  Description of Artificial Sequence: Synthetic oligonucleotide
  Antisense Strand to SEQ ID NO: 395037
auugccauccucaauaccc

SEQ ID NO: 395039 - RNA, 19 nt, Artificial Sequence
  Description of Artificial Sequence: Synthetic oligonucleotide
  Sense Strand Starting at position 972 of SEQ ID NO: 317839
ggcuuagagguccaagguu

SEQ ID NO: 395040 - RNA, 19 nt, Artificial Sequence
  Description of Artificial Sequence: Synthetic oligonucleotide
  Antisense Strand to SEQ ID NO: 395039
aaccuuggaccucuaagcc

SEQ ID NO: 395041 - RNA, 19 nt, Artificial Sequence
  Description of Artificial Sequence: Synthetic oligonucleotide
  Sense Strand Starting at position 972 of SEQ ID NO: 317847
gguccaagguucuaggaua

SEQ ID NO: 395042 - RNA, 19 nt, Artificial Sequence
  Description of Artificial Sequence: Synthetic oligonucleotide
  Antisense Strand to SEQ ID NO: 395041
uauccuagaaccuuggacc

SEQ ID NO: 395043 - RNA, 19 nt, Artificial Sequence
  Description of Artificial Sequence: Synthetic oligonucleotide
  Sense Strand Starting at position 972 of SEQ ID NO: 317899
ucgugagcagcgcuuagaa

SEQ ID NO: 395044 - RNA, 19 nt, Artificial Sequence
  Description of Artificial Sequence: Synthetic oligonucleotide
  Antisense Strand to SEQ ID NO: 395043
uucuaagcgcugcucacga

SEQ ID NO: 395045 - RNA, 19 nt, Artificial Sequence
  Description of Artificial Sequence: Synthetic oligonucleotide
  Sense Strand Starting at position 972 of SEQ ID NO: 318213
cucccagauuucugggauc

SEQ ID NO: 395046 - RNA, 19 nt, Artificial Sequence
  Description of Artificial Sequence: Synthetic oligonucleotide
  Antisense Strand to SEQ ID NO: 395045
gaucccagaaaucugggag

SEQ ID NO: 395047 - RNA, 19 nt, Artificial Sequence
  Description of Artificial Sequence: Synthetic oligonucleotide
  Sense Strand Starting at position 972 of SEQ ID NO: 318216
ccagauuucugggaucuag

SEQ ID NO: 395048 - RNA, 19 nt, Artificial Sequence
  Description of Artificial Sequence: Synthetic oligonucleotide
  Antisense Strand to SEQ ID NO: 395047
cuagaucccagaaaucugg

SEQ ID NO: 395049 - RNA, 19 nt, Artificial Sequence
  Description of Artificial Sequence: Synthetic oligonucleotide
  Sense Strand Starting at position 972 of SEQ ID NO: 318306
gugccuaccuguuccaaca

SEQ ID NO: 395050 - RNA, 19 nt, Artificial Sequence
  Description of Artificial Sequence: Synthetic oligonucleotide
  Antisense Strand to SEQ ID NO: 395049
uguuggaacagguaggcac

SEQ ID NO: 395051 - RNA, 19 nt, Artificial Sequence
  Description of Artificial Sequence: Synthetic oligonucleotide
  Sense Strand Starting at position 972 of SEQ ID NO: 318411
agcagugugucugugagga

SEQ ID NO: 395052 - RNA, 19 nt, Artificial Sequence
  Description of Artificial Sequence: Synthetic oligonucleotide
  Antisense Strand to SEQ ID NO: 395051
uccucacagacacacugcu

SEQ ID NO: 395053 - RNA, 19 nt, Artificial Sequence
  Description of Artificial Sequence: Synthetic oligonucleotide
  Sense Strand Starting at position 972 of SEQ ID NO: 318686
ggagucugaccuugaguag

SEQ ID NO: 395054 - RNA, 19 nt, Artificial Sequence
  Description of Artificial Sequence: Synthetic oligonucleotide
  Antisense Strand to SEQ ID NO: 395053
cuacucaaggucagacucc

SEQ ID NO: 395055 - RNA, 19 nt, Artificial Sequence
  Description of Artificial Sequence: Synthetic oligonucleotide
  Sense Strand Starting at position 972 of SEQ ID NO: 318701
guagccgucccuuggcaaa

SEQ ID NO: 395056 - RNA, 19 nt, Artificial Sequence
  Description of Artificial Sequence: Synthetic oligonucleotide
  Antisense Strand to SEQ ID NO: 395055
uuugccaagggacggcuac

SEQ ID NO: 395057 - RNA, 19 nt, Artificial Sequence
  Description of Artificial Sequence: Synthetic oligonucleotide
  Sense Strand Starting at position 972 of SEQ ID NO: 318980
aggacuugcccaggcuaua

SEQ ID NO: 395058 - RNA, 19 nt, Artificial Sequence
  Description of Artificial Sequence: Synthetic oligonucleotide
  Antisense Strand to SEQ ID NO: 395057
uauagccugggcaaguccu

SEQ ID NO: 395059 - RNA, 19 nt, Artificial Sequence
  Description of Artificial Sequence: Synthetic oligonucleotide
  Sense Strand Starting at position 972 of SEQ ID NO: 319017
cagggugagccucaguagu

SEQ ID NO: 395060 - RNA, 19 nt, Artificial Sequence
  Description of Artificial Sequence: Synthetic oligonucleotide
  Antisense Strand to SEQ ID NO: 395059
acuacugaggcucacccug

SEQ ID NO: 395061 - RNA, 19 nt, Artificial Sequence
  Description of Artificial Sequence: Synthetic oligonucleotide
  Sense Strand Starting at position 972 of SEQ ID NO: 319122
aggguuugucuucgugugu

SEQ ID NO: 395062 - RNA, 19 nt, Artificial Sequence
  Description of Artificial Sequence: Synthetic oligonucleotide
  Antisense Strand to SEQ ID NO: 395061
acacacgaagacaaacccu

SEQ ID NO: 395063 - RNA, 19 nt, Artificial Sequence
  Description of Artificial Sequence: Synthetic oligonucleotide
  Sense Strand Starting at position 972 of SEQ ID NO: 319125
guuugucuucgugugugca

SEQ ID NO: 395064 - RNA, 19 nt, Artificial Sequence
  Description of Artificial Sequence: Synthetic oligonucleotide
  Antisense Strand to SEQ ID NO: 395063
ugcacacacgaagacaaac

SEQ ID NO: 395065 - RNA, 19 nt, Artificial Sequence
  Description of Artificial Sequence: Synthetic oligonucleotide
  Sense Strand Starting at position 973 of SEQ ID NO: 315408
ggcacacaguucuccgaua

SEQ ID NO: 395066 - RNA, 19 nt, Artificial Sequence
  Description of Artificial Sequence: Synthetic oligonucleotide
  Antisense Strand to SEQ ID NO: 395065
uaucggagaacugugugcc

SEQ ID NO: 395067 - RNA, 19 nt, Artificial Sequence
  Description of Artificial Sequence: Synthetic oligonucleotide
  Sense Strand Starting at position 973 of SEQ ID NO: 315409
gcacacaguucuccgauaa

SEQ ID NO: 395068 - RNA, 19 nt, Artificial Sequence
  Description of Artificial Sequence: Synthetic oligonucleotide
  Antisense Strand to SEQ ID NO: 395067
uuaucggagaacugugugc

SEQ ID NO: 395069 - RNA, 19 nt, Artificial Sequence
  Description of Artificial Sequence: Synthetic oligonucleotide
  Sense Strand Starting at position 973 of SEQ ID NO: 315456
cuuacaguccuggguuagu

SEQ ID NO: 395070 - RNA, 19 nt, Artificial Sequence
  Description of Artificial Sequence: Synthetic oligonucleotide
  Antisense Strand to SEQ ID NO: 395069
acuaacccaggacuguaag

SEQ ID NO: 395071 - RNA, 19 nt, Artificial Sequence
  Description of Artificial Sequence: Synthetic oligonucleotide
  Sense Strand Starting at position 973 of SEQ ID NO: 315467
ggguuaguaaccuggaucu

SEQ ID NO: 395072 - RNA, 19 nt, Artificial Sequence
  Description of Artificial Sequence: Synthetic oligonucleotide
  Antisense Strand to SEQ ID NO: 395071
agauccagguuacuaaccc

SEQ ID NO: 395073 - RNA, 19 nt, Artificial Sequence
  Description of Artificial Sequence: Synthetic oligonucleotide
  Sense Strand Starting at position 973 of SEQ ID NO: 315469
guuaguaaccuggaucucu

SEQ ID NO: 395074 - RNA, 19 nt, Artificial Sequence
  Description of Artificial Sequence: Synthetic oligonucleotide
  Antisense Strand to SEQ ID NO: 395073
agagauccagguuacuaac

SEQ ID NO: 395075 - RNA, 19 nt, Artificial Sequence
  Description of Artificial Sequence: Synthetic oligonucleotide
  Sense Strand Starting at position 973 of SEQ ID NO: 315535
uggguaaagugcuccugaa

SEQ ID NO: 395076 - RNA, 19 nt, Artificial Sequence
  Description of Artificial Sequence: Synthetic oligonucleotide
  Antisense Strand to SEQ ID NO: 395075
uucaggagcacuuuaccca

SEQ ID NO: 395077 - RNA, 19 nt, Artificial Sequence
  Description of Artificial Sequence: Synthetic oligonucleotide
  Sense Strand Starting at position 973 of SEQ ID NO: 315539
uaaagugcuccugaaugcu

SEQ ID NO: 395078 - RNA, 19 nt, Artificial Sequence
  Description of Artificial Sequence: Synthetic oligonucleotide
  Antisense Strand to SEQ ID NO: 395077
agcauucaggagcacuuua

SEQ ID NO: 395079 - RNA, 19 nt, Artificial Sequence
  Description of Artificial Sequence: Synthetic oligonucleotide
  Sense Strand Starting at position 973 of SEQ ID NO: 315828
ggagcauucgaacgcggaa

SEQ ID NO: 395080 - RNA, 19 nt, Artificial Sequence
  Description of Artificial Sequence: Synthetic oligonucleotide
  Antisense Strand to SEQ ID NO: 395079
uuccgcguucgaaugcucc

SEQ ID NO: 395081 - RNA, 19 nt, Artificial Sequence
  Description of Artificial Sequence: Synthetic oligonucleotide
  Sense Strand Starting at position 973 of SEQ ID NO: 315830
agcauucgaacgcggaaau

SEQ ID NO: 395082 - RNA, 19 nt, Artificial Sequence
  Description of Artificial Sequence: Synthetic oligonucleotide
  Antisense Strand to SEQ ID NO: 395081
auuuccgcguucgaaugcu

SEQ ID NO: 395083 - RNA, 19 nt, Artificial Sequence
  Description of Artificial Sequence: Synthetic oligonucleotide
  Sense Strand Starting at position 973 of SEQ ID NO: 315840
cgcggaaaucgaggugcua

SEQ ID NO: 395084 - RNA, 19 nt, Artificial Sequence
  Description of Artificial Sequence: Synthetic oligonucleotide
  Antisense Strand to SEQ ID NO: 395083
uagcaccucgauuuccgcg

SEQ ID NO: 395085 - RNA, 19 nt, Artificial Sequence
  Description of Artificial Sequence: Synthetic oligonucleotide
  Sense Strand Starting at position 973 of SEQ ID NO: 315842
cggaaaucgaggugcuagu

SEQ ID NO: 395086 - RNA, 19 nt, Artificial Sequence
  Description of Artificial Sequence: Synthetic oligonucleotide
  Antisense Strand to SEQ ID NO: 395085
acuagcaccucgauuuccg

SEQ ID NO: 395087 - RNA, 19 nt, Artificial Sequence
  Description of Artificial Sequence: Synthetic oligonucleotide
  Sense Strand Starting at position 973 of SEQ ID NO: 315880
uuagucauagcuggauaau

SEQ ID NO: 395088 - RNA, 19 nt, Artificial Sequence
  Description of Artificial Sequence: Synthetic oligonucleotide
  Antisense Strand to SEQ ID NO: 395087
auuauccagcuaugacuaa

SEQ ID NO: 395089 - RNA, 19 nt, Artificial Sequence
  Description of Artificial Sequence: Synthetic oligonucleotide
  Sense Strand Starting at position 973 of SEQ ID NO: 315881
uagucauagcuggauaaug

SEQ ID NO: 395090 - RNA, 19 nt, Artificial Sequence
  Description of Artificial Sequence: Synthetic oligonucleotide
  Antisense Strand to SEQ ID NO: 395089
cauuauccagcuaugacua

SEQ ID NO: 395091 - RNA, 19 nt, Artificial Sequence
  Description of Artificial Sequence: Synthetic oligonucleotide
  Sense Strand Starting at position 973 of SEQ ID NO: 315945
ucaaccugucugugacaga

SEQ ID NO: 395092 - RNA, 19 nt, Artificial Sequence
  Description of Artificial Sequence: Synthetic oligonucleotide
  Antisense Strand to SEQ ID NO: 395091
ucugucacagacagguuga

SEQ ID NO: 395093 - RNA, 19 nt, Artificial Sequence
  Description of Artificial Sequence: Synthetic oligonucleotide
  Sense Strand Starting at position 973 of SEQ ID NO: 316279
ugcuccaggucauuucgaa

SEQ ID NO: 395094 - RNA, 19 nt, Artificial Sequence
  Description of Artificial Sequence: Synthetic oligonucleotide
  Antisense Strand to SEQ ID NO: 395093
uucgaaaugaccuggagca

SEQ ID NO: 395095 - RNA, 19 nt, Artificial Sequence
  Description of Artificial Sequence: Synthetic oligonucleotide
  Sense Strand Starting at position 973 of SEQ ID NO: 316283
ccaggucauuucgaaagaa

SEQ ID NO: 395096 - RNA, 19 nt, Artificial Sequence
  Description of Artificial Sequence: Synthetic oligonucleotide
  Antisense Strand to SEQ ID NO: 395095
uucuuucgaaaugaccugg

SEQ ID NO: 395097 - RNA, 19 nt, Artificial Sequence
  Description of Artificial Sequence: Synthetic oligonucleotide
  Sense Strand Starting at position 973 of SEQ ID NO: 316441
accguuaagacugaaacgu

SEQ ID NO: 395098 - RNA, 19 nt, Artificial Sequence
  Description of Artificial Sequence: Synthetic oligonucleotide
  Antisense Strand to SEQ ID NO: 395097
acguuucagucuuaacggu

SEQ ID NO: 395099 - RNA, 19 nt, Artificial Sequence
  Description of Artificial Sequence: Synthetic oligonucleotide
  Sense Strand Starting at position 973 of SEQ ID NO: 316445
uuaagacugaaacguagau

SEQ ID NO: 395100 - RNA, 19 nt, Artificial Sequence
  Description of Artificial Sequence: Synthetic oligonucleotide
  Antisense Strand to SEQ ID NO: 395099
aucuacguuucagucuuaa

SEQ ID NO: 395101 - RNA, 19 nt, Artificial Sequence
  Description of Artificial Sequence: Synthetic oligonucleotide
  Sense Strand Starting at position 973 of SEQ ID NO: 316457
cguagaucgccgggaucua

SEQ ID NO: 395102 - RNA, 19 nt, Artificial Sequence
  Description of Artificial Sequence: Synthetic oligonucleotide
  Antisense Strand to SEQ ID NO: 395101
uagaucccggcgaucuacg

SEQ ID NO: 395103 - RNA, 19 nt, Artificial Sequence
  Description of Artificial Sequence: Synthetic oligonucleotide
  Sense Strand Starting at position 973 of SEQ ID NO: 317588
ugggaacguauauggaaua

SEQ ID NO: 395104 - RNA, 19 nt, Artificial Sequence
  Description of Artificial Sequence: Synthetic oligonucleotide
  Antisense Strand to SEQ ID NO: 395103
uauuccauauacguuccca

SEQ ID NO: 395105 - RNA, 19 nt, Artificial Sequence
  Description of Artificial Sequence: Synthetic oligonucleotide
  Sense Strand Starting at position 973 of SEQ ID NO: 317600
uggaauacaucugcccauu

SEQ ID NO: 395106 - RNA, 19 nt, Artificial Sequence
  Description of Artificial Sequence: Synthetic oligonucleotide
  Antisense Strand to SEQ ID NO: 395105
aaugggcagauguauucca

SEQ ID NO: 395107 - RNA, 19 nt, Artificial Sequence
  Description of Artificial Sequence: Synthetic oligonucleotide
  Sense Strand Starting at position 973 of SEQ ID NO: 317693
ccaagacacuggucucuau

SEQ ID NO: 395108 - RNA, 19 nt, Artificial Sequence
  Description of Artificial Sequence: Synthetic oligonucleotide
  Antisense Strand to SEQ ID NO: 395107
auagagaccagugucuugg

SEQ ID NO: 395109 - RNA, 19 nt, Artificial Sequence
  Description of Artificial Sequence: Synthetic oligonucleotide
  Sense Strand Starting at position 973 of SEQ ID NO: 317696
agacacuggucucuauaca

SEQ ID NO: 395110 - RNA, 19 nt, Artificial Sequence
  Description of Artificial Sequence: Synthetic oligonucleotide
  Antisense Strand to SEQ ID NO: 395109
uguauagagaccagugucu

SEQ ID NO: 395111 - RNA, 19 nt, Artificial Sequence
  Description of Artificial Sequence: Synthetic oligonucleotide
  Sense Strand Starting at position 973 of SEQ ID NO: 317763
ugccucuuccuccaggaaa

SEQ ID NO: 395112 - RNA, 19 nt, Artificial Sequence
  Description of Artificial Sequence: Synthetic oligonucleotide
  Antisense Strand to SEQ ID NO: 395111
uuuccuggaggaagaggca

SEQ ID NO: 395113 - RNA, 19 nt, Artificial Sequence
  Description of Artificial Sequence: Synthetic oligonucleotide
  Sense Strand Starting at position 973 of SEQ ID NO: 317796
guccucagcgaucugugua

SEQ ID NO: 395114 - RNA, 19 nt, Artificial Sequence
  Description of Artificial Sequence: Synthetic oligonucleotide
  Antisense Strand to SEQ ID NO: 395113
uacacagaucgcugaggac

SEQ ID NO: 395115 - RNA, 19 nt, Artificial Sequence
  Description of Artificial Sequence: Synthetic oligonucleotide
  Sense Strand Starting at position 973 of SEQ ID NO: 317799
cucagcgaucuguguacua

SEQ ID NO: 395116 - RNA, 19 nt, Artificial Sequence
  Description of Artificial Sequence: Synthetic oligonucleotide
  Antisense Strand to SEQ ID NO: 395115
uaguacacagaucgcugag

SEQ ID NO: 395117 - RNA, 19 nt, Artificial Sequence
  Description of Artificial Sequence: Synthetic oligonucleotide
  Sense Strand Starting at position 973 of SEQ ID NO: 317821
aauggaauccaguguucca

SEQ ID NO: 395118 - RNA, 19 nt, Artificial Sequence
  Description of Artificial Sequence: Synthetic oligonucleotide
  Antisense Strand to SEQ ID NO: 395117
uggaacacuggauuccauu

SEQ ID NO: 395119 - RNA, 19 nt, Artificial Sequence
  Description of Artificial Sequence: Synthetic oligonucleotide
  Sense Strand Starting at position 973 of SEQ ID NO: 317950
ugcagauucugacucaacu

SEQ ID NO: 395120 - RNA, 19 nt, Artificial Sequence
  Description of Artificial Sequence: Synthetic oligonucleotide
  Antisense Strand to SEQ ID NO: 395119
aguugagucagaaucugca

SEQ ID NO: 395121 - RNA, 19 nt, Artificial Sequence
  Description of Artificial Sequence: Synthetic oligonucleotide
  Sense Strand Starting at position 973 of SEQ ID NO: 317981
gaugaagucugggcucagu

SEQ ID NO: 395122 - RNA, 19 nt, Artificial Sequence
  Description of Artificial Sequence: Synthetic oligonucleotide
  Antisense Strand to SEQ ID NO: 395121
acugagcccagacuucauc

SEQ ID NO: 395123 - RNA, 19 nt, Artificial Sequence
  Description of Artificial Sequence: Synthetic oligonucleotide
  Sense Strand Starting at position 973 of SEQ ID NO: 317991
gggcucaguccugaucacu

SEQ ID NO: 395124 - RNA, 19 nt, Artificial Sequence
  Description of Artificial Sequence: Synthetic oligonucleotide
  Antisense Strand to SEQ ID NO: 395123
agugaucaggacugagccc

SEQ ID NO: 395125 - RNA, 19 nt, Artificial Sequence
  Description of Artificial Sequence: Synthetic oligonucleotide
  Sense Strand Starting at position 973 of SEQ ID NO: 318250
uuugauuucucccuugucu

SEQ ID NO: 395126 - RNA, 19 nt, Artificial Sequence
  Description of Artificial Sequence: Synthetic oligonucleotide
  Antisense Strand to SEQ ID NO: 395125
agacaagggagaaaucaaa

SEQ ID NO: 395127 - RNA, 19 nt, Artificial Sequence
  Description of Artificial Sequence: Synthetic oligonucleotide
  Sense Strand Starting at position 973 of SEQ ID NO: 318252
ugauuucucccuugucucu

SEQ ID NO: 395128 - RNA, 19 nt, Artificial Sequence
  Description of Artificial Sequence: Synthetic oligonucleotide
  Antisense Strand to SEQ ID NO: 395127
agagacaagggagaaauca

SEQ ID NO: 395129 - RNA, 19 nt, Artificial Sequence
  Description of Artificial Sequence: Synthetic oligonucleotide
  Sense Strand Starting at position 973 of SEQ ID NO: 318322
uuauuucucuuugagaacg

SEQ ID NO: 395130 - RNA, 19 nt, Artificial Sequence
  Description of Artificial Sequence: Synthetic oligonucleotide
  Antisense Strand to SEQ ID NO: 395129
cguucucaaagagaaauaa

SEQ ID NO: 395131 - RNA, 19 nt, Artificial Sequence
  Description of Artificial Sequence: Synthetic oligonucleotide
  Sense Strand Starting at position 973 of SEQ ID NO: 318330
cuuugagaacgcugcaaug

SEQ ID NO: 395132 - RNA, 19 nt, Artificial Sequence
  Description of Artificial Sequence: Synthetic oligonucleotide
  Antisense Strand to SEQ ID NO: 395131
cauugcagcguucucaaag

SEQ ID NO: 395133 - RNA, 19 nt, Artificial Sequence
  Description of Artificial Sequence: Synthetic oligonucleotide
  Sense Strand Starting at position 973 of SEQ ID NO: 318717
cugaauuugugauguccuc

SEQ ID NO: 395134 - RNA, 19 nt, Artificial Sequence
  Description of Artificial Sequence: Synthetic oligonucleotide
  Antisense Strand to SEQ ID NO: 395133
gaggacaucacaaauucag

SEQ ID NO: 395135 - RNA, 19 nt, Artificial Sequence
  Description of Artificial Sequence: Synthetic oligonucleotide
  Sense Strand Starting at position 973 of SEQ ID NO: 318732
ccucuuguaccggaugaga

SEQ ID NO: 395136 - RNA, 19 nt, Artificial Sequence
  Description of Artificial Sequence: Synthetic oligonucleotide
  Antisense Strand to SEQ ID NO: 395135
ucucauccgguacaagagg

SEQ ID NO: 395137 - RNA, 19 nt, Artificial Sequence
  Description of Artificial Sequence: Synthetic oligonucleotide
  Sense Strand Starting at position 973 of SEQ ID NO: 318812
agcagugaugcucaaccca

SEQ ID NO: 395138 - RNA, 19 nt, Artificial Sequence
  Description of Artificial Sequence: Synthetic oligonucleotide
  Antisense Strand to SEQ ID NO: 395137
uggguugagcaucacugcu

SEQ ID NO: 395139 - RNA, 19 nt, Artificial Sequence
  Description of Artificial Sequence: Synthetic oligonucleotide
  Sense Strand Starting at position 973 of SEQ ID NO: 319211
ggucaugaguguuugagaa

SEQ ID NO: 395140 - RNA, 19 nt, Artificial Sequence
  Description of Artificial Sequence: Synthetic oligonucleotide
  Antisense Strand to SEQ ID NO: 395139
uucucaaacacucaugacc

SEQ ID NO: 395141 - RNA, 19 nt, Artificial Sequence
  Description of Artificial Sequence: Synthetic oligonucleotide
  Sense Strand Starting at position 973 of SEQ ID NO: 319213
ucaugaguguuugagaaga

SEQ ID NO: 395142 - RNA, 19 nt, Artificial Sequence
  Description of Artificial Sequence: Synthetic oligonucleotide
  Antisense Strand to SEQ ID NO: 395141
ucuucucaaacacucauga

SEQ ID NO: 395143 - RNA, 19 nt, Artificial Sequence
  Description of Artificial Sequence: Synthetic oligonucleotide
  Sense Strand Starting at position 973 of SEQ ID NO: 319218
aguguuugagaagaggcaa

SEQ ID NO: 395144 - RNA, 19 nt, Artificial Sequence
  Description of Artificial Sequence: Synthetic oligonucleotide
  Antisense Strand to SEQ ID NO: 395143
uugccucuucucaaacacu

SEQ ID NO: 395145 - RNA, 19 nt, Artificial Sequence
  Description of Artificial Sequence: Synthetic oligonucleotide
  Sense Strand Starting at position 974 of SEQ ID NO: 315593
ccucgaauuccugauugca

SEQ ID NO: 395146 - RNA, 19 nt, Artificial Sequence
  Description of Artificial Sequence: Synthetic oligonucleotide
  Antisense Strand to SEQ ID NO: 395145
ugcaaucaggaauucgagg

SEQ ID NO: 395147 - RNA, 19 nt, Artificial Sequence
  Description of Artificial Sequence: Synthetic oligonucleotide
  Sense Strand Starting at position 974 of SEQ ID NO: 315595
ucgaauuccugauugcaaa

SEQ ID NO: 395148 - RNA, 19 nt, Artificial Sequence
  Description of Artificial Sequence: Synthetic oligonucleotide
  Antisense Strand to SEQ ID NO: 395147
uuugcaaucaggaauucga

SEQ ID NO: 395149 - RNA, 19 nt, Artificial Sequence
  Description of Artificial Sequence: Synthetic oligonucleotide
  Sense Strand Starting at position 974 of SEQ ID NO: 315596
cgaauuccugauugcaaau

SEQ ID NO: 395150 - RNA, 19 nt, Artificial Sequence
  Description of Artificial Sequence: Synthetic oligonucleotide
  Antisense Strand to SEQ ID NO: 395149
auuugcaaucaggaauucg

SEQ ID NO: 395151 - RNA, 19 nt, Artificial Sequence
  Description of Artificial Sequence: Synthetic oligonucleotide
  Sense Strand Starting at position 974 of SEQ ID NO: 315958
caagcucugggcuaagauu

SEQ ID NO: 395152 - RNA, 19 nt, Artificial Sequence
  Description of Artificial Sequence: Synthetic oligonucleotide
  Antisense Strand to SEQ ID NO: 395151
aaucuuagcccagagcuug

SEQ ID NO: 395153 - RNA, 19 nt, Artificial Sequence
  Description of Artificial Sequence: Synthetic oligonucleotide
  Sense Strand Starting at position 974 of SEQ ID NO: 316177
ggcacacaguucuccgaua

SEQ ID NO: 395154 - RNA, 19 nt, Artificial Sequence
  Description of Artificial Sequence: Synthetic oligonucleotide
  Antisense Strand to SEQ ID NO: 395153
uaucggagaacugugugcc

SEQ ID NO: 395155 - RNA, 19 nt, Artificial Sequence
  Description of Artificial Sequence: Synthetic oligonucleotide
  Sense Strand Starting at position 974 of SEQ ID NO: 316178
gcacacaguucuccgauaa

SEQ ID NO: 395156 - RNA, 19 nt, Artificial Sequence
  Description of Artificial Sequence: Synthetic oligonucleotide
  Antisense Strand to SEQ ID NO: 395155
uuaucggagaacugugugc

SEQ ID NO: 395157 - RNA, 19 nt, Artificial Sequence
  Description of Artificial Sequence: Synthetic oligonucleotide
  Sense Strand Starting at position 974 of SEQ ID NO: 316225
cuuacaguccuggguuagu

SEQ ID NO: 395158 - RNA, 19 nt, Artificial Sequence
  Description of Artificial Sequence: Synthetic oligonucleotide
  Antisense Strand to SEQ ID NO: 395157
acuaacccaggacuguaag

SEQ ID NO: 395159 - RNA, 19 nt, Artificial Sequence
  Description of Artificial Sequence: Synthetic oligonucleotide
  Sense Strand Starting at position 974 of SEQ ID NO: 316236
ggguuaguaaccuggaucu

SEQ ID NO: 395160 - RNA, 19 nt, Artificial Sequence
  Description of Artificial Sequence: Synthetic oligonucleotide
  Antisense Strand to SEQ ID NO: 395159
agauccagguuacuaaccc

SEQ ID NO: 395161 - RNA, 19 nt, Artificial Sequence
  Description of Artificial Sequence: Synthetic oligonucleotide
  Sense Strand Starting at position 974 of SEQ ID NO: 316238
guuaguaaccuggaucucu

SEQ ID NO: 395162 - RNA, 19 nt, Artificial Sequence
  Description of Artificial Sequence: Synthetic oligonucleotide
  Antisense Strand to SEQ ID NO: 395161
agagauccagguuacuaac

SEQ ID NO: 395163 - RNA, 19 nt, Artificial Sequence
  Description of Artificial Sequence: Synthetic oligonucleotide
  Sense Strand Starting at position 974 of SEQ ID NO: 316304
uggguaaagugcuccugaa

SEQ ID NO: 395164 - RNA, 19 nt, Artificial Sequence
  Description of Artificial Sequence: Synthetic oligonucleotide
  Antisense Strand to SEQ ID NO: 395163
uucaggagcacuuuaccca

SEQ ID NO: 395165 - RNA, 19 nt, Artificial Sequence
  Description of Artificial Sequence: Synthetic oligonucleotide
  Sense Strand Starting at position 974 of SEQ ID NO: 316308
uaaagugcuccugaaugcu

SEQ ID NO: 395166 - RNA, 19 nt, Artificial Sequence
  Description of Artificial Sequence: Synthetic oligonucleotide
  Antisense Strand to SEQ ID NO: 395165
agcauucaggagcacuuua

SEQ ID NO: 395167 - RNA, 19 nt, Artificial Sequence
  Description of Artificial Sequence: Synthetic oligonucleotide
  Sense Strand Starting at position 974 of SEQ ID NO: 316597
ggagcauucgaacgcggaa

SEQ ID NO: 395168 - RNA, 19 nt, Artificial Sequence
  Description of Artificial Sequence: Synthetic oligonucleotide
  Antisense Strand to SEQ ID NO: 395167
uuccgcguucgaaugcucc

SEQ ID NO: 395169 - RNA, 19 nt, Artificial Sequence
  Description of Artificial Sequence: Synthetic oligonucleotide
  Sense Strand Starting at position 974 of SEQ ID NO: 316599
agcauucgaacgcggaaau

SEQ ID NO: 395170 - RNA, 19 nt, Artificial Sequence
  Description of Artificial Sequence: Synthetic oligonucleotide
  Antisense Strand to SEQ ID NO: 395169
auuuccgcguucgaaugcu

SEQ ID NO: 395171 - RNA, 19 nt, Artificial Sequence
  Description of Artificial Sequence: Synthetic oligonucleotide
  Sense Strand Starting at position 974 of SEQ ID NO: 316609
cgcggaaaucgaggugcua

SEQ ID NO: 395172 - RNA, 19 nt, Artificial Sequence
  Description of Artificial Sequence: Synthetic oligonucleotide
  Antisense Strand to SEQ ID NO: 395171
uagcaccucgauuuccgcg

SEQ ID NO: 395173 - RNA, 19 nt, Artificial Sequence
  Description of Artificial Sequence: Synthetic oligonucleotide
  Sense Strand Starting at position 974 of SEQ ID NO: 316611
cggaaaucgaggugcuagu

SEQ ID NO: 395174 - RNA, 19 nt, Artificial Sequence
  Description of Artificial Sequence: Synthetic oligonucleotide
  Antisense Strand to SEQ ID NO: 395173
acuagcaccucgauuuccg

SEQ ID NO: 395175 - RNA, 19 nt, Artificial Sequence
  Description of Artificial Sequence: Synthetic oligonucleotide
  Sense Strand Starting at position 974 of SEQ ID NO: 316649
uuagucauagcuggauaau

SEQ ID NO: 395176 - RNA, 19 nt, Artificial Sequence
  Description of Artificial Sequence: Synthetic oligonucleotide
  Antisense Strand to SEQ ID NO: 395175
auuauccagcuaugacuaa

SEQ ID NO: 395177 - RNA, 19 nt, Artificial Sequence
  Description of Artificial Sequence: Synthetic oligonucleotide
  Sense Strand Starting at position 974 of SEQ ID NO: 316650
uagucauagcuggauaaug

SEQ ID NO: 395178 - RNA, 19 nt, Artificial Sequence
  Description of Artificial Sequence: Synthetic oligonucleotide
  Antisense Strand to SEQ ID NO: 395177
cauuauccagcuaugacua

SEQ ID NO: 395179 - RNA, 19 nt, Artificial Sequence
  Description of Artificial Sequence: Synthetic oligonucleotide
  Sense Strand Starting at position 974 of SEQ ID NO: 316714
ucaaccugucugugacaga

SEQ ID NO: 395180 - RNA, 19 nt, Artificial Sequence
  Description of Artificial Sequence: Synthetic oligonucleotide
  Antisense Strand to SEQ ID NO: 395179
ucugucacagacagguuga

SEQ ID NO: 395181 - RNA, 19 nt, Artificial Sequence
  Description of Artificial Sequence: Synthetic oligonucleotide
  Sense Strand Starting at position 974 of SEQ ID NO: 316715
caaccugucugugacagaa

SEQ ID NO: 395182 - RNA, 19 nt, Artificial Sequence
  Description of Artificial Sequence: Synthetic oligonucleotide
  Antisense Strand to SEQ ID NO: 395181
uucugucacagacagguug

SEQ ID NO: 395183 - RNA, 19 nt, Artificial Sequence
  Description of Artificial Sequence: Synthetic oligonucleotide
  Sense Strand Starting at position 974 of SEQ ID NO: 317048
ugcuccaggucauuucgaa

SEQ ID NO: 395184 - RNA, 19 nt, Artificial Sequence
  Description of Artificial Sequence: Synthetic oligonucleotide
  Antisense Strand to SEQ ID NO: 395183
uucgaaaugaccuggagca

SEQ ID NO: 395185 - RNA, 19 nt, Artificial Sequence
  Description of Artificial Sequence: Synthetic oligonucleotide
  Sense Strand Starting at position 974 of SEQ ID NO: 317052
ccaggucauuucgaaagaa

SEQ ID NO: 395186 - RNA, 19 nt, Artificial Sequence
  Description of Artificial Sequence: Synthetic oligonucleotide
  Antisense Strand to SEQ ID NO: 395185
uucuuucgaaaugaccugg

SEQ ID NO: 395187 - RNA, 19 nt, Artificial Sequence
  Description of Artificial Sequence: Synthetic oligonucleotide
  Sense Strand Starting at position 974 of SEQ ID NO: 317210
accguuaagacugaaacgu

SEQ ID NO: 395188 - RNA, 19 nt, Artificial Sequence
  Description of Artificial Sequence: Synthetic oligonucleotide
  Antisense Strand to SEQ ID NO: 395187
acguuucagucuuaacggu

SEQ ID NO: 395189 - RNA, 19 nt, Artificial Sequence
  Description of Artificial Sequence: Synthetic oligonucleotide
  Sense Strand Starting at position 974 of SEQ ID NO: 317214
uuaagacugaaacguagau

SEQ ID NO: 395190 - RNA, 19 nt, Artificial Sequence
  Description of Artificial Sequence: Synthetic oligonucleotide
  Antisense Strand to SEQ ID NO: 395189
aucuacguuucagucuuaa

SEQ ID NO: 395191 - RNA, 19 nt, Artificial Sequence
  Description of Artificial Sequence: Synthetic oligonucleotide
  Sense Strand Starting at position 974 of SEQ ID NO: 317226
cguagaucgccgggaucua

SEQ ID NO: 395192 - RNA, 19 nt, Artificial Sequence
  Description of Artificial Sequence: Synthetic oligonucleotide
  Antisense Strand to SEQ ID NO: 395191
uagaucccggcgaucuacg

SEQ ID NO: 395193 - RNA, 19 nt, Artificial Sequence
  Description of Artificial Sequence: Synthetic oligonucleotide
  Sense Strand Starting at position 974 of SEQ ID NO: 318357
ugggaacguauauggaaua

SEQ ID NO: 395194 - RNA, 19 nt, Artificial Sequence
  Description of Artificial Sequence: Synthetic oligonucleotide
  Antisense Strand to SEQ ID NO: 395193
uauuccauauacguuccca

SEQ ID NO: 395195 - RNA, 19 nt, Artificial Sequence
  Description of Artificial Sequence: Synthetic oligonucleotide
  Sense Strand Starting at position 974 of SEQ ID NO: 318369
uggaauacaucugcccauu

SEQ ID NO: 395196 - RNA, 19 nt, Artificial Sequence
  Description of Artificial Sequence: Synthetic oligonucleotide
  Antisense Strand to SEQ ID NO: 395195
aaugggcagauguauucca

SEQ ID NO: 395197 - RNA, 19 nt, Artificial Sequence
  Description of Artificial Sequence: Synthetic oligonucleotide
  Sense Strand Starting at position 974 of SEQ ID NO: 318462
ccaagacacuggucucuau

SEQ ID NO: 395198 - RNA, 19 nt, Artificial Sequence
  Description of Artificial Sequence: Synthetic oligonucleotide
  Antisense Strand to SEQ ID NO: 395197
auagagaccagugucuugg

SEQ ID NO: 395199 - RNA, 19 nt, Artificial Sequence
  Description of Artificial Sequence: Synthetic oligonucleotide
  Sense Strand Starting at position 974 of SEQ ID NO: 318465
agacacuggucucuauaca

SEQ ID NO: 395200 - RNA, 19 nt, Artificial Sequence
  Description of Artificial Sequence: Synthetic oligonucleotide
  Antisense Strand to SEQ ID NO: 395199
uguauagagaccagugucu

SEQ ID NO: 395201 - RNA, 19 nt, Artificial Sequence
  Description of Artificial Sequence: Synthetic oligonucleotide
  Sense Strand Starting at position 974 of SEQ ID NO: 318532
ugccucuuccuccaggaaa

SEQ ID NO: 395202 - RNA, 19 nt, Artificial Sequence
  Description of Artificial Sequence: Synthetic oligonucleotide
  Antisense Strand to SEQ ID NO: 395201
uuuccuggaggaagaggca

SEQ ID NO: 395203 - RNA, 19 nt, Artificial Sequence
  Description of Artificial Sequence: Synthetic oligonucleotide
  Sense Strand Starting at position 974 of SEQ ID NO: 318565
guccucagcgaucugugua

SEQ ID NO: 395204 - RNA, 19 nt, Artificial Sequence
  Description of Artificial Sequence: Synthetic oligonucleotide
  Antisense Strand to SEQ ID NO: 395203
uacacagaucgcugaggac

SEQ ID NO: 395205 - RNA, 19 nt, Artificial Sequence
  Description of Artificial Sequence: Synthetic oligonucleotide
  Sense Strand Starting at position 974 of SEQ ID NO: 318568
cucagcgaucuguguacua

SEQ ID NO: 395206 - RNA, 19 nt, Artificial Sequence
  Description of Artificial Sequence: Synthetic oligonucleotide
  Antisense Strand to SEQ ID NO: 395205
uaguacacagaucgcugag

SEQ ID NO: 395207 - RNA, 19 nt, Artificial Sequence
  Description of Artificial Sequence: Synthetic oligonucleotide
  Sense Strand Starting at position 974 of SEQ ID NO: 318590
aauggaauccaguguucca

SEQ ID NO: 395208 - RNA, 19 nt, Artificial Sequence
  Description of Artificial Sequence: Synthetic oligonucleotide
  Antisense Strand to SEQ ID NO: 395207
uggaacacuggauuccauu

SEQ ID NO: 395209 - RNA, 19 nt, Artificial Sequence
  Description of Artificial Sequence: Synthetic oligonucleotide
  Sense Strand Starting at position 974 of SEQ ID NO: 318717
uuugcagauucugacucaa

SEQ ID NO: 395210 - RNA, 19 nt, Artificial Sequence
  Description of Artificial Sequence: Synthetic oligonucleotide
  Antisense Strand to SEQ ID NO: 395209
uugagucagaaucugcaaa

SEQ ID NO: 395211 - RNA, 19 nt, Artificial Sequence
  Description of Artificial Sequence: Synthetic oligonucleotide
  Sense Strand Starting at position 974 of SEQ ID NO: 318719
ugcagauucugacucaacu

SEQ ID NO: 395212 - RNA, 19 nt, Artificial Sequence
  Description of Artificial Sequence: Synthetic oligonucleotide
  Antisense Strand to SEQ ID NO: 395211
aguugagucagaaucugca

SEQ ID NO: 395213 - RNA, 19 nt, Artificial Sequence
  Description of Artificial Sequence: Synthetic oligonucleotide
  Sense Strand Starting at position 974 of SEQ ID NO: 318750
gaugaagucugggcucagu

SEQ ID NO: 395214 - RNA, 19 nt, Artificial Sequence
  Description of Artificial Sequence: Synthetic oligonucleotide
  Antisense Strand to SEQ ID NO: 395213
acugagcccagacuucauc

SEQ ID NO: 395215 - RNA, 19 nt, Artificial Sequence
  Description of Artificial Sequence: Synthetic oligonucleotide
  Sense Strand Starting at position 974 of SEQ ID NO: 318760
gggcucaguccugaucacu

SEQ ID NO: 395216 - RNA, 19 nt, Artificial Sequence
  Description of Artificial Sequence: Synthetic oligonucleotide
  Antisense Strand to SEQ ID NO: 395215
agugaucaggacugagccc

SEQ ID NO: 395217 - RNA, 19 nt, Artificial Sequence
  Description of Artificial Sequence: Synthetic oligonucleotide
  Sense Strand Starting at position 974 of SEQ ID NO: 319019
uuugauuucucccuugucu

SEQ ID NO: 395218 - RNA, 19 nt, Artificial Sequence
  Description of Artificial Sequence: Synthetic oligonucleotide
  Antisense Strand to SEQ ID NO: 395217
agacaagggagaaaucaaa

SEQ ID NO: 395219 - RNA, 19 nt, Artificial Sequence
  Description of Artificial Sequence: Synthetic oligonucleotide
  Sense Strand Starting at position 974 of SEQ ID NO: 319021
ugauuucucccuugucucu

SEQ ID NO: 395220 - RNA, 19 nt, Artificial Sequence
  Description of Artificial Sequence: Synthetic oligonucleotide
  Antisense Strand to SEQ ID NO: 395219
agagacaagggagaaauca

SEQ ID NO: 395221 - RNA, 19 nt, Artificial Sequence
  Description of Artificial Sequence: Synthetic oligonucleotide
  Sense Strand Starting at position 974 of SEQ ID NO: 319091
uuauuucucuuugagaacg

SEQ ID NO: 395222 - RNA, 19 nt, Artificial Sequence
  Description of Artificial Sequence: Synthetic oligonucleotide
  Antisense Strand to SEQ ID NO: 395221
cguucucaaagagaaauaa

SEQ ID NO: 395223 - RNA, 19 nt, Artificial Sequence
  Description of Artificial Sequence: Synthetic oligonucleotide
  Sense Strand Starting at position 974 of SEQ ID NO: 319099
cuuugagaacgcugcaaug

SEQ ID NO: 395224 - RNA, 19 nt, Artificial Sequence
  Description of Artificial Sequence: Synthetic oligonucleotide
  Antisense Strand to SEQ ID NO: 395223
cauugcagcguucucaaag

SEQ ID NO: 395225 - RNA, 19 nt, Artificial Sequence
  Description of Artificial Sequence: Synthetic oligonucleotide
  Sense Strand Starting at position 975 of SEQ ID NO: 317260
ccgggcauugcguuaucaa

SEQ ID NO: 395226 - RNA, 19 nt, Artificial Sequence
  Description of Artificial Sequence: Synthetic oligonucleotide
  Antisense Strand to SEQ ID NO: 395225
uugauaacgcaaugcccgg

SEQ ID NO: 395227 - RNA, 19 nt, Artificial Sequence
  Description of Artificial Sequence: Synthetic oligonucleotide
  Sense Strand Starting at position 975 of SEQ ID NO: 317261
cgggcauugcguuaucaag

SEQ ID NO: 395228 - RNA, 19 nt, Artificial Sequence
  Description of Artificial Sequence: Synthetic oligonucleotide
  Antisense Strand to SEQ ID NO: 395227
cuugauaacgcaaugcccg

SEQ ID NO: 395229 - RNA, 19 nt, Artificial Sequence
  Description of Artificial Sequence: Synthetic oligonucleotide
  Sense Strand Starting at position 975 of SEQ ID NO: 317263
ggcauugcguuaucaaggu

SEQ ID NO: 395230 - RNA, 19 nt, Artificial Sequence
  Description of Artificial Sequence: Synthetic oligonucleotide
  Antisense Strand to SEQ ID NO: 395229
accuugauaacgcaaugcc

SEQ ID NO: 395231 - RNA, 19 nt, Artificial Sequence
  Description of Artificial Sequence: Synthetic oligonucleotide
  Sense Strand Starting at position 975 of SEQ ID NO: 317373
cugugagugcugggugagu

SEQ ID NO: 395232 - RNA, 19 nt, Artificial Sequence
  Description of Artificial Sequence: Synthetic oligonucleotide
  Antisense Strand to SEQ ID NO: 395231
acucacccagcacucacag

SEQ ID NO: 395233 - RNA, 19 nt, Artificial Sequence
  Description of Artificial Sequence: Synthetic oligonucleotide
  Sense Strand Starting at position 975 of SEQ ID NO: 317564
cgcugauuggagcaggagu

SEQ ID NO: 395234 - RNA, 19 nt, Artificial Sequence
  Description of Artificial Sequence: Synthetic oligonucleotide
  Antisense Strand to SEQ ID NO: 395233
acuccugcuccaaucagcg

SEQ ID NO: 395235 - RNA, 19 nt, Artificial Sequence
  Description of Artificial Sequence: Synthetic oligonucleotide
  Sense Strand Starting at position 975 of SEQ ID NO: 317627
guggucucuuuauguagua

SEQ ID NO: 395236 - RNA, 19 nt, Artificial Sequence
  Description of Artificial Sequence: Synthetic oligonucleotide
  Antisense Strand to SEQ ID NO: 395235
uacuacauaaagagaccac

SEQ ID NO: 395237 - RNA, 19 nt, Artificial Sequence
  Description of Artificial Sequence: Synthetic oligonucleotide
  Sense Strand Starting at position 975 of SEQ ID NO: 317628
uggucucuuuauguaguau

SEQ ID NO: 395238 - RNA, 19 nt, Artificial Sequence
  Description of Artificial Sequence: Synthetic oligonucleotide
  Antisense Strand to SEQ ID NO: 395237
auacuacauaaagagacca

SEQ ID NO: 395239 - RNA, 19 nt, Artificial Sequence
  Description of Artificial Sequence: Synthetic oligonucleotide
  Sense Strand Starting at position 975 of SEQ ID NO: 317733
aggacuaaugcaugccuau

SEQ ID NO: 395240 - RNA, 19 nt, Artificial Sequence
  Description of Artificial Sequence: Synthetic oligonucleotide
  Antisense Strand to SEQ ID NO: 395239
auaggcaugcauuaguccu

SEQ ID NO: 395241 - RNA, 19 nt, Artificial Sequence
  Description of Artificial Sequence: Synthetic oligonucleotide
  Sense Strand Starting at position 975 of SEQ ID NO: 317740
augcaugccuauccuuaga

SEQ ID NO: 395242 - RNA, 19 nt, Artificial Sequence
  Description of Artificial Sequence: Synthetic oligonucleotide
  Antisense Strand to SEQ ID NO: 395241
ucuaaggauaggcaugcau

SEQ ID NO: 395243 - RNA, 19 nt, Artificial Sequence
  Description of Artificial Sequence: Synthetic oligonucleotide
  Sense Strand Starting at position 975 of SEQ ID NO: 317845
auugcugucacgcagguaa

SEQ ID NO: 395244 - RNA, 19 nt, Artificial Sequence
  Description of Artificial Sequence: Synthetic oligonucleotide
  Antisense Strand to SEQ ID NO: 395243
uuaccugcgugacagcaau

SEQ ID NO: 395245 - RNA, 19 nt, Artificial Sequence
  Description of Artificial Sequence: Synthetic oligonucleotide
  Sense Strand Starting at position 975 of SEQ ID NO: 317847
ugcugucacgcagguaaua

SEQ ID NO: 395246 - RNA, 19 nt, Artificial Sequence
  Description of Artificial Sequence: Synthetic oligonucleotide
  Antisense Strand to SEQ ID NO: 395245
uauuaccugcgugacagca

SEQ ID NO: 395247 - RNA, 19 nt, Artificial Sequence
  Description of Artificial Sequence: Synthetic oligonucleotide
  Sense Strand Starting at position 975 of SEQ ID NO: 317895
aguugauggaguuggaaua

SEQ ID NO: 395248 - RNA, 19 nt, Artificial Sequence
  Description of Artificial Sequence: Synthetic oligonucleotide
  Antisense Strand to SEQ ID NO: 395247
uauuccaacuccaucaacu

SEQ ID NO: 395249 - RNA, 19 nt, Artificial Sequence
  Description of Artificial Sequence: Synthetic oligonucleotide
  Sense Strand Starting at position 975 of SEQ ID NO: 317908
ggaauagacucuuuaacgc

SEQ ID NO: 395250 - RNA, 19 nt, Artificial Sequence
  Description of Artificial Sequence: Synthetic oligonucleotide
  Antisense Strand to SEQ ID NO: 395249
gcguuaaagagucuauucc

SEQ ID NO: 395251 - RNA, 19 nt, Artificial Sequence
  Description of Artificial Sequence: Synthetic oligonucleotide
  Sense Strand Starting at position 975 of SEQ ID NO: 317943
ccucuucugugggcagaua

SEQ ID NO: 395252 - RNA, 19 nt, Artificial Sequence
  Description of Artificial Sequence: Synthetic oligonucleotide
  Antisense Strand to SEQ ID NO: 395251
uaucugcccacagaagagg

SEQ ID NO: 395253 - RNA, 19 nt, Artificial Sequence
  Description of Artificial Sequence: Synthetic oligonucleotide
  Sense Strand Starting at position 975 of SEQ ID NO: 317979
ggccguaagagccaaggau

SEQ ID NO: 395254 - RNA, 19 nt, Artificial Sequence
  Description of Artificial Sequence: Synthetic oligonucleotide
  Antisense Strand to SEQ ID NO: 395253
auccuuggcucuuacggcc

SEQ ID NO: 395255 - RNA, 19 nt, Artificial Sequence
  Description of Artificial Sequence: Synthetic oligonucleotide
  Sense Strand Starting at position 975 of SEQ ID NO: 318137
gcucaagcccauugaggaa

SEQ ID NO: 395256 - RNA, 19 nt, Artificial Sequence
  Description of Artificial Sequence: Synthetic oligonucleotide
  Antisense Strand to SEQ ID NO: 395255
uuccucaaugggcuugagc

SEQ ID NO: 395257 - RNA, 19 nt, Artificial Sequence
  Description of Artificial Sequence: Synthetic oligonucleotide
  Sense Strand Starting at position 975 of SEQ ID NO: 318190
gguagaaccugacccaauu

SEQ ID NO: 395258 - RNA, 19 nt, Artificial Sequence
  Description of Artificial Sequence: Synthetic oligonucleotide
  Antisense Strand to SEQ ID NO: 395257
aauugggucagguucuacc

SEQ ID NO: 395259 - RNA, 19 nt, Artificial Sequence
  Description of Artificial Sequence: Synthetic oligonucleotide
  Sense Strand Starting at position 975 of SEQ ID NO: 318202
cccaauuucuggcacagaa

SEQ ID NO: 395260 - RNA, 19 nt, Artificial Sequence
  Description of Artificial Sequence: Synthetic oligonucleotide
  Antisense Strand to SEQ ID NO: 395259
uucugugccagaaauuggg

SEQ ID NO: 395261 - RNA, 19 nt, Artificial Sequence
  Description of Artificial Sequence: Synthetic oligonucleotide
  Sense Strand Starting at position 975 of SEQ ID NO: 318212
ggcacagaauccuugcgau

SEQ ID NO: 395262 - RNA, 19 nt, Artificial Sequence
  Description of Artificial Sequence: Synthetic oligonucleotide
  Antisense Strand to SEQ ID NO: 395261
aucgcaaggauucugugcc

SEQ ID NO: 395263 - RNA, 19 nt, Artificial Sequence
  Description of Artificial Sequence: Synthetic oligonucleotide
  Sense Strand Starting at position 975 of SEQ ID NO: 318271
gaaagcagcuccuggagua

SEQ ID NO: 395264 - RNA, 19 nt, Artificial Sequence
  Description of Artificial Sequence: Synthetic oligonucleotide
  Antisense Strand to SEQ ID NO: 395263
uacuccaggagcugcuuuc

SEQ ID NO: 395265 - RNA, 19 nt, Artificial Sequence
  Description of Artificial Sequence: Synthetic oligonucleotide
  Sense Strand Starting at position 975 of SEQ ID NO: 318384
agugaagugaucugaggca

SEQ ID NO: 395266 - RNA, 19 nt, Artificial Sequence
  Description of Artificial Sequence: Synthetic oligonucleotide
  Antisense Strand to SEQ ID NO: 395265
ugccucagaucacuucacu

SEQ ID NO: 395267 - RNA, 19 nt, Artificial Sequence
  Description of Artificial Sequence: Synthetic oligonucleotide
  Sense Strand Starting at position 975 of SEQ ID NO: 318405
accaauuacuuggaaagca

SEQ ID NO: 395268 - RNA, 19 nt, Artificial Sequence
  Description of Artificial Sequence: Synthetic oligonucleotide
  Antisense Strand to SEQ ID NO: 395267
ugcuuuccaaguaauuggu

SEQ ID NO: 395269 - RNA, 19 nt, Artificial Sequence
  Description of Artificial Sequence: Synthetic oligonucleotide
  Sense Strand Starting at position 975 of SEQ ID NO: 318414
uuggaaagcacugguucuu

SEQ ID NO: 395270 - RNA, 19 nt, Artificial Sequence
  Description of Artificial Sequence: Synthetic oligonucleotide
  Antisense Strand to SEQ ID NO: 395269
aagaaccagugcuuuccaa

SEQ ID NO: 395271 - RNA, 19 nt, Artificial Sequence
  Description of Artificial Sequence: Synthetic oligonucleotide
  Sense Strand Starting at position 975 of SEQ ID NO: 318571
agacuaaucuaggguaaac

SEQ ID NO: 395272 - RNA, 19 nt, Artificial Sequence
  Description of Artificial Sequence: Synthetic oligonucleotide
  Antisense Strand to SEQ ID NO: 395271
guuuacccuagauuagucu

SEQ ID NO: 395273 - RNA, 19 nt, Artificial Sequence
  Description of Artificial Sequence: Synthetic oligonucleotide
  Sense Strand Starting at position 975 of SEQ ID NO: 318628
gcugacuccugccagacuu

SEQ ID NO: 395274 - RNA, 19 nt, Artificial Sequence
  Description of Artificial Sequence: Synthetic oligonucleotide
  Antisense Strand to SEQ ID NO: 395273
aagucuggcaggagucagc

SEQ ID NO: 395275 - RNA, 19 nt, Artificial Sequence
  Description of Artificial Sequence: Synthetic oligonucleotide
  Sense Strand Starting at position 975 of SEQ ID NO: 318663
acaucagaggcuuggaaug

SEQ ID NO: 395276 - RNA, 19 nt, Artificial Sequence
  Description of Artificial Sequence: Synthetic oligonucleotide
  Antisense Strand to SEQ ID NO: 395275
cauuccaagccucugaugu

SEQ ID NO: 395277 - RNA, 19 nt, Artificial Sequence
  Description of Artificial Sequence: Synthetic oligonucleotide
  Sense Strand Starting at position 975 of SEQ ID NO: 318711
acagcaucuuuauagagau

SEQ ID NO: 395278 - RNA, 19 nt, Artificial Sequence
  Description of Artificial Sequence: Synthetic oligonucleotide
  Antisense Strand to SEQ ID NO: 395277
aucucuauaaagaugcugu

SEQ ID NO: 395279 - RNA, 19 nt, Artificial Sequence
  Description of Artificial Sequence: Synthetic oligonucleotide
  Sense Strand Starting at position 975 of SEQ ID NO: 318723
uagagaugucagugcugac

SEQ ID NO: 395280 - RNA, 19 nt, Artificial Sequence
  Description of Artificial Sequence: Synthetic oligonucleotide
  Antisense Strand to SEQ ID NO: 395279
gucagcacugacaucucua

SEQ ID NO: 395281 - RNA, 19 nt, Artificial Sequence
  Description of Artificial Sequence: Synthetic oligonucleotide
  Sense Strand Starting at position 975 of SEQ ID NO: 318740
acgugcacugauugaagau

SEQ ID NO: 395282 - RNA, 19 nt, Artificial Sequence
  Description of Artificial Sequence: Synthetic oligonucleotide
  Antisense Strand to SEQ ID NO: 395281
aucuucaaucagugcacgu

SEQ ID NO: 395283 - RNA, 19 nt, Artificial Sequence
  Description of Artificial Sequence: Synthetic oligonucleotide
  Sense Strand Starting at position 975 of SEQ ID NO: 318741
cgugcacugauugaagaua

SEQ ID NO: 395284 - RNA, 19 nt, Artificial Sequence
  Description of Artificial Sequence: Synthetic oligonucleotide
  Antisense Strand to SEQ ID NO: 395283
uaucuucaaucagugcacg

SEQ ID NO: 395285 - RNA, 19 nt, Artificial Sequence
  Description of Artificial Sequence: Synthetic oligonucleotide
  Sense Strand Starting at position 975 of SEQ ID NO: 318752
ugaagauauccuuguggaa

SEQ ID NO: 395286 - RNA, 19 nt, Artificial Sequence
  Description of Artificial Sequence: Synthetic oligonucleotide
  Antisense Strand to SEQ ID NO: 395285
uuccacaaggauaucuuca

SEQ ID NO: 395287 - RNA, 19 nt, Artificial Sequence
  Description of Artificial Sequence: Synthetic oligonucleotide
  Sense Strand Starting at position 975 of SEQ ID NO: 318800
uguacugagccacaauaua

SEQ ID NO: 395288 - RNA, 19 nt, Artificial Sequence
  Description of Artificial Sequence: Synthetic oligonucleotide
  Antisense Strand to SEQ ID NO: 395287
uauauuguggcucaguaca

SEQ ID NO: 395289 - RNA, 19 nt, Artificial Sequence
  Description of Artificial Sequence: Synthetic oligonucleotide
  Sense Strand Starting at position 975 of SEQ ID NO: 318870
cucucuugggcggguaaga

SEQ ID NO: 395290 - RNA, 19 nt, Artificial Sequence
  Description of Artificial Sequence: Synthetic oligonucleotide
  Antisense Strand to SEQ ID NO: 395289
ucuuacccgcccaagagag

SEQ ID NO: 395291 - RNA, 19 nt, Artificial Sequence
  Description of Artificial Sequence: Synthetic oligonucleotide
  Sense Strand Starting at position 975 of SEQ ID NO: 319036
gcacugguggguugagaga

SEQ ID NO: 395292 - RNA, 19 nt, Artificial Sequence
  Description of Artificial Sequence: Synthetic oligonucleotide
  Antisense Strand to SEQ ID NO: 395291
ucucucaacccaccagugc

SEQ ID NO: 395293 - RNA, 19 nt, Artificial Sequence
  Description of Artificial Sequence: Synthetic oligonucleotide
  Sense Strand Starting at position 975 of SEQ ID NO: 319038
acugguggguugagagaua

SEQ ID NO: 395294 - RNA, 19 nt, Artificial Sequence
  Description of Artificial Sequence: Synthetic oligonucleotide
  Antisense Strand to SEQ ID NO: 395293
uaucucucaacccaccagu

SEQ ID NO: 395295 - RNA, 19 nt, Artificial Sequence
  Description of Artificial Sequence: Synthetic oligonucleotide
  Sense Strand Starting at position 975 of SEQ ID NO: 319050
agagauaaaugggaaugaa

SEQ ID NO: 395296 - RNA, 19 nt, Artificial Sequence
  Description of Artificial Sequence: Synthetic oligonucleotide
  Antisense Strand to SEQ ID NO: 395295
uucauucccauuuaucucu

SEQ ID NO: 395297 - RNA, 19 nt, Artificial Sequence
  Description of Artificial Sequence: Synthetic oligonucleotide
  Sense Strand Starting at position 976 of SEQ ID NO: 315288
ugcuaagugccagacugua

SEQ ID NO: 395298 - RNA, 19 nt, Artificial Sequence
  Description of Artificial Sequence: Synthetic oligonucleotide
  Antisense Strand to SEQ ID NO: 395297
uacagucuggcacuuagca

SEQ ID NO: 395299 - RNA, 19 nt, Artificial Sequence
  Description of Artificial Sequence: Synthetic oligonucleotide
  Sense Strand Starting at position 976 of SEQ ID NO: 315301
acuguaugaucuccuggau

SEQ ID NO: 395300 - RNA, 19 nt, Artificial Sequence
  Description of Artificial Sequence: Synthetic oligonucleotide
  Antisense Strand to SEQ ID NO: 395299
auccaggagaucauacagu

SEQ ID NO: 395301 - RNA, 19 nt, Artificial Sequence
  Description of Artificial Sequence: Synthetic oligonucleotide
  Sense Strand Starting at position 976 of SEQ ID NO: 315304
guaugaucuccuggauucu

SEQ ID NO: 395302 - RNA, 19 nt, Artificial Sequence
  Description of Artificial Sequence: Synthetic oligonucleotide
  Antisense Strand to SEQ ID NO: 395301
agaauccaggagaucauac

SEQ ID NO: 395303 - RNA, 19 nt, Artificial Sequence
  Description of Artificial Sequence: Synthetic oligonucleotide
  Sense Strand Starting at position 976 of SEQ ID NO: 315325
aaagguugcuguccacaca

SEQ ID NO: 395304 - RNA, 19 nt, Artificial Sequence
  Description of Artificial Sequence: Synthetic oligonucleotide
  Antisense Strand to SEQ ID NO: 395303
uguguggacagcaaccuuu

SEQ ID NO: 395305 - RNA, 19 nt, Artificial Sequence
  Description of Artificial Sequence: Synthetic oligonucleotide
  Sense Strand Starting at position 976 of SEQ ID NO: 315406
agcuuccuuccagagaaua

SEQ ID NO: 395306 - RNA, 19 nt, Artificial Sequence
  Description of Artificial Sequence: Synthetic oligonucleotide
  Antisense Strand to SEQ ID NO: 395305
uauucucuggaaggaagcu

SEQ ID NO: 395307 - RNA, 19 nt, Artificial Sequence
  Description of Artificial Sequence: Synthetic oligonucleotide
  Sense Strand Starting at position 976 of SEQ ID NO: 315436
aagcuuuccuggcugugaa

SEQ ID NO: 395308 - RNA, 19 nt, Artificial Sequence
  Description of Artificial Sequence: Synthetic oligonucleotide
  Antisense Strand to SEQ ID NO: 395307
uucacagccaggaaagcuu

SEQ ID NO: 395309 - RNA, 19 nt, Artificial Sequence
  Description of Artificial Sequence: Synthetic oligonucleotide
  Sense Strand Starting at position 976 of SEQ ID NO: 315439
cuuuccuggcugugaacaa

SEQ ID NO: 395310 - RNA, 19 nt, Artificial Sequence
  Description of Artificial Sequence: Synthetic oligonucleotide
  Antisense Strand to SEQ ID NO: 395309
uuguucacagccaggaaag

SEQ ID NO: 395311 - RNA, 19 nt, Artificial Sequence
  Description of Artificial Sequence: Synthetic oligonucleotide
  Sense Strand Starting at position 976 of SEQ ID NO: 315470
cuuccuauguguucuaaga

SEQ ID NO: 395312 - RNA, 19 nt, Artificial Sequence
  Description of Artificial Sequence: Synthetic oligonucleotide
  Antisense Strand to SEQ ID NO: 395311
ucuuagaacacauaggaag

SEQ ID NO: 395313 - RNA, 19 nt, Artificial Sequence
  Description of Artificial Sequence: Synthetic oligonucleotide
  Sense Strand Starting at position 976 of SEQ ID NO: 315540
uagacuguaguuugugaca

SEQ ID NO: 395314 - RNA, 19 nt, Artificial Sequence
  Description of Artificial Sequence: Synthetic oligonucleotide
  Antisense Strand to SEQ ID NO: 395313
ugucacaaacuacagucua

SEQ ID NO: 395315 - RNA, 19 nt, Artificial Sequence
  Description of Artificial Sequence: Synthetic oligonucleotide
  Sense Strand Starting at position 976 of SEQ ID NO: 315562
ggaucauaaagguguucgu

SEQ ID NO: 395316 - RNA, 19 nt, Artificial Sequence
  Description of Artificial Sequence: Synthetic oligonucleotide
  Antisense Strand to SEQ ID NO: 395315
acgaacaccuuuaugaucc

SEQ ID NO: 395317 - RNA, 19 nt, Artificial Sequence
  Description of Artificial Sequence: Synthetic oligonucleotide
  Sense Strand Starting at position 976 of SEQ ID NO: 315565
ucauaaagguguucguuag

SEQ ID NO: 395318 - RNA, 19 nt, Artificial Sequence
  Description of Artificial Sequence: Synthetic oligonucleotide
  Antisense Strand to SEQ ID NO: 395317
cuaacgaacaccuuuauga

SEQ ID NO: 395319 - RNA, 19 nt, Artificial Sequence
  Description of Artificial Sequence: Synthetic oligonucleotide
  Sense Strand Starting at position 976 of SEQ ID NO: 315569
aaagguguucguuagcaau

SEQ ID NO: 395320 - RNA, 19 nt, Artificial Sequence
  Description of Artificial Sequence: Synthetic oligonucleotide
  Antisense Strand to SEQ ID NO: 395319
auugcuaacgaacaccuuu

SEQ ID NO: 395321 - RNA, 19 nt, Artificial Sequence
  Description of Artificial Sequence: Synthetic oligonucleotide
  Sense Strand Starting at position 976 of SEQ ID NO: 315818
gcuccauagcuuggauacu

SEQ ID NO: 395322 - RNA, 19 nt, Artificial Sequence
  Description of Artificial Sequence: Synthetic oligonucleotide
  Antisense Strand to SEQ ID NO: 395321
aguauccaagcuauggagc

SEQ ID NO: 395323 - RNA, 19 nt, Artificial Sequence
  Description of Artificial Sequence: Synthetic oligonucleotide
  Sense Strand Starting at position 976 of SEQ ID NO: 315873
gacagugauuaucuaaggu

SEQ ID NO: 395324 - RNA, 19 nt, Artificial Sequence
  Description of Artificial Sequence: Synthetic oligonucleotide
  Antisense Strand to SEQ ID NO: 395323
accuuagauaaucacuguc

SEQ ID NO: 395325 - RNA, 19 nt, Artificial Sequence
  Description of Artificial Sequence: Synthetic oligonucleotide
  Sense Strand Starting at position 976 of SEQ ID NO: 315907
acaaacugucaacguuaaa

SEQ ID NO: 395326 - RNA, 19 nt, Artificial Sequence
  Description of Artificial Sequence: Synthetic oligonucleotide
  Antisense Strand to SEQ ID NO: 395325
uuuaacguugacaguuugu

SEQ ID NO: 395327 - RNA, 19 nt, Artificial Sequence
  Description of Artificial Sequence: Synthetic oligonucleotide
  Sense Strand Starting at position 976 of SEQ ID NO: 315959
ccggaagauuaagcauauu

SEQ ID NO: 395328 - RNA, 19 nt, Artificial Sequence
  Description of Artificial Sequence: Synthetic oligonucleotide
  Antisense Strand to SEQ ID NO: 395327
aauaugcuuaaucuuccgg

SEQ ID NO: 395329 - RNA, 19 nt, Artificial Sequence
  Description of Artificial Sequence: Synthetic oligonucleotide
  Sense Strand Starting at position 976 of SEQ ID NO: 316106
aaagcaacuccgugggaua

SEQ ID NO: 395330 - RNA, 19 nt, Artificial Sequence
  Description of Artificial Sequence: Synthetic oligonucleotide
  Antisense Strand to SEQ ID NO: 395329
uaucccacggaguugcuuu

SEQ ID NO: 395331 - RNA, 19 nt, Artificial Sequence
  Description of Artificial Sequence: Synthetic oligonucleotide
  Sense Strand Starting at position 976 of SEQ ID NO: 316118
ugggauaguugaccguuaa

SEQ ID NO: 395332 - RNA, 19 nt, Artificial Sequence
  Description of Artificial Sequence: Synthetic oligonucleotide
  Antisense Strand to SEQ ID NO: 395331
uuaacggucaacuauccca

SEQ ID NO: 395333 - RNA, 19 nt, Artificial Sequence
  Description of Artificial Sequence: Synthetic oligonucleotide
  Sense Strand Starting at position 976 of SEQ ID NO: 316119
gggauaguugaccguuaaa

SEQ ID NO: 395334 - RNA, 19 nt, Artificial Sequence
  Description of Artificial Sequence: Synthetic oligonucleotide
  Antisense Strand to SEQ ID NO: 395333
uuuaacggucaacuauccc

SEQ ID NO: 395335 - RNA, 19 nt, Artificial Sequence
  Description of Artificial Sequence: Synthetic oligonucleotide
  Sense Strand Starting at position 976 of SEQ ID NO: 316211
ccucguagaagcugggaua

SEQ ID NO: 395336 - RNA, 19 nt, Artificial Sequence
  Description of Artificial Sequence: Synthetic oligonucleotide
  Antisense Strand to SEQ ID NO: 395335
uaucccagcuucuacgagg

SEQ ID NO: 395337 - RNA, 19 nt, Artificial Sequence
  Description of Artificial Sequence: Synthetic oligonucleotide
  Sense Strand Starting at position 976 of SEQ ID NO: 316258
uaacguaucgcauaagaca

SEQ ID NO: 395338 - RNA, 19 nt, Artificial Sequence
  Description of Artificial Sequence: Synthetic oligonucleotide
  Antisense Strand to SEQ ID NO: 395337
ugucuuaugcgauacguua

SEQ ID NO: 395339 - RNA, 19 nt, Artificial Sequence
  Description of Artificial Sequence: Synthetic oligonucleotide
  Sense Strand Starting at position 976 of SEQ ID NO: 316467
aagccuagucuagagcgaa

SEQ ID NO: 395340 - RNA, 19 nt, Artificial Sequence
  Description of Artificial Sequence: Synthetic oligonucleotide
  Antisense Strand to SEQ ID NO: 395339
uucgcucuagacuaggcuu

SEQ ID NO: 395341 - RNA, 19 nt, Artificial Sequence
  Description of Artificial Sequence: Synthetic oligonucleotide
  Sense Strand Starting at position 976 of SEQ ID NO: 316481
gcgaaugcucaacgauuug

SEQ ID NO: 395342 - RNA, 19 nt, Artificial Sequence
  Description of Artificial Sequence: Synthetic oligonucleotide
  Antisense Strand to SEQ ID NO: 395341
caaaucguugagcauucgc

SEQ ID NO: 395343 - RNA, 19 nt, Artificial Sequence
  Description of Artificial Sequence: Synthetic oligonucleotide
  Sense Strand Starting at position 976 of SEQ ID NO: 316486
ugcucaacgauuuguugaa

SEQ ID NO: 395344 - RNA, 19 nt, Artificial Sequence
  Description of Artificial Sequence: Synthetic oligonucleotide
  Antisense Strand to SEQ ID NO: 395343
uucaacaaaucguugagca

SEQ ID NO: 395345 - RNA, 19 nt, Artificial Sequence
  Description of Artificial Sequence: Synthetic oligonucleotide
  Sense Strand Starting at position 976 of SEQ ID NO: 316840
cuccguugggcugaagauu

SEQ ID NO: 395346 - RNA, 19 nt, Artificial Sequence
  Description of Artificial Sequence: Synthetic oligonucleotide
  Antisense Strand to SEQ ID NO: 395345
aaucuucagcccaacggag

SEQ ID NO: 395347 - RNA, 19 nt, Artificial Sequence
  Description of Artificial Sequence: Synthetic oligonucleotide
  Sense Strand Starting at position 976 of SEQ ID NO: 317080
aaccuaccgucguuacaga

SEQ ID NO: 395348 - RNA, 19 nt, Artificial Sequence
  Description of Artificial Sequence: Synthetic oligonucleotide
  Antisense Strand to SEQ ID NO: 395347
ucuguaacgacgguagguu

SEQ ID NO: 395349 - RNA, 19 nt, Artificial Sequence
  Description of Artificial Sequence: Synthetic oligonucleotide
  Sense Strand Starting at position 976 of SEQ ID NO: 317311
gggaaauguggucgccaga

SEQ ID NO: 395350 - RNA, 19 nt, Artificial Sequence
  Description of Artificial Sequence: Synthetic oligonucleotide
  Antisense Strand to SEQ ID NO: 395349
ucuggcgaccacauuuccc

SEQ ID NO: 395351 - RNA, 19 nt, Artificial Sequence
  Description of Artificial Sequence: Synthetic oligonucleotide
  Sense Strand Starting at position 976 of SEQ ID NO: 317314
aaauguggucgccagacca

SEQ ID NO: 395352 - RNA, 19 nt, Artificial Sequence
  Description of Artificial Sequence: Synthetic oligonucleotide
  Antisense Strand to SEQ ID NO: 395351
uggucuggcgaccacauuu

SEQ ID NO: 395353 - RNA, 19 nt, Artificial Sequence
  Description of Artificial Sequence: Synthetic oligonucleotide
  Sense Strand Starting at position 976 of SEQ ID NO: 317383
ucacuacagaguugucgau

SEQ ID NO: 395354 - RNA, 19 nt, Artificial Sequence
  Description of Artificial Sequence: Synthetic oligonucleotide
  Antisense Strand to SEQ ID NO: 395353
aucgacaacucuguaguga

SEQ ID NO: 395355 - RNA, 19 nt, Artificial Sequence
  Description of Artificial Sequence: Synthetic oligonucleotide
  Sense Strand Starting at position 976 of SEQ ID NO: 317407
uuugcagaccuggauuagu

SEQ ID NO: 395356 - RNA, 19 nt, Artificial Sequence
  Description of Artificial Sequence: Synthetic oligonucleotide
  Antisense Strand to SEQ ID NO: 395355
acuaauccaggucugcaaa

SEQ ID NO: 395357 - RNA, 19 nt, Artificial Sequence
  Description of Artificial Sequence: Synthetic oligonucleotide
  Sense Strand Starting at position 976 of SEQ ID NO: 317435
uccuauuaggcauguuaau

SEQ ID NO: 395358 - RNA, 19 nt, Artificial Sequence
  Description of Artificial Sequence: Synthetic oligonucleotide
  Antisense Strand to SEQ ID NO: 395357
auuaacaugccuaauagga

SEQ ID NO: 395359 - RNA, 19 nt, Artificial Sequence
  Description of Artificial Sequence: Synthetic oligonucleotide
  Sense Strand Starting at position 976 of SEQ ID NO: 317557
agugguggcucacucacaa

SEQ ID NO: 395360 - RNA, 19 nt, Artificial Sequence
  Description of Artificial Sequence: Synthetic oligonucleotide
  Antisense Strand to SEQ ID NO: 395359
uugugagugagccaccacu

SEQ ID NO: 395361 - RNA, 19 nt, Artificial Sequence
  Description of Artificial Sequence: Synthetic oligonucleotide
  Sense Strand Starting at position 976 of SEQ ID NO: 317772
cugugaucucgucacagca

SEQ ID NO: 395362 - RNA, 19 nt, Artificial Sequence
  Description of Artificial Sequence: Synthetic oligonucleotide
  Antisense Strand to SEQ ID NO: 395361
ugcugugacgagaucacag

SEQ ID NO: 395363 - RNA, 19 nt, Artificial Sequence
  Description of Artificial Sequence: Synthetic oligonucleotide
  Sense Strand Starting at position 976 of SEQ ID NO: 318815
acauuaguugaucgcuuua

SEQ ID NO: 395364 - RNA, 19 nt, Artificial Sequence
  Description of Artificial Sequence: Synthetic oligonucleotide
  Antisense Strand to SEQ ID NO: 395363
uaaagcgaucaacuaaugu

SEQ ID NO: 395365 - RNA, 19 nt, Artificial Sequence
  Description of Artificial Sequence: Synthetic oligonucleotide
  Sense Strand Starting at position 976 of SEQ ID NO: 318820
aguugaucgcuuuacuaga

SEQ ID NO: 395366 - RNA, 19 nt, Artificial Sequence
  Description of Artificial Sequence: Synthetic oligonucleotide
  Antisense Strand to SEQ ID NO: 395365
ucuaguaaagcgaucaacu

SEQ ID NO: 395367 - RNA, 19 nt, Artificial Sequence
  Description of Artificial Sequence: Synthetic oligonucleotide
  Sense Strand Starting at position 976 of SEQ ID NO: 318825
aucgcuuuacuagaugcua

SEQ ID NO: 395368 - RNA, 19 nt, Artificial Sequence
  Description of Artificial Sequence: Synthetic oligonucleotide
  Antisense Strand to SEQ ID NO: 395367
uagcaucuaguaaagcgau

SEQ ID NO: 395369 - RNA, 19 nt, Artificial Sequence
  Description of Artificial Sequence: Synthetic oligonucleotide
  Sense Strand Starting at position 976 of SEQ ID NO: 318840
gcuauauuauugcccuaga

SEQ ID NO: 395370 - RNA, 19 nt, Artificial Sequence
  Description of Artificial Sequence: Synthetic oligonucleotide
  Antisense Strand to SEQ ID NO: 395369
ucuagggcaauaauauagc

SEQ ID NO: 395371 - RNA, 19 nt, Artificial Sequence
  Description of Artificial Sequence: Synthetic oligonucleotide
  Sense Strand Starting at position 976 of SEQ ID NO: 318853
ccuagaugcuuugcaaaca

SEQ ID NO: 395372 - RNA, 19 nt, Artificial Sequence
  Description of Artificial Sequence: Synthetic oligonucleotide
  Antisense Strand to SEQ ID NO: 395371
uguuugcaaagcaucuagg

SEQ ID NO: 395373 - RNA, 19 nt, Artificial Sequence
  Description of Artificial Sequence: Synthetic oligonucleotide
  Sense Strand Starting at position 976 of SEQ ID NO: 319212
ugccuauaccauuaguuac

SEQ ID NO: 395374 - RNA, 19 nt, Artificial Sequence
  Description of Artificial Sequence: Synthetic oligonucleotide
  Antisense Strand to SEQ ID NO: 395373
guaacuaaugguauaggca

SEQ ID NO: 395375 - RNA, 19 nt, Artificial Sequence
  Description of Artificial Sequence: Synthetic oligonucleotide
  Sense Strand Starting at position 976 of SEQ ID NO: 319215
cuauaccauuaguuacaga

SEQ ID NO: 395376 - RNA, 19 nt, Artificial Sequence
  Description of Artificial Sequence: Synthetic oligonucleotide
  Antisense Strand to SEQ ID NO: 395375
ucuguaacuaaugguauag

SEQ ID NO: 395377 - RNA, 19 nt, Artificial Sequence
  Description of Artificial Sequence: Synthetic oligonucleotide
  Sense Strand Starting at position 977 of SEQ ID NO: 315892
ccaggcucggccugguaau

SEQ ID NO: 395378 - RNA, 19 nt, Artificial Sequence
  Description of Artificial Sequence: Synthetic oligonucleotide
  Antisense Strand to SEQ ID NO: 395377
auuaccaggccgagccugg

SEQ ID NO: 395379 - RNA, 19 nt, Artificial Sequence
  Description of Artificial Sequence: Synthetic oligonucleotide
  Sense Strand Starting at position 977 of SEQ ID NO: 315893
caggcucggccugguaaua

SEQ ID NO: 395380 - RNA, 19 nt, Artificial Sequence
  Description of Artificial Sequence: Synthetic oligonucleotide
  Antisense Strand to SEQ ID NO: 395379
uauuaccaggccgagccug

SEQ ID NO: 395381 - RNA, 19 nt, Artificial Sequence
  Description of Artificial Sequence: Synthetic oligonucleotide
  Sense Strand Starting at position 977 of SEQ ID NO: 315898
ucggccugguaauagaauu

SEQ ID NO: 395382 - RNA, 19 nt, Artificial Sequence
  Description of Artificial Sequence: Synthetic oligonucleotide
  Antisense Strand to SEQ ID NO: 395381
aauucuauuaccaggccga

SEQ ID NO: 395383 - RNA, 19 nt, Artificial Sequence
  Description of Artificial Sequence: Synthetic oligonucleotide
  Sense Strand Starting at position 977 of SEQ ID NO: 315906
guaauagaauucuauaagg

SEQ ID NO: 395384 - RNA, 19 nt, Artificial Sequence
  Description of Artificial Sequence: Synthetic oligonucleotide
  Antisense Strand to SEQ ID NO: 395383
ccuuauagaauucuauuac

SEQ ID NO: 395385 - RNA, 19 nt, Artificial Sequence
  Description of Artificial Sequence: Synthetic oligonucleotide
  Sense Strand Starting at position 977 of SEQ ID NO: 315921
aaggaaaggugcuacaacu

SEQ ID NO: 395386 - RNA, 19 nt, Artificial Sequence
  Description of Artificial Sequence: Synthetic oligonucleotide
  Antisense Strand to SEQ ID NO: 395385
aguuguagcaccuuuccuu

SEQ ID NO: 395387 - RNA, 19 nt, Artificial Sequence
  Description of Artificial Sequence: Synthetic oligonucleotide
  Sense Strand Starting at position 977 of SEQ ID NO: 315930
ugcuacaacuauccagaga

SEQ ID NO: 395388 - RNA, 19 nt, Artificial Sequence
  Description of Artificial Sequence: Synthetic oligonucleotide
  Antisense Strand to SEQ ID NO: 395387
ucucuggauaguuguagca

SEQ ID NO: 395389 - RNA, 19 nt, Artificial Sequence
  Description of Artificial Sequence: Synthetic oligonucleotide
  Sense Strand Starting at position 977 of SEQ ID NO: 315955
ggaccuguccugcagguua

SEQ ID NO: 395390 - RNA, 19 nt, Artificial Sequence
  Description of Artificial Sequence: Synthetic oligonucleotide
  Antisense Strand to SEQ ID NO: 395389
uaaccugcaggacaggucc

SEQ ID NO: 395391 - RNA, 19 nt, Artificial Sequence
  Description of Artificial Sequence: Synthetic oligonucleotide
  Sense Strand Starting at position 977 of SEQ ID NO: 315967
cagguuagguaucuaguua

SEQ ID NO: 395392 - RNA, 19 nt, Artificial Sequence
  Description of Artificial Sequence: Synthetic oligonucleotide
  Antisense Strand to SEQ ID NO: 395391
uaacuagauaccuaaccug

SEQ ID NO: 395393 - RNA, 19 nt, Artificial Sequence
  Description of Artificial Sequence: Synthetic oligonucleotide
  Sense Strand Starting at position 977 of SEQ ID NO: 315968
agguuagguaucuaguuag

SEQ ID NO: 395394 - RNA, 19 nt, Artificial Sequence
  Description of Artificial Sequence: Synthetic oligonucleotide
  Antisense Strand to SEQ ID NO: 395393
cuaacuagauaccuaaccu

SEQ ID NO: 395395 - RNA, 19 nt, Artificial Sequence
  Description of Artificial Sequence: Synthetic oligonucleotide
  Sense Strand Starting at position 977 of SEQ ID NO: 315971
uuagguaucuaguuagaug

SEQ ID NO: 395396 - RNA, 19 nt, Artificial Sequence
  Description of Artificial Sequence: Synthetic oligonucleotide
  Antisense Strand to SEQ ID NO: 395395
caucuaacuagauaccuaa

SEQ ID NO: 395397 - RNA, 19 nt, Artificial Sequence
  Description of Artificial Sequence: Synthetic oligonucleotide
  Sense Strand Starting at position 977 of SEQ ID NO: 315974
gguaucuaguuagaugcua

SEQ ID NO: 395398 - RNA, 19 nt, Artificial Sequence
  Description of Artificial Sequence: Synthetic oligonucleotide
  Antisense Strand to SEQ ID NO: 395397
uagcaucuaacuagauacc

SEQ ID NO: 395399 - RNA, 19 nt, Artificial Sequence
  Description of Artificial Sequence: Synthetic oligonucleotide
  Sense Strand Starting at position 977 of SEQ ID NO: 315982
guuagaugcuaguuucuga

SEQ ID NO: 395400 - RNA, 19 nt, Artificial Sequence
  Description of Artificial Sequence: Synthetic oligonucleotide
  Antisense Strand to SEQ ID NO: 395399
ucagaaacuagcaucuaac

SEQ ID NO: 395401 - RNA, 19 nt, Artificial Sequence
  Description of Artificial Sequence: Synthetic oligonucleotide
  Sense Strand Starting at position 977 of SEQ ID NO: 315986
gaugcuaguuucugagaca

SEQ ID NO: 395402 - RNA, 19 nt, Artificial Sequence
  Description of Artificial Sequence: Synthetic oligonucleotide
  Antisense Strand to SEQ ID NO: 395401
ugucucagaaacuagcauc

SEQ ID NO: 395403 - RNA, 19 nt, Artificial Sequence
  Description of Artificial Sequence: Synthetic oligonucleotide
  Sense Strand Starting at position 977 of SEQ ID NO: 315987
augcuaguuucugagacaa

SEQ ID NO: 395404 - RNA, 19 nt, Artificial Sequence
  Description of Artificial Sequence: Synthetic oligonucleotide
  Antisense Strand to SEQ ID NO: 395403
uugucucagaaacuagcau

SEQ ID NO: 395405 - RNA, 19 nt, Artificial Sequence
  Description of Artificial Sequence: Synthetic oligonucleotide
  Sense Strand Starting at position 977 of SEQ ID NO: 315989
gcuaguuucugagacaagg

SEQ ID NO: 395406 - RNA, 19 nt, Artificial Sequence
  Description of Artificial Sequence: Synthetic oligonucleotide
  Antisense Strand to SEQ ID NO: 395405
ccuugucucagaaacuagc

SEQ ID NO: 395407 - RNA, 19 nt, Artificial Sequence
  Description of Artificial Sequence: Synthetic oligonucleotide
  Sense Strand Starting at position 977 of SEQ ID NO: 316096
cuugacaccucucguuaga

SEQ ID NO: 395408 - RNA, 19 nt, Artificial Sequence
  Description of Artificial Sequence: Synthetic oligonucleotide
  Antisense Strand to SEQ ID NO: 395407
ucuaacgagaggugucaag

SEQ ID NO: 395409 - RNA, 19 nt, Artificial Sequence
  Description of Artificial Sequence: Synthetic oligonucleotide
  Sense Strand Starting at position 977 of SEQ ID NO: 316098
ugacaccucucguuagaga

SEQ ID NO: 395410 - RNA, 19 nt, Artificial Sequence
  Description of Artificial Sequence: Synthetic oligonucleotide
  Antisense Strand to SEQ ID NO: 395409
ucucuaacgagagguguca

SEQ ID NO: 395411 - RNA, 19 nt, Artificial Sequence
  Description of Artificial Sequence: Synthetic oligonucleotide
  Sense Strand Starting at position 977 of SEQ ID NO: 316128
caguaauggugacauauuu

SEQ ID NO: 395412 - RNA, 19 nt, Artificial Sequence
  Description of Artificial Sequence: Synthetic oligonucleotide
  Antisense Strand to SEQ ID NO: 395411
aaauaugucaccauuacug

SEQ ID NO: 395413 - RNA, 19 nt, Artificial Sequence
  Description of Artificial Sequence: Synthetic oligonucleotide
  Sense Strand Starting at position 977 of SEQ ID NO: 316326
uacgcucacgguuuaugua

SEQ ID NO: 395414 - RNA, 19 nt, Artificial Sequence
  Description of Artificial Sequence: Synthetic oligonucleotide
  Antisense Strand to SEQ ID NO: 395413
uacauaaaccgugagcgua

SEQ ID NO: 395415 - RNA, 19 nt, Artificial Sequence
  Description of Artificial Sequence: Synthetic oligonucleotide
  Sense Strand Starting at position 977 of SEQ ID NO: 316334
cgguuuauguacccuacga

SEQ ID NO: 395416 - RNA, 19 nt, Artificial Sequence
  Description of Artificial Sequence: Synthetic oligonucleotide
  Antisense Strand to SEQ ID NO: 395415
ucguaggguacauaaaccg

SEQ ID NO: 395417 - RNA, 19 nt, Artificial Sequence
  Description of Artificial Sequence: Synthetic oligonucleotide
  Sense Strand Starting at position 977 of SEQ ID NO: 316336
guuuauguacccuacgaaa

SEQ ID NO: 395418 - RNA, 19 nt, Artificial Sequence
  Description of Artificial Sequence: Synthetic oligonucleotide
  Antisense Strand to SEQ ID NO: 395417
uuucguaggguacauaaac

SEQ ID NO: 395419 - RNA, 19 nt, Artificial Sequence
  Description of Artificial Sequence: Synthetic oligonucleotide
  Sense Strand Starting at position 977 of SEQ ID NO: 316338
uuauguacccuacgaaaca

SEQ ID NO: 395420 - RNA, 19 nt, Artificial Sequence
  Description of Artificial Sequence: Synthetic oligonucleotide
  Antisense Strand to SEQ ID NO: 395419
uguuucguaggguacauaa

SEQ ID NO: 395421 - RNA, 19 nt, Artificial Sequence
  Description of Artificial Sequence: Synthetic oligonucleotide
  Sense Strand Starting at position 977 of SEQ ID NO: 316466
uggaaucuaaagcgugaau

SEQ ID NO: 395422 - RNA, 19 nt, Artificial Sequence
  Description of Artificial Sequence: Synthetic oligonucleotide
  Antisense Strand to SEQ ID NO: 395421
auucacgcuuuagauucca

SEQ ID NO: 395423 - RNA, 19 nt, Artificial Sequence
  Description of Artificial Sequence: Synthetic oligonucleotide
  Sense Strand Starting at position 977 of SEQ ID NO: 316468
gaaucuaaagcgugaauac

SEQ ID NO: 395424 - RNA, 19 nt, Artificial Sequence
  Description of Artificial Sequence: Synthetic oligonucleotide
  Antisense Strand to SEQ ID NO: 395423
guauucacgcuuuagauuc

SEQ ID NO: 395425 - RNA, 19 nt, Artificial Sequence
  Description of Artificial Sequence: Synthetic oligonucleotide
  Sense Strand Starting at position 977 of SEQ ID NO: 316662
gagcucccuuccuagugau

SEQ ID NO: 395426 - RNA, 19 nt, Artificial Sequence
  Description of Artificial Sequence: Synthetic oligonucleotide
  Antisense Strand to SEQ ID NO: 395425
aucacuaggaagggagcuc

SEQ ID NO: 395427 - RNA, 19 nt, Artificial Sequence
  Description of Artificial Sequence: Synthetic oligonucleotide
  Sense Strand Starting at position 977 of SEQ ID NO: 316686
agaauuggaucugaaacag

SEQ ID NO: 395428 - RNA, 19 nt, Artificial Sequence
  Description of Artificial Sequence: Synthetic oligonucleotide
  Antisense Strand to SEQ ID NO: 395427
cuguuucagauccaauucu

SEQ ID NO: 395429 - RNA, 19 nt, Artificial Sequence
  Description of Artificial Sequence: Synthetic oligonucleotide
  Sense Strand Starting at position 977 of SEQ ID NO: 316799
cggcgggaccgguaaucua

SEQ ID NO: 395430 - RNA, 19 nt, Artificial Sequence
  Description of Artificial Sequence: Synthetic oligonucleotide
  Antisense Strand to SEQ ID NO: 395429
uagauuaccggucccgccg

SEQ ID NO: 395431 - RNA, 19 nt, Artificial Sequence
  Description of Artificial Sequence: Synthetic oligonucleotide
  Sense Strand Starting at position 977 of SEQ ID NO: 317397
uugugcuuuccucucaguu

SEQ ID NO: 395432 - RNA, 19 nt, Artificial Sequence
  Description of Artificial Sequence: Synthetic oligonucleotide
  Antisense Strand to SEQ ID NO: 395431
aacugagaggaaagcacaa

SEQ ID NO: 395433 - RNA, 19 nt, Artificial Sequence
  Description of Artificial Sequence: Synthetic oligonucleotide
  Sense Strand Starting at position 977 of SEQ ID NO: 317401
gcuuuccucucaguugauu

SEQ ID NO: 395434 - RNA, 19 nt, Artificial Sequence
  Description of Artificial Sequence: Synthetic oligonucleotide
  Antisense Strand to SEQ ID NO: 395433
aaucaacugagaggaaagc

SEQ ID NO: 395435 - RNA, 19 nt, Artificial Sequence
  Description of Artificial Sequence: Synthetic oligonucleotide
  Sense Strand Starting at position 977 of SEQ ID NO: 317414
uugauugaggcuuacaguu

SEQ ID NO: 395436 - RNA, 19 nt, Artificial Sequence
  Description of Artificial Sequence: Synthetic oligonucleotide
  Antisense Strand to SEQ ID NO: 395435
aacuguaagccucaaucaa

SEQ ID NO: 395437 - RNA, 19 nt, Artificial Sequence
  Description of Artificial Sequence: Synthetic oligonucleotide
  Sense Strand Starting at position 977 of SEQ ID NO: 317442
cuugacuuuccugagguuu

SEQ ID NO: 395438 - RNA, 19 nt, Artificial Sequence
  Description of Artificial Sequence: Synthetic oligonucleotide
  Antisense Strand to SEQ ID NO: 395437
aaaccucaggaaagucaag

SEQ ID NO: 395439 - RNA, 19 nt, Artificial Sequence
  Description of Artificial Sequence: Synthetic oligonucleotide
  Sense Strand Starting at position 977 of SEQ ID NO: 317510
cuccuuauuguccguuagu

SEQ ID NO: 395440 - RNA, 19 nt, Artificial Sequence
  Description of Artificial Sequence: Synthetic oligonucleotide
  Antisense Strand to SEQ ID NO: 395439
acuaacggacaauaaggag

SEQ ID NO: 395441 - RNA, 19 nt, Artificial Sequence
  Description of Artificial Sequence: Synthetic oligonucleotide
  Sense Strand Starting at position 977 of SEQ ID NO: 317512
ccuuauuguccguuagugu

SEQ ID NO: 395442 - RNA, 19 nt, Artificial Sequence
  Description of Artificial Sequence: Synthetic oligonucleotide
  Antisense Strand to SEQ ID NO: 395441
acacuaacggacaauaagg

SEQ ID NO: 395443 - RNA, 19 nt, Artificial Sequence
  Description of Artificial Sequence: Synthetic oligonucleotide
  Sense Strand Starting at position 977 of SEQ ID NO: 317519
guccguuagugugagagaa

SEQ ID NO: 395444 - RNA, 19 nt, Artificial Sequence
  Description of Artificial Sequence: Synthetic oligonucleotide
  Antisense Strand to SEQ ID NO: 395443
uucucucacacuaacggac

SEQ ID NO: 395445 - RNA, 19 nt, Artificial Sequence
  Description of Artificial Sequence: Synthetic oligonucleotide
  Sense Strand Starting at position 977 of SEQ ID NO: 317521
ccguuagugugagagaaau

SEQ ID NO: 395446 - RNA, 19 nt, Artificial Sequence
  Description of Artificial Sequence: Synthetic oligonucleotide
  Antisense Strand to SEQ ID NO: 395445
auuucucucacacuaacgg

SEQ ID NO: 395447 - RNA, 19 nt, Artificial Sequence
  Description of Artificial Sequence: Synthetic oligonucleotide
  Sense Strand Starting at position 977 of SEQ ID NO: 317544
gggagcuucuucgggagua

SEQ ID NO: 395448 - RNA, 19 nt, Artificial Sequence
  Description of Artificial Sequence: Synthetic oligonucleotide
  Antisense Strand to SEQ ID NO: 395447
uacucccgaagaagcuccc

SEQ ID NO: 395449 - RNA, 19 nt, Artificial Sequence
  Description of Artificial Sequence: Synthetic oligonucleotide
  Sense Strand Starting at position 977 of SEQ ID NO: 317545
ggagcuucuucgggaguaa

SEQ ID NO: 395450 - RNA, 19 nt, Artificial Sequence
  Description of Artificial Sequence: Synthetic oligonucleotide
  Antisense Strand to SEQ ID NO: 395449
uuacucccgaagaagcucc

SEQ ID NO: 395451 - RNA, 19 nt, Artificial Sequence
  Description of Artificial Sequence: Synthetic oligonucleotide
  Sense Strand Starting at position 977 of SEQ ID NO: 317546
gagcuucuucgggaguaag

SEQ ID NO: 395452 - RNA, 19 nt, Artificial Sequence
  Description of Artificial Sequence: Synthetic oligonucleotide
  Antisense Strand to SEQ ID NO: 395451
cuuacucccgaagaagcuc

SEQ ID NO: 395453 - RNA, 19 nt, Artificial Sequence
  Description of Artificial Sequence: Synthetic oligonucleotide
  Sense Strand Starting at position 977 of SEQ ID NO: 317549
cuucuucgggaguaaguuu

SEQ ID NO: 395454 - RNA, 19 nt, Artificial Sequence
  Description of Artificial Sequence: Synthetic oligonucleotide
  Antisense Strand to SEQ ID NO: 395453
aaacuuacucccgaagaag

SEQ ID NO: 395455 - RNA, 19 nt, Artificial Sequence
  Description of Artificial Sequence: Synthetic oligonucleotide
  Sense Strand Starting at position 977 of SEQ ID NO: 317558
gaguaaguuuaagccaucu

SEQ ID NO: 395456 - RNA, 19 nt, Artificial Sequence
  Description of Artificial Sequence: Synthetic oligonucleotide
  Antisense Strand to SEQ ID NO: 395455
agauggcuuaaacuuacuc

SEQ ID NO: 395457 - RNA, 19 nt, Artificial Sequence
  Description of Artificial Sequence: Synthetic oligonucleotide
  Sense Strand Starting at position 978 of SEQ ID NO: 315319
gauggaaugucugauauuu

SEQ ID NO: 395458 - RNA, 19 nt, Artificial Sequence
  Description of Artificial Sequence: Synthetic oligonucleotide
  Antisense Strand to SEQ ID NO: 395457
aaauaucagacauuccauc

SEQ ID NO: 395459 - RNA, 19 nt, Artificial Sequence
  Description of Artificial Sequence: Synthetic oligonucleotide
  Sense Strand Starting at position 978 of SEQ ID NO: 315369
uuuguugaggcaugagaaa

SEQ ID NO: 395460 - RNA, 19 nt, Artificial Sequence
  Description of Artificial Sequence: Synthetic oligonucleotide
  Antisense Strand to SEQ ID NO: 395459
uuucucaugccucaacaaa

SEQ ID NO: 395461 - RNA, 19 nt, Artificial Sequence
  Description of Artificial Sequence: Synthetic oligonucleotide
  Sense Strand Starting at position 978 of SEQ ID NO: 315505
gggcuagucuauuuaagca

SEQ ID NO: 395462 - RNA, 19 nt, Artificial Sequence
  Description of Artificial Sequence: Synthetic oligonucleotide
  Antisense Strand to SEQ ID NO: 395461
ugcuuaaauagacuagccc

SEQ ID NO: 395463 - RNA, 19 nt, Artificial Sequence
  Description of Artificial Sequence: Synthetic oligonucleotide
  Sense Strand Starting at position 978 of SEQ ID NO: 315658
uucccagucugguuuacaa

SEQ ID NO: 395464 - RNA, 19 nt, Artificial Sequence
  Description of Artificial Sequence: Synthetic oligonucleotide
  Antisense Strand to SEQ ID NO: 395463
uuguaaaccagacugggaa

SEQ ID NO: 395465 - RNA, 19 nt, Artificial Sequence
  Description of Artificial Sequence: Synthetic oligonucleotide
  Sense Strand Starting at position 978 of SEQ ID NO: 315759
ggugacagcauagaucauu

SEQ ID NO: 395466 - RNA, 19 nt, Artificial Sequence
  Description of Artificial Sequence: Synthetic oligonucleotide
  Antisense Strand to SEQ ID NO: 395465
aaugaucuaugcugucacc

SEQ ID NO: 395467 - RNA, 19 nt, Artificial Sequence
  Description of Artificial Sequence: Synthetic oligonucleotide
  Sense Strand Starting at position 978 of SEQ ID NO: 315881
uggucacuccgcuaacaug

SEQ ID NO: 395468 - RNA, 19 nt, Artificial Sequence
  Description of Artificial Sequence: Synthetic oligonucleotide
  Antisense Strand to SEQ ID NO: 395467
cauguuagcggagugacca

SEQ ID NO: 395469 - RNA, 19 nt, Artificial Sequence
  Description of Artificial Sequence: Synthetic oligonucleotide
  Sense Strand Starting at position 978 of SEQ ID NO: 315929
gacaaaucggagcagugau

SEQ ID NO: 395470 - RNA, 19 nt, Artificial Sequence
  Description of Artificial Sequence: Synthetic oligonucleotide
  Antisense Strand to SEQ ID NO: 395469
aucacugcuccgauuuguc

SEQ ID NO: 395471 - RNA, 19 nt, Artificial Sequence
  Description of Artificial Sequence: Synthetic oligonucleotide
  Sense Strand Starting at position 978 of SEQ ID NO: 315968
augucuuaacugcaggaua

SEQ ID NO: 395472 - RNA, 19 nt, Artificial Sequence
  Description of Artificial Sequence: Synthetic oligonucleotide
  Antisense Strand to SEQ ID NO: 395471
uauccugcaguuaagacau

SEQ ID NO: 395473 - RNA, 19 nt, Artificial Sequence
  Description of Artificial Sequence: Synthetic oligonucleotide
  Sense Strand Starting at position 978 of SEQ ID NO: 315970
gucuuaacugcaggauaaa

SEQ ID NO: 395474 - RNA, 19 nt, Artificial Sequence
  Description of Artificial Sequence: Synthetic oligonucleotide
  Antisense Strand to SEQ ID NO: 395473
uuuauccugcaguuaagac

SEQ ID NO: 395475 - RNA, 19 nt, Artificial Sequence
  Description of Artificial Sequence: Synthetic oligonucleotide
  Sense Strand Starting at position 978 of SEQ ID NO: 315983
gauaaaguucaggguaggu

SEQ ID NO: 395476 - RNA, 19 nt, Artificial Sequence
  Description of Artificial Sequence: Synthetic oligonucleotide
  Antisense Strand to SEQ ID NO: 395475
accuacccugaacuuuauc

SEQ ID NO: 395477 - RNA, 19 nt, Artificial Sequence
  Description of Artificial Sequence: Synthetic oligonucleotide
  Sense Strand Starting at position 978 of SEQ ID NO: 316095
guccaauuaugaucaguua

SEQ ID NO: 395478 - RNA, 19 nt, Artificial Sequence
  Description of Artificial Sequence: Synthetic oligonucleotide
  Antisense Strand to SEQ ID NO: 395477
uaacugaucauaauuggac

SEQ ID NO: 395479 - RNA, 19 nt, Artificial Sequence
  Description of Artificial Sequence: Synthetic oligonucleotide
  Sense Strand Starting at position 978 of SEQ ID NO: 316368
cguccuauccagugggaaa

SEQ ID NO: 395480 - RNA, 19 nt, Artificial Sequence
  Description of Artificial Sequence: Synthetic oligonucleotide
  Antisense Strand to SEQ ID NO: 395479
uuucccacuggauaggacg

SEQ ID NO: 395481 - RNA, 19 nt, Artificial Sequence
  Description of Artificial Sequence: Synthetic oligonucleotide
  Sense Strand Starting at position 978 of SEQ ID NO: 316502
aaagacguuccugauauca

SEQ ID NO: 395482 - RNA, 19 nt, Artificial Sequence
  Description of Artificial Sequence: Synthetic oligonucleotide
  Antisense Strand to SEQ ID NO: 395481
ugauaucaggaacgucuuu

SEQ ID NO: 395483 - RNA, 19 nt, Artificial Sequence
  Description of Artificial Sequence: Synthetic oligonucleotide
  Sense Strand Starting at position 978 of SEQ ID NO: 316647
acuccauugguaugucacu

SEQ ID NO: 395484 - RNA, 19 nt, Artificial Sequence
  Description of Artificial Sequence: Synthetic oligonucleotide
  Antisense Strand to SEQ ID NO: 395483
agugacauaccaauggagu

SEQ ID NO: 395485 - RNA, 19 nt, Artificial Sequence
  Description of Artificial Sequence: Synthetic oligonucleotide
  Sense Strand Starting at position 978 of SEQ ID NO: 316648
cuccauugguaugucacua

SEQ ID NO: 395486 - RNA, 19 nt, Artificial Sequence
  Description of Artificial Sequence: Synthetic oligonucleotide
  Antisense Strand to SEQ ID NO: 395485
uagugacauaccaauggag

SEQ ID NO: 395487 - RNA, 19 nt, Artificial Sequence
  Description of Artificial Sequence: Synthetic oligonucleotide
  Sense Strand Starting at position 978 of SEQ ID NO: 316787
cauaccuugguuuggagau

SEQ ID NO: 395488 - RNA, 19 nt, Artificial Sequence
  Description of Artificial Sequence: Synthetic oligonucleotide
  Antisense Strand to SEQ ID NO: 395487
aucuccaaaccaagguaug

SEQ ID NO: 395489 - RNA, 19 nt, Artificial Sequence
  Description of Artificial Sequence: Synthetic oligonucleotide
  Sense Strand Starting at position 978 of SEQ ID NO: 317465
cccagagugacaugguguu

SEQ ID NO: 395490 - RNA, 19 nt, Artificial Sequence
  Description of Artificial Sequence: Synthetic oligonucleotide
  Antisense Strand to SEQ ID NO: 395489
aacaccaugucacucuggg

SEQ ID NO: 395491 - RNA, 19 nt, Artificial Sequence
  Description of Artificial Sequence: Synthetic oligonucleotide
  Sense Strand Starting at position 978 of SEQ ID NO: 317573
uccagaaggcugcaguauu

SEQ ID NO: 395492 - RNA, 19 nt, Artificial Sequence
  Description of Artificial Sequence: Synthetic oligonucleotide
  Antisense Strand to SEQ ID NO: 395491
aauacugcagccuucugga

SEQ ID NO: 395493 - RNA, 19 nt, Artificial Sequence
  Description of Artificial Sequence: Synthetic oligonucleotide
  Sense Strand Starting at position 978 of SEQ ID NO: 317581
gcugcaguauuuccuccaa

SEQ ID NO: 395494 - RNA, 19 nt, Artificial Sequence
  Description of Artificial Sequence: Synthetic oligonucleotide
  Antisense Strand to SEQ ID NO: 395493
uuggaggaaauacugcagc

SEQ ID NO: 395495 - RNA, 19 nt, Artificial Sequence
  Description of Artificial Sequence: Synthetic oligonucleotide
  Sense Strand Starting at position 978 of SEQ ID NO: 317662
ggcuaucucgaauagcaag

SEQ ID NO: 395496 - RNA, 19 nt, Artificial Sequence
  Description of Artificial Sequence: Synthetic oligonucleotide
  Antisense Strand to SEQ ID NO: 395495
cuugcuauucgagauagcc

SEQ ID NO: 395497 - RNA, 19 nt, Artificial Sequence
  Description of Artificial Sequence: Synthetic oligonucleotide
  Sense Strand Starting at position 978 of SEQ ID NO: 317737
ggcgguggauuauuucuua

SEQ ID NO: 395498 - RNA, 19 nt, Artificial Sequence
  Description of Artificial Sequence: Synthetic oligonucleotide
  Antisense Strand to SEQ ID NO: 395497
uaagaaauaauccaccgcc

SEQ ID NO: 395499 - RNA, 19 nt, Artificial Sequence
  Description of Artificial Sequence: Synthetic oligonucleotide
  Sense Strand Starting at position 978 of SEQ ID NO: 317907
gaacuaaccuugcugguua

SEQ ID NO: 395500 - RNA, 19 nt, Artificial Sequence
  Description of Artificial Sequence: Synthetic oligonucleotide
  Antisense Strand to SEQ ID NO: 395499
uaaccagcaagguuaguuc

SEQ ID NO: 395501 - RNA, 19 nt, Artificial Sequence
  Description of Artificial Sequence: Synthetic oligonucleotide
  Sense Strand Starting at position 978 of SEQ ID NO: 317909
acuaaccuugcugguuaaa

SEQ ID NO: 395502 - RNA, 19 nt, Artificial Sequence
  Description of Artificial Sequence: Synthetic oligonucleotide
  Antisense Strand to SEQ ID NO: 395501
uuuaaccagcaagguuagu

SEQ ID NO: 395503 - RNA, 19 nt, Artificial Sequence
  Description of Artificial Sequence: Synthetic oligonucleotide
  Sense Strand Starting at position 978 of SEQ ID NO: 317936
aaguaagucccggaugcuu

SEQ ID NO: 395504 - RNA, 19 nt, Artificial Sequence
  Description of Artificial Sequence: Synthetic oligonucleotide
  Antisense Strand to SEQ ID NO: 395503
aagcauccgggacuuacuu

SEQ ID NO: 395505 - RNA, 19 nt, Artificial Sequence
  Description of Artificial Sequence: Synthetic oligonucleotide
  Sense Strand Starting at position 978 of SEQ ID NO: 317985
gcauccaagagcugauuga

SEQ ID NO: 395506 - RNA, 19 nt, Artificial Sequence
  Description of Artificial Sequence: Synthetic oligonucleotide
  Antisense Strand to SEQ ID NO: 395505
ucaaucagcucuuggaugc

SEQ ID NO: 395507 - RNA, 19 nt, Artificial Sequence
  Description of Artificial Sequence: Synthetic oligonucleotide
  Sense Strand Starting at position 978 of SEQ ID NO: 318034
gguggauguuaaguauuga

SEQ ID NO: 395508 - RNA, 19 nt, Artificial Sequence
  Description of Artificial Sequence: Synthetic oligonucleotide
  Antisense Strand to SEQ ID NO: 395507
ucaauacuuaacauccacc

SEQ ID NO: 395509 - RNA, 19 nt, Artificial Sequence
  Description of Artificial Sequence: Synthetic oligonucleotide
  Sense Strand Starting at position 978 of SEQ ID NO: 318035
guggauguuaaguauugaa

SEQ ID NO: 395510 - RNA, 19 nt, Artificial Sequence
  Description of Artificial Sequence: Synthetic oligonucleotide
  Antisense Strand to SEQ ID NO: 395509
uucaauacuuaacauccac

SEQ ID NO: 395511 - RNA, 19 nt, Artificial Sequence
  Description of Artificial Sequence: Synthetic oligonucleotide
  Sense Strand Starting at position 978 of SEQ ID NO: 318064
ggucuacuccaggacuacu

SEQ ID NO: 395512 - RNA, 19 nt, Artificial Sequence
  Description of Artificial Sequence: Synthetic oligonucleotide
  Antisense Strand to SEQ ID NO: 395511
aguaguccuggaguagacc

SEQ ID NO: 395513 - RNA, 19 nt, Artificial Sequence
  Description of Artificial Sequence: Synthetic oligonucleotide
  Sense Strand Starting at position 978 of SEQ ID NO: 318088
ugccacaugucaucagauu

SEQ ID NO: 395514 - RNA, 19 nt, Artificial Sequence
  Description of Artificial Sequence: Synthetic oligonucleotide
  Antisense Strand to SEQ ID NO: 395513
aaucugaugacauguggca

SEQ ID NO: 395515 - RNA, 19 nt, Artificial Sequence
  Description of Artificial Sequence: Synthetic oligonucleotide
  Sense Strand Starting at position 978 of SEQ ID NO: 318089
gccacaugucaucagauug

SEQ ID NO: 395516 - RNA, 19 nt, Artificial Sequence
  Description of Artificial Sequence: Synthetic oligonucleotide
  Antisense Strand to SEQ ID NO: 395515
caaucugaugacauguggc

SEQ ID NO: 395517 - RNA, 19 nt, Artificial Sequence
  Description of Artificial Sequence: Synthetic oligonucleotide
  Sense Strand Starting at position 978 of SEQ ID NO: 318326
aucauaauugcuuggcaga

SEQ ID NO: 395518 - RNA, 19 nt, Artificial Sequence
  Description of Artificial Sequence: Synthetic oligonucleotide
  Antisense Strand to SEQ ID NO: 395517
ucugccaagcaauuaugau

SEQ ID NO: 395519 - RNA, 19 nt, Artificial Sequence
  Description of Artificial Sequence: Synthetic oligonucleotide
  Sense Strand Starting at position 978 of SEQ ID NO: 318327
ucauaauugcuuggcagag

SEQ ID NO: 395520 - RNA, 19 nt, Artificial Sequence
  Description of Artificial Sequence: Synthetic oligonucleotide
  Antisense Strand to SEQ ID NO: 395519
cucugccaagcaauuauga

SEQ ID NO: 395521 - RNA, 19 nt, Artificial Sequence
  Description of Artificial Sequence: Synthetic oligonucleotide
  Sense Strand Starting at position 978 of SEQ ID NO: 318360
ugauaauauucugucaugu

SEQ ID NO: 395522 - RNA, 19 nt, Artificial Sequence
  Description of Artificial Sequence: Synthetic oligonucleotide
  Antisense Strand to SEQ ID NO: 395521
acaugacagaauauuauca

SEQ ID NO: 395523 - RNA, 19 nt, Artificial Sequence
  Description of Artificial Sequence: Synthetic oligonucleotide
  Sense Strand Starting at position 978 of SEQ ID NO: 318573
agcccagagucuccuauuu

SEQ ID NO: 395524 - RNA, 19 nt, Artificial Sequence
  Description of Artificial Sequence: Synthetic oligonucleotide
  Antisense Strand to SEQ ID NO: 395523
aaauaggagacucugggcu

SEQ ID NO: 395525 - RNA, 19 nt, Artificial Sequence
  Description of Artificial Sequence: Synthetic oligonucleotide
  Sense Strand Starting at position 978 of SEQ ID NO: 318616
ccagcuuccuagucaagaa

SEQ ID NO: 395526 - RNA, 19 nt, Artificial Sequence
  Description of Artificial Sequence: Synthetic oligonucleotide
  Antisense Strand to SEQ ID NO: 395525
uucuugacuaggaagcugg

SEQ ID NO: 395527 - RNA, 19 nt, Artificial Sequence
  Description of Artificial Sequence: Synthetic oligonucleotide
  Sense Strand Starting at position 978 of SEQ ID NO: 318665
gguguccauccacauacaa

SEQ ID NO: 395528 - RNA, 19 nt, Artificial Sequence
  Description of Artificial Sequence: Synthetic oligonucleotide
  Antisense Strand to SEQ ID NO: 395527
uuguauguggauggacacc

SEQ ID NO: 395529 - RNA, 19 nt, Artificial Sequence
  Description of Artificial Sequence: Synthetic oligonucleotide
  Sense Strand Starting at position 978 of SEQ ID NO: 318734
ggaagcugugugagugcau

SEQ ID NO: 395530 - RNA, 19 nt, Artificial Sequence
  Description of Artificial Sequence: Synthetic oligonucleotide
  Antisense Strand to SEQ ID NO: 395529
augcacucacacagcuucc

SEQ ID NO: 395531 - RNA, 19 nt, Artificial Sequence
  Description of Artificial Sequence: Synthetic oligonucleotide
  Sense Strand Starting at position 978 of SEQ ID NO: 318870
cccugacaacauggugauu

SEQ ID NO: 395532 - RNA, 19 nt, Artificial Sequence
  Description of Artificial Sequence: Synthetic oligonucleotide
  Antisense Strand to SEQ ID NO: 395531
aaucaccauguugucaggg

SEQ ID NO: 395533 - RNA, 19 nt, Artificial Sequence
  Description of Artificial Sequence: Synthetic oligonucleotide
  Sense Strand Starting at position 978 of SEQ ID NO: 319067
aguccugacucuuuggaau

SEQ ID NO: 395534 - RNA, 19 nt, Artificial Sequence
  Description of Artificial Sequence: Synthetic oligonucleotide
  Antisense Strand to SEQ ID NO: 395533
auuccaaagagucaggacu

SEQ ID NO: 395535 - RNA, 19 nt, Artificial Sequence
  Description of Artificial Sequence: Synthetic oligonucleotide
  Sense Strand Starting at position 978 of SEQ ID NO: 319173
gagucacucugagcuacuu

SEQ ID NO: 395536 - RNA, 19 nt, Artificial Sequence
  Description of Artificial Sequence: Synthetic oligonucleotide
  Antisense Strand to SEQ ID NO: 395535
aaguagcucagagugacuc

SEQ ID NO: 395537 - RNA, 19 nt, Artificial Sequence
  Description of Artificial Sequence: Synthetic oligonucleotide
  Sense Strand Starting at position 979 of SEQ ID NO: 315508
ggcccugacuuacugaaua

SEQ ID NO: 395538 - RNA, 19 nt, Artificial Sequence
  Description of Artificial Sequence: Synthetic oligonucleotide
  Antisense Strand to SEQ ID NO: 395537
uauucaguaagucagggcc

SEQ ID NO: 395539 - RNA, 19 nt, Artificial Sequence
  Description of Artificial Sequence: Synthetic oligonucleotide
  Sense Strand Starting at position 979 of SEQ ID NO: 315524
auaggugucagcugcaaag

SEQ ID NO: 395540 - RNA, 19 nt, Artificial Sequence
  Description of Artificial Sequence: Synthetic oligonucleotide
  Antisense Strand to SEQ ID NO: 395539
cuuugcagcugacaccuau

SEQ ID NO: 395541 - RNA, 19 nt, Artificial Sequence
  Description of Artificial Sequence: Synthetic oligonucleotide
  Sense Strand Starting at position 979 of SEQ ID NO: 315526
aggugucagcugcaaaguu

SEQ ID NO: 395542 - RNA, 19 nt, Artificial Sequence
  Description of Artificial Sequence: Synthetic oligonucleotide
  Antisense Strand to SEQ ID NO: 395541
aacuuugcagcugacaccu

SEQ ID NO: 395543 - RNA, 19 nt, Artificial Sequence
  Description of Artificial Sequence: Synthetic oligonucleotide
  Sense Strand Starting at position 979 of SEQ ID NO: 315546
aaagaaugcucaguaggca

SEQ ID NO: 395544 - RNA, 19 nt, Artificial Sequence
  Description of Artificial Sequence: Synthetic oligonucleotide
  Antisense Strand to SEQ ID NO: 395543
ugccuacugagcauucuuu

SEQ ID NO: 395545 - RNA, 19 nt, Artificial Sequence
  Description of Artificial Sequence: Synthetic oligonucleotide
  Sense Strand Starting at position 979 of SEQ ID NO: 315547
aagaaugcucaguaggcau

SEQ ID NO: 395546 - RNA, 19 nt, Artificial Sequence
  Description of Artificial Sequence: Synthetic oligonucleotide
  Antisense Strand to SEQ ID NO: 395545
augccuacugagcauucuu

SEQ ID NO: 395547 - RNA, 19 nt, Artificial Sequence
  Description of Artificial Sequence: Synthetic oligonucleotide
  Sense Strand Starting at position 979 of SEQ ID NO: 315554
cucaguaggcauuggauga

SEQ ID NO: 395548 - RNA, 19 nt, Artificial Sequence
  Description of Artificial Sequence: Synthetic oligonucleotide
  Antisense Strand to SEQ ID NO: 395547
ucauccaaugccuacugag

SEQ ID NO: 395549 - RNA, 19 nt, Artificial Sequence
  Description of Artificial Sequence: Synthetic oligonucleotide
  Sense Strand Starting at position 979 of SEQ ID NO: 315638
gggcuuccagcagagauca

SEQ ID NO: 395550 - RNA, 19 nt, Artificial Sequence
  Description of Artificial Sequence: Synthetic oligonucleotide
  Antisense Strand to SEQ ID NO: 395549
ugaucucugcuggaagccc

SEQ ID NO: 395551 - RNA, 19 nt, Artificial Sequence
  Description of Artificial Sequence: Synthetic oligonucleotide
  Sense Strand Starting at position 979 of SEQ ID NO: 315837
ugcuacucuggacauguua

SEQ ID NO: 395552 - RNA, 19 nt, Artificial Sequence
  Description of Artificial Sequence: Synthetic oligonucleotide
  Antisense Strand to SEQ ID NO: 395551
uaacauguccagaguagca

SEQ ID NO: 395553 - RNA, 19 nt, Artificial Sequence
  Description of Artificial Sequence: Synthetic oligonucleotide
  Sense Strand Starting at position 979 of SEQ ID NO: 315933
ggugaagucaugugcauaa

SEQ ID NO: 395554 - RNA, 19 nt, Artificial Sequence
  Description of Artificial Sequence: Synthetic oligonucleotide
  Antisense Strand to SEQ ID NO: 395553
uuaugcacaugacuucacc

SEQ ID NO: 395555 - RNA, 19 nt, Artificial Sequence
  Description of Artificial Sequence: Synthetic oligonucleotide
  Sense Strand Starting at position 979 of SEQ ID NO: 315937
aagucaugugcauaaagca

SEQ ID NO: 395556 - RNA, 19 nt, Artificial Sequence
  Description of Artificial Sequence: Synthetic oligonucleotide
  Antisense Strand to SEQ ID NO: 395555
ugcuuuaugcacaugacuu

SEQ ID NO: 395557 - RNA, 19 nt, Artificial Sequence
  Description of Artificial Sequence: Synthetic oligonucleotide
  Sense Strand Starting at position 979 of SEQ ID NO: 316011
aucaccuuccaguguagau

SEQ ID NO: 395558 - RNA, 19 nt, Artificial Sequence
  Description of Artificial Sequence: Synthetic oligonucleotide
  Antisense Strand to SEQ ID NO: 395557
aucuacacuggaaggugau

SEQ ID NO: 395559 - RNA, 19 nt, Artificial Sequence
  Description of Artificial Sequence: Synthetic oligonucleotide
  Sense Strand Starting at position 979 of SEQ ID NO: 316240
ccuggaaguccaugaugua

SEQ ID NO: 395560 - RNA, 19 nt, Artificial Sequence
  Description of Artificial Sequence: Synthetic oligonucleotide
  Antisense Strand to SEQ ID NO: 395559
uacaucauggacuuccagg

SEQ ID NO: 395561 - RNA, 19 nt, Artificial Sequence
  Description of Artificial Sequence: Synthetic oligonucleotide
  Sense Strand Starting at position 979 of SEQ ID NO: 316403
gagaguuggcagggaaacu

SEQ ID NO: 395562 - RNA, 19 nt, Artificial Sequence
  Description of Artificial Sequence: Synthetic oligonucleotide
  Antisense Strand to SEQ ID NO: 395561
aguuucccugccaacucuc

SEQ ID NO: 395563 - RNA, 19 nt, Artificial Sequence
  Description of Artificial Sequence: Synthetic oligonucleotide
  Sense Strand Starting at position 979 of SEQ ID NO: 316648
gacauuugccaccgguuaa

SEQ ID NO: 395564 - RNA, 19 nt, Artificial Sequence
  Description of Artificial Sequence: Synthetic oligonucleotide
  Antisense Strand to SEQ ID NO: 395563
uuaaccgguggcaaauguc

SEQ ID NO: 395565 - RNA, 19 nt, Artificial Sequence
  Description of Artificial Sequence: Synthetic oligonucleotide
  Sense Strand Starting at position 979 of SEQ ID NO: 316875
gcagguacuccucgaaauu

SEQ ID NO: 395566 - RNA, 19 nt, Artificial Sequence
  Description of Artificial Sequence: Synthetic oligonucleotide
  Antisense Strand to SEQ ID NO: 395565
aauuucgaggaguaccugc

SEQ ID NO: 395567 - RNA, 19 nt, Artificial Sequence
  Description of Artificial Sequence: Synthetic oligonucleotide
  Sense Strand Starting at position 979 of SEQ ID NO: 316876
cagguacuccucgaaauuc

SEQ ID NO: 395568 - RNA, 19 nt, Artificial Sequence
  Description of Artificial Sequence: Synthetic oligonucleotide
  Antisense Strand to SEQ ID NO: 395567
gaauuucgaggaguaccug

SEQ ID NO: 395569 - RNA, 19 nt, Artificial Sequence
  Description of Artificial Sequence: Synthetic oligonucleotide
  Sense Strand Starting at position 979 of SEQ ID NO: 316886
ucgaaauucucguugacca

SEQ ID NO: 395570 - RNA, 19 nt, Artificial Sequence
  Description of Artificial Sequence: Synthetic oligonucleotide
  Antisense Strand to SEQ ID NO: 395569
uggucaacgagaauuucga

SEQ ID NO: 395571 - RNA, 19 nt, Artificial Sequence
  Description of Artificial Sequence: Synthetic oligonucleotide
  Sense Strand Starting at position 979 of SEQ ID NO: 316887
cgaaauucucguugaccaa

SEQ ID NO: 395572 - RNA, 19 nt, Artificial Sequence
  Description of Artificial Sequence: Synthetic oligonucleotide
  Antisense Strand to SEQ ID NO: 395571
uuggucaacgagaauuucg

SEQ ID NO: 395573 - RNA, 19 nt, Artificial Sequence
  Description of Artificial Sequence: Synthetic oligonucleotide
  Sense Strand Starting at position 979 of SEQ ID NO: 316888
gaaauucucguugaccaac

SEQ ID NO: 395574 - RNA, 19 nt, Artificial Sequence
  Description of Artificial Sequence: Synthetic oligonucleotide
  Antisense Strand to SEQ ID NO: 395573
guuggucaacgagaauuuc

SEQ ID NO: 395575 - RNA, 19 nt, Artificial Sequence
  Description of Artificial Sequence: Synthetic oligonucleotide
  Sense Strand Starting at position 979 of SEQ ID NO: 316921
agugaagucgacuggcauu

SEQ ID NO: 395576 - RNA, 19 nt, Artificial Sequence
  Description of Artificial Sequence: Synthetic oligonucleotide
  Antisense Strand to SEQ ID NO: 395575
aaugccagucgacuucacu

SEQ ID NO: 395577 - RNA, 19 nt, Artificial Sequence
  Description of Artificial Sequence: Synthetic oligonucleotide
  Sense Strand Starting at position 979 of SEQ ID NO: 317373
ggguuugugcuggcgugau

SEQ ID NO: 395578 - RNA, 19 nt, Artificial Sequence
  Description of Artificial Sequence: Synthetic oligonucleotide
  Antisense Strand to SEQ ID NO: 395577
aucacgccagcacaaaccc

SEQ ID NO: 395579 - RNA, 19 nt, Artificial Sequence
  Description of Artificial Sequence: Synthetic oligonucleotide
  Sense Strand Starting at position 979 of SEQ ID NO: 317375
guuugugcuggcgugauua

SEQ ID NO: 395580 - RNA, 19 nt, Artificial Sequence
  Description of Artificial Sequence: Synthetic oligonucleotide
  Antisense Strand to SEQ ID NO: 395579
uaaucacgccagcacaaac

SEQ ID NO: 395581 - RNA, 19 nt, Artificial Sequence
  Description of Artificial Sequence: Synthetic oligonucleotide
  Sense Strand Starting at position 979 of SEQ ID NO: 317407
cuuacaggccuuugucuaa

SEQ ID NO: 395582 - RNA, 19 nt, Artificial Sequence
  Description of Artificial Sequence: Synthetic oligonucleotide
  Antisense Strand to SEQ ID NO: 395581
uuagacaaaggccuguaag

SEQ ID NO: 395583 - RNA, 19 nt, Artificial Sequence
  Description of Artificial Sequence: Synthetic oligonucleotide
  Sense Strand Starting at position 979 of SEQ ID NO: 317928
augcaaauguaagcaauau

SEQ ID NO: 395584 - RNA, 19 nt, Artificial Sequence
  Description of Artificial Sequence: Synthetic oligonucleotide
  Antisense Strand to SEQ ID NO: 395583
auauugcuuacauuugcau

SEQ ID NO: 395585 - RNA, 19 nt, Artificial Sequence
  Description of Artificial Sequence: Synthetic oligonucleotide
  Sense Strand Starting at position 979 of SEQ ID NO: 318085
ggaguauuccauugcuuau

SEQ ID NO: 395586 - RNA, 19 nt, Artificial Sequence
  Description of Artificial Sequence: Synthetic oligonucleotide
  Antisense Strand to SEQ ID NO: 395585
auaagcaauggaauacucc

SEQ ID NO: 395587 - RNA, 19 nt, Artificial Sequence
  Description of Artificial Sequence: Synthetic oligonucleotide
  Sense Strand Starting at position 979 of SEQ ID NO: 318088
guauuccauugcuuaucca

SEQ ID NO: 395588 - RNA, 19 nt, Artificial Sequence
  Description of Artificial Sequence: Synthetic oligonucleotide
  Antisense Strand to SEQ ID NO: 395587
uggauaagcaauggaauac

SEQ ID NO: 395589 - RNA, 19 nt, Artificial Sequence
  Description of Artificial Sequence: Synthetic oligonucleotide
  Sense Strand Starting at position 979 of SEQ ID NO: 318127
acuauauuguuucugaucu

SEQ ID NO: 395590 - RNA, 19 nt, Artificial Sequence
  Description of Artificial Sequence: Synthetic oligonucleotide
  Antisense Strand to SEQ ID NO: 395589
agaucagaaacaauauagu

SEQ ID NO: 395591 - RNA, 19 nt, Artificial Sequence
  Description of Artificial Sequence: Synthetic oligonucleotide
  Sense Strand Starting at position 979 of SEQ ID NO: 318212
augucauugugguuuaacu

SEQ ID NO: 395592 - RNA, 19 nt, Artificial Sequence
  Description of Artificial Sequence: Synthetic oligonucleotide
  Antisense Strand to SEQ ID NO: 395591
aguuaaaccacaaugacau

SEQ ID NO: 395593 - RNA, 19 nt, Artificial Sequence
  Description of Artificial Sequence: Synthetic oligonucleotide
  Sense Strand Starting at position 979 of SEQ ID NO: 318408
cacagugcaggcugaauua

SEQ ID NO: 395594 - RNA, 19 nt, Artificial Sequence
  Description of Artificial Sequence: Synthetic oligonucleotide
  Antisense Strand to SEQ ID NO: 395593
uaauucagccugcacugug

SEQ ID NO: 395595 - RNA, 19 nt, Artificial Sequence
  Description of Artificial Sequence: Synthetic oligonucleotide
  Sense Strand Starting at position 979 of SEQ ID NO: 318434
gagccucuuccucagggua

SEQ ID NO: 395596 - RNA, 19 nt, Artificial Sequence
  Description of Artificial Sequence: Synthetic oligonucleotide
  Antisense Strand to SEQ ID NO: 395595
uacccugaggaagaggcuc

SEQ ID NO: 395597 - RNA, 19 nt, Artificial Sequence
  Description of Artificial Sequence: Synthetic oligonucleotide
  Sense Strand Starting at position 979 of SEQ ID NO: 318517
ggauuuguuucuuaaucuc

SEQ ID NO: 395598 - RNA, 19 nt, Artificial Sequence
  Description of Artificial Sequence: Synthetic oligonucleotide
  Antisense Strand to SEQ ID NO: 395597
gagauuaagaaacaaaucc

SEQ ID NO: 395599 - RNA, 19 nt, Artificial Sequence
  Description of Artificial Sequence: Synthetic oligonucleotide
  Sense Strand Starting at position 979 of SEQ ID NO: 318543
cugacauucuaggccacau

SEQ ID NO: 395600 - RNA, 19 nt, Artificial Sequence
  Description of Artificial Sequence: Synthetic oligonucleotide
  Antisense Strand to SEQ ID NO: 395599
auguggccuagaaugucag

SEQ ID NO: 395601 - RNA, 19 nt, Artificial Sequence
  Description of Artificial Sequence: Synthetic oligonucleotide
  Sense Strand Starting at position 979 of SEQ ID NO: 318556
ccacauaagucuuuguuac

SEQ ID NO: 395602 - RNA, 19 nt, Artificial Sequence
  Description of Artificial Sequence: Synthetic oligonucleotide
  Antisense Strand to SEQ ID NO: 395601
guaacaaagacuuaugugg

SEQ ID NO: 395603 - RNA, 19 nt, Artificial Sequence
  Description of Artificial Sequence: Synthetic oligonucleotide
  Sense Strand Starting at position 979 of SEQ ID NO: 318558
acauaagucuuuguuacag

SEQ ID NO: 395604 - RNA, 19 nt, Artificial Sequence
  Description of Artificial Sequence: Synthetic oligonucleotide
  Antisense Strand to SEQ ID NO: 395603
cuguaacaaagacuuaugu

SEQ ID NO: 395605 - RNA, 19 nt, Artificial Sequence
  Description of Artificial Sequence: Synthetic oligonucleotide
  Sense Strand Starting at position 979 of SEQ ID NO: 318654
caaagaugucgccagacau

SEQ ID NO: 395606 - RNA, 19 nt, Artificial Sequence
  Description of Artificial Sequence: Synthetic oligonucleotide
  Antisense Strand to SEQ ID NO: 395605
augucuggcgacaucuuug

SEQ ID NO: 395607 - RNA, 19 nt, Artificial Sequence
  Description of Artificial Sequence: Synthetic oligonucleotide
  Sense Strand Starting at position 979 of SEQ ID NO: 318771
ugguuaggucaucaguugu

SEQ ID NO: 395608 - RNA, 19 nt, Artificial Sequence
  Description of Artificial Sequence: Synthetic oligonucleotide
  Antisense Strand to SEQ ID NO: 395607
acaacugaugaccuaacca

SEQ ID NO: 395609 - RNA, 19 nt, Artificial Sequence
  Description of Artificial Sequence: Synthetic oligonucleotide
  Sense Strand Starting at position 979 of SEQ ID NO: 318970
cuuucuuguuauccugacu

SEQ ID NO: 395610 - RNA, 19 nt, Artificial Sequence
  Description of Artificial Sequence: Synthetic oligonucleotide
  Antisense Strand to SEQ ID NO: 395609
agucaggauaacaagaaag

SEQ ID NO: 395611 - RNA, 19 nt, Artificial Sequence
  Description of Artificial Sequence: Synthetic oligonucleotide
  Sense Strand Starting at position 979 of SEQ ID NO: 318973
ucuuguuauccugacuuac

SEQ ID NO: 395612 - RNA, 19 nt, Artificial Sequence
  Description of Artificial Sequence: Synthetic oligonucleotide
  Antisense Strand to SEQ ID NO: 395611
guaagucaggauaacaaga

SEQ ID NO: 395613 - RNA, 19 nt, Artificial Sequence
  Description of Artificial Sequence: Synthetic oligonucleotide
  Sense Strand Starting at position 979 of SEQ ID NO: 318975
uuguuauccugacuuacca

SEQ ID NO: 395614 - RNA, 19 nt, Artificial Sequence
  Description of Artificial Sequence: Synthetic oligonucleotide
  Antisense Strand to SEQ ID NO: 395613
ugguaagucaggauaacaa

SEQ ID NO: 395615 - RNA, 19 nt, Artificial Sequence
  Description of Artificial Sequence: Synthetic oligonucleotide
  Sense Strand Starting at position 979 of SEQ ID NO: 319136
ugcugaaucaccugagaug

SEQ ID NO: 395616 - RNA, 19 nt, Artificial Sequence
  Description of Artificial Sequence: Synthetic oligonucleotide
  Antisense Strand to SEQ ID NO: 395615
caucucaggugauucagca

SEQ ID NO: 395617 - RNA, 19 nt, Artificial Sequence
  Description of Artificial Sequence: Synthetic oligonucleotide
  Sense Strand Starting at position 980 of SEQ ID NO: 315277
ugcugaaaccuugaaacuu

SEQ ID NO: 395618 - RNA, 19 nt, Artificial Sequence
  Description of Artificial Sequence: Synthetic oligonucleotide
  Antisense Strand to SEQ ID NO: 395617
aaguuucaagguuucagca

SEQ ID NO: 395619 - RNA, 19 nt, Artificial Sequence
  Description of Artificial Sequence: Synthetic oligonucleotide
  Sense Strand Starting at position 980 of SEQ ID NO: 315522
ucagaauucuaguuccaag

SEQ ID NO: 395620 - RNA, 19 nt, Artificial Sequence
  Description of Artificial Sequence: Synthetic oligonucleotide
  Antisense Strand to SEQ ID NO: 395619
cuuggaacuagaauucuga

SEQ ID NO: 395621 - RNA, 19 nt, Artificial Sequence
  Description of Artificial Sequence: Synthetic oligonucleotide
  Sense Strand Starting at position 980 of SEQ ID NO: 316132
cauugacaugguggacauu

SEQ ID NO: 395622 - RNA, 19 nt, Artificial Sequence
  Description of Artificial Sequence: Synthetic oligonucleotide
  Antisense Strand to SEQ ID NO: 395621
aauguccaccaugucaaug

SEQ ID NO: 395623 - RNA, 19 nt, Artificial Sequence
  Description of Artificial Sequence: Synthetic oligonucleotide
  Sense Strand Starting at position 980 of SEQ ID NO: 316282
ggaaguuccagcgaaguua

SEQ ID NO: 395624 - RNA, 19 nt, Artificial Sequence
  Description of Artificial Sequence: Synthetic oligonucleotide
  Antisense Strand to SEQ ID NO: 395623
uaacuucgcuggaacuucc

SEQ ID NO: 395625 - RNA, 19 nt, Artificial Sequence
  Description of Artificial Sequence: Synthetic oligonucleotide
  Sense Strand Starting at position 980 of SEQ ID NO: 316308
uguggagaacuuuaaagcu

SEQ ID NO: 395626 - RNA, 19 nt, Artificial Sequence
  Description of Artificial Sequence: Synthetic oligonucleotide
  Antisense Strand to SEQ ID NO: 395625
agcuuuaaaguucuccaca

SEQ ID NO: 395627 - RNA, 19 nt, Artificial Sequence
  Description of Artificial Sequence: Synthetic oligonucleotide
  Sense Strand Starting at position 980 of SEQ ID NO: 316345
gcugcugagggauggaaua

SEQ ID NO: 395628 - RNA, 19 nt, Artificial Sequence
  Description of Artificial Sequence: Synthetic oligonucleotide
  Antisense Strand to SEQ ID NO: 395627
uauuccaucccucagcagc

SEQ ID NO: 395629 - RNA, 19 nt, Artificial Sequence
  Description of Artificial Sequence: Synthetic oligonucleotide
  Sense Strand Starting at position 980 of SEQ ID NO: 316449
acucuagucccaggcagaa

SEQ ID NO: 395630 - RNA, 19 nt, Artificial Sequence
  Description of Artificial Sequence: Synthetic oligonucleotide
  Antisense Strand to SEQ ID NO: 395629
uucugccugggacuagagu

SEQ ID NO: 395631 - RNA, 19 nt, Artificial Sequence
  Description of Artificial Sequence: Synthetic oligonucleotide
  Sense Strand Starting at position 980 of SEQ ID NO: 316723
gaggucauugguggauaau

SEQ ID NO: 395632 - RNA, 19 nt, Artificial Sequence
  Description of Artificial Sequence: Synthetic oligonucleotide
  Antisense Strand to SEQ ID NO: 395631
auuauccaccaaugaccuc

SEQ ID NO: 395633 - RNA, 19 nt, Artificial Sequence
  Description of Artificial Sequence: Synthetic oligonucleotide
  Sense Strand Starting at position 980 of SEQ ID NO: 316726
gucauugguggauaauauc

SEQ ID NO: 395634 - RNA, 19 nt, Artificial Sequence
  Description of Artificial Sequence: Synthetic oligonucleotide
  Antisense Strand to SEQ ID NO: 395633
gauauuauccaccaaugac

SEQ ID NO: 395635 - RNA, 19 nt, Artificial Sequence
  Description of Artificial Sequence: Synthetic oligonucleotide
  Sense Strand Starting at position 980 of SEQ ID NO: 316746
gguccaagugguuaucaga

SEQ ID NO: 395636 - RNA, 19 nt, Artificial Sequence
  Description of Artificial Sequence: Synthetic oligonucleotide
  Antisense Strand to SEQ ID NO: 395635
ucugauaaccacuuggacc

SEQ ID NO: 395637 - RNA, 19 nt, Artificial Sequence
  Description of Artificial Sequence: Synthetic oligonucleotide
  Sense Strand Starting at position 980 of SEQ ID NO: 316761
cagagagaugguggucaca

SEQ ID NO: 395638 - RNA, 19 nt, Artificial Sequence
  Description of Artificial Sequence: Synthetic oligonucleotide
  Antisense Strand to SEQ ID NO: 395637
ugugaccaccaucucucug

SEQ ID NO: 395639 - RNA, 19 nt, Artificial Sequence
  Description of Artificial Sequence: Synthetic oligonucleotide
  Sense Strand Starting at position 980 of SEQ ID NO: 316763
gagagaugguggucacaag

SEQ ID NO: 395640 - RNA, 19 nt, Artificial Sequence
  Description of Artificial Sequence: Synthetic oligonucleotide
  Antisense Strand to SEQ ID NO: 395639
cuugugaccaccaucucuc

SEQ ID NO: 395641 - RNA, 19 nt, Artificial Sequence
  Description of Artificial Sequence: Synthetic oligonucleotide
  Sense Strand Starting at position 980 of SEQ ID NO: 316833
guguauccuccugacauac

SEQ ID NO: 395642 - RNA, 19 nt, Artificial Sequence
  Description of Artificial Sequence: Synthetic oligonucleotide
  Antisense Strand to SEQ ID NO: 395641
guaugucaggaggauacac

SEQ ID NO: 395643 - RNA, 19 nt, Artificial Sequence
  Description of Artificial Sequence: Synthetic oligonucleotide
  Sense Strand Starting at position 980 of SEQ ID NO: 316992
guacaugaggcaugaggau

SEQ ID NO: 395644 - RNA, 19 nt, Artificial Sequence
  Description of Artificial Sequence: Synthetic oligonucleotide
  Antisense Strand to SEQ ID NO: 395643
auccucaugccucauguac

SEQ ID NO: 395645 - RNA, 19 nt, Artificial Sequence
  Description of Artificial Sequence: Synthetic oligonucleotide
  Sense Strand Starting at position 980 of SEQ ID NO: 317283
ccagguuugugacucugaa

SEQ ID NO: 395646 - RNA, 19 nt, Artificial Sequence
  Description of Artificial Sequence: Synthetic oligonucleotide
  Antisense Strand to SEQ ID NO: 395645
uucagagucacaaaccugg

SEQ ID NO: 395647 - RNA, 19 nt, Artificial Sequence
  Description of Artificial Sequence: Synthetic oligonucleotide
  Sense Strand Starting at position 980 of SEQ ID NO: 317584
uggagucuaucagccauga

SEQ ID NO: 395648 - RNA, 19 nt, Artificial Sequence
  Description of Artificial Sequence: Synthetic oligonucleotide
  Antisense Strand to SEQ ID NO: 395647
ucauggcugauagacucca

SEQ ID NO: 395649 - RNA, 19 nt, Artificial Sequence
  Description of Artificial Sequence: Synthetic oligonucleotide
  Sense Strand Starting at position 980 of SEQ ID NO: 317724
gugaguuauguuuaaccau

SEQ ID NO: 395650 - RNA, 19 nt, Artificial Sequence
  Description of Artificial Sequence: Synthetic oligonucleotide
  Antisense Strand to SEQ ID NO: 395649
augguuaaacauaacucac

SEQ ID NO: 395651 - RNA, 19 nt, Artificial Sequence
  Description of Artificial Sequence: Synthetic oligonucleotide
  Sense Strand Starting at position 980 of SEQ ID NO: 317795
acaacuuguaagugguuga

SEQ ID NO: 395652 - RNA, 19 nt, Artificial Sequence
  Description of Artificial Sequence: Synthetic oligonucleotide
  Antisense Strand to SEQ ID NO: 395651
ucaaccacuuacaaguugu

SEQ ID NO: 395653 - RNA, 19 nt, Artificial Sequence
  Description of Artificial Sequence: Synthetic oligonucleotide
  Sense Strand Starting at position 980 of SEQ ID NO: 317869
cuaggucagcuuugaaaga

SEQ ID NO: 395654 - RNA, 19 nt, Artificial Sequence
  Description of Artificial Sequence: Synthetic oligonucleotide
  Antisense Strand to SEQ ID NO: 395653
ucuuucaaagcugaccuag

SEQ ID NO: 395655 - RNA, 19 nt, Artificial Sequence
  Description of Artificial Sequence: Synthetic oligonucleotide
  Sense Strand Starting at position 980 of SEQ ID NO: 317890
uuuggagccugacuuaaga

SEQ ID NO: 395656 - RNA, 19 nt, Artificial Sequence
  Description of Artificial Sequence: Synthetic oligonucleotide
  Antisense Strand to SEQ ID NO: 395655
ucuuaagucaggcuccaaa

SEQ ID NO: 395657 - RNA, 19 nt, Artificial Sequence
  Description of Artificial Sequence: Synthetic oligonucleotide
  Sense Strand Starting at position 980 of SEQ ID NO: 318143
ucaggaauguucuccaaau

SEQ ID NO: 395658 - RNA, 19 nt, Artificial Sequence
  Description of Artificial Sequence: Synthetic oligonucleotide
  Antisense Strand to SEQ ID NO: 395657
auuuggagaacauuccuga

SEQ ID NO: 395659 - RNA, 19 nt, Artificial Sequence
  Description of Artificial Sequence: Synthetic oligonucleotide
  Sense Strand Starting at position 980 of SEQ ID NO: 318144
caggaauguucuccaaaug

SEQ ID NO: 395660 - RNA, 19 nt, Artificial Sequence
  Description of Artificial Sequence: Synthetic oligonucleotide
  Antisense Strand to SEQ ID NO: 395659
cauuuggagaacauuccug

SEQ ID NO: 395661 - RNA, 19 nt, Artificial Sequence
  Description of Artificial Sequence: Synthetic oligonucleotide
  Sense Strand Starting at position 980 of SEQ ID NO: 318163
ggcugucccaauggaaaug

SEQ ID NO: 395662 - RNA, 19 nt, Artificial Sequence
  Description of Artificial Sequence: Synthetic oligonucleotide
  Antisense Strand to SEQ ID NO: 395661
cauuuccauugggacagcc

SEQ ID NO: 395663 - RNA, 19 nt, Artificial Sequence
  Description of Artificial Sequence: Synthetic oligonucleotide
  Sense Strand Starting at position 980 of SEQ ID NO: 318174
uggaaauggguuuaguuua

SEQ ID NO: 395664 - RNA, 19 nt, Artificial Sequence
  Description of Artificial Sequence: Synthetic oligonucleotide
  Antisense Strand to SEQ ID NO: 395663
uaaacuaaacccauuucca

SEQ ID NO: 395665 - RNA, 19 nt, Artificial Sequence
  Description of Artificial Sequence: Synthetic oligonucleotide
  Sense Strand Starting at position 980 of SEQ ID NO: 318214
agauguggugucugagaag

SEQ ID NO: 395666 - RNA, 19 nt, Artificial Sequence
  Description of Artificial Sequence: Synthetic oligonucleotide
  Antisense Strand to SEQ ID NO: 395665
cuucucagacaccacaucu

SEQ ID NO: 395667 - RNA, 19 nt, Artificial Sequence
  Description of Artificial Sequence: Synthetic oligonucleotide
  Sense Strand Starting at position 980 of SEQ ID NO: 318225
cugagaagugacugugaag

SEQ ID NO: 395668 - RNA, 19 nt, Artificial Sequence
  Description of Artificial Sequence: Synthetic oligonucleotide
  Antisense Strand to SEQ ID NO: 395667
cuucacagucacuucucag

SEQ ID NO: 395669 - RNA, 19 nt, Artificial Sequence
  Description of Artificial Sequence: Synthetic oligonucleotide
  Sense Strand Starting at position 980 of SEQ ID NO: 318263
acagauauaccaugaguuc

SEQ ID NO: 395670 - RNA, 19 nt, Artificial Sequence
  Description of Artificial Sequence: Synthetic oligonucleotide
  Antisense Strand to SEQ ID NO: 395669
gaacucaugguauaucugu

SEQ ID NO: 395671 - RNA, 19 nt, Artificial Sequence
  Description of Artificial Sequence: Synthetic oligonucleotide
  Sense Strand Starting at position 980 of SEQ ID NO: 318340
ugugaaaucuaaguaaaug

SEQ ID NO: 395672 - RNA, 19 nt, Artificial Sequence
  Description of Artificial Sequence: Synthetic oligonucleotide
  Antisense Strand to SEQ ID NO: 395671
cauuuacuuagauuucaca

SEQ ID NO: 395673 - RNA, 19 nt, Artificial Sequence
  Description of Artificial Sequence: Synthetic oligonucleotide
  Sense Strand Starting at position 980 of SEQ ID NO: 318367
ugugguacgagggauauaa

SEQ ID NO: 395674 - RNA, 19 nt, Artificial Sequence
  Description of Artificial Sequence: Synthetic oligonucleotide
  Antisense Strand to SEQ ID NO: 395673
uuauaucccucguaccaca

SEQ ID NO: 395675 - RNA, 19 nt, Artificial Sequence
  Description of Artificial Sequence: Synthetic oligonucleotide
  Sense Strand Starting at position 980 of SEQ ID NO: 318404
caguaaauacacuggaguu

SEQ ID NO: 395676 - RNA, 19 nt, Artificial Sequence
  Description of Artificial Sequence: Synthetic oligonucleotide
  Antisense Strand to SEQ ID NO: 395675
aacuccaguguauuuacug

SEQ ID NO: 395677 - RNA, 19 nt, Artificial Sequence
  Description of Artificial Sequence: Synthetic oligonucleotide
  Sense Strand Starting at position 980 of SEQ ID NO: 318699
aggccucuccuguaagaau

SEQ ID NO: 395678 - RNA, 19 nt, Artificial Sequence
  Description of Artificial Sequence: Synthetic oligonucleotide
  Antisense Strand to SEQ ID NO: 395677
auucuuacaggagaggccu

SEQ ID NO: 395679 - RNA, 19 nt, Artificial Sequence
  Description of Artificial Sequence: Synthetic oligonucleotide
  Sense Strand Starting at position 980 of SEQ ID NO: 318707
ccuguaagaauguguaaug

SEQ ID NO: 395680 - RNA, 19 nt, Artificial Sequence
  Description of Artificial Sequence: Synthetic oligonucleotide
  Antisense Strand to SEQ ID NO: 395679
cauuacacauucuuacagg

SEQ ID NO: 395681 - RNA, 19 nt, Artificial Sequence
  Description of Artificial Sequence: Synthetic oligonucleotide
  Sense Strand Starting at position 980 of SEQ ID NO: 318708
cuguaagaauguguaauga

SEQ ID NO: 395682 - RNA, 19 nt, Artificial Sequence
  Description of Artificial Sequence: Synthetic oligonucleotide
  Antisense Strand to SEQ ID NO: 395681
ucauuacacauucuuacag

SEQ ID NO: 395683 - RNA, 19 nt, Artificial Sequence
  Description of Artificial Sequence: Synthetic oligonucleotide
  Sense Strand Starting at position 980 of SEQ ID NO: 318849
auuugaaacugagaugucu

SEQ ID NO: 395684 - RNA, 19 nt, Artificial Sequence
  Description of Artificial Sequence: Synthetic oligonucleotide
  Antisense Strand to SEQ ID NO: 395683
agacaucucaguuucaaau

SEQ ID NO: 395685 - RNA, 19 nt, Artificial Sequence
  Description of Artificial Sequence: Synthetic oligonucleotide
  Sense Strand Starting at position 980 of SEQ ID NO: 318898
ccucauugaggguguaaau

SEQ ID NO: 395686 - RNA, 19 nt, Artificial Sequence
  Description of Artificial Sequence: Synthetic oligonucleotide
  Antisense Strand to SEQ ID NO: 395685
auuuacacccucaaugagg

SEQ ID NO: 395687 - RNA, 19 nt, Artificial Sequence
  Description of Artificial Sequence: Synthetic oligonucleotide
  Sense Strand Starting at position 980 of SEQ ID NO: 318905
gaggguguaaauuagucaa

SEQ ID NO: 395688 - RNA, 19 nt, Artificial Sequence
  Description of Artificial Sequence: Synthetic oligonucleotide
  Antisense Strand to SEQ ID NO: 395687
uugacuaauuuacacccuc

SEQ ID NO: 395689 - RNA, 19 nt, Artificial Sequence
  Description of Artificial Sequence: Synthetic oligonucleotide
  Sense Strand Starting at position 980 of SEQ ID NO: 318956
cuacuuggcaugggaucua

SEQ ID NO: 395690 - RNA, 19 nt, Artificial Sequence
  Description of Artificial Sequence: Synthetic oligonucleotide
  Antisense Strand to SEQ ID NO: 395689
uagaucccaugccaaguag

SEQ ID NO: 395691 - RNA, 19 nt, Artificial Sequence
  Description of Artificial Sequence: Synthetic oligonucleotide
  Sense Strand Starting at position 980 of SEQ ID NO: 319154
accagaauucugugugaua

SEQ ID NO: 395692 - RNA, 19 nt, Artificial Sequence
  Description of Artificial Sequence: Synthetic oligonucleotide
  Antisense Strand to SEQ ID NO: 395691
uaucacacagaauucuggu

SEQ ID NO: 395693 - RNA, 19 nt, Artificial Sequence
  Description of Artificial Sequence: Synthetic oligonucleotide
  Sense Strand Starting at position 980 of SEQ ID NO: 319155
ccagaauucugugugauaa

SEQ ID NO: 395694 - RNA, 19 nt, Artificial Sequence
  Description of Artificial Sequence: Synthetic oligonucleotide
  Antisense Strand to SEQ ID NO: 395693
uuaucacacagaauucugg

SEQ ID NO: 395695 - RNA, 19 nt, Artificial Sequence
  Description of Artificial Sequence: Synthetic oligonucleotide
  Sense Strand Starting at position 980 of SEQ ID NO: 319156
cagaauucugugugauaaa

SEQ ID NO: 395696 - RNA, 19 nt, Artificial Sequence
  Description of Artificial Sequence: Synthetic oligonucleotide
  Antisense Strand to SEQ ID NO: 395695
uuuaucacacagaauucug

SEQ ID NO: 395697 - RNA, 19 nt, Artificial Sequence
  Description of Artificial Sequence: Synthetic oligonucleotide
  Sense Strand Starting at position 981 of SEQ ID NO: 315243
cuuauaagccauuaaguga

SEQ ID NO: 395698 - RNA, 19 nt, Artificial Sequence
  Description of Artificial Sequence: Synthetic oligonucleotide
  Antisense Strand to SEQ ID NO: 395697
ucacuuaauggcuuauaag

SEQ ID NO: 395699 - RNA, 19 nt, Artificial Sequence
  Description of Artificial Sequence: Synthetic oligonucleotide
  Sense Strand Starting at position 981 of SEQ ID NO: 315258
gugacaguuaaguagcaaa

SEQ ID NO: 395700 - RNA, 19 nt, Artificial Sequence
  Description of Artificial Sequence: Synthetic oligonucleotide
  Antisense Strand to SEQ ID NO: 395699
uuugcuacuuaacugucac

SEQ ID NO: 395701 - RNA, 19 nt, Artificial Sequence
  Description of Artificial Sequence: Synthetic oligonucleotide
  Sense Strand Starting at position 981 of SEQ ID NO: 315689
auggcaaagucacuuccaa

SEQ ID NO: 395702 - RNA, 19 nt, Artificial Sequence
  Description of Artificial Sequence: Synthetic oligonucleotide
  Antisense Strand to SEQ ID NO: 395701
uuggaagugacuuugccau

SEQ ID NO: 395703 - RNA, 19 nt, Artificial Sequence
  Description of Artificial Sequence: Synthetic oligonucleotide
  Sense Strand Starting at position 981 of SEQ ID NO: 315826
augugugacccucagcuuu

SEQ ID NO: 395704 - RNA, 19 nt, Artificial Sequence
  Description of Artificial Sequence: Synthetic oligonucleotide
  Antisense Strand to SEQ ID NO: 395703
aaagcugagggucacacau

SEQ ID NO: 395705 - RNA, 19 nt, Artificial Sequence
  Description of Artificial Sequence: Synthetic oligonucleotide
  Sense Strand Starting at position 981 of SEQ ID NO: 316032
gccagugguucaucugaug

SEQ ID NO: 395706 - RNA, 19 nt, Artificial Sequence
  Description of Artificial Sequence: Synthetic oligonucleotide
  Antisense Strand to SEQ ID NO: 395705
caucagaugaaccacuggc

SEQ ID NO: 395707 - RNA, 19 nt, Artificial Sequence
  Description of Artificial Sequence: Synthetic oligonucleotide
  Sense Strand Starting at position 981 of SEQ ID NO: 316182
agaaaugccucuuacucag

SEQ ID NO: 395708 - RNA, 19 nt, Artificial Sequence
  Description of Artificial Sequence: Synthetic oligonucleotide
  Antisense Strand to SEQ ID NO: 395707
cugaguaagaggcauuucu

SEQ ID NO: 395709 - RNA, 19 nt, Artificial Sequence
  Description of Artificial Sequence: Synthetic oligonucleotide
  Sense Strand Starting at position 981 of SEQ ID NO: 316260
acgugaagugaccaaguaa

SEQ ID NO: 395710 - RNA, 19 nt, Artificial Sequence
  Description of Artificial Sequence: Synthetic oligonucleotide
  Antisense Strand to SEQ ID NO: 395709
uuacuuggucacuucacgu

SEQ ID NO: 395711 - RNA, 19 nt, Artificial Sequence
  Description of Artificial Sequence: Synthetic oligonucleotide
  Sense Strand Starting at position 981 of SEQ ID NO: 316581
ccguacauccagcaugaau

SEQ ID NO: 395712 - RNA, 19 nt, Artificial Sequence
  Description of Artificial Sequence: Synthetic oligonucleotide
  Antisense Strand to SEQ ID NO: 395711
auucaugcuggauguacgg

SEQ ID NO: 395713 - RNA, 19 nt, Artificial Sequence
  Description of Artificial Sequence: Synthetic oligonucleotide
  Sense Strand Starting at position 981 of SEQ ID NO: 316729
gacucaaucccgugaagca

SEQ ID NO: 395714 - RNA, 19 nt, Artificial Sequence
  Description of Artificial Sequence: Synthetic oligonucleotide
  Antisense Strand to SEQ ID NO: 395713
ugcuucacgggauugaguc

SEQ ID NO: 395715 - RNA, 19 nt, Artificial Sequence
  Description of Artificial Sequence: Synthetic oligonucleotide
  Sense Strand Starting at position 981 of SEQ ID NO: 316738
ccgugaagcagacaugaca

SEQ ID NO: 395716 - RNA, 19 nt, Artificial Sequence
  Description of Artificial Sequence: Synthetic oligonucleotide
  Antisense Strand to SEQ ID NO: 395715
ugucaugucugcuucacgg

SEQ ID NO: 395717 - RNA, 19 nt, Artificial Sequence
  Description of Artificial Sequence: Synthetic oligonucleotide
  Sense Strand Starting at position 981 of SEQ ID NO: 317093
gccugacccucuguaugua

SEQ ID NO: 395718 - RNA, 19 nt, Artificial Sequence
  Description of Artificial Sequence: Synthetic oligonucleotide
  Antisense Strand to SEQ ID NO: 395717
uacauacagagggucaggc

SEQ ID NO: 395719 - RNA, 19 nt, Artificial Sequence
  Description of Artificial Sequence: Synthetic oligonucleotide
  Sense Strand Starting at position 981 of SEQ ID NO: 317318
uacggauucgaauagugga

SEQ ID NO: 395720 - RNA, 19 nt, Artificial Sequence
  Description of Artificial Sequence: Synthetic oligonucleotide
  Antisense Strand to SEQ ID NO: 395719
uccacuauucgaauccgua

SEQ ID NO: 395721 - RNA, 19 nt, Artificial Sequence
  Description of Artificial Sequence: Synthetic oligonucleotide
  Sense Strand Starting at position 981 of SEQ ID NO: 317362
gcgcuuuccgaacgaggga

SEQ ID NO: 395722 - RNA, 19 nt, Artificial Sequence
  Description of Artificial Sequence: Synthetic oligonucleotide
  Antisense Strand to SEQ ID NO: 395721
ucccucguucggaaagcgc

SEQ ID NO: 395723 - RNA, 19 nt, Artificial Sequence
  Description of Artificial Sequence: Synthetic oligonucleotide
  Sense Strand Starting at position 981 of SEQ ID NO: 317426
gcgguucuuacgucccgaa

SEQ ID NO: 395724 - RNA, 19 nt, Artificial Sequence
  Description of Artificial Sequence: Synthetic oligonucleotide
  Antisense Strand to SEQ ID NO: 395723
uucgggacguaagaaccgc

SEQ ID NO: 395725 - RNA, 19 nt, Artificial Sequence
  Description of Artificial Sequence: Synthetic oligonucleotide
  Sense Strand Starting at position 981 of SEQ ID NO: 317427
cgguucuuacgucccgaau

SEQ ID NO: 395726 - RNA, 19 nt, Artificial Sequence
  Description of Artificial Sequence: Synthetic oligonucleotide
  Antisense Strand to SEQ ID NO: 395725
auucgggacguaagaaccg

SEQ ID NO: 395727 - RNA, 19 nt, Artificial Sequence
  Description of Artificial Sequence: Synthetic oligonucleotide
  Sense Strand Starting at position 981 of SEQ ID NO: 317448
gaacuaauagcgcgucaaa

SEQ ID NO: 395728 - RNA, 19 nt, Artificial Sequence
  Description of Artificial Sequence: Synthetic oligonucleotide
  Antisense Strand to SEQ ID NO: 395727
uuugacgcgcuauuaguuc

SEQ ID NO: 395729 - RNA, 19 nt, Artificial Sequence
  Description of Artificial Sequence: Synthetic oligonucleotide
  Sense Strand Starting at position 981 of SEQ ID NO: 317506
agcugagaccaguagaucu

SEQ ID NO: 395730 - RNA, 19 nt, Artificial Sequence
  Description of Artificial Sequence: Synthetic oligonucleotide
  Antisense Strand to SEQ ID NO: 395729
agaucuacuggucucagcu

SEQ ID NO: 395731 - RNA, 19 nt, Artificial Sequence
  Description of Artificial Sequence: Synthetic oligonucleotide
  Sense Strand Starting at position 981 of SEQ ID NO: 317514
ccaguagaucuuuggcucu

SEQ ID NO: 395732 - RNA, 19 nt, Artificial Sequence
  Description of Artificial Sequence: Synthetic oligonucleotide
  Antisense Strand to SEQ ID NO: 395731
agagccaaagaucuacugg

SEQ ID NO: 395733 - RNA, 19 nt, Artificial Sequence
  Description of Artificial Sequence: Synthetic oligonucleotide
  Sense Strand Starting at position 981 of SEQ ID NO: 317517
guagaucuuuggcucuuga

SEQ ID NO: 395734 - RNA, 19 nt, Artificial Sequence
  Description of Artificial Sequence: Synthetic oligonucleotide
  Antisense Strand to SEQ ID NO: 395733
ucaagagccaaagaucuac

SEQ ID NO: 395735 - RNA, 19 nt, Artificial Sequence
  Description of Artificial Sequence: Synthetic oligonucleotide
  Sense Strand Starting at position 981 of SEQ ID NO: 317568
aucaaaguuccugagagcu

SEQ ID NO: 395736 - RNA, 19 nt, Artificial Sequence
  Description of Artificial Sequence: Synthetic oligonucleotide
  Antisense Strand to SEQ ID NO: 395735
agcucucaggaacuuugau

SEQ ID NO: 395737 - RNA, 19 nt, Artificial Sequence
  Description of Artificial Sequence: Synthetic oligonucleotide
  Sense Strand Starting at position 981 of SEQ ID NO: 317661
uugguaugagaagguguau

SEQ ID NO: 395738 - RNA, 19 nt, Artificial Sequence
  Description of Artificial Sequence: Synthetic oligonucleotide
  Antisense Strand to SEQ ID NO: 395737
auacaccuucucauaccaa

SEQ ID NO: 395739 - RNA, 19 nt, Artificial Sequence
  Description of Artificial Sequence: Synthetic oligonucleotide
  Sense Strand Starting at position 981 of SEQ ID NO: 317736
gacgauugaucagccagga

SEQ ID NO: 395740 - RNA, 19 nt, Artificial Sequence
  Description of Artificial Sequence: Synthetic oligonucleotide
  Antisense Strand to SEQ ID NO: 395739
uccuggcugaucaaucguc

SEQ ID NO: 395741 - RNA, 19 nt, Artificial Sequence
  Description of Artificial Sequence: Synthetic oligonucleotide
  Sense Strand Starting at position 981 of SEQ ID NO: 317851
cguucuggaccuuagcaau

SEQ ID NO: 395742 - RNA, 19 nt, Artificial Sequence
  Description of Artificial Sequence: Synthetic oligonucleotide
  Antisense Strand to SEQ ID NO: 395741
auugcuaagguccagaacg

SEQ ID NO: 395743 - RNA, 19 nt, Artificial Sequence
  Description of Artificial Sequence: Synthetic oligonucleotide
  Sense Strand Starting at position 981 of SEQ ID NO: 318008
caguguugugaagauugag

SEQ ID NO: 395744 - RNA, 19 nt, Artificial Sequence
  Description of Artificial Sequence: Synthetic oligonucleotide
  Antisense Strand to SEQ ID NO: 395743
cucaaucuucacaacacug

SEQ ID NO: 395745 - RNA, 19 nt, Artificial Sequence
  Description of Artificial Sequence: Synthetic oligonucleotide
  Sense Strand Starting at position 981 of SEQ ID NO: 318054
gaggguguccugcauauug

SEQ ID NO: 395746 - RNA, 19 nt, Artificial Sequence
  Description of Artificial Sequence: Synthetic oligonucleotide
  Antisense Strand to SEQ ID NO: 395745
caauaugcaggacacccuc

SEQ ID NO: 395747 - RNA, 19 nt, Artificial Sequence
  Description of Artificial Sequence: Synthetic oligonucleotide
  Sense Strand Starting at position 981 of SEQ ID NO: 318217
gugaaagggcagugaacua

SEQ ID NO: 395748 - RNA, 19 nt, Artificial Sequence
  Description of Artificial Sequence: Synthetic oligonucleotide
  Antisense Strand to SEQ ID NO: 395747
uaguucacugcccuuucac

SEQ ID NO: 395749 - RNA, 19 nt, Artificial Sequence
  Description of Artificial Sequence: Synthetic oligonucleotide
  Sense Strand Starting at position 981 of SEQ ID NO: 318238
ggucuagagaucuggguuc

SEQ ID NO: 395750 - RNA, 19 nt, Artificial Sequence
  Description of Artificial Sequence: Synthetic oligonucleotide
  Antisense Strand to SEQ ID NO: 395749
gaacccagaucucuagacc

SEQ ID NO: 395751 - RNA, 19 nt, Artificial Sequence
  Description of Artificial Sequence: Synthetic oligonucleotide
  Sense Strand Starting at position 981 of SEQ ID NO: 318240
ucuagagaucuggguucua

SEQ ID NO: 395752 - RNA, 19 nt, Artificial Sequence
  Description of Artificial Sequence: Synthetic oligonucleotide
  Antisense Strand to SEQ ID NO: 395751
uagaacccagaucucuaga

SEQ ID NO: 395753 - RNA, 19 nt, Artificial Sequence
  Description of Artificial Sequence: Synthetic oligonucleotide
  Sense Strand Starting at position 981 of SEQ ID NO: 318302
cccuuucuucgccugaguu

SEQ ID NO: 395754 - RNA, 19 nt, Artificial Sequence
  Description of Artificial Sequence: Synthetic oligonucleotide
  Antisense Strand to SEQ ID NO: 395753
aacucaggcgaagaaaggg

SEQ ID NO: 395755 - RNA, 19 nt, Artificial Sequence
  Description of Artificial Sequence: Synthetic oligonucleotide
  Sense Strand Starting at position 981 of SEQ ID NO: 318304
cuuucuucgccugaguucu

SEQ ID NO: 395756 - RNA, 19 nt, Artificial Sequence
  Description of Artificial Sequence: Synthetic oligonucleotide
  Antisense Strand to SEQ ID NO: 395755
agaacucaggcgaagaaag

SEQ ID NO: 395757 - RNA, 19 nt, Artificial Sequence
  Description of Artificial Sequence: Synthetic oligonucleotide
  Sense Strand Starting at position 981 of SEQ ID NO: 318310
ucgccugaguucucucauc

SEQ ID NO: 395758 - RNA, 19 nt, Artificial Sequence
  Description of Artificial Sequence: Synthetic oligonucleotide
  Antisense Strand to SEQ ID NO: 395757
gaugagagaacucaggcga

SEQ ID NO: 395759 - RNA, 19 nt, Artificial Sequence
  Description of Artificial Sequence: Synthetic oligonucleotide
  Sense Strand Starting at position 981 of SEQ ID NO: 318315
ugaguucucucaucuguac

SEQ ID NO: 395760 - RNA, 19 nt, Artificial Sequence
  Description of Artificial Sequence: Synthetic oligonucleotide
  Antisense Strand to SEQ ID NO: 395759
guacagaugagagaacuca

SEQ ID NO: 395761 - RNA, 19 nt, Artificial Sequence
  Description of Artificial Sequence: Synthetic oligonucleotide
  Sense Strand Starting at position 981 of SEQ ID NO: 318318
guucucucaucuguacaaa

SEQ ID NO: 395762 - RNA, 19 nt, Artificial Sequence
  Description of Artificial Sequence: Synthetic oligonucleotide
  Antisense Strand to SEQ ID NO: 395761
uuuguacagaugagagaac

SEQ ID NO: 395763 - RNA, 19 nt, Artificial Sequence
  Description of Artificial Sequence: Synthetic oligonucleotide
  Sense Strand Starting at position 981 of SEQ ID NO: 318367
ucucaaucugauggccaau

SEQ ID NO: 395764 - RNA, 19 nt, Artificial Sequence
  Description of Artificial Sequence: Synthetic oligonucleotide
  Antisense Strand to SEQ ID NO: 395763
auuggccaucagauugaga

SEQ ID NO: 395765 - RNA, 19 nt, Artificial Sequence
  Description of Artificial Sequence: Synthetic oligonucleotide
  Sense Strand Starting at position 981 of SEQ ID NO: 318433
uuguuuacugauggagaca

SEQ ID NO: 395766 - RNA, 19 nt, Artificial Sequence
  Description of Artificial Sequence: Synthetic oligonucleotide
  Antisense Strand to SEQ ID NO: 395765
ugucuccaucaguaaacaa

SEQ ID NO: 395767 - RNA, 19 nt, Artificial Sequence
  Description of Artificial Sequence: Synthetic oligonucleotide
  Sense Strand Starting at position 981 of SEQ ID NO: 318453
ggaagaggcuuccuaaccu

SEQ ID NO: 395768 - RNA, 19 nt, Artificial Sequence
  Description of Artificial Sequence: Synthetic oligonucleotide
  Antisense Strand to SEQ ID NO: 395767
agguuaggaagccucuucc

SEQ ID NO: 395769 - RNA, 19 nt, Artificial Sequence
  Description of Artificial Sequence: Synthetic oligonucleotide
  Sense Strand Starting at position 981 of SEQ ID NO: 318539
ccaggacuuugggaguaaa

SEQ ID NO: 395770 - RNA, 19 nt, Artificial Sequence
  Description of Artificial Sequence: Synthetic oligonucleotide
  Antisense Strand to SEQ ID NO: 395769
uuuacucccaaaguccugg

SEQ ID NO: 395771 - RNA, 19 nt, Artificial Sequence
  Description of Artificial Sequence: Synthetic oligonucleotide
  Sense Strand Starting at position 981 of SEQ ID NO: 318849
ggugucgcucgccuguaau

SEQ ID NO: 395772 - RNA, 19 nt, Artificial Sequence
  Description of Artificial Sequence: Synthetic oligonucleotide
  Antisense Strand to SEQ ID NO: 395771
auuacaggcgagcgacacc

SEQ ID NO: 395773 - RNA, 19 nt, Artificial Sequence
  Description of Artificial Sequence: Synthetic oligonucleotide
  Sense Strand Starting at position 981 of SEQ ID NO: 319069
guggccucaacuuguaagu

SEQ ID NO: 395774 - RNA, 19 nt, Artificial Sequence
  Description of Artificial Sequence: Synthetic oligonucleotide
  Antisense Strand to SEQ ID NO: 395773
acuuacaaguugaggccac

SEQ ID NO: 395775 - RNA, 19 nt, Artificial Sequence
  Description of Artificial Sequence: Synthetic oligonucleotide
  Sense Strand Starting at position 981 of SEQ ID NO: 319079
cuuguaaguuaauucugga

SEQ ID NO: 395776 - RNA, 19 nt, Artificial Sequence
  Description of Artificial Sequence: Synthetic oligonucleotide
  Antisense Strand to SEQ ID NO: 395775
uccagaauuaacuuacaag

SEQ ID NO: 395777 - RNA, 19 nt, Artificial Sequence
  Description of Artificial Sequence: Synthetic oligonucleotide
  Sense Strand Starting at position 982 of SEQ ID NO: 315505
agaugucaccacugggaca

SEQ ID NO: 395778 - RNA, 19 nt, Artificial Sequence
  Description of Artificial Sequence: Synthetic oligonucleotide
  Antisense Strand to SEQ ID NO: 395777
ugucccaguggugacaucu

SEQ ID NO: 395779 - RNA, 19 nt, Artificial Sequence
  Description of Artificial Sequence: Synthetic oligonucleotide
  Sense Strand Starting at position 982 of SEQ ID NO: 316176
ugaaguaugugaucauuau

SEQ ID NO: 395780 - RNA, 19 nt, Artificial Sequence
  Description of Artificial Sequence: Synthetic oligonucleotide
  Antisense Strand to SEQ ID NO: 395779
auaaugaucacauacuuca

SEQ ID NO: 395781 - RNA, 19 nt, Artificial Sequence
  Description of Artificial Sequence: Synthetic oligonucleotide
  Sense Strand Starting at position 982 of SEQ ID NO: 316180
guaugugaucauuauggga

SEQ ID NO: 395782 - RNA, 19 nt, Artificial Sequence
  Description of Artificial Sequence: Synthetic oligonucleotide
  Antisense Strand to SEQ ID NO: 395781
ucccauaaugaucacauac

SEQ ID NO: 395783 - RNA, 19 nt, Artificial Sequence
  Description of Artificial Sequence: Synthetic oligonucleotide
  Sense Strand Starting at position 982 of SEQ ID NO: 316184
gugaucauuaugggacaau

SEQ ID NO: 395784 - RNA, 19 nt, Artificial Sequence
  Description of Artificial Sequence: Synthetic oligonucleotide
  Antisense Strand to SEQ ID NO: 395783
auugucccauaaugaucac

SEQ ID NO: 395785 - RNA, 19 nt, Artificial Sequence
  Description of Artificial Sequence: Synthetic oligonucleotide
  Sense Strand Starting at position 982 of SEQ ID NO: 316359
gugauacagaccugacaug

SEQ ID NO: 395786 - RNA, 19 nt, Artificial Sequence
  Description of Artificial Sequence: Synthetic oligonucleotide
  Antisense Strand to SEQ ID NO: 395785
caugucaggucuguaucac

SEQ ID NO: 395787 - RNA, 19 nt, Artificial Sequence
  Description of Artificial Sequence: Synthetic oligonucleotide
  Sense Strand Starting at position 982 of SEQ ID NO: 316436
auucccucucagggaguua

SEQ ID NO: 395788 - RNA, 19 nt, Artificial Sequence
  Description of Artificial Sequence: Synthetic oligonucleotide
  Antisense Strand to SEQ ID NO: 395787
uaacucccugagagggaau

SEQ ID NO: 395789 - RNA, 19 nt, Artificial Sequence
  Description of Artificial Sequence: Synthetic oligonucleotide
  Sense Strand Starting at position 982 of SEQ ID NO: 316509
gagcuucuugcuuauagga

SEQ ID NO: 395790 - RNA, 19 nt, Artificial Sequence
  Description of Artificial Sequence: Synthetic oligonucleotide
  Antisense Strand to SEQ ID NO: 395789
uccuauaagcaagaagcuc

SEQ ID NO: 395791 - RNA, 19 nt, Artificial Sequence
  Description of Artificial Sequence: Synthetic oligonucleotide
  Sense Strand Starting at position 982 of SEQ ID NO: 316528
gagggacuguacucugagu

SEQ ID NO: 395792 - RNA, 19 nt, Artificial Sequence
  Description of Artificial Sequence: Synthetic oligonucleotide
  Antisense Strand to SEQ ID NO: 395791
acucagaguacagucccuc

SEQ ID NO: 395793 - RNA, 19 nt, Artificial Sequence
  Description of Artificial Sequence: Synthetic oligonucleotide
  Sense Strand Starting at position 982 of SEQ ID NO: 316530
gggacuguacucugaguag

SEQ ID NO: 395794 - RNA, 19 nt, Artificial Sequence
  Description of Artificial Sequence: Synthetic oligonucleotide
  Antisense Strand to SEQ ID NO: 395793
cuacucagaguacaguccc

SEQ ID NO: 395795 - RNA, 19 nt, Artificial Sequence
  Description of Artificial Sequence: Synthetic oligonucleotide
  Sense Strand Starting at position 982 of SEQ ID NO: 316533
acuguacucugaguaggaa

SEQ ID NO: 395796 - RNA, 19 nt, Artificial Sequence
  Description of Artificial Sequence: Synthetic oligonucleotide
  Antisense Strand to SEQ ID NO: 395795
uuccuacucagaguacagu

SEQ ID NO: 395797 - RNA, 19 nt, Artificial Sequence
  Description of Artificial Sequence: Synthetic oligonucleotide
  Sense Strand Starting at position 982 of SEQ ID NO: 316536
guacucugaguaggaaaga

SEQ ID NO: 395798 - RNA, 19 nt, Artificial Sequence
  Description of Artificial Sequence: Synthetic oligonucleotide
  Antisense Strand to SEQ ID NO: 395797
ucuuuccuacucagaguac

SEQ ID NO: 395799 - RNA, 19 nt, Artificial Sequence
  Description of Artificial Sequence: Synthetic oligonucleotide
  Sense Strand Starting at position 982 of SEQ ID NO: 316560
ggguacaucccaugagcua

SEQ ID NO: 395800 - RNA, 19 nt, Artificial Sequence
  Description of Artificial Sequence: Synthetic oligonucleotide
  Antisense Strand to SEQ ID NO: 395799
uagcucaugggauguaccc

SEQ ID NO: 395801 - RNA, 19 nt, Artificial Sequence
  Description of Artificial Sequence: Synthetic oligonucleotide
  Sense Strand Starting at position 982 of SEQ ID NO: 316561
gguacaucccaugagcuau

SEQ ID NO: 395802 - RNA, 19 nt, Artificial Sequence
  Description of Artificial Sequence: Synthetic oligonucleotide
  Antisense Strand to SEQ ID NO: 395801
auagcucaugggauguacc

SEQ ID NO: 395803 - RNA, 19 nt, Artificial Sequence
  Description of Artificial Sequence: Synthetic oligonucleotide
  Sense Strand Starting at position 982 of SEQ ID NO: 317002
gucaguuaccuagacuguu

SEQ ID NO: 395804 - RNA, 19 nt, Artificial Sequence
  Description of Artificial Sequence: Synthetic oligonucleotide
  Antisense Strand to SEQ ID NO: 395803
aacagucuagguaacugac

SEQ ID NO: 395805 - RNA, 19 nt, Artificial Sequence
  Description of Artificial Sequence: Synthetic oligonucleotide
  Sense Strand Starting at position 982 of SEQ ID NO: 317019
uugagaacauccuugaucu

SEQ ID NO: 395806 - RNA, 19 nt, Artificial Sequence
  Description of Artificial Sequence: Synthetic oligonucleotide
  Antisense Strand to SEQ ID NO: 395805
agaucaaggauguucucaa

SEQ ID NO: 395807 - RNA, 19 nt, Artificial Sequence
  Description of Artificial Sequence: Synthetic oligonucleotide
  Sense Strand Starting at position 982 of SEQ ID NO: 317020
ugagaacauccuugaucuu

SEQ ID NO: 395808 - RNA, 19 nt, Artificial Sequence
  Description of Artificial Sequence: Synthetic oligonucleotide
  Antisense Strand to SEQ ID NO: 395807
aagaucaaggauguucuca

SEQ ID NO: 395809 - RNA, 19 nt, Artificial Sequence
  Description of Artificial Sequence: Synthetic oligonucleotide
  Sense Strand Starting at position 982 of SEQ ID NO: 317035
ucuucuuauccauaacgga

SEQ ID NO: 395810 - RNA, 19 nt, Artificial Sequence
  Description of Artificial Sequence: Synthetic oligonucleotide
  Antisense Strand to SEQ ID NO: 395809
uccguuauggauaagaaga

SEQ ID NO: 395811 - RNA, 19 nt, Artificial Sequence
  Description of Artificial Sequence: Synthetic oligonucleotide
  Sense Strand Starting at position 982 of SEQ ID NO: 317080
gguugaucagcuggagaag

SEQ ID NO: 395812 - RNA, 19 nt, Artificial Sequence
  Description of Artificial Sequence: Synthetic oligonucleotide
  Antisense Strand to SEQ ID NO: 395811
cuucuccagcugaucaacc

SEQ ID NO: 395813 - RNA, 19 nt, Artificial Sequence
  Description of Artificial Sequence: Synthetic oligonucleotide
  Sense Strand Starting at position 982 of SEQ ID NO: 317235
guuaguuuccagggaguaa

SEQ ID NO: 395814 - RNA, 19 nt, Artificial Sequence
  Description of Artificial Sequence: Synthetic oligonucleotide
  Antisense Strand to SEQ ID NO: 395813
uuacucccuggaaacuaac

SEQ ID NO: 395815 - RNA, 19 nt, Artificial Sequence
  Description of Artificial Sequence: Synthetic oligonucleotide
  Sense Strand Starting at position 982 of SEQ ID NO: 317487
guaacaggugacugugaua

SEQ ID NO: 395816 - RNA, 19 nt, Artificial Sequence
  Description of Artificial Sequence: Synthetic oligonucleotide
  Antisense Strand to SEQ ID NO: 395815
uaucacagucaccuguuac

SEQ ID NO: 395817 - RNA, 19 nt, Artificial Sequence
  Description of Artificial Sequence: Synthetic oligonucleotide
  Sense Strand Starting at position 982 of SEQ ID NO: 317511
uggaguguucaugagaagc

SEQ ID NO: 395818 - RNA, 19 nt, Artificial Sequence
  Description of Artificial Sequence: Synthetic oligonucleotide
  Antisense Strand to SEQ ID NO: 395817
gcuucucaugaacacucca

SEQ ID NO: 395819 - RNA, 19 nt, Artificial Sequence
  Description of Artificial Sequence: Synthetic oligonucleotide
  Sense Strand Starting at position 982 of SEQ ID NO: 317635
uguggucugccgguauuau

SEQ ID NO: 395820 - RNA, 19 nt, Artificial Sequence
  Description of Artificial Sequence: Synthetic oligonucleotide
  Antisense Strand to SEQ ID NO: 395819
auaauaccggcagaccaca

SEQ ID NO: 395821 - RNA, 19 nt, Artificial Sequence
  Description of Artificial Sequence: Synthetic oligonucleotide
  Sense Strand Starting at position 982 of SEQ ID NO: 317821
ccaaucucauuuggaggaa

SEQ ID NO: 395822 - RNA, 19 nt, Artificial Sequence
  Description of Artificial Sequence: Synthetic oligonucleotide
  Antisense Strand to SEQ ID NO: 395821
uuccuccaaaugagauugg

SEQ ID NO: 395823 - RNA, 19 nt, Artificial Sequence
  Description of Artificial Sequence: Synthetic oligonucleotide
  Sense Strand Starting at position 982 of SEQ ID NO: 317896
uaacuagaagcaugguuua

SEQ ID NO: 395824 - RNA, 19 nt, Artificial Sequence
  Description of Artificial Sequence: Synthetic oligonucleotide
  Antisense Strand to SEQ ID NO: 395823
uaaaccaugcuucuaguua

SEQ ID NO: 395825 - RNA, 19 nt, Artificial Sequence
  Description of Artificial Sequence: Synthetic oligonucleotide
  Sense Strand Starting at position 982 of SEQ ID NO: 317899
cuagaagcaugguuuauga

SEQ ID NO: 395826 - RNA, 19 nt, Artificial Sequence
  Description of Artificial Sequence: Synthetic oligonucleotide
  Antisense Strand to SEQ ID NO: 395825
ucauaaaccaugcuucuag

SEQ ID NO: 395827 - RNA, 19 nt, Artificial Sequence
  Description of Artificial Sequence: Synthetic oligonucleotide
  Sense Strand Starting at position 982 of SEQ ID NO: 317901
agaagcaugguuuaugauu

SEQ ID NO: 395828 - RNA, 19 nt, Artificial Sequence
  Description of Artificial Sequence: Synthetic oligonucleotide
  Antisense Strand to SEQ ID NO: 395827
aaucauaaaccaugcuucu

SEQ ID NO: 395829 - RNA, 19 nt, Artificial Sequence
  Description of Artificial Sequence: Synthetic oligonucleotide
  Sense Strand Starting at position 982 of SEQ ID NO: 318102
agagcaagaucuuucucua

SEQ ID NO: 395830 - RNA, 19 nt, Artificial Sequence
  Description of Artificial Sequence: Synthetic oligonucleotide
  Antisense Strand to SEQ ID NO: 395829
uagagaaagaucuugcucu

SEQ ID NO: 395831 - RNA, 19 nt, Artificial Sequence
  Description of Artificial Sequence: Synthetic oligonucleotide
  Sense Strand Starting at position 982 of SEQ ID NO: 318105
gcaagaucuuucucuagaa

SEQ ID NO: 395832 - RNA, 19 nt, Artificial Sequence
  Description of Artificial Sequence: Synthetic oligonucleotide
  Antisense Strand to SEQ ID NO: 395831
uucuagagaaagaucuugc

SEQ ID NO: 395833 - RNA, 19 nt, Artificial Sequence
  Description of Artificial Sequence: Synthetic oligonucleotide
  Sense Strand Starting at position 982 of SEQ ID NO: 318287
gugcaaauucuguauauua

SEQ ID NO: 395834 - RNA, 19 nt, Artificial Sequence
  Description of Artificial Sequence: Synthetic oligonucleotide
  Antisense Strand to SEQ ID NO: 395833
uaauauacagaauuugcac

SEQ ID NO: 395835 - RNA, 19 nt, Artificial Sequence
  Description of Artificial Sequence: Synthetic oligonucleotide
  Sense Strand Starting at position 982 of SEQ ID NO: 318289
gcaaauucuguauauuaug

SEQ ID NO: 395836 - RNA, 19 nt, Artificial Sequence
  Description of Artificial Sequence: Synthetic oligonucleotide
  Antisense Strand to SEQ ID NO: 395835
cauaauauacagaauuugc

SEQ ID NO: 395837 - RNA, 19 nt, Artificial Sequence
  Description of Artificial Sequence: Synthetic oligonucleotide
  Sense Strand Starting at position 982 of SEQ ID NO: 318445
ccaaaugaguuagccucaa

SEQ ID NO: 395838 - RNA, 19 nt, Artificial Sequence
  Description of Artificial Sequence: Synthetic oligonucleotide
  Antisense Strand to SEQ ID NO: 395837
uugaggcuaacucauuugg

SEQ ID NO: 395839 - RNA, 19 nt, Artificial Sequence
  Description of Artificial Sequence: Synthetic oligonucleotide
  Sense Strand Starting at position 982 of SEQ ID NO: 318458
ccucaaauuuaggacagaa

SEQ ID NO: 395840 - RNA, 19 nt, Artificial Sequence
  Description of Artificial Sequence: Synthetic oligonucleotide
  Antisense Strand to SEQ ID NO: 395839
uucuguccuaaauuugagg

SEQ ID NO: 395841 - RNA, 19 nt, Artificial Sequence
  Description of Artificial Sequence: Synthetic oligonucleotide
  Sense Strand Starting at position 982 of SEQ ID NO: 318562
ugaggaugccaugauuccu

SEQ ID NO: 395842 - RNA, 19 nt, Artificial Sequence
  Description of Artificial Sequence: Synthetic oligonucleotide
  Antisense Strand to SEQ ID NO: 395841
aggaaucauggcauccuca

SEQ ID NO: 395843 - RNA, 19 nt, Artificial Sequence
  Description of Artificial Sequence: Synthetic oligonucleotide
  Sense Strand Starting at position 982 of SEQ ID NO: 318594
gcauguggccaccaugaau

SEQ ID NO: 395844 - RNA, 19 nt, Artificial Sequence
  Description of Artificial Sequence: Synthetic oligonucleotide
  Antisense Strand to SEQ ID NO: 395843
auucaugguggccacaugc

SEQ ID NO: 395845 - RNA, 19 nt, Artificial Sequence
  Description of Artificial Sequence: Synthetic oligonucleotide
  Sense Strand Starting at position 982 of SEQ ID NO: 318712
gggucucuugagcacaaga

SEQ ID NO: 395846 - RNA, 19 nt, Artificial Sequence
  Description of Artificial Sequence: Synthetic oligonucleotide
  Antisense Strand to SEQ ID NO: 395845
ucuugugcucaagagaccc

SEQ ID NO: 395847 - RNA, 19 nt, Artificial Sequence
  Description of Artificial Sequence: Synthetic oligonucleotide
  Sense Strand Starting at position 982 of SEQ ID NO: 318843
ucacuugagccucaagguu

SEQ ID NO: 395848 - RNA, 19 nt, Artificial Sequence
  Description of Artificial Sequence: Synthetic oligonucleotide
  Antisense Strand to SEQ ID NO: 395847
aaccuugaggcucaaguga

SEQ ID NO: 395849 - RNA, 19 nt, Artificial Sequence
  Description of Artificial Sequence: Synthetic oligonucleotide
  Sense Strand Starting at position 982 of SEQ ID NO: 318965
aaggcaguuaggugacuau

SEQ ID NO: 395850 - RNA, 19 nt, Artificial Sequence
  Description of Artificial Sequence: Synthetic oligonucleotide
  Antisense Strand to SEQ ID NO: 395849
auagucaccuaacugccuu

SEQ ID NO: 395851 - RNA, 19 nt, Artificial Sequence
  Description of Artificial Sequence: Synthetic oligonucleotide
  Sense Strand Starting at position 982 of SEQ ID NO: 318972
uuaggugacuauuccuuga

SEQ ID NO: 395852 - RNA, 19 nt, Artificial Sequence
  Description of Artificial Sequence: Synthetic oligonucleotide
  Antisense Strand to SEQ ID NO: 395851
ucaaggaauagucaccuaa

SEQ ID NO: 395853 - RNA, 19 nt, Artificial Sequence
  Description of Artificial Sequence: Synthetic oligonucleotide
  Sense Strand Starting at position 982 of SEQ ID NO: 318977
ugacuauuccuugaggcag

SEQ ID NO: 395854 - RNA, 19 nt, Artificial Sequence
  Description of Artificial Sequence: Synthetic oligonucleotide
  Antisense Strand to SEQ ID NO: 395853
cugccucaaggaauaguca

SEQ ID NO: 395855 - RNA, 19 nt, Artificial Sequence
  Description of Artificial Sequence: Synthetic oligonucleotide
  Sense Strand Starting at position 982 of SEQ ID NO: 319041
gcccacuuuccuggagaug

SEQ ID NO: 395856 - RNA, 19 nt, Artificial Sequence
  Description of Artificial Sequence: Synthetic oligonucleotide
  Antisense Strand to SEQ ID NO: 395855
caucuccaggaaagugggc

SEQ ID NO: 395857 - RNA, 19 nt, Artificial Sequence
  Description of Artificial Sequence: Synthetic oligonucleotide
  Sense Strand Starting at position 983 of SEQ ID NO: 315253
gugaucaguacugguuaga

SEQ ID NO: 395858 - RNA, 19 nt, Artificial Sequence
  Description of Artificial Sequence: Synthetic oligonucleotide
  Antisense Strand to SEQ ID NO: 395857
ucuaaccaguacugaucac

SEQ ID NO: 395859 - RNA, 19 nt, Artificial Sequence
  Description of Artificial Sequence: Synthetic oligonucleotide
  Sense Strand Starting at position 983 of SEQ ID NO: 315299
agacacaaguguucuuacu

SEQ ID NO: 395860 - RNA, 19 nt, Artificial Sequence
  Description of Artificial Sequence: Synthetic oligonucleotide
  Antisense Strand to SEQ ID NO: 395859
aguaagaacacuugugucu

SEQ ID NO: 395861 - RNA, 19 nt, Artificial Sequence
  Description of Artificial Sequence: Synthetic oligonucleotide
  Sense Strand Starting at position 983 of SEQ ID NO: 315301
acacaaguguucuuacuau

SEQ ID NO: 395862 - RNA, 19 nt, Artificial Sequence
  Description of Artificial Sequence: Synthetic oligonucleotide
  Antisense Strand to SEQ ID NO: 395861
auaguaagaacacuugugu

SEQ ID NO: 395863 - RNA, 19 nt, Artificial Sequence
  Description of Artificial Sequence: Synthetic oligonucleotide
  Sense Strand Starting at position 983 of SEQ ID NO: 315406
ggguuuaguacugauggau

SEQ ID NO: 395864 - RNA, 19 nt, Artificial Sequence
  Description of Artificial Sequence: Synthetic oligonucleotide
  Antisense Strand to SEQ ID NO: 395863
auccaucaguacuaaaccc

SEQ ID NO: 395865 - RNA, 19 nt, Artificial Sequence
  Description of Artificial Sequence: Synthetic oligonucleotide
  Sense Strand Starting at position 983 of SEQ ID NO: 315409
uuuaguacugauggaugua

SEQ ID NO: 395866 - RNA, 19 nt, Artificial Sequence
  Description of Artificial Sequence: Synthetic oligonucleotide
  Antisense Strand to SEQ ID NO: 395865
uacauccaucaguacuaaa

SEQ ID NO: 395867 - RNA, 19 nt, Artificial Sequence
  Description of Artificial Sequence: Synthetic oligonucleotide
  Sense Strand Starting at position 983 of SEQ ID NO: 315580
cuuagccuugugcaaagau

SEQ ID NO: 395868 - RNA, 19 nt, Artificial Sequence
  Description of Artificial Sequence: Synthetic oligonucleotide
  Antisense Strand to SEQ ID NO: 395867
aucuuugcacaaggcuaag

SEQ ID NO: 395869 - RNA, 19 nt, Artificial Sequence
  Description of Artificial Sequence: Synthetic oligonucleotide
  Sense Strand Starting at position 983 of SEQ ID NO: 315678
ggucaaagucccuaacgaa

SEQ ID NO: 395870 - RNA, 19 nt, Artificial Sequence
  Description of Artificial Sequence: Synthetic oligonucleotide
  Antisense Strand to SEQ ID NO: 395869
uucguuagggacuuugacc

SEQ ID NO: 395871 - RNA, 19 nt, Artificial Sequence
  Description of Artificial Sequence: Synthetic oligonucleotide
  Sense Strand Starting at position 983 of SEQ ID NO: 315708
uuucuagugcaggaguuau

SEQ ID NO: 395872 - RNA, 19 nt, Artificial Sequence
  Description of Artificial Sequence: Synthetic oligonucleotide
  Antisense Strand to SEQ ID NO: 395871
auaacuccugcacuagaaa

SEQ ID NO: 395873 - RNA, 19 nt, Artificial Sequence
  Description of Artificial Sequence: Synthetic oligonucleotide
  Sense Strand Starting at position 983 of SEQ ID NO: 315712
uagugcaggaguuauagaa

SEQ ID NO: 395874 - RNA, 19 nt, Artificial Sequence
  Description of Artificial Sequence: Synthetic oligonucleotide
  Antisense Strand to SEQ ID NO: 395873
uucuauaacuccugcacua

SEQ ID NO: 395875 - RNA, 19 nt, Artificial Sequence
  Description of Artificial Sequence: Synthetic oligonucleotide
  Sense Strand Starting at position 983 of SEQ ID NO: 315866
auggacucuucggcaauua

SEQ ID NO: 395876 - RNA, 19 nt, Artificial Sequence
  Description of Artificial Sequence: Synthetic oligonucleotide
  Antisense Strand to SEQ ID NO: 395875
uaauugccgaagaguccau

SEQ ID NO: 395877 - RNA, 19 nt, Artificial Sequence
  Description of Artificial Sequence: Synthetic oligonucleotide
  Sense Strand Starting at position 983 of SEQ ID NO: 315867
uggacucuucggcaauuaa

SEQ ID NO: 395878 - RNA, 19 nt, Artificial Sequence
  Description of Artificial Sequence: Synthetic oligonucleotide
  Antisense Strand to SEQ ID NO: 395877
uuaauugccgaagagucca

SEQ ID NO: 395879 - RNA, 19 nt, Artificial Sequence
  Description of Artificial Sequence: Synthetic oligonucleotide
  Sense Strand Starting at position 983 of SEQ ID NO: 315922
uccuuuccuugggucagaa

SEQ ID NO: 395880 - RNA, 19 nt, Artificial Sequence
  Description of Artificial Sequence: Synthetic oligonucleotide
  Antisense Strand to SEQ ID NO: 395879
uucugacccaaggaaagga

SEQ ID NO: 395881 - RNA, 19 nt, Artificial Sequence
  Description of Artificial Sequence: Synthetic oligonucleotide
  Sense Strand Starting at position 983 of SEQ ID NO: 316014
gcggaaucaugguucacug

SEQ ID NO: 395882 - RNA, 19 nt, Artificial Sequence
  Description of Artificial Sequence: Synthetic oligonucleotide
  Antisense Strand to SEQ ID NO: 395881
cagugaaccaugauuccgc

SEQ ID NO: 395883 - RNA, 19 nt, Artificial Sequence
  Description of Artificial Sequence: Synthetic oligonucleotide
  Sense Strand Starting at position 983 of SEQ ID NO: 316447
gguaacuauuucuaacaug

SEQ ID NO: 395884 - RNA, 19 nt, Artificial Sequence
  Description of Artificial Sequence: Synthetic oligonucleotide
  Antisense Strand to SEQ ID NO: 395883
cauguuagaaauaguuacc

SEQ ID NO: 395885 - RNA, 19 nt, Artificial Sequence
  Description of Artificial Sequence: Synthetic oligonucleotide
  Sense Strand Starting at position 983 of SEQ ID NO: 316594
guagaugcuccguaauauu

SEQ ID NO: 395886 - RNA, 19 nt, Artificial Sequence
  Description of Artificial Sequence: Synthetic oligonucleotide
  Antisense Strand to SEQ ID NO: 395885
aauauuacggagcaucuac

SEQ ID NO: 395887 - RNA, 19 nt, Artificial Sequence
  Description of Artificial Sequence: Synthetic oligonucleotide
  Sense Strand Starting at position 983 of SEQ ID NO: 316615
gugaaugaauuaccaucua

SEQ ID NO: 395888 - RNA, 19 nt, Artificial Sequence
  Description of Artificial Sequence: Synthetic oligonucleotide
  Antisense Strand to SEQ ID NO: 395887
uagaugguaauucauucac

SEQ ID NO: 395889 - RNA, 19 nt, Artificial Sequence
  Description of Artificial Sequence: Synthetic oligonucleotide
  Sense Strand Starting at position 983 of SEQ ID NO: 316661
ggagcuaaggccuauucca

SEQ ID NO: 395890 - RNA, 19 nt, Artificial Sequence
  Description of Artificial Sequence: Synthetic oligonucleotide
  Antisense Strand to SEQ ID NO: 395889
uggaauaggccuuagcucc

SEQ ID NO: 395891 - RNA, 19 nt, Artificial Sequence
  Description of Artificial Sequence: Synthetic oligonucleotide
  Sense Strand Starting at position 983 of SEQ ID NO: 316791
uuuauaacguuacuggauu

SEQ ID NO: 395892 - RNA, 19 nt, Artificial Sequence
  Description of Artificial Sequence: Synthetic oligonucleotide
  Antisense Strand to SEQ ID NO: 395891
aauccaguaacguuauaaa

SEQ ID NO: 395893 - RNA, 19 nt, Artificial Sequence
  Description of Artificial Sequence: Synthetic oligonucleotide
  Sense Strand Starting at position 983 of SEQ ID NO: 316825
cgggcuguuaaacauuaau

SEQ ID NO: 395894 - RNA, 19 nt, Artificial Sequence
  Description of Artificial Sequence: Synthetic oligonucleotide
  Antisense Strand to SEQ ID NO: 395893
auuaauguuuaacagcccg

SEQ ID NO: 395895 - RNA, 19 nt, Artificial Sequence
  Description of Artificial Sequence: Synthetic oligonucleotide
  Sense Strand Starting at position 983 of SEQ ID NO: 317070
ucagguuuccgcgauacaa

SEQ ID NO: 395896 - RNA, 19 nt, Artificial Sequence
  Description of Artificial Sequence: Synthetic oligonucleotide
  Antisense Strand to SEQ ID NO: 395895
uuguaucgcggaaaccuga

SEQ ID NO: 395897 - RNA, 19 nt, Artificial Sequence
  Description of Artificial Sequence: Synthetic oligonucleotide
  Sense Strand Starting at position 983 of SEQ ID NO: 317095
cgagauggucucgaagucu

SEQ ID NO: 395898 - RNA, 19 nt, Artificial Sequence
  Description of Artificial Sequence: Synthetic oligonucleotide
  Antisense Strand to SEQ ID NO: 395897
agacuucgagaccaucucg

SEQ ID NO: 395899 - RNA, 19 nt, Artificial Sequence
  Description of Artificial Sequence: Synthetic oligonucleotide
  Sense Strand Starting at position 983 of SEQ ID NO: 317106
cgaagucuuagcuccguca

SEQ ID NO: 395900 - RNA, 19 nt, Artificial Sequence
  Description of Artificial Sequence: Synthetic oligonucleotide
  Antisense Strand to SEQ ID NO: 395899
ugacggagcuaagacuucg

SEQ ID NO: 395901 - RNA, 19 nt, Artificial Sequence
  Description of Artificial Sequence: Synthetic oligonucleotide
  Sense Strand Starting at position 983 of SEQ ID NO: 317118
uccgucaccuaaucugaga

SEQ ID NO: 395902 - RNA, 19 nt, Artificial Sequence
  Description of Artificial Sequence: Synthetic oligonucleotide
  Antisense Strand to SEQ ID NO: 395901
ucucagauuaggugacgga

SEQ ID NO: 395903 - RNA, 19 nt, Artificial Sequence
  Description of Artificial Sequence: Synthetic oligonucleotide
  Sense Strand Starting at position 983 of SEQ ID NO: 317223
ggaauacgccgguaggaau

SEQ ID NO: 395904 - RNA, 19 nt, Artificial Sequence
  Description of Artificial Sequence: Synthetic oligonucleotide
  Antisense Strand to SEQ ID NO: 395903
auuccuaccggcguauucc

SEQ ID NO: 395905 - RNA, 19 nt, Artificial Sequence
  Description of Artificial Sequence: Synthetic oligonucleotide
  Sense Strand Starting at position 983 of SEQ ID NO: 317629
agcagaacgcgugugcuuu

SEQ ID NO: 395906 - RNA, 19 nt, Artificial Sequence
  Description of Artificial Sequence: Synthetic oligonucleotide
  Antisense Strand to SEQ ID NO: 395905
aaagcacacgcguucugcu

SEQ ID NO: 395907 - RNA, 19 nt, Artificial Sequence
  Description of Artificial Sequence: Synthetic oligonucleotide
  Sense Strand Starting at position 983 of SEQ ID NO: 317643
gcuuuaagggcagagacau

SEQ ID NO: 395908 - RNA, 19 nt, Artificial Sequence
  Description of Artificial Sequence: Synthetic oligonucleotide
  Antisense Strand to SEQ ID NO: 395907
augucucugcccuuaaagc

SEQ ID NO: 395909 - RNA, 19 nt, Artificial Sequence
  Description of Artificial Sequence: Synthetic oligonucleotide
  Sense Strand Starting at position 983 of SEQ ID NO: 317796
agugaaggcguucaauaaa

SEQ ID NO: 395910 - RNA, 19 nt, Artificial Sequence
  Description of Artificial Sequence: Synthetic oligonucleotide
  Antisense Strand to SEQ ID NO: 395909
uuuauugaacgccuucacu

SEQ ID NO: 395911 - RNA, 19 nt, Artificial Sequence
  Description of Artificial Sequence: Synthetic oligonucleotide
  Sense Strand Starting at position 983 of SEQ ID NO: 317912
uugguuuagcucugaaaug

SEQ ID NO: 395912 - RNA, 19 nt, Artificial Sequence
  Description of Artificial Sequence: Synthetic oligonucleotide
  Antisense Strand to SEQ ID NO: 395911
cauuucagagcuaaaccaa

SEQ ID NO: 395913 - RNA, 19 nt, Artificial Sequence
  Description of Artificial Sequence: Synthetic oligonucleotide
  Sense Strand Starting at position 983 of SEQ ID NO: 318045
ggcacaaacucagcaugau

SEQ ID NO: 395914 - RNA, 19 nt, Artificial Sequence
  Description of Artificial Sequence: Synthetic oligonucleotide
  Antisense Strand to SEQ ID NO: 395913
aucaugcugaguuugugcc

SEQ ID NO: 395915 - RNA, 19 nt, Artificial Sequence
  Description of Artificial Sequence: Synthetic oligonucleotide
  Sense Strand Starting at position 983 of SEQ ID NO: 318046
gcacaaacucagcaugaua

SEQ ID NO: 395916 - RNA, 19 nt, Artificial Sequence
  Description of Artificial Sequence: Synthetic oligonucleotide
  Antisense Strand to SEQ ID NO: 395915
uaucaugcugaguuugugc

SEQ ID NO: 395917 - RNA, 19 nt, Artificial Sequence
  Description of Artificial Sequence: Synthetic oligonucleotide
  Sense Strand Starting at position 983 of SEQ ID NO: 318064
auccauuguuaacuuugua

SEQ ID NO: 395918 - RNA, 19 nt, Artificial Sequence
  Description of Artificial Sequence: Synthetic oligonucleotide
  Antisense Strand to SEQ ID NO: 395917
uacaaaguuaacaauggau

SEQ ID NO: 395919 - RNA, 19 nt, Artificial Sequence
  Description of Artificial Sequence: Synthetic oligonucleotide
  Sense Strand Starting at position 983 of SEQ ID NO: 318135
guuagaugccugcagauac

SEQ ID NO: 395920 - RNA, 19 nt, Artificial Sequence
  Description of Artificial Sequence: Synthetic oligonucleotide
  Antisense Strand to SEQ ID NO: 395919
guaucugcaggcaucuaac

SEQ ID NO: 395921 - RNA, 19 nt, Artificial Sequence
  Description of Artificial Sequence: Synthetic oligonucleotide
  Sense Strand Starting at position 983 of SEQ ID NO: 318168
ucgagaugcccucaaguag

SEQ ID NO: 395922 - RNA, 19 nt, Artificial Sequence
  Description of Artificial Sequence: Synthetic oligonucleotide
  Antisense Strand to SEQ ID NO: 395921
cuacuugagggcaucucga

SEQ ID NO: 395923 - RNA, 19 nt, Artificial Sequence
  Description of Artificial Sequence: Synthetic oligonucleotide
  Sense Strand Starting at position 983 of SEQ ID NO: 318222
ugugguuaugcagaggaag

SEQ ID NO: 395924 - RNA, 19 nt, Artificial Sequence
  Description of Artificial Sequence: Synthetic oligonucleotide
  Antisense Strand to SEQ ID NO: 395923
cuuccucugcauaaccaca

SEQ ID NO: 395925 - RNA, 19 nt, Artificial Sequence
  Description of Artificial Sequence: Synthetic oligonucleotide
  Sense Strand Starting at position 983 of SEQ ID NO: 318224
ugguuaugcagaggaagua

SEQ ID NO: 395926 - RNA, 19 nt, Artificial Sequence
  Description of Artificial Sequence: Synthetic oligonucleotide
  Antisense Strand to SEQ ID NO: 395925
uacuuccucugcauaacca

SEQ ID NO: 395927 - RNA, 19 nt, Artificial Sequence
  Description of Artificial Sequence: Synthetic oligonucleotide
  Sense Strand Starting at position 983 of SEQ ID NO: 318369
cagguuaucuaucugguca

SEQ ID NO: 395928 - RNA, 19 nt, Artificial Sequence
  Description of Artificial Sequence: Synthetic oligonucleotide
  Antisense Strand to SEQ ID NO: 395927
ugaccagauagauaaccug

SEQ ID NO: 395929 - RNA, 19 nt, Artificial Sequence
  Description of Artificial Sequence: Synthetic oligonucleotide
  Sense Strand Starting at position 983 of SEQ ID NO: 318387
accgguuuacauuaccaua

SEQ ID NO: 395930 - RNA, 19 nt, Artificial Sequence
  Description of Artificial Sequence: Synthetic oligonucleotide
  Antisense Strand to SEQ ID NO: 395929
uaugguaauguaaaccggu

SEQ ID NO: 395931 - RNA, 19 nt, Artificial Sequence
  Description of Artificial Sequence: Synthetic oligonucleotide
  Sense Strand Starting at position 983 of SEQ ID NO: 318888
auggauaaguggucuuugu

SEQ ID NO: 395932 - RNA, 19 nt, Artificial Sequence
  Description of Artificial Sequence: Synthetic oligonucleotide
  Antisense Strand to SEQ ID NO: 395931
acaaagaccacuuauccau

SEQ ID NO: 395933 - RNA, 19 nt, Artificial Sequence
  Description of Artificial Sequence: Synthetic oligonucleotide
  Sense Strand Starting at position 983 of SEQ ID NO: 318923
guuuauaagccauagauug

SEQ ID NO: 395934 - RNA, 19 nt, Artificial Sequence
  Description of Artificial Sequence: Synthetic oligonucleotide
  Antisense Strand to SEQ ID NO: 395933
caaucuauggcuuauaaac

SEQ ID NO: 395935 - RNA, 19 nt, Artificial Sequence
  Description of Artificial Sequence: Synthetic oligonucleotide
  Sense Strand Starting at position 983 of SEQ ID NO: 319107
agccaucuccuuuaugaag

SEQ ID NO: 395936 - RNA, 19 nt, Artificial Sequence
  Description of Artificial Sequence: Synthetic oligonucleotide
  Antisense Strand to SEQ ID NO: 395935
cuucauaaaggagauggcu

SEQ ID NO: 395937 - RNA, 19 nt, Artificial Sequence
  Description of Artificial Sequence: Synthetic oligonucleotide
  Sense Strand Starting at position 984 of SEQ ID NO: 315352
gaaccauuaugagaaagua

SEQ ID NO: 395938 - RNA, 19 nt, Artificial Sequence
  Description of Artificial Sequence: Synthetic oligonucleotide
  Antisense Strand to SEQ ID NO: 395937
uacuuucucauaaugguuc

SEQ ID NO: 395939 - RNA, 19 nt, Artificial Sequence
  Description of Artificial Sequence: Synthetic oligonucleotide
  Sense Strand Starting at position 984 of SEQ ID NO: 315386
cuuagccuugugcaaagau

SEQ ID NO: 395940 - RNA, 19 nt, Artificial Sequence
  Description of Artificial Sequence: Synthetic oligonucleotide
  Antisense Strand to SEQ ID NO: 395939
aucuuugcacaaggcuaag

SEQ ID NO: 395941 - RNA, 19 nt, Artificial Sequence
  Description of Artificial Sequence: Synthetic oligonucleotide
  Sense Strand Starting at position 984 of SEQ ID NO: 315402
gauguuacauaauaaagga

SEQ ID NO: 395942 - RNA, 19 nt, Artificial Sequence
  Description of Artificial Sequence: Synthetic oligonucleotide
  Antisense Strand to SEQ ID NO: 395941
uccuuuauuauguaacauc

SEQ ID NO: 395943 - RNA, 19 nt, Artificial Sequence
  Description of Artificial Sequence: Synthetic oligonucleotide
  Sense Strand Starting at position 984 of SEQ ID NO: 315484
ggucaaagucccuaacgaa

SEQ ID NO: 395944 - RNA, 19 nt, Artificial Sequence
  Description of Artificial Sequence: Synthetic oligonucleotide
  Antisense Strand to SEQ ID NO: 395943
uucguuagggacuuugacc

SEQ ID NO: 395945 - RNA, 19 nt, Artificial Sequence
  Description of Artificial Sequence: Synthetic oligonucleotide
  Sense Strand Starting at position 984 of SEQ ID NO: 315514
uuucuagugcaggaguuau

SEQ ID NO: 395946 - RNA, 19 nt, Artificial Sequence
  Description of Artificial Sequence: Synthetic oligonucleotide
  Antisense Strand to SEQ ID NO: 395945
auaacuccugcacuagaaa

SEQ ID NO: 395947 - RNA, 19 nt, Artificial Sequence
  Description of Artificial Sequence: Synthetic oligonucleotide
  Sense Strand Starting at position 984 of SEQ ID NO: 315518
uagugcaggaguuauagaa

SEQ ID NO: 395948 - RNA, 19 nt, Artificial Sequence
  Description of Artificial Sequence: Synthetic oligonucleotide
  Antisense Strand to SEQ ID NO: 395947
uucuauaacuccugcacua

SEQ ID NO: 395949 - RNA, 19 nt, Artificial Sequence
  Description of Artificial Sequence: Synthetic oligonucleotide
  Sense Strand Starting at position 984 of SEQ ID NO: 315672
auggacucuucggcaauua

SEQ ID NO: 395950 - RNA, 19 nt, Artificial Sequence
  Description of Artificial Sequence: Synthetic oligonucleotide
  Antisense Strand to SEQ ID NO: 395949
uaauugccgaagaguccau

SEQ ID NO: 395951 - RNA, 19 nt, Artificial Sequence
  Description of Artificial Sequence: Synthetic oligonucleotide
  Sense Strand Starting at position 984 of SEQ ID NO: 315673
uggacucuucggcaauuaa

SEQ ID NO: 395952 - RNA, 19 nt, Artificial Sequence
  Description of Artificial Sequence: Synthetic oligonucleotide
  Antisense Strand to SEQ ID NO: 395951
uuaauugccgaagagucca

SEQ ID NO: 395953 - RNA, 19 nt, Artificial Sequence
  Description of Artificial Sequence: Synthetic oligonucleotide
  Sense Strand Starting at position 984 of SEQ ID NO: 315728
uccuuuccuugggucagaa

SEQ ID NO: 395954 - RNA, 19 nt, Artificial Sequence
  Description of Artificial Sequence: Synthetic oligonucleotide
  Antisense Strand to SEQ ID NO: 395953
uucugacccaaggaaagga

SEQ ID NO: 395955 - RNA, 19 nt, Artificial Sequence
  Description of Artificial Sequence: Synthetic oligonucleotide
  Sense Strand Starting at position 984 of SEQ ID NO: 315820
gcggaaucaugguucacug

SEQ ID NO: 395956 - RNA, 19 nt, Artificial Sequence
  Description of Artificial Sequence: Synthetic oligonucleotide
  Antisense Strand to SEQ ID NO: 395955
cagugaaccaugauuccgc

SEQ ID NO: 395957 - RNA, 19 nt, Artificial Sequence
  Description of Artificial Sequence: Synthetic oligonucleotide
  Sense Strand Starting at position 984 of SEQ ID NO: 316253
gguaacuauuucuaacaug

SEQ ID NO: 395958 - RNA, 19 nt, Artificial Sequence
  Description of Artificial Sequence: Synthetic oligonucleotide
  Antisense Strand to SEQ ID NO: 395957
cauguuagaaauaguuacc

SEQ ID NO: 395959 - RNA, 19 nt, Artificial Sequence
  Description of Artificial Sequence: Synthetic oligonucleotide
  Sense Strand Starting at position 984 of SEQ ID NO: 316400
guagaugcuccguaauauu

SEQ ID NO: 395960 - RNA, 19 nt, Artificial Sequence
  Description of Artificial Sequence: Synthetic oligonucleotide
  Antisense Strand to SEQ ID NO: 395959
aauauuacggagcaucuac

SEQ ID NO: 395961 - RNA, 19 nt, Artificial Sequence
  Description of Artificial Sequence: Synthetic oligonucleotide
  Sense Strand Starting at position 984 of SEQ ID NO: 316421
gugaaugaauuaccaucua

SEQ ID NO: 395962 - RNA, 19 nt, Artificial Sequence
  Description of Artificial Sequence: Synthetic oligonucleotide
  Antisense Strand to SEQ ID NO: 395961
uagaugguaauucauucac

SEQ ID NO: 395963 - RNA, 19 nt, Artificial Sequence
  Description of Artificial Sequence: Synthetic oligonucleotide
  Sense Strand Starting at position 984 of SEQ ID NO: 316467
ggagcuaaggccuauucca

SEQ ID NO: 395964 - RNA, 19 nt, Artificial Sequence
  Description of Artificial Sequence: Synthetic oligonucleotide
  Antisense Strand to SEQ ID NO: 395963
uggaauaggccuuagcucc

SEQ ID NO: 395965 - RNA, 19 nt, Artificial Sequence
  Description of Artificial Sequence: Synthetic oligonucleotide
  Sense Strand Starting at position 984 of SEQ ID NO: 316597
uuuauaacguuacuggauu

SEQ ID NO: 395966 - RNA, 19 nt, Artificial Sequence
  Description of Artificial Sequence: Synthetic oligonucleotide
  Antisense Strand to SEQ ID NO: 395965
aauccaguaacguuauaaa

SEQ ID NO: 395967 - RNA, 19 nt, Artificial Sequence
  Description of Artificial Sequence: Synthetic oligonucleotide
  Sense Strand Starting at position 984 of SEQ ID NO: 316631
cgggcuguuaaacauuaau

SEQ ID NO: 395968 - RNA, 19 nt, Artificial Sequence
  Description of Artificial Sequence: Synthetic oligonucleotide
  Antisense Strand to SEQ ID NO: 395967
auuaauguuuaacagcccg

SEQ ID NO: 395969 - RNA, 19 nt, Artificial Sequence
  Description of Artificial Sequence: Synthetic oligonucleotide
  Sense Strand Starting at position 984 of SEQ ID NO: 316876
ucagguuuccgcgauacaa

SEQ ID NO: 395970 - RNA, 19 nt, Artificial Sequence
  Description of Artificial Sequence: Synthetic oligonucleotide
  Antisense Strand to SEQ ID NO: 395969
uuguaucgcggaaaccuga

SEQ ID NO: 395971 - RNA, 19 nt, Artificial Sequence
  Description of Artificial Sequence: Synthetic oligonucleotide
  Sense Strand Starting at position 984 of SEQ ID NO: 316901
cgagauggucucgaagucu

SEQ ID NO: 395972 - RNA, 19 nt, Artificial Sequence
  Description of Artificial Sequence: Synthetic oligonucleotide
  Antisense Strand to SEQ ID NO: 395971
agacuucgagaccaucucg

SEQ ID NO: 395973 - RNA, 19 nt, Artificial Sequence
  Description of Artificial Sequence: Synthetic oligonucleotide
  Sense Strand Starting at position 984 of SEQ ID NO: 316912
cgaagucuuagcuccguca

SEQ ID NO: 395974 - RNA, 19 nt, Artificial Sequence
  Description of Artificial Sequence: Synthetic oligonucleotide
  Antisense Strand to SEQ ID NO: 395973
ugacggagcuaagacuucg

SEQ ID NO: 395975 - RNA, 19 nt, Artificial Sequence
  Description of Artificial Sequence: Synthetic oligonucleotide
  Sense Strand Starting at position 984 of SEQ ID NO: 316924
uccgucaccuaaucugaga

SEQ ID NO: 395976 - RNA, 19 nt, Artificial Sequence
  Description of Artificial Sequence: Synthetic oligonucleotide
  Antisense Strand to SEQ ID NO: 395975
ucucagauuaggugacgga

SEQ ID NO: 395977 - RNA, 19 nt, Artificial Sequence
  Description of Artificial Sequence: Synthetic oligonucleotide
  Sense Strand Starting at position 984 of SEQ ID NO: 317029
ggaauacgccgguaggaau

SEQ ID NO: 395978 - RNA, 19 nt, Artificial Sequence
  Description of Artificial Sequence: Synthetic oligonucleotide
  Antisense Strand to SEQ ID NO: 395977
auuccuaccggcguauucc

SEQ ID NO: 395979 - RNA, 19 nt, Artificial Sequence
  Description of Artificial Sequence: Synthetic oligonucleotide
  Sense Strand Starting at position 984 of SEQ ID NO: 317435
agcagaacgcgugugcuuu

SEQ ID NO: 395980 - RNA, 19 nt, Artificial Sequence
  Description of Artificial Sequence: Synthetic oligonucleotide
  Antisense Strand to SEQ ID NO: 395979
aaagcacacgcguucugcu

SEQ ID NO: 395981 - RNA, 19 nt, Artificial Sequence
  Description of Artificial Sequence: Synthetic oligonucleotide
  Sense Strand Starting at position 984 of SEQ ID NO: 317449
gcuuuaagggcagagacau

SEQ ID NO: 395982 - RNA, 19 nt, Artificial Sequence
  Description of Artificial Sequence: Synthetic oligonucleotide
  Antisense Strand to SEQ ID NO: 395981
augucucugcccuuaaagc

SEQ ID NO: 395983 - RNA, 19 nt, Artificial Sequence
  Description of Artificial Sequence: Synthetic oligonucleotide
  Sense Strand Starting at position 984 of SEQ ID NO: 317602
agugaaggcguucaauaaa

SEQ ID NO: 395984 - RNA, 19 nt, Artificial Sequence
  Description of Artificial Sequence: Synthetic oligonucleotide
  Antisense Strand to SEQ ID NO: 395983
uuuauugaacgccuucacu

SEQ ID NO: 395985 - RNA, 19 nt, Artificial Sequence
  Description of Artificial Sequence: Synthetic oligonucleotide
  Sense Strand Starting at position 984 of SEQ ID NO: 317718
uugguuuagcucugaaaug

SEQ ID NO: 395986 - RNA, 19 nt, Artificial Sequence
  Description of Artificial Sequence: Synthetic oligonucleotide
  Antisense Strand to SEQ ID NO: 395985
cauuucagagcuaaaccaa

SEQ ID NO: 395987 - RNA, 19 nt, Artificial Sequence
  Description of Artificial Sequence: Synthetic oligonucleotide
  Sense Strand Starting at position 984 of SEQ ID NO: 317851
ggcacaaacucagcaugau

SEQ ID NO: 395988 - RNA, 19 nt, Artificial Sequence
  Description of Artificial Sequence: Synthetic oligonucleotide
  Antisense Strand to SEQ ID NO: 395987
aucaugcugaguuugugcc

SEQ ID NO: 395989 - RNA, 19 nt, Artificial Sequence
  Description of Artificial Sequence: Synthetic oligonucleotide
  Sense Strand Starting at position 984 of SEQ ID NO: 317852
gcacaaacucagcaugaua

SEQ ID NO: 395990 - RNA, 19 nt, Artificial Sequence
  Description of Artificial Sequence: Synthetic oligonucleotide
  Antisense Strand to SEQ ID NO: 395989
uaucaugcugaguuugugc

SEQ ID NO: 395991 - RNA, 19 nt, Artificial Sequence
  Description of Artificial Sequence: Synthetic oligonucleotide
  Sense Strand Starting at position 984 of SEQ ID NO: 317870
auccauuguuaacuuugua

SEQ ID NO: 395992 - RNA, 19 nt, Artificial Sequence
  Description of Artificial Sequence: Synthetic oligonucleotide
  Antisense Strand to SEQ ID NO: 395991
uacaaaguuaacaauggau

SEQ ID NO: 395993 - RNA, 19 nt, Artificial Sequence
  Description of Artificial Sequence: Synthetic oligonucleotide
  Sense Strand Starting at position 984 of SEQ ID NO: 317941
guuagaugccugcagauac

SEQ ID NO: 395994 - RNA, 19 nt, Artificial Sequence
  Description of Artificial Sequence: Synthetic oligonucleotide
  Antisense Strand to SEQ ID NO: 395993
guaucugcaggcaucuaac

SEQ ID NO: 395995 - RNA, 19 nt, Artificial Sequence
  Description of Artificial Sequence: Synthetic oligonucleotide
  Sense Strand Starting at position 984 of SEQ ID NO: 317974
ucgagaugcccucaaguag

SEQ ID NO: 395996 - RNA, 19 nt, Artificial Sequence
  Description of Artificial Sequence: Synthetic oligonucleotide
  Antisense Strand to SEQ ID NO: 395995
cuacuugagggcaucucga

SEQ ID NO: 395997 - RNA, 19 nt, Artificial Sequence
  Description of Artificial Sequence: Synthetic oligonucleotide
  Sense Strand Starting at position 984 of SEQ ID NO: 318028
ugugguuaugcagaggaag

SEQ ID NO: 395998 - RNA, 19 nt, Artificial Sequence
  Description of Artificial Sequence: Synthetic oligonucleotide
  Antisense Strand to SEQ ID NO: 395997
cuuccucugcauaaccaca

SEQ ID NO: 395999 - RNA, 19 nt, Artificial Sequence
  Description of Artificial Sequence: Synthetic oligonucleotide
  Sense Strand Starting at position 984 of SEQ ID NO: 318030
ugguuaugcagaggaagua

SEQ ID NO: 396000 - RNA, 19 nt, Artificial Sequence
  Description of Artificial Sequence: Synthetic oligonucleotide
  Antisense Strand to SEQ ID NO: 395999
uacuuccucugcauaacca

SEQ ID NO: 396001 - RNA, 19 nt, Artificial Sequence
  Description of Artificial Sequence: Synthetic oligonucleotide
  Sense Strand Starting at position 984 of SEQ ID NO: 318175
cagguuaucuaucugguca

SEQ ID NO: 396002 - RNA, 19 nt, Artificial Sequence
  Description of Artificial Sequence: Synthetic oligonucleotide
  Antisense Strand to SEQ ID NO: 396001
ugaccagauagauaaccug

SEQ ID NO: 396003 - RNA, 19 nt, Artificial Sequence
  Description of Artificial Sequence: Synthetic oligonucleotide
  Sense Strand Starting at position 984 of SEQ ID NO: 318193
accgguuuacauuaccaua

SEQ ID NO: 396004 - RNA, 19 nt, Artificial Sequence
  Description of Artificial Sequence: Synthetic oligonucleotide
  Antisense Strand to SEQ ID NO: 396003
uaugguaauguaaaccggu

SEQ ID NO: 396005 - RNA, 19 nt, Artificial Sequence
  Description of Artificial Sequence: Synthetic oligonucleotide
  Sense Strand Starting at position 984 of SEQ ID NO: 318694
auggauaaguggucuuugu

SEQ ID NO: 396006 - RNA, 19 nt, Artificial Sequence
  Description of Artificial Sequence: Synthetic oligonucleotide
  Antisense Strand to SEQ ID NO: 396005
acaaagaccacuuauccau

SEQ ID NO: 396007 - RNA, 19 nt, Artificial Sequence
  Description of Artificial Sequence: Synthetic oligonucleotide
  Sense Strand Starting at position 984 of SEQ ID NO: 318729
guuuauaagccauagauug

SEQ ID NO: 396008 - RNA, 19 nt, Artificial Sequence
  Description of Artificial Sequence: Synthetic oligonucleotide
  Antisense Strand to SEQ ID NO: 396007
caaucuauggcuuauaaac

SEQ ID NO: 396009 - RNA, 19 nt, Artificial Sequence
  Description of Artificial Sequence: Synthetic oligonucleotide
  Sense Strand Starting at position 984 of SEQ ID NO: 318913
agccaucuccuuuaugaag

SEQ ID NO: 396010 - RNA, 19 nt, Artificial Sequence
  Description of Artificial Sequence: Synthetic oligonucleotide
  Antisense Strand to SEQ ID NO: 396009
cuucauaaaggagauggcu

SEQ ID NO: 396011 - RNA, 19 nt, Artificial Sequence
  Description of Artificial Sequence: Synthetic oligonucleotide
  Sense Strand Starting at position 984 of SEQ ID NO: 319092
guggcaaagccauaaucca

SEQ ID NO: 396012 - RNA, 19 nt, Artificial Sequence
  Description of Artificial Sequence: Synthetic oligonucleotide
  Antisense Strand to SEQ ID NO: 396011
uggauuauggcuuugccac

SEQ ID NO: 396013 - RNA, 19 nt, Artificial Sequence
  Description of Artificial Sequence: Synthetic oligonucleotide
  Sense Strand Starting at position 984 of SEQ ID NO: 319133
caaagcuugugaucaguca

SEQ ID NO: 396014 - RNA, 19 nt, Artificial Sequence
  Description of Artificial Sequence: Synthetic oligonucleotide
  Antisense Strand to SEQ ID NO: 396013
ugacugaucacaagcuuug

SEQ ID NO: 396015 - RNA, 19 nt, Artificial Sequence
  Description of Artificial Sequence: Synthetic oligonucleotide
  Sense Strand Starting at position 984 of SEQ ID NO: 319202
gagagaccugagugguauc

SEQ ID NO: 396016 - RNA, 19 nt, Artificial Sequence
  Description of Artificial Sequence: Synthetic oligonucleotide
  Antisense Strand to SEQ ID NO: 396015
gauaccacucaggucucuc

SEQ ID NO: 396017 - RNA, 19 nt, Artificial Sequence
  Description of Artificial Sequence: Synthetic oligonucleotide
  Sense Strand Starting at position 985 of SEQ ID NO: 315691
gugauuuccucacugucac

SEQ ID NO: 396018 - RNA, 19 nt, Artificial Sequence
  Description of Artificial Sequence: Synthetic oligonucleotide
  Antisense Strand to SEQ ID NO: 396017
gugacagugaggaaaucac

SEQ ID NO: 396019 - RNA, 19 nt, Artificial Sequence
  Description of Artificial Sequence: Synthetic oligonucleotide
  Sense Strand Starting at position 985 of SEQ ID NO: 315755
acucguaguccaguguguu

SEQ ID NO: 396020 - RNA, 19 nt, Artificial Sequence
  Description of Artificial Sequence: Synthetic oligonucleotide
  Antisense Strand to SEQ ID NO: 396019
aacacacuggacuacgagu

SEQ ID NO: 396021 - RNA, 19 nt, Artificial Sequence
  Description of Artificial Sequence: Synthetic oligonucleotide
  Sense Strand Starting at position 985 of SEQ ID NO: 315798
uaugaagccuaucugagua

SEQ ID NO: 396022 - RNA, 19 nt, Artificial Sequence
  Description of Artificial Sequence: Synthetic oligonucleotide
  Antisense Strand to SEQ ID NO: 396021
uacucagauaggcuucaua

SEQ ID NO: 396023 - RNA, 19 nt, Artificial Sequence
  Description of Artificial Sequence: Synthetic oligonucleotide
  Sense Strand Starting at position 985 of SEQ ID NO: 315803
agccuaucugaguaguaag

SEQ ID NO: 396024 - RNA, 19 nt, Artificial Sequence
  Description of Artificial Sequence: Synthetic oligonucleotide
  Antisense Strand to SEQ ID NO: 396023
cuuacuacucagauaggcu

SEQ ID NO: 396025 - RNA, 19 nt, Artificial Sequence
  Description of Artificial Sequence: Synthetic oligonucleotide
  Sense Strand Starting at position 985 of SEQ ID NO: 315913
guaaacuuagaauggcuaa

SEQ ID NO: 396026 - RNA, 19 nt, Artificial Sequence
  Description of Artificial Sequence: Synthetic oligonucleotide
  Antisense Strand to SEQ ID NO: 396025
uuagccauucuaaguuuac

SEQ ID NO: 396027 - RNA, 19 nt, Artificial Sequence
  Description of Artificial Sequence: Synthetic oligonucleotide
  Sense Strand Starting at position 985 of SEQ ID NO: 315970
acaugcuuuccauagguua

SEQ ID NO: 396028 - RNA, 19 nt, Artificial Sequence
  Description of Artificial Sequence: Synthetic oligonucleotide
  Antisense Strand to SEQ ID NO: 396027
uaaccuauggaaagcaugu

SEQ ID NO: 396029 - RNA, 19 nt, Artificial Sequence
  Description of Artificial Sequence: Synthetic oligonucleotide
  Sense Strand Starting at position 985 of SEQ ID NO: 316078
gcacuuaagaggcaugauu

SEQ ID NO: 396030 - RNA, 19 nt, Artificial Sequence
  Description of Artificial Sequence: Synthetic oligonucleotide
  Antisense Strand to SEQ ID NO: 396029
aaucaugccucuuaagugc

SEQ ID NO: 396031 - RNA, 19 nt, Artificial Sequence
  Description of Artificial Sequence: Synthetic oligonucleotide
  Sense Strand Starting at position 985 of SEQ ID NO: 316151
ugaagaaacugauacagaa

SEQ ID NO: 396032 - RNA, 19 nt, Artificial Sequence
  Description of Artificial Sequence: Synthetic oligonucleotide
  Antisense Strand to SEQ ID NO: 396031
uucuguaucaguuucuuca

SEQ ID NO: 396033 - RNA, 19 nt, Artificial Sequence
  Description of Artificial Sequence: Synthetic oligonucleotide
  Sense Strand Starting at position 985 of SEQ ID NO: 316285
ggguagauucgggacuugu

SEQ ID NO: 396034 - RNA, 19 nt, Artificial Sequence
  Description of Artificial Sequence: Synthetic oligonucleotide
  Antisense Strand to SEQ ID NO: 396033
acaagucccgaaucuaccc

SEQ ID NO: 396035 - RNA, 19 nt, Artificial Sequence
  Description of Artificial Sequence: Synthetic oligonucleotide
  Sense Strand Starting at position 985 of SEQ ID NO: 316298
acuugugugaaguaggguu

SEQ ID NO: 396036 - RNA, 19 nt, Artificial Sequence
  Description of Artificial Sequence: Synthetic oligonucleotide
  Antisense Strand to SEQ ID NO: 396035
aacccuacuucacacaagu

SEQ ID NO: 396037 - RNA, 19 nt, Artificial Sequence
  Description of Artificial Sequence: Synthetic oligonucleotide
  Sense Strand Starting at position 985 of SEQ ID NO: 316311
aggguugauuggcucaaga

SEQ ID NO: 396038 - RNA, 19 nt, Artificial Sequence
  Description of Artificial Sequence: Synthetic oligonucleotide
  Antisense Strand to SEQ ID NO: 396037
ucuugagccaaucaacccu

SEQ ID NO: 396039 - RNA, 19 nt, Artificial Sequence
  Description of Artificial Sequence: Synthetic oligonucleotide
  Sense Strand Starting at position 985 of SEQ ID NO: 316313
gguugauuggcucaagagu

SEQ ID NO: 396040 - RNA, 19 nt, Artificial Sequence
  Description of Artificial Sequence: Synthetic oligonucleotide
  Antisense Strand to SEQ ID NO: 396039
acucuugagccaaucaacc

SEQ ID NO: 396041 - RNA, 19 nt, Artificial Sequence
  Description of Artificial Sequence: Synthetic oligonucleotide
  Sense Strand Starting at position 985 of SEQ ID NO: 316338
gagagauacugagccacuu

SEQ ID NO: 396042 - RNA, 19 nt, Artificial Sequence
  Description of Artificial Sequence: Synthetic oligonucleotide
  Antisense Strand to SEQ ID NO: 396041
aaguggcucaguaucucuc

SEQ ID NO: 396043 - RNA, 19 nt, Artificial Sequence
  Description of Artificial Sequence: Synthetic oligonucleotide
  Sense Strand Starting at position 985 of SEQ ID NO: 316410
cuaacuggccuguaucaua

SEQ ID NO: 396044 - RNA, 19 nt, Artificial Sequence
  Description of Artificial Sequence: Synthetic oligonucleotide
  Antisense Strand to SEQ ID NO: 396043
uaugauacaggccaguuag

SEQ ID NO: 396045 - RNA, 19 nt, Artificial Sequence
  Description of Artificial Sequence: Synthetic oligonucleotide
  Sense Strand Starting at position 985 of SEQ ID NO: 316459
agggaagugacuuguccaa

SEQ ID NO: 396046 - RNA, 19 nt, Artificial Sequence
  Description of Artificial Sequence: Synthetic oligonucleotide
  Antisense Strand to SEQ ID NO: 396045
uuggacaagucacuucccu

SEQ ID NO: 396047 - RNA, 19 nt, Artificial Sequence
  Description of Artificial Sequence: Synthetic oligonucleotide
  Sense Strand Starting at position 985 of SEQ ID NO: 316508
guauuaaaugcauacuaag

SEQ ID NO: 396048 - RNA, 19 nt, Artificial Sequence
  Description of Artificial Sequence: Synthetic oligonucleotide
  Antisense Strand to SEQ ID NO: 396047
cuuaguaugcauuuaauac

SEQ ID NO: 396049 - RNA, 19 nt, Artificial Sequence
  Description of Artificial Sequence: Synthetic oligonucleotide
  Sense Strand Starting at position 985 of SEQ ID NO: 316585
agcuaaguacgacauauua

SEQ ID NO: 396050 - RNA, 19 nt, Artificial Sequence
  Description of Artificial Sequence: Synthetic oligonucleotide
  Antisense Strand to SEQ ID NO: 396049
uaauaugucguacuuagcu

SEQ ID NO: 396051 - RNA, 19 nt, Artificial Sequence
  Description of Artificial Sequence: Synthetic oligonucleotide
  Sense Strand Starting at position 985 of SEQ ID NO: 316728
cucagugggacucaaaguu

SEQ ID NO: 396052 - RNA, 19 nt, Artificial Sequence
  Description of Artificial Sequence: Synthetic oligonucleotide
  Antisense Strand to SEQ ID NO: 396051
aacuuugagucccacugag

SEQ ID NO: 396053 - RNA, 19 nt, Artificial Sequence
  Description of Artificial Sequence: Synthetic oligonucleotide
  Sense Strand Starting at position 985 of SEQ ID NO: 316744
guuugaggaagguguuuga

SEQ ID NO: 396054 - RNA, 19 nt, Artificial Sequence
  Description of Artificial Sequence: Synthetic oligonucleotide
  Antisense Strand to SEQ ID NO: 396053
ucaaacaccuuccucaaac

SEQ ID NO: 396055 - RNA, 19 nt, Artificial Sequence
  Description of Artificial Sequence: Synthetic oligonucleotide
  Sense Strand Starting at position 985 of SEQ ID NO: 316747
ugaggaagguguuugauga

SEQ ID NO: 396056 - RNA, 19 nt, Artificial Sequence
  Description of Artificial Sequence: Synthetic oligonucleotide
  Antisense Strand to SEQ ID NO: 396055
ucaucaaacaccuuccuca

SEQ ID NO: 396057 - RNA, 19 nt, Artificial Sequence
  Description of Artificial Sequence: Synthetic oligonucleotide
  Sense Strand Starting at position 985 of SEQ ID NO: 316748
gaggaagguguuugaugaa

SEQ ID NO: 396058 - RNA, 19 nt, Artificial Sequence
  Description of Artificial Sequence: Synthetic oligonucleotide
  Antisense Strand to SEQ ID NO: 396057
uucaucaaacaccuuccuc

SEQ ID NO: 396059 - RNA, 19 nt, Artificial Sequence
  Description of Artificial Sequence: Synthetic oligonucleotide
  Sense Strand Starting at position 985 of SEQ ID NO: 316755
guguuugaugaaggaaaug

SEQ ID NO: 396060 - RNA, 19 nt, Artificial Sequence
  Description of Artificial Sequence: Synthetic oligonucleotide
  Antisense Strand to SEQ ID NO: 396059
cauuuccuucaucaaacac

SEQ ID NO: 396061 - RNA, 19 nt, Artificial Sequence
  Description of Artificial Sequence: Synthetic oligonucleotide
  Sense Strand Starting at position 985 of SEQ ID NO: 316795
cagauucucgagcacgaaa

SEQ ID NO: 396062 - RNA, 19 nt, Artificial Sequence
  Description of Artificial Sequence: Synthetic oligonucleotide
  Antisense Strand to SEQ ID NO: 396061
uuucgugcucgagaaucug

SEQ ID NO: 396063 - RNA, 19 nt, Artificial Sequence
  Description of Artificial Sequence: Synthetic oligonucleotide
  Sense Strand Starting at position 985 of SEQ ID NO: 317224
cuccguuuagucgcgauaa

SEQ ID NO: 396064 - RNA, 19 nt, Artificial Sequence
  Description of Artificial Sequence: Synthetic oligonucleotide
  Antisense Strand to SEQ ID NO: 396063
uuaucgcgacuaaacggag

SEQ ID NO: 396065 - RNA, 19 nt, Artificial Sequence
  Description of Artificial Sequence: Synthetic oligonucleotide
  Sense Strand Starting at position 985 of SEQ ID NO: 317271
gauugauggccuugagaga

SEQ ID NO: 396066 - RNA, 19 nt, Artificial Sequence
  Description of Artificial Sequence: Synthetic oligonucleotide
  Antisense Strand to SEQ ID NO: 396065
ucucucaaggccaucaauc

SEQ ID NO: 396067 - RNA, 19 nt, Artificial Sequence
  Description of Artificial Sequence: Synthetic oligonucleotide
  Sense Strand Starting at position 985 of SEQ ID NO: 317358
ggcucuuucuauuucggua

SEQ ID NO: 396068 - RNA, 19 nt, Artificial Sequence
  Description of Artificial Sequence: Synthetic oligonucleotide
  Antisense Strand to SEQ ID NO: 396067
uaccgaaauagaaagagcc

SEQ ID NO: 396069 - RNA, 19 nt, Artificial Sequence
  Description of Artificial Sequence: Synthetic oligonucleotide
  Sense Strand Starting at position 985 of SEQ ID NO: 317362
cuuucuauuucgguagguu

SEQ ID NO: 396070 - RNA, 19 nt, Artificial Sequence
  Description of Artificial Sequence: Synthetic oligonucleotide
  Antisense Strand to SEQ ID NO: 396069
aaccuaccgaaauagaaag

SEQ ID NO: 396071 - RNA, 19 nt, Artificial Sequence
  Description of Artificial Sequence: Synthetic oligonucleotide
  Sense Strand Starting at position 985 of SEQ ID NO: 317363
uuucuauuucgguagguuu

SEQ ID NO: 396072 - RNA, 19 nt, Artificial Sequence
  Description of Artificial Sequence: Synthetic oligonucleotide
  Antisense Strand to SEQ ID NO: 396071
aaaccuaccgaaauagaaa

SEQ ID NO: 396073 - RNA, 19 nt, Artificial Sequence
  Description of Artificial Sequence: Synthetic oligonucleotide
  Sense Strand Starting at position 985 of SEQ ID NO: 317587
auugaccuuugcuuacaga

SEQ ID NO: 396074 - RNA, 19 nt, Artificial Sequence
  Description of Artificial Sequence: Synthetic oligonucleotide
  Antisense Strand to SEQ ID NO: 396073
ucuguaagcaaaggucaau

SEQ ID NO: 396075 - RNA, 19 nt, Artificial Sequence
  Description of Artificial Sequence: Synthetic oligonucleotide
  Sense Strand Starting at position 985 of SEQ ID NO: 317588
uugaccuuugcuuacagaa

SEQ ID NO: 396076 - RNA, 19 nt, Artificial Sequence
  Description of Artificial Sequence: Synthetic oligonucleotide
  Antisense Strand to SEQ ID NO: 396075
uucuguaagcaaaggucaa

SEQ ID NO: 396077 - RNA, 19 nt, Artificial Sequence
  Description of Artificial Sequence: Synthetic oligonucleotide
  Sense Strand Starting at position 985 of SEQ ID NO: 317647
guccucauuuaacagagaa

SEQ ID NO: 396078 - RNA, 19 nt, Artificial Sequence
  Description of Artificial Sequence: Synthetic oligonucleotide
  Antisense Strand to SEQ ID NO: 396077
uucucuguuaaaugaggac

SEQ ID NO: 396079 - RNA, 19 nt, Artificial Sequence
  Description of Artificial Sequence: Synthetic oligonucleotide
  Sense Strand Starting at position 985 of SEQ ID NO: 317685
uagauauagcacuguuaug

SEQ ID NO: 396080 - RNA, 19 nt, Artificial Sequence
  Description of Artificial Sequence: Synthetic oligonucleotide
  Antisense Strand to SEQ ID NO: 396079
cauaacagugcuauaucua

SEQ ID NO: 396081 - RNA, 19 nt, Artificial Sequence
  Description of Artificial Sequence: Synthetic oligonucleotide
  Sense Strand Starting at position 985 of SEQ ID NO: 317724
uuccgaaagcucugagaau

SEQ ID NO: 396082 - RNA, 19 nt, Artificial Sequence
  Description of Artificial Sequence: Synthetic oligonucleotide
  Antisense Strand to SEQ ID NO: 396081
auucucagagcuuucggaa

SEQ ID NO: 396083 - RNA, 19 nt, Artificial Sequence
  Description of Artificial Sequence: Synthetic oligonucleotide
  Sense Strand Starting at position 985 of SEQ ID NO: 317750
ugugguuagagaugaguaa

SEQ ID NO: 396084 - RNA, 19 nt, Artificial Sequence
  Description of Artificial Sequence: Synthetic oligonucleotide
  Antisense Strand to SEQ ID NO: 396083
uuacucaucucuaaccaca

SEQ ID NO: 396085 - RNA, 19 nt, Artificial Sequence
  Description of Artificial Sequence: Synthetic oligonucleotide
  Sense Strand Starting at position 985 of SEQ ID NO: 317813
uuuccugacuaaguggaua

SEQ ID NO: 396086 - RNA, 19 nt, Artificial Sequence
  Description of Artificial Sequence: Synthetic oligonucleotide
  Antisense Strand to SEQ ID NO: 396085
uauccacuuagucaggaaa

SEQ ID NO: 396087 - RNA, 19 nt, Artificial Sequence
  Description of Artificial Sequence: Synthetic oligonucleotide
  Sense Strand Starting at position 985 of SEQ ID NO: 317832
ccaggcuccugauccuaaa

SEQ ID NO: 396088 - RNA, 19 nt, Artificial Sequence
  Description of Artificial Sequence: Synthetic oligonucleotide
  Antisense Strand to SEQ ID NO: 396087
uuuaggaucaggagccugg

SEQ ID NO: 396089 - RNA, 19 nt, Artificial Sequence
  Description of Artificial Sequence: Synthetic oligonucleotide
  Sense Strand Starting at position 985 of SEQ ID NO: 317863
gccuguaugcuagaaauug

SEQ ID NO: 396090 - RNA, 19 nt, Artificial Sequence
  Description of Artificial Sequence: Synthetic oligonucleotide
  Antisense Strand to SEQ ID NO: 396089
caauuucuagcauacaggc

SEQ ID NO: 396091 - RNA, 19 nt, Artificial Sequence
  Description of Artificial Sequence: Synthetic oligonucleotide
  Sense Strand Starting at position 985 of SEQ ID NO: 318348
ggaaguaauuagguccuga

SEQ ID NO: 396092 - RNA, 19 nt, Artificial Sequence
  Description of Artificial Sequence: Synthetic oligonucleotide
  Antisense Strand to SEQ ID NO: 396091
ucaggaccuaauuacuucc

SEQ ID NO: 396093 - RNA, 19 nt, Artificial Sequence
  Description of Artificial Sequence: Synthetic oligonucleotide
  Sense Strand Starting at position 985 of SEQ ID NO: 318692
ugcauuauagcagaaagac

SEQ ID NO: 396094 - RNA, 19 nt, Artificial Sequence
  Description of Artificial Sequence: Synthetic oligonucleotide
  Antisense Strand to SEQ ID NO: 396093
gucuuucugcuauaaugca

SEQ ID NO: 396095 - RNA, 19 nt, Artificial Sequence
  Description of Artificial Sequence: Synthetic oligonucleotide
  Sense Strand Starting at position 985 of SEQ ID NO: 318709
acuagaauaugugucucua

SEQ ID NO: 396096 - RNA, 19 nt, Artificial Sequence
  Description of Artificial Sequence: Synthetic oligonucleotide
  Antisense Strand to SEQ ID NO: 396095
uagagacacauauucuagu

SEQ ID NO: 396097 - RNA, 19 nt, Artificial Sequence
  Description of Artificial Sequence: Synthetic oligonucleotide
  Sense Strand Starting at position 986 of SEQ ID NO: 315311
agaacucacugacuuguau

SEQ ID NO: 396098 - RNA, 19 nt, Artificial Sequence
  Description of Artificial Sequence: Synthetic oligonucleotide
  Antisense Strand to SEQ ID NO: 396097
auacaagucagugaguucu

SEQ ID NO: 396099 - RNA, 19 nt, Artificial Sequence
  Description of Artificial Sequence: Synthetic oligonucleotide
  Sense Strand Starting at position 986 of SEQ ID NO: 315660
acuugaacuucguugggau

SEQ ID NO: 396100 - RNA, 19 nt, Artificial Sequence
  Description of Artificial Sequence: Synthetic oligonucleotide
  Antisense Strand to SEQ ID NO: 396099
aucccaacgaaguucaagu

SEQ ID NO: 396101 - RNA, 19 nt, Artificial Sequence
  Description of Artificial Sequence: Synthetic oligonucleotide
  Sense Strand Starting at position 986 of SEQ ID NO: 315661
cuugaacuucguugggauu

SEQ ID NO: 396102 - RNA, 19 nt, Artificial Sequence
  Description of Artificial Sequence: Synthetic oligonucleotide
  Antisense Strand to SEQ ID NO: 396101
aaucccaacgaaguucaag

SEQ ID NO: 396103 - RNA, 19 nt, Artificial Sequence
  Description of Artificial Sequence: Synthetic oligonucleotide
  Sense Strand Starting at position 986 of SEQ ID NO: 315772
cuggcaaggccuuaacuua

SEQ ID NO: 396104 - RNA, 19 nt, Artificial Sequence
  Description of Artificial Sequence: Synthetic oligonucleotide
  Antisense Strand to SEQ ID NO: 396103
uaaguuaaggccuugccag

SEQ ID NO: 396105 - RNA, 19 nt, Artificial Sequence
  Description of Artificial Sequence: Synthetic oligonucleotide
  Sense Strand Starting at position 986 of SEQ ID NO: 315780
gccuuaacuuauccugaga

SEQ ID NO: 396106 - RNA, 19 nt, Artificial Sequence
  Description of Artificial Sequence: Synthetic oligonucleotide
  Antisense Strand to SEQ ID NO: 396105
ucucaggauaaguuaaggc

SEQ ID NO: 396107 - RNA, 19 nt, Artificial Sequence
  Description of Artificial Sequence: Synthetic oligonucleotide
  Sense Strand Starting at position 986 of SEQ ID NO: 315818
uuggaagaugccuagucua

SEQ ID NO: 396108 - RNA, 19 nt, Artificial Sequence
  Description of Artificial Sequence: Synthetic oligonucleotide
  Antisense Strand to SEQ ID NO: 396107
uagacuaggcaucuuccaa

SEQ ID NO: 396109 - RNA, 19 nt, Artificial Sequence
  Description of Artificial Sequence: Synthetic oligonucleotide
  Sense Strand Starting at position 986 of SEQ ID NO: 315821
gaagaugccuagucuaguu

SEQ ID NO: 396110 - RNA, 19 nt, Artificial Sequence
  Description of Artificial Sequence: Synthetic oligonucleotide
  Antisense Strand to SEQ ID NO: 396109
aacuagacuaggcaucuuc

SEQ ID NO: 396111 - RNA, 19 nt, Artificial Sequence
  Description of Artificial Sequence: Synthetic oligonucleotide
  Sense Strand Starting at position 986 of SEQ ID NO: 315885
gcacaugaguugcuggaaa

SEQ ID NO: 396112 - RNA, 19 nt, Artificial Sequence
  Description of Artificial Sequence: Synthetic oligonucleotide
  Antisense Strand to SEQ ID NO: 396111
uuuccagcaacucaugugc

SEQ ID NO: 396113 - RNA, 19 nt, Artificial Sequence
  Description of Artificial Sequence: Synthetic oligonucleotide
  Sense Strand Starting at position 986 of SEQ ID NO: 315887
acaugaguugcuggaaacu

SEQ ID NO: 396114 - RNA, 19 nt, Artificial Sequence
  Description of Artificial Sequence: Synthetic oligonucleotide
  Antisense Strand to SEQ ID NO: 396113
aguuuccagcaacucaugu

SEQ ID NO: 396115 - RNA, 19 nt, Artificial Sequence
  Description of Artificial Sequence: Synthetic oligonucleotide
  Sense Strand Starting at position 986 of SEQ ID NO: 316253
gucccuugagucuagagaa

SEQ ID NO: 396116 - RNA, 19 nt, Artificial Sequence
  Description of Artificial Sequence: Synthetic oligonucleotide
  Antisense Strand to SEQ ID NO: 396115
uucucuagacucaagggac

SEQ ID NO: 396117 - RNA, 19 nt, Artificial Sequence
  Description of Artificial Sequence: Synthetic oligonucleotide
  Sense Strand Starting at position 986 of SEQ ID NO: 316261
agucuagagaaguggguua

SEQ ID NO: 396118 - RNA, 19 nt, Artificial Sequence
  Description of Artificial Sequence: Synthetic oligonucleotide
  Antisense Strand to SEQ ID NO: 396117
uaacccacuucucuagacu

SEQ ID NO: 396119 - RNA, 19 nt, Artificial Sequence
  Description of Artificial Sequence: Synthetic oligonucleotide
  Sense Strand Starting at position 986 of SEQ ID NO: 316688
ccuacaucgcuccaggaau

SEQ ID NO: 396120 - RNA, 19 nt, Artificial Sequence
  Description of Artificial Sequence: Synthetic oligonucleotide
  Antisense Strand to SEQ ID NO: 396119
auuccuggagcgauguagg

SEQ ID NO: 396121 - RNA, 19 nt, Artificial Sequence
  Description of Artificial Sequence: Synthetic oligonucleotide
  Sense Strand Starting at position 986 of SEQ ID NO: 317015
guuccgucccgggaggaaa

SEQ ID NO: 396122 - RNA, 19 nt, Artificial Sequence
  Description of Artificial Sequence: Synthetic oligonucleotide
  Antisense Strand to SEQ ID NO: 396121
uuuccucccgggacggaac

SEQ ID NO: 396123 - RNA, 19 nt, Artificial Sequence
  Description of Artificial Sequence: Synthetic oligonucleotide
  Sense Strand Starting at position 986 of SEQ ID NO: 317026
ggaggaaaguuugugccau

SEQ ID NO: 396124 - RNA, 19 nt, Artificial Sequence
  Description of Artificial Sequence: Synthetic oligonucleotide
  Antisense Strand to SEQ ID NO: 396123
auggcacaaacuuuccucc

SEQ ID NO: 396125 - RNA, 19 nt, Artificial Sequence
  Description of Artificial Sequence: Synthetic oligonucleotide
  Sense Strand Starting at position 986 of SEQ ID NO: 317028
aggaaaguuugugccauac

SEQ ID NO: 396126 - RNA, 19 nt, Artificial Sequence
  Description of Artificial Sequence: Synthetic oligonucleotide
  Antisense Strand to SEQ ID NO: 396125
guauggcacaaacuuuccu

SEQ ID NO: 396127 - RNA, 19 nt, Artificial Sequence
  Description of Artificial Sequence: Synthetic oligonucleotide
  Sense Strand Starting at position 986 of SEQ ID NO: 317032
aaguuugugccauacagag

SEQ ID NO: 396128 - RNA, 19 nt, Artificial Sequence
  Description of Artificial Sequence: Synthetic oligonucleotide
  Antisense Strand to SEQ ID NO: 396127
cucuguauggcacaaacuu

SEQ ID NO: 396129 - RNA, 19 nt, Artificial Sequence
  Description of Artificial Sequence: Synthetic oligonucleotide
  Sense Strand Starting at position 986 of SEQ ID NO: 317649
gugggagcaucccuaaaca

SEQ ID NO: 396130 - RNA, 19 nt, Artificial Sequence
  Description of Artificial Sequence: Synthetic oligonucleotide
  Antisense Strand to SEQ ID NO: 396129
uguuuagggaugcucccac

SEQ ID NO: 396131 - RNA, 19 nt, Artificial Sequence
  Description of Artificial Sequence: Synthetic oligonucleotide
  Sense Strand Starting at position 986 of SEQ ID NO: 317680
cugaaauucucucuugcga

SEQ ID NO: 396132 - RNA, 19 nt, Artificial Sequence
  Description of Artificial Sequence: Synthetic oligonucleotide
  Antisense Strand to SEQ ID NO: 396131
ucgcaagagagaauuucag

SEQ ID NO: 396133 - RNA, 19 nt, Artificial Sequence
  Description of Artificial Sequence: Synthetic oligonucleotide
  Sense Strand Starting at position 986 of SEQ ID NO: 317747
uggucuaccuacuuaagau

SEQ ID NO: 396134 - RNA, 19 nt, Artificial Sequence
  Description of Artificial Sequence: Synthetic oligonucleotide
  Antisense Strand to SEQ ID NO: 396133
aucuuaaguagguagacca

SEQ ID NO: 396135 - RNA, 19 nt, Artificial Sequence
  Description of Artificial Sequence: Synthetic oligonucleotide
  Sense Strand Starting at position 986 of SEQ ID NO: 317759
uuaagauguccagagguuu

SEQ ID NO: 396136 - RNA, 19 nt, Artificial Sequence
  Description of Artificial Sequence: Synthetic oligonucleotide
  Antisense Strand to SEQ ID NO: 396135
aaaccucuggacaucuuaa

SEQ ID NO: 396137 - RNA, 19 nt, Artificial Sequence
  Description of Artificial Sequence: Synthetic oligonucleotide
  Sense Strand Starting at position 986 of SEQ ID NO: 317765
uguccagagguuugagaag

SEQ ID NO: 396138 - RNA, 19 nt, Artificial Sequence
  Description of Artificial Sequence: Synthetic oligonucleotide
  Antisense Strand to SEQ ID NO: 396137
cuucucaaaccucuggaca

SEQ ID NO: 396139 - RNA, 19 nt, Artificial Sequence
  Description of Artificial Sequence: Synthetic oligonucleotide
  Sense Strand Starting at position 986 of SEQ ID NO: 317832
uuauauaaagagugaagca

SEQ ID NO: 396140 - RNA, 19 nt, Artificial Sequence
  Description of Artificial Sequence: Synthetic oligonucleotide
  Antisense Strand to SEQ ID NO: 396139
ugcuucacucuuuauauaa

SEQ ID NO: 396141 - RNA, 19 nt, Artificial Sequence
  Description of Artificial Sequence: Synthetic oligonucleotide
  Sense Strand Starting at position 986 of SEQ ID NO: 317866
gcauuaguaaagugaagau

SEQ ID NO: 396142 - RNA, 19 nt, Artificial Sequence
  Description of Artificial Sequence: Synthetic oligonucleotide
  Antisense Strand to SEQ ID NO: 396141
aucuucacuuuacuaaugc

SEQ ID NO: 396143 - RNA, 19 nt, Artificial Sequence
  Description of Artificial Sequence: Synthetic oligonucleotide
  Sense Strand Starting at position 986 of SEQ ID NO: 318027
uuggguaagugacuuaacu

SEQ ID NO: 396144 - RNA, 19 nt, Artificial Sequence
  Description of Artificial Sequence: Synthetic oligonucleotide
  Antisense Strand to SEQ ID NO: 396143
aguuaagucacuuacccaa

SEQ ID NO: 396145 - RNA, 19 nt, Artificial Sequence
  Description of Artificial Sequence: Synthetic oligonucleotide
  Sense Strand Starting at position 986 of SEQ ID NO: 318073
uucuucguggguuauuaua

SEQ ID NO: 396146 - RNA, 19 nt, Artificial Sequence
  Description of Artificial Sequence: Synthetic oligonucleotide
  Antisense Strand to SEQ ID NO: 396145
uauaauaacccacgaagaa

SEQ ID NO: 396147 - RNA, 19 nt, Artificial Sequence
  Description of Artificial Sequence: Synthetic oligonucleotide
  Sense Strand Starting at position 986 of SEQ ID NO: 318081
ggguuauuauauguaaagu

SEQ ID NO: 396148 - RNA, 19 nt, Artificial Sequence
  Description of Artificial Sequence: Synthetic oligonucleotide
  Antisense Strand to SEQ ID NO: 396147
acuuuacauauaauaaccc

SEQ ID NO: 396149 - RNA, 19 nt, Artificial Sequence
  Description of Artificial Sequence: Synthetic oligonucleotide
  Sense Strand Starting at position 986 of SEQ ID NO: 318082
gguuauuauauguaaagug

SEQ ID NO: 396150 - RNA, 19 nt, Artificial Sequence
  Description of Artificial Sequence: Synthetic oligonucleotide
  Antisense Strand to SEQ ID NO: 396149
cacuuuacauauaauaacc

SEQ ID NO: 396151 - RNA, 19 nt, Artificial Sequence
  Description of Artificial Sequence: Synthetic oligonucleotide
  Sense Strand Starting at position 986 of SEQ ID NO: 318091
auguaaaguguuuagcaac

SEQ ID NO: 396152 - RNA, 19 nt, Artificial Sequence
  Description of Artificial Sequence: Synthetic oligonucleotide
  Antisense Strand to SEQ ID NO: 396151
guugcuaaacacuuuacau

SEQ ID NO: 396153 - RNA, 19 nt, Artificial Sequence
  Description of Artificial Sequence: Synthetic oligonucleotide
  Sense Strand Starting at position 986 of SEQ ID NO: 318154
caagaagggugagauaauu

SEQ ID NO: 396154 - RNA, 19 nt, Artificial Sequence
  Description of Artificial Sequence: Synthetic oligonucleotide
  Antisense Strand to SEQ ID NO: 396153
aauuaucucacccuucuug

SEQ ID NO: 396155 - RNA, 19 nt, Artificial Sequence
  Description of Artificial Sequence: Synthetic oligonucleotide
  Sense Strand Starting at position 986 of SEQ ID NO: 318266
ggcccagcaguguuucgau

SEQ ID NO: 396156 - RNA, 19 nt, Artificial Sequence
  Description of Artificial Sequence: Synthetic oligonucleotide
  Antisense Strand to SEQ ID NO: 396155
aucgaaacacugcugggcc

SEQ ID NO: 396157 - RNA, 19 nt, Artificial Sequence
  Description of Artificial Sequence: Synthetic oligonucleotide
  Sense Strand Starting at position 986 of SEQ ID NO: 318271
agcaguguuucgaugaggu

SEQ ID NO: 396158 - RNA, 19 nt, Artificial Sequence
  Description of Artificial Sequence: Synthetic oligonucleotide
  Antisense Strand to SEQ ID NO: 396157
accucaucgaaacacugcu

SEQ ID NO: 396159 - RNA, 19 nt, Artificial Sequence
  Description of Artificial Sequence: Synthetic oligonucleotide
  Sense Strand Starting at position 986 of SEQ ID NO: 318548
uugagcuugccacaugaaa

SEQ ID NO: 396160 - RNA, 19 nt, Artificial Sequence
  Description of Artificial Sequence: Synthetic oligonucleotide
  Antisense Strand to SEQ ID NO: 396159
uuucauguggcaagcucaa

SEQ ID NO: 396161 - RNA, 19 nt, Artificial Sequence
  Description of Artificial Sequence: Synthetic oligonucleotide
  Sense Strand Starting at position 986 of SEQ ID NO: 318710
cuugaauugcugcaaguca

SEQ ID NO: 396162 - RNA, 19 nt, Artificial Sequence
  Description of Artificial Sequence: Synthetic oligonucleotide
  Antisense Strand to SEQ ID NO: 396161
ugacuugcagcaauucaag

SEQ ID NO: 396163 - RNA, 19 nt, Artificial Sequence
  Description of Artificial Sequence: Synthetic oligonucleotide
  Sense Strand Starting at position 986 of SEQ ID NO: 318871
guugcagugugcuugauuu

SEQ ID NO: 396164 - RNA, 19 nt, Artificial Sequence
  Description of Artificial Sequence: Synthetic oligonucleotide
  Antisense Strand to SEQ ID NO: 396163
aaaucaagcacacugcaac

SEQ ID NO: 396165 - RNA, 19 nt, Artificial Sequence
  Description of Artificial Sequence: Synthetic oligonucleotide
  Sense Strand Starting at position 986 of SEQ ID NO: 318875
cagugugcuugauuucuuu

SEQ ID NO: 396166 - RNA, 19 nt, Artificial Sequence
  Description of Artificial Sequence: Synthetic oligonucleotide
  Antisense Strand to SEQ ID NO: 396165
aaagaaaucaagcacacug

SEQ ID NO: 396167 - RNA, 19 nt, Artificial Sequence
  Description of Artificial Sequence: Synthetic oligonucleotide
  Sense Strand Starting at position 986 of SEQ ID NO: 318963
acaccagugcuugagguua

SEQ ID NO: 396168 - RNA, 19 nt, Artificial Sequence
  Description of Artificial Sequence: Synthetic oligonucleotide
  Antisense Strand to SEQ ID NO: 396167
uaaccucaagcacuggugu

SEQ ID NO: 396169 - RNA, 19 nt, Artificial Sequence
  Description of Artificial Sequence: Synthetic oligonucleotide
  Sense Strand Starting at position 986 of SEQ ID NO: 318968
agugcuugagguuaauaug

SEQ ID NO: 396170 - RNA, 19 nt, Artificial Sequence
  Description of Artificial Sequence: Synthetic oligonucleotide
  Antisense Strand to SEQ ID NO: 396169
cauauuaaccucaagcacu

SEQ ID NO: 396171 - RNA, 19 nt, Artificial Sequence
  Description of Artificial Sequence: Synthetic oligonucleotide
  Sense Strand Starting at position 986 of SEQ ID NO: 319033
gcuaauaaucaugggcaaa

SEQ ID NO: 396172 - RNA, 19 nt, Artificial Sequence
  Description of Artificial Sequence: Synthetic oligonucleotide
  Antisense Strand to SEQ ID NO: 396171
uuugcccaugauuauuagc

SEQ ID NO: 396173 - RNA, 19 nt, Artificial Sequence
  Description of Artificial Sequence: Synthetic oligonucleotide
  Sense Strand Starting at position 986 of SEQ ID NO: 319043
augggcaaaugucuuaaau

SEQ ID NO: 396174 - RNA, 19 nt, Artificial Sequence
  Description of Artificial Sequence: Synthetic oligonucleotide
  Antisense Strand to SEQ ID NO: 396173
auuuaagacauuugcccau

SEQ ID NO: 396175 - RNA, 19 nt, Artificial Sequence
  Description of Artificial Sequence: Synthetic oligonucleotide
  Sense Strand Starting at position 986 of SEQ ID NO: 319187
gagccaauagcaugcagau

SEQ ID NO: 396176 - RNA, 19 nt, Artificial Sequence
  Description of Artificial Sequence: Synthetic oligonucleotide
  Antisense Strand to SEQ ID NO: 396175
aucugcaugcuauuggcuc

SEQ ID NO: 396177 - RNA, 19 nt, Artificial Sequence
  Description of Artificial Sequence: Synthetic oligonucleotide
  Sense Strand Starting at position 987 of SEQ ID NO: 315363
guguguuuagcagaagaau

SEQ ID NO: 396178 - RNA, 19 nt, Artificial Sequence
  Description of Artificial Sequence: Synthetic oligonucleotide
  Antisense Strand to SEQ ID NO: 396177
auucuucugcuaaacacac

SEQ ID NO: 396179 - RNA, 19 nt, Artificial Sequence
  Description of Artificial Sequence: Synthetic oligonucleotide
  Sense Strand Starting at position 987 of SEQ ID NO: 315398
cagaguuccuuguugggaa

SEQ ID NO: 396180 - RNA, 19 nt, Artificial Sequence
  Description of Artificial Sequence: Synthetic oligonucleotide
  Antisense Strand to SEQ ID NO: 396179
uucccaacaaggaacucug

SEQ ID NO: 396181 - RNA, 19 nt, Artificial Sequence
  Description of Artificial Sequence: Synthetic oligonucleotide
  Sense Strand Starting at position 987 of SEQ ID NO: 315464
cucccuucucgggaaauga

SEQ ID NO: 396182 - RNA, 19 nt, Artificial Sequence
  Description of Artificial Sequence: Synthetic oligonucleotide
  Antisense Strand to SEQ ID NO: 396181
ucauuucccgagaagggag

SEQ ID NO: 396183 - RNA, 19 nt, Artificial Sequence
  Description of Artificial Sequence: Synthetic oligonucleotide
  Sense Strand Starting at position 987 of SEQ ID NO: 315610
uagggagaguggccauaua

SEQ ID NO: 396184 - RNA, 19 nt, Artificial Sequence
  Description of Artificial Sequence: Synthetic oligonucleotide
  Antisense Strand to SEQ ID NO: 396183
uauauggccacucucccua

SEQ ID NO: 396185 - RNA, 19 nt, Artificial Sequence
  Description of Artificial Sequence: Synthetic oligonucleotide
  Sense Strand Starting at position 987 of SEQ ID NO: 315667
ggacaauauuuguaaacug

SEQ ID NO: 396186 - RNA, 19 nt, Artificial Sequence
  Description of Artificial Sequence: Synthetic oligonucleotide
  Antisense Strand to SEQ ID NO: 396185
caguuuacaaauauugucc

SEQ ID NO: 396187 - RNA, 19 nt, Artificial Sequence
  Description of Artificial Sequence: Synthetic oligonucleotide
  Sense Strand Starting at position 987 of SEQ ID NO: 315737
gccagaacugagugaucug

SEQ ID NO: 396188 - RNA, 19 nt, Artificial Sequence
  Description of Artificial Sequence: Synthetic oligonucleotide
  Antisense Strand to SEQ ID NO: 396187
cagaucacucaguucuggc

SEQ ID NO: 396189 - RNA, 19 nt, Artificial Sequence
  Description of Artificial Sequence: Synthetic oligonucleotide
  Sense Strand Starting at position 987 of SEQ ID NO: 315740
agaacugagugaucuguga

SEQ ID NO: 396190 - RNA, 19 nt, Artificial Sequence
  Description of Artificial Sequence: Synthetic oligonucleotide
  Antisense Strand to SEQ ID NO: 396189
ucacagaucacucaguucu

SEQ ID NO: 396191 - RNA, 19 nt, Artificial Sequence
  Description of Artificial Sequence: Synthetic oligonucleotide
  Sense Strand Starting at position 987 of SEQ ID NO: 315744
cugagugaucugugauuau

SEQ ID NO: 396192 - RNA, 19 nt, Artificial Sequence
  Description of Artificial Sequence: Synthetic oligonucleotide
  Antisense Strand to SEQ ID NO: 396191
auaaucacagaucacucag

SEQ ID NO: 396193 - RNA, 19 nt, Artificial Sequence
  Description of Artificial Sequence: Synthetic oligonucleotide
  Sense Strand Starting at position 987 of SEQ ID NO: 315747
agugaucugugauuauuga

SEQ ID NO: 396194 - RNA, 19 nt, Artificial Sequence
  Description of Artificial Sequence: Synthetic oligonucleotide
  Antisense Strand to SEQ ID NO: 396193
ucaauaaucacagaucacu

SEQ ID NO: 396195 - RNA, 19 nt, Artificial Sequence
  Description of Artificial Sequence: Synthetic oligonucleotide
  Sense Strand Starting at position 987 of SEQ ID NO: 315748
gugaucugugauuauugaa

SEQ ID NO: 396196 - RNA, 19 nt, Artificial Sequence
  Description of Artificial Sequence: Synthetic oligonucleotide
  Antisense Strand to SEQ ID NO: 396195
uucaauaaucacagaucac

SEQ ID NO: 396197 - RNA, 19 nt, Artificial Sequence
  Description of Artificial Sequence: Synthetic oligonucleotide
  Sense Strand Starting at position 987 of SEQ ID NO: 315755
gugauuauugaaugcaaca

SEQ ID NO: 396198 - RNA, 19 nt, Artificial Sequence
  Description of Artificial Sequence: Synthetic oligonucleotide
  Antisense Strand to SEQ ID NO: 396197
uguugcauucaauaaucac

SEQ ID NO: 396199 - RNA, 19 nt, Artificial Sequence
  Description of Artificial Sequence: Synthetic oligonucleotide
  Sense Strand Starting at position 987 of SEQ ID NO: 315788
gccagagauucccugagaa

SEQ ID NO: 396200 - RNA, 19 nt, Artificial Sequence
  Description of Artificial Sequence: Synthetic oligonucleotide
  Antisense Strand to SEQ ID NO: 396199
uucucagggaaucucuggc

SEQ ID NO: 396201 - RNA, 19 nt, Artificial Sequence
  Description of Artificial Sequence: Synthetic oligonucleotide
  Sense Strand Starting at position 987 of SEQ ID NO: 315929
ccugcaucucagcagagau

SEQ ID NO: 396202 - RNA, 19 nt, Artificial Sequence
  Description of Artificial Sequence: Synthetic oligonucleotide
  Antisense Strand to SEQ ID NO: 396201
aucucugcugagaugcagg

SEQ ID NO: 396203 - RNA, 19 nt, Artificial Sequence
  Description of Artificial Sequence: Synthetic oligonucleotide
  Sense Strand Starting at position 987 of SEQ ID NO: 315931
ugcaucucagcagagauau

SEQ ID NO: 396204 - RNA, 19 nt, Artificial Sequence
  Description of Artificial Sequence: Synthetic oligonucleotide
  Antisense Strand to SEQ ID NO: 396203
auaucucugcugagaugca

SEQ ID NO: 396205 - RNA, 19 nt, Artificial Sequence
  Description of Artificial Sequence: Synthetic oligonucleotide
  Sense Strand Starting at position 987 of SEQ ID NO: 316047
uuaagugggaucuguuauc

SEQ ID NO: 396206 - RNA, 19 nt, Artificial Sequence
  Description of Artificial Sequence: Synthetic oligonucleotide
  Antisense Strand to SEQ ID NO: 396205
gauaacagaucccacuuaa

SEQ ID NO: 396207 - RNA, 19 nt, Artificial Sequence
  Description of Artificial Sequence: Synthetic oligonucleotide
  Sense Strand Starting at position 987 of SEQ ID NO: 316098
gcaagacauuauucuaaag

SEQ ID NO: 396208 - RNA, 19 nt, Artificial Sequence
  Description of Artificial Sequence: Synthetic oligonucleotide
  Antisense Strand to SEQ ID NO: 396207
cuuuagaauaaugucuugc

SEQ ID NO: 396209 - RNA, 19 nt, Artificial Sequence
  Description of Artificial Sequence: Synthetic oligonucleotide
  Sense Strand Starting at position 987 of SEQ ID NO: 316139
ggcugcuugcgguucucaa

SEQ ID NO: 396210 - RNA, 19 nt, Artificial Sequence
  Description of Artificial Sequence: Synthetic oligonucleotide
  Antisense Strand to SEQ ID NO: 396209
uugagaaccgcaagcagcc

SEQ ID NO: 396211 - RNA, 19 nt, Artificial Sequence
  Description of Artificial Sequence: Synthetic oligonucleotide
  Sense Strand Starting at position 987 of SEQ ID NO: 316420
gcaaacauggcccgagaua

SEQ ID NO: 396212 - RNA, 19 nt, Artificial Sequence
  Description of Artificial Sequence: Synthetic oligonucleotide
  Antisense Strand to SEQ ID NO: 396211
uaucucgggccauguuugc

SEQ ID NO: 396213 - RNA, 19 nt, Artificial Sequence
  Description of Artificial Sequence: Synthetic oligonucleotide
  Sense Strand Starting at position 987 of SEQ ID NO: 316547
cgcauauugcuccaaauaa

SEQ ID NO: 396214 - RNA, 19 nt, Artificial Sequence
  Description of Artificial Sequence: Synthetic oligonucleotide
  Antisense Strand to SEQ ID NO: 396213
uuauuuggagcaauaugcg

SEQ ID NO: 396215 - RNA, 19 nt, Artificial Sequence
  Description of Artificial Sequence: Synthetic oligonucleotide
  Sense Strand Starting at position 987 of SEQ ID NO: 316562
auaagaucaaggcaguguu

SEQ ID NO: 396216 - RNA, 19 nt, Artificial Sequence
  Description of Artificial Sequence: Synthetic oligonucleotide
  Antisense Strand to SEQ ID NO: 396215
aacacugccuugaucuuau

SEQ ID NO: 396217 - RNA, 19 nt, Artificial Sequence
  Description of Artificial Sequence: Synthetic oligonucleotide
  Sense Strand Starting at position 987 of SEQ ID NO: 316607
cccggcuaucaccaugaau

SEQ ID NO: 396218 - RNA, 19 nt, Artificial Sequence
  Description of Artificial Sequence: Synthetic oligonucleotide
  Antisense Strand to SEQ ID NO: 396217
auucauggugauagccggg

SEQ ID NO: 396219 - RNA, 19 nt, Artificial Sequence
  Description of Artificial Sequence: Synthetic oligonucleotide
  Sense Strand Starting at position 987 of SEQ ID NO: 316610
ggcuaucaccaugaauggu

SEQ ID NO: 396220 - RNA, 19 nt, Artificial Sequence
  Description of Artificial Sequence: Synthetic oligonucleotide
  Antisense Strand to SEQ ID NO: 396219
accauucauggugauagcc

SEQ ID NO: 396221 - RNA, 19 nt, Artificial Sequence
  Description of Artificial Sequence: Synthetic oligonucleotide
  Sense Strand Starting at position 987 of SEQ ID NO: 316644
auaugagggcuuuggauaa

SEQ ID NO: 396222 - RNA, 19 nt, Artificial Sequence
  Description of Artificial Sequence: Synthetic oligonucleotide
  Antisense Strand to SEQ ID NO: 396221
uuauccaaagcccucauau

SEQ ID NO: 396223 - RNA, 19 nt, Artificial Sequence
  Description of Artificial Sequence: Synthetic oligonucleotide
  Sense Strand Starting at position 987 of SEQ ID NO: 317227
ggaugacucuggguucuga

SEQ ID NO: 396224 - RNA, 19 nt, Artificial Sequence
  Description of Artificial Sequence: Synthetic oligonucleotide
  Antisense Strand to SEQ ID NO: 396223
ucagaacccagagucaucc

SEQ ID NO: 396225 - RNA, 19 nt, Artificial Sequence
  Description of Artificial Sequence: Synthetic oligonucleotide
  Sense Strand Starting at position 987 of SEQ ID NO: 317563
gagacuuucugguuuauuc

SEQ ID NO: 396226 - RNA, 19 nt, Artificial Sequence
  Description of Artificial Sequence: Synthetic oligonucleotide
  Antisense Strand to SEQ ID NO: 396225
gaauaaaccagaaagucuc

SEQ ID NO: 396227 - RNA, 19 nt, Artificial Sequence
  Description of Artificial Sequence: Synthetic oligonucleotide
  Sense Strand Starting at position 987 of SEQ ID NO: 317630
acaaguuaccucuggaguc

SEQ ID NO: 396228 - RNA, 19 nt, Artificial Sequence
  Description of Artificial Sequence: Synthetic oligonucleotide
  Antisense Strand to SEQ ID NO: 396227
gacuccagagguaacuugu

SEQ ID NO: 396229 - RNA, 19 nt, Artificial Sequence
  Description of Artificial Sequence: Synthetic oligonucleotide
  Sense Strand Starting at position 987 of SEQ ID NO: 317632
aaguuaccucuggagucau

SEQ ID NO: 396230 - RNA, 19 nt, Artificial Sequence
  Description of Artificial Sequence: Synthetic oligonucleotide
  Antisense Strand to SEQ ID NO: 396229
augacuccagagguaacuu

SEQ ID NO: 396231 - RNA, 19 nt, Artificial Sequence
  Description of Artificial Sequence: Synthetic oligonucleotide
  Sense Strand Starting at position 987 of SEQ ID NO: 317763
guugcauggaauuggaauu

SEQ ID NO: 396232 - RNA, 19 nt, Artificial Sequence
  Description of Artificial Sequence: Synthetic oligonucleotide
  Antisense Strand to SEQ ID NO: 396231
aauuccaauuccaugcaac

SEQ ID NO: 396233 - RNA, 19 nt, Artificial Sequence
  Description of Artificial Sequence: Synthetic oligonucleotide
  Sense Strand Starting at position 987 of SEQ ID NO: 318077
ccuggcuuuauccagagga

SEQ ID NO: 396234 - RNA, 19 nt, Artificial Sequence
  Description of Artificial Sequence: Synthetic oligonucleotide
  Antisense Strand to SEQ ID NO: 396233
uccucuggauaaagccagg

SEQ ID NO: 396235 - RNA, 19 nt, Artificial Sequence
  Description of Artificial Sequence: Synthetic oligonucleotide
  Sense Strand Starting at position 987 of SEQ ID NO: 318081
gcuuuauccagaggaaagu

SEQ ID NO: 396236 - RNA, 19 nt, Artificial Sequence
  Description of Artificial Sequence: Synthetic oligonucleotide
  Antisense Strand to SEQ ID NO: 396235
acuuuccucuggauaaagc

SEQ ID NO: 396237 - RNA, 19 nt, Artificial Sequence
  Description of Artificial Sequence: Synthetic oligonucleotide
  Sense Strand Starting at position 987 of SEQ ID NO: 318127
guagaaaggugacucaaau

SEQ ID NO: 396238 - RNA, 19 nt, Artificial Sequence
  Description of Artificial Sequence: Synthetic oligonucleotide
  Antisense Strand to SEQ ID NO: 396237
auuugagucaccuuucuac

SEQ ID NO: 396239 - RNA, 19 nt, Artificial Sequence
  Description of Artificial Sequence: Synthetic oligonucleotide
  Sense Strand Starting at position 987 of SEQ ID NO: 318340
uccagaauagcaggaugua

SEQ ID NO: 396240 - RNA, 19 nt, Artificial Sequence
  Description of Artificial Sequence: Synthetic oligonucleotide
  Antisense Strand to SEQ ID NO: 396239
uacauccugcuauucugga

SEQ ID NO: 396241 - RNA, 19 nt, Artificial Sequence
  Description of Artificial Sequence: Synthetic oligonucleotide
  Sense Strand Starting at position 987 of SEQ ID NO: 318350
caggauguaccgugagaaa

SEQ ID NO: 396242 - RNA, 19 nt, Artificial Sequence
  Description of Artificial Sequence: Synthetic oligonucleotide
  Antisense Strand to SEQ ID NO: 396241
uuucucacgguacauccug

SEQ ID NO: 396243 - RNA, 19 nt, Artificial Sequence
  Description of Artificial Sequence: Synthetic oligonucleotide
  Sense Strand Starting at position 987 of SEQ ID NO: 318746
acaggaggcuucucugaga

SEQ ID NO: 396244 - RNA, 19 nt, Artificial Sequence
  Description of Artificial Sequence: Synthetic oligonucleotide
  Antisense Strand to SEQ ID NO: 396243
ucucagagaagccuccugu

SEQ ID NO: 396245 - RNA, 19 nt, Artificial Sequence
  Description of Artificial Sequence: Synthetic oligonucleotide
  Sense Strand Starting at position 987 of SEQ ID NO: 318849
agcccugaugccugggaaa

SEQ ID NO: 396246 - RNA, 19 nt, Artificial Sequence
  Description of Artificial Sequence: Synthetic oligonucleotide
  Antisense Strand to SEQ ID NO: 396245
uuucccaggcaucagggcu

SEQ ID NO: 396247 - RNA, 19 nt, Artificial Sequence
  Description of Artificial Sequence: Synthetic oligonucleotide
  Sense Strand Starting at position 987 of SEQ ID NO: 318851
cccugaugccugggaaaua

SEQ ID NO: 396248 - RNA, 19 nt, Artificial Sequence
  Description of Artificial Sequence: Synthetic oligonucleotide
  Antisense Strand to SEQ ID NO: 396247
uauuucccaggcaucaggg

SEQ ID NO: 396249 - RNA, 19 nt, Artificial Sequence
  Description of Artificial Sequence: Synthetic oligonucleotide
  Sense Strand Starting at position 987 of SEQ ID NO: 318905
ccaggauucccagaucugu

SEQ ID NO: 396250 - RNA, 19 nt, Artificial Sequence
  Description of Artificial Sequence: Synthetic oligonucleotide
  Antisense Strand to SEQ ID NO: 396249
acagaucugggaauccugg

SEQ ID NO: 396251 - RNA, 19 nt, Artificial Sequence
  Description of Artificial Sequence: Synthetic oligonucleotide
  Sense Strand Starting at position 987 of SEQ ID NO: 318916
agaucugucugcucagaag

SEQ ID NO: 396252 - RNA, 19 nt, Artificial Sequence
  Description of Artificial Sequence: Synthetic oligonucleotide
  Antisense Strand to SEQ ID NO: 396251
cuucugagcagacagaucu

SEQ ID NO: 396253 - RNA, 19 nt, Artificial Sequence
  Description of Artificial Sequence: Synthetic oligonucleotide
  Sense Strand Starting at position 987 of SEQ ID NO: 319068
gcgcuuggccuggugauua

SEQ ID NO: 396254 - RNA, 19 nt, Artificial Sequence
  Description of Artificial Sequence: Synthetic oligonucleotide
  Antisense Strand to SEQ ID NO: 396253
uaaucaccaggccaagcgc

SEQ ID NO: 396255 - RNA, 19 nt, Artificial Sequence
  Description of Artificial Sequence: Synthetic oligonucleotide
  Sense Strand Starting at position 987 of SEQ ID NO: 319162
gaugccuugggucaagacu

SEQ ID NO: 396256 - RNA, 19 nt, Artificial Sequence
  Description of Artificial Sequence: Synthetic oligonucleotide
  Antisense Strand to SEQ ID NO: 396255
agucuugacccaaggcauc

SEQ ID NO: 396257 - RNA, 19 nt, Artificial Sequence
  Description of Artificial Sequence: Synthetic oligonucleotide
  Sense Strand Starting at position 988 of SEQ ID NO: 315332
ggccaacugcuugggagua

SEQ ID NO: 396258 - RNA, 19 nt, Artificial Sequence
  Description of Artificial Sequence: Synthetic oligonucleotide
  Antisense Strand to SEQ ID NO: 396257
uacucccaagcaguuggcc

SEQ ID NO: 396259 - RNA, 19 nt, Artificial Sequence
  Description of Artificial Sequence: Synthetic oligonucleotide
  Sense Strand Starting at position 988 of SEQ ID NO: 315383
uggucugcuccugacuaga

SEQ ID NO: 396260 - RNA, 19 nt, Artificial Sequence
  Description of Artificial Sequence: Synthetic oligonucleotide
  Antisense Strand to SEQ ID NO: 396259
ucuagucaggagcagacca

SEQ ID NO: 396261 - RNA, 19 nt, Artificial Sequence
  Description of Artificial Sequence: Synthetic oligonucleotide
  Sense Strand Starting at position 988 of SEQ ID NO: 315385
gucugcuccugacuagaua

SEQ ID NO: 396262 - RNA, 19 nt, Artificial Sequence
  Description of Artificial Sequence: Synthetic oligonucleotide
  Antisense Strand to SEQ ID NO: 396261
uaucuagucaggagcagac

SEQ ID NO: 396263 - RNA, 19 nt, Artificial Sequence
  Description of Artificial Sequence: Synthetic oligonucleotide
  Sense Strand Starting at position 988 of SEQ ID NO: 315421
uacuuaagucucugggacu

SEQ ID NO: 396264 - RNA, 19 nt, Artificial Sequence
  Description of Artificial Sequence: Synthetic oligonucleotide
  Antisense Strand to SEQ ID NO: 396263
agucccagagacuuaagua

SEQ ID NO: 396265 - RNA, 19 nt, Artificial Sequence
  Description of Artificial Sequence: Synthetic oligonucleotide
  Sense Strand Starting at position 988 of SEQ ID NO: 315477
ccugaaagauuccucuuag

SEQ ID NO: 396266 - RNA, 19 nt, Artificial Sequence
  Description of Artificial Sequence: Synthetic oligonucleotide
  Antisense Strand to SEQ ID NO: 396265
cuaagaggaaucuuucagg

SEQ ID NO: 396267 - RNA, 19 nt, Artificial Sequence
  Description of Artificial Sequence: Synthetic oligonucleotide
  Sense Strand Starting at position 988 of SEQ ID NO: 315570
ggauaaaucuagcacuaga

SEQ ID NO: 396268 - RNA, 19 nt, Artificial Sequence
  Description of Artificial Sequence: Synthetic oligonucleotide
  Antisense Strand to SEQ ID NO: 396267
ucuagugcuagauuuaucc

SEQ ID NO: 396269 - RNA, 19 nt, Artificial Sequence
  Description of Artificial Sequence: Synthetic oligonucleotide
  Sense Strand Starting at position 988 of SEQ ID NO: 315604
aggugcaccuuauauauuu

SEQ ID NO: 396270 - RNA, 19 nt, Artificial Sequence
  Description of Artificial Sequence: Synthetic oligonucleotide
  Antisense Strand to SEQ ID NO: 396269
aaauauauaaggugcaccu

SEQ ID NO: 396271 - RNA, 19 nt, Artificial Sequence
  Description of Artificial Sequence: Synthetic oligonucleotide
  Sense Strand Starting at position 988 of SEQ ID NO: 315635
agccaucagugcuccacaa

SEQ ID NO: 396272 - RNA, 19 nt, Artificial Sequence
  Description of Artificial Sequence: Synthetic oligonucleotide
  Antisense Strand to SEQ ID NO: 396271
uuguggagcacugauggcu

SEQ ID NO: 396273 - RNA, 19 nt, Artificial Sequence
  Description of Artificial Sequence: Synthetic oligonucleotide
  Sense Strand Starting at position 988 of SEQ ID NO: 315798
gacaaucauccgcauggua

SEQ ID NO: 396274 - RNA, 19 nt, Artificial Sequence
  Description of Artificial Sequence: Synthetic oligonucleotide
  Antisense Strand to SEQ ID NO: 396273
uaccaugcggaugauuguc

SEQ ID NO: 396275 - RNA, 19 nt, Artificial Sequence
  Description of Artificial Sequence: Synthetic oligonucleotide
  Sense Strand Starting at position 988 of SEQ ID NO: 315800
caaucauccgcaugguaca

SEQ ID NO: 396276 - RNA, 19 nt, Artificial Sequence
  Description of Artificial Sequence: Synthetic oligonucleotide
  Antisense Strand to SEQ ID NO: 396275
uguaccaugcggaugauug

SEQ ID NO: 396277 - RNA, 19 nt, Artificial Sequence
  Description of Artificial Sequence: Synthetic oligonucleotide
  Sense Strand Starting at position 988 of SEQ ID NO: 315820
auuacacaucugggugaua

SEQ ID NO: 396278 - RNA, 19 nt, Artificial Sequence
  Description of Artificial Sequence: Synthetic oligonucleotide
  Antisense Strand to SEQ ID NO: 396277
uaucacccagauguguaau

SEQ ID NO: 396279 - RNA, 19 nt, Artificial Sequence
  Description of Artificial Sequence: Synthetic oligonucleotide
  Sense Strand Starting at position 988 of SEQ ID NO: 315822
uacacaucugggugauacu

SEQ ID NO: 396280 - RNA, 19 nt, Artificial Sequence
  Description of Artificial Sequence: Synthetic oligonucleotide
  Antisense Strand to SEQ ID NO: 396279
aguaucacccagaugugua

SEQ ID NO: 396281 - RNA, 19 nt, Artificial Sequence
  Description of Artificial Sequence: Synthetic oligonucleotide
  Sense Strand Starting at position 988 of SEQ ID NO: 315832
ggugauacuaagugguuga

SEQ ID NO: 396282 - RNA, 19 nt, Artificial Sequence
  Description of Artificial Sequence: Synthetic oligonucleotide
  Antisense Strand to SEQ ID NO: 396281
ucaaccacuuaguaucacc

SEQ ID NO: 396283 - RNA, 19 nt, Artificial Sequence
  Description of Artificial Sequence: Synthetic oligonucleotide
  Sense Strand Starting at position 988 of SEQ ID NO: 315833
gugauacuaagugguugaa

SEQ ID NO: 396284 - RNA, 19 nt, Artificial Sequence
  Description of Artificial Sequence: Synthetic oligonucleotide
  Antisense Strand to SEQ ID NO: 396283
uucaaccacuuaguaucac

SEQ ID NO: 396285 - RNA, 19 nt, Artificial Sequence
  Description of Artificial Sequence: Synthetic oligonucleotide
  Sense Strand Starting at position 988 of SEQ ID NO: 315951
gcaagaaacguuuaagacu

SEQ ID NO: 396286 - RNA, 19 nt, Artificial Sequence
  Description of Artificial Sequence: Synthetic oligonucleotide
  Antisense Strand to SEQ ID NO: 396285
agucuuaaacguuucuugc

SEQ ID NO: 396287 - RNA, 19 nt, Artificial Sequence
  Description of Artificial Sequence: Synthetic oligonucleotide
  Sense Strand Starting at position 988 of SEQ ID NO: 316112
aaucaacuuggaugcgaau

SEQ ID NO: 396288 - RNA, 19 nt, Artificial Sequence
  Description of Artificial Sequence: Synthetic oligonucleotide
  Antisense Strand to SEQ ID NO: 396287
auucgcauccaaguugauu

SEQ ID NO: 396289 - RNA, 19 nt, Artificial Sequence
  Description of Artificial Sequence: Synthetic oligonucleotide
  Sense Strand Starting at position 988 of SEQ ID NO: 316215
agcgacuucgacuaagcaa

SEQ ID NO: 396290 - RNA, 19 nt, Artificial Sequence
  Description of Artificial Sequence: Synthetic oligonucleotide
  Antisense Strand to SEQ ID NO: 396289
uugcuuagucgaagucgcu

SEQ ID NO: 396291 - RNA, 19 nt, Artificial Sequence
  Description of Artificial Sequence: Synthetic oligonucleotide
  Sense Strand Starting at position 988 of SEQ ID NO: 316251
ugcaacaucgcuuaaauca

SEQ ID NO: 396292 - RNA, 19 nt, Artificial Sequence
  Description of Artificial Sequence: Synthetic oligonucleotide
  Antisense Strand to SEQ ID NO: 396291
ugauuuaagcgauguugca

SEQ ID NO: 396293 - RNA, 19 nt, Artificial Sequence
  Description of Artificial Sequence: Synthetic oligonucleotide
  Sense Strand Starting at position 988 of SEQ ID NO: 316493
ugaaacagugauugucguu

SEQ ID NO: 396294 - RNA, 19 nt, Artificial Sequence
  Description of Artificial Sequence: Synthetic oligonucleotide
  Antisense Strand to SEQ ID NO: 396293
aacgacaaucacuguuuca

SEQ ID NO: 396295 - RNA, 19 nt, Artificial Sequence
  Description of Artificial Sequence: Synthetic oligonucleotide
  Sense Strand Starting at position 988 of SEQ ID NO: 316500
gugauugucguuucucguu

SEQ ID NO: 396296 - RNA, 19 nt, Artificial Sequence
  Description of Artificial Sequence: Synthetic oligonucleotide
  Antisense Strand to SEQ ID NO: 396295
aacgagaaacgacaaucac

SEQ ID NO: 396297 - RNA, 19 nt, Artificial Sequence
  Description of Artificial Sequence: Synthetic oligonucleotide
  Sense Strand Starting at position 988 of SEQ ID NO: 317781
aggugaggcuuccuacgaa

SEQ ID NO: 396298 - RNA, 19 nt, Artificial Sequence
  Description of Artificial Sequence: Synthetic oligonucleotide
  Antisense Strand to SEQ ID NO: 396297
uucguaggaagccucaccu

SEQ ID NO: 396299 - RNA, 19 nt, Artificial Sequence
  Description of Artificial Sequence: Synthetic oligonucleotide
  Sense Strand Starting at position 988 of SEQ ID NO: 317867
gcaagaggcucaucagaac

SEQ ID NO: 396300 - RNA, 19 nt, Artificial Sequence
  Description of Artificial Sequence: Synthetic oligonucleotide
  Antisense Strand to SEQ ID NO: 396299
guucugaugagccucuugc

SEQ ID NO: 396301 - RNA, 19 nt, Artificial Sequence
  Description of Artificial Sequence: Synthetic oligonucleotide
  Sense Strand Starting at position 988 of SEQ ID NO: 318033
uuguaucuguuccucagaa

SEQ ID NO: 396302 - RNA, 19 nt, Artificial Sequence
  Description of Artificial Sequence: Synthetic oligonucleotide
  Antisense Strand to SEQ ID NO: 396301
uucugaggaacagauacaa

SEQ ID NO: 396303 - RNA, 19 nt, Artificial Sequence
  Description of Artificial Sequence: Synthetic oligonucleotide
  Sense Strand Starting at position 988 of SEQ ID NO: 318034
uguaucuguuccucagaac

SEQ ID NO: 396304 - RNA, 19 nt, Artificial Sequence
  Description of Artificial Sequence: Synthetic oligonucleotide
  Antisense Strand to SEQ ID NO: 396303
guucugaggaacagauaca

SEQ ID NO: 396305 - RNA, 19 nt, Artificial Sequence
  Description of Artificial Sequence: Synthetic oligonucleotide
  Sense Strand Starting at position 988 of SEQ ID NO: 318035
guaucuguuccucagaacu

SEQ ID NO: 396306 - RNA, 19 nt, Artificial Sequence
  Description of Artificial Sequence: Synthetic oligonucleotide
  Antisense Strand to SEQ ID NO: 396305
aguucugaggaacagauac

SEQ ID NO: 396307 - RNA, 19 nt, Artificial Sequence
  Description of Artificial Sequence: Synthetic oligonucleotide
  Sense Strand Starting at position 988 of SEQ ID NO: 318238
gcauuucccuucgugguga

SEQ ID NO: 396308 - RNA, 19 nt, Artificial Sequence
  Description of Artificial Sequence: Synthetic oligonucleotide
  Antisense Strand to SEQ ID NO: 396307
ucaccacgaagggaaaugc

SEQ ID NO: 396309 - RNA, 19 nt, Artificial Sequence
  Description of Artificial Sequence: Synthetic oligonucleotide
  Sense Strand Starting at position 988 of SEQ ID NO: 318243
ucccuucguggugaguaaa

SEQ ID NO: 396310 - RNA, 19 nt, Artificial Sequence
  Description of Artificial Sequence: Synthetic oligonucleotide
  Antisense Strand to SEQ ID NO: 396309
uuuacucaccacgaaggga

SEQ ID NO: 396311 - RNA, 19 nt, Artificial Sequence
  Description of Artificial Sequence: Synthetic oligonucleotide
  Sense Strand Starting at position 988 of SEQ ID NO: 318246
cuucguggugaguaaaucu

SEQ ID NO: 396312 - RNA, 19 nt, Artificial Sequence
  Description of Artificial Sequence: Synthetic oligonucleotide
  Antisense Strand to SEQ ID NO: 396311
agauuuacucaccacgaag

SEQ ID NO: 396313 - RNA, 19 nt, Artificial Sequence
  Description of Artificial Sequence: Synthetic oligonucleotide
  Sense Strand Starting at position 988 of SEQ ID NO: 318253
gugaguaaaucuguccaua

SEQ ID NO: 396314 - RNA, 19 nt, Artificial Sequence
  Description of Artificial Sequence: Synthetic oligonucleotide
  Antisense Strand to SEQ ID NO: 396313
uauggacagauuuacucac

SEQ ID NO: 396315 - RNA, 19 nt, Artificial Sequence
  Description of Artificial Sequence: Synthetic oligonucleotide
  Sense Strand Starting at position 988 of SEQ ID NO: 318495
gaugaaaugacagguuugu

SEQ ID NO: 396316 - RNA, 19 nt, Artificial Sequence
  Description of Artificial Sequence: Synthetic oligonucleotide
  Antisense Strand to SEQ ID NO: 396315
acaaaccugucauuucauc

SEQ ID NO: 396317 - RNA, 19 nt, Artificial Sequence
  Description of Artificial Sequence: Synthetic oligonucleotide
  Sense Strand Starting at position 988 of SEQ ID NO: 318501
augacagguuuguuggauu

SEQ ID NO: 396318 - RNA, 19 nt, Artificial Sequence
  Description of Artificial Sequence: Synthetic oligonucleotide
  Antisense Strand to SEQ ID NO: 396317
aauccaacaaaccugucau

SEQ ID NO: 396319 - RNA, 19 nt, Artificial Sequence
  Description of Artificial Sequence: Synthetic oligonucleotide
  Sense Strand Starting at position 988 of SEQ ID NO: 318514
uggauuccacucugcacaa

SEQ ID NO: 396320 - RNA, 19 nt, Artificial Sequence
  Description of Artificial Sequence: Synthetic oligonucleotide
  Antisense Strand to SEQ ID NO: 396319
uugugcagaguggaaucca

SEQ ID NO: 396321 - RNA, 19 nt, Artificial Sequence
  Description of Artificial Sequence: Synthetic oligonucleotide
  Sense Strand Starting at position 988 of SEQ ID NO: 318515
ggauuccacucugcacaau

SEQ ID NO: 396322 - RNA, 19 nt, Artificial Sequence
  Description of Artificial Sequence: Synthetic oligonucleotide
  Antisense Strand to SEQ ID NO: 396321
auugugcagaguggaaucc

SEQ ID NO: 396323 - RNA, 19 nt, Artificial Sequence
  Description of Artificial Sequence: Synthetic oligonucleotide
  Sense Strand Starting at position 988 of SEQ ID NO: 318549
ggcaguaaucucuguccug

SEQ ID NO: 396324 - RNA, 19 nt, Artificial Sequence
  Description of Artificial Sequence: Synthetic oligonucleotide
  Antisense Strand to SEQ ID NO: 396323
caggacagagauuacugcc

SEQ ID NO: 396325 - RNA, 19 nt, Artificial Sequence
  Description of Artificial Sequence: Synthetic oligonucleotide
  Sense Strand Starting at position 988 of SEQ ID NO: 318550
gcaguaaucucuguccuga

SEQ ID NO: 396326 - RNA, 19 nt, Artificial Sequence
  Description of Artificial Sequence: Synthetic oligonucleotide
  Antisense Strand to SEQ ID NO: 396325
ucaggacagagauuacugc

SEQ ID NO: 396327 - RNA, 19 nt, Artificial Sequence
  Description of Artificial Sequence: Synthetic oligonucleotide
  Sense Strand Starting at position 988 of SEQ ID NO: 318897
uagguaagacugugaugcu

SEQ ID NO: 396328 - RNA, 19 nt, Artificial Sequence
  Description of Artificial Sequence: Synthetic oligonucleotide
  Antisense Strand to SEQ ID NO: 396327
agcaucacagucuuaccua

SEQ ID NO: 396329 - RNA, 19 nt, Artificial Sequence
  Description of Artificial Sequence: Synthetic oligonucleotide
  Sense Strand Starting at position 988 of SEQ ID NO: 318973
aaggcuguggucugaucua

SEQ ID NO: 396330 - RNA, 19 nt, Artificial Sequence
  Description of Artificial Sequence: Synthetic oligonucleotide
  Antisense Strand to SEQ ID NO: 396329
uagaucagaccacagccuu

SEQ ID NO: 396331 - RNA, 19 nt, Artificial Sequence
  Description of Artificial Sequence: Synthetic oligonucleotide
  Sense Strand Starting at position 988 of SEQ ID NO: 319040
aagaguuagggcuagaggu

SEQ ID NO: 396332 - RNA, 19 nt, Artificial Sequence
  Description of Artificial Sequence: Synthetic oligonucleotide
  Antisense Strand to SEQ ID NO: 396331
accucuagcccuaacucuu

SEQ ID NO: 396333 - RNA, 19 nt, Artificial Sequence
  Description of Artificial Sequence: Synthetic oligonucleotide
  Sense Strand Starting at position 988 of SEQ ID NO: 319042
gaguuagggcuagagguua

SEQ ID NO: 396334 - RNA, 19 nt, Artificial Sequence
  Description of Artificial Sequence: Synthetic oligonucleotide
  Antisense Strand to SEQ ID NO: 396333
uaaccucuagcccuaacuc

SEQ ID NO: 396335 - RNA, 19 nt, Artificial Sequence
  Description of Artificial Sequence: Synthetic oligonucleotide
  Sense Strand Starting at position 988 of SEQ ID NO: 319077
ccagguuucugucuuagag

SEQ ID NO: 396336 - RNA, 19 nt, Artificial Sequence
  Description of Artificial Sequence: Synthetic oligonucleotide
  Antisense Strand to SEQ ID NO: 396335
cucuaagacagaaaccugg

SEQ ID NO: 396337 - RNA, 19 nt, Artificial Sequence
  Description of Artificial Sequence: Synthetic oligonucleotide
  Sense Strand Starting at position 989 of SEQ ID NO: 315798
ggucuaggcccauguaaca

SEQ ID NO: 396338 - RNA, 19 nt, Artificial Sequence
  Description of Artificial Sequence: Synthetic oligonucleotide
  Antisense Strand to SEQ ID NO: 396337
uguuacaugggccuagacc

SEQ ID NO: 396339 - RNA, 19 nt, Artificial Sequence
  Description of Artificial Sequence: Synthetic oligonucleotide
  Sense Strand Starting at position 989 of SEQ ID NO: 315909
augucucagcucuguggaa

SEQ ID NO: 396340 - RNA, 19 nt, Artificial Sequence
  Description of Artificial Sequence: Synthetic oligonucleotide
  Antisense Strand to SEQ ID NO: 396339
uuccacagagcugagacau

SEQ ID NO: 396341 - RNA, 19 nt, Artificial Sequence
  Description of Artificial Sequence: Synthetic oligonucleotide
  Sense Strand Starting at position 989 of SEQ ID NO: 315911
gucucagcucuguggaaau

SEQ ID NO: 396342 - RNA, 19 nt, Artificial Sequence
  Description of Artificial Sequence: Synthetic oligonucleotide
  Antisense Strand to SEQ ID NO: 396341
auuuccacagagcugagac

SEQ ID NO: 396343 - RNA, 19 nt, Artificial Sequence
  Description of Artificial Sequence: Synthetic oligonucleotide
  Sense Strand Starting at position 989 of SEQ ID NO: 315942
uccaaagugagguguccua

SEQ ID NO: 396344 - RNA, 19 nt, Artificial Sequence
  Description of Artificial Sequence: Synthetic oligonucleotide
  Antisense Strand to SEQ ID NO: 396343
uaggacaccucacuuugga

SEQ ID NO: 396345 - RNA, 19 nt, Artificial Sequence
  Description of Artificial Sequence: Synthetic oligonucleotide
  Sense Strand Starting at position 989 of SEQ ID NO: 315975
guauccaucucaguuguaa

SEQ ID NO: 396346 - RNA, 19 nt, Artificial Sequence
  Description of Artificial Sequence: Synthetic oligonucleotide
  Antisense Strand to SEQ ID NO: 396345
uuacaacugagauggauac

SEQ ID NO: 396347 - RNA, 19 nt, Artificial Sequence
  Description of Artificial Sequence: Synthetic oligonucleotide
  Sense Strand Starting at position 989 of SEQ ID NO: 316065
ucuggucaucucuagccau

SEQ ID NO: 396348 - RNA, 19 nt, Artificial Sequence
  Description of Artificial Sequence: Synthetic oligonucleotide
  Antisense Strand to SEQ ID NO: 396347
auggcuagagaugaccaga

SEQ ID NO: 396349 - RNA, 19 nt, Artificial Sequence
  Description of Artificial Sequence: Synthetic oligonucleotide
  Sense Strand Starting at position 989 of SEQ ID NO: 316068
ggucaucucuagccauaag

SEQ ID NO: 396350 - RNA, 19 nt, Artificial Sequence
  Description of Artificial Sequence: Synthetic oligonucleotide
  Antisense Strand to SEQ ID NO: 396349
cuuauggcuagagaugacc

SEQ ID NO: 396351 - RNA, 19 nt, Artificial Sequence
  Description of Artificial Sequence: Synthetic oligonucleotide
  Sense Strand Starting at position 989 of SEQ ID NO: 316148
uauccaugguccugauagu

SEQ ID NO: 396352 - RNA, 19 nt, Artificial Sequence
  Description of Artificial Sequence: Synthetic oligonucleotide
  Antisense Strand to SEQ ID NO: 396351
acuaucaggaccauggaua

SEQ ID NO: 396353 - RNA, 19 nt, Artificial Sequence
  Description of Artificial Sequence: Synthetic oligonucleotide
  Sense Strand Starting at position 989 of SEQ ID NO: 316257
gugcaucuaucccucacau

SEQ ID NO: 396354 - RNA, 19 nt, Artificial Sequence
  Description of Artificial Sequence: Synthetic oligonucleotide
  Antisense Strand to SEQ ID NO: 396353
augugagggauagaugcac

SEQ ID NO: 396355 - RNA, 19 nt, Artificial Sequence
  Description of Artificial Sequence: Synthetic oligonucleotide
  Sense Strand Starting at position 989 of SEQ ID NO: 316364
ccgucauccacaugagguu

SEQ ID NO: 396356 - RNA, 19 nt, Artificial Sequence
  Description of Artificial Sequence: Synthetic oligonucleotide
  Antisense Strand to SEQ ID NO: 396355
aaccucauguggaugacgg

SEQ ID NO: 396357 - RNA, 19 nt, Artificial Sequence
  Description of Artificial Sequence: Synthetic oligonucleotide
  Sense Strand Starting at position 989 of SEQ ID NO: 316373
acaugagguuacuuaaauu

SEQ ID NO: 396358 - RNA, 19 nt, Artificial Sequence
  Description of Artificial Sequence: Synthetic oligonucleotide
  Antisense Strand to SEQ ID NO: 396357
aauuuaaguaaccucaugu

SEQ ID NO: 396359 - RNA, 19 nt, Artificial Sequence
  Description of Artificial Sequence: Synthetic oligonucleotide
  Sense Strand Starting at position 989 of SEQ ID NO: 316465
ggcuaaugguuacucuguu

SEQ ID NO: 396360 - RNA, 19 nt, Artificial Sequence
  Description of Artificial Sequence: Synthetic oligonucleotide
  Antisense Strand to SEQ ID NO: 396359
aacagaguaaccauuagcc

SEQ ID NO: 396361 - RNA, 19 nt, Artificial Sequence
  Description of Artificial Sequence: Synthetic oligonucleotide
  Sense Strand Starting at position 989 of SEQ ID NO: 316496
gguagaacguucccaccau

SEQ ID NO: 396362 - RNA, 19 nt, Artificial Sequence
  Description of Artificial Sequence: Synthetic oligonucleotide
  Antisense Strand to SEQ ID NO: 396361
auggugggaacguucuacc

SEQ ID NO: 396363 - RNA, 19 nt, Artificial Sequence
  Description of Artificial Sequence: Synthetic oligonucleotide
  Sense Strand Starting at position 989 of SEQ ID NO: 316543
ucuagaguuucgcucugca

SEQ ID NO: 396364 - RNA, 19 nt, Artificial Sequence
  Description of Artificial Sequence: Synthetic oligonucleotide
  Antisense Strand to SEQ ID NO: 396363
ugcagagcgaaacucuaga

SEQ ID NO: 396365 - RNA, 19 nt, Artificial Sequence
  Description of Artificial Sequence: Synthetic oligonucleotide
  Sense Strand Starting at position 989 of SEQ ID NO: 316546
agaguuucgcucugcagca

SEQ ID NO: 396366 - RNA, 19 nt, Artificial Sequence
  Description of Artificial Sequence: Synthetic oligonucleotide
  Antisense Strand to SEQ ID NO: 396365
ugcugcagagcgaaacucu

SEQ ID NO: 396367 - RNA, 19 nt, Artificial Sequence
  Description of Artificial Sequence: Synthetic oligonucleotide
  Sense Strand Starting at position 989 of SEQ ID NO: 316734
cuaccagaguaguugaaga

SEQ ID NO: 396368 - RNA, 19 nt, Artificial Sequence
  Description of Artificial Sequence: Synthetic oligonucleotide
  Antisense Strand to SEQ ID NO: 396367
ucuucaacuacucugguag

SEQ ID NO: 396369 - RNA, 19 nt, Artificial Sequence
  Description of Artificial Sequence: Synthetic oligonucleotide
  Sense Strand Starting at position 989 of SEQ ID NO: 316744
aguugaagaucugauuaaa

SEQ ID NO: 396370 - RNA, 19 nt, Artificial Sequence
  Description of Artificial Sequence: Synthetic oligonucleotide
  Antisense Strand to SEQ ID NO: 396369
uuuaaucagaucuucaacu

SEQ ID NO: 396371 - RNA, 19 nt, Artificial Sequence
  Description of Artificial Sequence: Synthetic oligonucleotide
  Sense Strand Starting at position 989 of SEQ ID NO: 317409
gcgacaugcuaaccggaau

SEQ ID NO: 396372 - RNA, 19 nt, Artificial Sequence
  Description of Artificial Sequence: Synthetic oligonucleotide
  Antisense Strand to SEQ ID NO: 396371
auuccgguuagcaugucgc

SEQ ID NO: 396373 - RNA, 19 nt, Artificial Sequence
  Description of Artificial Sequence: Synthetic oligonucleotide
  Sense Strand Starting at position 989 of SEQ ID NO: 317536
ccuauuuaguccuagugga

SEQ ID NO: 396374 - RNA, 19 nt, Artificial Sequence
  Description of Artificial Sequence: Synthetic oligonucleotide
  Antisense Strand to SEQ ID NO: 396373
uccacuaggacuaaauagg

SEQ ID NO: 396375 - RNA, 19 nt, Artificial Sequence
  Description of Artificial Sequence: Synthetic oligonucleotide
  Sense Strand Starting at position 989 of SEQ ID NO: 318211
cuccuauucuaggaugaga

SEQ ID NO: 396376 - RNA, 19 nt, Artificial Sequence
  Description of Artificial Sequence: Synthetic oligonucleotide
  Antisense Strand to SEQ ID NO: 396375
ucucauccuagaauaggag

SEQ ID NO: 396377 - RNA, 19 nt, Artificial Sequence
  Description of Artificial Sequence: Synthetic oligonucleotide
  Sense Strand Starting at position 989 of SEQ ID NO: 318859
agcgcucgccauugaauga

SEQ ID NO: 396378 - RNA, 19 nt, Artificial Sequence
  Description of Artificial Sequence: Synthetic oligonucleotide
  Antisense Strand to SEQ ID NO: 396377
ucauucaauggcgagcgcu

SEQ ID NO: 396379 - RNA, 19 nt, Artificial Sequence
  Description of Artificial Sequence: Synthetic oligonucleotide
  Sense Strand Starting at position 989 of SEQ ID NO: 318866
gccauugaaugacuuccaa

SEQ ID NO: 396380 - RNA, 19 nt, Artificial Sequence
  Description of Artificial Sequence: Synthetic oligonucleotide
  Antisense Strand to SEQ ID NO: 396379
uuggaagucauucaauggc

SEQ ID NO: 396381 - RNA, 19 nt, Artificial Sequence
  Description of Artificial Sequence: Synthetic oligonucleotide
  Sense Strand Starting at position 989 of SEQ ID NO: 319176
ugugaccucuuccagaaga

SEQ ID NO: 396382 - RNA, 19 nt, Artificial Sequence
  Description of Artificial Sequence: Synthetic oligonucleotide
  Antisense Strand to SEQ ID NO: 396381
ucuucuggaagaggucaca

SEQ ID NO: 396383 - RNA, 19 nt, Artificial Sequence
  Description of Artificial Sequence: Synthetic oligonucleotide
  Sense Strand Starting at position 990 of SEQ ID NO: 315359
agcuuaugucaauguacua

SEQ ID NO: 396384 - RNA, 19 nt, Artificial Sequence
  Description of Artificial Sequence: Synthetic oligonucleotide
  Antisense Strand to SEQ ID NO: 396383
uaguacauugacauaagcu

SEQ ID NO: 396385 - RNA, 19 nt, Artificial Sequence
  Description of Artificial Sequence: Synthetic oligonucleotide
  Sense Strand Starting at position 990 of SEQ ID NO: 315469
cuuaccuccuguuuaaagu

SEQ ID NO: 396386 - RNA, 19 nt, Artificial Sequence
  Description of Artificial Sequence: Synthetic oligonucleotide
  Antisense Strand to SEQ ID NO: 396385
acuuuaaacaggagguaag

SEQ ID NO: 396387 - RNA, 19 nt, Artificial Sequence
  Description of Artificial Sequence: Synthetic oligonucleotide
  Sense Strand Starting at position 990 of SEQ ID NO: 315470
uuaccuccuguuuaaaguu

SEQ ID NO: 396388 - RNA, 19 nt, Artificial Sequence
  Description of Artificial Sequence: Synthetic oligonucleotide
  Antisense Strand to SEQ ID NO: 396387
aacuuuaaacaggagguaa

SEQ ID NO: 396389 - RNA, 19 nt, Artificial Sequence
  Description of Artificial Sequence: Synthetic oligonucleotide
  Sense Strand Starting at position 990 of SEQ ID NO: 315516
uuguuacuucgagauggag

SEQ ID NO: 396390 - RNA, 19 nt, Artificial Sequence
  Description of Artificial Sequence: Synthetic oligonucleotide
  Antisense Strand to SEQ ID NO: 396389
cuccaucucgaaguaacaa

SEQ ID NO: 396391 - RNA, 19 nt, Artificial Sequence
  Description of Artificial Sequence: Synthetic oligonucleotide
  Sense Strand Starting at position 990 of SEQ ID NO: 315606
uugaucuguuucuccagaa

SEQ ID NO: 396392 - RNA, 19 nt, Artificial Sequence
  Description of Artificial Sequence: Synthetic oligonucleotide
  Antisense Strand to SEQ ID NO: 396391
uucuggagaaacagaucaa

SEQ ID NO: 396393 - RNA, 19 nt, Artificial Sequence
  Description of Artificial Sequence: Synthetic oligonucleotide
  Sense Strand Starting at position 990 of SEQ ID NO: 315607
ugaucuguuucuccagaag

SEQ ID NO: 396394 - RNA, 19 nt, Artificial Sequence
  Description of Artificial Sequence: Synthetic oligonucleotide
  Antisense Strand to SEQ ID NO: 396393
cuucuggagaaacagauca

SEQ ID NO: 396395 - RNA, 19 nt, Artificial Sequence
  Description of Artificial Sequence: Synthetic oligonucleotide
  Sense Strand Starting at position 990 of SEQ ID NO: 315675
ugcagauguucuccuugga

SEQ ID NO: 396396 - RNA, 19 nt, Artificial Sequence
  Description of Artificial Sequence: Synthetic oligonucleotide
  Antisense Strand to SEQ ID NO: 396395
uccaaggagaacaucugca

SEQ ID NO: 396397 - RNA, 19 nt, Artificial Sequence
  Description of Artificial Sequence: Synthetic oligonucleotide
  Sense Strand Starting at position 990 of SEQ ID NO: 315678
agauguucuccuuggagaa

SEQ ID NO: 396398 - RNA, 19 nt, Artificial Sequence
  Description of Artificial Sequence: Synthetic oligonucleotide
  Antisense Strand to SEQ ID NO: 396397
uucuccaaggagaacaucu

SEQ ID NO: 396399 - RNA, 19 nt, Artificial Sequence
  Description of Artificial Sequence: Synthetic oligonucleotide
  Sense Strand Starting at position 990 of SEQ ID NO: 315679
gauguucuccuuggagaac

SEQ ID NO: 396400 - RNA, 19 nt, Artificial Sequence
  Description of Artificial Sequence: Synthetic oligonucleotide
  Antisense Strand to SEQ ID NO: 396399
guucuccaaggagaacauc

SEQ ID NO: 396401 - RNA, 19 nt, Artificial Sequence
  Description of Artificial Sequence: Synthetic oligonucleotide
  Sense Strand Starting at position 990 of SEQ ID NO: 315709
uguugaaaggaaugcauca

SEQ ID NO: 396402 - RNA, 19 nt, Artificial Sequence
  Description of Artificial Sequence: Synthetic oligonucleotide
  Antisense Strand to SEQ ID NO: 396401
ugaugcauuccuuucaaca

SEQ ID NO: 396403 - RNA, 19 nt, Artificial Sequence
  Description of Artificial Sequence: Synthetic oligonucleotide
  Sense Strand Starting at position 990 of SEQ ID NO: 315855
acuauuuacuauugucaga

SEQ ID NO: 396404 - RNA, 19 nt, Artificial Sequence
  Description of Artificial Sequence: Synthetic oligonucleotide
  Antisense Strand to SEQ ID NO: 396403
ucugacaauaguaaauagu

SEQ ID NO: 396405 - RNA, 19 nt, Artificial Sequence
  Description of Artificial Sequence: Synthetic oligonucleotide
  Sense Strand Starting at position 990 of SEQ ID NO: 315994
uucucucugggacaaaguu

SEQ ID NO: 396406 - RNA, 19 nt, Artificial Sequence
  Description of Artificial Sequence: Synthetic oligonucleotide
  Antisense Strand to SEQ ID NO: 396405
aacuuugucccagagagaa

SEQ ID NO: 396407 - RNA, 19 nt, Artificial Sequence
  Description of Artificial Sequence: Synthetic oligonucleotide
  Sense Strand Starting at position 990 of SEQ ID NO: 316236
gcagguacuugaccaagaa

SEQ ID NO: 396408 - RNA, 19 nt, Artificial Sequence
  Description of Artificial Sequence: Synthetic oligonucleotide
  Antisense Strand to SEQ ID NO: 396407
uucuuggucaaguaccugc

SEQ ID NO: 396409 - RNA, 19 nt, Artificial Sequence
  Description of Artificial Sequence: Synthetic oligonucleotide
  Sense Strand Starting at position 990 of SEQ ID NO: 317286
guggccacaccuuaaagua

SEQ ID NO: 396410 - RNA, 19 nt, Artificial Sequence
  Description of Artificial Sequence: Synthetic oligonucleotide
  Antisense Strand to SEQ ID NO: 396409
uacuuuaagguguggccac

SEQ ID NO: 396411 - RNA, 19 nt, Artificial Sequence
  Description of Artificial Sequence: Synthetic oligonucleotide
  Sense Strand Starting at position 990 of SEQ ID NO: 317305
gggcucaaauuguuagaga

SEQ ID NO: 396412 - RNA, 19 nt, Artificial Sequence
  Description of Artificial Sequence: Synthetic oligonucleotide
  Antisense Strand to SEQ ID NO: 396411
ucucuaacaauuugagccc

SEQ ID NO: 396413 - RNA, 19 nt, Artificial Sequence
  Description of Artificial Sequence: Synthetic oligonucleotide
  Sense Strand Starting at position 990 of SEQ ID NO: 317532
ccuuucugguugucucaau

SEQ ID NO: 396414 - RNA, 19 nt, Artificial Sequence
  Description of Artificial Sequence: Synthetic oligonucleotide
  Antisense Strand to SEQ ID NO: 396413
auugagacaaccagaaagg

SEQ ID NO: 396415 - RNA, 19 nt, Artificial Sequence
  Description of Artificial Sequence: Synthetic oligonucleotide
  Sense Strand Starting at position 990 of SEQ ID NO: 317567
cuuaaauuaccggauugua

SEQ ID NO: 396416 - RNA, 19 nt, Artificial Sequence
  Description of Artificial Sequence: Synthetic oligonucleotide
  Antisense Strand to SEQ ID NO: 396415
uacaauccgguaauuuaag

SEQ ID NO: 396417 - RNA, 19 nt, Artificial Sequence
  Description of Artificial Sequence: Synthetic oligonucleotide
  Sense Strand Starting at position 990 of SEQ ID NO: 317581
uuguaccauccacauugau

SEQ ID NO: 396418 - RNA, 19 nt, Artificial Sequence
  Description of Artificial Sequence: Synthetic oligonucleotide
  Antisense Strand to SEQ ID NO: 396417
aucaauguggaugguacaa

SEQ ID NO: 396419 - RNA, 19 nt, Artificial Sequence
  Description of Artificial Sequence: Synthetic oligonucleotide
  Sense Strand Starting at position 990 of SEQ ID NO: 317629
agcagugugacuuaggcaa

SEQ ID NO: 396420 - RNA, 19 nt, Artificial Sequence
  Description of Artificial Sequence: Synthetic oligonucleotide
  Antisense Strand to SEQ ID NO: 396419
uugccuaagucacacugcu

SEQ ID NO: 396421 - RNA, 19 nt, Artificial Sequence
  Description of Artificial Sequence: Synthetic oligonucleotide
  Sense Strand Starting at position 990 of SEQ ID NO: 317664
aaagaaaugucaggagaca

SEQ ID NO: 396422 - RNA, 19 nt, Artificial Sequence
  Description of Artificial Sequence: Synthetic oligonucleotide
  Antisense Strand to SEQ ID NO: 396421
ugucuccugacauuucuuu

SEQ ID NO: 396423 - RNA, 19 nt, Artificial Sequence
  Description of Artificial Sequence: Synthetic oligonucleotide
  Sense Strand Starting at position 990 of SEQ ID NO: 317794
cacagaguauuaguagaau

SEQ ID NO: 396424 - RNA, 19 nt, Artificial Sequence
  Description of Artificial Sequence: Synthetic oligonucleotide
  Antisense Strand to SEQ ID NO: 396423
auucuacuaauacucugug

SEQ ID NO: 396425 - RNA, 19 nt, Artificial Sequence
  Description of Artificial Sequence: Synthetic oligonucleotide
  Sense Strand Starting at position 990 of SEQ ID NO: 317800
guauuaguagaauaccauu

SEQ ID NO: 396426 - RNA, 19 nt, Artificial Sequence
  Description of Artificial Sequence: Synthetic oligonucleotide
  Antisense Strand to SEQ ID NO: 396425
aaugguauucuacuaauac

SEQ ID NO: 396427 - RNA, 19 nt, Artificial Sequence
  Description of Artificial Sequence: Synthetic oligonucleotide
  Sense Strand Starting at position 990 of SEQ ID NO: 317806
guagaauaccauuggaugu

SEQ ID NO: 396428 - RNA, 19 nt, Artificial Sequence
  Description of Artificial Sequence: Synthetic oligonucleotide
  Antisense Strand to SEQ ID NO: 396427
acauccaaugguauucuac

SEQ ID NO: 396429 - RNA, 19 nt, Artificial Sequence
  Description of Artificial Sequence: Synthetic oligonucleotide
  Sense Strand Starting at position 990 of SEQ ID NO: 317808
agaauaccauuggauguaa

SEQ ID NO: 396430 - RNA, 19 nt, Artificial Sequence
  Description of Artificial Sequence: Synthetic oligonucleotide
  Antisense Strand to SEQ ID NO: 396429
uuacauccaaugguauucu

SEQ ID NO: 396431 - RNA, 19 nt, Artificial Sequence
  Description of Artificial Sequence: Synthetic oligonucleotide
  Sense Strand Starting at position 990 of SEQ ID NO: 317819
ggauguaacuugucacuuu

SEQ ID NO: 396432 - RNA, 19 nt, Artificial Sequence
  Description of Artificial Sequence: Synthetic oligonucleotide
  Antisense Strand to SEQ ID NO: 396431
aaagugacaaguuacaucc

SEQ ID NO: 396433 - RNA, 19 nt, Artificial Sequence
  Description of Artificial Sequence: Synthetic oligonucleotide
  Sense Strand Starting at position 990 of SEQ ID NO: 317822
uguaacuugucacuuugau

SEQ ID NO: 396434 - RNA, 19 nt, Artificial Sequence
  Description of Artificial Sequence: Synthetic oligonucleotide
  Antisense Strand to SEQ ID NO: 396433
aucaaagugacaaguuaca

SEQ ID NO: 396435 - RNA, 19 nt, Artificial Sequence
  Description of Artificial Sequence: Synthetic oligonucleotide
  Sense Strand Starting at position 990 of SEQ ID NO: 317832
cacuuugauugcuuggaga

SEQ ID NO: 396436 - RNA, 19 nt, Artificial Sequence
  Description of Artificial Sequence: Synthetic oligonucleotide
  Antisense Strand to SEQ ID NO: 396435
ucuccaagcaaucaaagug

SEQ ID NO: 396437 - RNA, 19 nt, Artificial Sequence
  Description of Artificial Sequence: Synthetic oligonucleotide
  Sense Strand Starting at position 990 of SEQ ID NO: 317886
acucuuuccuuauugugua

SEQ ID NO: 396438 - RNA, 19 nt, Artificial Sequence
  Description of Artificial Sequence: Synthetic oligonucleotide
  Antisense Strand to SEQ ID NO: 396437
uacacaauaaggaaagagu

SEQ ID NO: 396439 - RNA, 19 nt, Artificial Sequence
  Description of Artificial Sequence: Synthetic oligonucleotide
  Sense Strand Starting at position 990 of SEQ ID NO: 318023
uccucuucuguguauccua

SEQ ID NO: 396440 - RNA, 19 nt, Artificial Sequence
  Description of Artificial Sequence: Synthetic oligonucleotide
  Antisense Strand to SEQ ID NO: 396439
uaggauacacagaagagga

SEQ ID NO: 396441 - RNA, 19 nt, Artificial Sequence
  Description of Artificial Sequence: Synthetic oligonucleotide
  Sense Strand Starting at position 990 of SEQ ID NO: 318030
cuguguauccuaugaguau

SEQ ID NO: 396442 - RNA, 19 nt, Artificial Sequence
  Description of Artificial Sequence: Synthetic oligonucleotide
  Antisense Strand to SEQ ID NO: 396441
auacucauaggauacacag

SEQ ID NO: 396443 - RNA, 19 nt, Artificial Sequence
  Description of Artificial Sequence: Synthetic oligonucleotide
  Sense Strand Starting at position 990 of SEQ ID NO: 318034
guauccuaugaguauucua

SEQ ID NO: 396444 - RNA, 19 nt, Artificial Sequence
  Description of Artificial Sequence: Synthetic oligonucleotide
  Antisense Strand to SEQ ID NO: 396443
uagaauacucauaggauac

SEQ ID NO: 396445 - RNA, 19 nt, Artificial Sequence
  Description of Artificial Sequence: Synthetic oligonucleotide
  Sense Strand Starting at position 990 of SEQ ID NO: 318037
uccuaugaguauucuaugu

SEQ ID NO: 396446 - RNA, 19 nt, Artificial Sequence
  Description of Artificial Sequence: Synthetic oligonucleotide
  Antisense Strand to SEQ ID NO: 396445
acauagaauacucauagga

SEQ ID NO: 396447 - RNA, 19 nt, Artificial Sequence
  Description of Artificial Sequence: Synthetic oligonucleotide
  Sense Strand Starting at position 990 of SEQ ID NO: 318041
augaguauucuauguaguc

SEQ ID NO: 396448 - RNA, 19 nt, Artificial Sequence
  Description of Artificial Sequence: Synthetic oligonucleotide
  Antisense Strand to SEQ ID NO: 396447
gacuacauagaauacucau

SEQ ID NO: 396449 - RNA, 19 nt, Artificial Sequence
  Description of Artificial Sequence: Synthetic oligonucleotide
  Sense Strand Starting at position 990 of SEQ ID NO: 318935
gcaccuugaguacagaaua

SEQ ID NO: 396450 - RNA, 19 nt, Artificial Sequence
  Description of Artificial Sequence: Synthetic oligonucleotide
  Antisense Strand to SEQ ID NO: 396449
uauucuguacucaaggugc

SEQ ID NO: 396451 - RNA, 19 nt, Artificial Sequence
  Description of Artificial Sequence: Synthetic oligonucleotide
  Sense Strand Starting at position 990 of SEQ ID NO: 318992
agguauaguucucucaacu

SEQ ID NO: 396452 - RNA, 19 nt, Artificial Sequence
  Description of Artificial Sequence: Synthetic oligonucleotide
  Antisense Strand to SEQ ID NO: 396451
aguugagagaacuauaccu

SEQ ID NO: 396453 - RNA, 19 nt, Artificial Sequence
  Description of Artificial Sequence: Synthetic oligonucleotide
  Sense Strand Starting at position 990 of SEQ ID NO: 319019
gguaaugugucauuuguac

SEQ ID NO: 396454 - RNA, 19 nt, Artificial Sequence
  Description of Artificial Sequence: Synthetic oligonucleotide
  Antisense Strand to SEQ ID NO: 396453
guacaaaugacacauuacc

SEQ ID NO: 396455 - RNA, 19 nt, Artificial Sequence
  Description of Artificial Sequence: Synthetic oligonucleotide
  Sense Strand Starting at position 990 of SEQ ID NO: 319026
ugucauuuguacugcauuu

SEQ ID NO: 396456 - RNA, 19 nt, Artificial Sequence
  Description of Artificial Sequence: Synthetic oligonucleotide
  Antisense Strand to SEQ ID NO: 396455
aaaugcaguacaaaugaca

SEQ ID NO: 396457 - RNA, 19 nt, Artificial Sequence
  Description of Artificial Sequence: Synthetic oligonucleotide
  Sense Strand Starting at position 990 of SEQ ID NO: 319072
cucccaaccugugcugaaa

SEQ ID NO: 396458 - RNA, 19 nt, Artificial Sequence
  Description of Artificial Sequence: Synthetic oligonucleotide
  Antisense Strand to SEQ ID NO: 396457
uuucagcacagguugggag

SEQ ID NO: 396459 - RNA, 19 nt, Artificial Sequence
  Description of Artificial Sequence: Synthetic oligonucleotide
  Sense Strand Starting at position 990 of SEQ ID NO: 319151
caguaagauugacagauau

SEQ ID NO: 396460 - RNA, 19 nt, Artificial Sequence
  Description of Artificial Sequence: Synthetic oligonucleotide
  Antisense Strand to SEQ ID NO: 396459
auaucugucaaucuuacug

SEQ ID NO: 396461 - RNA, 19 nt, Artificial Sequence
  Description of Artificial Sequence: Synthetic oligonucleotide
  Sense Strand Starting at position 990 of SEQ ID NO: 319199
guuaauaaggcacgugaua

SEQ ID NO: 396462 - RNA, 19 nt, Artificial Sequence
  Description of Artificial Sequence: Synthetic oligonucleotide
  Antisense Strand to SEQ ID NO: 396461
uaucacgugccuuauuaac

SEQ ID NO: 396463 - RNA, 19 nt, Artificial Sequence
  Description of Artificial Sequence: Synthetic oligonucleotide
  Sense Strand Starting at position 991 of SEQ ID NO: 315378
ugaauuguauggucugcga

SEQ ID NO: 396464 - RNA, 19 nt, Artificial Sequence
  Description of Artificial Sequence: Synthetic oligonucleotide
  Antisense Strand to SEQ ID NO: 396463
ucgcagaccauacaauuca

SEQ ID NO: 396465 - RNA, 19 nt, Artificial Sequence
  Description of Artificial Sequence: Synthetic oligonucleotide
  Sense Strand Starting at position 991 of SEQ ID NO: 315391
cugcgagcauuugaauaaa

SEQ ID NO: 396466 - RNA, 19 nt, Artificial Sequence
  Description of Artificial Sequence: Synthetic oligonucleotide
  Antisense Strand to SEQ ID NO: 396465
uuuauucaaaugcucgcag

SEQ ID NO: 396467 - RNA, 19 nt, Artificial Sequence
  Description of Artificial Sequence: Synthetic oligonucleotide
  Sense Strand Starting at position 991 of SEQ ID NO: 315547
aagaccuguccacgagaga

SEQ ID NO: 396468 - RNA, 19 nt, Artificial Sequence
  Description of Artificial Sequence: Synthetic oligonucleotide
  Antisense Strand to SEQ ID NO: 396467
ucucucguggacaggucuu

SEQ ID NO: 396469 - RNA, 19 nt, Artificial Sequence
  Description of Artificial Sequence: Synthetic oligonucleotide
  Sense Strand Starting at position 991 of SEQ ID NO: 316225
gacaaauacuagucggguu

SEQ ID NO: 396470 - RNA, 19 nt, Artificial Sequence
  Description of Artificial Sequence: Synthetic oligonucleotide
  Antisense Strand to SEQ ID NO: 396469
aacccgacuaguauuuguc

SEQ ID NO: 396471 - RNA, 19 nt, Artificial Sequence
  Description of Artificial Sequence: Synthetic oligonucleotide
  Sense Strand Starting at position 991 of SEQ ID NO: 316373
gcuugcacucccugggaua

SEQ ID NO: 396472 - RNA, 19 nt, Artificial Sequence
  Description of Artificial Sequence: Synthetic oligonucleotide
  Antisense Strand to SEQ ID NO: 396471
uaucccagggagugcaagc

SEQ ID NO: 396473 - RNA, 19 nt, Artificial Sequence
  Description of Artificial Sequence: Synthetic oligonucleotide
  Sense Strand Starting at position 991 of SEQ ID NO: 316397
uuugaauuaucguccacag

SEQ ID NO: 396474 - RNA, 19 nt, Artificial Sequence
  Description of Artificial Sequence: Synthetic oligonucleotide
  Antisense Strand to SEQ ID NO: 396473
cuguggacgauaauucaaa

SEQ ID NO: 396475 - RNA, 19 nt, Artificial Sequence
  Description of Artificial Sequence: Synthetic oligonucleotide
  Sense Strand Starting at position 991 of SEQ ID NO: 316399
ugaauuaucguccacaguu

SEQ ID NO: 396476 - RNA, 19 nt, Artificial Sequence
  Description of Artificial Sequence: Synthetic oligonucleotide
  Antisense Strand to SEQ ID NO: 396475
aacuguggacgauaauuca

SEQ ID NO: 396477 - RNA, 19 nt, Artificial Sequence
  Description of Artificial Sequence: Synthetic oligonucleotide
  Sense Strand Starting at position 991 of SEQ ID NO: 316418
ccacguugacgagagaauu

SEQ ID NO: 396478 - RNA, 19 nt, Artificial Sequence
  Description of Artificial Sequence: Synthetic oligonucleotide
  Antisense Strand to SEQ ID NO: 396477
aauucucucgucaacgugg

SEQ ID NO: 396479 - RNA, 19 nt, Artificial Sequence
  Description of Artificial Sequence: Synthetic oligonucleotide
  Sense Strand Starting at position 991 of SEQ ID NO: 316430
gagaauuucuucggguaug

SEQ ID NO: 396480 - RNA, 19 nt, Artificial Sequence
  Description of Artificial Sequence: Synthetic oligonucleotide
  Antisense Strand to SEQ ID NO: 396479
cauacccgaagaaauucuc

SEQ ID NO: 396481 - RNA, 19 nt, Artificial Sequence
  Description of Artificial Sequence: Synthetic oligonucleotide
  Sense Strand Starting at position 991 of SEQ ID NO: 316450
uaccgaguccacgacgaua

SEQ ID NO: 396482 - RNA, 19 nt, Artificial Sequence
  Description of Artificial Sequence: Synthetic oligonucleotide
  Antisense Strand to SEQ ID NO: 396481
uaucgucguggacucggua

SEQ ID NO: 396483 - RNA, 19 nt, Artificial Sequence
  Description of Artificial Sequence: Synthetic oligonucleotide
  Sense Strand Starting at position 991 of SEQ ID NO: 316615
gggauggcgucuuugggua

SEQ ID NO: 396484 - RNA, 19 nt, Artificial Sequence
  Description of Artificial Sequence: Synthetic oligonucleotide
  Antisense Strand to SEQ ID NO: 396483
uacccaaagacgccauccc

SEQ ID NO: 396485 - RNA, 19 nt, Artificial Sequence
  Description of Artificial Sequence: Synthetic oligonucleotide
  Sense Strand Starting at position 991 of SEQ ID NO: 316649
guuaguaaagccgacuaaa

SEQ ID NO: 396486 - RNA, 19 nt, Artificial Sequence
  Description of Artificial Sequence: Synthetic oligonucleotide
  Antisense Strand to SEQ ID NO: 396485
uuuagucggcuuuacuaac

SEQ ID NO: 396487 - RNA, 19 nt, Artificial Sequence
  Description of Artificial Sequence: Synthetic oligonucleotide
  Sense Strand Starting at position 991 of SEQ ID NO: 316738
ucaguauuaugcccagaag

SEQ ID NO: 396488 - RNA, 19 nt, Artificial Sequence
  Description of Artificial Sequence: Synthetic oligonucleotide
  Antisense Strand to SEQ ID NO: 396487
cuucugggcauaauacuga

SEQ ID NO: 396489 - RNA, 19 nt, Artificial Sequence
  Description of Artificial Sequence: Synthetic oligonucleotide
  Sense Strand Starting at position 991 of SEQ ID NO: 316741
guauuaugcccagaagcgu

SEQ ID NO: 396490 - RNA, 19 nt, Artificial Sequence
  Description of Artificial Sequence: Synthetic oligonucleotide
  Antisense Strand to SEQ ID NO: 396489
acgcuucugggcauaauac

SEQ ID NO: 396491 - RNA, 19 nt, Artificial Sequence
  Description of Artificial Sequence: Synthetic oligonucleotide
  Sense Strand Starting at position 991 of SEQ ID NO: 316747
ugcccagaagcguaucaga

SEQ ID NO: 396492 - RNA, 19 nt, Artificial Sequence
  Description of Artificial Sequence: Synthetic oligonucleotide
  Antisense Strand to SEQ ID NO: 396491
ucugauacgcuucugggca

SEQ ID NO: 396493 - RNA, 19 nt, Artificial Sequence
  Description of Artificial Sequence: Synthetic oligonucleotide
  Sense Strand Starting at position 991 of SEQ ID NO: 316757
cguaucagaauucggagaa

SEQ ID NO: 396494 - RNA, 19 nt, Artificial Sequence
  Description of Artificial Sequence: Synthetic oligonucleotide
  Antisense Strand to SEQ ID NO: 396493
uucuccgaauucugauacg

SEQ ID NO: 396495 - RNA, 19 nt, Artificial Sequence
  Description of Artificial Sequence: Synthetic oligonucleotide
  Sense Strand Starting at position 991 of SEQ ID NO: 317408
gccugaccuuucccugaga

SEQ ID NO: 396496 - RNA, 19 nt, Artificial Sequence
  Description of Artificial Sequence: Synthetic oligonucleotide
  Antisense Strand to SEQ ID NO: 396495
ucucagggaaaggucaggc

SEQ ID NO: 396497 - RNA, 19 nt, Artificial Sequence
  Description of Artificial Sequence: Synthetic oligonucleotide
  Sense Strand Starting at position 991 of SEQ ID NO: 317409
ccugaccuuucccugagau

SEQ ID NO: 396498 - RNA, 19 nt, Artificial Sequence
  Description of Artificial Sequence: Synthetic oligonucleotide
  Antisense Strand to SEQ ID NO: 396497
aucucagggaaaggucagg

SEQ ID NO: 396499 - RNA, 19 nt, Artificial Sequence
  Description of Artificial Sequence: Synthetic oligonucleotide
  Sense Strand Starting at position 991 of SEQ ID NO: 317410
cugaccuuucccugagauu

SEQ ID NO: 396500 - RNA, 19 nt, Artificial Sequence
  Description of Artificial Sequence: Synthetic oligonucleotide
  Antisense Strand to SEQ ID NO: 396499
aaucucagggaaaggucag

SEQ ID NO: 396501 - RNA, 19 nt, Artificial Sequence
  Description of Artificial Sequence: Synthetic oligonucleotide
  Sense Strand Starting at position 991 of SEQ ID NO: 317424
agauuucugcgaggccuca

SEQ ID NO: 396502 - RNA, 19 nt, Artificial Sequence
  Description of Artificial Sequence: Synthetic oligonucleotide
  Antisense Strand to SEQ ID NO: 396501
ugaggccucgcagaaaucu

SEQ ID NO: 396503 - RNA, 19 nt, Artificial Sequence
  Description of Artificial Sequence: Synthetic oligonucleotide
  Sense Strand Starting at position 991 of SEQ ID NO: 317457
cuugguuucuggguagaaa

SEQ ID NO: 396504 - RNA, 19 nt, Artificial Sequence
  Description of Artificial Sequence: Synthetic oligonucleotide
  Antisense Strand to SEQ ID NO: 396503
uuucuacccagaaaccaag

SEQ ID NO: 396505 - RNA, 19 nt, Artificial Sequence
  Description of Artificial Sequence: Synthetic oligonucleotide
  Sense Strand Starting at position 991 of SEQ ID NO: 317907
gggucuagagcuugcaacu

SEQ ID NO: 396506 - RNA, 19 nt, Artificial Sequence
  Description of Artificial Sequence: Synthetic oligonucleotide
  Antisense Strand to SEQ ID NO: 396505
aguugcaagcucuagaccc

SEQ ID NO: 396507 - RNA, 19 nt, Artificial Sequence
  Description of Artificial Sequence: Synthetic oligonucleotide
  Sense Strand Starting at position 991 of SEQ ID NO: 317957
gggaaucaaucagugugaa

SEQ ID NO: 396508 - RNA, 19 nt, Artificial Sequence
  Description of Artificial Sequence: Synthetic oligonucleotide
  Antisense Strand to SEQ ID NO: 396507
uucacacugauugauuccc

SEQ ID NO: 396509 - RNA, 19 nt, Artificial Sequence
  Description of Artificial Sequence: Synthetic oligonucleotide
  Sense Strand Starting at position 991 of SEQ ID NO: 317958
ggaaucaaucagugugaag

SEQ ID NO: 396510 - RNA, 19 nt, Artificial Sequence
  Description of Artificial Sequence: Synthetic oligonucleotide
  Antisense Strand to SEQ ID NO: 396509
cuucacacugauugauucc

SEQ ID NO: 396511 - RNA, 19 nt, Artificial Sequence
  Description of Artificial Sequence: Synthetic oligonucleotide
  Sense Strand Starting at position 991 of SEQ ID NO: 317960
aaucaaucagugugaagga

SEQ ID NO: 396512 - RNA, 19 nt, Artificial Sequence
  Description of Artificial Sequence: Synthetic oligonucleotide
  Antisense Strand to SEQ ID NO: 396511
uccuucacacugauugauu

SEQ ID NO: 396513 - RNA, 19 nt, Artificial Sequence
  Description of Artificial Sequence: Synthetic oligonucleotide
  Sense Strand Starting at position 991 of SEQ ID NO: 317989
aaaucacugugcgugaaag

SEQ ID NO: 396514 - RNA, 19 nt, Artificial Sequence
  Description of Artificial Sequence: Synthetic oligonucleotide
  Antisense Strand to SEQ ID NO: 396513
cuuucacgcacagugauuu

SEQ ID NO: 396515 - RNA, 19 nt, Artificial Sequence
  Description of Artificial Sequence: Synthetic oligonucleotide
  Sense Strand Starting at position 991 of SEQ ID NO: 318060
ugguuuccagguugagaac

SEQ ID NO: 396516 - RNA, 19 nt, Artificial Sequence
  Description of Artificial Sequence: Synthetic oligonucleotide
  Antisense Strand to SEQ ID NO: 396515
guucucaaccuggaaacca

SEQ ID NO: 396517 - RNA, 19 nt, Artificial Sequence
  Description of Artificial Sequence: Synthetic oligonucleotide
  Sense Strand Starting at position 991 of SEQ ID NO: 318087
gacaucggucguugguaga

SEQ ID NO: 396518 - RNA, 19 nt, Artificial Sequence
  Description of Artificial Sequence: Synthetic oligonucleotide
  Antisense Strand to SEQ ID NO: 396517
ucuaccaacgaccgauguc

SEQ ID NO: 396519 - RNA, 19 nt, Artificial Sequence
  Description of Artificial Sequence: Synthetic oligonucleotide
  Sense Strand Starting at position 991 of SEQ ID NO: 318100
gguagaagucuuugggaac

SEQ ID NO: 396520 - RNA, 19 nt, Artificial Sequence
  Description of Artificial Sequence: Synthetic oligonucleotide
  Antisense Strand to SEQ ID NO: 396519
guucccaaagacuucuacc

SEQ ID NO: 396521 - RNA, 19 nt, Artificial Sequence
  Description of Artificial Sequence: Synthetic oligonucleotide
  Sense Strand Starting at position 991 of SEQ ID NO: 318143
accuguuauugucugugau

SEQ ID NO: 396522 - RNA, 19 nt, Artificial Sequence
  Description of Artificial Sequence: Synthetic oligonucleotide
  Antisense Strand to SEQ ID NO: 396521
aucacagacaauaacaggu

SEQ ID NO: 396523 - RNA, 19 nt, Artificial Sequence
  Description of Artificial Sequence: Synthetic oligonucleotide
  Sense Strand Starting at position 991 of SEQ ID NO: 318144
ccuguuauugucugugaua

SEQ ID NO: 396524 - RNA, 19 nt, Artificial Sequence
  Description of Artificial Sequence: Synthetic oligonucleotide
  Antisense Strand to SEQ ID NO: 396523
uaucacagacaauaacagg

SEQ ID NO: 396525 - RNA, 19 nt, Artificial Sequence
  Description of Artificial Sequence: Synthetic oligonucleotide
  Sense Strand Starting at position 991 of SEQ ID NO: 318145
cuguuauugucugugauag

SEQ ID NO: 396526 - RNA, 19 nt, Artificial Sequence
  Description of Artificial Sequence: Synthetic oligonucleotide
  Antisense Strand to SEQ ID NO: 396525
cuaucacagacaauaacag

SEQ ID NO: 396527 - RNA, 19 nt, Artificial Sequence
  Description of Artificial Sequence: Synthetic oligonucleotide
  Sense Strand Starting at position 991 of SEQ ID NO: 318279
aaauuaacucggugugcug

SEQ ID NO: 396528 - RNA, 19 nt, Artificial Sequence
  Description of Artificial Sequence: Synthetic oligonucleotide
  Antisense Strand to SEQ ID NO: 396527
cagcacaccgaguuaauuu

SEQ ID NO: 396529 - RNA, 19 nt, Artificial Sequence
  Description of Artificial Sequence: Synthetic oligonucleotide
  Sense Strand Starting at position 991 of SEQ ID NO: 318455
cugggacugucaucugguu

SEQ ID NO: 396530 - RNA, 19 nt, Artificial Sequence
  Description of Artificial Sequence: Synthetic oligonucleotide
  Antisense Strand to SEQ ID NO: 396529
aaccagaugacagucccag

SEQ ID NO: 396531 - RNA, 19 nt, Artificial Sequence
  Description of Artificial Sequence: Synthetic oligonucleotide
  Sense Strand Starting at position 991 of SEQ ID NO: 318457
gggacugucaucugguugu

SEQ ID NO: 396532 - RNA, 19 nt, Artificial Sequence
  Description of Artificial Sequence: Synthetic oligonucleotide
  Antisense Strand to SEQ ID NO: 396531
acaaccagaugacaguccc

SEQ ID NO: 396533 - RNA, 19 nt, Artificial Sequence
  Description of Artificial Sequence: Synthetic oligonucleotide
  Sense Strand Starting at position 991 of SEQ ID NO: 318460
acugucaucugguugucua

SEQ ID NO: 396534 - RNA, 19 nt, Artificial Sequence
  Description of Artificial Sequence: Synthetic oligonucleotide
  Antisense Strand to SEQ ID NO: 396533
uagacaaccagaugacagu

SEQ ID NO: 396535 - RNA, 19 nt, Artificial Sequence
  Description of Artificial Sequence: Synthetic oligonucleotide
  Sense Strand Starting at position 991 of SEQ ID NO: 318470
gguugucuacaguaacagu

SEQ ID NO: 396536 - RNA, 19 nt, Artificial Sequence
  Description of Artificial Sequence: Synthetic oligonucleotide
  Antisense Strand to SEQ ID NO: 396535
acuguuacuguagacaacc

SEQ ID NO: 396537 - RNA, 19 nt, Artificial Sequence
  Description of Artificial Sequence: Synthetic oligonucleotide
  Sense Strand Starting at position 991 of SEQ ID NO: 318486
aguaccuuagcuuggaauu

SEQ ID NO: 396538 - RNA, 19 nt, Artificial Sequence
  Description of Artificial Sequence: Synthetic oligonucleotide
  Antisense Strand to SEQ ID NO: 396537
aauuccaagcuaagguacu

SEQ ID NO: 396539 - RNA, 19 nt, Artificial Sequence
  Description of Artificial Sequence: Synthetic oligonucleotide
  Sense Strand Starting at position 991 of SEQ ID NO: 318539
ugagauggcuccucauucu

SEQ ID NO: 396540 - RNA, 19 nt, Artificial Sequence
  Description of Artificial Sequence: Synthetic oligonucleotide
  Antisense Strand to SEQ ID NO: 396539
agaaugaggagccaucuca

SEQ ID NO: 396541 - RNA, 19 nt, Artificial Sequence
  Description of Artificial Sequence: Synthetic oligonucleotide
  Sense Strand Starting at position 991 of SEQ ID NO: 318680
uaccacgugcauuguaaua

SEQ ID NO: 396542 - RNA, 19 nt, Artificial Sequence
  Description of Artificial Sequence: Synthetic oligonucleotide
  Antisense Strand to SEQ ID NO: 396541
uauuacaaugcacguggua

SEQ ID NO: 396543 - RNA, 19 nt, Artificial Sequence
  Description of Artificial Sequence: Synthetic oligonucleotide
  Sense Strand Starting at position 992 of SEQ ID NO: 315246
uagcgaaacuugucuuaaa

SEQ ID NO: 396544 - RNA, 19 nt, Artificial Sequence
  Description of Artificial Sequence: Synthetic oligonucleotide
  Antisense Strand to SEQ ID NO: 396543
uuuaagacaaguuucgcua

SEQ ID NO: 396545 - RNA, 19 nt, Artificial Sequence
  Description of Artificial Sequence: Synthetic oligonucleotide
  Sense Strand Starting at position 992 of SEQ ID NO: 315275
aagagucuccuggaucagu

SEQ ID NO: 396546 - RNA, 19 nt, Artificial Sequence
  Description of Artificial Sequence: Synthetic oligonucleotide
  Antisense Strand to SEQ ID NO: 396545
acugauccaggagacucuu

SEQ ID NO: 396547 - RNA, 19 nt, Artificial Sequence
  Description of Artificial Sequence: Synthetic oligonucleotide
  Sense Strand Starting at position 992 of SEQ ID NO: 315278
agucuccuggaucaguuaa

SEQ ID NO: 396548 - RNA, 19 nt, Artificial Sequence
  Description of Artificial Sequence: Synthetic oligonucleotide
  Antisense Strand to SEQ ID NO: 396547
uuaacugauccaggagacu

SEQ ID NO: 396549 - RNA, 19 nt, Artificial Sequence
  Description of Artificial Sequence: Synthetic oligonucleotide
  Sense Strand Starting at position 992 of SEQ ID NO: 315654
gugggucaugucuaauauc

SEQ ID NO: 396550 - RNA, 19 nt, Artificial Sequence
  Description of Artificial Sequence: Synthetic oligonucleotide
  Antisense Strand to SEQ ID NO: 396549
gauauuagacaugacccac

SEQ ID NO: 396551 - RNA, 19 nt, Artificial Sequence
  Description of Artificial Sequence: Synthetic oligonucleotide
  Sense Strand Starting at position 992 of SEQ ID NO: 315663
gucuaauaucaaggucuuu

SEQ ID NO: 396552 - RNA, 19 nt, Artificial Sequence
  Description of Artificial Sequence: Synthetic oligonucleotide
  Antisense Strand to SEQ ID NO: 396551
aaagaccuugauauuagac

SEQ ID NO: 396553 - RNA, 19 nt, Artificial Sequence
  Description of Artificial Sequence: Synthetic oligonucleotide
  Sense Strand Starting at position 992 of SEQ ID NO: 315705
ugaauccaauuguuguaaa

SEQ ID NO: 396554 - RNA, 19 nt, Artificial Sequence
  Description of Artificial Sequence: Synthetic oligonucleotide
  Antisense Strand to SEQ ID NO: 396553
uuuacaacaauuggauuca

SEQ ID NO: 396555 - RNA, 19 nt, Artificial Sequence
  Description of Artificial Sequence: Synthetic oligonucleotide
  Sense Strand Starting at position 992 of SEQ ID NO: 315762
gagcauaaacugcgaaauc

SEQ ID NO: 396556 - RNA, 19 nt, Artificial Sequence
  Description of Artificial Sequence: Synthetic oligonucleotide
  Antisense Strand to SEQ ID NO: 396555
gauuucgcaguuuaugcuc

SEQ ID NO: 396557 - RNA, 19 nt, Artificial Sequence
  Description of Artificial Sequence: Synthetic oligonucleotide
  Sense Strand Starting at position 992 of SEQ ID NO: 315773
gcgaaaucucuugauucug

SEQ ID NO: 396558 - RNA, 19 nt, Artificial Sequence
  Description of Artificial Sequence: Synthetic oligonucleotide
  Antisense Strand to SEQ ID NO: 396557
cagaaucaagagauuucgc

SEQ ID NO: 396559 - RNA, 19 nt, Artificial Sequence
  Description of Artificial Sequence: Synthetic oligonucleotide
  Sense Strand Starting at position 992 of SEQ ID NO: 315775
gaaaucucuugauucuggu

SEQ ID NO: 396560 - RNA, 19 nt, Artificial Sequence
  Description of Artificial Sequence: Synthetic oligonucleotide
  Antisense Strand to SEQ ID NO: 396559
accagaaucaagagauuuc

SEQ ID NO: 396561 - RNA, 19 nt, Artificial Sequence
  Description of Artificial Sequence: Synthetic oligonucleotide
  Sense Strand Starting at position 992 of SEQ ID NO: 315784
ugauucugguauguuuaca

SEQ ID NO: 396562 - RNA, 19 nt, Artificial Sequence
  Description of Artificial Sequence: Synthetic oligonucleotide
  Antisense Strand to SEQ ID NO: 396561
uguaaacauaccagaauca

SEQ ID NO: 396563 - RNA, 19 nt, Artificial Sequence
  Description of Artificial Sequence: Synthetic oligonucleotide
  Sense Strand Starting at position 992 of SEQ ID NO: 316009
uggucugaguucuuagaac

SEQ ID NO: 396564 - RNA, 19 nt, Artificial Sequence
  Description of Artificial Sequence: Synthetic oligonucleotide
  Antisense Strand to SEQ ID NO: 396563
guucuaagaacucagacca

SEQ ID NO: 396565 - RNA, 19 nt, Artificial Sequence
  Description of Artificial Sequence: Synthetic oligonucleotide
  Sense Strand Starting at position 992 of SEQ ID NO: 316044
agauuaagcuguucugaaa

SEQ ID NO: 396566 - RNA, 19 nt, Artificial Sequence
  Description of Artificial Sequence: Synthetic oligonucleotide
  Antisense Strand to SEQ ID NO: 396565
uuucagaacagcuuaaucu

SEQ ID NO: 396567 - RNA, 19 nt, Artificial Sequence
  Description of Artificial Sequence: Synthetic oligonucleotide
  Sense Strand Starting at position 992 of SEQ ID NO: 316110
acauauuuguaagaggguu

SEQ ID NO: 396568 - RNA, 19 nt, Artificial Sequence
  Description of Artificial Sequence: Synthetic oligonucleotide
  Antisense Strand to SEQ ID NO: 396567
aacccucuuacaaauaugu

SEQ ID NO: 396569 - RNA, 19 nt, Artificial Sequence
  Description of Artificial Sequence: Synthetic oligonucleotide
  Sense Strand Starting at position 992 of SEQ ID NO: 316118
guaagaggguucuccacaa

SEQ ID NO: 396570 - RNA, 19 nt, Artificial Sequence
  Description of Artificial Sequence: Synthetic oligonucleotide
  Antisense Strand to SEQ ID NO: 396569
uuguggagaacccucuuac

SEQ ID NO: 396571 - RNA, 19 nt, Artificial Sequence
  Description of Artificial Sequence: Synthetic oligonucleotide
  Sense Strand Starting at position 992 of SEQ ID NO: 316156
acaguaucuucuccaggaa

SEQ ID NO: 396572 - RNA, 19 nt, Artificial Sequence
  Description of Artificial Sequence: Synthetic oligonucleotide
  Antisense Strand to SEQ ID NO: 396571
uuccuggagaagauacugu

SEQ ID NO: 396573 - RNA, 19 nt, Artificial Sequence
  Description of Artificial Sequence: Synthetic oligonucleotide
  Sense Strand Starting at position 992 of SEQ ID NO: 316159
guaucuucuccaggaaaug

SEQ ID NO: 396574 - RNA, 19 nt, Artificial Sequence
  Description of Artificial Sequence: Synthetic oligonucleotide
  Antisense Strand to SEQ ID NO: 396573
cauuuccuggagaagauac

SEQ ID NO: 396575 - RNA, 19 nt, Artificial Sequence
  Description of Artificial Sequence: Synthetic oligonucleotide
  Sense Strand Starting at position 992 of SEQ ID NO: 316466
gguggugaccaagacuauu

SEQ ID NO: 396576 - RNA, 19 nt, Artificial Sequence
  Description of Artificial Sequence: Synthetic oligonucleotide
  Antisense Strand to SEQ ID NO: 396575
aauagucuuggucaccacc

SEQ ID NO: 396577 - RNA, 19 nt, Artificial Sequence
  Description of Artificial Sequence: Synthetic oligonucleotide
  Sense Strand Starting at position 992 of SEQ ID NO: 317407
acagauugugcagggauau

SEQ ID NO: 396578 - RNA, 19 nt, Artificial Sequence
  Description of Artificial Sequence: Synthetic oligonucleotide
  Antisense Strand to SEQ ID NO: 396577
auaucccugcacaaucugu

SEQ ID NO: 396579 - RNA, 19 nt, Artificial Sequence
  Description of Artificial Sequence: Synthetic oligonucleotide
  Sense Strand Starting at position 992 of SEQ ID NO: 317536
uguugcuaucaccacauua

SEQ ID NO: 396580 - RNA, 19 nt, Artificial Sequence
  Description of Artificial Sequence: Synthetic oligonucleotide
  Antisense Strand to SEQ ID NO: 396579
uaauguggugauagcaaca

SEQ ID NO: 396581 - RNA, 19 nt, Artificial Sequence
  Description of Artificial Sequence: Synthetic oligonucleotide
  Sense Strand Starting at position 992 of SEQ ID NO: 317589
gcacaauuauuuguugagu

SEQ ID NO: 396582 - RNA, 19 nt, Artificial Sequence
  Description of Artificial Sequence: Synthetic oligonucleotide
  Antisense Strand to SEQ ID NO: 396581
acucaacaaauaauugugc

SEQ ID NO: 396583 - RNA, 19 nt, Artificial Sequence
  Description of Artificial Sequence: Synthetic oligonucleotide
  Sense Strand Starting at position 992 of SEQ ID NO: 317717
uuauguaggaaauguguaa

SEQ ID NO: 396584 - RNA, 19 nt, Artificial Sequence
  Description of Artificial Sequence: Synthetic oligonucleotide
  Antisense Strand to SEQ ID NO: 396583
uuacacauuuccuacauaa

SEQ ID NO: 396585 - RNA, 19 nt, Artificial Sequence
  Description of Artificial Sequence: Synthetic oligonucleotide
  Sense Strand Starting at position 992 of SEQ ID NO: 317851
agagauuaauguuugcuuu

SEQ ID NO: 396586 - RNA, 19 nt, Artificial Sequence
  Description of Artificial Sequence: Synthetic oligonucleotide
  Antisense Strand to SEQ ID NO: 396585
aaagcaaacauuaaucucu

SEQ ID NO: 396587 - RNA, 19 nt, Artificial Sequence
  Description of Artificial Sequence: Synthetic oligonucleotide
  Sense Strand Starting at position 992 of SEQ ID NO: 317914
guaguaaccucauuacagg

SEQ ID NO: 396588 - RNA, 19 nt, Artificial Sequence
  Description of Artificial Sequence: Synthetic oligonucleotide
  Antisense Strand to SEQ ID NO: 396587
ccuguaaugagguuacuac

SEQ ID NO: 396589 - RNA, 19 nt, Artificial Sequence
  Description of Artificial Sequence: Synthetic oligonucleotide
  Sense Strand Starting at position 992 of SEQ ID NO: 317922
cucauuacagguuaucauu

SEQ ID NO: 396590 - RNA, 19 nt, Artificial Sequence
  Description of Artificial Sequence: Synthetic oligonucleotide
  Antisense Strand to SEQ ID NO: 396589
aaugauaaccuguaaugag

SEQ ID NO: 396591 - RNA, 19 nt, Artificial Sequence
  Description of Artificial Sequence: Synthetic oligonucleotide
  Sense Strand Starting at position 992 of SEQ ID NO: 318022
cucuaaauauuguuaggca

SEQ ID NO: 396592 - RNA, 19 nt, Artificial Sequence
  Description of Artificial Sequence: Synthetic oligonucleotide
  Antisense Strand to SEQ ID NO: 396591
ugccuaacaauauuuagag

SEQ ID NO: 396593 - RNA, 19 nt, Artificial Sequence
  Description of Artificial Sequence: Synthetic oligonucleotide
  Sense Strand Starting at position 992 of SEQ ID NO: 318168
caguacauuugagcuaguu

SEQ ID NO: 396594 - RNA, 19 nt, Artificial Sequence
  Description of Artificial Sequence: Synthetic oligonucleotide
  Antisense Strand to SEQ ID NO: 396593
aacuagcucaaauguacug

SEQ ID NO: 396595 - RNA, 19 nt, Artificial Sequence
  Description of Artificial Sequence: Synthetic oligonucleotide
  Sense Strand Starting at position 992 of SEQ ID NO: 318242
agaucacaucguuauuaua

SEQ ID NO: 396596 - RNA, 19 nt, Artificial Sequence
  Description of Artificial Sequence: Synthetic oligonucleotide
  Antisense Strand to SEQ ID NO: 396595
uauaauaacgaugugaucu

SEQ ID NO: 396597 - RNA, 19 nt, Artificial Sequence
  Description of Artificial Sequence: Synthetic oligonucleotide
  Sense Strand Starting at position 992 of SEQ ID NO: 318287
ucacauguguuuccaagaa

SEQ ID NO: 396598 - RNA, 19 nt, Artificial Sequence
  Description of Artificial Sequence: Synthetic oligonucleotide
  Antisense Strand to SEQ ID NO: 396597
uucuuggaaacacauguga

SEQ ID NO: 396599 - RNA, 19 nt, Artificial Sequence
  Description of Artificial Sequence: Synthetic oligonucleotide
  Sense Strand Starting at position 992 of SEQ ID NO: 318544
gaugcaaaugcguauuugu

SEQ ID NO: 396600 - RNA, 19 nt, Artificial Sequence
  Description of Artificial Sequence: Synthetic oligonucleotide
  Antisense Strand to SEQ ID NO: 396599
acaaauacgcauuugcauc

SEQ ID NO: 396601 - RNA, 19 nt, Artificial Sequence
  Description of Artificial Sequence: Synthetic oligonucleotide
  Sense Strand Starting at position 992 of SEQ ID NO: 318547
gcaaaugcguauuuguuga

SEQ ID NO: 396602 - RNA, 19 nt, Artificial Sequence
  Description of Artificial Sequence: Synthetic oligonucleotide
  Antisense Strand to SEQ ID NO: 396601
ucaacaaauacgcauuugc

SEQ ID NO: 396603 - RNA, 19 nt, Artificial Sequence
  Description of Artificial Sequence: Synthetic oligonucleotide
  Sense Strand Starting at position 992 of SEQ ID NO: 318552
ugcguauuuguugaguggu

SEQ ID NO: 396604 - RNA, 19 nt, Artificial Sequence
  Description of Artificial Sequence: Synthetic oligonucleotide
  Antisense Strand to SEQ ID NO: 396603
accacucaacaaauacgca

SEQ ID NO: 396605 - RNA, 19 nt, Artificial Sequence
  Description of Artificial Sequence: Synthetic oligonucleotide
  Sense Strand Starting at position 992 of SEQ ID NO: 318721
ucaugagagaggugaaguu

SEQ ID NO: 396606 - RNA, 19 nt, Artificial Sequence
  Description of Artificial Sequence: Synthetic oligonucleotide
  Antisense Strand to SEQ ID NO: 396605
aacuucaccucucucauga

SEQ ID NO: 396607 - RNA, 19 nt, Artificial Sequence
  Description of Artificial Sequence: Synthetic oligonucleotide
  Sense Strand Starting at position 992 of SEQ ID NO: 318918
ccacacaucugccuagaga

SEQ ID NO: 396608 - RNA, 19 nt, Artificial Sequence
  Description of Artificial Sequence: Synthetic oligonucleotide
  Antisense Strand to SEQ ID NO: 396607
ucucuaggcagaugugugg

SEQ ID NO: 396609 - RNA, 19 nt, Artificial Sequence
  Description of Artificial Sequence: Synthetic oligonucleotide
  Sense Strand Starting at position 992 of SEQ ID NO: 318929
ccuagagauggcuguaaau

SEQ ID NO: 396610 - RNA, 19 nt, Artificial Sequence
  Description of Artificial Sequence: Synthetic oligonucleotide
  Antisense Strand to SEQ ID NO: 396609
auuuacagccaucucuagg

SEQ ID NO: 396611 - RNA, 19 nt, Artificial Sequence
  Description of Artificial Sequence: Synthetic oligonucleotide
  Sense Strand Starting at position 992 of SEQ ID NO: 319006
uggugagaaguuugaaagu

SEQ ID NO: 396612 - RNA, 19 nt, Artificial Sequence
  Description of Artificial Sequence: Synthetic oligonucleotide
  Antisense Strand to SEQ ID NO: 396611
acuuucaaacuucucacca

SEQ ID NO: 396613 - RNA, 19 nt, Artificial Sequence
  Description of Artificial Sequence: Synthetic oligonucleotide
  Sense Strand Starting at position 992 of SEQ ID NO: 319054
aaugguuucgcuggaggaa

SEQ ID NO: 396614 - RNA, 19 nt, Artificial Sequence
  Description of Artificial Sequence: Synthetic oligonucleotide
  Antisense Strand to SEQ ID NO: 396613
uuccuccagcgaaaccauu

SEQ ID NO: 396615 - RNA, 19 nt, Artificial Sequence
  Description of Artificial Sequence: Synthetic oligonucleotide
  Sense Strand Starting at position 992 of SEQ ID NO: 319055
augguuucgcuggaggaau

SEQ ID NO: 396616 - RNA, 19 nt, Artificial Sequence
  Description of Artificial Sequence: Synthetic oligonucleotide
  Antisense Strand to SEQ ID NO: 396615
auuccuccagcgaaaccau

SEQ ID NO: 396617 - RNA, 19 nt, Artificial Sequence
  Description of Artificial Sequence: Synthetic oligonucleotide
  Sense Strand Starting at position 992 of SEQ ID NO: 319084
cuugcugaggcaugaaauc

SEQ ID NO: 396618 - RNA, 19 nt, Artificial Sequence
  Description of Artificial Sequence: Synthetic oligonucleotide
  Antisense Strand to SEQ ID NO: 396617
gauuucaugccucagcaag

SEQ ID NO: 396619 - RNA, 19 nt, Artificial Sequence
  Description of Artificial Sequence: Synthetic oligonucleotide
  Sense Strand Starting at position 992 of SEQ ID NO: 319110
aggugucugcugcaaugaa

SEQ ID NO: 396620 - RNA, 19 nt, Artificial Sequence
  Description of Artificial Sequence: Synthetic oligonucleotide
  Antisense Strand to SEQ ID NO: 396619
uucauugcagcagacaccu

SEQ ID NO: 396621 - RNA, 19 nt, Artificial Sequence
  Description of Artificial Sequence: Synthetic oligonucleotide
  Sense Strand Starting at position 992 of SEQ ID NO: 319208
acugcaugucaggagaacu

SEQ ID NO: 396622 - RNA, 19 nt, Artificial Sequence
  Description of Artificial Sequence: Synthetic oligonucleotide
  Antisense Strand to SEQ ID NO: 396621
aguucuccugacaugcagu

SEQ ID NO: 396623 - RNA, 19 nt, Artificial Sequence
  Description of Artificial Sequence: Synthetic oligonucleotide
  Sense Strand Starting at position 993 of SEQ ID NO: 315280
ugaaaucggauccgugauu

SEQ ID NO: 396624 - RNA, 19 nt, Artificial Sequence
  Description of Artificial Sequence: Synthetic oligonucleotide
  Antisense Strand to SEQ ID NO: 396623
aaucacggauccgauuuca

SEQ ID NO: 396625 - RNA, 19 nt, Artificial Sequence
  Description of Artificial Sequence: Synthetic oligonucleotide
  Sense Strand Starting at position 993 of SEQ ID NO: 315285
ucggauccgugauugaaac

SEQ ID NO: 396626 - RNA, 19 nt, Artificial Sequence
  Description of Artificial Sequence: Synthetic oligonucleotide
  Antisense Strand to SEQ ID NO: 396625
guuucaaucacggauccga

SEQ ID NO: 396627 - RNA, 19 nt, Artificial Sequence
  Description of Artificial Sequence: Synthetic oligonucleotide
  Sense Strand Starting at position 993 of SEQ ID NO: 315332
aguugagucguggcucagu

SEQ ID NO: 396628 - RNA, 19 nt, Artificial Sequence
  Description of Artificial Sequence: Synthetic oligonucleotide
  Antisense Strand to SEQ ID NO: 396627
acugagccacgacucaacu

SEQ ID NO: 396629 - RNA, 19 nt, Artificial Sequence
  Description of Artificial Sequence: Synthetic oligonucleotide
  Sense Strand Starting at position 993 of SEQ ID NO: 315366
aaguuuccuagggagugua

SEQ ID NO: 396630 - RNA, 19 nt, Artificial Sequence
  Description of Artificial Sequence: Synthetic oligonucleotide
  Antisense Strand to SEQ ID NO: 396629
uacacucccuaggaaacuu

SEQ ID NO: 396631 - RNA, 19 nt, Artificial Sequence
  Description of Artificial Sequence: Synthetic oligonucleotide
  Sense Strand Starting at position 993 of SEQ ID NO: 315414
guguacucuuaugucagaa

SEQ ID NO: 396632 - RNA, 19 nt, Artificial Sequence
  Description of Artificial Sequence: Synthetic oligonucleotide
  Antisense Strand to SEQ ID NO: 396631
uucugacauaagaguacac

SEQ ID NO: 396633 - RNA, 19 nt, Artificial Sequence
  Description of Artificial Sequence: Synthetic oligonucleotide
  Sense Strand Starting at position 993 of SEQ ID NO: 315515
uucuuucgccaaugagaau

SEQ ID NO: 396634 - RNA, 19 nt, Artificial Sequence
  Description of Artificial Sequence: Synthetic oligonucleotide
  Antisense Strand to SEQ ID NO: 396633
auucucauuggcgaaagaa

SEQ ID NO: 396635 - RNA, 19 nt, Artificial Sequence
  Description of Artificial Sequence: Synthetic oligonucleotide
  Sense Strand Starting at position 993 of SEQ ID NO: 315614
cuaccuuaagaaggaguua

SEQ ID NO: 396636 - RNA, 19 nt, Artificial Sequence
  Description of Artificial Sequence: Synthetic oligonucleotide
  Antisense Strand to SEQ ID NO: 396635
uaacuccuucuuaagguag

SEQ ID NO: 396637 - RNA, 19 nt, Artificial Sequence
  Description of Artificial Sequence: Synthetic oligonucleotide
  Sense Strand Starting at position 993 of SEQ ID NO: 315625
aggaguuauuucgugaagc

SEQ ID NO: 396638 - RNA, 19 nt, Artificial Sequence
  Description of Artificial Sequence: Synthetic oligonucleotide
  Antisense Strand to SEQ ID NO: 396637
gcuucacgaaauaacuccu

SEQ ID NO: 396639 - RNA, 19 nt, Artificial Sequence
  Description of Artificial Sequence: Synthetic oligonucleotide
  Sense Strand Starting at position 993 of SEQ ID NO: 315627
gaguuauuucgugaagcuu

SEQ ID NO: 396640 - RNA, 19 nt, Artificial Sequence
  Description of Artificial Sequence: Synthetic oligonucleotide
  Antisense Strand to SEQ ID NO: 396639
aagcuucacgaaauaacuc

SEQ ID NO: 396641 - RNA, 19 nt, Artificial Sequence
  Description of Artificial Sequence: Synthetic oligonucleotide
  Sense Strand Starting at position 993 of SEQ ID NO: 315939
ggccgagaucugcaaagag

SEQ ID NO: 396642 - RNA, 19 nt, Artificial Sequence
  Description of Artificial Sequence: Synthetic oligonucleotide
  Antisense Strand to SEQ ID NO: 396641
cucuuugcagaucucggcc

SEQ ID NO: 396643 - RNA, 19 nt, Artificial Sequence
  Description of Artificial Sequence: Synthetic oligonucleotide
  Sense Strand Starting at position 993 of SEQ ID NO: 316100
auacacuucuggguuugau

SEQ ID NO: 396644 - RNA, 19 nt, Artificial Sequence
  Description of Artificial Sequence: Synthetic oligonucleotide
  Antisense Strand to SEQ ID NO: 396643
aucaaacccagaaguguau

SEQ ID NO: 396645 - RNA, 19 nt, Artificial Sequence
  Description of Artificial Sequence: Synthetic oligonucleotide
  Sense Strand Starting at position 993 of SEQ ID NO: 316350
gggucaauuagccaagagu

SEQ ID NO: 396646 - RNA, 19 nt, Artificial Sequence
  Description of Artificial Sequence: Synthetic oligonucleotide
  Antisense Strand to SEQ ID NO: 396645
acucuuggcuaauugaccc

SEQ ID NO: 396647 - RNA, 19 nt, Artificial Sequence
  Description of Artificial Sequence: Synthetic oligonucleotide
  Sense Strand Starting at position 993 of SEQ ID NO: 316377
caauuacucgucgaccuuu

SEQ ID NO: 396648 - RNA, 19 nt, Artificial Sequence
  Description of Artificial Sequence: Synthetic oligonucleotide
  Antisense Strand to SEQ ID NO: 396647
aaaggucgacgaguaauug

SEQ ID NO: 396649 - RNA, 19 nt, Artificial Sequence
  Description of Artificial Sequence: Synthetic oligonucleotide
  Sense Strand Starting at position 993 of SEQ ID NO: 316433
gaagaauuccaagguuugu

SEQ ID NO: 396650 - RNA, 19 nt, Artificial Sequence
  Description of Artificial Sequence: Synthetic oligonucleotide
  Antisense Strand to SEQ ID NO: 396649
acaaaccuuggaauucuuc

SEQ ID NO: 396651 - RNA, 19 nt, Artificial Sequence
  Description of Artificial Sequence: Synthetic oligonucleotide
  Sense Strand Starting at position 993 of SEQ ID NO: 316734
ggcgauagcagccaaagua

SEQ ID NO: 396652 - RNA, 19 nt, Artificial Sequence
  Description of Artificial Sequence: Synthetic oligonucleotide
  Antisense Strand to SEQ ID NO: 396651
uacuuuggcugcuaucgcc

SEQ ID NO: 396653 - RNA, 19 nt, Artificial Sequence
  Description of Artificial Sequence: Synthetic oligonucleotide
  Sense Strand Starting at position 993 of SEQ ID NO: 317426
gaauccaauugcucggaau

SEQ ID NO: 396654 - RNA, 19 nt, Artificial Sequence
  Description of Artificial Sequence: Synthetic oligonucleotide
  Antisense Strand to SEQ ID NO: 396653
auuccgagcaauuggauuc

SEQ ID NO: 396655 - RNA, 19 nt, Artificial Sequence
  Description of Artificial Sequence: Synthetic oligonucleotide
  Sense Strand Starting at position 993 of SEQ ID NO: 317443
aucggaaauccaggcgaau

SEQ ID NO: 396656 - RNA, 19 nt, Artificial Sequence
  Description of Artificial Sequence: Synthetic oligonucleotide
  Antisense Strand to SEQ ID NO: 396655
auucgccuggauuuccgau

SEQ ID NO: 396657 - RNA, 19 nt, Artificial Sequence
  Description of Artificial Sequence: Synthetic oligonucleotide
  Sense Strand Starting at position 993 of SEQ ID NO: 317445
cggaaauccaggcgaauga

SEQ ID NO: 396658 - RNA, 19 nt, Artificial Sequence
  Description of Artificial Sequence: Synthetic oligonucleotide
  Antisense Strand to SEQ ID NO: 396657
ucauucgccuggauuuccg

SEQ ID NO: 396659 - RNA, 19 nt, Artificial Sequence
  Description of Artificial Sequence: Synthetic oligonucleotide
  Sense Strand Starting at position 993 of SEQ ID NO: 317460
augagaaacugucuuguuu

SEQ ID NO: 396660 - RNA, 19 nt, Artificial Sequence
  Description of Artificial Sequence: Synthetic oligonucleotide
  Antisense Strand to SEQ ID NO: 396659
aaacaagacaguuucucau

SEQ ID NO: 396661 - RNA, 19 nt, Artificial Sequence
  Description of Artificial Sequence: Synthetic oligonucleotide
  Sense Strand Starting at position 993 of SEQ ID NO: 317658
gcaacauggcuuuaggaca

SEQ ID NO: 396662 - RNA, 19 nt, Artificial Sequence
  Description of Artificial Sequence: Synthetic oligonucleotide
  Antisense Strand to SEQ ID NO: 396661
uguccuaaagccauguugc

SEQ ID NO: 396663 - RNA, 19 nt, Artificial Sequence
  Description of Artificial Sequence: Synthetic oligonucleotide
  Sense Strand Starting at position 993 of SEQ ID NO: 317943
agaguuugcaguuaggaga

SEQ ID NO: 396664 - RNA, 19 nt, Artificial Sequence
  Description of Artificial Sequence: Synthetic oligonucleotide
  Antisense Strand to SEQ ID NO: 396663
ucuccuaacugcaaacucu

SEQ ID NO: 396665 - RNA, 19 nt, Artificial Sequence
  Description of Artificial Sequence: Synthetic oligonucleotide
  Sense Strand Starting at position 993 of SEQ ID NO: 317957
ggagaagcuagucaggcau

SEQ ID NO: 396666 - RNA, 19 nt, Artificial Sequence
  Description of Artificial Sequence: Synthetic oligonucleotide
  Antisense Strand to SEQ ID NO: 396665
augccugacuagcuucucc

SEQ ID NO: 396667 - RNA, 19 nt, Artificial Sequence
  Description of Artificial Sequence: Synthetic oligonucleotide
  Sense Strand Starting at position 993 of SEQ ID NO: 317963
gcuagucaggcauagguuu

SEQ ID NO: 396668 - RNA, 19 nt, Artificial Sequence
  Description of Artificial Sequence: Synthetic oligonucleotide
  Antisense Strand to SEQ ID NO: 396667
aaaccuaugccugacuagc

SEQ ID NO: 396669 - RNA, 19 nt, Artificial Sequence
  Description of Artificial Sequence: Synthetic oligonucleotide
  Sense Strand Starting at position 993 of SEQ ID NO: 317969
caggcauagguuugacacu

SEQ ID NO: 396670 - RNA, 19 nt, Artificial Sequence
  Description of Artificial Sequence: Synthetic oligonucleotide
  Antisense Strand to SEQ ID NO: 396669
agugucaaaccuaugccug

SEQ ID NO: 396671 - RNA, 19 nt, Artificial Sequence
  Description of Artificial Sequence: Synthetic oligonucleotide
  Sense Strand Starting at position 993 of SEQ ID NO: 318019
aguuauagcucugugacca

SEQ ID NO: 396672 - RNA, 19 nt, Artificial Sequence
  Description of Artificial Sequence: Synthetic oligonucleotide
  Antisense Strand to SEQ ID NO: 396671
uggucacagagcuauaacu

SEQ ID NO: 396673 - RNA, 19 nt, Artificial Sequence
  Description of Artificial Sequence: Synthetic oligonucleotide
  Sense Strand Starting at position 993 of SEQ ID NO: 318057
guuucuguucucgagauau

SEQ ID NO: 396674 - RNA, 19 nt, Artificial Sequence
  Description of Artificial Sequence: Synthetic oligonucleotide
  Antisense Strand to SEQ ID NO: 396673
auaucucgagaacagaaac

SEQ ID NO: 396675 - RNA, 19 nt, Artificial Sequence
  Description of Artificial Sequence: Synthetic oligonucleotide
  Sense Strand Starting at position 993 of SEQ ID NO: 318559
aguuguguaccauaacuuc

SEQ ID NO: 396676 - RNA, 19 nt, Artificial Sequence
  Description of Artificial Sequence: Synthetic oligonucleotide
  Antisense Strand to SEQ ID NO: 396675
gaaguuaugguacacaacu

SEQ ID NO: 396677 - RNA, 19 nt, Artificial Sequence
  Description of Artificial Sequence: Synthetic oligonucleotide
  Sense Strand Starting at position 993 of SEQ ID NO: 318586
uuauuuggugucuagcagu

SEQ ID NO: 396678 - RNA, 19 nt, Artificial Sequence
  Description of Artificial Sequence: Synthetic oligonucleotide
  Antisense Strand to SEQ ID NO: 396677
acugcuagacaccaaauaa

SEQ ID NO: 396679 - RNA, 19 nt, Artificial Sequence
  Description of Artificial Sequence: Synthetic oligonucleotide
  Sense Strand Starting at position 993 of SEQ ID NO: 318625
ggugguugccucuggagga

SEQ ID NO: 396680 - RNA, 19 nt, Artificial Sequence
  Description of Artificial Sequence: Synthetic oligonucleotide
  Antisense Strand to SEQ ID NO: 396679
uccuccagaggcaaccacc

SEQ ID NO: 396681 - RNA, 19 nt, Artificial Sequence
  Description of Artificial Sequence: Synthetic oligonucleotide
  Sense Strand Starting at position 993 of SEQ ID NO: 318827
uggaaacucugguuaacag

SEQ ID NO: 396682 - RNA, 19 nt, Artificial Sequence
  Description of Artificial Sequence: Synthetic oligonucleotide
  Antisense Strand to SEQ ID NO: 396681
cuguuaaccagaguuucca

SEQ ID NO: 396683 - RNA, 19 nt, Artificial Sequence
  Description of Artificial Sequence: Synthetic oligonucleotide
  Sense Strand Starting at position 993 of SEQ ID NO: 318844
agcaccuaucuuugaaagu

SEQ ID NO: 396684 - RNA, 19 nt, Artificial Sequence
  Description of Artificial Sequence: Synthetic oligonucleotide
  Antisense Strand to SEQ ID NO: 396683
acuuucaaagauaggugcu

SEQ ID NO: 396685 - RNA, 19 nt, Artificial Sequence
  Description of Artificial Sequence: Synthetic oligonucleotide
  Sense Strand Starting at position 993 of SEQ ID NO: 318860
agugaaagauagucuaauc

SEQ ID NO: 396686 - RNA, 19 nt, Artificial Sequence
  Description of Artificial Sequence: Synthetic oligonucleotide
  Antisense Strand to SEQ ID NO: 396685
gauuagacuaucuuucacu

SEQ ID NO: 396687 - RNA, 19 nt, Artificial Sequence
  Description of Artificial Sequence: Synthetic oligonucleotide
  Sense Strand Starting at position 993 of SEQ ID NO: 318865
aagauagucuaauccugag

SEQ ID NO: 396688 - RNA, 19 nt, Artificial Sequence
  Description of Artificial Sequence: Synthetic oligonucleotide
  Antisense Strand to SEQ ID NO: 396687
cucaggauuagacuaucuu

SEQ ID NO: 396689 - RNA, 19 nt, Artificial Sequence
  Description of Artificial Sequence: Synthetic oligonucleotide
  Sense Strand Starting at position 993 of SEQ ID NO: 318901
caguaaacagccuggagau

SEQ ID NO: 396690 - RNA, 19 nt, Artificial Sequence
  Description of Artificial Sequence: Synthetic oligonucleotide
  Antisense Strand to SEQ ID NO: 396689
aucuccaggcuguuuacug

SEQ ID NO: 396691 - RNA, 19 nt, Artificial Sequence
  Description of Artificial Sequence: Synthetic oligonucleotide
  Sense Strand Starting at position 993 of SEQ ID NO: 318902
aguaaacagccuggagaua

SEQ ID NO: 396692 - RNA, 19 nt, Artificial Sequence
  Description of Artificial Sequence: Synthetic oligonucleotide
  Antisense Strand to SEQ ID NO: 396691
uaucuccaggcuguuuacu

SEQ ID NO: 396693 - RNA, 19 nt, Artificial Sequence
  Description of Artificial Sequence: Synthetic oligonucleotide
  Sense Strand Starting at position 993 of SEQ ID NO: 319003
ggucuugcuaaaggauauu

SEQ ID NO: 396694 - RNA, 19 nt, Artificial Sequence
  Description of Artificial Sequence: Synthetic oligonucleotide
  Antisense Strand to SEQ ID NO: 396693
aauauccuuuagcaagacc

SEQ ID NO: 396695 - RNA, 19 nt, Artificial Sequence
  Description of Artificial Sequence: Synthetic oligonucleotide
  Sense Strand Starting at position 993 of SEQ ID NO: 319074
aagagaagcuuaccuagua

SEQ ID NO: 396696 - RNA, 19 nt, Artificial Sequence
  Description of Artificial Sequence: Synthetic oligonucleotide
  Antisense Strand to SEQ ID NO: 396695
uacuagguaagcuucucuu

SEQ ID NO: 396697 - RNA, 19 nt, Artificial Sequence
  Description of Artificial Sequence: Synthetic oligonucleotide
  Sense Strand Starting at position 993 of SEQ ID NO: 319075
agagaagcuuaccuaguaa

SEQ ID NO: 396698 - RNA, 19 nt, Artificial Sequence
  Description of Artificial Sequence: Synthetic oligonucleotide
  Antisense Strand to SEQ ID NO: 396697
uuacuagguaagcuucucu

SEQ ID NO: 396699 - RNA, 19 nt, Artificial Sequence
  Description of Artificial Sequence: Synthetic oligonucleotide
  Sense Strand Starting at position 993 of SEQ ID NO: 319110
aaguguaguacuugagaga

SEQ ID NO: 396700 - RNA, 19 nt, Artificial Sequence
  Description of Artificial Sequence: Synthetic oligonucleotide
  Antisense Strand to SEQ ID NO: 396699
ucucucaaguacuacacuu

SEQ ID NO: 396701 - RNA, 19 nt, Artificial Sequence
  Description of Artificial Sequence: Synthetic oligonucleotide
  Sense Strand Starting at position 993 of SEQ ID NO: 319111
aguguaguacuugagagaa

SEQ ID NO: 396702 - RNA, 19 nt, Artificial Sequence
  Description of Artificial Sequence: Synthetic oligonucleotide
  Antisense Strand to SEQ ID NO: 396701
uucucucaaguacuacacu

SEQ ID NO: 396703 - RNA, 19 nt, Artificial Sequence
  Description of Artificial Sequence: Synthetic oligonucleotide
  Sense Strand Starting at position 994 of SEQ ID NO: 315249
uuaacaggccucuguaaca

SEQ ID NO: 396704 - RNA, 19 nt, Artificial Sequence
  Description of Artificial Sequence: Synthetic oligonucleotide
  Antisense Strand to SEQ ID NO: 396703
uguuacagaggccuguuaa

SEQ ID NO: 396705 - RNA, 19 nt, Artificial Sequence
  Description of Artificial Sequence: Synthetic oligonucleotide
  Sense Strand Starting at position 994 of SEQ ID NO: 315362
ugcugaggucaggguuaaa

SEQ ID NO: 396706 - RNA, 19 nt, Artificial Sequence
  Description of Artificial Sequence: Synthetic oligonucleotide
  Antisense Strand to SEQ ID NO: 396705
uuuaacccugaccucagca

SEQ ID NO: 396707 - RNA, 19 nt, Artificial Sequence
  Description of Artificial Sequence: Synthetic oligonucleotide
  Sense Strand Starting at position 994 of SEQ ID NO: 315373
ggguuaaacuacccuguga

SEQ ID NO: 396708 - RNA, 19 nt, Artificial Sequence
  Description of Artificial Sequence: Synthetic oligonucleotide
  Antisense Strand to SEQ ID NO: 396707
ucacaggguaguuuaaccc

SEQ ID NO: 396709 - RNA, 19 nt, Artificial Sequence
  Description of Artificial Sequence: Synthetic oligonucleotide
  Sense Strand Starting at position 994 of SEQ ID NO: 315375
guuaaacuacccugugaaa

SEQ ID NO: 396710 - RNA, 19 nt, Artificial Sequence
  Description of Artificial Sequence: Synthetic oligonucleotide
  Antisense Strand to SEQ ID NO: 396709
uuucacaggguaguuuaac

SEQ ID NO: 396711 - RNA, 19 nt, Artificial Sequence
  Description of Artificial Sequence: Synthetic oligonucleotide
  Sense Strand Starting at position 994 of SEQ ID NO: 315723
gcaggagugggaugucuua

SEQ ID NO: 396712 - RNA, 19 nt, Artificial Sequence
  Description of Artificial Sequence: Synthetic oligonucleotide
  Antisense Strand to SEQ ID NO: 396711
uaagacaucccacuccugc

SEQ ID NO: 396713 - RNA, 19 nt, Artificial Sequence
  Description of Artificial Sequence: Synthetic oligonucleotide
  Sense Strand Starting at position 994 of SEQ ID NO: 315781
cagugacuccuagaagggu

SEQ ID NO: 396714 - RNA, 19 nt, Artificial Sequence
  Description of Artificial Sequence: Synthetic oligonucleotide
  Antisense Strand to SEQ ID NO: 396713
acccuucuaggagucacug

SEQ ID NO: 396715 - RNA, 19 nt, Artificial Sequence
  Description of Artificial Sequence: Synthetic oligonucleotide
  Sense Strand Starting at position 994 of SEQ ID NO: 316157
ccuggaccucccugcaaua

SEQ ID NO: 396716 - RNA, 19 nt, Artificial Sequence
  Description of Artificial Sequence: Synthetic oligonucleotide
  Antisense Strand to SEQ ID NO: 396715
uauugcagggagguccagg

SEQ ID NO: 396717 - RNA, 19 nt, Artificial Sequence
  Description of Artificial Sequence: Synthetic oligonucleotide
  Sense Strand Starting at position 994 of SEQ ID NO: 316382
aauccugcagguuggaaau

SEQ ID NO: 396718 - RNA, 19 nt, Artificial Sequence
  Description of Artificial Sequence: Synthetic oligonucleotide
  Antisense Strand to SEQ ID NO: 396717
auuuccaaccugcaggauu

SEQ ID NO: 396719 - RNA, 19 nt, Artificial Sequence
  Description of Artificial Sequence: Synthetic oligonucleotide
  Sense Strand Starting at position 994 of SEQ ID NO: 316394
uggaaaugcaagugucaaa

SEQ ID NO: 396720 - RNA, 19 nt, Artificial Sequence
  Description of Artificial Sequence: Synthetic oligonucleotide
  Antisense Strand to SEQ ID NO: 396719
uuugacacuugcauuucca

SEQ ID NO: 396721 - RNA, 19 nt, Artificial Sequence
  Description of Artificial Sequence: Synthetic oligonucleotide
  Sense Strand Starting at position 994 of SEQ ID NO: 316424
ccuacauaccgccaagagu

SEQ ID NO: 396722 - RNA, 19 nt, Artificial Sequence
  Description of Artificial Sequence: Synthetic oligonucleotide
  Antisense Strand to SEQ ID NO: 396721
acucuuggcgguauguagg

SEQ ID NO: 396723 - RNA, 19 nt, Artificial Sequence
  Description of Artificial Sequence: Synthetic oligonucleotide
  Sense Strand Starting at position 994 of SEQ ID NO: 316432
ccgccaagaguuuaccaaa

SEQ ID NO: 396724 - RNA, 19 nt, Artificial Sequence
  Description of Artificial Sequence: Synthetic oligonucleotide
  Antisense Strand to SEQ ID NO: 396723
uuugguaaacucuuggcgg

SEQ ID NO: 396725 - RNA, 19 nt, Artificial Sequence
  Description of Artificial Sequence: Synthetic oligonucleotide
  Sense Strand Starting at position 994 of SEQ ID NO: 316488
gcauccauuccuggagaau

SEQ ID NO: 396726 - RNA, 19 nt, Artificial Sequence
  Description of Artificial Sequence: Synthetic oligonucleotide
  Antisense Strand to SEQ ID NO: 396725
auucuccaggaauggaugc

SEQ ID NO: 396727 - RNA, 19 nt, Artificial Sequence
  Description of Artificial Sequence: Synthetic oligonucleotide
  Sense Strand Starting at position 994 of SEQ ID NO: 316541
cgugucuaugccucaguca

SEQ ID NO: 396728 - RNA, 19 nt, Artificial Sequence
  Description of Artificial Sequence: Synthetic oligonucleotide
  Antisense Strand to SEQ ID NO: 396727
ugacugaggcauagacacg

SEQ ID NO: 396729 - RNA, 19 nt, Artificial Sequence
  Description of Artificial Sequence: Synthetic oligonucleotide
  Sense Strand Starting at position 994 of SEQ ID NO: 316596
gagauuaggcugcaaaguu

SEQ ID NO: 396730 - RNA, 19 nt, Artificial Sequence
  Description of Artificial Sequence: Synthetic oligonucleotide
  Antisense Strand to SEQ ID NO: 396729
aacuuugcagccuaaucuc

SEQ ID NO: 396731 - RNA, 19 nt, Artificial Sequence
  Description of Artificial Sequence: Synthetic oligonucleotide
  Sense Strand Starting at position 994 of SEQ ID NO: 316829
aucgcaucccugcaggaaa

SEQ ID NO: 396732 - RNA, 19 nt, Artificial Sequence
  Description of Artificial Sequence: Synthetic oligonucleotide
  Antisense Strand to SEQ ID NO: 396731
uuuccugcagggaugcgau

SEQ ID NO: 396733 - RNA, 19 nt, Artificial Sequence
  Description of Artificial Sequence: Synthetic oligonucleotide
  Sense Strand Starting at position 994 of SEQ ID NO: 316875
gcugcaauuuccgauuuag

SEQ ID NO: 396734 - RNA, 19 nt, Artificial Sequence
  Description of Artificial Sequence: Synthetic oligonucleotide
  Antisense Strand to SEQ ID NO: 396733
cuaaaucggaaauugcagc

SEQ ID NO: 396735 - RNA, 19 nt, Artificial Sequence
  Description of Artificial Sequence: Synthetic oligonucleotide
  Sense Strand Starting at position 994 of SEQ ID NO: 316884
uccgauuuagccugaaggu

SEQ ID NO: 396736 - RNA, 19 nt, Artificial Sequence
  Description of Artificial Sequence: Synthetic oligonucleotide
  Antisense Strand to SEQ ID NO: 396735
accuucaggcuaaaucgga

SEQ ID NO: 396737 - RNA, 19 nt, Artificial Sequence
  Description of Artificial Sequence: Synthetic oligonucleotide
  Sense Strand Starting at position 994 of SEQ ID NO: 316961
gaguccucucggcaaccau

SEQ ID NO: 396738 - RNA, 19 nt, Artificial Sequence
  Description of Artificial Sequence: Synthetic oligonucleotide
  Antisense Strand to SEQ ID NO: 396737
augguugccgagaggacuc

SEQ ID NO: 396739 - RNA, 19 nt, Artificial Sequence
  Description of Artificial Sequence: Synthetic oligonucleotide
  Sense Strand Starting at position 994 of SEQ ID NO: 317298
acccguuaucuguauuacu

SEQ ID NO: 396740 - RNA, 19 nt, Artificial Sequence
  Description of Artificial Sequence: Synthetic oligonucleotide
  Antisense Strand to SEQ ID NO: 396739
aguaauacagauaacgggu

SEQ ID NO: 396741 - RNA, 19 nt, Artificial Sequence
  Description of Artificial Sequence: Synthetic oligonucleotide
  Sense Strand Starting at position 994 of SEQ ID NO: 317314
acuauuaaugcgcagagca

SEQ ID NO: 396742 - RNA, 19 nt, Artificial Sequence
  Description of Artificial Sequence: Synthetic oligonucleotide
  Antisense Strand to SEQ ID NO: 396741
ugcucugcgcauuaauagu

SEQ ID NO: 396743 - RNA, 19 nt, Artificial Sequence
  Description of Artificial Sequence: Synthetic oligonucleotide
  Sense Strand Starting at position 994 of SEQ ID NO: 317316
uauuaaugcgcagagcaga

SEQ ID NO: 396744 - RNA, 19 nt, Artificial Sequence
  Description of Artificial Sequence: Synthetic oligonucleotide
  Antisense Strand to SEQ ID NO: 396743
ucugcucugcgcauuaaua

SEQ ID NO: 396745 - RNA, 19 nt, Artificial Sequence
  Description of Artificial Sequence: Synthetic oligonucleotide
  Sense Strand Starting at position 994 of SEQ ID NO: 317356
ccaagugugcgcuucuauu

SEQ ID NO: 396746 - RNA, 19 nt, Artificial Sequence
  Description of Artificial Sequence: Synthetic oligonucleotide
  Antisense Strand to SEQ ID NO: 396745
aauagaagcgcacacuugg

SEQ ID NO: 396747 - RNA, 19 nt, Artificial Sequence
  Description of Artificial Sequence: Synthetic oligonucleotide
  Sense Strand Starting at position 994 of SEQ ID NO: 317494
uuguaaugccugcugcgau

SEQ ID NO: 396748 - RNA, 19 nt, Artificial Sequence
  Description of Artificial Sequence: Synthetic oligonucleotide
  Antisense Strand to SEQ ID NO: 396747
aucgcagcaggcauuacaa

SEQ ID NO: 396749 - RNA, 19 nt, Artificial Sequence
  Description of Artificial Sequence: Synthetic oligonucleotide
  Sense Strand Starting at position 994 of SEQ ID NO: 317564
ccugucaugugaucuauca

SEQ ID NO: 396750 - RNA, 19 nt, Artificial Sequence
  Description of Artificial Sequence: Synthetic oligonucleotide
  Antisense Strand to SEQ ID NO: 396749
ugauagaucacaugacagg

SEQ ID NO: 396751 - RNA, 19 nt, Artificial Sequence
  Description of Artificial Sequence: Synthetic oligonucleotide
  Sense Strand Starting at position 994 of SEQ ID NO: 317571
ugugaucuaucauuccaua

SEQ ID NO: 396752 - RNA, 19 nt, Artificial Sequence
  Description of Artificial Sequence: Synthetic oligonucleotide
  Antisense Strand to SEQ ID NO: 396751
uauggaaugauagaucaca

SEQ ID NO: 396753 - RNA, 19 nt, Artificial Sequence
  Description of Artificial Sequence: Synthetic oligonucleotide
  Sense Strand Starting at position 994 of SEQ ID NO: 317613
aguggcuuugaucauacaa

SEQ ID NO: 396754 - RNA, 19 nt, Artificial Sequence
  Description of Artificial Sequence: Synthetic oligonucleotide
  Antisense Strand to SEQ ID NO: 396753
uuguaugaucaaagccacu

SEQ ID NO: 396755 - RNA, 19 nt, Artificial Sequence
  Description of Artificial Sequence: Synthetic oligonucleotide
  Sense Strand Starting at position 994 of SEQ ID NO: 317883
cggguuauauuagucaaau

SEQ ID NO: 396756 - RNA, 19 nt, Artificial Sequence
  Description of Artificial Sequence: Synthetic oligonucleotide
  Antisense Strand to SEQ ID NO: 396755
auuugacuaauauaacccg

SEQ ID NO: 396757 - RNA, 19 nt, Artificial Sequence
  Description of Artificial Sequence: Synthetic oligonucleotide
  Sense Strand Starting at position 994 of SEQ ID NO: 317884
ggguuauauuagucaaaug

SEQ ID NO: 396758 - RNA, 19 nt, Artificial Sequence
  Description of Artificial Sequence: Synthetic oligonucleotide
  Antisense Strand to SEQ ID NO: 396757
cauuugacuaauauaaccc

SEQ ID NO: 396759 - RNA, 19 nt, Artificial Sequence
  Description of Artificial Sequence: Synthetic oligonucleotide
  Sense Strand Starting at position 994 of SEQ ID NO: 318115
uuggcauaacaaggagauu

SEQ ID NO: 396760 - RNA, 19 nt, Artificial Sequence
  Description of Artificial Sequence: Synthetic oligonucleotide
  Antisense Strand to SEQ ID NO: 396759
aaucuccuuguuaugccaa

SEQ ID NO: 396761 - RNA, 19 nt, Artificial Sequence
  Description of Artificial Sequence: Synthetic oligonucleotide
  Sense Strand Starting at position 994 of SEQ ID NO: 318147
accuguggugacuagcaau

SEQ ID NO: 396762 - RNA, 19 nt, Artificial Sequence
  Description of Artificial Sequence: Synthetic oligonucleotide
  Antisense Strand to SEQ ID NO: 396761
auugcuagucaccacaggu

SEQ ID NO: 396763 - RNA, 19 nt, Artificial Sequence
  Description of Artificial Sequence: Synthetic oligonucleotide
  Sense Strand Starting at position 994 of SEQ ID NO: 318491
cugaaugaacauuguugga

SEQ ID NO: 396764 - RNA, 19 nt, Artificial Sequence
  Description of Artificial Sequence: Synthetic oligonucleotide
  Antisense Strand to SEQ ID NO: 396763
uccaacaauguucauucag

SEQ ID NO: 396765 - RNA, 19 nt, Artificial Sequence
  Description of Artificial Sequence: Synthetic oligonucleotide
  Sense Strand Starting at position 994 of SEQ ID NO: 318513
ggccacucuggauaagguu

SEQ ID NO: 396766 - RNA, 19 nt, Artificial Sequence
  Description of Artificial Sequence: Synthetic oligonucleotide
  Antisense Strand to SEQ ID NO: 396765
aaccuuauccagaguggcc

SEQ ID NO: 396767 - RNA, 19 nt, Artificial Sequence
  Description of Artificial Sequence: Synthetic oligonucleotide
  Sense Strand Starting at position 994 of SEQ ID NO: 318555
acuaccuauguguaaacua

SEQ ID NO: 396768 - RNA, 19 nt, Artificial Sequence
  Description of Artificial Sequence: Synthetic oligonucleotide
  Antisense Strand to SEQ ID NO: 396767
uaguuuacacauagguagu

SEQ ID NO: 396769 - RNA, 19 nt, Artificial Sequence
  Description of Artificial Sequence: Synthetic oligonucleotide
  Sense Strand Starting at position 994 of SEQ ID NO: 318609
ucgagaucuuauuccaaau

SEQ ID NO: 396770 - RNA, 19 nt, Artificial Sequence
  Description of Artificial Sequence: Synthetic oligonucleotide
  Antisense Strand to SEQ ID NO: 396769
auuuggaauaagaucucga

SEQ ID NO: 396771 - RNA, 19 nt, Artificial Sequence
  Description of Artificial Sequence: Synthetic oligonucleotide
  Sense Strand Starting at position 994 of SEQ ID NO: 318645
auuuauguagugugugcua

SEQ ID NO: 396772 - RNA, 19 nt, Artificial Sequence
  Description of Artificial Sequence: Synthetic oligonucleotide
  Antisense Strand to SEQ ID NO: 396771
uagcacacacuacauaaau

SEQ ID NO: 396773 - RNA, 19 nt, Artificial Sequence
  Description of Artificial Sequence: Synthetic oligonucleotide
  Sense Strand Starting at position 994 of SEQ ID NO: 318886
uuauguguauuugcaaagu

SEQ ID NO: 396774 - RNA, 19 nt, Artificial Sequence
  Description of Artificial Sequence: Synthetic oligonucleotide
  Antisense Strand to SEQ ID NO: 396773
acuuugcaaauacacauaa

SEQ ID NO: 396775 - RNA, 19 nt, Artificial Sequence
  Description of Artificial Sequence: Synthetic oligonucleotide
  Sense Strand Starting at position 994 of SEQ ID NO: 318959
agaugugaucauuggcauu

SEQ ID NO: 396776 - RNA, 19 nt, Artificial Sequence
  Description of Artificial Sequence: Synthetic oligonucleotide
  Antisense Strand to SEQ ID NO: 396775
aaugccaaugaucacaucu

SEQ ID NO: 396777 - RNA, 19 nt, Artificial Sequence
  Description of Artificial Sequence: Synthetic oligonucleotide
  Sense Strand Starting at position 994 of SEQ ID NO: 318965
gaucauuggcauuguauca

SEQ ID NO: 396778 - RNA, 19 nt, Artificial Sequence
  Description of Artificial Sequence: Synthetic oligonucleotide
  Antisense Strand to SEQ ID NO: 396777
ugauacaaugccaaugauc

SEQ ID NO: 396779 - RNA, 19 nt, Artificial Sequence
  Description of Artificial Sequence: Synthetic oligonucleotide
  Sense Strand Starting at position 994 of SEQ ID NO: 318982
cagagucaauuugcuguau

SEQ ID NO: 396780 - RNA, 19 nt, Artificial Sequence
  Description of Artificial Sequence: Synthetic oligonucleotide
  Antisense Strand to SEQ ID NO: 396779
auacagcaaauugacucug

SEQ ID NO: 396781 - RNA, 19 nt, Artificial Sequence
  Description of Artificial Sequence: Synthetic oligonucleotide
  Sense Strand Starting at position 994 of SEQ ID NO: 319213
gcauaaugaccaugcaaag

SEQ ID NO: 396782 - RNA, 19 nt, Artificial Sequence
  Description of Artificial Sequence: Synthetic oligonucleotide
  Antisense Strand to SEQ ID NO: 396781
cuuugcauggucauuaugc

SEQ ID NO: 396783 - RNA, 19 nt, Artificial Sequence
  Description of Artificial Sequence: Synthetic oligonucleotide
  Sense Strand Starting at position 995 of SEQ ID NO: 315246
auuugcugcugaguagaua

SEQ ID NO: 396784 - RNA, 19 nt, Artificial Sequence
  Description of Artificial Sequence: Synthetic oligonucleotide
  Antisense Strand to SEQ ID NO: 396783
uaucuacucagcagcaaau

SEQ ID NO: 396785 - RNA, 19 nt, Artificial Sequence
  Description of Artificial Sequence: Synthetic oligonucleotide
  Sense Strand Starting at position 995 of SEQ ID NO: 315419
ucugaaucuuggucaccua

SEQ ID NO: 396786 - RNA, 19 nt, Artificial Sequence
  Description of Artificial Sequence: Synthetic oligonucleotide
  Antisense Strand to SEQ ID NO: 396785
uaggugaccaagauucaga

SEQ ID NO: 396787 - RNA, 19 nt, Artificial Sequence
  Description of Artificial Sequence: Synthetic oligonucleotide
  Sense Strand Starting at position 995 of SEQ ID NO: 315420
cugaaucuuggucaccuaa

SEQ ID NO: 396788 - RNA, 19 nt, Artificial Sequence
  Description of Artificial Sequence: Synthetic oligonucleotide
  Antisense Strand to SEQ ID NO: 396787
uuaggugaccaagauucag

SEQ ID NO: 396789 - RNA, 19 nt, Artificial Sequence
  Description of Artificial Sequence: Synthetic oligonucleotide
  Sense Strand Starting at position 995 of SEQ ID NO: 315723
ucccauuguuaacuaaagu

SEQ ID NO: 396790 - RNA, 19 nt, Artificial Sequence
  Description of Artificial Sequence: Synthetic oligonucleotide
  Antisense Strand to SEQ ID NO: 396789
acuuuaguuaacaauggga

SEQ ID NO: 396791 - RNA, 19 nt, Artificial Sequence
  Description of Artificial Sequence: Synthetic oligonucleotide
  Sense Strand Starting at position 995 of SEQ ID NO: 315849
ccagguuucuuagcacaaa

SEQ ID NO: 396792 - RNA, 19 nt, Artificial Sequence
  Description of Artificial Sequence: Synthetic oligonucleotide
  Antisense Strand to SEQ ID NO: 396791
uuugugcuaagaaaccugg

SEQ ID NO: 396793 - RNA, 19 nt, Artificial Sequence
  Description of Artificial Sequence: Synthetic oligonucleotide
  Sense Strand Starting at position 995 of SEQ ID NO: 315878
gaagcagaugccugagaac

SEQ ID NO: 396794 - RNA, 19 nt, Artificial Sequence
  Description of Artificial Sequence: Synthetic oligonucleotide
  Antisense Strand to SEQ ID NO: 396793
guucucaggcaucugcuuc

SEQ ID NO: 396795 - RNA, 19 nt, Artificial Sequence
  Description of Artificial Sequence: Synthetic oligonucleotide
  Sense Strand Starting at position 995 of SEQ ID NO: 316229
agcuauuauuuaggagaaa

SEQ ID NO: 396796 - RNA, 19 nt, Artificial Sequence
  Description of Artificial Sequence: Synthetic oligonucleotide
  Antisense Strand to SEQ ID NO: 396795
uuucuccuaaauaauagcu

SEQ ID NO: 396797 - RNA, 19 nt, Artificial Sequence
  Description of Artificial Sequence: Synthetic oligonucleotide
  Sense Strand Starting at position 995 of SEQ ID NO: 316737
acaacacccuggcuugaua

SEQ ID NO: 396798 - RNA, 19 nt, Artificial Sequence
  Description of Artificial Sequence: Synthetic oligonucleotide
  Antisense Strand to SEQ ID NO: 396797
uaucaagccaggguguugu

SEQ ID NO: 396799 - RNA, 19 nt, Artificial Sequence
  Description of Artificial Sequence: Synthetic oligonucleotide
  Sense Strand Starting at position 995 of SEQ ID NO: 316762
ugaccagacuucucugaag

SEQ ID NO: 396800 - RNA, 19 nt, Artificial Sequence
  Description of Artificial Sequence: Synthetic oligonucleotide
  Antisense Strand to SEQ ID NO: 396799
cuucagagaagucugguca

SEQ ID NO: 396801 - RNA, 19 nt, Artificial Sequence
  Description of Artificial Sequence: Synthetic oligonucleotide
  Sense Strand Starting at position 995 of SEQ ID NO: 316807
uugauugauucuuuagguu

SEQ ID NO: 396802 - RNA, 19 nt, Artificial Sequence
  Description of Artificial Sequence: Synthetic oligonucleotide
  Antisense Strand to SEQ ID NO: 396801
aaccuaaagaaucaaucaa

SEQ ID NO: 396803 - RNA, 19 nt, Artificial Sequence
  Description of Artificial Sequence: Synthetic oligonucleotide
  Sense Strand Starting at position 995 of SEQ ID NO: 316869
aaaguaaaugugcacauga

SEQ ID NO: 396804 - RNA, 19 nt, Artificial Sequence
  Description of Artificial Sequence: Synthetic oligonucleotide
  Antisense Strand to SEQ ID NO: 396803
ucaugugcacauuuacuuu

SEQ ID NO: 396805 - RNA, 19 nt, Artificial Sequence
  Description of Artificial Sequence: Synthetic oligonucleotide
  Sense Strand Starting at position 995 of SEQ ID NO: 317440
aggaguuagguuuaaugug

SEQ ID NO: 396806 - RNA, 19 nt, Artificial Sequence
  Description of Artificial Sequence: Synthetic oligonucleotide
  Antisense Strand to SEQ ID NO: 396805
cacauuaaaccuaacuccu

SEQ ID NO: 396807 - RNA, 19 nt, Artificial Sequence
  Description of Artificial Sequence: Synthetic oligonucleotide
  Sense Strand Starting at position 995 of SEQ ID NO: 317516
gggaucagcauggguacua

SEQ ID NO: 396808 - RNA, 19 nt, Artificial Sequence
  Description of Artificial Sequence: Synthetic oligonucleotide
  Antisense Strand to SEQ ID NO: 396807
uaguacccaugcugauccc

SEQ ID NO: 396809 - RNA, 19 nt, Artificial Sequence
  Description of Artificial Sequence: Synthetic oligonucleotide
  Sense Strand Starting at position 995 of SEQ ID NO: 317526
uggguacuaagaugaguaa

SEQ ID NO: 396810 - RNA, 19 nt, Artificial Sequence
  Description of Artificial Sequence: Synthetic oligonucleotide
  Antisense Strand to SEQ ID NO: 396809
uuacucaucuuaguaccca

SEQ ID NO: 396811 - RNA, 19 nt, Artificial Sequence
  Description of Artificial Sequence: Synthetic oligonucleotide
  Sense Strand Starting at position 995 of SEQ ID NO: 317643
gccaauauguuaucagacu

SEQ ID NO: 396812 - RNA, 19 nt, Artificial Sequence
  Description of Artificial Sequence: Synthetic oligonucleotide
  Antisense Strand to SEQ ID NO: 396811
agucugauaacauauuggc

SEQ ID NO: 396813 - RNA, 19 nt, Artificial Sequence
  Description of Artificial Sequence: Synthetic oligonucleotide
  Sense Strand Starting at position 995 of SEQ ID NO: 317676
ccuguaaauuauguacaaa

SEQ ID NO: 396814 - RNA, 19 nt, Artificial Sequence
  Description of Artificial Sequence: Synthetic oligonucleotide
  Antisense Strand to SEQ ID NO: 396813
uuuguacauaauuuacagg

SEQ ID NO: 396815 - RNA, 19 nt, Artificial Sequence
  Description of Artificial Sequence: Synthetic oligonucleotide
  Sense Strand Starting at position 995 of SEQ ID NO: 317736
gaugucaguugcccagaaa

SEQ ID NO: 396816 - RNA, 19 nt, Artificial Sequence
  Description of Artificial Sequence: Synthetic oligonucleotide
  Antisense Strand to SEQ ID NO: 396815
uuucugggcaacugacauc

SEQ ID NO: 396817 - RNA, 19 nt, Artificial Sequence
  Description of Artificial Sequence: Synthetic oligonucleotide
  Sense Strand Starting at position 995 of SEQ ID NO: 317737
augucaguugcccagaaau

SEQ ID NO: 396818 - RNA, 19 nt, Artificial Sequence
  Description of Artificial Sequence: Synthetic oligonucleotide
  Antisense Strand to SEQ ID NO: 396817
auuucugggcaacugacau

SEQ ID NO: 396819 - RNA, 19 nt, Artificial Sequence
  Description of Artificial Sequence: Synthetic oligonucleotide
  Sense Strand Starting at position 995 of SEQ ID NO: 317794
agguguguuugacugaaga

SEQ ID NO: 396820 - RNA, 19 nt, Artificial Sequence
  Description of Artificial Sequence: Synthetic oligonucleotide
  Antisense Strand to SEQ ID NO: 396819
ucuucagucaaacacaccu

SEQ ID NO: 396821 - RNA, 19 nt, Artificial Sequence
  Description of Artificial Sequence: Synthetic oligonucleotide
  Sense Strand Starting at position 995 of SEQ ID NO: 317796
guguguuugacugaagagc

SEQ ID NO: 396822 - RNA, 19 nt, Artificial Sequence
  Description of Artificial Sequence: Synthetic oligonucleotide
  Antisense Strand to SEQ ID NO: 396821
gcucuucagucaaacacac

SEQ ID NO: 396823 - RNA, 19 nt, Artificial Sequence
  Description of Artificial Sequence: Synthetic oligonucleotide
  Sense Strand Starting at position 995 of SEQ ID NO: 317818
aguauaaauccguauguua

SEQ ID NO: 396824 - RNA, 19 nt, Artificial Sequence
  Description of Artificial Sequence: Synthetic oligonucleotide
  Antisense Strand to SEQ ID NO: 396823
uaacauacggauuuauacu

SEQ ID NO: 396825 - RNA, 19 nt, Artificial Sequence
  Description of Artificial Sequence: Synthetic oligonucleotide
  Sense Strand Starting at position 995 of SEQ ID NO: 317848
gcugcauagagguauauaa

SEQ ID NO: 396826 - RNA, 19 nt, Artificial Sequence
  Description of Artificial Sequence: Synthetic oligonucleotide
  Antisense Strand to SEQ ID NO: 396825
uuauauaccucuaugcagc

SEQ ID NO: 396827 - RNA, 19 nt, Artificial Sequence
  Description of Artificial Sequence: Synthetic oligonucleotide
  Sense Strand Starting at position 995 of SEQ ID NO: 317956
uagauugagccguaaagaa

SEQ ID NO: 396828 - RNA, 19 nt, Artificial Sequence
  Description of Artificial Sequence: Synthetic oligonucleotide
  Antisense Strand to SEQ ID NO: 396827
uucuuuacggcucaaucua

SEQ ID NO: 396829 - RNA, 19 nt, Artificial Sequence
  Description of Artificial Sequence: Synthetic oligonucleotide
  Sense Strand Starting at position 995 of SEQ ID NO: 318001
gcaucaugccaagagauac

SEQ ID NO: 396830 - RNA, 19 nt, Artificial Sequence
  Description of Artificial Sequence: Synthetic oligonucleotide
  Antisense Strand to SEQ ID NO: 396829
guaucucuuggcaugaugc

SEQ ID NO: 396831 - RNA, 19 nt, Artificial Sequence
  Description of Artificial Sequence: Synthetic oligonucleotide
  Sense Strand Starting at position 995 of SEQ ID NO: 318111
agucuuggagccugagaca

SEQ ID NO: 396832 - RNA, 19 nt, Artificial Sequence
  Description of Artificial Sequence: Synthetic oligonucleotide
  Antisense Strand to SEQ ID NO: 396831
ugucucaggcuccaagacu

SEQ ID NO: 396833 - RNA, 19 nt, Artificial Sequence
  Description of Artificial Sequence: Synthetic oligonucleotide
  Sense Strand Starting at position 995 of SEQ ID NO: 318197
ugacaugacugucuguaca

SEQ ID NO: 396834 - RNA, 19 nt, Artificial Sequence
  Description of Artificial Sequence: Synthetic oligonucleotide
  Antisense Strand to SEQ ID NO: 396833
uguacagacagucauguca

SEQ ID NO: 396835 - RNA, 19 nt, Artificial Sequence
  Description of Artificial Sequence: Synthetic oligonucleotide
  Sense Strand Starting at position 995 of SEQ ID NO: 318199
acaugacugucuguacaau

SEQ ID NO: 396836 - RNA, 19 nt, Artificial Sequence
  Description of Artificial Sequence: Synthetic oligonucleotide
  Antisense Strand to SEQ ID NO: 396835
auuguacagacagucaugu

SEQ ID NO: 396837 - RNA, 19 nt, Artificial Sequence
  Description of Artificial Sequence: Synthetic oligonucleotide
  Sense Strand Starting at position 995 of SEQ ID NO: 318207
gucuguacaaucgaaagau

SEQ ID NO: 396838 - RNA, 19 nt, Artificial Sequence
  Description of Artificial Sequence: Synthetic oligonucleotide
  Antisense Strand to SEQ ID NO: 396837
aucuuucgauuguacagac

SEQ ID NO: 396839 - RNA, 19 nt, Artificial Sequence
  Description of Artificial Sequence: Synthetic oligonucleotide
  Sense Strand Starting at position 995 of SEQ ID NO: 318216
aucgaaagauacuuguagu

SEQ ID NO: 396840 - RNA, 19 nt, Artificial Sequence
  Description of Artificial Sequence: Synthetic oligonucleotide
  Antisense Strand to SEQ ID NO: 396839
acuacaaguaucuuucgau

SEQ ID NO: 396841 - RNA, 19 nt, Artificial Sequence
  Description of Artificial Sequence: Synthetic oligonucleotide
  Sense Strand Starting at position 995 of SEQ ID NO: 318217
ucgaaagauacuuguaguc

SEQ ID NO: 396842 - RNA, 19 nt, Artificial Sequence
  Description of Artificial Sequence: Synthetic oligonucleotide
  Antisense Strand to SEQ ID NO: 396841
gacuacaaguaucuuucga

SEQ ID NO: 396843 - RNA, 19 nt, Artificial Sequence
  Description of Artificial Sequence: Synthetic oligonucleotide
  Sense Strand Starting at position 995 of SEQ ID NO: 318226
acuuguagucuguauuauc

SEQ ID NO: 396844 - RNA, 19 nt, Artificial Sequence
  Description of Artificial Sequence: Synthetic oligonucleotide
  Antisense Strand to SEQ ID NO: 396843
gauaauacagacuacaagu

SEQ ID NO: 396845 - RNA, 19 nt, Artificial Sequence
  Description of Artificial Sequence: Synthetic oligonucleotide
  Sense Strand Starting at position 995 of SEQ ID NO: 318266
cacgaagacaguugugauu

SEQ ID NO: 396846 - RNA, 19 nt, Artificial Sequence
  Description of Artificial Sequence: Synthetic oligonucleotide
  Antisense Strand to SEQ ID NO: 396845
aaucacaacugucuucgug

SEQ ID NO: 396847 - RNA, 19 nt, Artificial Sequence
  Description of Artificial Sequence: Synthetic oligonucleotide
  Sense Strand Starting at position 995 of SEQ ID NO: 318327
gggaaaugaugguuuaggu

SEQ ID NO: 396848 - RNA, 19 nt, Artificial Sequence
  Description of Artificial Sequence: Synthetic oligonucleotide
  Antisense Strand to SEQ ID NO: 396847
accuaaaccaucauuuccc

SEQ ID NO: 396849 - RNA, 19 nt, Artificial Sequence
  Description of Artificial Sequence: Synthetic oligonucleotide
  Sense Strand Starting at position 995 of SEQ ID NO: 318385
gacagaauuugguauauca

SEQ ID NO: 396850 - RNA, 19 nt, Artificial Sequence
  Description of Artificial Sequence: Synthetic oligonucleotide
  Antisense Strand to SEQ ID NO: 396849
ugauauaccaaauucuguc

SEQ ID NO: 396851 - RNA, 19 nt, Artificial Sequence
  Description of Artificial Sequence: Synthetic oligonucleotide
  Sense Strand Starting at position 995 of SEQ ID NO: 318395
gguauaucaccaugcacag

SEQ ID NO: 396852 - RNA, 19 nt, Artificial Sequence
  Description of Artificial Sequence: Synthetic oligonucleotide
  Antisense Strand to SEQ ID NO: 396851
cugugcauggugauauacc

SEQ ID NO: 396853 - RNA, 19 nt, Artificial Sequence
  Description of Artificial Sequence: Synthetic oligonucleotide
  Sense Strand Starting at position 995 of SEQ ID NO: 318436
cagugacuucccugugaau

SEQ ID NO: 396854 - RNA, 19 nt, Artificial Sequence
  Description of Artificial Sequence: Synthetic oligonucleotide
  Antisense Strand to SEQ ID NO: 396853
auucacagggaagucacug

SEQ ID NO: 396855 - RNA, 19 nt, Artificial Sequence
  Description of Artificial Sequence: Synthetic oligonucleotide
  Sense Strand Starting at position 995 of SEQ ID NO: 318478
ggcguaagaaaucgaaaga

SEQ ID NO: 396856 - RNA, 19 nt, Artificial Sequence
  Description of Artificial Sequence: Synthetic oligonucleotide
  Antisense Strand to SEQ ID NO: 396855
ucuuucgauuucuuacgcc

SEQ ID NO: 396857 - RNA, 19 nt, Artificial Sequence
  Description of Artificial Sequence: Synthetic oligonucleotide
  Sense Strand Starting at position 995 of SEQ ID NO: 318479
gcguaagaaaucgaaagag

SEQ ID NO: 396858 - RNA, 19 nt, Artificial Sequence
  Description of Artificial Sequence: Synthetic oligonucleotide
  Antisense Strand to SEQ ID NO: 396857
cucuuucgauuucuuacgc

SEQ ID NO: 396859 - RNA, 19 nt, Artificial Sequence
  Description of Artificial Sequence: Synthetic oligonucleotide
  Sense Strand Starting at position 995 of SEQ ID NO: 318820
aagagaaggcucuguugau

SEQ ID NO: 396860 - RNA, 19 nt, Artificial Sequence
  Description of Artificial Sequence: Synthetic oligonucleotide
  Antisense Strand to SEQ ID NO: 396859
aucaacagagccuucucuu

SEQ ID NO: 396861 - RNA, 19 nt, Artificial Sequence
  Description of Artificial Sequence: Synthetic oligonucleotide
  Sense Strand Starting at position 995 of SEQ ID NO: 318821
agagaaggcucuguugaua

SEQ ID NO: 396862 - RNA, 19 nt, Artificial Sequence
  Description of Artificial Sequence: Synthetic oligonucleotide
  Antisense Strand to SEQ ID NO: 396861
uaucaacagagccuucucu

SEQ ID NO: 396863 - RNA, 19 nt, Artificial Sequence
  Description of Artificial Sequence: Synthetic oligonucleotide
  Sense Strand Starting at position 996 of SEQ ID NO: 315242
guacucauguaguccauga

SEQ ID NO: 396864 - RNA, 19 nt, Artificial Sequence
  Description of Artificial Sequence: Synthetic oligonucleotide
  Antisense Strand to SEQ ID NO: 396863
ucauggacuacaugaguac

SEQ ID NO: 396865 - RNA, 19 nt, Artificial Sequence
  Description of Artificial Sequence: Synthetic oligonucleotide
  Sense Strand Starting at position 996 of SEQ ID NO: 315244
acucauguaguccaugauu

SEQ ID NO: 396866 - RNA, 19 nt, Artificial Sequence
  Description of Artificial Sequence: Synthetic oligonucleotide
  Antisense Strand to SEQ ID NO: 396865
aaucauggacuacaugagu

SEQ ID NO: 396867 - RNA, 19 nt, Artificial Sequence
  Description of Artificial Sequence: Synthetic oligonucleotide
  Sense Strand Starting at position 996 of SEQ ID NO: 315246
ucauguaguccaugauuga

SEQ ID NO: 396868 - RNA, 19 nt, Artificial Sequence
  Description of Artificial Sequence: Synthetic oligonucleotide
  Antisense Strand to SEQ ID NO: 396867
ucaaucauggacuacauga

SEQ ID NO: 396869 - RNA, 19 nt, Artificial Sequence
  Description of Artificial Sequence: Synthetic oligonucleotide
  Sense Strand Starting at position 996 of SEQ ID NO: 315247
cauguaguccaugauugaa

SEQ ID NO: 396870 - RNA, 19 nt, Artificial Sequence
  Description of Artificial Sequence: Synthetic oligonucleotide
  Antisense Strand to SEQ ID NO: 396869
uucaaucauggacuacaug

SEQ ID NO: 396871 - RNA, 19 nt, Artificial Sequence
  Description of Artificial Sequence: Synthetic oligonucleotide
  Sense Strand Starting at position 996 of SEQ ID NO: 315270
gccacuugacaguagguaa

SEQ ID NO: 396872 - RNA, 19 nt, Artificial Sequence
  Description of Artificial Sequence: Synthetic oligonucleotide
  Antisense Strand to SEQ ID NO: 396871
uuaccuacugucaaguggc

SEQ ID NO: 396873 - RNA, 19 nt, Artificial Sequence
  Description of Artificial Sequence: Synthetic oligonucleotide
  Sense Strand Starting at position 996 of SEQ ID NO: 315284
gguaaacuccucuguauug

SEQ ID NO: 396874 - RNA, 19 nt, Artificial Sequence
  Description of Artificial Sequence: Synthetic oligonucleotide
  Antisense Strand to SEQ ID NO: 396873
caauacagaggaguuuacc

SEQ ID NO: 396875 - RNA, 19 nt, Artificial Sequence
  Description of Artificial Sequence: Synthetic oligonucleotide
  Sense Strand Starting at position 996 of SEQ ID NO: 315299
auugccucauguuuauaga

SEQ ID NO: 396876 - RNA, 19 nt, Artificial Sequence
  Description of Artificial Sequence: Synthetic oligonucleotide
  Antisense Strand to SEQ ID NO: 396875
ucuauaaacaugaggcaau

SEQ ID NO: 396877 - RNA, 19 nt, Artificial Sequence
  Description of Artificial Sequence: Synthetic oligonucleotide
  Sense Strand Starting at position 996 of SEQ ID NO: 315300
uugccucauguuuauagaa

SEQ ID NO: 396878 - RNA, 19 nt, Artificial Sequence
  Description of Artificial Sequence: Synthetic oligonucleotide
  Antisense Strand to SEQ ID NO: 396877
uucuauaaacaugaggcaa

SEQ ID NO: 396879 - RNA, 19 nt, Artificial Sequence
  Description of Artificial Sequence: Synthetic oligonucleotide
  Sense Strand Starting at position 996 of SEQ ID NO: 315336
ccaauacauugggcucuau

SEQ ID NO: 396880 - RNA, 19 nt, Artificial Sequence
  Description of Artificial Sequence: Synthetic oligonucleotide
  Antisense Strand to SEQ ID NO: 396879
auagagcccaauguauugg

SEQ ID NO: 396881 - RNA, 19 nt, Artificial Sequence
  Description of Artificial Sequence: Synthetic oligonucleotide
  Sense Strand Starting at position 996 of SEQ ID NO: 315376
aaaguuagcuacucagaug

SEQ ID NO: 396882 - RNA, 19 nt, Artificial Sequence
  Description of Artificial Sequence: Synthetic oligonucleotide
  Antisense Strand to SEQ ID NO: 396881
caucugaguagcuaacuuu

SEQ ID NO: 396883 - RNA, 19 nt, Artificial Sequence
  Description of Artificial Sequence: Synthetic oligonucleotide
  Sense Strand Starting at position 996 of SEQ ID NO: 315438
gcaaaugcuggaggaaagu

SEQ ID NO: 396884 - RNA, 19 nt, Artificial Sequence
  Description of Artificial Sequence: Synthetic oligonucleotide
  Antisense Strand to SEQ ID NO: 396883
acuuuccuccagcauuugc

SEQ ID NO: 396885 - RNA, 19 nt, Artificial Sequence
  Description of Artificial Sequence: Synthetic oligonucleotide
  Sense Strand Starting at position 996 of SEQ ID NO: 315449
aggaaaguuuauguggcaa

SEQ ID NO: 396886 - RNA, 19 nt, Artificial Sequence
  Description of Artificial Sequence: Synthetic oligonucleotide
  Antisense Strand to SEQ ID NO: 396885
uugccacauaaacuuuccu

SEQ ID NO: 396887 - RNA, 19 nt, Artificial Sequence
  Description of Artificial Sequence: Synthetic oligonucleotide
  Sense Strand Starting at position 996 of SEQ ID NO: 315505
ccuuuagguucuuuacaag

SEQ ID NO: 396888 - RNA, 19 nt, Artificial Sequence
  Description of Artificial Sequence: Synthetic oligonucleotide
  Antisense Strand to SEQ ID NO: 396887
cuuguaaagaaccuaaagg

SEQ ID NO: 396889 - RNA, 19 nt, Artificial Sequence
  Description of Artificial Sequence: Synthetic oligonucleotide
  Sense Strand Starting at position 996 of SEQ ID NO: 315743
gcaauagucgcacaagaaa

SEQ ID NO: 396890 - RNA, 19 nt, Artificial Sequence
  Description of Artificial Sequence: Synthetic oligonucleotide
  Antisense Strand to SEQ ID NO: 396889
uuucuugugcgacuauugc

SEQ ID NO: 396891 - RNA, 19 nt, Artificial Sequence
  Description of Artificial Sequence: Synthetic oligonucleotide
  Sense Strand Starting at position 996 of SEQ ID NO: 316103
acugaaccuuccuuagagu

SEQ ID NO: 396892 - RNA, 19 nt, Artificial Sequence
  Description of Artificial Sequence: Synthetic oligonucleotide
  Antisense Strand to SEQ ID NO: 396891
acucuaaggaagguucagu

SEQ ID NO: 396893 - RNA, 19 nt, Artificial Sequence
  Description of Artificial Sequence: Synthetic oligonucleotide
  Sense Strand Starting at position 996 of SEQ ID NO: 316112
uccuuagagugucuauuac

SEQ ID NO: 396894 - RNA, 19 nt, Artificial Sequence
  Description of Artificial Sequence: Synthetic oligonucleotide
  Antisense Strand to SEQ ID NO: 396893
guaauagacacucuaagga

SEQ ID NO: 396895 - RNA, 19 nt, Artificial Sequence
  Description of Artificial Sequence: Synthetic oligonucleotide
  Sense Strand Starting at position 996 of SEQ ID NO: 316144
uugaaugucucagccaaag

SEQ ID NO: 396896 - RNA, 19 nt, Artificial Sequence
  Description of Artificial Sequence: Synthetic oligonucleotide
  Antisense Strand to SEQ ID NO: 396895
cuuuggcugagacauucaa

SEQ ID NO: 396897 - RNA, 19 nt, Artificial Sequence
  Description of Artificial Sequence: Synthetic oligonucleotide
  Sense Strand Starting at position 996 of SEQ ID NO: 316210
uaggcucuugcaggagauu

SEQ ID NO: 396898 - RNA, 19 nt, Artificial Sequence
  Description of Artificial Sequence: Synthetic oligonucleotide
  Antisense Strand to SEQ ID NO: 396897
aaucuccugcaagagccua

SEQ ID NO: 396899 - RNA, 19 nt, Artificial Sequence
  Description of Artificial Sequence: Synthetic oligonucleotide
  Sense Strand Starting at position 996 of SEQ ID NO: 316219
gcaggagauugacuguaau

SEQ ID NO: 396900 - RNA, 19 nt, Artificial Sequence
  Description of Artificial Sequence: Synthetic oligonucleotide
  Antisense Strand to SEQ ID NO: 396899
auuacagucaaucuccugc

SEQ ID NO: 396901 - RNA, 19 nt, Artificial Sequence
  Description of Artificial Sequence: Synthetic oligonucleotide
  Sense Strand Starting at position 996 of SEQ ID NO: 316283
acuccuuaauuagugaagu

SEQ ID NO: 396902 - RNA, 19 nt, Artificial Sequence
  Description of Artificial Sequence: Synthetic oligonucleotide
  Antisense Strand to SEQ ID NO: 396901
acuucacuaauuaaggagu

SEQ ID NO: 396903 - RNA, 19 nt, Artificial Sequence
  Description of Artificial Sequence: Synthetic oligonucleotide
  Sense Strand Starting at position 996 of SEQ ID NO: 317248
ggacgauucggguggagaa

SEQ ID NO: 396904 - RNA, 19 nt, Artificial Sequence
  Description of Artificial Sequence: Synthetic oligonucleotide
  Antisense Strand to SEQ ID NO: 396903
uucuccacccgaaucgucc

SEQ ID NO: 396905 - RNA, 19 nt, Artificial Sequence
  Description of Artificial Sequence: Synthetic oligonucleotide
  Sense Strand Starting at position 996 of SEQ ID NO: 317249
gacgauucggguggagaau

SEQ ID NO: 396906 - RNA, 19 nt, Artificial Sequence
  Description of Artificial Sequence: Synthetic oligonucleotide
  Antisense Strand to SEQ ID NO: 396905
auucuccacccgaaucguc

SEQ ID NO: 396907 - RNA, 19 nt, Artificial Sequence
  Description of Artificial Sequence: Synthetic oligonucleotide
  Sense Strand Starting at position 996 of SEQ ID NO: 317557
aaggacuucuaggagggaa

SEQ ID NO: 396908 - RNA, 19 nt, Artificial Sequence
  Description of Artificial Sequence: Synthetic oligonucleotide
  Antisense Strand to SEQ ID NO: 396907
uucccuccuagaaguccuu

SEQ ID NO: 396909 - RNA, 19 nt, Artificial Sequence
  Description of Artificial Sequence: Synthetic oligonucleotide
  Sense Strand Starting at position 996 of SEQ ID NO: 317890
ccguuuaaugggcagguaa

SEQ ID NO: 396910 - RNA, 19 nt, Artificial Sequence
  Description of Artificial Sequence: Synthetic oligonucleotide
  Antisense Strand to SEQ ID NO: 396909
uuaccugcccauuaaacgg

SEQ ID NO: 396911 - RNA, 19 nt, Artificial Sequence
  Description of Artificial Sequence: Synthetic oligonucleotide
  Sense Strand Starting at position 996 of SEQ ID NO: 317892
guuuaaugggcagguaauu

SEQ ID NO: 396912 - RNA, 19 nt, Artificial Sequence
  Description of Artificial Sequence: Synthetic oligonucleotide
  Antisense Strand to SEQ ID NO: 396911
aauuaccugcccauuaaac

SEQ ID NO: 396913 - RNA, 19 nt, Artificial Sequence
  Description of Artificial Sequence: Synthetic oligonucleotide
  Sense Strand Starting at position 996 of SEQ ID NO: 317913
cuccgugagugauuucaug

SEQ ID NO: 396914 - RNA, 19 nt, Artificial Sequence
  Description of Artificial Sequence: Synthetic oligonucleotide
  Antisense Strand to SEQ ID NO: 396913
caugaaaucacucacggag

SEQ ID NO: 396915 - RNA, 19 nt, Artificial Sequence
  Description of Artificial Sequence: Synthetic oligonucleotide
  Sense Strand Starting at position 996 of SEQ ID NO: 318132
uggaaagguuguguguaga

SEQ ID NO: 396916 - RNA, 19 nt, Artificial Sequence
  Description of Artificial Sequence: Synthetic oligonucleotide
  Antisense Strand to SEQ ID NO: 396915
ucuacacacaaccuuucca

SEQ ID NO: 396917 - RNA, 19 nt, Artificial Sequence
  Description of Artificial Sequence: Synthetic oligonucleotide
  Sense Strand Starting at position 996 of SEQ ID NO: 318145
uguagaugcuuccuauaug

SEQ ID NO: 396918 - RNA, 19 nt, Artificial Sequence
  Description of Artificial Sequence: Synthetic oligonucleotide
  Antisense Strand to SEQ ID NO: 396917
cauauaggaagcaucuaca

SEQ ID NO: 396919 - RNA, 19 nt, Artificial Sequence
  Description of Artificial Sequence: Synthetic oligonucleotide
  Sense Strand Starting at position 996 of SEQ ID NO: 318148
agaugcuuccuauaugauu

SEQ ID NO: 396920 - RNA, 19 nt, Artificial Sequence
  Description of Artificial Sequence: Synthetic oligonucleotide
  Antisense Strand to SEQ ID NO: 396919
aaucauauaggaagcaucu

SEQ ID NO: 396921 - RNA, 19 nt, Artificial Sequence
  Description of Artificial Sequence: Synthetic oligonucleotide
  Sense Strand Starting at position 996 of SEQ ID NO: 318196
ggcagaauucucuaaccuc

SEQ ID NO: 396922 - RNA, 19 nt, Artificial Sequence
  Description of Artificial Sequence: Synthetic oligonucleotide
  Antisense Strand to SEQ ID NO: 396921
gagguuagagaauucugcc

SEQ ID NO: 396923 - RNA, 19 nt, Artificial Sequence
  Description of Artificial Sequence: Synthetic oligonucleotide
  Sense Strand Starting at position 996 of SEQ ID NO: 318715
gcuuguucagaugaugaga

SEQ ID NO: 396924 - RNA, 19 nt, Artificial Sequence
  Description of Artificial Sequence: Synthetic oligonucleotide
  Antisense Strand to SEQ ID NO: 396923
ucucaucaucugaacaagc

SEQ ID NO: 396925 - RNA, 19 nt, Artificial Sequence
  Description of Artificial Sequence: Synthetic oligonucleotide
  Sense Strand Starting at position 996 of SEQ ID NO: 318770
gagcuaaaugcuggauggu

SEQ ID NO: 396926 - RNA, 19 nt, Artificial Sequence
  Description of Artificial Sequence: Synthetic oligonucleotide
  Antisense Strand to SEQ ID NO: 396925
accauccagcauuuagcuc

SEQ ID NO: 396927 - RNA, 19 nt, Artificial Sequence
  Description of Artificial Sequence: Synthetic oligonucleotide
  Sense Strand Starting at position 996 of SEQ ID NO: 318783
gauggugagucuuuaguuc

SEQ ID NO: 396928 - RNA, 19 nt, Artificial Sequence
  Description of Artificial Sequence: Synthetic oligonucleotide
  Antisense Strand to SEQ ID NO: 396927
gaacuaaagacucaccauc

SEQ ID NO: 396929 - RNA, 19 nt, Artificial Sequence
  Description of Artificial Sequence: Synthetic oligonucleotide
  Sense Strand Starting at position 996 of SEQ ID NO: 318820
aggaaagguucucuccaga

SEQ ID NO: 396930 - RNA, 19 nt, Artificial Sequence
  Description of Artificial Sequence: Synthetic oligonucleotide
  Antisense Strand to SEQ ID NO: 396929
ucuggagagaaccuuuccu

SEQ ID NO: 396931 - RNA, 19 nt, Artificial Sequence
  Description of Artificial Sequence: Synthetic oligonucleotide
  Sense Strand Starting at position 996 of SEQ ID NO: 319006
acgguaaugaaauagucuu

SEQ ID NO: 396932 - RNA, 19 nt, Artificial Sequence
  Description of Artificial Sequence: Synthetic oligonucleotide
  Antisense Strand to SEQ ID NO: 396931
aagacuauuucauuaccgu

SEQ ID NO: 396933 - RNA, 19 nt, Artificial Sequence
  Description of Artificial Sequence: Synthetic oligonucleotide
  Sense Strand Starting at position 996 of SEQ ID NO: 319019
agucuugcgaaagaauaaa

SEQ ID NO: 396934 - RNA, 19 nt, Artificial Sequence
  Description of Artificial Sequence: Synthetic oligonucleotide
  Antisense Strand to SEQ ID NO: 396933
uuuauucuuucgcaagacu

SEQ ID NO: 396935 - RNA, 19 nt, Artificial Sequence
  Description of Artificial Sequence: Synthetic oligonucleotide
  Sense Strand Starting at position 996 of SEQ ID NO: 319050
cuuguaaagcauuaagagu

SEQ ID NO: 396936 - RNA, 19 nt, Artificial Sequence
  Description of Artificial Sequence: Synthetic oligonucleotide
  Antisense Strand to SEQ ID NO: 396935
acucuuaaugcuuuacaag

SEQ ID NO: 396937 - RNA, 19 nt, Artificial Sequence
  Description of Artificial Sequence: Synthetic oligonucleotide
  Sense Strand Starting at position 996 of SEQ ID NO: 319124
gguuguuaaaguugaauca

SEQ ID NO: 396938 - RNA, 19 nt, Artificial Sequence
  Description of Artificial Sequence: Synthetic oligonucleotide
  Antisense Strand to SEQ ID NO: 396937
ugauucaacuuuaacaacc

SEQ ID NO: 396939 - RNA, 19 nt, Artificial Sequence
  Description of Artificial Sequence: Synthetic oligonucleotide
  Sense Strand Starting at position 996 of SEQ ID NO: 319134
guugaaucacuugaauucu

SEQ ID NO: 396940 - RNA, 19 nt, Artificial Sequence
  Description of Artificial Sequence: Synthetic oligonucleotide
  Antisense Strand to SEQ ID NO: 396939
agaauucaagugauucaac

SEQ ID NO: 396941 - RNA, 19 nt, Artificial Sequence
  Description of Artificial Sequence: Synthetic oligonucleotide
  Sense Strand Starting at position 996 of SEQ ID NO: 319201
aggcuuaaccguuaaggag

SEQ ID NO: 396942 - RNA, 19 nt, Artificial Sequence
  Description of Artificial Sequence: Synthetic oligonucleotide
  Antisense Strand to SEQ ID NO: 396941
cuccuuaacgguuaagccu

SEQ ID NO: 396943 - RNA, 19 nt, Artificial Sequence
  Description of Artificial Sequence: Synthetic oligonucleotide
  Sense Strand Starting at position 997 of SEQ ID NO: 315306
ugaacuagguccuuuaaca

SEQ ID NO: 396944 - RNA, 19 nt, Artificial Sequence
  Description of Artificial Sequence: Synthetic oligonucleotide
  Antisense Strand to SEQ ID NO: 396943
uguuaaaggaccuaguuca

SEQ ID NO: 396945 - RNA, 19 nt, Artificial Sequence
  Description of Artificial Sequence: Synthetic oligonucleotide
  Sense Strand Starting at position 997 of SEQ ID NO: 315341
cugucauaaggauaugcuu

SEQ ID NO: 396946 - RNA, 19 nt, Artificial Sequence
  Description of Artificial Sequence: Synthetic oligonucleotide
  Antisense Strand to SEQ ID NO: 396945
aagcauauccuuaugacag

SEQ ID NO: 396947 - RNA, 19 nt, Artificial Sequence
  Description of Artificial Sequence: Synthetic oligonucleotide
  Sense Strand Starting at position 997 of SEQ ID NO: 315349
aggauaugcuuuguuagga

SEQ ID NO: 396948 - RNA, 19 nt, Artificial Sequence
  Description of Artificial Sequence: Synthetic oligonucleotide
  Antisense Strand to SEQ ID NO: 396947
uccuaacaaagcauauccu

SEQ ID NO: 396949 - RNA, 19 nt, Artificial Sequence
  Description of Artificial Sequence: Synthetic oligonucleotide
  Sense Strand Starting at position 997 of SEQ ID NO: 315392
ggaagagguuucucuuagg

SEQ ID NO: 396950 - RNA, 19 nt, Artificial Sequence
  Description of Artificial Sequence: Synthetic oligonucleotide
  Antisense Strand to SEQ ID NO: 396949
ccuaagagaaaccucuucc

SEQ ID NO: 396951 - RNA, 19 nt, Artificial Sequence
  Description of Artificial Sequence: Synthetic oligonucleotide
  Sense Strand Starting at position 997 of SEQ ID NO: 315595
ugggaagcucuauagcaga

SEQ ID NO: 396952 - RNA, 19 nt, Artificial Sequence
  Description of Artificial Sequence: Synthetic oligonucleotide
  Antisense Strand to SEQ ID NO: 396951
ucugcuauagagcuuccca

SEQ ID NO: 396953 - RNA, 19 nt, Artificial Sequence
  Description of Artificial Sequence: Synthetic oligonucleotide
  Sense Strand Starting at position 997 of SEQ ID NO: 315744
ugggaaagguuucuuccuu

SEQ ID NO: 396954 - RNA, 19 nt, Artificial Sequence
  Description of Artificial Sequence: Synthetic oligonucleotide
  Antisense Strand to SEQ ID NO: 396953
aaggaagaaaccuuuccca

SEQ ID NO: 396955 - RNA, 19 nt, Artificial Sequence
  Description of Artificial Sequence: Synthetic oligonucleotide
  Sense Strand Starting at position 997 of SEQ ID NO: 315745
gggaaagguuucuuccuug

SEQ ID NO: 396956 - RNA, 19 nt, Artificial Sequence
  Description of Artificial Sequence: Synthetic oligonucleotide
  Antisense Strand to SEQ ID NO: 396955
caaggaagaaaccuuuccc

SEQ ID NO: 396957 - RNA, 19 nt, Artificial Sequence
  Description of Artificial Sequence: Synthetic oligonucleotide
  Sense Strand Starting at position 997 of SEQ ID NO: 315755
ucuuccuugggugaucuau

SEQ ID NO: 396958 - RNA, 19 nt, Artificial Sequence
  Description of Artificial Sequence: Synthetic oligonucleotide
  Antisense Strand to SEQ ID NO: 396957
auagaucacccaaggaaga

SEQ ID NO: 396959 - RNA, 19 nt, Artificial Sequence
  Description of Artificial Sequence: Synthetic oligonucleotide
  Sense Strand Starting at position 997 of SEQ ID NO: 315942
uuuguuggacucugaaaca

SEQ ID NO: 396960 - RNA, 19 nt, Artificial Sequence
  Description of Artificial Sequence: Synthetic oligonucleotide
  Antisense Strand to SEQ ID NO: 396959
uguuucagaguccaacaaa

SEQ ID NO: 396961 - RNA, 19 nt, Artificial Sequence
  Description of Artificial Sequence: Synthetic oligonucleotide
  Sense Strand Starting at position 997 of SEQ ID NO: 316049
ugacaacucccaggagcuu

SEQ ID NO: 396962 - RNA, 19 nt, Artificial Sequence
  Description of Artificial Sequence: Synthetic oligonucleotide
  Antisense Strand to SEQ ID NO: 396961
aagcuccugggaguuguca

SEQ ID NO: 396963 - RNA, 19 nt, Artificial Sequence
  Description of Artificial Sequence: Synthetic oligonucleotide
  Sense Strand Starting at position 997 of SEQ ID NO: 316087
ugcaauagggagugauaua

SEQ ID NO: 396964 - RNA, 19 nt, Artificial Sequence
  Description of Artificial Sequence: Synthetic oligonucleotide
  Antisense Strand to SEQ ID NO: 396963
uauaucacucccuauugca

SEQ ID NO: 396965 - RNA, 19 nt, Artificial Sequence
  Description of Artificial Sequence: Synthetic oligonucleotide
  Sense Strand Starting at position 997 of SEQ ID NO: 316110
acaaguauuuaggagauag

SEQ ID NO: 396966 - RNA, 19 nt, Artificial Sequence
  Description of Artificial Sequence: Synthetic oligonucleotide
  Antisense Strand to SEQ ID NO: 396965
cuaucuccuaaauacuugu

SEQ ID NO: 396967 - RNA, 19 nt, Artificial Sequence
  Description of Artificial Sequence: Synthetic oligonucleotide
  Sense Strand Starting at position 997 of SEQ ID NO: 316400
aucauagacucucugaguu

SEQ ID NO: 396968 - RNA, 19 nt, Artificial Sequence
  Description of Artificial Sequence: Synthetic oligonucleotide
  Antisense Strand to SEQ ID NO: 396967
aacucagagagucuaugau

SEQ ID NO: 396969 - RNA, 19 nt, Artificial Sequence
  Description of Artificial Sequence: Synthetic oligonucleotide
  Sense Strand Starting at position 997 of SEQ ID NO: 316404
uagacucucugaguugaag

SEQ ID NO: 396970 - RNA, 19 nt, Artificial Sequence
  Description of Artificial Sequence: Synthetic oligonucleotide
  Antisense Strand to SEQ ID NO: 396969
cuucaacucagagagucua

SEQ ID NO: 396971 - RNA, 19 nt, Artificial Sequence
  Description of Artificial Sequence: Synthetic oligonucleotide
  Sense Strand Starting at position 997 of SEQ ID NO: 316552
uuuaaaucucuugauagug

SEQ ID NO: 396972 - RNA, 19 nt, Artificial Sequence
  Description of Artificial Sequence: Synthetic oligonucleotide
  Antisense Strand to SEQ ID NO: 396971
cacuaucaagagauuuaaa

SEQ ID NO: 396973 - RNA, 19 nt, Artificial Sequence
  Description of Artificial Sequence: Synthetic oligonucleotide
  Sense Strand Starting at position 997 of SEQ ID NO: 316692
cugccaagugcugaagaau

SEQ ID NO: 396974 - RNA, 19 nt, Artificial Sequence
  Description of Artificial Sequence: Synthetic oligonucleotide
  Antisense Strand to SEQ ID NO: 396973
auucuucagcacuuggcag

SEQ ID NO: 396975 - RNA, 19 nt, Artificial Sequence
  Description of Artificial Sequence: Synthetic oligonucleotide
  Sense Strand Starting at position 997 of SEQ ID NO: 316695
ccaagugcugaagaaugua

SEQ ID NO: 396976 - RNA, 19 nt, Artificial Sequence
  Description of Artificial Sequence: Synthetic oligonucleotide
  Antisense Strand to SEQ ID NO: 396975
uacauucuucagcacuugg

SEQ ID NO: 396977 - RNA, 19 nt, Artificial Sequence
  Description of Artificial Sequence: Synthetic oligonucleotide
  Sense Strand Starting at position 997 of SEQ ID NO: 316703
ugaagaauguaggucuuaa

SEQ ID NO: 396978 - RNA, 19 nt, Artificial Sequence
  Description of Artificial Sequence: Synthetic oligonucleotide
  Antisense Strand to SEQ ID NO: 396977
uuaagaccuacauucuuca

SEQ ID NO: 396979 - RNA, 19 nt, Artificial Sequence
  Description of Artificial Sequence: Synthetic oligonucleotide
  Sense Strand Starting at position 997 of SEQ ID NO: 316743
agggaucucucacuugguu

SEQ ID NO: 396980 - RNA, 19 nt, Artificial Sequence
  Description of Artificial Sequence: Synthetic oligonucleotide
  Antisense Strand to SEQ ID NO: 396979
aaccaagugagagaucccu

SEQ ID NO: 396981 - RNA, 19 nt, Artificial Sequence
  Description of Artificial Sequence: Synthetic oligonucleotide
  Sense Strand Starting at position 997 of SEQ ID NO: 316849
ggguuucuaugaguaucac

SEQ ID NO: 396982 - RNA, 19 nt, Artificial Sequence
  Description of Artificial Sequence: Synthetic oligonucleotide
  Antisense Strand to SEQ ID NO: 396981
gugauacucauagaaaccc

SEQ ID NO: 396983 - RNA, 19 nt, Artificial Sequence
  Description of Artificial Sequence: Synthetic oligonucleotide
  Sense Strand Starting at position 997 of SEQ ID NO: 316850
gguuucuaugaguaucacu

SEQ ID NO: 396984 - RNA, 19 nt, Artificial Sequence
  Description of Artificial Sequence: Synthetic oligonucleotide
  Antisense Strand to SEQ ID NO: 396983
agugauacucauagaaacc

SEQ ID NO: 396985 - RNA, 19 nt, Artificial Sequence
  Description of Artificial Sequence: Synthetic oligonucleotide
  Sense Strand Starting at position 997 of SEQ ID NO: 316855
cuaugaguaucacuuggaa

SEQ ID NO: 396986 - RNA, 19 nt, Artificial Sequence
  Description of Artificial Sequence: Synthetic oligonucleotide
  Antisense Strand to SEQ ID NO: 396985
uuccaagugauacucauag

SEQ ID NO: 396987 - RNA, 19 nt, Artificial Sequence
  Description of Artificial Sequence: Synthetic oligonucleotide
  Sense Strand Starting at position 997 of SEQ ID NO: 316858
ugaguaucacuuggaacca

SEQ ID NO: 396988 - RNA, 19 nt, Artificial Sequence
  Description of Artificial Sequence: Synthetic oligonucleotide
  Antisense Strand to SEQ ID NO: 396987
ugguuccaagugauacuca

SEQ ID NO: 396989 - RNA, 19 nt, Artificial Sequence
  Description of Artificial Sequence: Synthetic oligonucleotide
  Sense Strand Starting at position 997 of SEQ ID NO: 316903
uggguuuggaauuggagau

SEQ ID NO: 396990 - RNA, 19 nt, Artificial Sequence
  Description of Artificial Sequence: Synthetic oligonucleotide
  Antisense Strand to SEQ ID NO: 396989
aucuccaauuccaaaccca

SEQ ID NO: 396991 - RNA, 19 nt, Artificial Sequence
  Description of Artificial Sequence: Synthetic oligonucleotide
  Sense Strand Starting at position 997 of SEQ ID NO: 316929
uugggaugugguuacucuu

SEQ ID NO: 396992 - RNA, 19 nt, Artificial Sequence
  Description of Artificial Sequence: Synthetic oligonucleotide
  Antisense Strand to SEQ ID NO: 396991
aagaguaaccacaucccaa

SEQ ID NO: 396993 - RNA, 19 nt, Artificial Sequence
  Description of Artificial Sequence: Synthetic oligonucleotide
  Sense Strand Starting at position 997 of SEQ ID NO: 317075
gugauucuuugaguaacau

SEQ ID NO: 396994 - RNA, 19 nt, Artificial Sequence
  Description of Artificial Sequence: Synthetic oligonucleotide
  Antisense Strand to SEQ ID NO: 396993
auguuacucaaagaaucac

SEQ ID NO: 396995 - RNA, 19 nt, Artificial Sequence
  Description of Artificial Sequence: Synthetic oligonucleotide
  Sense Strand Starting at position 997 of SEQ ID NO: 317202
aaaugaaugcgugauagca

SEQ ID NO: 396996 - RNA, 19 nt, Artificial Sequence
  Description of Artificial Sequence: Synthetic oligonucleotide
  Antisense Strand to SEQ ID NO: 396995
ugcuaucacgcauucauuu

SEQ ID NO: 396997 - RNA, 19 nt, Artificial Sequence
  Description of Artificial Sequence: Synthetic oligonucleotide
  Sense Strand Starting at position 997 of SEQ ID NO: 317212
gugauagcagucuaugaag

SEQ ID NO: 396998 - RNA, 19 nt, Artificial Sequence
  Description of Artificial Sequence: Synthetic oligonucleotide
  Antisense Strand to SEQ ID NO: 396997
cuucauagacugcuaucac

SEQ ID NO: 396999 - RNA, 19 nt, Artificial Sequence
  Description of Artificial Sequence: Synthetic oligonucleotide
  Sense Strand Starting at position 997 of SEQ ID NO: 317480
aucccugucgcugaugaaa

SEQ ID NO: 397000 - RNA, 19 nt, Artificial Sequence
  Description of Artificial Sequence: Synthetic oligonucleotide
  Antisense Strand to SEQ ID NO: 396999
uuucaucagcgacagggau

SEQ ID NO: 397001 - RNA, 19 nt, Artificial Sequence
  Description of Artificial Sequence: Synthetic oligonucleotide
  Sense Strand Starting at position 997 of SEQ ID NO: 317560
cuguccuccggguaagaaa

SEQ ID NO: 397002 - RNA, 19 nt, Artificial Sequence
  Description of Artificial Sequence: Synthetic oligonucleotide
  Antisense Strand to SEQ ID NO: 397001
uuucuuacccggaggacag

SEQ ID NO: 397003 - RNA, 19 nt, Artificial Sequence
  Description of Artificial Sequence: Synthetic oligonucleotide
  Sense Strand Starting at position 997 of SEQ ID NO: 317572
uaagaaaccguauaauagu

SEQ ID NO: 397004 - RNA, 19 nt, Artificial Sequence
  Description of Artificial Sequence: Synthetic oligonucleotide
  Antisense Strand to SEQ ID NO: 397003
acuauuauacgguuucuua

SEQ ID NO: 397005 - RNA, 19 nt, Artificial Sequence
  Description of Artificial Sequence: Synthetic oligonucleotide
  Sense Strand Starting at position 997 of SEQ ID NO: 317585
aauaguauucuggguacaa

SEQ ID NO: 397006 - RNA, 19 nt, Artificial Sequence
  Description of Artificial Sequence: Synthetic oligonucleotide
  Antisense Strand to SEQ ID NO: 397005
uuguacccagaauacuauu

SEQ ID NO: 397007 - RNA, 19 nt, Artificial Sequence
  Description of Artificial Sequence: Synthetic oligonucleotide
  Sense Strand Starting at position 997 of SEQ ID NO: 317586
auaguauucuggguacaaa

SEQ ID NO: 397008 - RNA, 19 nt, Artificial Sequence
  Description of Artificial Sequence: Synthetic oligonucleotide
  Antisense Strand to SEQ ID NO: 397007
uuuguacccagaauacuau

SEQ ID NO: 397009 - RNA, 19 nt, Artificial Sequence
  Description of Artificial Sequence: Synthetic oligonucleotide
  Sense Strand Starting at position 997 of SEQ ID NO: 318300
agaaguggagcuugaucuu

SEQ ID NO: 397010 - RNA, 19 nt, Artificial Sequence
  Description of Artificial Sequence: Synthetic oligonucleotide
  Antisense Strand to SEQ ID NO: 397009
aagaucaagcuccacuucu

SEQ ID NO: 397011 - RNA, 19 nt, Artificial Sequence
  Description of Artificial Sequence: Synthetic oligonucleotide
  Sense Strand Starting at position 997 of SEQ ID NO: 318512
agguuaaacuuguccaaga

SEQ ID NO: 397012 - RNA, 19 nt, Artificial Sequence
  Description of Artificial Sequence: Synthetic oligonucleotide
  Antisense Strand to SEQ ID NO: 397011
ucuuggacaaguuuaaccu

SEQ ID NO: 397013 - RNA, 19 nt, Artificial Sequence
  Description of Artificial Sequence: Synthetic oligonucleotide
  Sense Strand Starting at position 997 of SEQ ID NO: 318513
gguuaaacuuguccaagau

SEQ ID NO: 397014 - RNA, 19 nt, Artificial Sequence
  Description of Artificial Sequence: Synthetic oligonucleotide
  Antisense Strand to SEQ ID NO: 397013
aucuuggacaaguuuaacc

SEQ ID NO: 397015 - RNA, 19 nt, Artificial Sequence
  Description of Artificial Sequence: Synthetic oligonucleotide
  Sense Strand Starting at position 997 of SEQ ID NO: 318514
guuaaacuuguccaagaug

SEQ ID NO: 397016 - RNA, 19 nt, Artificial Sequence
  Description of Artificial Sequence: Synthetic oligonucleotide
  Antisense Strand to SEQ ID NO: 397015
caucuuggacaaguuuaac

SEQ ID NO: 397017 - RNA, 19 nt, Artificial Sequence
  Description of Artificial Sequence: Synthetic oligonucleotide
  Sense Strand Starting at position 997 of SEQ ID NO: 318569
gguugcguggucccagauu

SEQ ID NO: 397018 - RNA, 19 nt, Artificial Sequence
  Description of Artificial Sequence: Synthetic oligonucleotide
  Antisense Strand to SEQ ID NO: 397017
aaucugggaccacgcaacc

SEQ ID NO: 397019 - RNA, 19 nt, Artificial Sequence
  Description of Artificial Sequence: Synthetic oligonucleotide
  Sense Strand Starting at position 997 of SEQ ID NO: 318747
cacaguaaacucugaaggu

SEQ ID NO: 397020 - RNA, 19 nt, Artificial Sequence
  Description of Artificial Sequence: Synthetic oligonucleotide
  Antisense Strand to SEQ ID NO: 397019
accuucagaguuuacugug

SEQ ID NO: 397021 - RNA, 19 nt, Artificial Sequence
  Description of Artificial Sequence: Synthetic oligonucleotide
  Sense Strand Starting at position 997 of SEQ ID NO: 318987
ggguaaucaugacucacug

SEQ ID NO: 397022 - RNA, 19 nt, Artificial Sequence
  Description of Artificial Sequence: Synthetic oligonucleotide
  Antisense Strand to SEQ ID NO: 397021
cagugagucaugauuaccc

SEQ ID NO: 397023 - RNA, 19 nt, Artificial Sequence
  Description of Artificial Sequence: Synthetic oligonucleotide
  Sense Strand Starting at position 998 of SEQ ID NO: 315293
ugagauaaauugcuaggca

SEQ ID NO: 397024 - RNA, 19 nt, Artificial Sequence
  Description of Artificial Sequence: Synthetic oligonucleotide
  Antisense Strand to SEQ ID NO: 397023
ugccuagcaauuuaucuca

SEQ ID NO: 397025 - RNA, 19 nt, Artificial Sequence
  Description of Artificial Sequence: Synthetic oligonucleotide
  Sense Strand Starting at position 998 of SEQ ID NO: 315344
aaggcaaaugucuggacua

SEQ ID NO: 397026 - RNA, 19 nt, Artificial Sequence
  Description of Artificial Sequence: Synthetic oligonucleotide
  Antisense Strand to SEQ ID NO: 397025
uaguccagacauuugccuu

SEQ ID NO: 397027 - RNA, 19 nt, Artificial Sequence
  Description of Artificial Sequence: Synthetic oligonucleotide
  Sense Strand Starting at position 998 of SEQ ID NO: 315486
gcugcuucuagucaggaga

SEQ ID NO: 397028 - RNA, 19 nt, Artificial Sequence
  Description of Artificial Sequence: Synthetic oligonucleotide
  Antisense Strand to SEQ ID NO: 397027
ucuccugacuagaagcagc

SEQ ID NO: 397029 - RNA, 19 nt, Artificial Sequence
  Description of Artificial Sequence: Synthetic oligonucleotide
  Sense Strand Starting at position 998 of SEQ ID NO: 315518
aggaguugguagccacaga

SEQ ID NO: 397030 - RNA, 19 nt, Artificial Sequence
  Description of Artificial Sequence: Synthetic oligonucleotide
  Antisense Strand to SEQ ID NO: 397029
ucuguggcuaccaacuccu

SEQ ID NO: 397031 - RNA, 19 nt, Artificial Sequence
  Description of Artificial Sequence: Synthetic oligonucleotide
  Sense Strand Starting at position 998 of SEQ ID NO: 315529
gccacagacuaguucuaag

SEQ ID NO: 397032 - RNA, 19 nt, Artificial Sequence
  Description of Artificial Sequence: Synthetic oligonucleotide
  Antisense Strand to SEQ ID NO: 397031
cuuagaacuagucuguggc

SEQ ID NO: 397033 - RNA, 19 nt, Artificial Sequence
  Description of Artificial Sequence: Synthetic oligonucleotide
  Sense Strand Starting at position 998 of SEQ ID NO: 315596
aaacuaaaguggucuuaga

SEQ ID NO: 397034 - RNA, 19 nt, Artificial Sequence
  Description of Artificial Sequence: Synthetic oligonucleotide
  Antisense Strand to SEQ ID NO: 397033
ucuaagaccacuuuaguuu

SEQ ID NO: 397035 - RNA, 19 nt, Artificial Sequence
  Description of Artificial Sequence: Synthetic oligonucleotide
  Sense Strand Starting at position 998 of SEQ ID NO: 315605
uggucuuagauugguggga

SEQ ID NO: 397036 - RNA, 19 nt, Artificial Sequence
  Description of Artificial Sequence: Synthetic oligonucleotide
  Antisense Strand to SEQ ID NO: 397035
ucccaccaaucuaagacca

SEQ ID NO: 397037 - RNA, 19 nt, Artificial Sequence
  Description of Artificial Sequence: Synthetic oligonucleotide
  Sense Strand Starting at position 998 of SEQ ID NO: 315910
ugaagaauguaggucuuaa

SEQ ID NO: 397038 - RNA, 19 nt, Artificial Sequence
  Description of Artificial Sequence: Synthetic oligonucleotide
  Antisense Strand to SEQ ID NO: 397037
uuaagaccuacauucuuca

SEQ ID NO: 397039 - RNA, 19 nt, Artificial Sequence
  Description of Artificial Sequence: Synthetic oligonucleotide
  Sense Strand Starting at position 998 of SEQ ID NO: 315970
uuuauugguaugggcuaaa

SEQ ID NO: 397040 - RNA, 19 nt, Artificial Sequence
  Description of Artificial Sequence: Synthetic oligonucleotide
  Antisense Strand to SEQ ID NO: 397039
uuuagcccauaccaauaaa

SEQ ID NO: 397041 - RNA, 19 nt, Artificial Sequence
  Description of Artificial Sequence: Synthetic oligonucleotide
  Sense Strand Starting at position 998 of SEQ ID NO: 316135
uugggaugugguuacucuu

SEQ ID NO: 397042 - RNA, 19 nt, Artificial Sequence
  Description of Artificial Sequence: Synthetic oligonucleotide
  Antisense Strand to SEQ ID NO: 397041
aagaguaaccacaucccaa

SEQ ID NO: 397043 - RNA, 19 nt, Artificial Sequence
  Description of Artificial Sequence: Synthetic oligonucleotide
  Sense Strand Starting at position 998 of SEQ ID NO: 316183
gguugauucuuccuuugga

SEQ ID NO: 397044 - RNA, 19 nt, Artificial Sequence
  Description of Artificial Sequence: Synthetic oligonucleotide
  Antisense Strand to SEQ ID NO: 397043
uccaaaggaagaaucaacc

SEQ ID NO: 397045 - RNA, 19 nt, Artificial Sequence
  Description of Artificial Sequence: Synthetic oligonucleotide
  Sense Strand Starting at position 998 of SEQ ID NO: 316184
guugauucuuccuuuggag

SEQ ID NO: 397046 - RNA, 19 nt, Artificial Sequence
  Description of Artificial Sequence: Synthetic oligonucleotide
  Antisense Strand to SEQ ID NO: 397045
cuccaaaggaagaaucaac

SEQ ID NO: 397047 - RNA, 19 nt, Artificial Sequence
  Description of Artificial Sequence: Synthetic oligonucleotide
  Sense Strand Starting at position 998 of SEQ ID NO: 316548
uaugaagugccagguauaa

SEQ ID NO: 397048 - RNA, 19 nt, Artificial Sequence
  Description of Artificial Sequence: Synthetic oligonucleotide
  Antisense Strand to SEQ ID NO: 397047
uuauaccuggcacuucaua

SEQ ID NO: 397049 - RNA, 19 nt, Artificial Sequence
  Description of Artificial Sequence: Synthetic oligonucleotide
  Sense Strand Starting at position 998 of SEQ ID NO: 316608
uaaugugugauaggagucu

SEQ ID NO: 397050 - RNA, 19 nt, Artificial Sequence
  Description of Artificial Sequence: Synthetic oligonucleotide
  Antisense Strand to SEQ ID NO: 397049
agacuccuaucacacauua

SEQ ID NO: 397051 - RNA, 19 nt, Artificial Sequence
  Description of Artificial Sequence: Synthetic oligonucleotide
  Sense Strand Starting at position 998 of SEQ ID NO: 316642
ugcccauugguccacauga

SEQ ID NO: 397052 - RNA, 19 nt, Artificial Sequence
  Description of Artificial Sequence: Synthetic oligonucleotide
  Antisense Strand to SEQ ID NO: 397051
ucauguggaccaaugggca

SEQ ID NO: 397053 - RNA, 19 nt, Artificial Sequence
  Description of Artificial Sequence: Synthetic oligonucleotide
  Sense Strand Starting at position 998 of SEQ ID NO: 316644
cccauugguccacaugaca

SEQ ID NO: 397054 - RNA, 19 nt, Artificial Sequence
  Description of Artificial Sequence: Synthetic oligonucleotide
  Antisense Strand to SEQ ID NO: 397053
ugucauguggaccaauggg

SEQ ID NO: 397055 - RNA, 19 nt, Artificial Sequence
  Description of Artificial Sequence: Synthetic oligonucleotide
  Sense Strand Starting at position 998 of SEQ ID NO: 316685
aucccugucgcugaugaaa

SEQ ID NO: 397056 - RNA, 19 nt, Artificial Sequence
  Description of Artificial Sequence: Synthetic oligonucleotide
  Antisense Strand to SEQ ID NO: 397055
uuucaucagcgacagggau

SEQ ID NO: 397057 - RNA, 19 nt, Artificial Sequence
  Description of Artificial Sequence: Synthetic oligonucleotide
  Sense Strand Starting at position 998 of SEQ ID NO: 316765
cuguccuccggguaagaaa

SEQ ID NO: 397058 - RNA, 19 nt, Artificial Sequence
  Description of Artificial Sequence: Synthetic oligonucleotide
  Antisense Strand to SEQ ID NO: 397057
uuucuuacccggaggacag

SEQ ID NO: 397059 - RNA, 19 nt, Artificial Sequence
  Description of Artificial Sequence: Synthetic oligonucleotide
  Sense Strand Starting at position 998 of SEQ ID NO: 316773
cggguaagaaaccguauaa

SEQ ID NO: 397060 - RNA, 19 nt, Artificial Sequence
  Description of Artificial Sequence: Synthetic oligonucleotide
  Antisense Strand to SEQ ID NO: 397059
uuauacgguuucuuacccg

SEQ ID NO: 397061 - RNA, 19 nt, Artificial Sequence
  Description of Artificial Sequence: Synthetic oligonucleotide
  Sense Strand Starting at position 998 of SEQ ID NO: 316777
uaagaaaccguauaauagu

SEQ ID NO: 397062 - RNA, 19 nt, Artificial Sequence
  Description of Artificial Sequence: Synthetic oligonucleotide
  Antisense Strand to SEQ ID NO: 397061
acuauuauacgguuucuua

SEQ ID NO: 397063 - RNA, 19 nt, Artificial Sequence
  Description of Artificial Sequence: Synthetic oligonucleotide
  Sense Strand Starting at position 998 of SEQ ID NO: 316786
guauaauaguauucugggu

SEQ ID NO: 397064 - RNA, 19 nt, Artificial Sequence
  Description of Artificial Sequence: Synthetic oligonucleotide
  Antisense Strand to SEQ ID NO: 397063
acccagaauacuauuauac

SEQ ID NO: 397065 - RNA, 19 nt, Artificial Sequence
  Description of Artificial Sequence: Synthetic oligonucleotide
  Sense Strand Starting at position 998 of SEQ ID NO: 316790
aauaguauucuggguacaa

SEQ ID NO: 397066 - RNA, 19 nt, Artificial Sequence
  Description of Artificial Sequence: Synthetic oligonucleotide
  Antisense Strand to SEQ ID NO: 397065
uuguacccagaauacuauu

SEQ ID NO: 397067 - RNA, 19 nt, Artificial Sequence
  Description of Artificial Sequence: Synthetic oligonucleotide
  Sense Strand Starting at position 998 of SEQ ID NO: 316791
auaguauucuggguacaaa

SEQ ID NO: 397068 - RNA, 19 nt, Artificial Sequence
  Description of Artificial Sequence: Synthetic oligonucleotide
  Antisense Strand to SEQ ID NO: 397067
uuuguacccagaauacuau

SEQ ID NO: 397069 - RNA, 19 nt, Artificial Sequence
  Description of Artificial Sequence: Synthetic oligonucleotide
  Sense Strand Starting at position 998 of SEQ ID NO: 317516
agaaguggagcuugaucuu

SEQ ID NO: 397070 - RNA, 19 nt, Artificial Sequence
  Description of Artificial Sequence: Synthetic oligonucleotide
  Antisense Strand to SEQ ID NO: 397069
aagaucaagcuccacuucu

SEQ ID NO: 397071 - RNA, 19 nt, Artificial Sequence
  Description of Artificial Sequence: Synthetic oligonucleotide
  Sense Strand Starting at position 998 of SEQ ID NO: 317728
agguuaaacuuguccaaga

SEQ ID NO: 397072 - RNA, 19 nt, Artificial Sequence
  Description of Artificial Sequence: Synthetic oligonucleotide
  Antisense Strand to SEQ ID NO: 397071
ucuuggacaaguuuaaccu

SEQ ID NO: 397073 - RNA, 19 nt, Artificial Sequence
  Description of Artificial Sequence: Synthetic oligonucleotide
  Sense Strand Starting at position 998 of SEQ ID NO: 317729
gguuaaacuuguccaagau

SEQ ID NO: 397074 - RNA, 19 nt, Artificial Sequence
  Description of Artificial Sequence: Synthetic oligonucleotide
  Antisense Strand to SEQ ID NO: 397073
aucuuggacaaguuuaacc

SEQ ID NO: 397075 - RNA, 19 nt, Artificial Sequence
  Description of Artificial Sequence: Synthetic oligonucleotide
  Sense Strand Starting at position 998 of SEQ ID NO: 317730
guuaaacuuguccaagaug

SEQ ID NO: 397076 - RNA, 19 nt, Artificial Sequence
  Description of Artificial Sequence: Synthetic oligonucleotide
  Antisense Strand to SEQ ID NO: 397075
caucuuggacaaguuuaac

SEQ ID NO: 397077 - RNA, 19 nt, Artificial Sequence
  Description of Artificial Sequence: Synthetic oligonucleotide
  Sense Strand Starting at position 998 of SEQ ID NO: 317785
gguugcguggucccagauu

SEQ ID NO: 397078 - RNA, 19 nt, Artificial Sequence
  Description of Artificial Sequence: Synthetic oligonucleotide
  Antisense Strand to SEQ ID NO: 397077
aaucugggaccacgcaacc

SEQ ID NO: 397079 - RNA, 19 nt, Artificial Sequence
  Description of Artificial Sequence: Synthetic oligonucleotide
  Sense Strand Starting at position 998 of SEQ ID NO: 317963
cacaguaaacucugaaggu

SEQ ID NO: 397080 - RNA, 19 nt, Artificial Sequence
  Description of Artificial Sequence: Synthetic oligonucleotide
  Antisense Strand to SEQ ID NO: 397079
accuucagaguuuacugug

SEQ ID NO: 397081 - RNA, 19 nt, Artificial Sequence
  Description of Artificial Sequence: Synthetic oligonucleotide
  Sense Strand Starting at position 998 of SEQ ID NO: 317967
guaaacucugaagguagau

SEQ ID NO: 397082 - RNA, 19 nt, Artificial Sequence
  Description of Artificial Sequence: Synthetic oligonucleotide
  Antisense Strand to SEQ ID NO: 397081
aucuaccuucagaguuuac

SEQ ID NO: 397083 - RNA, 19 nt, Artificial Sequence
  Description of Artificial Sequence: Synthetic oligonucleotide
  Sense Strand Starting at position 998 of SEQ ID NO: 318554
uguguauuagucuaaauca

SEQ ID NO: 397084 - RNA, 19 nt, Artificial Sequence
  Description of Artificial Sequence: Synthetic oligonucleotide
  Antisense Strand to SEQ ID NO: 397083
ugauuuagacuaauacaca

SEQ ID NO: 397085 - RNA, 19 nt, Artificial Sequence
  Description of Artificial Sequence: Synthetic oligonucleotide
  Sense Strand Starting at position 998 of SEQ ID NO: 318683
ggcuuaugcaugcagaaag

SEQ ID NO: 397086 - RNA, 19 nt, Artificial Sequence
  Description of Artificial Sequence: Synthetic oligonucleotide
  Antisense Strand to SEQ ID NO: 397085
cuuucugcaugcauaagcc

SEQ ID NO: 397087 - RNA, 19 nt, Artificial Sequence
  Description of Artificial Sequence: Synthetic oligonucleotide
  Sense Strand Starting at position 998 of SEQ ID NO: 318772
ccuugcacaccuggagaau

SEQ ID NO: 397088 - RNA, 19 nt, Artificial Sequence
  Description of Artificial Sequence: Synthetic oligonucleotide
  Antisense Strand to SEQ ID NO: 397087
auucuccaggugugcaagg

SEQ ID NO: 397089 - RNA, 19 nt, Artificial Sequence
  Description of Artificial Sequence: Synthetic oligonucleotide
  Sense Strand Starting at position 998 of SEQ ID NO: 318977
gugcaucuuccaggauaac

SEQ ID NO: 397090 - RNA, 19 nt, Artificial Sequence
  Description of Artificial Sequence: Synthetic oligonucleotide
  Antisense Strand to SEQ ID NO: 397089
guuauccuggaagaugcac

SEQ ID NO: 397091 - RNA, 19 nt, Artificial Sequence
  Description of Artificial Sequence: Synthetic oligonucleotide
  Sense Strand Starting at position 998 of SEQ ID NO: 318978
ugcaucuuccaggauaaca

SEQ ID NO: 397092 - RNA, 19 nt, Artificial Sequence
  Description of Artificial Sequence: Synthetic oligonucleotide
  Antisense Strand to SEQ ID NO: 397091
uguuauccuggaagaugca

SEQ ID NO: 397093 - RNA, 19 nt, Artificial Sequence
  Description of Artificial Sequence: Synthetic oligonucleotide
  Sense Strand Starting at position 998 of SEQ ID NO: 319017
gucuguucuguuguaugca

SEQ ID NO: 397094 - RNA, 19 nt, Artificial Sequence
  Description of Artificial Sequence: Synthetic oligonucleotide
  Antisense Strand to SEQ ID NO: 397093
ugcauacaacagaacagac

SEQ ID NO: 397095 - RNA, 19 nt, Artificial Sequence
  Description of Artificial Sequence: Synthetic oligonucleotide
  Sense Strand Starting at position 998 of SEQ ID NO: 319107
aaugaucuuugugcagaag

SEQ ID NO: 397096 - RNA, 19 nt, Artificial Sequence
  Description of Artificial Sequence: Synthetic oligonucleotide
  Antisense Strand to SEQ ID NO: 397095
cuucugcacaaagaucauu

SEQ ID NO: 397097 - RNA, 19 nt, Artificial Sequence
  Description of Artificial Sequence: Synthetic oligonucleotide
  Sense Strand Starting at position 998 of SEQ ID NO: 319108
augaucuuugugcagaaga

SEQ ID NO: 397098 - RNA, 19 nt, Artificial Sequence
  Description of Artificial Sequence: Synthetic oligonucleotide
  Antisense Strand to SEQ ID NO: 397097
ucuucugcacaaagaucau

SEQ ID NO: 397099 - RNA, 19 nt, Artificial Sequence
  Description of Artificial Sequence: Synthetic oligonucleotide
  Sense Strand Starting at position 998 of SEQ ID NO: 319110
gaucuuugugcagaagaac

SEQ ID NO: 397100 - RNA, 19 nt, Artificial Sequence
  Description of Artificial Sequence: Synthetic oligonucleotide
  Antisense Strand to SEQ ID NO: 397099
guucuucugcacaaagauc

SEQ ID NO: 397101 - RNA, 19 nt, Artificial Sequence
  Description of Artificial Sequence: Synthetic oligonucleotide
  Sense Strand Starting at position 998 of SEQ ID NO: 319185
uuuagaguagcagguuaaa

SEQ ID NO: 397102 - RNA, 19 nt, Artificial Sequence
  Description of Artificial Sequence: Synthetic oligonucleotide
  Antisense Strand to SEQ ID NO: 397101
uuuaaccugcuacucuaaa

SEQ ID NO: 397103 - RNA, 19 nt, Artificial Sequence
  Description of Artificial Sequence: Synthetic oligonucleotide
  Sense Strand Starting at position 999 of SEQ ID NO: 315243
acacaagacuuaguauugu

SEQ ID NO: 397104 - RNA, 19 nt, Artificial Sequence
  Description of Artificial Sequence: Synthetic oligonucleotide
  Antisense Strand to SEQ ID NO: 397103
acaauacuaagucuugugu

SEQ ID NO: 397105 - RNA, 19 nt, Artificial Sequence
  Description of Artificial Sequence: Synthetic oligonucleotide
  Sense Strand Starting at position 999 of SEQ ID NO: 315591
caugcuggucuugaaacuu

SEQ ID NO: 397106 - RNA, 19 nt, Artificial Sequence
  Description of Artificial Sequence: Synthetic oligonucleotide
  Antisense Strand to SEQ ID NO: 397105
aaguuucaagaccagcaug

SEQ ID NO: 397107 - RNA, 19 nt, Artificial Sequence
  Description of Artificial Sequence: Synthetic oligonucleotide
  Sense Strand Starting at position 999 of SEQ ID NO: 315736
ucaggauggcucugaaucu

SEQ ID NO: 397108 - RNA, 19 nt, Artificial Sequence
  Description of Artificial Sequence: Synthetic oligonucleotide
  Antisense Strand to SEQ ID NO: 397107
agauucagagccauccuga

SEQ ID NO: 397109 - RNA, 19 nt, Artificial Sequence
  Description of Artificial Sequence: Synthetic oligonucleotide
  Sense Strand Starting at position 999 of SEQ ID NO: 315747
cugaaucuuccguauuguu

SEQ ID NO: 397110 - RNA, 19 nt, Artificial Sequence
  Description of Artificial Sequence: Synthetic oligonucleotide
  Antisense Strand to SEQ ID NO: 397109
aacaauacggaagauucag

SEQ ID NO: 397111 - RNA, 19 nt, Artificial Sequence
  Description of Artificial Sequence: Synthetic oligonucleotide
  Sense Strand Starting at position 999 of SEQ ID NO: 315818
gagugauuaguggacaguu

SEQ ID NO: 397112 - RNA, 19 nt, Artificial Sequence
  Description of Artificial Sequence: Synthetic oligonucleotide
  Antisense Strand to SEQ ID NO: 397111
aacuguccacuaaucacuc

SEQ ID NO: 397113 - RNA, 19 nt, Artificial Sequence
  Description of Artificial Sequence: Synthetic oligonucleotide
  Sense Strand Starting at position 999 of SEQ ID NO: 315984
auggucagaugguucugua

SEQ ID NO: 397114 - RNA, 19 nt, Artificial Sequence
  Description of Artificial Sequence: Synthetic oligonucleotide
  Antisense Strand to SEQ ID NO: 397113
uacagaaccaucugaccau

SEQ ID NO: 397115 - RNA, 19 nt, Artificial Sequence
  Description of Artificial Sequence: Synthetic oligonucleotide
  Sense Strand Starting at position 999 of SEQ ID NO: 315988
ucagaugguucuguaacau

SEQ ID NO: 397116 - RNA, 19 nt, Artificial Sequence
  Description of Artificial Sequence: Synthetic oligonucleotide
  Antisense Strand to SEQ ID NO: 397115
auguuacagaaccaucuga

SEQ ID NO: 397117 - RNA, 19 nt, Artificial Sequence
  Description of Artificial Sequence: Synthetic oligonucleotide
  Sense Strand Starting at position 999 of SEQ ID NO: 316065
agacaaggauuguccuauc

SEQ ID NO: 397118 - RNA, 19 nt, Artificial Sequence
  Description of Artificial Sequence: Synthetic oligonucleotide
  Antisense Strand to SEQ ID NO: 397117
gauaggacaauccuugucu

SEQ ID NO: 397119 - RNA, 19 nt, Artificial Sequence
  Description of Artificial Sequence: Synthetic oligonucleotide
  Sense Strand Starting at position 999 of SEQ ID NO: 316075
uguccuaucuggguuauau

SEQ ID NO: 397120 - RNA, 19 nt, Artificial Sequence
  Description of Artificial Sequence: Synthetic oligonucleotide
  Antisense Strand to SEQ ID NO: 397119
auauaacccagauaggaca

SEQ ID NO: 397121 - RNA, 19 nt, Artificial Sequence
  Description of Artificial Sequence: Synthetic oligonucleotide
  Sense Strand Starting at position 999 of SEQ ID NO: 316077
uccuaucuggguuauauau

SEQ ID NO: 397122 - RNA, 19 nt, Artificial Sequence
  Description of Artificial Sequence: Synthetic oligonucleotide
  Antisense Strand to SEQ ID NO: 397121
auauauaacccagauagga

SEQ ID NO: 397123 - RNA, 19 nt, Artificial Sequence
  Description of Artificial Sequence: Synthetic oligonucleotide
  Sense Strand Starting at position 999 of SEQ ID NO: 316182
acauguaauuuacaggcaa

SEQ ID NO: 397124 - RNA, 19 nt, Artificial Sequence
  Description of Artificial Sequence: Synthetic oligonucleotide
  Antisense Strand to SEQ ID NO: 397123
uugccuguaaauuacaugu

SEQ ID NO: 397125 - RNA, 19 nt, Artificial Sequence
  Description of Artificial Sequence: Synthetic oligonucleotide
  Sense Strand Starting at position 999 of SEQ ID NO: 316207
gacucugaucccugcugau

SEQ ID NO: 397126 - RNA, 19 nt, Artificial Sequence
  Description of Artificial Sequence: Synthetic oligonucleotide
  Antisense Strand to SEQ ID NO: 397125
aucagcagggaucagaguc

SEQ ID NO: 397127 - RNA, 19 nt, Artificial Sequence
  Description of Artificial Sequence: Synthetic oligonucleotide
  Sense Strand Starting at position 999 of SEQ ID NO: 316318
ucacuuuacguauaguaac

SEQ ID NO: 397128 - RNA, 19 nt, Artificial Sequence
  Description of Artificial Sequence: Synthetic oligonucleotide
  Antisense Strand to SEQ ID NO: 397127
guuacuauacguaaaguga

SEQ ID NO: 397129 - RNA, 19 nt, Artificial Sequence
  Description of Artificial Sequence: Synthetic oligonucleotide
  Sense Strand Starting at position 999 of SEQ ID NO: 316378
agcuuaaguggcuaauacu

SEQ ID NO: 397130 - RNA, 19 nt, Artificial Sequence
  Description of Artificial Sequence: Synthetic oligonucleotide
  Antisense Strand to SEQ ID NO: 397129
aguauuagccacuuaagcu

SEQ ID NO: 397131 - RNA, 19 nt, Artificial Sequence
  Description of Artificial Sequence: Synthetic oligonucleotide
  Sense Strand Starting at position 999 of SEQ ID NO: 316722
agaaauacucgcuacauau

SEQ ID NO: 397132 - RNA, 19 nt, Artificial Sequence
  Description of Artificial Sequence: Synthetic oligonucleotide
  Antisense Strand to SEQ ID NO: 397131
auauguagcgaguauuucu

SEQ ID NO: 397133 - RNA, 19 nt, Artificial Sequence
  Description of Artificial Sequence: Synthetic oligonucleotide
  Sense Strand Starting at position 999 of SEQ ID NO: 317356
ucgcaagcucacugggaaa

SEQ ID NO: 397134 - RNA, 19 nt, Artificial Sequence
  Description of Artificial Sequence: Synthetic oligonucleotide
  Antisense Strand to SEQ ID NO: 397133
uuucccagugagcuugcga

SEQ ID NO: 397135 - RNA, 19 nt, Artificial Sequence
  Description of Artificial Sequence: Synthetic oligonucleotide
  Sense Strand Starting at position 999 of SEQ ID NO: 317440
ugauuuggauuagaaagcu

SEQ ID NO: 397136 - RNA, 19 nt, Artificial Sequence
  Description of Artificial Sequence: Synthetic oligonucleotide
  Antisense Strand to SEQ ID NO: 397135
agcuuucuaauccaaauca

SEQ ID NO: 397137 - RNA, 19 nt, Artificial Sequence
  Description of Artificial Sequence: Synthetic oligonucleotide
  Sense Strand Starting at position 999 of SEQ ID NO: 317464
agggucaucgcuuaguaau

SEQ ID NO: 397138 - RNA, 19 nt, Artificial Sequence
  Description of Artificial Sequence: Synthetic oligonucleotide
  Antisense Strand to SEQ ID NO: 397137
auuacuaagcgaugacccu

SEQ ID NO: 397139 - RNA, 19 nt, Artificial Sequence
  Description of Artificial Sequence: Synthetic oligonucleotide
  Sense Strand Starting at position 999 of SEQ ID NO: 317466
ggucaucgcuuaguaauuu

SEQ ID NO: 397140 - RNA, 19 nt, Artificial Sequence
  Description of Artificial Sequence: Synthetic oligonucleotide
  Antisense Strand to SEQ ID NO: 397139
aaauuacuaagcgaugacc

SEQ ID NO: 397141 - RNA, 19 nt, Artificial Sequence
  Description of Artificial Sequence: Synthetic oligonucleotide
  Sense Strand Starting at position 999 of SEQ ID NO: 317472
cgcuuaguaauuuaggguu

SEQ ID NO: 397142 - RNA, 19 nt, Artificial Sequence
  Description of Artificial Sequence: Synthetic oligonucleotide
  Antisense Strand to SEQ ID NO: 397141
aacccuaaauuacuaagcg

SEQ ID NO: 397143 - RNA, 19 nt, Artificial Sequence
  Description of Artificial Sequence: Synthetic oligonucleotide
  Sense Strand Starting at position 999 of SEQ ID NO: 317614
ucaguaacuuuguuaaccu

SEQ ID NO: 397144 - RNA, 19 nt, Artificial Sequence
  Description of Artificial Sequence: Synthetic oligonucleotide
  Antisense Strand to SEQ ID NO: 397143
agguuaacaaaguuacuga

SEQ ID NO: 397145 - RNA, 19 nt, Artificial Sequence
  Description of Artificial Sequence: Synthetic oligonucleotide
  Sense Strand Starting at position 999 of SEQ ID NO: 317734
gcuauaucauuugaaagga

SEQ ID NO: 397146 - RNA, 19 nt, Artificial Sequence
  Description of Artificial Sequence: Synthetic oligonucleotide
  Antisense Strand to SEQ ID NO: 397145
uccuuucaaaugauauagc

SEQ ID NO: 397147 - RNA, 19 nt, Artificial Sequence
  Description of Artificial Sequence: Synthetic oligonucleotide
  Sense Strand Starting at position 999 of SEQ ID NO: 317758
ccgacaugauguccuucua

SEQ ID NO: 397148 - RNA, 19 nt, Artificial Sequence
  Description of Artificial Sequence: Synthetic oligonucleotide
  Antisense Strand to SEQ ID NO: 397147
uagaaggacaucaugucgg

SEQ ID NO: 397149 - RNA, 19 nt, Artificial Sequence
  Description of Artificial Sequence: Synthetic oligonucleotide
  Sense Strand Starting at position 999 of SEQ ID NO: 318161
ucuaacuucugagugaaga

SEQ ID NO: 397150 - RNA, 19 nt, Artificial Sequence
  Description of Artificial Sequence: Synthetic oligonucleotide
  Antisense Strand to SEQ ID NO: 397149
ucuucacucagaaguuaga

SEQ ID NO: 397151 - RNA, 19 nt, Artificial Sequence
  Description of Artificial Sequence: Synthetic oligonucleotide
  Sense Strand Starting at position 999 of SEQ ID NO: 318162
cuaacuucugagugaagac

SEQ ID NO: 397152 - RNA, 19 nt, Artificial Sequence
  Description of Artificial Sequence: Synthetic oligonucleotide
  Antisense Strand to SEQ ID NO: 397151
gucuucacucagaaguuag

SEQ ID NO: 397153 - RNA, 19 nt, Artificial Sequence
  Description of Artificial Sequence: Synthetic oligonucleotide
  Sense Strand Starting at position 999 of SEQ ID NO: 318279
cagagagauucucuuaugu

SEQ ID NO: 397154 - RNA, 19 nt, Artificial Sequence
  Description of Artificial Sequence: Synthetic oligonucleotide
  Antisense Strand to SEQ ID NO: 397153
acauaagagaaucucucug

SEQ ID NO: 397155 - RNA, 19 nt, Artificial Sequence
  Description of Artificial Sequence: Synthetic oligonucleotide
  Sense Strand Starting at position 999 of SEQ ID NO: 318284
agauucucuuaugucauca

SEQ ID NO: 397156 - RNA, 19 nt, Artificial Sequence
  Description of Artificial Sequence: Synthetic oligonucleotide
  Antisense Strand to SEQ ID NO: 397155
ugaugacauaagagaaucu

SEQ ID NO: 397157 - RNA, 19 nt, Artificial Sequence
  Description of Artificial Sequence: Synthetic oligonucleotide
  Sense Strand Starting at position 999 of SEQ ID NO: 318289
cucuuaugucaucaguaca

SEQ ID NO: 397158 - RNA, 19 nt, Artificial Sequence
  Description of Artificial Sequence: Synthetic oligonucleotide
  Antisense Strand to SEQ ID NO: 397157
uguacugaugacauaagag

SEQ ID NO: 397159 - RNA, 19 nt, Artificial Sequence
  Description of Artificial Sequence: Synthetic oligonucleotide
  Sense Strand Starting at position 999 of SEQ ID NO: 318292
uuaugucaucaguacacuu

SEQ ID NO: 397160 - RNA, 19 nt, Artificial Sequence
  Description of Artificial Sequence: Synthetic oligonucleotide
  Antisense Strand to SEQ ID NO: 397159
aaguguacugaugacauaa

SEQ ID NO: 397161 - RNA, 19 nt, Artificial Sequence
  Description of Artificial Sequence: Synthetic oligonucleotide
  Sense Strand Starting at position 999 of SEQ ID NO: 318294
augucaucaguacacuuau

SEQ ID NO: 397162 - RNA, 19 nt, Artificial Sequence
  Description of Artificial Sequence: Synthetic oligonucleotide
  Antisense Strand to SEQ ID NO: 397161
auaaguguacugaugacau

SEQ ID NO: 397163 - RNA, 19 nt, Artificial Sequence
  Description of Artificial Sequence: Synthetic oligonucleotide
  Sense Strand Starting at position 999 of SEQ ID NO: 318326
uugauauugcaauaguacu

SEQ ID NO: 397164 - RNA, 19 nt, Artificial Sequence
  Description of Artificial Sequence: Synthetic oligonucleotide
  Antisense Strand to SEQ ID NO: 397163
aguacuauugcaauaucaa

SEQ ID NO: 397165 - RNA, 19 nt, Artificial Sequence
  Description of Artificial Sequence: Synthetic oligonucleotide
  Sense Strand Starting at position 999 of SEQ ID NO: 318470
uuaucaggucucuagucuu

SEQ ID NO: 397166 - RNA, 19 nt, Artificial Sequence
  Description of Artificial Sequence: Synthetic oligonucleotide
  Antisense Strand to SEQ ID NO: 397165
aagacuagagaccugauaa

SEQ ID NO: 397167 - RNA, 19 nt, Artificial Sequence
  Description of Artificial Sequence: Synthetic oligonucleotide
  Sense Strand Starting at position 999 of SEQ ID NO: 318473
ucaggucucuagucuuuaa

SEQ ID NO: 397168 - RNA, 19 nt, Artificial Sequence
  Description of Artificial Sequence: Synthetic oligonucleotide
  Antisense Strand to SEQ ID NO: 397167
uuaaagacuagagaccuga

SEQ ID NO: 397169 - RNA, 19 nt, Artificial Sequence
  Description of Artificial Sequence: Synthetic oligonucleotide
  Sense Strand Starting at position 999 of SEQ ID NO: 318476
ggucucuagucuuuaacug

SEQ ID NO: 397170 - RNA, 19 nt, Artificial Sequence
  Description of Artificial Sequence: Synthetic oligonucleotide
  Antisense Strand to SEQ ID NO: 397169
caguuaaagacuagagacc

SEQ ID NO: 397171 - RNA, 19 nt, Artificial Sequence
  Description of Artificial Sequence: Synthetic oligonucleotide
  Sense Strand Starting at position 999 of SEQ ID NO: 318477
gucucuagucuuuaacuga

SEQ ID NO: 397172 - RNA, 19 nt, Artificial Sequence
  Description of Artificial Sequence: Synthetic oligonucleotide
  Antisense Strand to SEQ ID NO: 397171
ucaguuaaagacuagagac

SEQ ID NO: 397173 - RNA, 19 nt, Artificial Sequence
  Description of Artificial Sequence: Synthetic oligonucleotide
  Sense Strand Starting at position 999 of SEQ ID NO: 318511
cuguuaaauuuguaacaug

SEQ ID NO: 397174 - RNA, 19 nt, Artificial Sequence
  Description of Artificial Sequence: Synthetic oligonucleotide
  Antisense Strand to SEQ ID NO: 397173
cauguuacaaauuuaacag

SEQ ID NO: 397175 - RNA, 19 nt, Artificial Sequence
  Description of Artificial Sequence: Synthetic oligonucleotide
  Sense Strand Starting at position 999 of SEQ ID NO: 318522
guaacauggguuuguugga

SEQ ID NO: 397176 - RNA, 19 nt, Artificial Sequence
  Description of Artificial Sequence: Synthetic oligonucleotide
  Antisense Strand to SEQ ID NO: 397175
uccaacaaacccauguuac

SEQ ID NO: 397177 - RNA, 19 nt, Artificial Sequence
  Description of Artificial Sequence: Synthetic oligonucleotide
  Sense Strand Starting at position 999 of SEQ ID NO: 318594
ggugcaucacaucagaaua

SEQ ID NO: 397178 - RNA, 19 nt, Artificial Sequence
  Description of Artificial Sequence: Synthetic oligonucleotide
  Antisense Strand to SEQ ID NO: 397177
uauucugaugugaugcacc

SEQ ID NO: 397179 - RNA, 19 nt, Artificial Sequence
  Description of Artificial Sequence: Synthetic oligonucleotide
  Sense Strand Starting at position 999 of SEQ ID NO: 319163
acacauggguucccaauau

SEQ ID NO: 397180 - RNA, 19 nt, Artificial Sequence
  Description of Artificial Sequence: Synthetic oligonucleotide
  Antisense Strand to SEQ ID NO: 397179
auauugggaacccaugugu

SEQ ID NO: 397181 - RNA, 19 nt, Artificial Sequence
  Description of Artificial Sequence: Synthetic oligonucleotide
  Sense Strand Starting at position 999 of SEQ ID NO: 319176
caauauuguggugguauuu

SEQ ID NO: 397182 - RNA, 19 nt, Artificial Sequence
  Description of Artificial Sequence: Synthetic oligonucleotide
  Antisense Strand to SEQ ID NO: 397181
aaauaccaccacaauauug

SEQ ID NO: 397183 - RNA, 19 nt, Artificial Sequence
  Description of Artificial Sequence: Synthetic oligonucleotide
  Sense Strand Starting at position 1000 of SEQ ID NO: 315544
caugcuggucuugaaacuu

SEQ ID NO: 397184 - RNA, 19 nt, Artificial Sequence
  Description of Artificial Sequence: Synthetic oligonucleotide
  Antisense Strand to SEQ ID NO: 397183
aaguuucaagaccagcaug

SEQ ID NO: 397185 - RNA, 19 nt, Artificial Sequence
  Description of Artificial Sequence: Synthetic oligonucleotide
  Sense Strand Starting at position 1000 of SEQ ID NO: 315689
ucaggauggcucugaaucu

SEQ ID NO: 397186 - RNA, 19 nt, Artificial Sequence
  Description of Artificial Sequence: Synthetic oligonucleotide
  Antisense Strand to SEQ ID NO: 397185
agauucagagccauccuga

SEQ ID NO: 397187 - RNA, 19 nt, Artificial Sequence
  Description of Artificial Sequence: Synthetic oligonucleotide
  Sense Strand Starting at position 1000 of SEQ ID NO: 315771
gagugauuaguggacaguu

SEQ ID NO: 397188 - RNA, 19 nt, Artificial Sequence
  Description of Artificial Sequence: Synthetic oligonucleotide
  Antisense Strand to SEQ ID NO: 397187
aacuguccacuaaucacuc

SEQ ID NO: 397189 - RNA, 19 nt, Artificial Sequence
  Description of Artificial Sequence: Synthetic oligonucleotide
  Sense Strand Starting at position 1000 of SEQ ID NO: 315937
auggucagaugguucugua

SEQ ID NO: 397190 - RNA, 19 nt, Artificial Sequence
  Description of Artificial Sequence: Synthetic oligonucleotide
  Antisense Strand to SEQ ID NO: 397189
uacagaaccaucugaccau

SEQ ID NO: 397191 - RNA, 19 nt, Artificial Sequence
  Description of Artificial Sequence: Synthetic oligonucleotide
  Sense Strand Starting at position 1000 of SEQ ID NO: 315941
ucagaugguucuguaacau

SEQ ID NO: 397192 - RNA, 19 nt, Artificial Sequence
  Description of Artificial Sequence: Synthetic oligonucleotide
  Antisense Strand to SEQ ID NO: 397191
auguuacagaaccaucuga

SEQ ID NO: 397193 - RNA, 19 nt, Artificial Sequence
  Description of Artificial Sequence: Synthetic oligonucleotide
  Sense Strand Starting at position 1000 of SEQ ID NO: 316018
agacaaggauuguccuauc

SEQ ID NO: 397194 - RNA, 19 nt, Artificial Sequence
  Description of Artificial Sequence: Synthetic oligonucleotide
  Antisense Strand to SEQ ID NO: 397193
gauaggacaauccuugucu

SEQ ID NO: 397195 - RNA, 19 nt, Artificial Sequence
  Description of Artificial Sequence: Synthetic oligonucleotide
  Sense Strand Starting at position 1000 of SEQ ID NO: 316030
uccuaucuggguuauauau

SEQ ID NO: 397196 - RNA, 19 nt, Artificial Sequence
  Description of Artificial Sequence: Synthetic oligonucleotide
  Antisense Strand to SEQ ID NO: 397195
auauauaacccagauagga

SEQ ID NO: 397197 - RNA, 19 nt, Artificial Sequence
  Description of Artificial Sequence: Synthetic oligonucleotide
  Sense Strand Starting at position 1000 of SEQ ID NO: 316135
acauguaauuuacaggcaa

SEQ ID NO: 397198 - RNA, 19 nt, Artificial Sequence
  Description of Artificial Sequence: Synthetic oligonucleotide
  Antisense Strand to SEQ ID NO: 397197
uugccuguaaauuacaugu

SEQ ID NO: 397199 - RNA, 19 nt, Artificial Sequence
  Description of Artificial Sequence: Synthetic oligonucleotide
  Sense Strand Starting at position 1000 of SEQ ID NO: 316160
gacucugaucccugcugau

SEQ ID NO: 397200 - RNA, 19 nt, Artificial Sequence
  Description of Artificial Sequence: Synthetic oligonucleotide
  Antisense Strand to SEQ ID NO: 397199
aucagcagggaucagaguc

SEQ ID NO: 397201 - RNA, 19 nt, Artificial Sequence
  Description of Artificial Sequence: Synthetic oligonucleotide
  Sense Strand Starting at position 1000 of SEQ ID NO: 316271
ucacuuuacguauaguaac

SEQ ID NO: 397202 - RNA, 19 nt, Artificial Sequence
  Description of Artificial Sequence: Synthetic oligonucleotide
  Antisense Strand to SEQ ID NO: 397201
guuacuauacguaaaguga

SEQ ID NO: 397203 - RNA, 19 nt, Artificial Sequence
  Description of Artificial Sequence: Synthetic oligonucleotide
  Sense Strand Starting at position 1000 of SEQ ID NO: 316331
agcuuaaguggcuaauacu

SEQ ID NO: 397204 - RNA, 19 nt, Artificial Sequence
  Description of Artificial Sequence: Synthetic oligonucleotide
  Antisense Strand to SEQ ID NO: 397203
aguauuagccacuuaagcu

SEQ ID NO: 397205 - RNA, 19 nt, Artificial Sequence
  Description of Artificial Sequence: Synthetic oligonucleotide
  Sense Strand Starting at position 1000 of SEQ ID NO: 316675
agaaauacucgcuacauau

SEQ ID NO: 397206 - RNA, 19 nt, Artificial Sequence
  Description of Artificial Sequence: Synthetic oligonucleotide
  Antisense Strand to SEQ ID NO: 397205
auauguagcgaguauuucu

SEQ ID NO: 397207 - RNA, 19 nt, Artificial Sequence
  Description of Artificial Sequence: Synthetic oligonucleotide
  Sense Strand Starting at position 1000 of SEQ ID NO: 317393
ugauuuggauuagaaagcu

SEQ ID NO: 397208 - RNA, 19 nt, Artificial Sequence
  Description of Artificial Sequence: Synthetic oligonucleotide
  Antisense Strand to SEQ ID NO: 397207
agcuuucuaauccaaauca

SEQ ID NO: 397209 - RNA, 19 nt, Artificial Sequence
  Description of Artificial Sequence: Synthetic oligonucleotide
  Sense Strand Starting at position 1000 of SEQ ID NO: 317417
agggucaucgcuuaguaau

SEQ ID NO: 397210 - RNA, 19 nt, Artificial Sequence
  Description of Artificial Sequence: Synthetic oligonucleotide
  Antisense Strand to SEQ ID NO: 397209
auuacuaagcgaugacccu

SEQ ID NO: 397211 - RNA, 19 nt, Artificial Sequence
  Description of Artificial Sequence: Synthetic oligonucleotide
  Sense Strand Starting at position 1000 of SEQ ID NO: 317419
ggucaucgcuuaguaauuu

SEQ ID NO: 397212 - RNA, 19 nt, Artificial Sequence
  Description of Artificial Sequence: Synthetic oligonucleotide
  Antisense Strand to SEQ ID NO: 397211
aaauuacuaagcgaugacc

SEQ ID NO: 397213 - RNA, 19 nt, Artificial Sequence
  Description of Artificial Sequence: Synthetic oligonucleotide
  Sense Strand Starting at position 1000 of SEQ ID NO: 317425
cgcuuaguaauuuaggguu

SEQ ID NO: 397214 - RNA, 19 nt, Artificial Sequence
  Description of Artificial Sequence: Synthetic oligonucleotide
  Antisense Strand to SEQ ID NO: 397213
aacccuaaauuacuaagcg

SEQ ID NO: 397215 - RNA, 19 nt, Artificial Sequence
  Description of Artificial Sequence: Synthetic oligonucleotide
  Sense Strand Starting at position 1000 of SEQ ID NO: 317567
ucaguaacuuuguuaaccu

SEQ ID NO: 397216 - RNA, 19 nt, Artificial Sequence
  Description of Artificial Sequence: Synthetic oligonucleotide
  Antisense Strand to SEQ ID NO: 397215
agguuaacaaaguuacuga

SEQ ID NO: 397217 - RNA, 19 nt, Artificial Sequence
  Description of Artificial Sequence: Synthetic oligonucleotide
  Sense Strand Starting at position 1000 of SEQ ID NO: 317687
gcuauaucauuugaaagga

SEQ ID NO: 397218 - RNA, 19 nt, Artificial Sequence
  Description of Artificial Sequence: Synthetic oligonucleotide
  Antisense Strand to SEQ ID NO: 397217
uccuuucaaaugauauagc

SEQ ID NO: 397219 - RNA, 19 nt, Artificial Sequence
  Description of Artificial Sequence: Synthetic oligonucleotide
  Sense Strand Starting at position 1000 of SEQ ID NO: 317711
ccgacaugauguccuucua

SEQ ID NO: 397220 - RNA, 19 nt, Artificial Sequence
  Description of Artificial Sequence: Synthetic oligonucleotide
  Antisense Strand to SEQ ID NO: 397219
uagaaggacaucaugucgg

SEQ ID NO: 397221 - RNA, 19 nt, Artificial Sequence
  Description of Artificial Sequence: Synthetic oligonucleotide
  Sense Strand Starting at position 1000 of SEQ ID NO: 318114
ucuaacuucugagugaaga

SEQ ID NO: 397222 - RNA, 19 nt, Artificial Sequence
  Description of Artificial Sequence: Synthetic oligonucleotide
  Antisense Strand to SEQ ID NO: 397221
ucuucacucagaaguuaga

SEQ ID NO: 397223 - RNA, 19 nt, Artificial Sequence
  Description of Artificial Sequence: Synthetic oligonucleotide
  Sense Strand Starting at position 1000 of SEQ ID NO: 318115
cuaacuucugagugaagac

SEQ ID NO: 397224 - RNA, 19 nt, Artificial Sequence
  Description of Artificial Sequence: Synthetic oligonucleotide
  Antisense Strand to SEQ ID NO: 397223
gucuucacucagaaguuag

SEQ ID NO: 397225 - RNA, 19 nt, Artificial Sequence
  Description of Artificial Sequence: Synthetic oligonucleotide
  Sense Strand Starting at position 1000 of SEQ ID NO: 318232
cagagagauucucuuaugu

SEQ ID NO: 397226 - RNA, 19 nt, Artificial Sequence
  Description of Artificial Sequence: Synthetic oligonucleotide
  Antisense Strand to SEQ ID NO: 397225
acauaagagaaucucucug

SEQ ID NO: 397227 - RNA, 19 nt, Artificial Sequence
  Description of Artificial Sequence: Synthetic oligonucleotide
  Sense Strand Starting at position 1000 of SEQ ID NO: 318237
agauucucuuaugucauca

SEQ ID NO: 397228 - RNA, 19 nt, Artificial Sequence
  Description of Artificial Sequence: Synthetic oligonucleotide
  Antisense Strand to SEQ ID NO: 397227
ugaugacauaagagaaucu

SEQ ID NO: 397229 - RNA, 19 nt, Artificial Sequence
  Description of Artificial Sequence: Synthetic oligonucleotide
  Sense Strand Starting at position 1000 of SEQ ID NO: 318242
cucuuaugucaucaguaca

SEQ ID NO: 397230 - RNA, 19 nt, Artificial Sequence
  Description of Artificial Sequence: Synthetic oligonucleotide
  Antisense Strand to SEQ ID NO: 397229
uguacugaugacauaagag

SEQ ID NO: 397231 - RNA, 19 nt, Artificial Sequence
  Description of Artificial Sequence: Synthetic oligonucleotide
  Sense Strand Starting at position 1000 of SEQ ID NO: 318245
uuaugucaucaguacacuu

SEQ ID NO: 397232 - RNA, 19 nt, Artificial Sequence
  Description of Artificial Sequence: Synthetic oligonucleotide
  Antisense Strand to SEQ ID NO: 397231
aaguguacugaugacauaa

SEQ ID NO: 397233 - RNA, 19 nt, Artificial Sequence
  Description of Artificial Sequence: Synthetic oligonucleotide
  Sense Strand Starting at position 1000 of SEQ ID NO: 318247
augucaucaguacacuuau

SEQ ID NO: 397234 - RNA, 19 nt, Artificial Sequence
  Description of Artificial Sequence: Synthetic oligonucleotide
  Antisense Strand to SEQ ID NO: 397233
auaaguguacugaugacau

SEQ ID NO: 397235 - RNA, 19 nt, Artificial Sequence
  Description of Artificial Sequence: Synthetic oligonucleotide
  Sense Strand Starting at position 1000 of SEQ ID NO: 318279
uugauauugcaauaguacu

SEQ ID NO: 397236 - RNA, 19 nt, Artificial Sequence
  Description of Artificial Sequence: Synthetic oligonucleotide
  Antisense Strand to SEQ ID NO: 397235
aguacuauugcaauaucaa

SEQ ID NO: 397237 - RNA, 19 nt, Artificial Sequence
  Description of Artificial Sequence: Synthetic oligonucleotide
  Sense Strand Starting at position 1000 of SEQ ID NO: 318423
uuaucaggucucuagucuu

SEQ ID NO: 397238 - RNA, 19 nt, Artificial Sequence
  Description of Artificial Sequence: Synthetic oligonucleotide
  Antisense Strand to SEQ ID NO: 397237
aagacuagagaccugauaa

SEQ ID NO: 397239 - RNA, 19 nt, Artificial Sequence
  Description of Artificial Sequence: Synthetic oligonucleotide
  Sense Strand Starting at position 1000 of SEQ ID NO: 318426
ucaggucucuagucuuuaa

SEQ ID NO: 397240 - RNA, 19 nt, Artificial Sequence
  Description of Artificial Sequence: Synthetic oligonucleotide
  Antisense Strand to SEQ ID NO: 397239
uuaaagacuagagaccuga

SEQ ID NO: 397241 - RNA, 19 nt, Artificial Sequence
  Description of Artificial Sequence: Synthetic oligonucleotide
  Sense Strand Starting at position 1000 of SEQ ID NO: 318429
ggucucuagucuuuaacug

SEQ ID NO: 397242 - RNA, 19 nt, Artificial Sequence
  Description of Artificial Sequence: Synthetic oligonucleotide
  Antisense Strand to SEQ ID NO: 397241
caguuaaagacuagagacc

SEQ ID NO: 397243 - RNA, 19 nt, Artificial Sequence
  Description of Artificial Sequence: Synthetic oligonucleotide
  Sense Strand Starting at position 1000 of SEQ ID NO: 318430
gucucuagucuuuaacuga

SEQ ID NO: 397244 - RNA, 19 nt, Artificial Sequence
  Description of Artificial Sequence: Synthetic oligonucleotide
  Antisense Strand to SEQ ID NO: 397243
ucaguuaaagacuagagac

SEQ ID NO: 397245 - RNA, 19 nt, Artificial Sequence
  Description of Artificial Sequence: Synthetic oligonucleotide
  Sense Strand Starting at position 1000 of SEQ ID NO: 318475
guaacauggguuuguugga

SEQ ID NO: 397246 - RNA, 19 nt, Artificial Sequence
  Description of Artificial Sequence: Synthetic oligonucleotide
  Antisense Strand to SEQ ID NO: 397245
uccaacaaacccauguuac

SEQ ID NO: 397247 - RNA, 19 nt, Artificial Sequence
  Description of Artificial Sequence: Synthetic oligonucleotide
  Sense Strand Starting at position 1000 of SEQ ID NO: 318547
ggugcaucacaucagaaua

SEQ ID NO: 397248 - RNA, 19 nt, Artificial Sequence
  Description of Artificial Sequence: Synthetic oligonucleotide
  Antisense Strand to SEQ ID NO: 397247
uauucugaugugaugcacc

SEQ ID NO: 397249 - RNA, 19 nt, Artificial Sequence
  Description of Artificial Sequence: Synthetic oligonucleotide
  Sense Strand Starting at position 1000 of SEQ ID NO: 319116
acacauggguucccaauau

SEQ ID NO: 397250 - RNA, 19 nt, Artificial Sequence
  Description of Artificial Sequence: Synthetic oligonucleotide
  Antisense Strand to SEQ ID NO: 397249
auauugggaacccaugugu

SEQ ID NO: 397251 - RNA, 19 nt, Artificial Sequence
  Description of Artificial Sequence: Synthetic oligonucleotide
  Sense Strand Starting at position 1000 of SEQ ID NO: 319129
caauauuguggugguauuu

SEQ ID NO: 397252 - RNA, 19 nt, Artificial Sequence
  Description of Artificial Sequence: Synthetic oligonucleotide
  Antisense Strand to SEQ ID NO: 397251
aaauaccaccacaauauug

SEQ ID NO: 397253 - RNA, 19 nt, Artificial Sequence
  Description of Artificial Sequence: Synthetic oligonucleotide
  Sense Strand Starting at position 1000 of SEQ ID NO: 319199
acuugauuaaggugaugau

SEQ ID NO: 397254 - RNA, 19 nt, Artificial Sequence
  Description of Artificial Sequence: Synthetic oligonucleotide
  Antisense Strand to SEQ ID NO: 397253
aucaucaccuuaaucaagu

SEQ ID NO: 397255 - RNA, 19 nt, Artificial Sequence
  Description of Artificial Sequence: Synthetic oligonucleotide
  Sense Strand Starting at position 1000 of SEQ ID NO: 319208
aggugaugaucuuugccau

SEQ ID NO: 397256 - RNA, 19 nt, Artificial Sequence
  Description of Artificial Sequence: Synthetic oligonucleotide
  Antisense Strand to SEQ ID NO: 397255
auggcaaagaucaucaccu

SEQ ID NO: 397257 - RNA, 19 nt, Artificial Sequence
  Description of Artificial Sequence: Synthetic oligonucleotide
  Sense Strand Starting at position 1000 of SEQ ID NO: 319209
ggugaugaucuuugccaug

SEQ ID NO: 397258 - RNA, 19 nt, Artificial Sequence
  Description of Artificial Sequence: Synthetic oligonucleotide
  Antisense Strand to SEQ ID NO: 397257
cauggcaaagaucaucacc

SEQ ID NO: 397259 - RNA, 19 nt, Artificial Sequence
  Description of Artificial Sequence: Synthetic oligonucleotide
  Sense Strand Starting at position 1000 of SEQ ID NO: 319211
ugaugaucuuugccaugac

SEQ ID NO: 397260 - RNA, 19 nt, Artificial Sequence
  Description of Artificial Sequence: Synthetic oligonucleotide
  Antisense Strand to SEQ ID NO: 397259
gucauggcaaagaucauca

SEQ ID NO: 397261 - RNA, 19 nt, Artificial Sequence
  Description of Artificial Sequence: Synthetic oligonucleotide
  Sense Strand Starting at position 1000 of SEQ ID NO: 319215
gaucuuugccaugacaguu

SEQ ID NO: 397262 - RNA, 19 nt, Artificial Sequence
  Description of Artificial Sequence: Synthetic oligonucleotide
  Antisense Strand to SEQ ID NO: 397261
aacugucauggcaaagauc

SEQ ID NO: 397263 - RNA, 19 nt, Artificial Sequence
  Description of Artificial Sequence: Synthetic oligonucleotide
  Sense Strand Starting at position 1001 of SEQ ID NO: 315364
cgagacagcucaccuaagu

SEQ ID NO: 397264 - RNA, 19 nt, Artificial Sequence
  Description of Artificial Sequence: Synthetic oligonucleotide
  Antisense Strand to SEQ ID NO: 397263
acuuaggugagcugucucg

SEQ ID NO: 397265 - RNA, 19 nt, Artificial Sequence
  Description of Artificial Sequence: Synthetic oligonucleotide
  Sense Strand Starting at position 1001 of SEQ ID NO: 315640
agccguaaggcuuaagacu

SEQ ID NO: 397266 - RNA, 19 nt, Artificial Sequence
  Description of Artificial Sequence: Synthetic oligonucleotide
  Antisense Strand to SEQ ID NO: 397265
agucuuaagccuuacggcu

SEQ ID NO: 397267 - RNA, 19 nt, Artificial Sequence
  Description of Artificial Sequence: Synthetic oligonucleotide
  Sense Strand Starting at position 1001 of SEQ ID NO: 315655
gacucaauggcuugucacu

SEQ ID NO: 397268 - RNA, 19 nt, Artificial Sequence
  Description of Artificial Sequence: Synthetic oligonucleotide
  Antisense Strand to SEQ ID NO: 397267
agugacaagccauugaguc

SEQ ID NO: 397269 - RNA, 19 nt, Artificial Sequence
  Description of Artificial Sequence: Synthetic oligonucleotide
  Sense Strand Starting at position 1001 of SEQ ID NO: 315657
cucaauggcuugucacuaa

SEQ ID NO: 397270 - RNA, 19 nt, Artificial Sequence
  Description of Artificial Sequence: Synthetic oligonucleotide
  Antisense Strand to SEQ ID NO: 397269
uuagugacaagccauugag

SEQ ID NO: 397271 - RNA, 19 nt, Artificial Sequence
  Description of Artificial Sequence: Synthetic oligonucleotide
  Sense Strand Starting at position 1001 of SEQ ID NO: 315661
auggcuugucacuaauacu

SEQ ID NO: 397272 - RNA, 19 nt, Artificial Sequence
  Description of Artificial Sequence: Synthetic oligonucleotide
  Antisense Strand to SEQ ID NO: 397271
aguauuagugacaagccau

SEQ ID NO: 397273 - RNA, 19 nt, Artificial Sequence
  Description of Artificial Sequence: Synthetic oligonucleotide
  Sense Strand Starting at position 1001 of SEQ ID NO: 315703
aguuaaugcuaucuaauag

SEQ ID NO: 397274 - RNA, 19 nt, Artificial Sequence
  Description of Artificial Sequence: Synthetic oligonucleotide
  Antisense Strand to SEQ ID NO: 397273
cuauuagauagcauuaacu

SEQ ID NO: 397275 - RNA, 19 nt, Artificial Sequence
  Description of Artificial Sequence: Synthetic oligonucleotide
  Sense Strand Starting at position 1001 of SEQ ID NO: 316497
aggagaugccgcugacauc

SEQ ID NO: 397276 - RNA, 19 nt, Artificial Sequence
  Description of Artificial Sequence: Synthetic oligonucleotide
  Antisense Strand to SEQ ID NO: 397275
gaugucagcggcaucuccu

SEQ ID NO: 397277 - RNA, 19 nt, Artificial Sequence
  Description of Artificial Sequence: Synthetic oligonucleotide
  Sense Strand Starting at position 1001 of SEQ ID NO: 317231
gucuuugaggucugaggag

SEQ ID NO: 397278 - RNA, 19 nt, Artificial Sequence
  Description of Artificial Sequence: Synthetic oligonucleotide
  Antisense Strand to SEQ ID NO: 397277
cuccucagaccucaaagac

SEQ ID NO: 397279 - RNA, 19 nt, Artificial Sequence
  Description of Artificial Sequence: Synthetic oligonucleotide
  Sense Strand Starting at position 1001 of SEQ ID NO: 317581
cggauuucgucccaaauuu

SEQ ID NO: 397280 - RNA, 19 nt, Artificial Sequence
  Description of Artificial Sequence: Synthetic oligonucleotide
  Antisense Strand to SEQ ID NO: 397279
aaauuugggacgaaauccg

SEQ ID NO: 397281 - RNA, 19 nt, Artificial Sequence
  Description of Artificial Sequence: Synthetic oligonucleotide
  Sense Strand Starting at position 1001 of SEQ ID NO: 317625
agaagagcagaauguuuau

SEQ ID NO: 397282 - RNA, 19 nt, Artificial Sequence
  Description of Artificial Sequence: Synthetic oligonucleotide
  Antisense Strand to SEQ ID NO: 397281
auaaacauucugcucuucu

SEQ ID NO: 397283 - RNA, 19 nt, Artificial Sequence
  Description of Artificial Sequence: Synthetic oligonucleotide
  Sense Strand Starting at position 1001 of SEQ ID NO: 317631
gcagaauguuuauuugcca

SEQ ID NO: 397284 - RNA, 19 nt, Artificial Sequence
  Description of Artificial Sequence: Synthetic oligonucleotide
  Antisense Strand to SEQ ID NO: 397283
uggcaaauaaacauucugc

SEQ ID NO: 397285 - RNA, 19 nt, Artificial Sequence
  Description of Artificial Sequence: Synthetic oligonucleotide
  Sense Strand Starting at position 1001 of SEQ ID NO: 317752
cuuacuuuguuucuccaga

SEQ ID NO: 397286 - RNA, 19 nt, Artificial Sequence
  Description of Artificial Sequence: Synthetic oligonucleotide
  Antisense Strand to SEQ ID NO: 397285
ucuggagaaacaaaguaag

SEQ ID NO: 397287 - RNA, 19 nt, Artificial Sequence
  Description of Artificial Sequence: Synthetic oligonucleotide
  Sense Strand Starting at position 1001 of SEQ ID NO: 317820
agauuaugcguucagaugu

SEQ ID NO: 397288 - RNA, 19 nt, Artificial Sequence
  Description of Artificial Sequence: Synthetic oligonucleotide
  Antisense Strand to SEQ ID NO: 397287
acaucugaacgcauaaucu

SEQ ID NO: 397289 - RNA, 19 nt, Artificial Sequence
  Description of Artificial Sequence: Synthetic oligonucleotide
  Sense Strand Starting at position 1001 of SEQ ID NO: 317837
guggcaaaggcuuaagaga

SEQ ID NO: 397290 - RNA, 19 nt, Artificial Sequence
  Description of Artificial Sequence: Synthetic oligonucleotide
  Antisense Strand to SEQ ID NO: 397289
ucucuuaagccuuugccac

SEQ ID NO: 397291 - RNA, 19 nt, Artificial Sequence
  Description of Artificial Sequence: Synthetic oligonucleotide
  Sense Strand Starting at position 1001 of SEQ ID NO: 317864
cucuuaaucguagcgguuu

SEQ ID NO: 397292 - RNA, 19 nt, Artificial Sequence
  Description of Artificial Sequence: Synthetic oligonucleotide
  Antisense Strand to SEQ ID NO: 397291
aaaccgcuacgauuaagag

SEQ ID NO: 397293 - RNA, 19 nt, Artificial Sequence
  Description of Artificial Sequence: Synthetic oligonucleotide
  Sense Strand Starting at position 1001 of SEQ ID NO: 318194
cagguuaagucuuugagag

SEQ ID NO: 397294 - RNA, 19 nt, Artificial Sequence
  Description of Artificial Sequence: Synthetic oligonucleotide
  Antisense Strand to SEQ ID NO: 397293
cucucaaagacuuaaccug

SEQ ID NO: 397295 - RNA, 19 nt, Artificial Sequence
  Description of Artificial Sequence: Synthetic oligonucleotide
  Sense Strand Starting at position 1001 of SEQ ID NO: 318195
agguuaagucuuugagaga

SEQ ID NO: 397296 - RNA, 19 nt, Artificial Sequence
  Description of Artificial Sequence: Synthetic oligonucleotide
  Antisense Strand to SEQ ID NO: 397295
ucucucaaagacuuaaccu

SEQ ID NO: 397297 - RNA, 19 nt, Artificial Sequence
  Description of Artificial Sequence: Synthetic oligonucleotide
  Sense Strand Starting at position 1001 of SEQ ID NO: 318245
ggagucugggaguaagagu

SEQ ID NO: 397298 - RNA, 19 nt, Artificial Sequence
  Description of Artificial Sequence: Synthetic oligonucleotide
  Antisense Strand to SEQ ID NO: 397297
acucuuacucccagacucc

SEQ ID NO: 397299 - RNA, 19 nt, Artificial Sequence
  Description of Artificial Sequence: Synthetic oligonucleotide
  Sense Strand Starting at position 1001 of SEQ ID NO: 318301
uggagcaugcaagauuaau

SEQ ID NO: 397300 - RNA, 19 nt, Artificial Sequence
  Description of Artificial Sequence: Synthetic oligonucleotide
  Antisense Strand to SEQ ID NO: 397299
auuaaucuugcaugcucca

SEQ ID NO: 397301 - RNA, 19 nt, Artificial Sequence
  Description of Artificial Sequence: Synthetic oligonucleotide
  Sense Strand Starting at position 1001 of SEQ ID NO: 318336
agcaguguggcugaaauuc

SEQ ID NO: 397302 - RNA, 19 nt, Artificial Sequence
  Description of Artificial Sequence: Synthetic oligonucleotide
  Antisense Strand to SEQ ID NO: 397301
gaauuucagccacacugcu

SEQ ID NO: 397303 - RNA, 19 nt, Artificial Sequence
  Description of Artificial Sequence: Synthetic oligonucleotide
  Sense Strand Starting at position 1001 of SEQ ID NO: 318387
aggugaagguucucacaug

SEQ ID NO: 397304 - RNA, 19 nt, Artificial Sequence
  Description of Artificial Sequence: Synthetic oligonucleotide
  Antisense Strand to SEQ ID NO: 397303
caugugagaaccuucaccu

SEQ ID NO: 397305 - RNA, 19 nt, Artificial Sequence
  Description of Artificial Sequence: Synthetic oligonucleotide
  Sense Strand Starting at position 1001 of SEQ ID NO: 318530
ugcuuaggaaauuguguua

SEQ ID NO: 397306 - RNA, 19 nt, Artificial Sequence
  Description of Artificial Sequence: Synthetic oligonucleotide
  Antisense Strand to SEQ ID NO: 397305
uaacacaauuuccuaagca

SEQ ID NO: 397307 - RNA, 19 nt, Artificial Sequence
  Description of Artificial Sequence: Synthetic oligonucleotide
  Sense Strand Starting at position 1001 of SEQ ID NO: 318578
gcaacuuuguugguuaaua

SEQ ID NO: 397308 - RNA, 19 nt, Artificial Sequence
  Description of Artificial Sequence: Synthetic oligonucleotide
  Antisense Strand to SEQ ID NO: 397307
uauuaaccaacaaaguugc

SEQ ID NO: 397309 - RNA, 19 nt, Artificial Sequence
  Description of Artificial Sequence: Synthetic oligonucleotide
  Sense Strand Starting at position 1001 of SEQ ID NO: 318627
ucagacuaggucuguaaau

SEQ ID NO: 397310 - RNA, 19 nt, Artificial Sequence
  Description of Artificial Sequence: Synthetic oligonucleotide
  Antisense Strand to SEQ ID NO: 397309
auuuacagaccuagucuga

SEQ ID NO: 397311 - RNA, 19 nt, Artificial Sequence
  Description of Artificial Sequence: Synthetic oligonucleotide
  Sense Strand Starting at position 1001 of SEQ ID NO: 318628
cagacuaggucuguaaauc

SEQ ID NO: 397312 - RNA, 19 nt, Artificial Sequence
  Description of Artificial Sequence: Synthetic oligonucleotide
  Antisense Strand to SEQ ID NO: 397311
gauuuacagaccuagucug

SEQ ID NO: 397313 - RNA, 19 nt, Artificial Sequence
  Description of Artificial Sequence: Synthetic oligonucleotide
  Sense Strand Starting at position 1001 of SEQ ID NO: 318629
agacuaggucuguaaaucu

SEQ ID NO: 397314 - RNA, 19 nt, Artificial Sequence
  Description of Artificial Sequence: Synthetic oligonucleotide
  Antisense Strand to SEQ ID NO: 397313
agauuuacagaccuagucu

SEQ ID NO: 397315 - RNA, 19 nt, Artificial Sequence
  Description of Artificial Sequence: Synthetic oligonucleotide
  Sense Strand Starting at position 1001 of SEQ ID NO: 318636
gucuguaaaucuguaaaua

SEQ ID NO: 397316 - RNA, 19 nt, Artificial Sequence
  Description of Artificial Sequence: Synthetic oligonucleotide
  Antisense Strand to SEQ ID NO: 397315
uauuuacagauuuacagac

SEQ ID NO: 397317 - RNA, 19 nt, Artificial Sequence
  Description of Artificial Sequence: Synthetic oligonucleotide
  Sense Strand Starting at position 1001 of SEQ ID NO: 318862
agacacuugugauuacacu

SEQ ID NO: 397318 - RNA, 19 nt, Artificial Sequence
  Description of Artificial Sequence: Synthetic oligonucleotide
  Antisense Strand to SEQ ID NO: 397317
aguguaaucacaagugucu

SEQ ID NO: 397319 - RNA, 19 nt, Artificial Sequence
  Description of Artificial Sequence: Synthetic oligonucleotide
  Sense Strand Starting at position 1001 of SEQ ID NO: 318898
ucaggauaauaucuucgua

SEQ ID NO: 397320 - RNA, 19 nt, Artificial Sequence
  Description of Artificial Sequence: Synthetic oligonucleotide
  Antisense Strand to SEQ ID NO: 397319
uacgaagauauuauccuga

SEQ ID NO: 397321 - RNA, 19 nt, Artificial Sequence
  Description of Artificial Sequence: Synthetic oligonucleotide
  Sense Strand Starting at position 1001 of SEQ ID NO: 318900
aggauaauaucuucguaug

SEQ ID NO: 397322 - RNA, 19 nt, Artificial Sequence
  Description of Artificial Sequence: Synthetic oligonucleotide
  Antisense Strand to SEQ ID NO: 397321
cauacgaagauauuauccu

SEQ ID NO: 397323 - RNA, 19 nt, Artificial Sequence
  Description of Artificial Sequence: Synthetic oligonucleotide
  Sense Strand Starting at position 1001 of SEQ ID NO: 318901
ggauaauaucuucguaugg

SEQ ID NO: 397324 - RNA, 19 nt, Artificial Sequence
  Description of Artificial Sequence: Synthetic oligonucleotide
  Antisense Strand to SEQ ID NO: 397323
ccauacgaagauauuaucc

SEQ ID NO: 397325 - RNA, 19 nt, Artificial Sequence
  Description of Artificial Sequence: Synthetic oligonucleotide
  Sense Strand Starting at position 1001 of SEQ ID NO: 318902
gauaauaucuucguaugga

SEQ ID NO: 397326 - RNA, 19 nt, Artificial Sequence
  Description of Artificial Sequence: Synthetic oligonucleotide
  Antisense Strand to SEQ ID NO: 397325
uccauacgaagauauuauc

SEQ ID NO: 397327 - RNA, 19 nt, Artificial Sequence
  Description of Artificial Sequence: Synthetic oligonucleotide
  Sense Strand Starting at position 1001 of SEQ ID NO: 318905
aauaucuucguauggaagu

SEQ ID NO: 397328 - RNA, 19 nt, Artificial Sequence
  Description of Artificial Sequence: Synthetic oligonucleotide
  Antisense Strand to SEQ ID NO: 397327
acuuccauacgaagauauu

SEQ ID NO: 397329 - RNA, 19 nt, Artificial Sequence
  Description of Artificial Sequence: Synthetic oligonucleotide
  Sense Strand Starting at position 1001 of SEQ ID NO: 318948
auucuuguaugaguaugua

SEQ ID NO: 397330 - RNA, 19 nt, Artificial Sequence
  Description of Artificial Sequence: Synthetic oligonucleotide
  Antisense Strand to SEQ ID NO: 397329
uacauacucauacaagaau

SEQ ID NO: 397331 - RNA, 19 nt, Artificial Sequence
  Description of Artificial Sequence: Synthetic oligonucleotide
  Sense Strand Starting at position 1001 of SEQ ID NO: 318951
cuuguaugaguauguaaag

SEQ ID NO: 397332 - RNA, 19 nt, Artificial Sequence
  Description of Artificial Sequence: Synthetic oligonucleotide
  Antisense Strand to SEQ ID NO: 397331
cuuuacauacucauacaag

SEQ ID NO: 397333 - RNA, 19 nt, Artificial Sequence
  Description of Artificial Sequence: Synthetic oligonucleotide
  Sense Strand Starting at position 1001 of SEQ ID NO: 318952
uuguaugaguauguaaagu

SEQ ID NO: 397334 - RNA, 19 nt, Artificial Sequence
  Description of Artificial Sequence: Synthetic oligonucleotide
  Antisense Strand to SEQ ID NO: 397333
acuuuacauacucauacaa

SEQ ID NO: 397335 - RNA, 19 nt, Artificial Sequence
  Description of Artificial Sequence: Synthetic oligonucleotide
  Sense Strand Starting at position 1001 of SEQ ID NO: 318992
ggauuacgauaucuuugag

SEQ ID NO: 397336 - RNA, 19 nt, Artificial Sequence
  Description of Artificial Sequence: Synthetic oligonucleotide
  Antisense Strand to SEQ ID NO: 397335
cucaaagauaucguaaucc

SEQ ID NO: 397337 - RNA, 19 nt, Artificial Sequence
  Description of Artificial Sequence: Synthetic oligonucleotide
  Sense Strand Starting at position 1001 of SEQ ID NO: 318995
uuacgauaucuuugagaga

SEQ ID NO: 397338 - RNA, 19 nt, Artificial Sequence
  Description of Artificial Sequence: Synthetic oligonucleotide
  Antisense Strand to SEQ ID NO: 397337
ucucucaaagauaucguaa

SEQ ID NO: 397339 - RNA, 19 nt, Artificial Sequence
  Description of Artificial Sequence: Synthetic oligonucleotide
  Sense Strand Starting at position 1001 of SEQ ID NO: 319149
gggcguaguccugcuccua

SEQ ID NO: 397340 - RNA, 19 nt, Artificial Sequence
  Description of Artificial Sequence: Synthetic oligonucleotide
  Antisense Strand to SEQ ID NO: 397339
uaggagcaggacuacgccc

SEQ ID NO: 397341 - RNA, 19 nt, Artificial Sequence
  Description of Artificial Sequence: Synthetic oligonucleotide
  Sense Strand Starting at position 1001 of SEQ ID NO: 319150
ggcguaguccugcuccuaa

SEQ ID NO: 397342 - RNA, 19 nt, Artificial Sequence
  Description of Artificial Sequence: Synthetic oligonucleotide
  Antisense Strand to SEQ ID NO: 397341
uuaggagcaggacuacgcc

SEQ ID NO: 397343 - RNA, 19 nt, Artificial Sequence
  Description of Artificial Sequence: Synthetic oligonucleotide
  Sense Strand Starting at position 1002 of SEQ ID NO: 315982
agggcaggaauauguuaau

SEQ ID NO: 397344 - RNA, 19 nt, Artificial Sequence
  Description of Artificial Sequence: Synthetic oligonucleotide
  Antisense Strand to SEQ ID NO: 397343
auuaacauauuccugcccu

SEQ ID NO: 397345 - RNA, 19 nt, Artificial Sequence
  Description of Artificial Sequence: Synthetic oligonucleotide
  Sense Strand Starting at position 1002 of SEQ ID NO: 315985
gcaggaauauguuaauauc

SEQ ID NO: 397346 - RNA, 19 nt, Artificial Sequence
  Description of Artificial Sequence: Synthetic oligonucleotide
  Antisense Strand to SEQ ID NO: 397345
gauauuaacauauuccugc

SEQ ID NO: 397347 - RNA, 19 nt, Artificial Sequence
  Description of Artificial Sequence: Synthetic oligonucleotide
  Sense Strand Starting at position 1002 of SEQ ID NO: 315991
auauguuaauaucugggua

SEQ ID NO: 397348 - RNA, 19 nt, Artificial Sequence
  Description of Artificial Sequence: Synthetic oligonucleotide
  Antisense Strand to SEQ ID NO: 397347
uacccagauauuaacauau

SEQ ID NO: 397349 - RNA, 19 nt, Artificial Sequence
  Description of Artificial Sequence: Synthetic oligonucleotide
  Sense Strand Starting at position 1002 of SEQ ID NO: 315994
uguuaauaucuggguaaca

SEQ ID NO: 397350 - RNA, 19 nt, Artificial Sequence
  Description of Artificial Sequence: Synthetic oligonucleotide
  Antisense Strand to SEQ ID NO: 397349
uguuacccagauauuaaca

SEQ ID NO: 397351 - RNA, 19 nt, Artificial Sequence
  Description of Artificial Sequence: Synthetic oligonucleotide
  Sense Strand Starting at position 1002 of SEQ ID NO: 315995
guuaauaucuggguaacaa

SEQ ID NO: 397352 - RNA, 19 nt, Artificial Sequence
  Description of Artificial Sequence: Synthetic oligonucleotide
  Antisense Strand to SEQ ID NO: 397351
uuguuacccagauauuaac

SEQ ID NO: 397353 - RNA, 19 nt, Artificial Sequence
  Description of Artificial Sequence: Synthetic oligonucleotide
  Sense Strand Starting at position 1002 of SEQ ID NO: 316051
cugagagcucagcaacguu

SEQ ID NO: 397354 - RNA, 19 nt, Artificial Sequence
  Description of Artificial Sequence: Synthetic oligonucleotide
  Antisense Strand to SEQ ID NO: 397353
aacguugcugagcucucag

SEQ ID NO: 397355 - RNA, 19 nt, Artificial Sequence
  Description of Artificial Sequence: Synthetic oligonucleotide
  Sense Strand Starting at position 1002 of SEQ ID NO: 316061
agcaacguuuagcuuuaaa

SEQ ID NO: 397356 - RNA, 19 nt, Artificial Sequence
  Description of Artificial Sequence: Synthetic oligonucleotide
  Antisense Strand to SEQ ID NO: 397355
uuuaaagcuaaacguugcu

SEQ ID NO: 397357 - RNA, 19 nt, Artificial Sequence
  Description of Artificial Sequence: Synthetic oligonucleotide
  Sense Strand Starting at position 1002 of SEQ ID NO: 316117
uuggucucuucugcauauu

SEQ ID NO: 397358 - RNA, 19 nt, Artificial Sequence
  Description of Artificial Sequence: Synthetic oligonucleotide
  Antisense Strand to SEQ ID NO: 397357
aauaugcagaagagaccaa

SEQ ID NO: 397359 - RNA, 19 nt, Artificial Sequence
  Description of Artificial Sequence: Synthetic oligonucleotide
  Sense Strand Starting at position 1002 of SEQ ID NO: 316120
gucucuucugcauauucuu

SEQ ID NO: 397360 - RNA, 19 nt, Artificial Sequence
  Description of Artificial Sequence: Synthetic oligonucleotide
  Antisense Strand to SEQ ID NO: 397359
aagaauaugcagaagagac

SEQ ID NO: 397361 - RNA, 19 nt, Artificial Sequence
  Description of Artificial Sequence: Synthetic oligonucleotide
  Sense Strand Starting at position 1002 of SEQ ID NO: 316265
cgagacagcucaccuaagu

SEQ ID NO: 397362 - RNA, 19 nt, Artificial Sequence
  Description of Artificial Sequence: Synthetic oligonucleotide
  Antisense Strand to SEQ ID NO: 397361
acuuaggugagcugucucg

SEQ ID NO: 397363 - RNA, 19 nt, Artificial Sequence
  Description of Artificial Sequence: Synthetic oligonucleotide
  Sense Strand Starting at position 1002 of SEQ ID NO: 316541
agccguaaggcuuaagacu

SEQ ID NO: 397364 - RNA, 19 nt, Artificial Sequence
  Description of Artificial Sequence: Synthetic oligonucleotide
  Antisense Strand to SEQ ID NO: 397363
agucuuaagccuuacggcu

SEQ ID NO: 397365 - RNA, 19 nt, Artificial Sequence
  Description of Artificial Sequence: Synthetic oligonucleotide
  Sense Strand Starting at position 1002 of SEQ ID NO: 316556
gacucaauggcuugucacu

SEQ ID NO: 397366 - RNA, 19 nt, Artificial Sequence
  Description of Artificial Sequence: Synthetic oligonucleotide
  Antisense Strand to SEQ ID NO: 397365
agugacaagccauugaguc

SEQ ID NO: 397367 - RNA, 19 nt, Artificial Sequence
  Description of Artificial Sequence: Synthetic oligonucleotide
  Sense Strand Starting at position 1002 of SEQ ID NO: 316558
cucaauggcuugucacuaa

SEQ ID NO: 397368 - RNA, 19 nt, Artificial Sequence
  Description of Artificial Sequence: Synthetic oligonucleotide
  Antisense Strand to SEQ ID NO: 397367
uuagugacaagccauugag

SEQ ID NO: 397369 - RNA, 19 nt, Artificial Sequence
  Description of Artificial Sequence: Synthetic oligonucleotide
  Sense Strand Starting at position 1002 of SEQ ID NO: 316562
auggcuugucacuaauacu

SEQ ID NO: 397370 - RNA, 19 nt, Artificial Sequence
  Description of Artificial Sequence: Synthetic oligonucleotide
  Antisense Strand to SEQ ID NO: 397369
aguauuagugacaagccau

SEQ ID NO: 397371 - RNA, 19 nt, Artificial Sequence
  Description of Artificial Sequence: Synthetic oligonucleotide
  Sense Strand Starting at position 1002 of SEQ ID NO: 316604
aguuaaugcuaucuaauag

SEQ ID NO: 397372 - RNA, 19 nt, Artificial Sequence
  Description of Artificial Sequence: Synthetic oligonucleotide
  Antisense Strand to SEQ ID NO: 397371
cuauuagauagcauuaacu

SEQ ID NO: 397373 - RNA, 19 nt, Artificial Sequence
  Description of Artificial Sequence: Synthetic oligonucleotide
  Sense Strand Starting at position 1002 of SEQ ID NO: 316772
ugaccaguguugcuagcuu

SEQ ID NO: 397374 - RNA, 19 nt, Artificial Sequence
  Description of Artificial Sequence: Synthetic oligonucleotide
  Antisense Strand to SEQ ID NO: 397373
aagcuagcaacacugguca

SEQ ID NO: 397375 - RNA, 19 nt, Artificial Sequence
  Description of Artificial Sequence: Synthetic oligonucleotide
  Sense Strand Starting at position 1002 of SEQ ID NO: 316828
gcagcagugucuuccuaac

SEQ ID NO: 397376 - RNA, 19 nt, Artificial Sequence
  Description of Artificial Sequence: Synthetic oligonucleotide
  Antisense Strand to SEQ ID NO: 397375
guuaggaagacacugcugc

SEQ ID NO: 397377 - RNA, 19 nt, Artificial Sequence
  Description of Artificial Sequence: Synthetic oligonucleotide
  Sense Strand Starting at position 1002 of SEQ ID NO: 316830
agcagugucuuccuaacag

SEQ ID NO: 397378 - RNA, 19 nt, Artificial Sequence
  Description of Artificial Sequence: Synthetic oligonucleotide
  Antisense Strand to SEQ ID NO: 397377
cuguuaggaagacacugcu

SEQ ID NO: 397379 - RNA, 19 nt, Artificial Sequence
  Description of Artificial Sequence: Synthetic oligonucleotide
  Sense Strand Starting at position 1002 of SEQ ID NO: 317398
aggagaugccgcugacauc

SEQ ID NO: 397380 - RNA, 19 nt, Artificial Sequence
  Description of Artificial Sequence: Synthetic oligonucleotide
  Antisense Strand to SEQ ID NO: 397379
gaugucagcggcaucuccu

SEQ ID NO: 397381 - RNA, 19 nt, Artificial Sequence
  Description of Artificial Sequence: Synthetic oligonucleotide
  Sense Strand Starting at position 1002 of SEQ ID NO: 317445
aggauuaacucucgaggaa

SEQ ID NO: 397382 - RNA, 19 nt, Artificial Sequence
  Description of Artificial Sequence: Synthetic oligonucleotide
  Antisense Strand to SEQ ID NO: 397381
uuccucgagaguuaauccu

SEQ ID NO: 397383 - RNA, 19 nt, Artificial Sequence
  Description of Artificial Sequence: Synthetic oligonucleotide
  Sense Strand Starting at position 1002 of SEQ ID NO: 318132
gucuuugaggucugaggag

SEQ ID NO: 397384 - RNA, 19 nt, Artificial Sequence
  Description of Artificial Sequence: Synthetic oligonucleotide
  Antisense Strand to SEQ ID NO: 397383
cuccucagaccucaaagac

SEQ ID NO: 397385 - RNA, 19 nt, Artificial Sequence
  Description of Artificial Sequence: Synthetic oligonucleotide
  Sense Strand Starting at position 1002 of SEQ ID NO: 318482
cggauuucgucccaaauuu

SEQ ID NO: 397386 - RNA, 19 nt, Artificial Sequence
  Description of Artificial Sequence: Synthetic oligonucleotide
  Antisense Strand to SEQ ID NO: 397385
aaauuugggacgaaauccg

SEQ ID NO: 397387 - RNA, 19 nt, Artificial Sequence
  Description of Artificial Sequence: Synthetic oligonucleotide
  Sense Strand Starting at position 1002 of SEQ ID NO: 318526
agaagagcagaauguuuau

SEQ ID NO: 397388 - RNA, 19 nt, Artificial Sequence
  Description of Artificial Sequence: Synthetic oligonucleotide
  Antisense Strand to SEQ ID NO: 397387
auaaacauucugcucuucu

SEQ ID NO: 397389 - RNA, 19 nt, Artificial Sequence
  Description of Artificial Sequence: Synthetic oligonucleotide
  Sense Strand Starting at position 1002 of SEQ ID NO: 318532
gcagaauguuuauuugcca

SEQ ID NO: 397390 - RNA, 19 nt, Artificial Sequence
  Description of Artificial Sequence: Synthetic oligonucleotide
  Antisense Strand to SEQ ID NO: 397389
uggcaaauaaacauucugc

SEQ ID NO: 397391 - RNA, 19 nt, Artificial Sequence
  Description of Artificial Sequence: Synthetic oligonucleotide
  Sense Strand Starting at position 1002 of SEQ ID NO: 318553
accuguuuggcagguguga

SEQ ID NO: 397392 - RNA, 19 nt, Artificial Sequence
  Description of Artificial Sequence: Synthetic oligonucleotide
  Antisense Strand to SEQ ID NO: 397391
ucacaccugccaaacaggu

SEQ ID NO: 397393 - RNA, 19 nt, Artificial Sequence
  Description of Artificial Sequence: Synthetic oligonucleotide
  Sense Strand Starting at position 1002 of SEQ ID NO: 318555
cuguuuggcaggugugaau

SEQ ID NO: 397394 - RNA, 19 nt, Artificial Sequence
  Description of Artificial Sequence: Synthetic oligonucleotide
  Antisense Strand to SEQ ID NO: 397393
auucacaccugccaaacag

SEQ ID NO: 397395 - RNA, 19 nt, Artificial Sequence
  Description of Artificial Sequence: Synthetic oligonucleotide
  Sense Strand Starting at position 1002 of SEQ ID NO: 318653
cuuacuuuguuucuccaga

SEQ ID NO: 397396 - RNA, 19 nt, Artificial Sequence
  Description of Artificial Sequence: Synthetic oligonucleotide
  Antisense Strand to SEQ ID NO: 397395
ucuggagaaacaaaguaag

SEQ ID NO: 397397 - RNA, 19 nt, Artificial Sequence
  Description of Artificial Sequence: Synthetic oligonucleotide
  Sense Strand Starting at position 1002 of SEQ ID NO: 318694
uaagucauguggcuuuaau

SEQ ID NO: 397398 - RNA, 19 nt, Artificial Sequence
  Description of Artificial Sequence: Synthetic oligonucleotide
  Antisense Strand to SEQ ID NO: 397397
auuaaagccacaugacuua

SEQ ID NO: 397399 - RNA, 19 nt, Artificial Sequence
  Description of Artificial Sequence: Synthetic oligonucleotide
  Sense Strand Starting at position 1002 of SEQ ID NO: 318721
agauuaugcguucagaugu

SEQ ID NO: 397400 - RNA, 19 nt, Artificial Sequence
  Description of Artificial Sequence: Synthetic oligonucleotide
  Antisense Strand to SEQ ID NO: 397399
acaucugaacgcauaaucu

SEQ ID NO: 397401 - RNA, 19 nt, Artificial Sequence
  Description of Artificial Sequence: Synthetic oligonucleotide
  Sense Strand Starting at position 1002 of SEQ ID NO: 318738
guggcaaaggcuuaagaga

SEQ ID NO: 397402 - RNA, 19 nt, Artificial Sequence
  Description of Artificial Sequence: Synthetic oligonucleotide
  Antisense Strand to SEQ ID NO: 397401
ucucuuaagccuuugccac

SEQ ID NO: 397403 - RNA, 19 nt, Artificial Sequence
  Description of Artificial Sequence: Synthetic oligonucleotide
  Sense Strand Starting at position 1002 of SEQ ID NO: 318765
cucuuaaucguagcgguuu

SEQ ID NO: 397404 - RNA, 19 nt, Artificial Sequence
  Description of Artificial Sequence: Synthetic oligonucleotide
  Antisense Strand to SEQ ID NO: 397403
aaaccgcuacgauuaagag

SEQ ID NO: 397405 - RNA, 19 nt, Artificial Sequence
  Description of Artificial Sequence: Synthetic oligonucleotide
  Sense Strand Starting at position 1002 of SEQ ID NO: 318981
gcagaaguaagcuguguuu

SEQ ID NO: 397406 - RNA, 19 nt, Artificial Sequence
  Description of Artificial Sequence: Synthetic oligonucleotide
  Antisense Strand to SEQ ID NO: 397405
aaacacagcuuacuucugc

SEQ ID NO: 397407 - RNA, 19 nt, Artificial Sequence
  Description of Artificial Sequence: Synthetic oligonucleotide
  Sense Strand Starting at position 1002 of SEQ ID NO: 319062
gcggcugaggguugcaauu

SEQ ID NO: 397408 - RNA, 19 nt, Artificial Sequence
  Description of Artificial Sequence: Synthetic oligonucleotide
  Antisense Strand to SEQ ID NO: 397407
aauugcaacccucagccgc

SEQ ID NO: 397409 - RNA, 19 nt, Artificial Sequence
  Description of Artificial Sequence: Synthetic oligonucleotide
  Sense Strand Starting at position 1002 of SEQ ID NO: 319095
cagguuaagucuuugagag

SEQ ID NO: 397410 - RNA, 19 nt, Artificial Sequence
  Description of Artificial Sequence: Synthetic oligonucleotide
  Antisense Strand to SEQ ID NO: 397409
cucucaaagacuuaaccug

SEQ ID NO: 397411 - RNA, 19 nt, Artificial Sequence
  Description of Artificial Sequence: Synthetic oligonucleotide
  Sense Strand Starting at position 1002 of SEQ ID NO: 319096
agguuaagucuuugagaga

SEQ ID NO: 397412 - RNA, 19 nt, Artificial Sequence
  Description of Artificial Sequence: Synthetic oligonucleotide
  Antisense Strand to SEQ ID NO: 397411
ucucucaaagacuuaaccu

SEQ ID NO: 397413 - RNA, 19 nt, Artificial Sequence
  Description of Artificial Sequence: Synthetic oligonucleotide
  Sense Strand Starting at position 1002 of SEQ ID NO: 319097
gguuaagucuuugagagaa

SEQ ID NO: 397414 - RNA, 19 nt, Artificial Sequence
  Description of Artificial Sequence: Synthetic oligonucleotide
  Antisense Strand to SEQ ID NO: 397413
uucucucaaagacuuaacc

SEQ ID NO: 397415 - RNA, 19 nt, Artificial Sequence
  Description of Artificial Sequence: Synthetic oligonucleotide
  Sense Strand Starting at position 1002 of SEQ ID NO: 319143
auaggagucugggaguaag

SEQ ID NO: 397416 - RNA, 19 nt, Artificial Sequence
  Description of Artificial Sequence: Synthetic oligonucleotide
  Antisense Strand to SEQ ID NO: 397415
cuuacucccagacuccuau

SEQ ID NO: 397417 - RNA, 19 nt, Artificial Sequence
  Description of Artificial Sequence: Synthetic oligonucleotide
  Sense Strand Starting at position 1002 of SEQ ID NO: 319146
ggagucugggaguaagagu

SEQ ID NO: 397418 - RNA, 19 nt, Artificial Sequence
  Description of Artificial Sequence: Synthetic oligonucleotide
  Antisense Strand to SEQ ID NO: 397417
acucuuacucccagacucc

SEQ ID NO: 397419 - RNA, 19 nt, Artificial Sequence
  Description of Artificial Sequence: Synthetic oligonucleotide
  Sense Strand Starting at position 1002 of SEQ ID NO: 319202
uggagcaugcaagauuaau

SEQ ID NO: 397420 - RNA, 19 nt, Artificial Sequence
  Description of Artificial Sequence: Synthetic oligonucleotide
  Antisense Strand to SEQ ID NO: 397419
auuaaucuugcaugcucca

SEQ ID NO: 397421 - RNA, 19 nt, Artificial Sequence
  Description of Artificial Sequence: Synthetic oligonucleotide
  Sense Strand Starting at position 1002 of SEQ ID NO: 319208
augcaagauuaauagagga

SEQ ID NO: 397422 - RNA, 19 nt, Artificial Sequence
  Description of Artificial Sequence: Synthetic oligonucleotide
  Antisense Strand to SEQ ID NO: 397421
uccucuauuaaucuugcau

SEQ ID NO: 397423 - RNA, 19 nt, Artificial Sequence
  Description of Artificial Sequence: Synthetic oligonucleotide
  Sense Strand Starting at position 1003 of SEQ ID NO: 315439
agggcaggaauauguuaau

SEQ ID NO: 397424 - RNA, 19 nt, Artificial Sequence
  Description of Artificial Sequence: Synthetic oligonucleotide
  Antisense Strand to SEQ ID NO: 397423
auuaacauauuccugcccu

SEQ ID NO: 397425 - RNA, 19 nt, Artificial Sequence
  Description of Artificial Sequence: Synthetic oligonucleotide
  Sense Strand Starting at position 1003 of SEQ ID NO: 315448
auauguuaauaucugggua

SEQ ID NO: 397426 - RNA, 19 nt, Artificial Sequence
  Description of Artificial Sequence: Synthetic oligonucleotide
  Antisense Strand to SEQ ID NO: 397425
uacccagauauuaacauau

SEQ ID NO: 397427 - RNA, 19 nt, Artificial Sequence
  Description of Artificial Sequence: Synthetic oligonucleotide
  Sense Strand Starting at position 1003 of SEQ ID NO: 315451
uguuaauaucuggguaaca

SEQ ID NO: 397428 - RNA, 19 nt, Artificial Sequence
  Description of Artificial Sequence: Synthetic oligonucleotide
  Antisense Strand to SEQ ID NO: 397427
uguuacccagauauuaaca

SEQ ID NO: 397429 - RNA, 19 nt, Artificial Sequence
  Description of Artificial Sequence: Synthetic oligonucleotide
  Sense Strand Starting at position 1003 of SEQ ID NO: 315452
guuaauaucuggguaacaa

SEQ ID NO: 397430 - RNA, 19 nt, Artificial Sequence
  Description of Artificial Sequence: Synthetic oligonucleotide
  Antisense Strand to SEQ ID NO: 397429
uuguuacccagauauuaac

SEQ ID NO: 397431 - RNA, 19 nt, Artificial Sequence
  Description of Artificial Sequence: Synthetic oligonucleotide
  Sense Strand Starting at position 1003 of SEQ ID NO: 315508
cugagagcucagcaacguu

SEQ ID NO: 397432 - RNA, 19 nt, Artificial Sequence
  Description of Artificial Sequence: Synthetic oligonucleotide
  Antisense Strand to SEQ ID NO: 397431
aacguugcugagcucucag

SEQ ID NO: 397433 - RNA, 19 nt, Artificial Sequence
  Description of Artificial Sequence: Synthetic oligonucleotide
  Sense Strand Starting at position 1003 of SEQ ID NO: 315518
agcaacguuuagcuuuaaa

SEQ ID NO: 397434 - RNA, 19 nt, Artificial Sequence
  Description of Artificial Sequence: Synthetic oligonucleotide
  Antisense Strand to SEQ ID NO: 397433
uuuaaagcuaaacguugcu

SEQ ID NO: 397435 - RNA, 19 nt, Artificial Sequence
  Description of Artificial Sequence: Synthetic oligonucleotide
  Sense Strand Starting at position 1003 of SEQ ID NO: 315574
uuggucucuucugcauauu

SEQ ID NO: 397436 - RNA, 19 nt, Artificial Sequence
  Description of Artificial Sequence: Synthetic oligonucleotide
  Antisense Strand to SEQ ID NO: 397435
aauaugcagaagagaccaa

SEQ ID NO: 397437 - RNA, 19 nt, Artificial Sequence
  Description of Artificial Sequence: Synthetic oligonucleotide
  Sense Strand Starting at position 1003 of SEQ ID NO: 315577
gucucuucugcauauucuu

SEQ ID NO: 397438 - RNA, 19 nt, Artificial Sequence
  Description of Artificial Sequence: Synthetic oligonucleotide
  Antisense Strand to SEQ ID NO: 397437
aagaauaugcagaagagac

SEQ ID NO: 397439 - RNA, 19 nt, Artificial Sequence
  Description of Artificial Sequence: Synthetic oligonucleotide
  Sense Strand Starting at position 1003 of SEQ ID NO: 315722
cgagacagcucaccuaagu

SEQ ID NO: 397440 - RNA, 19 nt, Artificial Sequence
  Description of Artificial Sequence: Synthetic oligonucleotide
  Antisense Strand to SEQ ID NO: 397439
acuuaggugagcugucucg

SEQ ID NO: 397441 - RNA, 19 nt, Artificial Sequence
  Description of Artificial Sequence: Synthetic oligonucleotide
  Sense Strand Starting at position 1003 of SEQ ID NO: 315998
agccguaaggcuuaagacu

SEQ ID NO: 397442 - RNA, 19 nt, Artificial Sequence
  Description of Artificial Sequence: Synthetic oligonucleotide
  Antisense Strand to SEQ ID NO: 397441
agucuuaagccuuacggcu

SEQ ID NO: 397443 - RNA, 19 nt, Artificial Sequence
  Description of Artificial Sequence: Synthetic oligonucleotide
  Sense Strand Starting at position 1003 of SEQ ID NO: 316013
gacucaauggcuugucacu

SEQ ID NO: 397444 - RNA, 19 nt, Artificial Sequence
  Description of Artificial Sequence: Synthetic oligonucleotide
  Antisense Strand to SEQ ID NO: 397443
agugacaagccauugaguc

SEQ ID NO: 397445 - RNA, 19 nt, Artificial Sequence
  Description of Artificial Sequence: Synthetic oligonucleotide
  Sense Strand Starting at position 1003 of SEQ ID NO: 316015
cucaauggcuugucacuaa

SEQ ID NO: 397446 - RNA, 19 nt, Artificial Sequence
  Description of Artificial Sequence: Synthetic oligonucleotide
  Antisense Strand to SEQ ID NO: 397445
uuagugacaagccauugag

SEQ ID NO: 397447 - RNA, 19 nt, Artificial Sequence
  Description of Artificial Sequence: Synthetic oligonucleotide
  Sense Strand Starting at position 1003 of SEQ ID NO: 316019
auggcuugucacuaauacu

SEQ ID NO: 397448 - RNA, 19 nt, Artificial Sequence
  Description of Artificial Sequence: Synthetic oligonucleotide
  Antisense Strand to SEQ ID NO: 397447
aguauuagugacaagccau

SEQ ID NO: 397449 - RNA, 19 nt, Artificial Sequence
  Description of Artificial Sequence: Synthetic oligonucleotide
  Sense Strand Starting at position 1003 of SEQ ID NO: 316061
aguuaaugcuaucuaauag

SEQ ID NO: 397450 - RNA, 19 nt, Artificial Sequence
  Description of Artificial Sequence: Synthetic oligonucleotide
  Antisense Strand to SEQ ID NO: 397449
cuauuagauagcauuaacu

SEQ ID NO: 397451 - RNA, 19 nt, Artificial Sequence
  Description of Artificial Sequence: Synthetic oligonucleotide
  Sense Strand Starting at position 1003 of SEQ ID NO: 316287
agcagugucuuccuaacag

SEQ ID NO: 397452 - RNA, 19 nt, Artificial Sequence
  Description of Artificial Sequence: Synthetic oligonucleotide
  Antisense Strand to SEQ ID NO: 397451
cuguuaggaagacacugcu

SEQ ID NO: 397453 - RNA, 19 nt, Artificial Sequence
  Description of Artificial Sequence: Synthetic oligonucleotide
  Sense Strand Starting at position 1003 of SEQ ID NO: 316855
aggagaugccgcugacauc

SEQ ID NO: 397454 - RNA, 19 nt, Artificial Sequence
  Description of Artificial Sequence: Synthetic oligonucleotide
  Antisense Strand to SEQ ID NO: 397453
gaugucagcggcaucuccu

SEQ ID NO: 397455 - RNA, 19 nt, Artificial Sequence
  Description of Artificial Sequence: Synthetic oligonucleotide
  Sense Strand Starting at position 1003 of SEQ ID NO: 317589
gucuuugaggucugaggag

SEQ ID NO: 397456 - RNA, 19 nt, Artificial Sequence
  Description of Artificial Sequence: Synthetic oligonucleotide
  Antisense Strand to SEQ ID NO: 397455
cuccucagaccucaaagac

SEQ ID NO: 397457 - RNA, 19 nt, Artificial Sequence
  Description of Artificial Sequence: Synthetic oligonucleotide
  Sense Strand Starting at position 1003 of SEQ ID NO: 317939
cggauuucgucccaaauuu

SEQ ID NO: 397458 - RNA, 19 nt, Artificial Sequence
  Description of Artificial Sequence: Synthetic oligonucleotide
  Antisense Strand to SEQ ID NO: 397457
aaauuugggacgaaauccg

SEQ ID NO: 397459 - RNA, 19 nt, Artificial Sequence
  Description of Artificial Sequence: Synthetic oligonucleotide
  Sense Strand Starting at position 1003 of SEQ ID NO: 317983
agaagagcagaauguuuau

SEQ ID NO: 397460 - RNA, 19 nt, Artificial Sequence
  Description of Artificial Sequence: Synthetic oligonucleotide
  Antisense Strand to SEQ ID NO: 397459
auaaacauucugcucuucu

SEQ ID NO: 397461 - RNA, 19 nt, Artificial Sequence
  Description of Artificial Sequence: Synthetic oligonucleotide
  Sense Strand Starting at position 1003 of SEQ ID NO: 317989
gcagaauguuuauuugcca

SEQ ID NO: 397462 - RNA, 19 nt, Artificial Sequence
  Description of Artificial Sequence: Synthetic oligonucleotide
  Antisense Strand to SEQ ID NO: 397461
uggcaaauaaacauucugc

SEQ ID NO: 397463 - RNA, 19 nt, Artificial Sequence
  Description of Artificial Sequence: Synthetic oligonucleotide
  Sense Strand Starting at position 1003 of SEQ ID NO: 318110
cuuacuuuguuucuccaga

SEQ ID NO: 397464 - RNA, 19 nt, Artificial Sequence
  Description of Artificial Sequence: Synthetic oligonucleotide
  Antisense Strand to SEQ ID NO: 397463
ucuggagaaacaaaguaag

SEQ ID NO: 397465 - RNA, 19 nt, Artificial Sequence
  Description of Artificial Sequence: Synthetic oligonucleotide
  Sense Strand Starting at position 1003 of SEQ ID NO: 318151
uaagucauguggcuuuaau

SEQ ID NO: 397466 - RNA, 19 nt, Artificial Sequence
  Description of Artificial Sequence: Synthetic oligonucleotide
  Antisense Strand to SEQ ID NO: 397465
auuaaagccacaugacuua

SEQ ID NO: 397467 - RNA, 19 nt, Artificial Sequence
  Description of Artificial Sequence: Synthetic oligonucleotide
  Sense Strand Starting at position 1003 of SEQ ID NO: 318178
agauuaugcguucagaugu

SEQ ID NO: 397468 - RNA, 19 nt, Artificial Sequence
  Description of Artificial Sequence: Synthetic oligonucleotide
  Antisense Strand to SEQ ID NO: 397467
acaucugaacgcauaaucu

SEQ ID NO: 397469 - RNA, 19 nt, Artificial Sequence
  Description of Artificial Sequence: Synthetic oligonucleotide
  Sense Strand Starting at position 1003 of SEQ ID NO: 318195
guggcaaaggcuuaagaga

SEQ ID NO: 397470 - RNA, 19 nt, Artificial Sequence
  Description of Artificial Sequence: Synthetic oligonucleotide
  Antisense Strand to SEQ ID NO: 397469
ucucuuaagccuuugccac

SEQ ID NO: 397471 - RNA, 19 nt, Artificial Sequence
  Description of Artificial Sequence: Synthetic oligonucleotide
  Sense Strand Starting at position 1003 of SEQ ID NO: 318222
cucuuaaucguagcgguuu

SEQ ID NO: 397472 - RNA, 19 nt, Artificial Sequence
  Description of Artificial Sequence: Synthetic oligonucleotide
  Antisense Strand to SEQ ID NO: 397471
aaaccgcuacgauuaagag

SEQ ID NO: 397473 - RNA, 19 nt, Artificial Sequence
  Description of Artificial Sequence: Synthetic oligonucleotide
  Sense Strand Starting at position 1003 of SEQ ID NO: 318552
cagguuaagucuuugagag

SEQ ID NO: 397474 - RNA, 19 nt, Artificial Sequence
  Description of Artificial Sequence: Synthetic oligonucleotide
  Antisense Strand to SEQ ID NO: 397473
cucucaaagacuuaaccug

SEQ ID NO: 397475 - RNA, 19 nt, Artificial Sequence
  Description of Artificial Sequence: Synthetic oligonucleotide
  Sense Strand Starting at position 1003 of SEQ ID NO: 318553
agguuaagucuuugagaga

SEQ ID NO: 397476 - RNA, 19 nt, Artificial Sequence
  Description of Artificial Sequence: Synthetic oligonucleotide
  Antisense Strand to SEQ ID NO: 397475
ucucucaaagacuuaaccu

SEQ ID NO: 397477 - RNA, 19 nt, Artificial Sequence
  Description of Artificial Sequence: Synthetic oligonucleotide
  Sense Strand Starting at position 1003 of SEQ ID NO: 318603
ggagucugggaguaagagu

SEQ ID NO: 397478 - RNA, 19 nt, Artificial Sequence
  Description of Artificial Sequence: Synthetic oligonucleotide
  Antisense Strand to SEQ ID NO: 397477
acucuuacucccagacucc

SEQ ID NO: 397479 - RNA, 19 nt, Artificial Sequence
  Description of Artificial Sequence: Synthetic oligonucleotide
  Sense Strand Starting at position 1003 of SEQ ID NO: 318659
uggagcaugcaagauuaau

SEQ ID NO: 397480 - RNA, 19 nt, Artificial Sequence
  Description of Artificial Sequence: Synthetic oligonucleotide
  Antisense Strand to SEQ ID NO: 397479
auuaaucuugcaugcucca

SEQ ID NO: 397481 - RNA, 19 nt, Artificial Sequence
  Description of Artificial Sequence: Synthetic oligonucleotide
  Sense Strand Starting at position 1003 of SEQ ID NO: 318665
augcaagauuaauagagga

SEQ ID NO: 397482 - RNA, 19 nt, Artificial Sequence
  Description of Artificial Sequence: Synthetic oligonucleotide
  Antisense Strand to SEQ ID NO: 397481
uccucuauuaaucuugcau

SEQ ID NO: 397483 - RNA, 19 nt, Artificial Sequence
  Description of Artificial Sequence: Synthetic oligonucleotide
  Sense Strand Starting at position 1003 of SEQ ID NO: 318694
agcaguguggcugaaauuc

SEQ ID NO: 397484 - RNA, 19 nt, Artificial Sequence
  Description of Artificial Sequence: Synthetic oligonucleotide
  Antisense Strand to SEQ ID NO: 397483
gaauuucagccacacugcu

SEQ ID NO: 397485 - RNA, 19 nt, Artificial Sequence
  Description of Artificial Sequence: Synthetic oligonucleotide
  Sense Strand Starting at position 1003 of SEQ ID NO: 318745
aggugaagguucucacaug

SEQ ID NO: 397486 - RNA, 19 nt, Artificial Sequence
  Description of Artificial Sequence: Synthetic oligonucleotide
  Antisense Strand to SEQ ID NO: 397485
caugugagaaccuucaccu

SEQ ID NO: 397487 - RNA, 19 nt, Artificial Sequence
  Description of Artificial Sequence: Synthetic oligonucleotide
  Sense Strand Starting at position 1003 of SEQ ID NO: 318888
ugcuuaggaaauuguguua

SEQ ID NO: 397488 - RNA, 19 nt, Artificial Sequence
  Description of Artificial Sequence: Synthetic oligonucleotide
  Antisense Strand to SEQ ID NO: 397487
uaacacaauuuccuaagca

SEQ ID NO: 397489 - RNA, 19 nt, Artificial Sequence
  Description of Artificial Sequence: Synthetic oligonucleotide
  Sense Strand Starting at position 1003 of SEQ ID NO: 318933
ucagcaacuuuguugguua

SEQ ID NO: 397490 - RNA, 19 nt, Artificial Sequence
  Description of Artificial Sequence: Synthetic oligonucleotide
  Antisense Strand to SEQ ID NO: 397489
uaaccaacaaaguugcuga

SEQ ID NO: 397491 - RNA, 19 nt, Artificial Sequence
  Description of Artificial Sequence: Synthetic oligonucleotide
  Sense Strand Starting at position 1003 of SEQ ID NO: 318935
agcaacuuuguugguuaau

SEQ ID NO: 397492 - RNA, 19 nt, Artificial Sequence
  Description of Artificial Sequence: Synthetic oligonucleotide
  Antisense Strand to SEQ ID NO: 397491
auuaaccaacaaaguugcu

SEQ ID NO: 397493 - RNA, 19 nt, Artificial Sequence
  Description of Artificial Sequence: Synthetic oligonucleotide
  Sense Strand Starting at position 1003 of SEQ ID NO: 318936
gcaacuuuguugguuaaua

SEQ ID NO: 397494 - RNA, 19 nt, Artificial Sequence
  Description of Artificial Sequence: Synthetic oligonucleotide
  Antisense Strand to SEQ ID NO: 397493
uauuaaccaacaaaguugc

SEQ ID NO: 397495 - RNA, 19 nt, Artificial Sequence
  Description of Artificial Sequence: Synthetic oligonucleotide
  Sense Strand Starting at position 1003 of SEQ ID NO: 318985
ucagacuaggucuguaaau

SEQ ID NO: 397496 - RNA, 19 nt, Artificial Sequence
  Description of Artificial Sequence: Synthetic oligonucleotide
  Antisense Strand to SEQ ID NO: 397495
auuuacagaccuagucuga

SEQ ID NO: 397497 - RNA, 19 nt, Artificial Sequence
  Description of Artificial Sequence: Synthetic oligonucleotide
  Sense Strand Starting at position 1003 of SEQ ID NO: 318986
cagacuaggucuguaaauc

SEQ ID NO: 397498 - RNA, 19 nt, Artificial Sequence
  Description of Artificial Sequence: Synthetic oligonucleotide
  Antisense Strand to SEQ ID NO: 397497
gauuuacagaccuagucug

SEQ ID NO: 397499 - RNA, 19 nt, Artificial Sequence
  Description of Artificial Sequence: Synthetic oligonucleotide
  Sense Strand Starting at position 1003 of SEQ ID NO: 318987
agacuaggucuguaaaucu

SEQ ID NO: 397500 - RNA, 19 nt, Artificial Sequence
  Description of Artificial Sequence: Synthetic oligonucleotide
  Antisense Strand to SEQ ID NO: 397499
agauuuacagaccuagucu

SEQ ID NO: 397501 - RNA, 19 nt, Artificial Sequence
  Description of Artificial Sequence: Synthetic oligonucleotide
  Sense Strand Starting at position 1003 of SEQ ID NO: 318994
gucuguaaaucuguaaaua

SEQ ID NO: 397502 - RNA, 19 nt, Artificial Sequence
  Description of Artificial Sequence: Synthetic oligonucleotide
  Antisense Strand to SEQ ID NO: 397501
uauuuacagauuuacagac

SEQ ID NO: 397503 - RNA, 19 nt, Artificial Sequence
  Description of Artificial Sequence: Synthetic oligonucleotide
  Sense Strand Starting at position 1004 of SEQ ID NO: 315404
agggcaggaauauguuaau

SEQ ID NO: 397504 - RNA, 19 nt, Artificial Sequence
  Description of Artificial Sequence: Synthetic oligonucleotide
  Antisense Strand to SEQ ID NO: 397503
auuaacauauuccugcccu

SEQ ID NO: 397505 - RNA, 19 nt, Artificial Sequence
  Description of Artificial Sequence: Synthetic oligonucleotide
  Sense Strand Starting at position 1004 of SEQ ID NO: 315413
auauguuaauaucugggua

SEQ ID NO: 397506 - RNA, 19 nt, Artificial Sequence
  Description of Artificial Sequence: Synthetic oligonucleotide
  Antisense Strand to SEQ ID NO: 397505
uacccagauauuaacauau

SEQ ID NO: 397507 - RNA, 19 nt, Artificial Sequence
  Description of Artificial Sequence: Synthetic oligonucleotide
  Sense Strand Starting at position 1004 of SEQ ID NO: 315416
uguuaauaucuggguaaca

SEQ ID NO: 397508 - RNA, 19 nt, Artificial Sequence
  Description of Artificial Sequence: Synthetic oligonucleotide
  Antisense Strand to SEQ ID NO: 397507
uguuacccagauauuaaca

SEQ ID NO: 397509 - RNA, 19 nt, Artificial Sequence
  Description of Artificial Sequence: Synthetic oligonucleotide
  Sense Strand Starting at position 1004 of SEQ ID NO: 315417
guuaauaucuggguaacaa

SEQ ID NO: 397510 - RNA, 19 nt, Artificial Sequence
  Description of Artificial Sequence: Synthetic oligonucleotide
  Antisense Strand to SEQ ID NO: 397509
uuguuacccagauauuaac

SEQ ID NO: 397511 - RNA, 19 nt, Artificial Sequence
  Description of Artificial Sequence: Synthetic oligonucleotide
  Sense Strand Starting at position 1004 of SEQ ID NO: 315473
cugagagcucagcaacguu

SEQ ID NO: 397512 - RNA, 19 nt, Artificial Sequence
  Description of Artificial Sequence: Synthetic oligonucleotide
  Antisense Strand to SEQ ID NO: 397511
aacguugcugagcucucag

SEQ ID NO: 397513 - RNA, 19 nt, Artificial Sequence
  Description of Artificial Sequence: Synthetic oligonucleotide
  Sense Strand Starting at position 1004 of SEQ ID NO: 315483
agcaacguuuagcuuuaaa

SEQ ID NO: 397514 - RNA, 19 nt, Artificial Sequence
  Description of Artificial Sequence: Synthetic oligonucleotide
  Antisense Strand to SEQ ID NO: 397513
uuuaaagcuaaacguugcu

SEQ ID NO: 397515 - RNA, 19 nt, Artificial Sequence
  Description of Artificial Sequence: Synthetic oligonucleotide
  Sense Strand Starting at position 1004 of SEQ ID NO: 315542
gucucuucugcauauucuu

SEQ ID NO: 397516 - RNA, 19 nt, Artificial Sequence
  Description of Artificial Sequence: Synthetic oligonucleotide
  Antisense Strand to SEQ ID NO: 397515
aagaauaugcagaagagac

SEQ ID NO: 397517 - RNA, 19 nt, Artificial Sequence
  Description of Artificial Sequence: Synthetic oligonucleotide
  Sense Strand Starting at position 1004 of SEQ ID NO: 315687
cgagacagcucaccuaagu

SEQ ID NO: 397518 - RNA, 19 nt, Artificial Sequence
  Description of Artificial Sequence: Synthetic oligonucleotide
  Antisense Strand to SEQ ID NO: 397517
acuuaggugagcugucucg

SEQ ID NO: 397519 - RNA, 19 nt, Artificial Sequence
  Description of Artificial Sequence: Synthetic oligonucleotide
  Sense Strand Starting at position 1004 of SEQ ID NO: 315963
agccguaaggcuuaagacu

SEQ ID NO: 397520 - RNA, 19 nt, Artificial Sequence
  Description of Artificial Sequence: Synthetic oligonucleotide
  Antisense Strand to SEQ ID NO: 397519
agucuuaagccuuacggcu

SEQ ID NO: 397521 - RNA, 19 nt, Artificial Sequence
  Description of Artificial Sequence: Synthetic oligonucleotide
  Sense Strand Starting at position 1004 of SEQ ID NO: 315978
gacucaauggcuugucacu

SEQ ID NO: 397522 - RNA, 19 nt, Artificial Sequence
  Description of Artificial Sequence: Synthetic oligonucleotide
  Antisense Strand to SEQ ID NO: 397521
agugacaagccauugaguc

SEQ ID NO: 397523 - RNA, 19 nt, Artificial Sequence
  Description of Artificial Sequence: Synthetic oligonucleotide
  Sense Strand Starting at position 1004 of SEQ ID NO: 315980
cucaauggcuugucacuaa

SEQ ID NO: 397524 - RNA, 19 nt, Artificial Sequence
  Description of Artificial Sequence: Synthetic oligonucleotide
  Antisense Strand to SEQ ID NO: 397523
uuagugacaagccauugag

SEQ ID NO: 397525 - RNA, 19 nt, Artificial Sequence
  Description of Artificial Sequence: Synthetic oligonucleotide
  Sense Strand Starting at position 1004 of SEQ ID NO: 315984
auggcuugucacuaauacu

SEQ ID NO: 397526 - RNA, 19 nt, Artificial Sequence
  Description of Artificial Sequence: Synthetic oligonucleotide
  Antisense Strand to SEQ ID NO: 397525
aguauuagugacaagccau

SEQ ID NO: 397527 - RNA, 19 nt, Artificial Sequence
  Description of Artificial Sequence: Synthetic oligonucleotide
  Sense Strand Starting at position 1004 of SEQ ID NO: 316026
aguuaaugcuaucuaauag

SEQ ID NO: 397528 - RNA, 19 nt, Artificial Sequence
  Description of Artificial Sequence: Synthetic oligonucleotide
  Antisense Strand to SEQ ID NO: 397527
cuauuagauagcauuaacu

SEQ ID NO: 397529 - RNA, 19 nt, Artificial Sequence
  Description of Artificial Sequence: Synthetic oligonucleotide
  Sense Strand Starting at position 1004 of SEQ ID NO: 316252
agcagugucuuccuaacag

SEQ ID NO: 397530 - RNA, 19 nt, Artificial Sequence
  Description of Artificial Sequence: Synthetic oligonucleotide
  Antisense Strand to SEQ ID NO: 397529
cuguuaggaagacacugcu

SEQ ID NO: 397531 - RNA, 19 nt, Artificial Sequence
  Description of Artificial Sequence: Synthetic oligonucleotide
  Sense Strand Starting at position 1004 of SEQ ID NO: 316820
aggagaugccgcugacauc

SEQ ID NO: 397532 - RNA, 19 nt, Artificial Sequence
  Description of Artificial Sequence: Synthetic oligonucleotide
  Antisense Strand to SEQ ID NO: 397531
gaugucagcggcaucuccu

SEQ ID NO: 397533 - RNA, 19 nt, Artificial Sequence
  Description of Artificial Sequence: Synthetic oligonucleotide
  Sense Strand Starting at position 1004 of SEQ ID NO: 317554
gucuuugaggucugaggag

SEQ ID NO: 397534 - RNA, 19 nt, Artificial Sequence
  Description of Artificial Sequence: Synthetic oligonucleotide
  Antisense Strand to SEQ ID NO: 397533
cuccucagaccucaaagac

SEQ ID NO: 397535 - RNA, 19 nt, Artificial Sequence
  Description of Artificial Sequence: Synthetic oligonucleotide
  Sense Strand Starting at position 1004 of SEQ ID NO: 317904
cggauuucgucccaaauuu

SEQ ID NO: 397536 - RNA, 19 nt, Artificial Sequence
  Description of Artificial Sequence: Synthetic oligonucleotide
  Antisense Strand to SEQ ID NO: 397535
aaauuugggacgaaauccg

SEQ ID NO: 397537 - RNA, 19 nt, Artificial Sequence
  Description of Artificial Sequence: Synthetic oligonucleotide
  Sense Strand Starting at position 1004 of SEQ ID NO: 317948
agaagagcagaauguuuau

SEQ ID NO: 397538 - RNA, 19 nt, Artificial Sequence
  Description of Artificial Sequence: Synthetic oligonucleotide
  Antisense Strand to SEQ ID NO: 397537
auaaacauucugcucuucu

SEQ ID NO: 397539 - RNA, 19 nt, Artificial Sequence
  Description of Artificial Sequence: Synthetic oligonucleotide
  Sense Strand Starting at position 1004 of SEQ ID NO: 317954
gcagaauguuuauuugcca

SEQ ID NO: 397540 - RNA, 19 nt, Artificial Sequence
  Description of Artificial Sequence: Synthetic oligonucleotide
  Antisense Strand to SEQ ID NO: 397539
uggcaaauaaacauucugc

SEQ ID NO: 397541 - RNA, 19 nt, Artificial Sequence
  Description of Artificial Sequence: Synthetic oligonucleotide
  Sense Strand Starting at position 1004 of SEQ ID NO: 318075
cuuacuuuguuucuccaga

SEQ ID NO: 397542 - RNA, 19 nt, Artificial Sequence
  Description of Artificial Sequence: Synthetic oligonucleotide
  Antisense Strand to SEQ ID NO: 397541
ucuggagaaacaaaguaag

SEQ ID NO: 397543 - RNA, 19 nt, Artificial Sequence
  Description of Artificial Sequence: Synthetic oligonucleotide
  Sense Strand Starting at position 1004 of SEQ ID NO: 318116
uaagucauguggcuuuaau

SEQ ID NO: 397544 - RNA, 19 nt, Artificial Sequence
  Description of Artificial Sequence: Synthetic oligonucleotide
  Antisense Strand to SEQ ID NO: 397543
auuaaagccacaugacuua

SEQ ID NO: 397545 - RNA, 19 nt, Artificial Sequence
  Description of Artificial Sequence: Synthetic oligonucleotide
  Sense Strand Starting at position 1004 of SEQ ID NO: 318143
agauuaugcguucagaugu

SEQ ID NO: 397546 - RNA, 19 nt, Artificial Sequence
  Description of Artificial Sequence: Synthetic oligonucleotide
  Antisense Strand to SEQ ID NO: 397545
acaucugaacgcauaaucu

SEQ ID NO: 397547 - RNA, 19 nt, Artificial Sequence
  Description of Artificial Sequence: Synthetic oligonucleotide
  Sense Strand Starting at position 1004 of SEQ ID NO: 318160
guggcaaaggcuuaagaga

SEQ ID NO: 397548 - RNA, 19 nt, Artificial Sequence
  Description of Artificial Sequence: Synthetic oligonucleotide
  Antisense Strand to SEQ ID NO: 397547
ucucuuaagccuuugccac

SEQ ID NO: 397549 - RNA, 19 nt, Artificial Sequence
  Description of Artificial Sequence: Synthetic oligonucleotide
  Sense Strand Starting at position 1004 of SEQ ID NO: 318187
cucuuaaucguagcgguuu

SEQ ID NO: 397550 - RNA, 19 nt, Artificial Sequence
  Description of Artificial Sequence: Synthetic oligonucleotide
  Antisense Strand to SEQ ID NO: 397549
aaaccgcuacgauuaagag

SEQ ID NO: 397551 - RNA, 19 nt, Artificial Sequence
  Description of Artificial Sequence: Synthetic oligonucleotide
  Sense Strand Starting at position 1004 of SEQ ID NO: 318517
cagguuaagucuuugagag

SEQ ID NO: 397552 - RNA, 19 nt, Artificial Sequence
  Description of Artificial Sequence: Synthetic oligonucleotide
  Antisense Strand to SEQ ID NO: 397551
cucucaaagacuuaaccug

SEQ ID NO: 397553 - RNA, 19 nt, Artificial Sequence
  Description of Artificial Sequence: Synthetic oligonucleotide
  Sense Strand Starting at position 1004 of SEQ ID NO: 318518
agguuaagucuuugagaga

SEQ ID NO: 397554 - RNA, 19 nt, Artificial Sequence
  Description of Artificial Sequence: Synthetic oligonucleotide
  Antisense Strand to SEQ ID NO: 397553
ucucucaaagacuuaaccu

SEQ ID NO: 397555 - RNA, 19 nt, Artificial Sequence
  Description of Artificial Sequence: Synthetic oligonucleotide
  Sense Strand Starting at position 1004 of SEQ ID NO: 318568
ggagucugggaguaagagu

SEQ ID NO: 397556 - RNA, 19 nt, Artificial Sequence
  Description of Artificial Sequence: Synthetic oligonucleotide
  Antisense Strand to SEQ ID NO: 397555
acucuuacucccagacucc

SEQ ID NO: 397557 - RNA, 19 nt, Artificial Sequence
  Description of Artificial Sequence: Synthetic oligonucleotide
  Sense Strand Starting at position 1004 of SEQ ID NO: 318624
uggagcaugcaagauuaau

SEQ ID NO: 397558 - RNA, 19 nt, Artificial Sequence
  Description of Artificial Sequence: Synthetic oligonucleotide
  Antisense Strand to SEQ ID NO: 397557
auuaaucuugcaugcucca

SEQ ID NO: 397559 - RNA, 19 nt, Artificial Sequence
  Description of Artificial Sequence: Synthetic oligonucleotide
  Sense Strand Starting at position 1004 of SEQ ID NO: 318630
augcaagauuaauagagga

SEQ ID NO: 397560 - RNA, 19 nt, Artificial Sequence
  Description of Artificial Sequence: Synthetic oligonucleotide
  Antisense Strand to SEQ ID NO: 397559
uccucuauuaaucuugcau

SEQ ID NO: 397561 - RNA, 19 nt, Artificial Sequence
  Description of Artificial Sequence: Synthetic oligonucleotide
  Sense Strand Starting at position 1004 of SEQ ID NO: 318659
agcaguguggcugaaauuc

SEQ ID NO: 397562 - RNA, 19 nt, Artificial Sequence
  Description of Artificial Sequence: Synthetic oligonucleotide
  Antisense Strand to SEQ ID NO: 397561
gaauuucagccacacugcu

SEQ ID NO: 397563 - RNA, 19 nt, Artificial Sequence
  Description of Artificial Sequence: Synthetic oligonucleotide
  Sense Strand Starting at position 1004 of SEQ ID NO: 318710
aggugaagguucucacaug

SEQ ID NO: 397564 - RNA, 19 nt, Artificial Sequence
  Description of Artificial Sequence: Synthetic oligonucleotide
  Antisense Strand to SEQ ID NO: 397563
caugugagaaccuucaccu

SEQ ID NO: 397565 - RNA, 19 nt, Artificial Sequence
  Description of Artificial Sequence: Synthetic oligonucleotide
  Sense Strand Starting at position 1004 of SEQ ID NO: 318853
ugcuuaggaaauuguguua

SEQ ID NO: 397566 - RNA, 19 nt, Artificial Sequence
  Description of Artificial Sequence: Synthetic oligonucleotide
  Antisense Strand to SEQ ID NO: 397565
uaacacaauuuccuaagca

SEQ ID NO: 397567 - RNA, 19 nt, Artificial Sequence
  Description of Artificial Sequence: Synthetic oligonucleotide
  Sense Strand Starting at position 1004 of SEQ ID NO: 318898
ucagcaacuuuguugguua

SEQ ID NO: 397568 - RNA, 19 nt, Artificial Sequence
  Description of Artificial Sequence: Synthetic oligonucleotide
  Antisense Strand to SEQ ID NO: 397567
uaaccaacaaaguugcuga

SEQ ID NO: 397569 - RNA, 19 nt, Artificial Sequence
  Description of Artificial Sequence: Synthetic oligonucleotide
  Sense Strand Starting at position 1004 of SEQ ID NO: 318900
agcaacuuuguugguuaau

SEQ ID NO: 397570 - RNA, 19 nt, Artificial Sequence
  Description of Artificial Sequence: Synthetic oligonucleotide
  Antisense Strand to SEQ ID NO: 397569
auuaaccaacaaaguugcu

SEQ ID NO: 397571 - RNA, 19 nt, Artificial Sequence
  Description of Artificial Sequence: Synthetic oligonucleotide
  Sense Strand Starting at position 1004 of SEQ ID NO: 318901
gcaacuuuguugguuaaua

SEQ ID NO: 397572 - RNA, 19 nt, Artificial Sequence
  Description of Artificial Sequence: Synthetic oligonucleotide
  Antisense Strand to SEQ ID NO: 397571
uauuaaccaacaaaguugc

SEQ ID NO: 397573 - RNA, 19 nt, Artificial Sequence
  Description of Artificial Sequence: Synthetic oligonucleotide
  Sense Strand Starting at position 1004 of SEQ ID NO: 318950
ucagacuaggucuguaaau

SEQ ID NO: 397574 - RNA, 19 nt, Artificial Sequence
  Description of Artificial Sequence: Synthetic oligonucleotide
  Antisense Strand to SEQ ID NO: 397573
auuuacagaccuagucuga

SEQ ID NO: 397575 - RNA, 19 nt, Artificial Sequence
  Description of Artificial Sequence: Synthetic oligonucleotide
  Sense Strand Starting at position 1004 of SEQ ID NO: 318951
cagacuaggucuguaaauc

SEQ ID NO: 397576 - RNA, 19 nt, Artificial Sequence
  Description of Artificial Sequence: Synthetic oligonucleotide
  Antisense Strand to SEQ ID NO: 397575
gauuuacagaccuagucug

SEQ ID NO: 397577 - RNA, 19 nt, Artificial Sequence
  Description of Artificial Sequence: Synthetic oligonucleotide
  Sense Strand Starting at position 1004 of SEQ ID NO: 318952
agacuaggucuguaaaucu

SEQ ID NO: 397578 - RNA, 19 nt, Artificial Sequence
  Description of Artificial Sequence: Synthetic oligonucleotide
  Antisense Strand to SEQ ID NO: 397577
agauuuacagaccuagucu

SEQ ID NO: 397579 - RNA, 19 nt, Artificial Sequence
  Description of Artificial Sequence: Synthetic oligonucleotide
  Sense Strand Starting at position 1004 of SEQ ID NO: 318959
gucuguaaaucuguaaaua

SEQ ID NO: 397580 - RNA, 19 nt, Artificial Sequence
  Description of Artificial Sequence: Synthetic oligonucleotide
  Antisense Strand to SEQ ID NO: 397579
uauuuacagauuuacagac

SEQ ID NO: 397581 - RNA, 19 nt, Artificial Sequence
  Description of Artificial Sequence: Synthetic oligonucleotide
  Sense Strand Starting at position 1004 of SEQ ID NO: 319185
agacacuugugauuacacu

SEQ ID NO: 397582 - RNA, 19 nt, Artificial Sequence
  Description of Artificial Sequence: Synthetic oligonucleotide
  Antisense Strand to SEQ ID NO: 397581
aguguaaucacaagugucu

SEQ ID NO: 397583 - RNA, 19 nt, Artificial Sequence
  Description of Artificial Sequence: Synthetic oligonucleotide
  Sense Strand Starting at position 1005 of SEQ ID NO: 315255
agccgaguagaaugauacu

SEQ ID NO: 397584 - RNA, 19 nt, Artificial Sequence
  Description of Artificial Sequence: Synthetic oligonucleotide
  Antisense Strand to SEQ ID NO: 397583
aguaucauucuacucggcu

SEQ ID NO: 397585 - RNA, 19 nt, Artificial Sequence
  Description of Artificial Sequence: Synthetic oligonucleotide
  Sense Strand Starting at position 1005 of SEQ ID NO: 315300
caucuucuacuggaugagu

SEQ ID NO: 397586 - RNA, 19 nt, Artificial Sequence
  Description of Artificial Sequence: Synthetic oligonucleotide
  Antisense Strand to SEQ ID NO: 397585
acucauccaguagaagaug

SEQ ID NO: 397587 - RNA, 19 nt, Artificial Sequence
  Description of Artificial Sequence: Synthetic oligonucleotide
  Sense Strand Starting at position 1005 of SEQ ID NO: 315302
ucuucuacuggaugaguaa

SEQ ID NO: 397588 - RNA, 19 nt, Artificial Sequence
  Description of Artificial Sequence: Synthetic oligonucleotide
  Antisense Strand to SEQ ID NO: 397587
uuacucauccaguagaaga

SEQ ID NO: 397589 - RNA, 19 nt, Artificial Sequence
  Description of Artificial Sequence: Synthetic oligonucleotide
  Sense Strand Starting at position 1005 of SEQ ID NO: 315449
augcaaucuguacaaugua

SEQ ID NO: 397590 - RNA, 19 nt, Artificial Sequence
  Description of Artificial Sequence: Synthetic oligonucleotide
  Antisense Strand to SEQ ID NO: 397589
uacauuguacagauugcau

SEQ ID NO: 397591 - RNA, 19 nt, Artificial Sequence
  Description of Artificial Sequence: Synthetic oligonucleotide
  Sense Strand Starting at position 1005 of SEQ ID NO: 315661
gggaauagguuaguauacu

SEQ ID NO: 397592 - RNA, 19 nt, Artificial Sequence
  Description of Artificial Sequence: Synthetic oligonucleotide
  Antisense Strand to SEQ ID NO: 397591
aguauacuaaccuauuccc

SEQ ID NO: 397593 - RNA, 19 nt, Artificial Sequence
  Description of Artificial Sequence: Synthetic oligonucleotide
  Sense Strand Starting at position 1005 of SEQ ID NO: 315751
cguuauuauaggcaaggga

SEQ ID NO: 397594 - RNA, 19 nt, Artificial Sequence
  Description of Artificial Sequence: Synthetic oligonucleotide
  Antisense Strand to SEQ ID NO: 397593
ucccuugccuauaauaacg

SEQ ID NO: 397595 - RNA, 19 nt, Artificial Sequence
  Description of Artificial Sequence: Synthetic oligonucleotide
  Sense Strand Starting at position 1005 of SEQ ID NO: 316038
uguagugagccugaucaug

SEQ ID NO: 397596 - RNA, 19 nt, Artificial Sequence
  Description of Artificial Sequence: Synthetic oligonucleotide
  Antisense Strand to SEQ ID NO: 397595
caugaucaggcucacuaca

SEQ ID NO: 397597 - RNA, 19 nt, Artificial Sequence
  Description of Artificial Sequence: Synthetic oligonucleotide
  Sense Strand Starting at position 1005 of SEQ ID NO: 316243
aucuguauuuaucagacua

SEQ ID NO: 397598 - RNA, 19 nt, Artificial Sequence
  Description of Artificial Sequence: Synthetic oligonucleotide
  Antisense Strand to SEQ ID NO: 397597
uagucugauaaauacagau

SEQ ID NO: 397599 - RNA, 19 nt, Artificial Sequence
  Description of Artificial Sequence: Synthetic oligonucleotide
  Sense Strand Starting at position 1005 of SEQ ID NO: 316245
cuguauuuaucagacuaua

SEQ ID NO: 397600 - RNA, 19 nt, Artificial Sequence
  Description of Artificial Sequence: Synthetic oligonucleotide
  Antisense Strand to SEQ ID NO: 397599
uauagucugauaaauacag

SEQ ID NO: 397601 - RNA, 19 nt, Artificial Sequence
  Description of Artificial Sequence: Synthetic oligonucleotide
  Sense Strand Starting at position 1005 of SEQ ID NO: 316305
acauuaguuugcuuucuca

SEQ ID NO: 397602 - RNA, 19 nt, Artificial Sequence
  Description of Artificial Sequence: Synthetic oligonucleotide
  Antisense Strand to SEQ ID NO: 397601
ugagaaagcaaacuaaugu

SEQ ID NO: 397603 - RNA, 19 nt, Artificial Sequence
  Description of Artificial Sequence: Synthetic oligonucleotide
  Sense Strand Starting at position 1005 of SEQ ID NO: 316370
gaaguuaauuugggagaca

SEQ ID NO: 397604 - RNA, 19 nt, Artificial Sequence
  Description of Artificial Sequence: Synthetic oligonucleotide
  Antisense Strand to SEQ ID NO: 397603
ugucucccaaauuaacuuc

SEQ ID NO: 397605 - RNA, 19 nt, Artificial Sequence
  Description of Artificial Sequence: Synthetic oligonucleotide
  Sense Strand Starting at position 1005 of SEQ ID NO: 316550
cuuacugguucccuuacua

SEQ ID NO: 397606 - RNA, 19 nt, Artificial Sequence
  Description of Artificial Sequence: Synthetic oligonucleotide
  Antisense Strand to SEQ ID NO: 397605
uaguaagggaaccaguaag

SEQ ID NO: 397607 - RNA, 19 nt, Artificial Sequence
  Description of Artificial Sequence: Synthetic oligonucleotide
  Sense Strand Starting at position 1005 of SEQ ID NO: 316554
cugguucccuuacuaauga

SEQ ID NO: 397608 - RNA, 19 nt, Artificial Sequence
  Description of Artificial Sequence: Synthetic oligonucleotide
  Antisense Strand to SEQ ID NO: 397607
ucauuaguaagggaaccag

SEQ ID NO: 397609 - RNA, 19 nt, Artificial Sequence
  Description of Artificial Sequence: Synthetic oligonucleotide
  Sense Strand Starting at position 1005 of SEQ ID NO: 316805
uuaucaggcgcgagauagu

SEQ ID NO: 397610 - RNA, 19 nt, Artificial Sequence
  Description of Artificial Sequence: Synthetic oligonucleotide
  Antisense Strand to SEQ ID NO: 397609
acuaucucgcgccugauaa

SEQ ID NO: 397611 - RNA, 19 nt, Artificial Sequence
  Description of Artificial Sequence: Synthetic oligonucleotide
  Sense Strand Starting at position 1005 of SEQ ID NO: 317033
ccuuuaucuugacugagac

SEQ ID NO: 397612 - RNA, 19 nt, Artificial Sequence
  Description of Artificial Sequence: Synthetic oligonucleotide
  Antisense Strand to SEQ ID NO: 397611
gucucagucaagauaaagg

SEQ ID NO: 397613 - RNA, 19 nt, Artificial Sequence
  Description of Artificial Sequence: Synthetic oligonucleotide
  Sense Strand Starting at position 1005 of SEQ ID NO: 317075
aucguuacagcggaaauca

SEQ ID NO: 397614 - RNA, 19 nt, Artificial Sequence
  Description of Artificial Sequence: Synthetic oligonucleotide
  Antisense Strand to SEQ ID NO: 397613
ugauuuccgcuguaacgau

SEQ ID NO: 397615 - RNA, 19 nt, Artificial Sequence
  Description of Artificial Sequence: Synthetic oligonucleotide
  Sense Strand Starting at position 1005 of SEQ ID NO: 317189
gcggucugcauuuauauca

SEQ ID NO: 397616 - RNA, 19 nt, Artificial Sequence
  Description of Artificial Sequence: Synthetic oligonucleotide
  Antisense Strand to SEQ ID NO: 397615
ugauauaaaugcagaccgc

SEQ ID NO: 397617 - RNA, 19 nt, Artificial Sequence
  Description of Artificial Sequence: Synthetic oligonucleotide
  Sense Strand Starting at position 1005 of SEQ ID NO: 317463
ggaugcaggagucaucuuu

SEQ ID NO: 397618 - RNA, 19 nt, Artificial Sequence
  Description of Artificial Sequence: Synthetic oligonucleotide
  Antisense Strand to SEQ ID NO: 397617
aaagaugacuccugcaucc

SEQ ID NO: 397619 - RNA, 19 nt, Artificial Sequence
  Description of Artificial Sequence: Synthetic oligonucleotide
  Sense Strand Starting at position 1005 of SEQ ID NO: 317558
guuauaauccuccagcgaa

SEQ ID NO: 397620 - RNA, 19 nt, Artificial Sequence
  Description of Artificial Sequence: Synthetic oligonucleotide
  Antisense Strand to SEQ ID NO: 397619
uucgcuggaggauuauaac

SEQ ID NO: 397621 - RNA, 19 nt, Artificial Sequence
  Description of Artificial Sequence: Synthetic oligonucleotide
  Sense Strand Starting at position 1005 of SEQ ID NO: 317649
ggaccagguccucgggaaa

SEQ ID NO: 397622 - RNA, 19 nt, Artificial Sequence
  Description of Artificial Sequence: Synthetic oligonucleotide
  Antisense Strand to SEQ ID NO: 397621
uuucccgaggaccuggucc

SEQ ID NO: 397623 - RNA, 19 nt, Artificial Sequence
  Description of Artificial Sequence: Synthetic oligonucleotide
  Sense Strand Starting at position 1005 of SEQ ID NO: 318010
gguauaauuuaucaugggu

SEQ ID NO: 397624 - RNA, 19 nt, Artificial Sequence
  Description of Artificial Sequence: Synthetic oligonucleotide
  Antisense Strand to SEQ ID NO: 397623
acccaugauaaauuauacc

SEQ ID NO: 397625 - RNA, 19 nt, Artificial Sequence
  Description of Artificial Sequence: Synthetic oligonucleotide
  Sense Strand Starting at position 1005 of SEQ ID NO: 318085
caaugaauguuugcuguga

SEQ ID NO: 397626 - RNA, 19 nt, Artificial Sequence
  Description of Artificial Sequence: Synthetic oligonucleotide
  Antisense Strand to SEQ ID NO: 397625
ucacagcaaacauucauug

SEQ ID NO: 397627 - RNA, 19 nt, Artificial Sequence
  Description of Artificial Sequence: Synthetic oligonucleotide
  Sense Strand Starting at position 1005 of SEQ ID NO: 318099
ugugaccuaucaguaugua

SEQ ID NO: 397628 - RNA, 19 nt, Artificial Sequence
  Description of Artificial Sequence: Synthetic oligonucleotide
  Antisense Strand to SEQ ID NO: 397627
uacauacugauaggucaca

SEQ ID NO: 397629 - RNA, 19 nt, Artificial Sequence
  Description of Artificial Sequence: Synthetic oligonucleotide
  Sense Strand Starting at position 1005 of SEQ ID NO: 318134
ggaagugucuugcugacaa

SEQ ID NO: 397630 - RNA, 19 nt, Artificial Sequence
  Description of Artificial Sequence: Synthetic oligonucleotide
  Antisense Strand to SEQ ID NO: 397629
uugucagcaagacacuucc

SEQ ID NO: 397631 - RNA, 19 nt, Artificial Sequence
  Description of Artificial Sequence: Synthetic oligonucleotide
  Sense Strand Starting at position 1005 of SEQ ID NO: 318170
ugagcuuugaaggauugua

SEQ ID NO: 397632 - RNA, 19 nt, Artificial Sequence
  Description of Artificial Sequence: Synthetic oligonucleotide
  Antisense Strand to SEQ ID NO: 397631
uacaauccuucaaagcuca

SEQ ID NO: 397633 - RNA, 19 nt, Artificial Sequence
  Description of Artificial Sequence: Synthetic oligonucleotide
  Sense Strand Starting at position 1005 of SEQ ID NO: 318228
uggguuuagcaguaauaug

SEQ ID NO: 397634 - RNA, 19 nt, Artificial Sequence
  Description of Artificial Sequence: Synthetic oligonucleotide
  Antisense Strand to SEQ ID NO: 397633
cauauuacugcuaaaccca

SEQ ID NO: 397635 - RNA, 19 nt, Artificial Sequence
  Description of Artificial Sequence: Synthetic oligonucleotide
  Sense Strand Starting at position 1005 of SEQ ID NO: 318331
gaaaguaagaacuguucgu

SEQ ID NO: 397636 - RNA, 19 nt, Artificial Sequence
  Description of Artificial Sequence: Synthetic oligonucleotide
  Antisense Strand to SEQ ID NO: 397635
acgaacaguucuuacuuuc

SEQ ID NO: 397637 - RNA, 19 nt, Artificial Sequence
  Description of Artificial Sequence: Synthetic oligonucleotide
  Sense Strand Starting at position 1005 of SEQ ID NO: 318366
aguaguuaucguggaaacu

SEQ ID NO: 397638 - RNA, 19 nt, Artificial Sequence
  Description of Artificial Sequence: Synthetic oligonucleotide
  Antisense Strand to SEQ ID NO: 397637
aguuuccacgauaacuacu

SEQ ID NO: 397639 - RNA, 19 nt, Artificial Sequence
  Description of Artificial Sequence: Synthetic oligonucleotide
  Sense Strand Starting at position 1005 of SEQ ID NO: 318367
guaguuaucguggaaacua

SEQ ID NO: 397640 - RNA, 19 nt, Artificial Sequence
  Description of Artificial Sequence: Synthetic oligonucleotide
  Antisense Strand to SEQ ID NO: 397639
uaguuuccacgauaacuac

SEQ ID NO: 397641 - RNA, 19 nt, Artificial Sequence
  Description of Artificial Sequence: Synthetic oligonucleotide
  Sense Strand Starting at position 1005 of SEQ ID NO: 318375
cguggaaacuaugcuuuaa

SEQ ID NO: 397642 - RNA, 19 nt, Artificial Sequence
  Description of Artificial Sequence: Synthetic oligonucleotide
  Antisense Strand to SEQ ID NO: 397641
uuaaagcauaguuuccacg

SEQ ID NO: 397643 - RNA, 19 nt, Artificial Sequence
  Description of Artificial Sequence: Synthetic oligonucleotide
  Sense Strand Starting at position 1005 of SEQ ID NO: 318377
uggaaacuaugcuuuaaua

SEQ ID NO: 397644 - RNA, 19 nt, Artificial Sequence
  Description of Artificial Sequence: Synthetic oligonucleotide
  Antisense Strand to SEQ ID NO: 397643
uauuaaagcauaguuucca

SEQ ID NO: 397645 - RNA, 19 nt, Artificial Sequence
  Description of Artificial Sequence: Synthetic oligonucleotide
  Sense Strand Starting at position 1005 of SEQ ID NO: 318387
gcuuuaauagagcauauga

SEQ ID NO: 397646 - RNA, 19 nt, Artificial Sequence
  Description of Artificial Sequence: Synthetic oligonucleotide
  Antisense Strand to SEQ ID NO: 397645
ucauaugcucuauuaaagc

SEQ ID NO: 397647 - RNA, 19 nt, Artificial Sequence
  Description of Artificial Sequence: Synthetic oligonucleotide
  Sense Strand Starting at position 1005 of SEQ ID NO: 318405
acuuguagagucugaagag

SEQ ID NO: 397648 - RNA, 19 nt, Artificial Sequence
  Description of Artificial Sequence: Synthetic oligonucleotide
  Antisense Strand to SEQ ID NO: 397647
cucuucagacucuacaagu

SEQ ID NO: 397649 - RNA, 19 nt, Artificial Sequence
  Description of Artificial Sequence: Synthetic oligonucleotide
  Sense Strand Starting at position 1005 of SEQ ID NO: 318598
agucuuccaugucuugaca

SEQ ID NO: 397650 - RNA, 19 nt, Artificial Sequence
  Description of Artificial Sequence: Synthetic oligonucleotide
  Antisense Strand to SEQ ID NO: 397649
ugucaagacauggaagacu

SEQ ID NO: 397651 - RNA, 19 nt, Artificial Sequence
  Description of Artificial Sequence: Synthetic oligonucleotide
  Sense Strand Starting at position 1005 of SEQ ID NO: 318758
gaauauuagcgagaaaugu

SEQ ID NO: 397652 - RNA, 19 nt, Artificial Sequence
  Description of Artificial Sequence: Synthetic oligonucleotide
  Antisense Strand to SEQ ID NO: 397651
acauuucucgcuaauauuc

SEQ ID NO: 397653 - RNA, 19 nt, Artificial Sequence
  Description of Artificial Sequence: Synthetic oligonucleotide
  Sense Strand Starting at position 1005 of SEQ ID NO: 318764
uagcgagaaaugugcagau

SEQ ID NO: 397654 - RNA, 19 nt, Artificial Sequence
  Description of Artificial Sequence: Synthetic oligonucleotide
  Antisense Strand to SEQ ID NO: 397653
aucugcacauuucucgcua

SEQ ID NO: 397655 - RNA, 19 nt, Artificial Sequence
  Description of Artificial Sequence: Synthetic oligonucleotide
  Sense Strand Starting at position 1005 of SEQ ID NO: 318827
gcgugugcacacguauaua

SEQ ID NO: 397656 - RNA, 19 nt, Artificial Sequence
  Description of Artificial Sequence: Synthetic oligonucleotide
  Antisense Strand to SEQ ID NO: 397655
uauauacgugugcacacgc

SEQ ID NO: 397657 - RNA, 19 nt, Artificial Sequence
  Description of Artificial Sequence: Synthetic oligonucleotide
  Sense Strand Starting at position 1005 of SEQ ID NO: 318860
gucaauacccuauaguuau

SEQ ID NO: 397658 - RNA, 19 nt, Artificial Sequence
  Description of Artificial Sequence: Synthetic oligonucleotide
  Antisense Strand to SEQ ID NO: 397657
auaacuauaggguauugac

SEQ ID NO: 397659 - RNA, 19 nt, Artificial Sequence
  Description of Artificial Sequence: Synthetic oligonucleotide
  Sense Strand Starting at position 1005 of SEQ ID NO: 319094
gcccaugaguauccaaugu

SEQ ID NO: 397660 - RNA, 19 nt, Artificial Sequence
  Description of Artificial Sequence: Synthetic oligonucleotide
  Antisense Strand to SEQ ID NO: 397659
acauuggauacucaugggc

SEQ ID NO: 397661 - RNA, 19 nt, Artificial Sequence
  Description of Artificial Sequence: Synthetic oligonucleotide
  Sense Strand Starting at position 1005 of SEQ ID NO: 319197
agccauguugcugcaaagu

SEQ ID NO: 397662 - RNA, 19 nt, Artificial Sequence
  Description of Artificial Sequence: Synthetic oligonucleotide
  Antisense Strand to SEQ ID NO: 397661
acuuugcagcaacauggcu

SEQ ID NO: 397663 - RNA, 19 nt, Artificial Sequence
  Description of Artificial Sequence: Synthetic oligonucleotide
  Sense Strand Starting at position 1006 of SEQ ID NO: 315492
uugcuaugacacugauaua

SEQ ID NO: 397664 - RNA, 19 nt, Artificial Sequence
  Description of Artificial Sequence: Synthetic oligonucleotide
  Antisense Strand to SEQ ID NO: 397663
uauaucagugucauagcaa

SEQ ID NO: 397665 - RNA, 19 nt, Artificial Sequence
  Description of Artificial Sequence: Synthetic oligonucleotide
  Sense Strand Starting at position 1006 of SEQ ID NO: 315558
aguggaacugcugggauaa

SEQ ID NO: 397666 - RNA, 19 nt, Artificial Sequence
  Description of Artificial Sequence: Synthetic oligonucleotide
  Antisense Strand to SEQ ID NO: 397665
uuaucccagcaguuccacu

SEQ ID NO: 397667 - RNA, 19 nt, Artificial Sequence
  Description of Artificial Sequence: Synthetic oligonucleotide
  Sense Strand Starting at position 1006 of SEQ ID NO: 315559
guggaacugcugggauaau

SEQ ID NO: 397668 - RNA, 19 nt, Artificial Sequence
  Description of Artificial Sequence: Synthetic oligonucleotide
  Antisense Strand to SEQ ID NO: 397667
auuaucccagcaguuccac

SEQ ID NO: 397669 - RNA, 19 nt, Artificial Sequence
  Description of Artificial Sequence: Synthetic oligonucleotide
  Sense Strand Starting at position 1006 of SEQ ID NO: 315715
cccuaauaggugugucaua

SEQ ID NO: 397670 - RNA, 19 nt, Artificial Sequence
  Description of Artificial Sequence: Synthetic oligonucleotide
  Antisense Strand to SEQ ID NO: 397669
uaugacacaccuauuaggg

SEQ ID NO: 397671 - RNA, 19 nt, Artificial Sequence
  Description of Artificial Sequence: Synthetic oligonucleotide
  Sense Strand Starting at position 1006 of SEQ ID NO: 315716
ccuaauaggugugucauau

SEQ ID NO: 397672 - RNA, 19 nt, Artificial Sequence
  Description of Artificial Sequence: Synthetic oligonucleotide
  Antisense Strand to SEQ ID NO: 397671
auaugacacaccuauuagg

SEQ ID NO: 397673 - RNA, 19 nt, Artificial Sequence
  Description of Artificial Sequence: Synthetic oligonucleotide
  Sense Strand Starting at position 1006 of SEQ ID NO: 315825
ccagaagguguucaguaag

SEQ ID NO: 397674 - RNA, 19 nt, Artificial Sequence
  Description of Artificial Sequence: Synthetic oligonucleotide
  Antisense Strand to SEQ ID NO: 397673
cuuacugaacaccuucugg

SEQ ID NO: 397675 - RNA, 19 nt, Artificial Sequence
  Description of Artificial Sequence: Synthetic oligonucleotide
  Sense Strand Starting at position 1006 of SEQ ID NO: 315998
cuauguuaggacuaauccu

SEQ ID NO: 397676 - RNA, 19 nt, Artificial Sequence
  Description of Artificial Sequence: Synthetic oligonucleotide
  Antisense Strand to SEQ ID NO: 397675
aggauuaguccuaacauag

SEQ ID NO: 397677 - RNA, 19 nt, Artificial Sequence
  Description of Artificial Sequence: Synthetic oligonucleotide
  Sense Strand Starting at position 1006 of SEQ ID NO: 316110
ugcuuaacguaauuuaucu

SEQ ID NO: 397678 - RNA, 19 nt, Artificial Sequence
  Description of Artificial Sequence: Synthetic oligonucleotide
  Antisense Strand to SEQ ID NO: 397677
agauaaauuacguuaagca

SEQ ID NO: 397679 - RNA, 19 nt, Artificial Sequence
  Description of Artificial Sequence: Synthetic oligonucleotide
  Sense Strand Starting at position 1006 of SEQ ID NO: 316117
cguaauuuaucugacuuua

SEQ ID NO: 397680 - RNA, 19 nt, Artificial Sequence
  Description of Artificial Sequence: Synthetic oligonucleotide
  Antisense Strand to SEQ ID NO: 397679
uaaagucagauaaauuacg

SEQ ID NO: 397681 - RNA, 19 nt, Artificial Sequence
  Description of Artificial Sequence: Synthetic oligonucleotide
  Sense Strand Starting at position 1006 of SEQ ID NO: 316232
ucgcauacagucugauuua

SEQ ID NO: 397682 - RNA, 19 nt, Artificial Sequence
  Description of Artificial Sequence: Synthetic oligonucleotide
  Antisense Strand to SEQ ID NO: 397681
uaaaucagacuguaugcga

SEQ ID NO: 397683 - RNA, 19 nt, Artificial Sequence
  Description of Artificial Sequence: Synthetic oligonucleotide
  Sense Strand Starting at position 1006 of SEQ ID NO: 316520
gaagaucaauaugcuaguu

SEQ ID NO: 397684 - RNA, 19 nt, Artificial Sequence
  Description of Artificial Sequence: Synthetic oligonucleotide
  Antisense Strand to SEQ ID NO: 397683
aacuagcauauugaucuuc

SEQ ID NO: 397685 - RNA, 19 nt, Artificial Sequence
  Description of Artificial Sequence: Synthetic oligonucleotide
  Sense Strand Starting at position 1006 of SEQ ID NO: 316533
cuaguucuggcuuaucauu

SEQ ID NO: 397686 - RNA, 19 nt, Artificial Sequence
  Description of Artificial Sequence: Synthetic oligonucleotide
  Antisense Strand to SEQ ID NO: 397685
aaugauaagccagaacuag

SEQ ID NO: 397687 - RNA, 19 nt, Artificial Sequence
  Description of Artificial Sequence: Synthetic oligonucleotide
  Sense Strand Starting at position 1006 of SEQ ID NO: 316651
gcaggaaaucuaggcucau

SEQ ID NO: 397688 - RNA, 19 nt, Artificial Sequence
  Description of Artificial Sequence: Synthetic oligonucleotide
  Antisense Strand to SEQ ID NO: 397687
augagccuagauuuccugc

SEQ ID NO: 397689 - RNA, 19 nt, Artificial Sequence
  Description of Artificial Sequence: Synthetic oligonucleotide
  Sense Strand Starting at position 1006 of SEQ ID NO: 316742
cuccguaccucaguuauuu

SEQ ID NO: 397690 - RNA, 19 nt, Artificial Sequence
  Description of Artificial Sequence: Synthetic oligonucleotide
  Antisense Strand to SEQ ID NO: 397689
aaauaacugagguacggag

SEQ ID NO: 397691 - RNA, 19 nt, Artificial Sequence
  Description of Artificial Sequence: Synthetic oligonucleotide
  Sense Strand Starting at position 1006 of SEQ ID NO: 316843
agagguuucugguccuaac

SEQ ID NO: 397692 - RNA, 19 nt, Artificial Sequence
  Description of Artificial Sequence: Synthetic oligonucleotide
  Antisense Strand to SEQ ID NO: 397691
guuaggaccagaaaccucu

SEQ ID NO: 397693 - RNA, 19 nt, Artificial Sequence
  Description of Artificial Sequence: Synthetic oligonucleotide
  Sense Strand Starting at position 1006 of SEQ ID NO: 317136
aggaguucugcccgaggau

SEQ ID NO: 397694 - RNA, 19 nt, Artificial Sequence
  Description of Artificial Sequence: Synthetic oligonucleotide
  Antisense Strand to SEQ ID NO: 397693
auccucgggcagaacuccu

SEQ ID NO: 397695 - RNA, 19 nt, Artificial Sequence
  Description of Artificial Sequence: Synthetic oligonucleotide
  Sense Strand Starting at position 1006 of SEQ ID NO: 317137
ggaguucugcccgaggaug

SEQ ID NO: 397696 - RNA, 19 nt, Artificial Sequence
  Description of Artificial Sequence: Synthetic oligonucleotide
  Antisense Strand to SEQ ID NO: 397695
cauccucgggcagaacucc

SEQ ID NO: 397697 - RNA, 19 nt, Artificial Sequence
  Description of Artificial Sequence: Synthetic oligonucleotide
  Sense Strand Starting at position 1006 of SEQ ID NO: 317232
aagagagaaucaugggaag

SEQ ID NO: 397698 - RNA, 19 nt, Artificial Sequence
  Description of Artificial Sequence: Synthetic oligonucleotide
  Antisense Strand to SEQ ID NO: 397697
cuucccaugauucucucuu

SEQ ID NO: 397699 - RNA, 19 nt, Artificial Sequence
  Description of Artificial Sequence: Synthetic oligonucleotide
  Sense Strand Starting at position 1006 of SEQ ID NO: 317235
agagaaucaugggaagaga

SEQ ID NO: 397700 - RNA, 19 nt, Artificial Sequence
  Description of Artificial Sequence: Synthetic oligonucleotide
  Antisense Strand to SEQ ID NO: 397699
ucucuucccaugauucucu

SEQ ID NO: 397701 - RNA, 19 nt, Artificial Sequence
  Description of Artificial Sequence: Synthetic oligonucleotide
  Sense Strand Starting at position 1006 of SEQ ID NO: 317296
cccaauauccuucgaugcu

SEQ ID NO: 397702 - RNA, 19 nt, Artificial Sequence
  Description of Artificial Sequence: Synthetic oligonucleotide
  Antisense Strand to SEQ ID NO: 397701
agcaucgaaggauauuggg

SEQ ID NO: 397703 - RNA, 19 nt, Artificial Sequence
  Description of Artificial Sequence: Synthetic oligonucleotide
  Sense Strand Starting at position 1006 of SEQ ID NO: 317334
guaaucaucgcgaggcgaa

SEQ ID NO: 397704 - RNA, 19 nt, Artificial Sequence
  Description of Artificial Sequence: Synthetic oligonucleotide
  Antisense Strand to SEQ ID NO: 397703
uucgccucgcgaugauuac

SEQ ID NO: 397705 - RNA, 19 nt, Artificial Sequence
  Description of Artificial Sequence: Synthetic oligonucleotide
  Sense Strand Starting at position 1006 of SEQ ID NO: 317448
ucagacaguugguuuauga

SEQ ID NO: 397706 - RNA, 19 nt, Artificial Sequence
  Description of Artificial Sequence: Synthetic oligonucleotide
  Antisense Strand to SEQ ID NO: 397705
ucauaaaccaacugucuga

SEQ ID NO: 397707 - RNA, 19 nt, Artificial Sequence
  Description of Artificial Sequence: Synthetic oligonucleotide
  Sense Strand Starting at position 1006 of SEQ ID NO: 317455
guugguuuaugagucauuc

SEQ ID NO: 397708 - RNA, 19 nt, Artificial Sequence
  Description of Artificial Sequence: Synthetic oligonucleotide
  Antisense Strand to SEQ ID NO: 397707
gaaugacucauaaaccaac

SEQ ID NO: 397709 - RNA, 19 nt, Artificial Sequence
  Description of Artificial Sequence: Synthetic oligonucleotide
  Sense Strand Starting at position 1006 of SEQ ID NO: 317457
ugguuuaugagucauucug

SEQ ID NO: 397710 - RNA, 19 nt, Artificial Sequence
  Description of Artificial Sequence: Synthetic oligonucleotide
  Antisense Strand to SEQ ID NO: 397709
cagaaugacucauaaacca

SEQ ID NO: 397711 - RNA, 19 nt, Artificial Sequence
  Description of Artificial Sequence: Synthetic oligonucleotide
  Sense Strand Starting at position 1006 of SEQ ID NO: 317459
guuuaugagucauucuguc

SEQ ID NO: 397712 - RNA, 19 nt, Artificial Sequence
  Description of Artificial Sequence: Synthetic oligonucleotide
  Antisense Strand to SEQ ID NO: 397711
gacagaaugacucauaaac

SEQ ID NO: 397713 - RNA, 19 nt, Artificial Sequence
  Description of Artificial Sequence: Synthetic oligonucleotide
  Sense Strand Starting at position 1006 of SEQ ID NO: 317806
ccaaguauccuagagccau

SEQ ID NO: 397714 - RNA, 19 nt, Artificial Sequence
  Description of Artificial Sequence: Synthetic oligonucleotide
  Antisense Strand to SEQ ID NO: 397713
auggcucuaggauacuugg

SEQ ID NO: 397715 - RNA, 19 nt, Artificial Sequence
  Description of Artificial Sequence: Synthetic oligonucleotide
  Sense Strand Starting at position 1006 of SEQ ID NO: 317852
agagaaagguguccucucu

SEQ ID NO: 397716 - RNA, 19 nt, Artificial Sequence
  Description of Artificial Sequence: Synthetic oligonucleotide
  Antisense Strand to SEQ ID NO: 397715
agagaggacaccuuucucu

SEQ ID NO: 397717 - RNA, 19 nt, Artificial Sequence
  Description of Artificial Sequence: Synthetic oligonucleotide
  Sense Strand Starting at position 1006 of SEQ ID NO: 317859
gguguccucucuucucaua

SEQ ID NO: 397718 - RNA, 19 nt, Artificial Sequence
  Description of Artificial Sequence: Synthetic oligonucleotide
  Antisense Strand to SEQ ID NO: 397717
uaugagaagagaggacacc

SEQ ID NO: 397719 - RNA, 19 nt, Artificial Sequence
  Description of Artificial Sequence: Synthetic oligonucleotide
  Sense Strand Starting at position 1006 of SEQ ID NO: 318146
uuaaguaccugccuaagaa

SEQ ID NO: 397720 - RNA, 19 nt, Artificial Sequence
  Description of Artificial Sequence: Synthetic oligonucleotide
  Antisense Strand to SEQ ID NO: 397719
uucuuaggcagguacuuaa

SEQ ID NO: 397721 - RNA, 19 nt, Artificial Sequence
  Description of Artificial Sequence: Synthetic oligonucleotide
  Sense Strand Starting at position 1006 of SEQ ID NO: 318174
ggaguugcugccuagugaa

SEQ ID NO: 397722 - RNA, 19 nt, Artificial Sequence
  Description of Artificial Sequence: Synthetic oligonucleotide
  Antisense Strand to SEQ ID NO: 397721
uucacuaggcagcaacucc

SEQ ID NO: 397723 - RNA, 19 nt, Artificial Sequence
  Description of Artificial Sequence: Synthetic oligonucleotide
  Sense Strand Starting at position 1006 of SEQ ID NO: 318300
ucuugaauucugugggagg

SEQ ID NO: 397724 - RNA, 19 nt, Artificial Sequence
  Description of Artificial Sequence: Synthetic oligonucleotide
  Antisense Strand to SEQ ID NO: 397723
ccucccacagaauucaaga

SEQ ID NO: 397725 - RNA, 19 nt, Artificial Sequence
  Description of Artificial Sequence: Synthetic oligonucleotide
  Sense Strand Starting at position 1006 of SEQ ID NO: 318302
uugaauucugugggagguu

SEQ ID NO: 397726 - RNA, 19 nt, Artificial Sequence
  Description of Artificial Sequence: Synthetic oligonucleotide
  Antisense Strand to SEQ ID NO: 397725
aaccucccacagaauucaa

SEQ ID NO: 397727 - RNA, 19 nt, Artificial Sequence
  Description of Artificial Sequence: Synthetic oligonucleotide
  Sense Strand Starting at position 1006 of SEQ ID NO: 318320
ugcaguauaugacuaggaa

SEQ ID NO: 397728 - RNA, 19 nt, Artificial Sequence
  Description of Artificial Sequence: Synthetic oligonucleotide
  Antisense Strand to SEQ ID NO: 397727
uuccuagucauauacugca

SEQ ID NO: 397729 - RNA, 19 nt, Artificial Sequence
  Description of Artificial Sequence: Synthetic oligonucleotide
  Sense Strand Starting at position 1006 of SEQ ID NO: 318324
guauaugacuaggaaacaa

SEQ ID NO: 397730 - RNA, 19 nt, Artificial Sequence
  Description of Artificial Sequence: Synthetic oligonucleotide
  Antisense Strand to SEQ ID NO: 397729
uuguuuccuagucauauac

SEQ ID NO: 397731 - RNA, 19 nt, Artificial Sequence
  Description of Artificial Sequence: Synthetic oligonucleotide
  Sense Strand Starting at position 1006 of SEQ ID NO: 318341
aaauguaaugacugaguuc

SEQ ID NO: 397732 - RNA, 19 nt, Artificial Sequence
  Description of Artificial Sequence: Synthetic oligonucleotide
  Antisense Strand to SEQ ID NO: 397731
gaacucagucauuacauuu

SEQ ID NO: 397733 - RNA, 19 nt, Artificial Sequence
  Description of Artificial Sequence: Synthetic oligonucleotide
  Sense Strand Starting at position 1006 of SEQ ID NO: 318398
uaagguagcugguugaaga

SEQ ID NO: 397734 - RNA, 19 nt, Artificial Sequence
  Description of Artificial Sequence: Synthetic oligonucleotide
  Antisense Strand to SEQ ID NO: 397733
ucuucaaccagcuaccuua

SEQ ID NO: 397735 - RNA, 19 nt, Artificial Sequence
  Description of Artificial Sequence: Synthetic oligonucleotide
  Sense Strand Starting at position 1006 of SEQ ID NO: 318399
aagguagcugguugaagau

SEQ ID NO: 397736 - RNA, 19 nt, Artificial Sequence
  Description of Artificial Sequence: Synthetic oligonucleotide
  Antisense Strand to SEQ ID NO: 397735
aucuucaaccagcuaccuu

SEQ ID NO: 397737 - RNA, 19 nt, Artificial Sequence
  Description of Artificial Sequence: Synthetic oligonucleotide
  Sense Strand Starting at position 1006 of SEQ ID NO: 318411
ugaagauauuuggaauguc

SEQ ID NO: 397738 - RNA, 19 nt, Artificial Sequence
  Description of Artificial Sequence: Synthetic oligonucleotide
  Antisense Strand to SEQ ID NO: 397737
gacauuccaaauaucuuca

SEQ ID NO: 397739 - RNA, 19 nt, Artificial Sequence
  Description of Artificial Sequence: Synthetic oligonucleotide
  Sense Strand Starting at position 1006 of SEQ ID NO: 318794
cagucuuaagaaugauguu

SEQ ID NO: 397740 - RNA, 19 nt, Artificial Sequence
  Description of Artificial Sequence: Synthetic oligonucleotide
  Antisense Strand to SEQ ID NO: 397739
aacaucauucuuaagacug

SEQ ID NO: 397741 - RNA, 19 nt, Artificial Sequence
  Description of Artificial Sequence: Synthetic oligonucleotide
  Sense Strand Starting at position 1006 of SEQ ID NO: 318808
auguuagguggccagucau

SEQ ID NO: 397742 - RNA, 19 nt, Artificial Sequence
  Description of Artificial Sequence: Synthetic oligonucleotide
  Antisense Strand to SEQ ID NO: 397741
augacuggccaccuaacau

SEQ ID NO: 397743 - RNA, 19 nt, Artificial Sequence
  Description of Artificial Sequence: Synthetic oligonucleotide
  Sense Strand Starting at position 1007 of SEQ ID NO: 315553
ugaaacuauuuccagagaa

SEQ ID NO: 397744 - RNA, 19 nt, Artificial Sequence
  Description of Artificial Sequence: Synthetic oligonucleotide
  Antisense Strand to SEQ ID NO: 397743
uucucuggaaauaguuuca

SEQ ID NO: 397745 - RNA, 19 nt, Artificial Sequence
  Description of Artificial Sequence: Synthetic oligonucleotide
  Sense Strand Starting at position 1007 of SEQ ID NO: 315755
uuuagaagaaggugucaau

SEQ ID NO: 397746 - RNA, 19 nt, Artificial Sequence
  Description of Artificial Sequence: Synthetic oligonucleotide
  Antisense Strand to SEQ ID NO: 397745
auugacaccuucuucuaaa

SEQ ID NO: 397747 - RNA, 19 nt, Artificial Sequence
  Description of Artificial Sequence: Synthetic oligonucleotide
  Sense Strand Starting at position 1007 of SEQ ID NO: 315830
aggcucagaguuugugauu

SEQ ID NO: 397748 - RNA, 19 nt, Artificial Sequence
  Description of Artificial Sequence: Synthetic oligonucleotide
  Antisense Strand to SEQ ID NO: 397747
aaucacaaacucugagccu

SEQ ID NO: 397749 - RNA, 19 nt, Artificial Sequence
  Description of Artificial Sequence: Synthetic oligonucleotide
  Sense Strand Starting at position 1007 of SEQ ID NO: 315991
gggucagauggaggucaua

SEQ ID NO: 397750 - RNA, 19 nt, Artificial Sequence
  Description of Artificial Sequence: Synthetic oligonucleotide
  Antisense Strand to SEQ ID NO: 397749
uaugaccuccaucugaccc

SEQ ID NO: 397751 - RNA, 19 nt, Artificial Sequence
  Description of Artificial Sequence: Synthetic oligonucleotide
  Sense Strand Starting at position 1007 of SEQ ID NO: 316011
ggcuggucagugugggaau

SEQ ID NO: 397752 - RNA, 19 nt, Artificial Sequence
  Description of Artificial Sequence: Synthetic oligonucleotide
  Antisense Strand to SEQ ID NO: 397751
auucccacacugaccagcc

SEQ ID NO: 397753 - RNA, 19 nt, Artificial Sequence
  Description of Artificial Sequence: Synthetic oligonucleotide
  Sense Strand Starting at position 1007 of SEQ ID NO: 316221
gccaguuaggcugugcuca

SEQ ID NO: 397754 - RNA, 19 nt, Artificial Sequence
  Description of Artificial Sequence: Synthetic oligonucleotide
  Antisense Strand to SEQ ID NO: 397753
ugagcacagccuaacuggc

SEQ ID NO: 397755 - RNA, 19 nt, Artificial Sequence
  Description of Artificial Sequence: Synthetic oligonucleotide
  Sense Strand Starting at position 1007 of SEQ ID NO: 316502
gcagcuacacuugagauau

SEQ ID NO: 397756 - RNA, 19 nt, Artificial Sequence
  Description of Artificial Sequence: Synthetic oligonucleotide
  Antisense Strand to SEQ ID NO: 397755
auaucucaaguguagcugc

SEQ ID NO: 397757 - RNA, 19 nt, Artificial Sequence
  Description of Artificial Sequence: Synthetic oligonucleotide
  Sense Strand Starting at position 1007 of SEQ ID NO: 316589
aaguuauuacugggugaaa

SEQ ID NO: 397758 - RNA, 19 nt, Artificial Sequence
  Description of Artificial Sequence: Synthetic oligonucleotide
  Antisense Strand to SEQ ID NO: 397757
uuucacccaguaauaacuu

SEQ ID NO: 397759 - RNA, 19 nt, Artificial Sequence
  Description of Artificial Sequence: Synthetic oligonucleotide
  Sense Strand Starting at position 1007 of SEQ ID NO: 316590
aguuauuacugggugaaau

SEQ ID NO: 397760 - RNA, 19 nt, Artificial Sequence
  Description of Artificial Sequence: Synthetic oligonucleotide
  Antisense Strand to SEQ ID NO: 397759
auuucacccaguaauaacu

SEQ ID NO: 397761 - RNA, 19 nt, Artificial Sequence
  Description of Artificial Sequence: Synthetic oligonucleotide
  Sense Strand Starting at position 1007 of SEQ ID NO: 316591
guuauuacugggugaaauc

SEQ ID NO: 397762 - RNA, 19 nt, Artificial Sequence
  Description of Artificial Sequence: Synthetic oligonucleotide
  Antisense Strand to SEQ ID NO: 397761
gauuucacccaguaauaac

SEQ ID NO: 397763 - RNA, 19 nt, Artificial Sequence
  Description of Artificial Sequence: Synthetic oligonucleotide
  Sense Strand Starting at position 1007 of SEQ ID NO: 316775
aguggagaucaggguuaag

SEQ ID NO: 397764 - RNA, 19 nt, Artificial Sequence
  Description of Artificial Sequence: Synthetic oligonucleotide
  Antisense Strand to SEQ ID NO: 397763
cuuaacccugaucuccacu

SEQ ID NO: 397765 - RNA, 19 nt, Artificial Sequence
  Description of Artificial Sequence: Synthetic oligonucleotide
  Sense Strand Starting at position 1007 of SEQ ID NO: 316925
agguaaugaugcccugaaa

SEQ ID NO: 397766 - RNA, 19 nt, Artificial Sequence
  Description of Artificial Sequence: Synthetic oligonucleotide
  Antisense Strand to SEQ ID NO: 397765
uuucagggcaucauuaccu

SEQ ID NO: 397767 - RNA, 19 nt, Artificial Sequence
  Description of Artificial Sequence: Synthetic oligonucleotide
  Sense Strand Starting at position 1007 of SEQ ID NO: 317416
ggaguccuugagggauguu

SEQ ID NO: 397768 - RNA, 19 nt, Artificial Sequence
  Description of Artificial Sequence: Synthetic oligonucleotide
  Antisense Strand to SEQ ID NO: 397767
aacaucccucaaggacucc

SEQ ID NO: 397769 - RNA, 19 nt, Artificial Sequence
  Description of Artificial Sequence: Synthetic oligonucleotide
  Sense Strand Starting at position 1007 of SEQ ID NO: 317419
guccuugagggauguuguu

SEQ ID NO: 397770 - RNA, 19 nt, Artificial Sequence
  Description of Artificial Sequence: Synthetic oligonucleotide
  Antisense Strand to SEQ ID NO: 397769
aacaacaucccucaaggac

SEQ ID NO: 397771 - RNA, 19 nt, Artificial Sequence
  Description of Artificial Sequence: Synthetic oligonucleotide
  Sense Strand Starting at position 1007 of SEQ ID NO: 317428
ggauguuguugggcaagaa

SEQ ID NO: 397772 - RNA, 19 nt, Artificial Sequence
  Description of Artificial Sequence: Synthetic oligonucleotide
  Antisense Strand to SEQ ID NO: 397771
uucuugcccaacaacaucc

SEQ ID NO: 397773 - RNA, 19 nt, Artificial Sequence
  Description of Artificial Sequence: Synthetic oligonucleotide
  Sense Strand Starting at position 1007 of SEQ ID NO: 317429
gauguuguugggcaagaag

SEQ ID NO: 397774 - RNA, 19 nt, Artificial Sequence
  Description of Artificial Sequence: Synthetic oligonucleotide
  Antisense Strand to SEQ ID NO: 397773
cuucuugcccaacaacauc

SEQ ID NO: 397775 - RNA, 19 nt, Artificial Sequence
  Description of Artificial Sequence: Synthetic oligonucleotide
  Sense Strand Starting at position 1007 of SEQ ID NO: 317440
gcaagaagaucuguguucu

SEQ ID NO: 397776 - RNA, 19 nt, Artificial Sequence
  Description of Artificial Sequence: Synthetic oligonucleotide
  Antisense Strand to SEQ ID NO: 397775
agaacacagaucuucuugc

SEQ ID NO: 397777 - RNA, 19 nt, Artificial Sequence
  Description of Artificial Sequence: Synthetic oligonucleotide
  Sense Strand Starting at position 1007 of SEQ ID NO: 317441
caagaagaucuguguucuu

SEQ ID NO: 397778 - RNA, 19 nt, Artificial Sequence
  Description of Artificial Sequence: Synthetic oligonucleotide
  Antisense Strand to SEQ ID NO: 397777
aagaacacagaucuucuug

SEQ ID NO: 397779 - RNA, 19 nt, Artificial Sequence
  Description of Artificial Sequence: Synthetic oligonucleotide
  Sense Strand Starting at position 1007 of SEQ ID NO: 318085
ccugacucuuucguggaga

SEQ ID NO: 397780 - RNA, 19 nt, Artificial Sequence
  Description of Artificial Sequence: Synthetic oligonucleotide
  Antisense Strand to SEQ ID NO: 397779
ucuccacgaaagagucagg

SEQ ID NO: 397781 - RNA, 19 nt, Artificial Sequence
  Description of Artificial Sequence: Synthetic oligonucleotide
  Sense Strand Starting at position 1007 of SEQ ID NO: 318087
ugacucuuucguggagaag

SEQ ID NO: 397782 - RNA, 19 nt, Artificial Sequence
  Description of Artificial Sequence: Synthetic oligonucleotide
  Antisense Strand to SEQ ID NO: 397781
cuucuccacgaaagaguca

SEQ ID NO: 397783 - RNA, 19 nt, Artificial Sequence
  Description of Artificial Sequence: Synthetic oligonucleotide
  Sense Strand Starting at position 1007 of SEQ ID NO: 318088
gacucuuucguggagaagg

SEQ ID NO: 397784 - RNA, 19 nt, Artificial Sequence
  Description of Artificial Sequence: Synthetic oligonucleotide
  Antisense Strand to SEQ ID NO: 397783
ccuucuccacgaaagaguc

SEQ ID NO: 397785 - RNA, 19 nt, Artificial Sequence
  Description of Artificial Sequence: Synthetic oligonucleotide
  Sense Strand Starting at position 1007 of SEQ ID NO: 318184
gaguacuggacuugggaca

SEQ ID NO: 397786 - RNA, 19 nt, Artificial Sequence
  Description of Artificial Sequence: Synthetic oligonucleotide
  Antisense Strand to SEQ ID NO: 397785
ugucccaaguccaguacuc

SEQ ID NO: 397787 - RNA, 19 nt, Artificial Sequence
  Description of Artificial Sequence: Synthetic oligonucleotide
  Sense Strand Starting at position 1007 of SEQ ID NO: 318240
cuaugucuuuggcuugaca

SEQ ID NO: 397788 - RNA, 19 nt, Artificial Sequence
  Description of Artificial Sequence: Synthetic oligonucleotide
  Antisense Strand to SEQ ID NO: 397787
ugucaagccaaagacauag

SEQ ID NO: 397789 - RNA, 19 nt, Artificial Sequence
  Description of Artificial Sequence: Synthetic oligonucleotide
  Sense Strand Starting at position 1007 of SEQ ID NO: 318242
augucuuuggcuugacaac

SEQ ID NO: 397790 - RNA, 19 nt, Artificial Sequence
  Description of Artificial Sequence: Synthetic oligonucleotide
  Antisense Strand to SEQ ID NO: 397789
guugucaagccaaagacau

SEQ ID NO: 397791 - RNA, 19 nt, Artificial Sequence
  Description of Artificial Sequence: Synthetic oligonucleotide
  Sense Strand Starting at position 1007 of SEQ ID NO: 318243
ugucuuuggcuugacaacu

SEQ ID NO: 397792 - RNA, 19 nt, Artificial Sequence
  Description of Artificial Sequence: Synthetic oligonucleotide
  Antisense Strand to SEQ ID NO: 397791
aguugucaagccaaagaca

SEQ ID NO: 397793 - RNA, 19 nt, Artificial Sequence
  Description of Artificial Sequence: Synthetic oligonucleotide
  Sense Strand Starting at position 1007 of SEQ ID NO: 318251
gcuugacaacugggugaau

SEQ ID NO: 397794 - RNA, 19 nt, Artificial Sequence
  Description of Artificial Sequence: Synthetic oligonucleotide
  Antisense Strand to SEQ ID NO: 397793
auucacccaguugucaagc

SEQ ID NO: 397795 - RNA, 19 nt, Artificial Sequence
  Description of Artificial Sequence: Synthetic oligonucleotide
  Sense Strand Starting at position 1007 of SEQ ID NO: 318365
augcauuaaaugugagaug

SEQ ID NO: 397796 - RNA, 19 nt, Artificial Sequence
  Description of Artificial Sequence: Synthetic oligonucleotide
  Antisense Strand to SEQ ID NO: 397795
caucucacauuuaaugcau

SEQ ID NO: 397797 - RNA, 19 nt, Artificial Sequence
  Description of Artificial Sequence: Synthetic oligonucleotide
  Sense Strand Starting at position 1007 of SEQ ID NO: 318374
augugagaugccuguugga

SEQ ID NO: 397798 - RNA, 19 nt, Artificial Sequence
  Description of Artificial Sequence: Synthetic oligonucleotide
  Antisense Strand to SEQ ID NO: 397797
uccaacaggcaucucacau

SEQ ID NO: 397799 - RNA, 19 nt, Artificial Sequence
  Description of Artificial Sequence: Synthetic oligonucleotide
  Sense Strand Starting at position 1007 of SEQ ID NO: 318381
augccuguuggacaucaga

SEQ ID NO: 397800 - RNA, 19 nt, Artificial Sequence
  Description of Artificial Sequence: Synthetic oligonucleotide
  Antisense Strand to SEQ ID NO: 397799
ucugauguccaacaggcau

SEQ ID NO: 397801 - RNA, 19 nt, Artificial Sequence
  Description of Artificial Sequence: Synthetic oligonucleotide
  Sense Strand Starting at position 1007 of SEQ ID NO: 318403
gagaaauuguugccucuaa

SEQ ID NO: 397802 - RNA, 19 nt, Artificial Sequence
  Description of Artificial Sequence: Synthetic oligonucleotide
  Antisense Strand to SEQ ID NO: 397801
uuagaggcaacaauuucuc

SEQ ID NO: 397803 - RNA, 19 nt, Artificial Sequence
  Description of Artificial Sequence: Synthetic oligonucleotide
  Sense Strand Starting at position 1007 of SEQ ID NO: 318404
agaaauuguugccucuaac

SEQ ID NO: 397804 - RNA, 19 nt, Artificial Sequence
  Description of Artificial Sequence: Synthetic oligonucleotide
  Antisense Strand to SEQ ID NO: 397803
guuagaggcaacaauuucu

SEQ ID NO: 397805 - RNA, 19 nt, Artificial Sequence
  Description of Artificial Sequence: Synthetic oligonucleotide
  Sense Strand Starting at position 1007 of SEQ ID NO: 318518
ucccuuaaaucugcaagga

SEQ ID NO: 397806 - RNA, 19 nt, Artificial Sequence
  Description of Artificial Sequence: Synthetic oligonucleotide
  Antisense Strand to SEQ ID NO: 397805
uccuugcagauuuaaggga

SEQ ID NO: 397807 - RNA, 19 nt, Artificial Sequence
  Description of Artificial Sequence: Synthetic oligonucleotide
  Sense Strand Starting at position 1007 of SEQ ID NO: 318542
ccuugcauugaagaucaau

SEQ ID NO: 397808 - RNA, 19 nt, Artificial Sequence
  Description of Artificial Sequence: Synthetic oligonucleotide
  Antisense Strand to SEQ ID NO: 397807
auugaucuucaaugcaagg

SEQ ID NO: 397809 - RNA, 19 nt, Artificial Sequence
  Description of Artificial Sequence: Synthetic oligonucleotide
  Sense Strand Starting at position 1007 of SEQ ID NO: 318774
gccucaucucaccagugau

SEQ ID NO: 397810 - RNA, 19 nt, Artificial Sequence
  Description of Artificial Sequence: Synthetic oligonucleotide
  Antisense Strand to SEQ ID NO: 397809
aucacuggugagaugaggc

SEQ ID NO: 397811 - RNA, 19 nt, Artificial Sequence
  Description of Artificial Sequence: Synthetic oligonucleotide
  Sense Strand Starting at position 1007 of SEQ ID NO: 318777
ucaucucaccagugauucu

SEQ ID NO: 397812 - RNA, 19 nt, Artificial Sequence
  Description of Artificial Sequence: Synthetic oligonucleotide
  Antisense Strand to SEQ ID NO: 397811
agaaucacuggugagauga

SEQ ID NO: 397813 - RNA, 19 nt, Artificial Sequence
  Description of Artificial Sequence: Synthetic oligonucleotide
  Sense Strand Starting at position 1007 of SEQ ID NO: 318790
gauucuguguccucucaug

SEQ ID NO: 397814 - RNA, 19 nt, Artificial Sequence
  Description of Artificial Sequence: Synthetic oligonucleotide
  Antisense Strand to SEQ ID NO: 397813
caugagaggacacagaauc

SEQ ID NO: 397815 - RNA, 19 nt, Artificial Sequence
  Description of Artificial Sequence: Synthetic oligonucleotide
  Sense Strand Starting at position 1007 of SEQ ID NO: 319136
augguuugcuuucuuuaua

SEQ ID NO: 397816 - RNA, 19 nt, Artificial Sequence
  Description of Artificial Sequence: Synthetic oligonucleotide
  Antisense Strand to SEQ ID NO: 397815
uauaaagaaagcaaaccau

SEQ ID NO: 397817 - RNA, 19 nt, Artificial Sequence
  Description of Artificial Sequence: Synthetic oligonucleotide
  Sense Strand Starting at position 1007 of SEQ ID NO: 319139
guuugcuuucuuuauagaa

SEQ ID NO: 397818 - RNA, 19 nt, Artificial Sequence
  Description of Artificial Sequence: Synthetic oligonucleotide
  Antisense Strand to SEQ ID NO: 397817
uucuauaaagaaagcaaac

SEQ ID NO: 397819 - RNA, 19 nt, Artificial Sequence
  Description of Artificial Sequence: Synthetic oligonucleotide
  Sense Strand Starting at position 1007 of SEQ ID NO: 319192
uguguauguguccauuauc

SEQ ID NO: 397820 - RNA, 19 nt, Artificial Sequence
  Description of Artificial Sequence: Synthetic oligonucleotide
  Antisense Strand to SEQ ID NO: 397819
gauaauggacacauacaca

SEQ ID NO: 397821 - RNA, 19 nt, Artificial Sequence
  Description of Artificial Sequence: Synthetic oligonucleotide
  Sense Strand Starting at position 1007 of SEQ ID NO: 319195
guauguguccauuaucaua

SEQ ID NO: 397822 - RNA, 19 nt, Artificial Sequence
  Description of Artificial Sequence: Synthetic oligonucleotide
  Antisense Strand to SEQ ID NO: 397821
uaugauaauggacacauac

SEQ ID NO: 397823 - RNA, 19 nt, Artificial Sequence
  Description of Artificial Sequence: Synthetic oligonucleotide
  Sense Strand Starting at position 1008 of SEQ ID NO: 315356
ggcuuuagccacuagggau

SEQ ID NO: 397824 - RNA, 19 nt, Artificial Sequence
  Description of Artificial Sequence: Synthetic oligonucleotide
  Antisense Strand to SEQ ID NO: 397823
aucccuaguggcuaaagcc

SEQ ID NO: 397825 - RNA, 19 nt, Artificial Sequence
  Description of Artificial Sequence: Synthetic oligonucleotide
  Sense Strand Starting at position 1008 of SEQ ID NO: 315694
gccaguucaucggucaaag

SEQ ID NO: 397826 - RNA, 19 nt, Artificial Sequence
  Description of Artificial Sequence: Synthetic oligonucleotide
  Antisense Strand to SEQ ID NO: 397825
cuuugaccgaugaacuggc

SEQ ID NO: 397827 - RNA, 19 nt, Artificial Sequence
  Description of Artificial Sequence: Synthetic oligonucleotide
  Sense Strand Starting at position 1008 of SEQ ID NO: 315711
agauaauccugacuaggug

SEQ ID NO: 397828 - RNA, 19 nt, Artificial Sequence
  Description of Artificial Sequence: Synthetic oligonucleotide
  Antisense Strand to SEQ ID NO: 397827
caccuagucaggauuaucu

SEQ ID NO: 397829 - RNA, 19 nt, Artificial Sequence
  Description of Artificial Sequence: Synthetic oligonucleotide
  Sense Strand Starting at position 1008 of SEQ ID NO: 316063
gcagaauacuaggcacucu

SEQ ID NO: 397830 - RNA, 19 nt, Artificial Sequence
  Description of Artificial Sequence: Synthetic oligonucleotide
  Antisense Strand to SEQ ID NO: 397829
agagugccuaguauucugc

SEQ ID NO: 397831 - RNA, 19 nt, Artificial Sequence
  Description of Artificial Sequence: Synthetic oligonucleotide
  Sense Strand Starting at position 1008 of SEQ ID NO: 316261
cuacuugaaccugagucuu

SEQ ID NO: 397832 - RNA, 19 nt, Artificial Sequence
  Description of Artificial Sequence: Synthetic oligonucleotide
  Antisense Strand to SEQ ID NO: 397831
aagacucagguucaaguag

SEQ ID NO: 397833 - RNA, 19 nt, Artificial Sequence
  Description of Artificial Sequence: Synthetic oligonucleotide
  Sense Strand Starting at position 1008 of SEQ ID NO: 316327
gugccugucacaggguaaa

SEQ ID NO: 397834 - RNA, 19 nt, Artificial Sequence
  Description of Artificial Sequence: Synthetic oligonucleotide
  Antisense Strand to SEQ ID NO: 397833
uuuacccugugacaggcac

SEQ ID NO: 397835 - RNA, 19 nt, Artificial Sequence
  Description of Artificial Sequence: Synthetic oligonucleotide
  Sense Strand Starting at position 1008 of SEQ ID NO: 316358
ccuucuaauucccuaggga

SEQ ID NO: 397836 - RNA, 19 nt, Artificial Sequence
  Description of Artificial Sequence: Synthetic oligonucleotide
  Antisense Strand to SEQ ID NO: 397835
ucccuagggaauuagaagg

SEQ ID NO: 397837 - RNA, 19 nt, Artificial Sequence
  Description of Artificial Sequence: Synthetic oligonucleotide
  Sense Strand Starting at position 1008 of SEQ ID NO: 316482
ggucuuccgagccauugau

SEQ ID NO: 397838 - RNA, 19 nt, Artificial Sequence
  Description of Artificial Sequence: Synthetic oligonucleotide
  Antisense Strand to SEQ ID NO: 397837
aucaauggcucggaagacc

SEQ ID NO: 397839 - RNA, 19 nt, Artificial Sequence
  Description of Artificial Sequence: Synthetic oligonucleotide
  Sense Strand Starting at position 1008 of SEQ ID NO: 316488
ccgagccauugauuuccua

SEQ ID NO: 397840 - RNA, 19 nt, Artificial Sequence
  Description of Artificial Sequence: Synthetic oligonucleotide
  Antisense Strand to SEQ ID NO: 397839
uaggaaaucaauggcucgg

SEQ ID NO: 397841 - RNA, 19 nt, Artificial Sequence
  Description of Artificial Sequence: Synthetic oligonucleotide
  Sense Strand Starting at position 1008 of SEQ ID NO: 316597
ggcccaugauauccucgaa

SEQ ID NO: 397842 - RNA, 19 nt, Artificial Sequence
  Description of Artificial Sequence: Synthetic oligonucleotide
  Antisense Strand to SEQ ID NO: 397841
uucgaggauaucaugggcc

SEQ ID NO: 397843 - RNA, 19 nt, Artificial Sequence
  Description of Artificial Sequence: Synthetic oligonucleotide
  Sense Strand Starting at position 1008 of SEQ ID NO: 316601
caugauauccucgaaggca

SEQ ID NO: 397844 - RNA, 19 nt, Artificial Sequence
  Description of Artificial Sequence: Synthetic oligonucleotide
  Antisense Strand to SEQ ID NO: 397843
ugccuucgaggauaucaug

SEQ ID NO: 397845 - RNA, 19 nt, Artificial Sequence
  Description of Artificial Sequence: Synthetic oligonucleotide
  Sense Strand Starting at position 1008 of SEQ ID NO: 317122
cggauugccacggauuaac

SEQ ID NO: 397846 - RNA, 19 nt, Artificial Sequence
  Description of Artificial Sequence: Synthetic oligonucleotide
  Antisense Strand to SEQ ID NO: 397845
guuaauccguggcaauccg

SEQ ID NO: 397847 - RNA, 19 nt, Artificial Sequence
  Description of Artificial Sequence: Synthetic oligonucleotide
  Sense Strand Starting at position 1008 of SEQ ID NO: 317370
ugagaaauguauucuaccu

SEQ ID NO: 397848 - RNA, 19 nt, Artificial Sequence
  Description of Artificial Sequence: Synthetic oligonucleotide
  Antisense Strand to SEQ ID NO: 397847
agguagaauacauuucuca

SEQ ID NO: 397849 - RNA, 19 nt, Artificial Sequence
  Description of Artificial Sequence: Synthetic oligonucleotide
  Sense Strand Starting at position 1008 of SEQ ID NO: 317382
ucuaccuauccuugggacu

SEQ ID NO: 397850 - RNA, 19 nt, Artificial Sequence
  Description of Artificial Sequence: Synthetic oligonucleotide
  Antisense Strand to SEQ ID NO: 397849
agucccaaggauagguaga

SEQ ID NO: 397851 - RNA, 19 nt, Artificial Sequence
  Description of Artificial Sequence: Synthetic oligonucleotide
  Sense Strand Starting at position 1008 of SEQ ID NO: 317383
cuaccuauccuugggacua

SEQ ID NO: 397852 - RNA, 19 nt, Artificial Sequence
  Description of Artificial Sequence: Synthetic oligonucleotide
  Antisense Strand to SEQ ID NO: 397851
uagucccaaggauagguag

SEQ ID NO: 397853 - RNA, 19 nt, Artificial Sequence
  Description of Artificial Sequence: Synthetic oligonucleotide
  Sense Strand Starting at position 1008 of SEQ ID NO: 317402
cguagaaauuuggaauucu

SEQ ID NO: 397854 - RNA, 19 nt, Artificial Sequence
  Description of Artificial Sequence: Synthetic oligonucleotide
  Antisense Strand to SEQ ID NO: 397853
agaauuccaaauuucuacg

SEQ ID NO: 397855 - RNA, 19 nt, Artificial Sequence
  Description of Artificial Sequence: Synthetic oligonucleotide
  Sense Strand Starting at position 1008 of SEQ ID NO: 317411
uuggaauucuuucugagcu

SEQ ID NO: 397856 - RNA, 19 nt, Artificial Sequence
  Description of Artificial Sequence: Synthetic oligonucleotide
  Antisense Strand to SEQ ID NO: 397855
agcucagaaagaauuccaa

SEQ ID NO: 397857 - RNA, 19 nt, Artificial Sequence
  Description of Artificial Sequence: Synthetic oligonucleotide
  Sense Strand Starting at position 1008 of SEQ ID NO: 317427
gcuaauaagaccuggugga

SEQ ID NO: 397858 - RNA, 19 nt, Artificial Sequence
  Description of Artificial Sequence: Synthetic oligonucleotide
  Antisense Strand to SEQ ID NO: 397857
uccaccaggucuuauuagc

SEQ ID NO: 397859 - RNA, 19 nt, Artificial Sequence
  Description of Artificial Sequence: Synthetic oligonucleotide
  Sense Strand Starting at position 1008 of SEQ ID NO: 317528
gccucuuaguggucagaag

SEQ ID NO: 397860 - RNA, 19 nt, Artificial Sequence
  Description of Artificial Sequence: Synthetic oligonucleotide
  Antisense Strand to SEQ ID NO: 397859
cuucugaccacuaagaggc

SEQ ID NO: 397861 - RNA, 19 nt, Artificial Sequence
  Description of Artificial Sequence: Synthetic oligonucleotide
  Sense Strand Starting at position 1008 of SEQ ID NO: 317529
ccucuuaguggucagaaga

SEQ ID NO: 397862 - RNA, 19 nt, Artificial Sequence
  Description of Artificial Sequence: Synthetic oligonucleotide
  Antisense Strand to SEQ ID NO: 397861
ucuucugaccacuaagagg

SEQ ID NO: 397863 - RNA, 19 nt, Artificial Sequence
  Description of Artificial Sequence: Synthetic oligonucleotide
  Sense Strand Starting at position 1008 of SEQ ID NO: 317875
cgagcuacugccuagaugu

SEQ ID NO: 397864 - RNA, 19 nt, Artificial Sequence
  Description of Artificial Sequence: Synthetic oligonucleotide
  Antisense Strand to SEQ ID NO: 397863
acaucuaggcaguagcucg

SEQ ID NO: 397865 - RNA, 19 nt, Artificial Sequence
  Description of Artificial Sequence: Synthetic oligonucleotide
  Sense Strand Starting at position 1008 of SEQ ID NO: 317877
agcuacugccuagauguuu

SEQ ID NO: 397866 - RNA, 19 nt, Artificial Sequence
  Description of Artificial Sequence: Synthetic oligonucleotide
  Antisense Strand to SEQ ID NO: 397865
aaacaucuaggcaguagcu

SEQ ID NO: 397867 - RNA, 19 nt, Artificial Sequence
  Description of Artificial Sequence: Synthetic oligonucleotide
  Sense Strand Starting at position 1008 of SEQ ID NO: 318027
agaugcucuugauuuguuu

SEQ ID NO: 397868 - RNA, 19 nt, Artificial Sequence
  Description of Artificial Sequence: Synthetic oligonucleotide
  Antisense Strand to SEQ ID NO: 397867
aaacaaaucaagagcaucu

SEQ ID NO: 397869 - RNA, 19 nt, Artificial Sequence
  Description of Artificial Sequence: Synthetic oligonucleotide
  Sense Strand Starting at position 1008 of SEQ ID NO: 318064
aagauuauugugcaaauug

SEQ ID NO: 397870 - RNA, 19 nt, Artificial Sequence
  Description of Artificial Sequence: Synthetic oligonucleotide
  Antisense Strand to SEQ ID NO: 397869
caauuugcacaauaaucuu

SEQ ID NO: 397871 - RNA, 19 nt, Artificial Sequence
  Description of Artificial Sequence: Synthetic oligonucleotide
  Sense Strand Starting at position 1008 of SEQ ID NO: 318109
auuccaauacuuugggagu

SEQ ID NO: 397872 - RNA, 19 nt, Artificial Sequence
  Description of Artificial Sequence: Synthetic oligonucleotide
  Antisense Strand to SEQ ID NO: 397871
acucccaaaguauuggaau

SEQ ID NO: 397873 - RNA, 19 nt, Artificial Sequence
  Description of Artificial Sequence: Synthetic oligonucleotide
  Sense Strand Starting at position 1008 of SEQ ID NO: 318429
uuucucuguggccaaugaa

SEQ ID NO: 397874 - RNA, 19 nt, Artificial Sequence
  Description of Artificial Sequence: Synthetic oligonucleotide
  Antisense Strand to SEQ ID NO: 397873
uucauuggccacagagaaa

SEQ ID NO: 397875 - RNA, 19 nt, Artificial Sequence
  Description of Artificial Sequence: Synthetic oligonucleotide
  Sense Strand Starting at position 1008 of SEQ ID NO: 318491
cuggaacugcagugagaua

SEQ ID NO: 397876 - RNA, 19 nt, Artificial Sequence
  Description of Artificial Sequence: Synthetic oligonucleotide
  Antisense Strand to SEQ ID NO: 397875
uaucucacugcaguuccag

SEQ ID NO: 397877 - RNA, 19 nt, Artificial Sequence
  Description of Artificial Sequence: Synthetic oligonucleotide
  Sense Strand Starting at position 1008 of SEQ ID NO: 318537
augggaauguccguacagu

SEQ ID NO: 397878 - RNA, 19 nt, Artificial Sequence
  Description of Artificial Sequence: Synthetic oligonucleotide
  Antisense Strand to SEQ ID NO: 397877
acuguacggacauucccau

SEQ ID NO: 397879 - RNA, 19 nt, Artificial Sequence
  Description of Artificial Sequence: Synthetic oligonucleotide
  Sense Strand Starting at position 1008 of SEQ ID NO: 318538
ugggaauguccguacagug

SEQ ID NO: 397880 - RNA, 19 nt, Artificial Sequence
  Description of Artificial Sequence: Synthetic oligonucleotide
  Antisense Strand to SEQ ID NO: 397879
cacuguacggacauuccca

SEQ ID NO: 397881 - RNA, 19 nt, Artificial Sequence
  Description of Artificial Sequence: Synthetic oligonucleotide
  Sense Strand Starting at position 1008 of SEQ ID NO: 318548
cguacagugcuagugcaaa

SEQ ID NO: 397882 - RNA, 19 nt, Artificial Sequence
  Description of Artificial Sequence: Synthetic oligonucleotide
  Antisense Strand to SEQ ID NO: 397881
uuugcacuagcacuguacg

SEQ ID NO: 397883 - RNA, 19 nt, Artificial Sequence
  Description of Artificial Sequence: Synthetic oligonucleotide
  Sense Strand Starting at position 1008 of SEQ ID NO: 318562
gcaaauaugaaauggugca

SEQ ID NO: 397884 - RNA, 19 nt, Artificial Sequence
  Description of Artificial Sequence: Synthetic oligonucleotide
  Antisense Strand to SEQ ID NO: 397883
ugcaccauuucauauuugc

SEQ ID NO: 397885 - RNA, 19 nt, Artificial Sequence
  Description of Artificial Sequence: Synthetic oligonucleotide
  Sense Strand Starting at position 1008 of SEQ ID NO: 318945
augaauuggugucccacaa

SEQ ID NO: 397886 - RNA, 19 nt, Artificial Sequence
  Description of Artificial Sequence: Synthetic oligonucleotide
  Antisense Strand to SEQ ID NO: 397885
uugugggacaccaauucau

SEQ ID NO: 397887 - RNA, 19 nt, Artificial Sequence
  Description of Artificial Sequence: Synthetic oligonucleotide
  Sense Strand Starting at position 1008 of SEQ ID NO: 319008
augucaacucaguaaucau

SEQ ID NO: 397888 - RNA, 19 nt, Artificial Sequence
  Description of Artificial Sequence: Synthetic oligonucleotide
  Antisense Strand to SEQ ID NO: 397887
augauuacugaguugacau

SEQ ID NO: 397889 - RNA, 19 nt, Artificial Sequence
  Description of Artificial Sequence: Synthetic oligonucleotide
  Sense Strand Starting at position 1008 of SEQ ID NO: 319074
caaguuagauuccuagggu

SEQ ID NO: 397890 - RNA, 19 nt, Artificial Sequence
  Description of Artificial Sequence: Synthetic oligonucleotide
  Antisense Strand to SEQ ID NO: 397889
acccuaggaaucuaacuug

SEQ ID NO: 397891 - RNA, 19 nt, Artificial Sequence
  Description of Artificial Sequence: Synthetic oligonucleotide
  Sense Strand Starting at position 1008 of SEQ ID NO: 319077
guuagauuccuaggguguc

SEQ ID NO: 397892 - RNA, 19 nt, Artificial Sequence
  Description of Artificial Sequence: Synthetic oligonucleotide
  Antisense Strand to SEQ ID NO: 397891
gacacccuaggaaucuaac

SEQ ID NO: 397893 - RNA, 19 nt, Artificial Sequence
  Description of Artificial Sequence: Synthetic oligonucleotide
  Sense Strand Starting at position 1008 of SEQ ID NO: 319080
agauuccuagggugucuaa

SEQ ID NO: 397894 - RNA, 19 nt, Artificial Sequence
  Description of Artificial Sequence: Synthetic oligonucleotide
  Antisense Strand to SEQ ID NO: 397893
uuagacacccuaggaaucu

SEQ ID NO: 397895 - RNA, 19 nt, Artificial Sequence
  Description of Artificial Sequence: Synthetic oligonucleotide
  Sense Strand Starting at position 1008 of SEQ ID NO: 319144
ccagcaucuuucuuguaag

SEQ ID NO: 397896 - RNA, 19 nt, Artificial Sequence
  Description of Artificial Sequence: Synthetic oligonucleotide
  Antisense Strand to SEQ ID NO: 397895
cuuacaagaaagaugcugg

SEQ ID NO: 397897 - RNA, 19 nt, Artificial Sequence
  Description of Artificial Sequence: Synthetic oligonucleotide
  Sense Strand Starting at position 1008 of SEQ ID NO: 319155
cuuguaagcggagguagau

SEQ ID NO: 397898 - RNA, 19 nt, Artificial Sequence
  Description of Artificial Sequence: Synthetic oligonucleotide
  Antisense Strand to SEQ ID NO: 397897
aucuaccuccgcuuacaag

SEQ ID NO: 397899 - RNA, 19 nt, Artificial Sequence
  Description of Artificial Sequence: Synthetic oligonucleotide
  Sense Strand Starting at position 1008 of SEQ ID NO: 319164
ggagguagauuugguuuca

SEQ ID NO: 397900 - RNA, 19 nt, Artificial Sequence
  Description of Artificial Sequence: Synthetic oligonucleotide
  Antisense Strand to SEQ ID NO: 397899
ugaaaccaaaucuaccucc

SEQ ID NO: 397901 - RNA, 19 nt, Artificial Sequence
  Description of Artificial Sequence: Synthetic oligonucleotide
  Sense Strand Starting at position 1008 of SEQ ID NO: 319188
gccuacuggaagugauaaa

SEQ ID NO: 397902 - RNA, 19 nt, Artificial Sequence
  Description of Artificial Sequence: Synthetic oligonucleotide
  Antisense Strand to SEQ ID NO: 397901
uuuaucacuuccaguaggc

SEQ ID NO: 397903 - RNA, 19 nt, Artificial Sequence
  Description of Artificial Sequence: Synthetic oligonucleotide
  Sense Strand Starting at position 1009 of SEQ ID NO: 315255
ccucuacaccuuuguguaa

SEQ ID NO: 397904 - RNA, 19 nt, Artificial Sequence
  Description of Artificial Sequence: Synthetic oligonucleotide
  Antisense Strand to SEQ ID NO: 397903
uuacacaaagguguagagg

SEQ ID NO: 397905 - RNA, 19 nt, Artificial Sequence
  Description of Artificial Sequence: Synthetic oligonucleotide
  Sense Strand Starting at position 1009 of SEQ ID NO: 315387
gucugagguccauguuuga

SEQ ID NO: 397906 - RNA, 19 nt, Artificial Sequence
  Description of Artificial Sequence: Synthetic oligonucleotide
  Antisense Strand to SEQ ID NO: 397905
ucaaacauggaccucagac

SEQ ID NO: 397907 - RNA, 19 nt, Artificial Sequence
  Description of Artificial Sequence: Synthetic oligonucleotide
  Sense Strand Starting at position 1009 of SEQ ID NO: 315538
uaaccaauucucgacgaga

SEQ ID NO: 397908 - RNA, 19 nt, Artificial Sequence
  Description of Artificial Sequence: Synthetic oligonucleotide
  Antisense Strand to SEQ ID NO: 397907
ucucgucgagaauugguua

SEQ ID NO: 397909 - RNA, 19 nt, Artificial Sequence
  Description of Artificial Sequence: Synthetic oligonucleotide
  Sense Strand Starting at position 1009 of SEQ ID NO: 315540
accaauucucgacgagaaa

SEQ ID NO: 397910 - RNA, 19 nt, Artificial Sequence
  Description of Artificial Sequence: Synthetic oligonucleotide
  Antisense Strand to SEQ ID NO: 397909
uuucucgucgagaauuggu

SEQ ID NO: 397911 - RNA, 19 nt, Artificial Sequence
  Description of Artificial Sequence: Synthetic oligonucleotide
  Sense Strand Starting at position 1009 of SEQ ID NO: 315541
ccaauucucgacgagaaac

SEQ ID NO: 397912 - RNA, 19 nt, Artificial Sequence
  Description of Artificial Sequence: Synthetic oligonucleotide
  Antisense Strand to SEQ ID NO: 397911
guuucucgucgagaauugg

SEQ ID NO: 397913 - RNA, 19 nt, Artificial Sequence
  Description of Artificial Sequence: Synthetic oligonucleotide
  Sense Strand Starting at position 1009 of SEQ ID NO: 315606
caauguaugccuuaugugu

SEQ ID NO: 397914 - RNA, 19 nt, Artificial Sequence
  Description of Artificial Sequence: Synthetic oligonucleotide
  Antisense Strand to SEQ ID NO: 397913
acacauaaggcauacauug

SEQ ID NO: 397915 - RNA, 19 nt, Artificial Sequence
  Description of Artificial Sequence: Synthetic oligonucleotide
  Sense Strand Starting at position 1009 of SEQ ID NO: 315610
guaugccuuauguguauuu

SEQ ID NO: 397916 - RNA, 19 nt, Artificial Sequence
  Description of Artificial Sequence: Synthetic oligonucleotide
  Antisense Strand to SEQ ID NO: 397915
aaauacacauaaggcauac

SEQ ID NO: 397917 - RNA, 19 nt, Artificial Sequence
  Description of Artificial Sequence: Synthetic oligonucleotide
  Sense Strand Starting at position 1009 of SEQ ID NO: 315620
uguguauuugauugauguc

SEQ ID NO: 397918 - RNA, 19 nt, Artificial Sequence
  Description of Artificial Sequence: Synthetic oligonucleotide
  Antisense Strand to SEQ ID NO: 397917
gacaucaaucaaauacaca

SEQ ID NO: 397919 - RNA, 19 nt, Artificial Sequence
  Description of Artificial Sequence: Synthetic oligonucleotide
  Sense Strand Starting at position 1009 of SEQ ID NO: 315687
ggacacauauucuuagggu

SEQ ID NO: 397920 - RNA, 19 nt, Artificial Sequence
  Description of Artificial Sequence: Synthetic oligonucleotide
  Antisense Strand to SEQ ID NO: 397919
acccuaagaauaugugucc

SEQ ID NO: 397921 - RNA, 19 nt, Artificial Sequence
  Description of Artificial Sequence: Synthetic oligonucleotide
  Sense Strand Starting at position 1009 of SEQ ID NO: 315843
uauuguaguaguggaaagu

SEQ ID NO: 397922 - RNA, 19 nt, Artificial Sequence
  Description of Artificial Sequence: Synthetic oligonucleotide
  Antisense Strand to SEQ ID NO: 397921
acuuuccacuacuacaaua

SEQ ID NO: 397923 - RNA, 19 nt, Artificial Sequence
  Description of Artificial Sequence: Synthetic oligonucleotide
  Sense Strand Starting at position 1009 of SEQ ID NO: 315852
aguggaaaguggcuauuau

SEQ ID NO: 397924 - RNA, 19 nt, Artificial Sequence
  Description of Artificial Sequence: Synthetic oligonucleotide
  Antisense Strand to SEQ ID NO: 397923
auaauagccacuuuccacu

SEQ ID NO: 397925 - RNA, 19 nt, Artificial Sequence
  Description of Artificial Sequence: Synthetic oligonucleotide
  Sense Strand Starting at position 1009 of SEQ ID NO: 315853
guggaaaguggcuauuauu

SEQ ID NO: 397926 - RNA, 19 nt, Artificial Sequence
  Description of Artificial Sequence: Synthetic oligonucleotide
  Antisense Strand to SEQ ID NO: 397925
aauaauagccacuuuccac

SEQ ID NO: 397927 - RNA, 19 nt, Artificial Sequence
  Description of Artificial Sequence: Synthetic oligonucleotide
  Sense Strand Starting at position 1009 of SEQ ID NO: 316046
ucccaagaguuuguagagu

SEQ ID NO: 397928 - RNA, 19 nt, Artificial Sequence
  Description of Artificial Sequence: Synthetic oligonucleotide
  Antisense Strand to SEQ ID NO: 397927
acucuacaaacucuuggga

SEQ ID NO: 397929 - RNA, 19 nt, Artificial Sequence
  Description of Artificial Sequence: Synthetic oligonucleotide
  Sense Strand Starting at position 1009 of SEQ ID NO: 316090
gcaaacuucugaucacuga

SEQ ID NO: 397930 - RNA, 19 nt, Artificial Sequence
  Description of Artificial Sequence: Synthetic oligonucleotide
  Antisense Strand to SEQ ID NO: 397929
ucagugaucagaaguuugc

SEQ ID NO: 397931 - RNA, 19 nt, Artificial Sequence
  Description of Artificial Sequence: Synthetic oligonucleotide
  Sense Strand Starting at position 1009 of SEQ ID NO: 316306
gccaguuacgcugaaggaa

SEQ ID NO: 397932 - RNA, 19 nt, Artificial Sequence
  Description of Artificial Sequence: Synthetic oligonucleotide
  Antisense Strand to SEQ ID NO: 397931
uuccuucagcguaacuggc

SEQ ID NO: 397933 - RNA, 19 nt, Artificial Sequence
  Description of Artificial Sequence: Synthetic oligonucleotide
  Sense Strand Starting at position 1009 of SEQ ID NO: 316488
ggcuuuagccacuagggau

SEQ ID NO: 397934 - RNA, 19 nt, Artificial Sequence
  Description of Artificial Sequence: Synthetic oligonucleotide
  Antisense Strand to SEQ ID NO: 397933
aucccuaguggcuaaagcc

SEQ ID NO: 397935 - RNA, 19 nt, Artificial Sequence
  Description of Artificial Sequence: Synthetic oligonucleotide
  Sense Strand Starting at position 1009 of SEQ ID NO: 316826
gccaguucaucggucaaag

SEQ ID NO: 397936 - RNA, 19 nt, Artificial Sequence
  Description of Artificial Sequence: Synthetic oligonucleotide
  Antisense Strand to SEQ ID NO: 397935
cuuugaccgaugaacuggc

SEQ ID NO: 397937 - RNA, 19 nt, Artificial Sequence
  Description of Artificial Sequence: Synthetic oligonucleotide
  Sense Strand Starting at position 1009 of SEQ ID NO: 316843
agauaauccugacuaggug

SEQ ID NO: 397938 - RNA, 19 nt, Artificial Sequence
  Description of Artificial Sequence: Synthetic oligonucleotide
  Antisense Strand to SEQ ID NO: 397937
caccuagucaggauuaucu

SEQ ID NO: 397939 - RNA, 19 nt, Artificial Sequence
  Description of Artificial Sequence: Synthetic oligonucleotide
  Sense Strand Starting at position 1009 of SEQ ID NO: 317195
gcagaauacuaggcacucu

SEQ ID NO: 397940 - RNA, 19 nt, Artificial Sequence
  Description of Artificial Sequence: Synthetic oligonucleotide
  Antisense Strand to SEQ ID NO: 397939
agagugccuaguauucugc

SEQ ID NO: 397941 - RNA, 19 nt, Artificial Sequence
  Description of Artificial Sequence: Synthetic oligonucleotide
  Sense Strand Starting at position 1009 of SEQ ID NO: 317393
cuacuugaaccugagucuu

SEQ ID NO: 397942 - RNA, 19 nt, Artificial Sequence
  Description of Artificial Sequence: Synthetic oligonucleotide
  Antisense Strand to SEQ ID NO: 397941
aagacucagguucaaguag

SEQ ID NO: 397943 - RNA, 19 nt, Artificial Sequence
  Description of Artificial Sequence: Synthetic oligonucleotide
  Sense Strand Starting at position 1009 of SEQ ID NO: 317459
gugccugucacaggguaaa

SEQ ID NO: 397944 - RNA, 19 nt, Artificial Sequence
  Description of Artificial Sequence: Synthetic oligonucleotide
  Antisense Strand to SEQ ID NO: 397943
uuuacccugugacaggcac

SEQ ID NO: 397945 - RNA, 19 nt, Artificial Sequence
  Description of Artificial Sequence: Synthetic oligonucleotide
  Sense Strand Starting at position 1009 of SEQ ID NO: 317490
ccuucuaauucccuaggga

SEQ ID NO: 397946 - RNA, 19 nt, Artificial Sequence
  Description of Artificial Sequence: Synthetic oligonucleotide
  Antisense Strand to SEQ ID NO: 397945
ucccuagggaauuagaagg

SEQ ID NO: 397947 - RNA, 19 nt, Artificial Sequence
  Description of Artificial Sequence: Synthetic oligonucleotide
  Sense Strand Starting at position 1009 of SEQ ID NO: 317614
ggucuuccgagccauugau

SEQ ID NO: 397948 - RNA, 19 nt, Artificial Sequence
  Description of Artificial Sequence: Synthetic oligonucleotide
  Antisense Strand to SEQ ID NO: 397947
aucaauggcucggaagacc

SEQ ID NO: 397949 - RNA, 19 nt, Artificial Sequence
  Description of Artificial Sequence: Synthetic oligonucleotide
  Sense Strand Starting at position 1009 of SEQ ID NO: 317620
ccgagccauugauuuccua

SEQ ID NO: 397950 - RNA, 19 nt, Artificial Sequence
  Description of Artificial Sequence: Synthetic oligonucleotide
  Antisense Strand to SEQ ID NO: 397949
uaggaaaucaauggcucgg

SEQ ID NO: 397951 - RNA, 19 nt, Artificial Sequence
  Description of Artificial Sequence: Synthetic oligonucleotide
  Sense Strand Starting at position 1009 of SEQ ID NO: 317729
ggcccaugauauccucgaa

SEQ ID NO: 397952 - RNA, 19 nt, Artificial Sequence
  Description of Artificial Sequence: Synthetic oligonucleotide
  Antisense Strand to SEQ ID NO: 397951
uucgaggauaucaugggcc

SEQ ID NO: 397953 - RNA, 19 nt, Artificial Sequence
  Description of Artificial Sequence: Synthetic oligonucleotide
  Sense Strand Starting at position 1009 of SEQ ID NO: 317733
caugauauccucgaaggca

SEQ ID NO: 397954 - RNA, 19 nt, Artificial Sequence
  Description of Artificial Sequence: Synthetic oligonucleotide
  Antisense Strand to SEQ ID NO: 397953
ugccuucgaggauaucaug

SEQ ID NO: 397955 - RNA, 19 nt, Artificial Sequence
  Description of Artificial Sequence: Synthetic oligonucleotide
  Sense Strand Starting at position 1009 of SEQ ID NO: 318254
cggauugccacggauuaac

SEQ ID NO: 397956 - RNA, 19 nt, Artificial Sequence
  Description of Artificial Sequence: Synthetic oligonucleotide
  Antisense Strand to SEQ ID NO: 397955
guuaauccguggcaauccg

SEQ ID NO: 397957 - RNA, 19 nt, Artificial Sequence
  Description of Artificial Sequence: Synthetic oligonucleotide
  Sense Strand Starting at position 1009 of SEQ ID NO: 318502
ugagaaauguauucuaccu

SEQ ID NO: 397958 - RNA, 19 nt, Artificial Sequence
  Description of Artificial Sequence: Synthetic oligonucleotide
  Antisense Strand to SEQ ID NO: 397957
agguagaauacauuucuca

SEQ ID NO: 397959 - RNA, 19 nt, Artificial Sequence
  Description of Artificial Sequence: Synthetic oligonucleotide
  Sense Strand Starting at position 1009 of SEQ ID NO: 318514
ucuaccuauccuugggacu

SEQ ID NO: 397960 - RNA, 19 nt, Artificial Sequence
  Description of Artificial Sequence: Synthetic oligonucleotide
  Antisense Strand to SEQ ID NO: 397959
agucccaaggauagguaga

SEQ ID NO: 397961 - RNA, 19 nt, Artificial Sequence
  Description of Artificial Sequence: Synthetic oligonucleotide
  Sense Strand Starting at position 1009 of SEQ ID NO: 318515
cuaccuauccuugggacua

SEQ ID NO: 397962 - RNA, 19 nt, Artificial Sequence
  Description of Artificial Sequence: Synthetic oligonucleotide
  Antisense Strand to SEQ ID NO: 397961
uagucccaaggauagguag

SEQ ID NO: 397963 - RNA, 19 nt, Artificial Sequence
  Description of Artificial Sequence: Synthetic oligonucleotide
  Sense Strand Starting at position 1009 of SEQ ID NO: 318534
cguagaaauuuggaauucu

SEQ ID NO: 397964 - RNA, 19 nt, Artificial Sequence
  Description of Artificial Sequence: Synthetic oligonucleotide
  Antisense Strand to SEQ ID NO: 397963
agaauuccaaauuucuacg

SEQ ID NO: 397965 - RNA, 19 nt, Artificial Sequence
  Description of Artificial Sequence: Synthetic oligonucleotide
  Sense Strand Starting at position 1009 of SEQ ID NO: 318543
uuggaauucuuucugagcu

SEQ ID NO: 397966 - RNA, 19 nt, Artificial Sequence
  Description of Artificial Sequence: Synthetic oligonucleotide
  Antisense Strand to SEQ ID NO: 397965
agcucagaaagaauuccaa

SEQ ID NO: 397967 - RNA, 19 nt, Artificial Sequence
  Description of Artificial Sequence: Synthetic oligonucleotide
  Sense Strand Starting at position 1009 of SEQ ID NO: 318559
gcuaauaagaccuggugga

SEQ ID NO: 397968 - RNA, 19 nt, Artificial Sequence
  Description of Artificial Sequence: Synthetic oligonucleotide
  Antisense Strand to SEQ ID NO: 397967
uccaccaggucuuauuagc

SEQ ID NO: 397969 - RNA, 19 nt, Artificial Sequence
  Description of Artificial Sequence: Synthetic oligonucleotide
  Sense Strand Starting at position 1009 of SEQ ID NO: 318660
gccucuuaguggucagaag

SEQ ID NO: 397970 - RNA, 19 nt, Artificial Sequence
  Description of Artificial Sequence: Synthetic oligonucleotide
  Antisense Strand to SEQ ID NO: 397969
cuucugaccacuaagaggc

SEQ ID NO: 397971 - RNA, 19 nt, Artificial Sequence
  Description of Artificial Sequence: Synthetic oligonucleotide
  Sense Strand Starting at position 1009 of SEQ ID NO: 318661
ccucuuaguggucagaaga

SEQ ID NO: 397972 - RNA, 19 nt, Artificial Sequence
  Description of Artificial Sequence: Synthetic oligonucleotide
  Antisense Strand to SEQ ID NO: 397971
ucuucugaccacuaagagg

SEQ ID NO: 397973 - RNA, 19 nt, Artificial Sequence
  Description of Artificial Sequence: Synthetic oligonucleotide
  Sense Strand Starting at position 1009 of SEQ ID NO: 318745
gcuaacaugcgauggaguu

SEQ ID NO: 397974 - RNA, 19 nt, Artificial Sequence
  Description of Artificial Sequence: Synthetic oligonucleotide
  Antisense Strand to SEQ ID NO: 397973
aacuccaucgcauguuagc

SEQ ID NO: 397975 - RNA, 19 nt, Artificial Sequence
  Description of Artificial Sequence: Synthetic oligonucleotide
  Sense Strand Starting at position 1009 of SEQ ID NO: 319007
cgagcuacugccuagaugu

SEQ ID NO: 397976 - RNA, 19 nt, Artificial Sequence
  Description of Artificial Sequence: Synthetic oligonucleotide
  Antisense Strand to SEQ ID NO: 397975
acaucuaggcaguagcucg

SEQ ID NO: 397977 - RNA, 19 nt, Artificial Sequence
  Description of Artificial Sequence: Synthetic oligonucleotide
  Sense Strand Starting at position 1009 of SEQ ID NO: 319009
agcuacugccuagauguuu

SEQ ID NO: 397978 - RNA, 19 nt, Artificial Sequence
  Description of Artificial Sequence: Synthetic oligonucleotide
  Antisense Strand to SEQ ID NO: 397977
aaacaucuaggcaguagcu

SEQ ID NO: 397979 - RNA, 19 nt, Artificial Sequence
  Description of Artificial Sequence: Synthetic oligonucleotide
  Sense Strand Starting at position 1009 of SEQ ID NO: 319159
agaugcucuugauuuguuu

SEQ ID NO: 397980 - RNA, 19 nt, Artificial Sequence
  Description of Artificial Sequence: Synthetic oligonucleotide
  Antisense Strand to SEQ ID NO: 397979
aaacaaaucaagagcaucu

SEQ ID NO: 397981 - RNA, 19 nt, Artificial Sequence
  Description of Artificial Sequence: Synthetic oligonucleotide
  Sense Strand Starting at position 1009 of SEQ ID NO: 319196
aagauuauugugcaaauug

SEQ ID NO: 397982 - RNA, 19 nt, Artificial Sequence
  Description of Artificial Sequence: Synthetic oligonucleotide
  Antisense Strand to SEQ ID NO: 397981
caauuugcacaauaaucuu

SEQ ID NO: 397983 - RNA, 19 nt, Artificial Sequence
  Description of Artificial Sequence: Synthetic oligonucleotide
  Sense Strand Starting at position 1010 of SEQ ID NO: 315372
ggaauuaccuccuuuauug

SEQ ID NO: 397984 - RNA, 19 nt, Artificial Sequence
  Description of Artificial Sequence: Synthetic oligonucleotide
  Antisense Strand to SEQ ID NO: 397983
caauaaaggagguaauucc

SEQ ID NO: 397985 - RNA, 19 nt, Artificial Sequence
  Description of Artificial Sequence: Synthetic oligonucleotide
  Sense Strand Starting at position 1010 of SEQ ID NO: 315522
ggaaacccauucucuagua

SEQ ID NO: 397986 - RNA, 19 nt, Artificial Sequence
  Description of Artificial Sequence: Synthetic oligonucleotide
  Antisense Strand to SEQ ID NO: 397985
uacuagagaauggguuucc

SEQ ID NO: 397987 - RNA, 19 nt, Artificial Sequence
  Description of Artificial Sequence: Synthetic oligonucleotide
  Sense Strand Starting at position 1010 of SEQ ID NO: 316031
gcaagacuccguuauauaa

SEQ ID NO: 397988 - RNA, 19 nt, Artificial Sequence
  Description of Artificial Sequence: Synthetic oligonucleotide
  Antisense Strand to SEQ ID NO: 397987
uuauauaacggagucuugc

SEQ ID NO: 397989 - RNA, 19 nt, Artificial Sequence
  Description of Artificial Sequence: Synthetic oligonucleotide
  Sense Strand Starting at position 1010 of SEQ ID NO: 316335
aguuacucagagcaaacau

SEQ ID NO: 397990 - RNA, 19 nt, Artificial Sequence
  Description of Artificial Sequence: Synthetic oligonucleotide
  Antisense Strand to SEQ ID NO: 397989
auguuugcucugaguaacu

SEQ ID NO: 397991 - RNA, 19 nt, Artificial Sequence
  Description of Artificial Sequence: Synthetic oligonucleotide
  Sense Strand Starting at position 1010 of SEQ ID NO: 316579
gggaguuucauguaggagu

SEQ ID NO: 397992 - RNA, 19 nt, Artificial Sequence
  Description of Artificial Sequence: Synthetic oligonucleotide
  Antisense Strand to SEQ ID NO: 397991
acuccuacaugaaacuccc

SEQ ID NO: 397993 - RNA, 19 nt, Artificial Sequence
  Description of Artificial Sequence: Synthetic oligonucleotide
  Sense Strand Starting at position 1010 of SEQ ID NO: 316964
cguucaggcccaggaauuu

SEQ ID NO: 397994 - RNA, 19 nt, Artificial Sequence
  Description of Artificial Sequence: Synthetic oligonucleotide
  Antisense Strand to SEQ ID NO: 397993
aaauuccugggccugaacg

SEQ ID NO: 397995 - RNA, 19 nt, Artificial Sequence
  Description of Artificial Sequence: Synthetic oligonucleotide
  Sense Strand Starting at position 1010 of SEQ ID NO: 317070
ucuugaaacccguagaaau

SEQ ID NO: 397996 - RNA, 19 nt, Artificial Sequence
  Description of Artificial Sequence: Synthetic oligonucleotide
  Antisense Strand to SEQ ID NO: 397995
auuucuacggguuucaaga

SEQ ID NO: 397997 - RNA, 19 nt, Artificial Sequence
  Description of Artificial Sequence: Synthetic oligonucleotide
  Sense Strand Starting at position 1010 of SEQ ID NO: 317084
gaaaucaauggcuggcaga

SEQ ID NO: 397998 - RNA, 19 nt, Artificial Sequence
  Description of Artificial Sequence: Synthetic oligonucleotide
  Antisense Strand to SEQ ID NO: 397997
ucugccagccauugauuuc

SEQ ID NO: 397999 - RNA, 19 nt, Artificial Sequence
  Description of Artificial Sequence: Synthetic oligonucleotide
  Sense Strand Starting at position 1010 of SEQ ID NO: 317270
cgacuccgcccucaauuua

SEQ ID NO: 398000 - RNA, 19 nt, Artificial Sequence
  Description of Artificial Sequence: Synthetic oligonucleotide
  Antisense Strand to SEQ ID NO: 397999
uaaauugagggcggagucg

SEQ ID NO: 398001 - RNA, 19 nt, Artificial Sequence
  Description of Artificial Sequence: Synthetic oligonucleotide
  Sense Strand Starting at position 1010 of SEQ ID NO: 317322
cggaaaucggcuucgcacu

SEQ ID NO: 398002 - RNA, 19 nt, Artificial Sequence
  Description of Artificial Sequence: Synthetic oligonucleotide
  Antisense Strand to SEQ ID NO: 398001
agugcgaagccgauuuccg

SEQ ID NO: 398003 - RNA, 19 nt, Artificial Sequence
  Description of Artificial Sequence: Synthetic oligonucleotide
  Sense Strand Starting at position 1010 of SEQ ID NO: 317558
cugccuaaagaaugauuga

SEQ ID NO: 398004 - RNA, 19 nt, Artificial Sequence
  Description of Artificial Sequence: Synthetic oligonucleotide
  Antisense Strand to SEQ ID NO: 398003
ucaaucauucuuuaggcag

SEQ ID NO: 398005 - RNA, 19 nt, Artificial Sequence
  Description of Artificial Sequence: Synthetic oligonucleotide
  Sense Strand Starting at position 1010 of SEQ ID NO: 317639
acggaaauucugggauccu

SEQ ID NO: 398006 - RNA, 19 nt, Artificial Sequence
  Description of Artificial Sequence: Synthetic oligonucleotide
  Antisense Strand to SEQ ID NO: 398005
aggaucccagaauuuccgu

SEQ ID NO: 398007 - RNA, 19 nt, Artificial Sequence
  Description of Artificial Sequence: Synthetic oligonucleotide
  Sense Strand Starting at position 1010 of SEQ ID NO: 317648
cugggauccuaaucuagca

SEQ ID NO: 398008 - RNA, 19 nt, Artificial Sequence
  Description of Artificial Sequence: Synthetic oligonucleotide
  Antisense Strand to SEQ ID NO: 398007
ugcuagauuaggaucccag

SEQ ID NO: 398009 - RNA, 19 nt, Artificial Sequence
  Description of Artificial Sequence: Synthetic oligonucleotide
  Sense Strand Starting at position 1010 of SEQ ID NO: 317655
ccuaaucuagcauggaaga

SEQ ID NO: 398010 - RNA, 19 nt, Artificial Sequence
  Description of Artificial Sequence: Synthetic oligonucleotide
  Antisense Strand to SEQ ID NO: 398009
ucuuccaugcuagauuagg

SEQ ID NO: 398011 - RNA, 19 nt, Artificial Sequence
  Description of Artificial Sequence: Synthetic oligonucleotide
  Sense Strand Starting at position 1010 of SEQ ID NO: 318059
gauacuuguagagguggau

SEQ ID NO: 398012 - RNA, 19 nt, Artificial Sequence
  Description of Artificial Sequence: Synthetic oligonucleotide
  Antisense Strand to SEQ ID NO: 398011
auccaccucuacaaguauc

SEQ ID NO: 398013 - RNA, 19 nt, Artificial Sequence
  Description of Artificial Sequence: Synthetic oligonucleotide
  Sense Strand Starting at position 1010 of SEQ ID NO: 318063
cuuguagagguggauuagu

SEQ ID NO: 398014 - RNA, 19 nt, Artificial Sequence
  Description of Artificial Sequence: Synthetic oligonucleotide
  Antisense Strand to SEQ ID NO: 398013
acuaauccaccucuacaag

SEQ ID NO: 398015 - RNA, 19 nt, Artificial Sequence
  Description of Artificial Sequence: Synthetic oligonucleotide
  Sense Strand Starting at position 1010 of SEQ ID NO: 318076
auuaguggacgccagagau

SEQ ID NO: 398016 - RNA, 19 nt, Artificial Sequence
  Description of Artificial Sequence: Synthetic oligonucleotide
  Antisense Strand to SEQ ID NO: 398015
aucucuggcguccacuaau

SEQ ID NO: 398017 - RNA, 19 nt, Artificial Sequence
  Description of Artificial Sequence: Synthetic oligonucleotide
  Sense Strand Starting at position 1010 of SEQ ID NO: 318124
uggguuauccuauggauuc

SEQ ID NO: 398018 - RNA, 19 nt, Artificial Sequence
  Description of Artificial Sequence: Synthetic oligonucleotide
  Antisense Strand to SEQ ID NO: 398017
gaauccauaggauaaccca

SEQ ID NO: 398019 - RNA, 19 nt, Artificial Sequence
  Description of Artificial Sequence: Synthetic oligonucleotide
  Sense Strand Starting at position 1010 of SEQ ID NO: 318394
ugcuuugagaugggaacua

SEQ ID NO: 398020 - RNA, 19 nt, Artificial Sequence
  Description of Artificial Sequence: Synthetic oligonucleotide
  Antisense Strand to SEQ ID NO: 398019
uaguucccaucucaaagca

SEQ ID NO: 398021 - RNA, 19 nt, Artificial Sequence
  Description of Artificial Sequence: Synthetic oligonucleotide
  Sense Strand Starting at position 1010 of SEQ ID NO: 318433
gggugacucuaucugacuu

SEQ ID NO: 398022 - RNA, 19 nt, Artificial Sequence
  Description of Artificial Sequence: Synthetic oligonucleotide
  Antisense Strand to SEQ ID NO: 398021
aagucagauagagucaccc

SEQ ID NO: 398023 - RNA, 19 nt, Artificial Sequence
  Description of Artificial Sequence: Synthetic oligonucleotide
  Sense Strand Starting at position 1010 of SEQ ID NO: 318461
caaagucacuguguugaaa

SEQ ID NO: 398024 - RNA, 19 nt, Artificial Sequence
  Description of Artificial Sequence: Synthetic oligonucleotide
  Antisense Strand to SEQ ID NO: 398023
uuucaacacagugacuuug

SEQ ID NO: 398025 - RNA, 19 nt, Artificial Sequence
  Description of Artificial Sequence: Synthetic oligonucleotide
  Sense Strand Starting at position 1010 of SEQ ID NO: 318552
uguguaaacagaggauauu

SEQ ID NO: 398026 - RNA, 19 nt, Artificial Sequence
  Description of Artificial Sequence: Synthetic oligonucleotide
  Antisense Strand to SEQ ID NO: 398025
aauauccucuguuuacaca

SEQ ID NO: 398027 - RNA, 19 nt, Artificial Sequence
  Description of Artificial Sequence: Synthetic oligonucleotide
  Sense Strand Starting at position 1010 of SEQ ID NO: 318604
gcaagauuugcugguggau

SEQ ID NO: 398028 - RNA, 19 nt, Artificial Sequence
  Description of Artificial Sequence: Synthetic oligonucleotide
  Antisense Strand to SEQ ID NO: 398027
auccaccagcaaaucuugc

SEQ ID NO: 398029 - RNA, 19 nt, Artificial Sequence
  Description of Artificial Sequence: Synthetic oligonucleotide
  Sense Strand Starting at position 1010 of SEQ ID NO: 318637
aguaaaguaugacuccgaa

SEQ ID NO: 398030 - RNA, 19 nt, Artificial Sequence
  Description of Artificial Sequence: Synthetic oligonucleotide
  Antisense Strand to SEQ ID NO: 398029
uucggagucauacuuuacu

SEQ ID NO: 398031 - RNA, 19 nt, Artificial Sequence
  Description of Artificial Sequence: Synthetic oligonucleotide
  Sense Strand Starting at position 1010 of SEQ ID NO: 318655
aguuguaugaaauagaugu

SEQ ID NO: 398032 - RNA, 19 nt, Artificial Sequence
  Description of Artificial Sequence: Synthetic oligonucleotide
  Antisense Strand to SEQ ID NO: 398031
acaucuauuucauacaacu

SEQ ID NO: 398033 - RNA, 19 nt, Artificial Sequence
  Description of Artificial Sequence: Synthetic oligonucleotide
  Sense Strand Starting at position 1010 of SEQ ID NO: 318668
agauguauauaagucacuu

SEQ ID NO: 398034 - RNA, 19 nt, Artificial Sequence
  Description of Artificial Sequence: Synthetic oligonucleotide
  Antisense Strand to SEQ ID NO: 398033
aagugacuuauauacaucu

SEQ ID NO: 398035 - RNA, 19 nt, Artificial Sequence
  Description of Artificial Sequence: Synthetic oligonucleotide
  Sense Strand Starting at position 1010 of SEQ ID NO: 318827
gaaguccuccugggaggaa

SEQ ID NO: 398036 - RNA, 19 nt, Artificial Sequence
  Description of Artificial Sequence: Synthetic oligonucleotide
  Antisense Strand to SEQ ID NO: 398035
uuccucccaggaggacuuc

SEQ ID NO: 398037 - RNA, 19 nt, Artificial Sequence
  Description of Artificial Sequence: Synthetic oligonucleotide
  Sense Strand Starting at position 1010 of SEQ ID NO: 318830
guccuccugggaggaauaa

SEQ ID NO: 398038 - RNA, 19 nt, Artificial Sequence
  Description of Artificial Sequence: Synthetic oligonucleotide
  Antisense Strand to SEQ ID NO: 398037
uuauuccucccaggaggac

SEQ ID NO: 398039 - RNA, 19 nt, Artificial Sequence
  Description of Artificial Sequence: Synthetic oligonucleotide
  Sense Strand Starting at position 1010 of SEQ ID NO: 318870
ucguuugcucguguauuau

SEQ ID NO: 398040 - RNA, 19 nt, Artificial Sequence
  Description of Artificial Sequence: Synthetic oligonucleotide
  Antisense Strand to SEQ ID NO: 398039
auaauacacgagcaaacga

SEQ ID NO: 398041 - RNA, 19 nt, Artificial Sequence
  Description of Artificial Sequence: Synthetic oligonucleotide
  Sense Strand Starting at position 1010 of SEQ ID NO: 318903
cuuauugagcacugagacu

SEQ ID NO: 398042 - RNA, 19 nt, Artificial Sequence
  Description of Artificial Sequence: Synthetic oligonucleotide
  Antisense Strand to SEQ ID NO: 398041
agucucagugcucaauaag

SEQ ID NO: 398043 - RNA, 19 nt, Artificial Sequence
  Description of Artificial Sequence: Synthetic oligonucleotide
  Sense Strand Starting at position 1010 of SEQ ID NO: 318928
cugauacaacugugagcau

SEQ ID NO: 398044 - RNA, 19 nt, Artificial Sequence
  Description of Artificial Sequence: Synthetic oligonucleotide
  Antisense Strand to SEQ ID NO: 398043
augcucacaguuguaucag

SEQ ID NO: 398045 - RNA, 19 nt, Artificial Sequence
  Description of Artificial Sequence: Synthetic oligonucleotide
  Sense Strand Starting at position 1010 of SEQ ID NO: 318939
gugagcaucguugucaugu

SEQ ID NO: 398046 - RNA, 19 nt, Artificial Sequence
  Description of Artificial Sequence: Synthetic oligonucleotide
  Antisense Strand to SEQ ID NO: 398045
acaugacaacgaugcucac

SEQ ID NO: 398047 - RNA, 19 nt, Artificial Sequence
  Description of Artificial Sequence: Synthetic oligonucleotide
  Sense Strand Starting at position 1010 of SEQ ID NO: 319070
gccugacgagucagcgaaa

SEQ ID NO: 398048 - RNA, 19 nt, Artificial Sequence
  Description of Artificial Sequence: Synthetic oligonucleotide
  Antisense Strand to SEQ ID NO: 398047
uuucgcugacucgucaggc

SEQ ID NO: 398049 - RNA, 19 nt, Artificial Sequence
  Description of Artificial Sequence: Synthetic oligonucleotide
  Sense Strand Starting at position 1010 of SEQ ID NO: 319073
ugacgagucagcgaaagga

SEQ ID NO: 398050 - RNA, 19 nt, Artificial Sequence
  Description of Artificial Sequence: Synthetic oligonucleotide
  Antisense Strand to SEQ ID NO: 398049
uccuuucgcugacucguca

SEQ ID NO: 398051 - RNA, 19 nt, Artificial Sequence
  Description of Artificial Sequence: Synthetic oligonucleotide
  Sense Strand Starting at position 1010 of SEQ ID NO: 319089
ggaucacuuggacaagugu

SEQ ID NO: 398052 - RNA, 19 nt, Artificial Sequence
  Description of Artificial Sequence: Synthetic oligonucleotide
  Antisense Strand to SEQ ID NO: 398051
acacuuguccaagugaucc

SEQ ID NO: 398053 - RNA, 19 nt, Artificial Sequence
  Description of Artificial Sequence: Synthetic oligonucleotide
  Sense Strand Starting at position 1010 of SEQ ID NO: 319098
ggacaagugucaguuaagg

SEQ ID NO: 398054 - RNA, 19 nt, Artificial Sequence
  Description of Artificial Sequence: Synthetic oligonucleotide
  Antisense Strand to SEQ ID NO: 398053
ccuuaacugacacuugucc

SEQ ID NO: 398055 - RNA, 19 nt, Artificial Sequence
  Description of Artificial Sequence: Synthetic oligonucleotide
  Sense Strand Starting at position 1010 of SEQ ID NO: 319100
acaagugucaguuaaggca

SEQ ID NO: 398056 - RNA, 19 nt, Artificial Sequence
  Description of Artificial Sequence: Synthetic oligonucleotide
  Antisense Strand to SEQ ID NO: 398055
ugccuuaacugacacuugu

SEQ ID NO: 398057 - RNA, 19 nt, Artificial Sequence
  Description of Artificial Sequence: Synthetic oligonucleotide
  Sense Strand Starting at position 1010 of SEQ ID NO: 319130
gcaggugaugaccauuagu

SEQ ID NO: 398058 - RNA, 19 nt, Artificial Sequence
  Description of Artificial Sequence: Synthetic oligonucleotide
  Antisense Strand to SEQ ID NO: 398057
acuaauggucaucaccugc

SEQ ID NO: 398059 - RNA, 19 nt, Artificial Sequence
  Description of Artificial Sequence: Synthetic oligonucleotide
  Sense Strand Starting at position 1010 of SEQ ID NO: 319141
ccauuaguagagcaugaua

SEQ ID NO: 398060 - RNA, 19 nt, Artificial Sequence
  Description of Artificial Sequence: Synthetic oligonucleotide
  Antisense Strand to SEQ ID NO: 398059
uaucaugcucuacuaaugg

SEQ ID NO: 398061 - RNA, 19 nt, Artificial Sequence
  Description of Artificial Sequence: Synthetic oligonucleotide
  Sense Strand Starting at position 1010 of SEQ ID NO: 319143
auuaguagagcaugauaag

SEQ ID NO: 398062 - RNA, 19 nt, Artificial Sequence
  Description of Artificial Sequence: Synthetic oligonucleotide
  Antisense Strand to SEQ ID NO: 398061
cuuaucaugcucuacuaau

SEQ ID NO: 398063 - RNA, 19 nt, Artificial Sequence
  Description of Artificial Sequence: Synthetic oligonucleotide
  Sense Strand Starting at position 1011 of SEQ ID NO: 315677
gcugaauagcuacauguga

SEQ ID NO: 398064 - RNA, 19 nt, Artificial Sequence
  Description of Artificial Sequence: Synthetic oligonucleotide
  Antisense Strand to SEQ ID NO: 398063
ucacauguagcuauucagc

SEQ ID NO: 398065 - RNA, 19 nt, Artificial Sequence
  Description of Artificial Sequence: Synthetic oligonucleotide
  Sense Strand Starting at position 1011 of SEQ ID NO: 315734
agguucuuucucuaagcaa

SEQ ID NO: 398066 - RNA, 19 nt, Artificial Sequence
  Description of Artificial Sequence: Synthetic oligonucleotide
  Antisense Strand to SEQ ID NO: 398065
uugcuuagagaaagaaccu

SEQ ID NO: 398067 - RNA, 19 nt, Artificial Sequence
  Description of Artificial Sequence: Synthetic oligonucleotide
  Sense Strand Starting at position 1011 of SEQ ID NO: 315787
gggugacuauuggauuaca

SEQ ID NO: 398068 - RNA, 19 nt, Artificial Sequence
  Description of Artificial Sequence: Synthetic oligonucleotide
  Antisense Strand to SEQ ID NO: 398067
uguaauccaauagucaccc

SEQ ID NO: 398069 - RNA, 19 nt, Artificial Sequence
  Description of Artificial Sequence: Synthetic oligonucleotide
  Sense Strand Starting at position 1011 of SEQ ID NO: 315862
auguccuagugacuaaaga

SEQ ID NO: 398070 - RNA, 19 nt, Artificial Sequence
  Description of Artificial Sequence: Synthetic oligonucleotide
  Antisense Strand to SEQ ID NO: 398069
ucuuuagucacuaggacau

SEQ ID NO: 398071 - RNA, 19 nt, Artificial Sequence
  Description of Artificial Sequence: Synthetic oligonucleotide
  Sense Strand Starting at position 1011 of SEQ ID NO: 316036
ucaagauugccauagcaga

SEQ ID NO: 398072 - RNA, 19 nt, Artificial Sequence
  Description of Artificial Sequence: Synthetic oligonucleotide
  Antisense Strand to SEQ ID NO: 398071
ucugcuauggcaaucuuga

SEQ ID NO: 398073 - RNA, 19 nt, Artificial Sequence
  Description of Artificial Sequence: Synthetic oligonucleotide
  Sense Strand Starting at position 1011 of SEQ ID NO: 316076
ccuucugagcccuauguga

SEQ ID NO: 398074 - RNA, 19 nt, Artificial Sequence
  Description of Artificial Sequence: Synthetic oligonucleotide
  Antisense Strand to SEQ ID NO: 398073
ucacauagggcucagaagg

SEQ ID NO: 398075 - RNA, 19 nt, Artificial Sequence
  Description of Artificial Sequence: Synthetic oligonucleotide
  Sense Strand Starting at position 1011 of SEQ ID NO: 316078
uucugagcccuaugugacu

SEQ ID NO: 398076 - RNA, 19 nt, Artificial Sequence
  Description of Artificial Sequence: Synthetic oligonucleotide
  Antisense Strand to SEQ ID NO: 398075
agucacauagggcucagaa

SEQ ID NO: 398077 - RNA, 19 nt, Artificial Sequence
  Description of Artificial Sequence: Synthetic oligonucleotide
  Sense Strand Starting at position 1011 of SEQ ID NO: 316122
aguccuggucaggguuuau

SEQ ID NO: 398078 - RNA, 19 nt, Artificial Sequence
  Description of Artificial Sequence: Synthetic oligonucleotide
  Antisense Strand to SEQ ID NO: 398077
auaaacccugaccaggacu

SEQ ID NO: 398079 - RNA, 19 nt, Artificial Sequence
  Description of Artificial Sequence: Synthetic oligonucleotide
  Sense Strand Starting at position 1011 of SEQ ID NO: 316131
caggguuuaugucucugga

SEQ ID NO: 398080 - RNA, 19 nt, Artificial Sequence
  Description of Artificial Sequence: Synthetic oligonucleotide
  Antisense Strand to SEQ ID NO: 398079
uccagagacauaaacccug

SEQ ID NO: 398081 - RNA, 19 nt, Artificial Sequence
  Description of Artificial Sequence: Synthetic oligonucleotide
  Sense Strand Starting at position 1011 of SEQ ID NO: 316133
ggguuuaugucucuggaug

SEQ ID NO: 398082 - RNA, 19 nt, Artificial Sequence
  Description of Artificial Sequence: Synthetic oligonucleotide
  Antisense Strand to SEQ ID NO: 398081
cauccagagacauaaaccc

SEQ ID NO: 398083 - RNA, 19 nt, Artificial Sequence
  Description of Artificial Sequence: Synthetic oligonucleotide
  Sense Strand Starting at position 1011 of SEQ ID NO: 316134
gguuuaugucucuggauga

SEQ ID NO: 398084 - RNA, 19 nt, Artificial Sequence
  Description of Artificial Sequence: Synthetic oligonucleotide
  Antisense Strand to SEQ ID NO: 398083
ucauccagagacauaaacc

SEQ ID NO: 398085 - RNA, 19 nt, Artificial Sequence
  Description of Artificial Sequence: Synthetic oligonucleotide
  Sense Strand Starting at position 1011 of SEQ ID NO: 316179
uggcgagauuccuugggcu

SEQ ID NO: 398086 - RNA, 19 nt, Artificial Sequence
  Description of Artificial Sequence: Synthetic oligonucleotide
  Antisense Strand to SEQ ID NO: 398085
agcccaaggaaucucgcca

SEQ ID NO: 398087 - RNA, 19 nt, Artificial Sequence
  Description of Artificial Sequence: Synthetic oligonucleotide
  Sense Strand Starting at position 1011 of SEQ ID NO: 316181
gcgagauuccuugggcuau

SEQ ID NO: 398088 - RNA, 19 nt, Artificial Sequence
  Description of Artificial Sequence: Synthetic oligonucleotide
  Antisense Strand to SEQ ID NO: 398087
auagcccaaggaaucucgc

SEQ ID NO: 398089 - RNA, 19 nt, Artificial Sequence
  Description of Artificial Sequence: Synthetic oligonucleotide
  Sense Strand Starting at position 1011 of SEQ ID NO: 316183
gagauuccuugggcuaucu

SEQ ID NO: 398090 - RNA, 19 nt, Artificial Sequence
  Description of Artificial Sequence: Synthetic oligonucleotide
  Antisense Strand to SEQ ID NO: 398089
agauagcccaaggaaucuc

SEQ ID NO: 398091 - RNA, 19 nt, Artificial Sequence
  Description of Artificial Sequence: Synthetic oligonucleotide
  Sense Strand Starting at position 1011 of SEQ ID NO: 316185
gauuccuugggcuaucuuu

SEQ ID NO: 398092 - RNA, 19 nt, Artificial Sequence
  Description of Artificial Sequence: Synthetic oligonucleotide
  Antisense Strand to SEQ ID NO: 398091
aaagauagcccaaggaauc

SEQ ID NO: 398093 - RNA, 19 nt, Artificial Sequence
  Description of Artificial Sequence: Synthetic oligonucleotide
  Sense Strand Starting at position 1011 of SEQ ID NO: 316191
uugggcuaucuuugagaaa

SEQ ID NO: 398094 - RNA, 19 nt, Artificial Sequence
  Description of Artificial Sequence: Synthetic oligonucleotide
  Antisense Strand to SEQ ID NO: 398093
uuucucaaagauagcccaa

SEQ ID NO: 398095 - RNA, 19 nt, Artificial Sequence
  Description of Artificial Sequence: Synthetic oligonucleotide
  Sense Strand Starting at position 1011 of SEQ ID NO: 316192
ugggcuaucuuugagaaac

SEQ ID NO: 398096 - RNA, 19 nt, Artificial Sequence
  Description of Artificial Sequence: Synthetic oligonucleotide
  Antisense Strand to SEQ ID NO: 398095
guuucucaaagauagccca

SEQ ID NO: 398097 - RNA, 19 nt, Artificial Sequence
  Description of Artificial Sequence: Synthetic oligonucleotide
  Sense Strand Starting at position 1011 of SEQ ID NO: 316269
guguuugcgccugugagaa

SEQ ID NO: 398098 - RNA, 19 nt, Artificial Sequence
  Description of Artificial Sequence: Synthetic oligonucleotide
  Antisense Strand to SEQ ID NO: 398097
uucucacaggcgcaaacac

SEQ ID NO: 398099 - RNA, 19 nt, Artificial Sequence
  Description of Artificial Sequence: Synthetic oligonucleotide
  Sense Strand Starting at position 1011 of SEQ ID NO: 316281
gugagaacgccuuggaaag

SEQ ID NO: 398100 - RNA, 19 nt, Artificial Sequence
  Description of Artificial Sequence: Synthetic oligonucleotide
  Antisense Strand to SEQ ID NO: 398099
cuuuccaaggcguucucac

SEQ ID NO: 398101 - RNA, 19 nt, Artificial Sequence
  Description of Artificial Sequence: Synthetic oligonucleotide
  Sense Strand Starting at position 1011 of SEQ ID NO: 316282
ugagaacgccuuggaaaga

SEQ ID NO: 398102 - RNA, 19 nt, Artificial Sequence
  Description of Artificial Sequence: Synthetic oligonucleotide
  Antisense Strand to SEQ ID NO: 398101
ucuuuccaaggcguucuca

SEQ ID NO: 398103 - RNA, 19 nt, Artificial Sequence
  Description of Artificial Sequence: Synthetic oligonucleotide
  Sense Strand Starting at position 1011 of SEQ ID NO: 316372
acucacauccuggguaauu

SEQ ID NO: 398104 - RNA, 19 nt, Artificial Sequence
  Description of Artificial Sequence: Synthetic oligonucleotide
  Antisense Strand to SEQ ID NO: 398103
aauuacccaggaugugagu

SEQ ID NO: 398105 - RNA, 19 nt, Artificial Sequence
  Description of Artificial Sequence: Synthetic oligonucleotide
  Sense Strand Starting at position 1011 of SEQ ID NO: 316382
uggguaauucuagggacac

SEQ ID NO: 398106 - RNA, 19 nt, Artificial Sequence
  Description of Artificial Sequence: Synthetic oligonucleotide
  Antisense Strand to SEQ ID NO: 398105
gugucccuagaauuaccca

SEQ ID NO: 398107 - RNA, 19 nt, Artificial Sequence
  Description of Artificial Sequence: Synthetic oligonucleotide
  Sense Strand Starting at position 1011 of SEQ ID NO: 316459
gcuacuuuauugucgauuu

SEQ ID NO: 398108 - RNA, 19 nt, Artificial Sequence
  Description of Artificial Sequence: Synthetic oligonucleotide
  Antisense Strand to SEQ ID NO: 398107
aaaucgacaauaaaguagc

SEQ ID NO: 398109 - RNA, 19 nt, Artificial Sequence
  Description of Artificial Sequence: Synthetic oligonucleotide
  Sense Strand Starting at position 1011 of SEQ ID NO: 316616
ucgagacuggugugaccaa

SEQ ID NO: 398110 - RNA, 19 nt, Artificial Sequence
  Description of Artificial Sequence: Synthetic oligonucleotide
  Antisense Strand to SEQ ID NO: 398109
uuggucacaccagucucga

SEQ ID NO: 398111 - RNA, 19 nt, Artificial Sequence
  Description of Artificial Sequence: Synthetic oligonucleotide
  Sense Strand Starting at position 1011 of SEQ ID NO: 316886
uguuguuuccagcccguga

SEQ ID NO: 398112 - RNA, 19 nt, Artificial Sequence
  Description of Artificial Sequence: Synthetic oligonucleotide
  Antisense Strand to SEQ ID NO: 398111
ucacgggcuggaaacaaca

SEQ ID NO: 398113 - RNA, 19 nt, Artificial Sequence
  Description of Artificial Sequence: Synthetic oligonucleotide
  Sense Strand Starting at position 1011 of SEQ ID NO: 317377
gcgugugaugugucaccaa

SEQ ID NO: 398114 - RNA, 19 nt, Artificial Sequence
  Description of Artificial Sequence: Synthetic oligonucleotide
  Antisense Strand to SEQ ID NO: 398113
uuggugacacaucacacgc

SEQ ID NO: 398115 - RNA, 19 nt, Artificial Sequence
  Description of Artificial Sequence: Synthetic oligonucleotide
  Sense Strand Starting at position 1011 of SEQ ID NO: 317481
cacacagcgugacuuaaua

SEQ ID NO: 398116 - RNA, 19 nt, Artificial Sequence
  Description of Artificial Sequence: Synthetic oligonucleotide
  Antisense Strand to SEQ ID NO: 398115
uauuaagucacgcugugug

SEQ ID NO: 398117 - RNA, 19 nt, Artificial Sequence
  Description of Artificial Sequence: Synthetic oligonucleotide
  Sense Strand Starting at position 1011 of SEQ ID NO: 317755
uuaaacgagucacuuuauu

SEQ ID NO: 398118 - RNA, 19 nt, Artificial Sequence
  Description of Artificial Sequence: Synthetic oligonucleotide
  Antisense Strand to SEQ ID NO: 398117
aauaaagugacucguuuaa

SEQ ID NO: 398119 - RNA, 19 nt, Artificial Sequence
  Description of Artificial Sequence: Synthetic oligonucleotide
  Sense Strand Starting at position 1011 of SEQ ID NO: 317794
ugggauuucugcuaaugca

SEQ ID NO: 398120 - RNA, 19 nt, Artificial Sequence
  Description of Artificial Sequence: Synthetic oligonucleotide
  Antisense Strand to SEQ ID NO: 398119
ugcauuagcagaaauccca

SEQ ID NO: 398121 - RNA, 19 nt, Artificial Sequence
  Description of Artificial Sequence: Synthetic oligonucleotide
  Sense Strand Starting at position 1011 of SEQ ID NO: 317838
ugguucuaauucuagauga

SEQ ID NO: 398122 - RNA, 19 nt, Artificial Sequence
  Description of Artificial Sequence: Synthetic oligonucleotide
  Antisense Strand to SEQ ID NO: 398121
ucaucuagaauuagaacca

SEQ ID NO: 398123 - RNA, 19 nt, Artificial Sequence
  Description of Artificial Sequence: Synthetic oligonucleotide
  Sense Strand Starting at position 1011 of SEQ ID NO: 317969
caaguaauguaguuggaaa

SEQ ID NO: 398124 - RNA, 19 nt, Artificial Sequence
  Description of Artificial Sequence: Synthetic oligonucleotide
  Antisense Strand to SEQ ID NO: 398123
uuuccaacuacauuacuug

SEQ ID NO: 398125 - RNA, 19 nt, Artificial Sequence
  Description of Artificial Sequence: Synthetic oligonucleotide
  Sense Strand Starting at position 1011 of SEQ ID NO: 317971
aguaauguaguuggaaaug

SEQ ID NO: 398126 - RNA, 19 nt, Artificial Sequence
  Description of Artificial Sequence: Synthetic oligonucleotide
  Antisense Strand to SEQ ID NO: 398125
cauuuccaacuacauuacu

SEQ ID NO: 398127 - RNA, 19 nt, Artificial Sequence
  Description of Artificial Sequence: Synthetic oligonucleotide
  Sense Strand Starting at position 1011 of SEQ ID NO: 318036
ggugguuuacuucagguca

SEQ ID NO: 398128 - RNA, 19 nt, Artificial Sequence
  Description of Artificial Sequence: Synthetic oligonucleotide
  Antisense Strand to SEQ ID NO: 398127
ugaccugaaguaaaccacc

SEQ ID NO: 398129 - RNA, 19 nt, Artificial Sequence
  Description of Artificial Sequence: Synthetic oligonucleotide
  Sense Strand Starting at position 1011 of SEQ ID NO: 318291
auaugacaguucgaauuag

SEQ ID NO: 398130 - RNA, 19 nt, Artificial Sequence
  Description of Artificial Sequence: Synthetic oligonucleotide
  Antisense Strand to SEQ ID NO: 398129
cuaauucgaacugucauau

SEQ ID NO: 398131 - RNA, 19 nt, Artificial Sequence
  Description of Artificial Sequence: Synthetic oligonucleotide
  Sense Strand Starting at position 1011 of SEQ ID NO: 318400
auugacauguuauucuaca

SEQ ID NO: 398132 - RNA, 19 nt, Artificial Sequence
  Description of Artificial Sequence: Synthetic oligonucleotide
  Antisense Strand to SEQ ID NO: 398131
uguagaauaacaugucaau

SEQ ID NO: 398133 - RNA, 19 nt, Artificial Sequence
  Description of Artificial Sequence: Synthetic oligonucleotide
  Sense Strand Starting at position 1011 of SEQ ID NO: 318401
uugacauguuauucuacau

SEQ ID NO: 398134 - RNA, 19 nt, Artificial Sequence
  Description of Artificial Sequence: Synthetic oligonucleotide
  Antisense Strand to SEQ ID NO: 398133
auguagaauaacaugucaa

SEQ ID NO: 398135 - RNA, 19 nt, Artificial Sequence
  Description of Artificial Sequence: Synthetic oligonucleotide
  Sense Strand Starting at position 1011 of SEQ ID NO: 318537
uugaaaugucuugguaaau

SEQ ID NO: 398136 - RNA, 19 nt, Artificial Sequence
  Description of Artificial Sequence: Synthetic oligonucleotide
  Antisense Strand to SEQ ID NO: 398135
auuuaccaagacauuucaa

SEQ ID NO: 398137 - RNA, 19 nt, Artificial Sequence
  Description of Artificial Sequence: Synthetic oligonucleotide
  Sense Strand Starting at position 1011 of SEQ ID NO: 318538
ugaaaugucuugguaaaug

SEQ ID NO: 398138 - RNA, 19 nt, Artificial Sequence
  Description of Artificial Sequence: Synthetic oligonucleotide
  Antisense Strand to SEQ ID NO: 398137
cauuuaccaagacauuuca

SEQ ID NO: 398139 - RNA, 19 nt, Artificial Sequence
  Description of Artificial Sequence: Synthetic oligonucleotide
  Sense Strand Starting at position 1011 of SEQ ID NO: 318543
ugucuugguaaaugagguu

SEQ ID NO: 398140 - RNA, 19 nt, Artificial Sequence
  Description of Artificial Sequence: Synthetic oligonucleotide
  Antisense Strand to SEQ ID NO: 398139
aaccucauuuaccaagaca

SEQ ID NO: 398141 - RNA, 19 nt, Artificial Sequence
  Description of Artificial Sequence: Synthetic oligonucleotide
  Sense Strand Starting at position 1011 of SEQ ID NO: 318789
ucaaauaguguacaaagua

SEQ ID NO: 398142 - RNA, 19 nt, Artificial Sequence
  Description of Artificial Sequence: Synthetic oligonucleotide
  Antisense Strand to SEQ ID NO: 398141
uacuuuguacacuauuuga

SEQ ID NO: 398143 - RNA, 19 nt, Artificial Sequence
  Description of Artificial Sequence: Synthetic oligonucleotide
  Sense Strand Starting at position 1012 of SEQ ID NO: 315241
ugacuuacucugcacugua

SEQ ID NO: 398144 - RNA, 19 nt, Artificial Sequence
  Description of Artificial Sequence: Synthetic oligonucleotide
  Antisense Strand to SEQ ID NO: 398143
uacagugcagaguaaguca

SEQ ID NO: 398145 - RNA, 19 nt, Artificial Sequence
  Description of Artificial Sequence: Synthetic oligonucleotide
  Sense Strand Starting at position 1012 of SEQ ID NO: 315244
cuuacucugcacuguaaga

SEQ ID NO: 398146 - RNA, 19 nt, Artificial Sequence
  Description of Artificial Sequence: Synthetic oligonucleotide
  Antisense Strand to SEQ ID NO: 398145
ucuuacagugcagaguaag

SEQ ID NO: 398147 - RNA, 19 nt, Artificial Sequence
  Description of Artificial Sequence: Synthetic oligonucleotide
  Sense Strand Starting at position 1012 of SEQ ID NO: 315254
acuguaagaccgcauguaa

SEQ ID NO: 398148 - RNA, 19 nt, Artificial Sequence
  Description of Artificial Sequence: Synthetic oligonucleotide
  Antisense Strand to SEQ ID NO: 398147
uuacaugcggucuuacagu

SEQ ID NO: 398149 - RNA, 19 nt, Artificial Sequence
  Description of Artificial Sequence: Synthetic oligonucleotide
  Sense Strand Starting at position 1012 of SEQ ID NO: 315304
gccuccuugccugcuauau

SEQ ID NO: 398150 - RNA, 19 nt, Artificial Sequence
  Description of Artificial Sequence: Synthetic oligonucleotide
  Antisense Strand to SEQ ID NO: 398149
auauagcaggcaaggaggc

SEQ ID NO: 398151 - RNA, 19 nt, Artificial Sequence
  Description of Artificial Sequence: Synthetic oligonucleotide
  Sense Strand Starting at position 1012 of SEQ ID NO: 315342
gguugcuaugagggcuaaa

SEQ ID NO: 398152 - RNA, 19 nt, Artificial Sequence
  Description of Artificial Sequence: Synthetic oligonucleotide
  Antisense Strand to SEQ ID NO: 398151
uuuagcccucauagcaacc

SEQ ID NO: 398153 - RNA, 19 nt, Artificial Sequence
  Description of Artificial Sequence: Synthetic oligonucleotide
  Sense Strand Starting at position 1012 of SEQ ID NO: 315345
ugcuaugagggcuaaauga

SEQ ID NO: 398154 - RNA, 19 nt, Artificial Sequence
  Description of Artificial Sequence: Synthetic oligonucleotide
  Antisense Strand to SEQ ID NO: 398153
ucauuuagcccucauagca

SEQ ID NO: 398155 - RNA, 19 nt, Artificial Sequence
  Description of Artificial Sequence: Synthetic oligonucleotide
  Sense Strand Starting at position 1012 of SEQ ID NO: 315352
agggcuaaaugagaauaua

SEQ ID NO: 398156 - RNA, 19 nt, Artificial Sequence
  Description of Artificial Sequence: Synthetic oligonucleotide
  Antisense Strand to SEQ ID NO: 398155
uauauucucauuuagcccu

SEQ ID NO: 398157 - RNA, 19 nt, Artificial Sequence
  Description of Artificial Sequence: Synthetic oligonucleotide
  Sense Strand Starting at position 1012 of SEQ ID NO: 315414
guaagaaaguaucuuacca

SEQ ID NO: 398158 - RNA, 19 nt, Artificial Sequence
  Description of Artificial Sequence: Synthetic oligonucleotide
  Antisense Strand to SEQ ID NO: 398157
ugguaagauacuuucuuac

SEQ ID NO: 398159 - RNA, 19 nt, Artificial Sequence
  Description of Artificial Sequence: Synthetic oligonucleotide
  Sense Strand Starting at position 1012 of SEQ ID NO: 315481
auauguuuauuacccggau

SEQ ID NO: 398160 - RNA, 19 nt, Artificial Sequence
  Description of Artificial Sequence: Synthetic oligonucleotide
  Antisense Strand to SEQ ID NO: 398159
auccggguaauaaacauau

SEQ ID NO: 398161 - RNA, 19 nt, Artificial Sequence
  Description of Artificial Sequence: Synthetic oligonucleotide
  Sense Strand Starting at position 1012 of SEQ ID NO: 315482
uauguuuauuacccggauu

SEQ ID NO: 398162 - RNA, 19 nt, Artificial Sequence
  Description of Artificial Sequence: Synthetic oligonucleotide
  Antisense Strand to SEQ ID NO: 398161
aauccggguaauaaacaua

SEQ ID NO: 398163 - RNA, 19 nt, Artificial Sequence
  Description of Artificial Sequence: Synthetic oligonucleotide
  Sense Strand Starting at position 1012 of SEQ ID NO: 315485
guuuauuacccggauugug

SEQ ID NO: 398164 - RNA, 19 nt, Artificial Sequence
  Description of Artificial Sequence: Synthetic oligonucleotide
  Antisense Strand to SEQ ID NO: 398163
cacaauccggguaauaaac

SEQ ID NO: 398165 - RNA, 19 nt, Artificial Sequence
  Description of Artificial Sequence: Synthetic oligonucleotide
  Sense Strand Starting at position 1012 of SEQ ID NO: 315508
ugguuacaccaguguauac

SEQ ID NO: 398166 - RNA, 19 nt, Artificial Sequence
  Description of Artificial Sequence: Synthetic oligonucleotide
  Antisense Strand to SEQ ID NO: 398165
guauacacugguguaacca

SEQ ID NO: 398167 - RNA, 19 nt, Artificial Sequence
  Description of Artificial Sequence: Synthetic oligonucleotide
  Sense Strand Starting at position 1012 of SEQ ID NO: 315748
caaagauggcaaggcaaau

SEQ ID NO: 398168 - RNA, 19 nt, Artificial Sequence
  Description of Artificial Sequence: Synthetic oligonucleotide
  Antisense Strand to SEQ ID NO: 398167
auuugccuugccaucuuug

SEQ ID NO: 398169 - RNA, 19 nt, Artificial Sequence
  Description of Artificial Sequence: Synthetic oligonucleotide
  Sense Strand Starting at position 1012 of SEQ ID NO: 315791
uccacaagccuuugaguaa

SEQ ID NO: 398170 - RNA, 19 nt, Artificial Sequence
  Description of Artificial Sequence: Synthetic oligonucleotide
  Antisense Strand to SEQ ID NO: 398169
uuacucaaaggcuugugga

SEQ ID NO: 398171 - RNA, 19 nt, Artificial Sequence
  Description of Artificial Sequence: Synthetic oligonucleotide
  Sense Strand Starting at position 1012 of SEQ ID NO: 315848
ggagucauuucagaaacgu

SEQ ID NO: 398172 - RNA, 19 nt, Artificial Sequence
  Description of Artificial Sequence: Synthetic oligonucleotide
  Antisense Strand to SEQ ID NO: 398171
acguuucugaaaugacucc

SEQ ID NO: 398173 - RNA, 19 nt, Artificial Sequence
  Description of Artificial Sequence: Synthetic oligonucleotide
  Sense Strand Starting at position 1012 of SEQ ID NO: 315857
ucagaaacguaaucucuau

SEQ ID NO: 398174 - RNA, 19 nt, Artificial Sequence
  Description of Artificial Sequence: Synthetic oligonucleotide
  Antisense Strand to SEQ ID NO: 398173
auagagauuacguuucuga

SEQ ID NO: 398175 - RNA, 19 nt, Artificial Sequence
  Description of Artificial Sequence: Synthetic oligonucleotide
  Sense Strand Starting at position 1012 of SEQ ID NO: 315910
aacgaagugugcuuagaag

SEQ ID NO: 398176 - RNA, 19 nt, Artificial Sequence
  Description of Artificial Sequence: Synthetic oligonucleotide
  Antisense Strand to SEQ ID NO: 398175
cuucuaagcacacuucguu

SEQ ID NO: 398177 - RNA, 19 nt, Artificial Sequence
  Description of Artificial Sequence: Synthetic oligonucleotide
  Sense Strand Starting at position 1012 of SEQ ID NO: 315916
gugugcuuagaagaaaugu

SEQ ID NO: 398178 - RNA, 19 nt, Artificial Sequence
  Description of Artificial Sequence: Synthetic oligonucleotide
  Antisense Strand to SEQ ID NO: 398177
acauuucuucuaagcacac

SEQ ID NO: 398179 - RNA, 19 nt, Artificial Sequence
  Description of Artificial Sequence: Synthetic oligonucleotide
  Sense Strand Starting at position 1012 of SEQ ID NO: 315925
gaagaaaugugacacuaua

SEQ ID NO: 398180 - RNA, 19 nt, Artificial Sequence
  Description of Artificial Sequence: Synthetic oligonucleotide
  Antisense Strand to SEQ ID NO: 398179
uauagugucacauuucuuc

SEQ ID NO: 398181 - RNA, 19 nt, Artificial Sequence
  Description of Artificial Sequence: Synthetic oligonucleotide
  Sense Strand Starting at position 1012 of SEQ ID NO: 316014
ccaaaccucuguguaugua

SEQ ID NO: 398182 - RNA, 19 nt, Artificial Sequence
  Description of Artificial Sequence: Synthetic oligonucleotide
  Antisense Strand to SEQ ID NO: 398181
uacauacacagagguuugg

SEQ ID NO: 398183 - RNA, 19 nt, Artificial Sequence
  Description of Artificial Sequence: Synthetic oligonucleotide
  Sense Strand Starting at position 1012 of SEQ ID NO: 316060
uuucuuuggugaucacuga

SEQ ID NO: 398184 - RNA, 19 nt, Artificial Sequence
  Description of Artificial Sequence: Synthetic oligonucleotide
  Antisense Strand to SEQ ID NO: 398183
ucagugaucaccaaagaaa

SEQ ID NO: 398185 - RNA, 19 nt, Artificial Sequence
  Description of Artificial Sequence: Synthetic oligonucleotide
  Sense Strand Starting at position 1012 of SEQ ID NO: 316061
uucuuuggugaucacugaa

SEQ ID NO: 398186 - RNA, 19 nt, Artificial Sequence
  Description of Artificial Sequence: Synthetic oligonucleotide
  Antisense Strand to SEQ ID NO: 398185
uucagugaucaccaaagaa

SEQ ID NO: 398187 - RNA, 19 nt, Artificial Sequence
  Description of Artificial Sequence: Synthetic oligonucleotide
  Sense Strand Starting at position 1012 of SEQ ID NO: 316064
uuuggugaucacugaaaua

SEQ ID NO: 398188 - RNA, 19 nt, Artificial Sequence
  Description of Artificial Sequence: Synthetic oligonucleotide
  Antisense Strand to SEQ ID NO: 398187
uauuucagugaucaccaaa

SEQ ID NO: 398189 - RNA, 19 nt, Artificial Sequence
  Description of Artificial Sequence: Synthetic oligonucleotide
  Sense Strand Starting at position 1012 of SEQ ID NO: 316109
ccauuuauugccgaggugu

SEQ ID NO: 398190 - RNA, 19 nt, Artificial Sequence
  Description of Artificial Sequence: Synthetic oligonucleotide
  Antisense Strand to SEQ ID NO: 398189
acaccucggcaauaaaugg

SEQ ID NO: 398191 - RNA, 19 nt, Artificial Sequence
  Description of Artificial Sequence: Synthetic oligonucleotide
  Sense Strand Starting at position 1012 of SEQ ID NO: 316111
auuuauugccgagguguaa

SEQ ID NO: 398192 - RNA, 19 nt, Artificial Sequence
  Description of Artificial Sequence: Synthetic oligonucleotide
  Antisense Strand to SEQ ID NO: 398191
uuacaccucggcaauaaau

SEQ ID NO: 398193 - RNA, 19 nt, Artificial Sequence
  Description of Artificial Sequence: Synthetic oligonucleotide
  Sense Strand Starting at position 1012 of SEQ ID NO: 316115
auugccgagguguaagaau

SEQ ID NO: 398194 - RNA, 19 nt, Artificial Sequence
  Description of Artificial Sequence: Synthetic oligonucleotide
  Antisense Strand to SEQ ID NO: 398193
auucuuacaccucggcaau

SEQ ID NO: 398195 - RNA, 19 nt, Artificial Sequence
  Description of Artificial Sequence: Synthetic oligonucleotide
  Sense Strand Starting at position 1012 of SEQ ID NO: 316174
uucuguacagcauaagaga

SEQ ID NO: 398196 - RNA, 19 nt, Artificial Sequence
  Description of Artificial Sequence: Synthetic oligonucleotide
  Antisense Strand to SEQ ID NO: 398195
ucucuuaugcuguacagaa

SEQ ID NO: 398197 - RNA, 19 nt, Artificial Sequence
  Description of Artificial Sequence: Synthetic oligonucleotide
  Sense Strand Starting at position 1012 of SEQ ID NO: 316193
acuuauauuacgugcagga

SEQ ID NO: 398198 - RNA, 19 nt, Artificial Sequence
  Description of Artificial Sequence: Synthetic oligonucleotide
  Antisense Strand to SEQ ID NO: 398197
uccugcacguaauauaagu

SEQ ID NO: 398199 - RNA, 19 nt, Artificial Sequence
  Description of Artificial Sequence: Synthetic oligonucleotide
  Sense Strand Starting at position 1012 of SEQ ID NO: 316195
uuauauuacgugcaggagu

SEQ ID NO: 398200 - RNA, 19 nt, Artificial Sequence
  Description of Artificial Sequence: Synthetic oligonucleotide
  Antisense Strand to SEQ ID NO: 398199
acuccugcacguaauauaa

SEQ ID NO: 398201 - RNA, 19 nt, Artificial Sequence
  Description of Artificial Sequence: Synthetic oligonucleotide
  Sense Strand Starting at position 1012 of SEQ ID NO: 316336
uucugaugguucucuaugu

SEQ ID NO: 398202 - RNA, 19 nt, Artificial Sequence
  Description of Artificial Sequence: Synthetic oligonucleotide
  Antisense Strand to SEQ ID NO: 398201
acauagagaaccaucagaa

SEQ ID NO: 398203 - RNA, 19 nt, Artificial Sequence
  Description of Artificial Sequence: Synthetic oligonucleotide
  Sense Strand Starting at position 1012 of SEQ ID NO: 316340
gaugguucucuaugucuag

SEQ ID NO: 398204 - RNA, 19 nt, Artificial Sequence
  Description of Artificial Sequence: Synthetic oligonucleotide
  Antisense Strand to SEQ ID NO: 398203
cuagacauagagaaccauc

SEQ ID NO: 398205 - RNA, 19 nt, Artificial Sequence
  Description of Artificial Sequence: Synthetic oligonucleotide
  Sense Strand Starting at position 1012 of SEQ ID NO: 316341
augguucucuaugucuaga

SEQ ID NO: 398206 - RNA, 19 nt, Artificial Sequence
  Description of Artificial Sequence: Synthetic oligonucleotide
  Antisense Strand to SEQ ID NO: 398205
ucuagacauagagaaccau

SEQ ID NO: 398207 - RNA, 19 nt, Artificial Sequence
  Description of Artificial Sequence: Synthetic oligonucleotide
  Sense Strand Starting at position 1012 of SEQ ID NO: 316343
gguucucuaugucuagaaa

SEQ ID NO: 398208 - RNA, 19 nt, Artificial Sequence
  Description of Artificial Sequence: Synthetic oligonucleotide
  Antisense Strand to SEQ ID NO: 398207
uuucuagacauagagaacc

SEQ ID NO: 398209 - RNA, 19 nt, Artificial Sequence
  Description of Artificial Sequence: Synthetic oligonucleotide
  Sense Strand Starting at position 1012 of SEQ ID NO: 316344
guucucuaugucuagaaag

SEQ ID NO: 398210 - RNA, 19 nt, Artificial Sequence
  Description of Artificial Sequence: Synthetic oligonucleotide
  Antisense Strand to SEQ ID NO: 398209
cuuucuagacauagagaac

SEQ ID NO: 398211 - RNA, 19 nt, Artificial Sequence
  Description of Artificial Sequence: Synthetic oligonucleotide
  Sense Strand Starting at position 1012 of SEQ ID NO: 317340
cucagagcugcucgggaua

SEQ ID NO: 398212 - RNA, 19 nt, Artificial Sequence
  Description of Artificial Sequence: Synthetic oligonucleotide
  Antisense Strand to SEQ ID NO: 398211
uaucccgagcagcucugag

SEQ ID NO: 398213 - RNA, 19 nt, Artificial Sequence
  Description of Artificial Sequence: Synthetic oligonucleotide
  Sense Strand Starting at position 1012 of SEQ ID NO: 317354
ggauauccuucuguucgua

SEQ ID NO: 398214 - RNA, 19 nt, Artificial Sequence
  Description of Artificial Sequence: Synthetic oligonucleotide
  Antisense Strand to SEQ ID NO: 398213
uacgaacagaaggauaucc

SEQ ID NO: 398215 - RNA, 19 nt, Artificial Sequence
  Description of Artificial Sequence: Synthetic oligonucleotide
  Sense Strand Starting at position 1012 of SEQ ID NO: 317369
cguagugcgaguguacuua

SEQ ID NO: 398216 - RNA, 19 nt, Artificial Sequence
  Description of Artificial Sequence: Synthetic oligonucleotide
  Antisense Strand to SEQ ID NO: 398215
uaaguacacucgcacuacg

SEQ ID NO: 398217 - RNA, 19 nt, Artificial Sequence
  Description of Artificial Sequence: Synthetic oligonucleotide
  Sense Strand Starting at position 1012 of SEQ ID NO: 318484
aauaguuuacaguggagaa

SEQ ID NO: 398218 - RNA, 19 nt, Artificial Sequence
  Description of Artificial Sequence: Synthetic oligonucleotide
  Antisense Strand to SEQ ID NO: 398217
uucuccacuguaaacuauu

SEQ ID NO: 398219 - RNA, 19 nt, Artificial Sequence
  Description of Artificial Sequence: Synthetic oligonucleotide
  Sense Strand Starting at position 1012 of SEQ ID NO: 318485
auaguuuacaguggagaau

SEQ ID NO: 398220 - RNA, 19 nt, Artificial Sequence
  Description of Artificial Sequence: Synthetic oligonucleotide
  Antisense Strand to SEQ ID NO: 398219
auucuccacuguaaacuau

SEQ ID NO: 398221 - RNA, 19 nt, Artificial Sequence
  Description of Artificial Sequence: Synthetic oligonucleotide
  Sense Strand Starting at position 1012 of SEQ ID NO: 318906
ggaugaguccgcagugcaa

SEQ ID NO: 398222 - RNA, 19 nt, Artificial Sequence
  Description of Artificial Sequence: Synthetic oligonucleotide
  Antisense Strand to SEQ ID NO: 398221
uugcacugcggacucaucc

SEQ ID NO: 398223 - RNA, 19 nt, Artificial Sequence
  Description of Artificial Sequence: Synthetic oligonucleotide
  Sense Strand Starting at position 1013 of SEQ ID NO: 315251
gugguauaggccuauauau

SEQ ID NO: 398224 - RNA, 19 nt, Artificial Sequence
  Description of Artificial Sequence: Synthetic oligonucleotide
  Antisense Strand to SEQ ID NO: 398223
auauauaggccuauaccac

SEQ ID NO: 398225 - RNA, 19 nt, Artificial Sequence
  Description of Artificial Sequence: Synthetic oligonucleotide
  Sense Strand Starting at position 1013 of SEQ ID NO: 315253
gguauaggccuauauauuc

SEQ ID NO: 398226 - RNA, 19 nt, Artificial Sequence
  Description of Artificial Sequence: Synthetic oligonucleotide
  Antisense Strand to SEQ ID NO: 398225
gaauauauaggccuauacc

SEQ ID NO: 398227 - RNA, 19 nt, Artificial Sequence
  Description of Artificial Sequence: Synthetic oligonucleotide
  Sense Strand Starting at position 1013 of SEQ ID NO: 315295
agcggaaauaguuaccuga

SEQ ID NO: 398228 - RNA, 19 nt, Artificial Sequence
  Description of Artificial Sequence: Synthetic oligonucleotide
  Antisense Strand to SEQ ID NO: 398227
ucagguaacuauuuccgcu

SEQ ID NO: 398229 - RNA, 19 nt, Artificial Sequence
  Description of Artificial Sequence: Synthetic oligonucleotide
  Sense Strand Starting at position 1013 of SEQ ID NO: 315297
cggaaauaguuaccugaug

SEQ ID NO: 398230 - RNA, 19 nt, Artificial Sequence
  Description of Artificial Sequence: Synthetic oligonucleotide
  Antisense Strand to SEQ ID NO: 398229
caucagguaacuauuuccg

SEQ ID NO: 398231 - RNA, 19 nt, Artificial Sequence
  Description of Artificial Sequence: Synthetic oligonucleotide
  Sense Strand Starting at position 1013 of SEQ ID NO: 315413
uaguguuacugccuugaug

SEQ ID NO: 398232 - RNA, 19 nt, Artificial Sequence
  Description of Artificial Sequence: Synthetic oligonucleotide
  Antisense Strand to SEQ ID NO: 398231
caucaaggcaguaacacua

SEQ ID NO: 398233 - RNA, 19 nt, Artificial Sequence
  Description of Artificial Sequence: Synthetic oligonucleotide
  Sense Strand Starting at position 1013 of SEQ ID NO: 315415
guguuacugccuugaugga

SEQ ID NO: 398234 - RNA, 19 nt, Artificial Sequence
  Description of Artificial Sequence: Synthetic oligonucleotide
  Antisense Strand to SEQ ID NO: 398233
uccaucaaggcaguaacac

SEQ ID NO: 398235 - RNA, 19 nt, Artificial Sequence
  Description of Artificial Sequence: Synthetic oligonucleotide
  Sense Strand Starting at position 1013 of SEQ ID NO: 315553
acucaaugcuacuuacgau

SEQ ID NO: 398236 - RNA, 19 nt, Artificial Sequence
  Description of Artificial Sequence: Synthetic oligonucleotide
  Antisense Strand to SEQ ID NO: 398235
aucguaaguagcauugagu

SEQ ID NO: 398237 - RNA, 19 nt, Artificial Sequence
  Description of Artificial Sequence: Synthetic oligonucleotide
  Sense Strand Starting at position 1013 of SEQ ID NO: 315667
gaggauaccugggaaauua

SEQ ID NO: 398238 - RNA, 19 nt, Artificial Sequence
  Description of Artificial Sequence: Synthetic oligonucleotide
  Antisense Strand to SEQ ID NO: 398237
uaauuucccagguauccuc

SEQ ID NO: 398239 - RNA, 19 nt, Artificial Sequence
  Description of Artificial Sequence: Synthetic oligonucleotide
  Sense Strand Starting at position 1013 of SEQ ID NO: 315689
uguacagacugguauuaaa

SEQ ID NO: 398240 - RNA, 19 nt, Artificial Sequence
  Description of Artificial Sequence: Synthetic oligonucleotide
  Antisense Strand to SEQ ID NO: 398239
uuuaauaccagucuguaca

SEQ ID NO: 398241 - RNA, 19 nt, Artificial Sequence
  Description of Artificial Sequence: Synthetic oligonucleotide
  Sense Strand Starting at position 1013 of SEQ ID NO: 315692
acagacugguauuaaauau

SEQ ID NO: 398242 - RNA, 19 nt, Artificial Sequence
  Description of Artificial Sequence: Synthetic oligonucleotide
  Antisense Strand to SEQ ID NO: 398241
auauuuaauaccagucugu

SEQ ID NO: 398243 - RNA, 19 nt, Artificial Sequence
  Description of Artificial Sequence: Synthetic oligonucleotide
  Sense Strand Starting at position 1013 of SEQ ID NO: 315744
aaguuacugucaucgucau

SEQ ID NO: 398244 - RNA, 19 nt, Artificial Sequence
  Description of Artificial Sequence: Synthetic oligonucleotide
  Antisense Strand to SEQ ID NO: 398243
augacgaugacaguaacuu

SEQ ID NO: 398245 - RNA, 19 nt, Artificial Sequence
  Description of Artificial Sequence: Synthetic oligonucleotide
  Sense Strand Starting at position 1013 of SEQ ID NO: 315750
cugucaucgucaucuuuaa

SEQ ID NO: 398246 - RNA, 19 nt, Artificial Sequence
  Description of Artificial Sequence: Synthetic oligonucleotide
  Antisense Strand to SEQ ID NO: 398245
uuaaagaugacgaugacag

SEQ ID NO: 398247 - RNA, 19 nt, Artificial Sequence
  Description of Artificial Sequence: Synthetic oligonucleotide
  Sense Strand Starting at position 1013 of SEQ ID NO: 315762
ucuuuaaagucagucuugu

SEQ ID NO: 398248 - RNA, 19 nt, Artificial Sequence
  Description of Artificial Sequence: Synthetic oligonucleotide
  Antisense Strand to SEQ ID NO: 398247
acaagacugacuuuaaaga

SEQ ID NO: 398249 - RNA, 19 nt, Artificial Sequence
  Description of Artificial Sequence: Synthetic oligonucleotide
  Sense Strand Starting at position 1013 of SEQ ID NO: 315823
agugcuuugggucgaagca

SEQ ID NO: 398250 - RNA, 19 nt, Artificial Sequence
  Description of Artificial Sequence: Synthetic oligonucleotide
  Antisense Strand to SEQ ID NO: 398249
ugcuucgacccaaagcacu

SEQ ID NO: 398251 - RNA, 19 nt, Artificial Sequence
  Description of Artificial Sequence: Synthetic oligonucleotide
  Sense Strand Starting at position 1013 of SEQ ID NO: 315824
gugcuuugggucgaagcaa

SEQ ID NO: 398252 - RNA, 19 nt, Artificial Sequence
  Description of Artificial Sequence: Synthetic oligonucleotide
  Antisense Strand to SEQ ID NO: 398251
uugcuucgacccaaagcac

SEQ ID NO: 398253 - RNA, 19 nt, Artificial Sequence
  Description of Artificial Sequence: Synthetic oligonucleotide
  Sense Strand Starting at position 1013 of SEQ ID NO: 315839
gcaauucucgcuccucagu

SEQ ID NO: 398254 - RNA, 19 nt, Artificial Sequence
  Description of Artificial Sequence: Synthetic oligonucleotide
  Antisense Strand to SEQ ID NO: 398253
acugaggagcgagaauugc

SEQ ID NO: 398255 - RNA, 19 nt, Artificial Sequence
  Description of Artificial Sequence: Synthetic oligonucleotide
  Sense Strand Starting at position 1013 of SEQ ID NO: 316227
ggccaaaguccuuagagca

SEQ ID NO: 398256 - RNA, 19 nt, Artificial Sequence
  Description of Artificial Sequence: Synthetic oligonucleotide
  Antisense Strand to SEQ ID NO: 398255
ugcucuaaggacuuuggcc

SEQ ID NO: 398257 - RNA, 19 nt, Artificial Sequence
  Description of Artificial Sequence: Synthetic oligonucleotide
  Sense Strand Starting at position 1013 of SEQ ID NO: 316417
ugggaaagaucuuccucca

SEQ ID NO: 398258 - RNA, 19 nt, Artificial Sequence
  Description of Artificial Sequence: Synthetic oligonucleotide
  Antisense Strand to SEQ ID NO: 398257
uggaggaagaucuuuccca

SEQ ID NO: 398259 - RNA, 19 nt, Artificial Sequence
  Description of Artificial Sequence: Synthetic oligonucleotide
  Sense Strand Starting at position 1013 of SEQ ID NO: 316546
cccugcuuucuucuucgua

SEQ ID NO: 398260 - RNA, 19 nt, Artificial Sequence
  Description of Artificial Sequence: Synthetic oligonucleotide
  Antisense Strand to SEQ ID NO: 398259
uacgaagaagaaagcaggg

SEQ ID NO: 398261 - RNA, 19 nt, Artificial Sequence
  Description of Artificial Sequence: Synthetic oligonucleotide
  Sense Strand Starting at position 1013 of SEQ ID NO: 316584
acaauuauguaacucguuu

SEQ ID NO: 398262 - RNA, 19 nt, Artificial Sequence
  Description of Artificial Sequence: Synthetic oligonucleotide
  Antisense Strand to SEQ ID NO: 398261
aaacgaguuacauaauugu

SEQ ID NO: 398263 - RNA, 19 nt, Artificial Sequence
  Description of Artificial Sequence: Synthetic oligonucleotide
  Sense Strand Starting at position 1013 of SEQ ID NO: 316588
uuauguaacucguuuaucu

SEQ ID NO: 398264 - RNA, 19 nt, Artificial Sequence
  Description of Artificial Sequence: Synthetic oligonucleotide
  Antisense Strand to SEQ ID NO: 398263
agauaaacgaguuacauaa

SEQ ID NO: 398265 - RNA, 19 nt, Artificial Sequence
  Description of Artificial Sequence: Synthetic oligonucleotide
  Sense Strand Starting at position 1013 of SEQ ID NO: 316590
auguaacucguuuaucuuu

SEQ ID NO: 398266 - RNA, 19 nt, Artificial Sequence
  Description of Artificial Sequence: Synthetic oligonucleotide
  Antisense Strand to SEQ ID NO: 398265
aaagauaaacgaguuacau

SEQ ID NO: 398267 - RNA, 19 nt, Artificial Sequence
  Description of Artificial Sequence: Synthetic oligonucleotide
  Sense Strand Starting at position 1013 of SEQ ID NO: 316592
guaacucguuuaucuuuau

SEQ ID NO: 398268 - RNA, 19 nt, Artificial Sequence
  Description of Artificial Sequence: Synthetic oligonucleotide
  Antisense Strand to SEQ ID NO: 398267
auaaagauaaacgaguuac

SEQ ID NO: 398269 - RNA, 19 nt, Artificial Sequence
  Description of Artificial Sequence: Synthetic oligonucleotide
  Sense Strand Starting at position 1013 of SEQ ID NO: 316596
cucguuuaucuuuaucugu

SEQ ID NO: 398270 - RNA, 19 nt, Artificial Sequence
  Description of Artificial Sequence: Synthetic oligonucleotide
  Antisense Strand to SEQ ID NO: 398269
acagauaaagauaaacgag

SEQ ID NO: 398271 - RNA, 19 nt, Artificial Sequence
  Description of Artificial Sequence: Synthetic oligonucleotide
  Sense Strand Starting at position 1013 of SEQ ID NO: 316713
gggcgugcgacguacaauu

SEQ ID NO: 398272 - RNA, 19 nt, Artificial Sequence
  Description of Artificial Sequence: Synthetic oligonucleotide
  Antisense Strand to SEQ ID NO: 398271
aauuguacgucgcacgccc

SEQ ID NO: 398273 - RNA, 19 nt, Artificial Sequence
  Description of Artificial Sequence: Synthetic oligonucleotide
  Sense Strand Starting at position 1013 of SEQ ID NO: 317318
ugguguccacuccgggaaa

SEQ ID NO: 398274 - RNA, 19 nt, Artificial Sequence
  Description of Artificial Sequence: Synthetic oligonucleotide
  Antisense Strand to SEQ ID NO: 398273
uuucccggaguggacacca

SEQ ID NO: 398275 - RNA, 19 nt, Artificial Sequence
  Description of Artificial Sequence: Synthetic oligonucleotide
  Sense Strand Starting at position 1013 of SEQ ID NO: 317331
gggaaagccgugugugcaa

SEQ ID NO: 398276 - RNA, 19 nt, Artificial Sequence
  Description of Artificial Sequence: Synthetic oligonucleotide
  Antisense Strand to SEQ ID NO: 398275
uugcacacacggcuuuccc

SEQ ID NO: 398277 - RNA, 19 nt, Artificial Sequence
  Description of Artificial Sequence: Synthetic oligonucleotide
  Sense Strand Starting at position 1013 of SEQ ID NO: 317726
gcaacugcgcccgagucau

SEQ ID NO: 398278 - RNA, 19 nt, Artificial Sequence
  Description of Artificial Sequence: Synthetic oligonucleotide
  Antisense Strand to SEQ ID NO: 398277
augacucgggcgcaguugc

SEQ ID NO: 398279 - RNA, 19 nt, Artificial Sequence
  Description of Artificial Sequence: Synthetic oligonucleotide
  Sense Strand Starting at position 1013 of SEQ ID NO: 318268
cucagugucccuugugacu

SEQ ID NO: 398280 - RNA, 19 nt, Artificial Sequence
  Description of Artificial Sequence: Synthetic oligonucleotide
  Antisense Strand to SEQ ID NO: 398279
agucacaagggacacugag

SEQ ID NO: 398281 - RNA, 19 nt, Artificial Sequence
  Description of Artificial Sequence: Synthetic oligonucleotide
  Sense Strand Starting at position 1013 of SEQ ID NO: 318294
cauaguagguguucuaucu

SEQ ID NO: 398282 - RNA, 19 nt, Artificial Sequence
  Description of Artificial Sequence: Synthetic oligonucleotide
  Antisense Strand to SEQ ID NO: 398281
agauagaacaccuacuaug

SEQ ID NO: 398283 - RNA, 19 nt, Artificial Sequence
  Description of Artificial Sequence: Synthetic oligonucleotide
  Sense Strand Starting at position 1013 of SEQ ID NO: 318377
uuacauaugucaucucaug

SEQ ID NO: 398284 - RNA, 19 nt, Artificial Sequence
  Description of Artificial Sequence: Synthetic oligonucleotide
  Antisense Strand to SEQ ID NO: 398283
caugagaugacauauguaa

SEQ ID NO: 398285 - RNA, 19 nt, Artificial Sequence
  Description of Artificial Sequence: Synthetic oligonucleotide
  Sense Strand Starting at position 1013 of SEQ ID NO: 318401
cucacacaauccugagaug

SEQ ID NO: 398286 - RNA, 19 nt, Artificial Sequence
  Description of Artificial Sequence: Synthetic oligonucleotide
  Antisense Strand to SEQ ID NO: 398285
caucucaggauugugugag

SEQ ID NO: 398287 - RNA, 19 nt, Artificial Sequence
  Description of Artificial Sequence: Synthetic oligonucleotide
  Sense Strand Starting at position 1013 of SEQ ID NO: 318404
acacaauccugagauggcu

SEQ ID NO: 398288 - RNA, 19 nt, Artificial Sequence
  Description of Artificial Sequence: Synthetic oligonucleotide
  Antisense Strand to SEQ ID NO: 398287
agccaucucaggauugugu

SEQ ID NO: 398289 - RNA, 19 nt, Artificial Sequence
  Description of Artificial Sequence: Synthetic oligonucleotide
  Sense Strand Starting at position 1013 of SEQ ID NO: 318410
uccugagauggcuauuacu

SEQ ID NO: 398290 - RNA, 19 nt, Artificial Sequence
  Description of Artificial Sequence: Synthetic oligonucleotide
  Antisense Strand to SEQ ID NO: 398289
aguaauagccaucucagga

SEQ ID NO: 398291 - RNA, 19 nt, Artificial Sequence
  Description of Artificial Sequence: Synthetic oligonucleotide
  Sense Strand Starting at position 1013 of SEQ ID NO: 318413
ugagauggcuauuacuaug

SEQ ID NO: 398292 - RNA, 19 nt, Artificial Sequence
  Description of Artificial Sequence: Synthetic oligonucleotide
  Antisense Strand to SEQ ID NO: 398291
cauaguaauagccaucuca

SEQ ID NO: 398293 - RNA, 19 nt, Artificial Sequence
  Description of Artificial Sequence: Synthetic oligonucleotide
  Sense Strand Starting at position 1013 of SEQ ID NO: 318418
uggcuauuacuaugaucau

SEQ ID NO: 398294 - RNA, 19 nt, Artificial Sequence
  Description of Artificial Sequence: Synthetic oligonucleotide
  Antisense Strand to SEQ ID NO: 398293
augaucauaguaauagcca

SEQ ID NO: 398295 - RNA, 19 nt, Artificial Sequence
  Description of Artificial Sequence: Synthetic oligonucleotide
  Sense Strand Starting at position 1013 of SEQ ID NO: 318755
aggcuaaguuauuugcuca

SEQ ID NO: 398296 - RNA, 19 nt, Artificial Sequence
  Description of Artificial Sequence: Synthetic oligonucleotide
  Antisense Strand to SEQ ID NO: 398295
ugagcaaauaacuuagccu

SEQ ID NO: 398297 - RNA, 19 nt, Artificial Sequence
  Description of Artificial Sequence: Synthetic oligonucleotide
  Sense Strand Starting at position 1013 of SEQ ID NO: 318825
uccauacugcacuguauua

SEQ ID NO: 398298 - RNA, 19 nt, Artificial Sequence
  Description of Artificial Sequence: Synthetic oligonucleotide
  Antisense Strand to SEQ ID NO: 398297
uaauacagugcaguaugga

SEQ ID NO: 398299 - RNA, 19 nt, Artificial Sequence
  Description of Artificial Sequence: Synthetic oligonucleotide
  Sense Strand Starting at position 1013 of SEQ ID NO: 319060
gggaucuccuuccucaauu

SEQ ID NO: 398300 - RNA, 19 nt, Artificial Sequence
  Description of Artificial Sequence: Synthetic oligonucleotide
  Antisense Strand to SEQ ID NO: 398299
aauugaggaaggagauccc

SEQ ID NO: 398301 - RNA, 19 nt, Artificial Sequence
  Description of Artificial Sequence: Synthetic oligonucleotide
  Sense Strand Starting at position 1013 of SEQ ID NO: 319187
gcuuguuccagauguggga

SEQ ID NO: 398302 - RNA, 19 nt, Artificial Sequence
  Description of Artificial Sequence: Synthetic oligonucleotide
  Antisense Strand to SEQ ID NO: 398301
ucccacaucuggaacaagc

SEQ ID NO: 398303 - RNA, 19 nt, Artificial Sequence
  Description of Artificial Sequence: Synthetic oligonucleotide
  Sense Strand Starting at position 1014 of SEQ ID NO: 315327
cccagcauguauguugaaa

SEQ ID NO: 398304 - RNA, 19 nt, Artificial Sequence
  Description of Artificial Sequence: Synthetic oligonucleotide
  Antisense Strand to SEQ ID NO: 398303
uuucaacauacaugcuggg

SEQ ID NO: 398305 - RNA, 19 nt, Artificial Sequence
  Description of Artificial Sequence: Synthetic oligonucleotide
  Sense Strand Starting at position 1014 of SEQ ID NO: 315574
cugcaaugagccgauauca

SEQ ID NO: 398306 - RNA, 19 nt, Artificial Sequence
  Description of Artificial Sequence: Synthetic oligonucleotide
  Antisense Strand to SEQ ID NO: 398305
ugauaucggcucauugcag

SEQ ID NO: 398307 - RNA, 19 nt, Artificial Sequence
  Description of Artificial Sequence: Synthetic oligonucleotide
  Sense Strand Starting at position 1014 of SEQ ID NO: 315629
gcgagagacugucuugaag

SEQ ID NO: 398308 - RNA, 19 nt, Artificial Sequence
  Description of Artificial Sequence: Synthetic oligonucleotide
  Antisense Strand to SEQ ID NO: 398307
cuucaagacagucucucgc

SEQ ID NO: 398309 - RNA, 19 nt, Artificial Sequence
  Description of Artificial Sequence: Synthetic oligonucleotide
  Sense Strand Starting at position 1014 of SEQ ID NO: 315691
gggcgauuucuauggcuca

SEQ ID NO: 398310 - RNA, 19 nt, Artificial Sequence
  Description of Artificial Sequence: Synthetic oligonucleotide
  Antisense Strand to SEQ ID NO: 398309
ugagccauagaaaucgccc

SEQ ID NO: 398311 - RNA, 19 nt, Artificial Sequence
  Description of Artificial Sequence: Synthetic oligonucleotide
  Sense Strand Starting at position 1014 of SEQ ID NO: 315722
aucucuuaacaguggaguu

SEQ ID NO: 398312 - RNA, 19 nt, Artificial Sequence
  Description of Artificial Sequence: Synthetic oligonucleotide
  Antisense Strand to SEQ ID NO: 398311
aacuccacuguuaagagau

SEQ ID NO: 398313 - RNA, 19 nt, Artificial Sequence
  Description of Artificial Sequence: Synthetic oligonucleotide
  Sense Strand Starting at position 1014 of SEQ ID NO: 316061
gucuuucuaugucucacaa

SEQ ID NO: 398314 - RNA, 19 nt, Artificial Sequence
  Description of Artificial Sequence: Synthetic oligonucleotide
  Antisense Strand to SEQ ID NO: 398313
uugugagacauagaaagac

SEQ ID NO: 398315 - RNA, 19 nt, Artificial Sequence
  Description of Artificial Sequence: Synthetic oligonucleotide
  Sense Strand Starting at position 1014 of SEQ ID NO: 316073
cucacaaugucuguaagcu

SEQ ID NO: 398316 - RNA, 19 nt, Artificial Sequence
  Description of Artificial Sequence: Synthetic oligonucleotide
  Antisense Strand to SEQ ID NO: 398315
agcuuacagacauugugag

SEQ ID NO: 398317 - RNA, 19 nt, Artificial Sequence
  Description of Artificial Sequence: Synthetic oligonucleotide
  Sense Strand Starting at position 1014 of SEQ ID NO: 316074
ucacaaugucuguaagcuu

SEQ ID NO: 398318 - RNA, 19 nt, Artificial Sequence
  Description of Artificial Sequence: Synthetic oligonucleotide
  Antisense Strand to SEQ ID NO: 398317
aagcuuacagacauuguga

SEQ ID NO: 398319 - RNA, 19 nt, Artificial Sequence
  Description of Artificial Sequence: Synthetic oligonucleotide
  Sense Strand Starting at position 1014 of SEQ ID NO: 316081
gucuguaagcuuuauuucu

SEQ ID NO: 398320 - RNA, 19 nt, Artificial Sequence
  Description of Artificial Sequence: Synthetic oligonucleotide
  Antisense Strand to SEQ ID NO: 398319
agaaauaaagcuuacagac

SEQ ID NO: 398321 - RNA, 19 nt, Artificial Sequence
  Description of Artificial Sequence: Synthetic oligonucleotide
  Sense Strand Starting at position 1014 of SEQ ID NO: 316304
ucucaaguuuacucuaugu

SEQ ID NO: 398322 - RNA, 19 nt, Artificial Sequence
  Description of Artificial Sequence: Synthetic oligonucleotide
  Antisense Strand to SEQ ID NO: 398321
acauagaguaaacuugaga

SEQ ID NO: 398323 - RNA, 19 nt, Artificial Sequence
  Description of Artificial Sequence: Synthetic oligonucleotide
  Sense Strand Starting at position 1014 of SEQ ID NO: 316308
aaguuuacucuauguggca

SEQ ID NO: 398324 - RNA, 19 nt, Artificial Sequence
  Description of Artificial Sequence: Synthetic oligonucleotide
  Antisense Strand to SEQ ID NO: 398323
ugccacauagaguaaacuu

SEQ ID NO: 398325 - RNA, 19 nt, Artificial Sequence
  Description of Artificial Sequence: Synthetic oligonucleotide
  Sense Strand Starting at position 1014 of SEQ ID NO: 316517
auuccaucauugguucuua

SEQ ID NO: 398326 - RNA, 19 nt, Artificial Sequence
  Description of Artificial Sequence: Synthetic oligonucleotide
  Antisense Strand to SEQ ID NO: 398325
uaagaaccaaugauggaau

SEQ ID NO: 398327 - RNA, 19 nt, Artificial Sequence
  Description of Artificial Sequence: Synthetic oligonucleotide
  Sense Strand Starting at position 1014 of SEQ ID NO: 316637
uugguagcuuuaucucuaa

SEQ ID NO: 398328 - RNA, 19 nt, Artificial Sequence
  Description of Artificial Sequence: Synthetic oligonucleotide
  Antisense Strand to SEQ ID NO: 398327
uuagagauaaagcuaccaa

SEQ ID NO: 398329 - RNA, 19 nt, Artificial Sequence
  Description of Artificial Sequence: Synthetic oligonucleotide
  Sense Strand Starting at position 1014 of SEQ ID NO: 316659
aaguaagugccuuagccaa

SEQ ID NO: 398330 - RNA, 19 nt, Artificial Sequence
  Description of Artificial Sequence: Synthetic oligonucleotide
  Antisense Strand to SEQ ID NO: 398329
uuggcuaaggcacuuacuu

SEQ ID NO: 398331 - RNA, 19 nt, Artificial Sequence
  Description of Artificial Sequence: Synthetic oligonucleotide
  Sense Strand Starting at position 1014 of SEQ ID NO: 316760
ucaauagccuguguaagua

SEQ ID NO: 398332 - RNA, 19 nt, Artificial Sequence
  Description of Artificial Sequence: Synthetic oligonucleotide
  Antisense Strand to SEQ ID NO: 398331
uacuuacacaggcuauuga

SEQ ID NO: 398333 - RNA, 19 nt, Artificial Sequence
  Description of Artificial Sequence: Synthetic oligonucleotide
  Sense Strand Starting at position 1014 of SEQ ID NO: 316768
cuguguaaguaccuaugaa

SEQ ID NO: 398334 - RNA, 19 nt, Artificial Sequence
  Description of Artificial Sequence: Synthetic oligonucleotide
  Antisense Strand to SEQ ID NO: 398333
uucauagguacuuacacag

SEQ ID NO: 398335 - RNA, 19 nt, Artificial Sequence
  Description of Artificial Sequence: Synthetic oligonucleotide
  Sense Strand Starting at position 1014 of SEQ ID NO: 316769
uguguaaguaccuaugaag

SEQ ID NO: 398336 - RNA, 19 nt, Artificial Sequence
  Description of Artificial Sequence: Synthetic oligonucleotide
  Antisense Strand to SEQ ID NO: 398335
cuucauagguacuuacaca

SEQ ID NO: 398337 - RNA, 19 nt, Artificial Sequence
  Description of Artificial Sequence: Synthetic oligonucleotide
  Sense Strand Starting at position 1014 of SEQ ID NO: 317026
uguacuuacagcuggagua

SEQ ID NO: 398338 - RNA, 19 nt, Artificial Sequence
  Description of Artificial Sequence: Synthetic oligonucleotide
  Antisense Strand to SEQ ID NO: 398337
uacuccagcuguaaguaca

SEQ ID NO: 398339 - RNA, 19 nt, Artificial Sequence
  Description of Artificial Sequence: Synthetic oligonucleotide
  Sense Strand Starting at position 1014 of SEQ ID NO: 317027
guacuuacagcuggaguaa

SEQ ID NO: 398340 - RNA, 19 nt, Artificial Sequence
  Description of Artificial Sequence: Synthetic oligonucleotide
  Antisense Strand to SEQ ID NO: 398339
uuacuccagcuguaaguac

SEQ ID NO: 398341 - RNA, 19 nt, Artificial Sequence
  Description of Artificial Sequence: Synthetic oligonucleotide
  Sense Strand Starting at position 1014 of SEQ ID NO: 317264
ucauuccauugaguuaagu

SEQ ID NO: 398342 - RNA, 19 nt, Artificial Sequence
  Description of Artificial Sequence: Synthetic oligonucleotide
  Antisense Strand to SEQ ID NO: 398341
acuuaacucaauggaauga

SEQ ID NO: 398343 - RNA, 19 nt, Artificial Sequence
  Description of Artificial Sequence: Synthetic oligonucleotide
  Sense Strand Starting at position 1014 of SEQ ID NO: 317325
gugucaggcauugagcuua

SEQ ID NO: 398344 - RNA, 19 nt, Artificial Sequence
  Description of Artificial Sequence: Synthetic oligonucleotide
  Antisense Strand to SEQ ID NO: 398343
uaagcucaaugccugacac

SEQ ID NO: 398345 - RNA, 19 nt, Artificial Sequence
  Description of Artificial Sequence: Synthetic oligonucleotide
  Sense Strand Starting at position 1014 of SEQ ID NO: 317337
gagcuuacaguguagugaa

SEQ ID NO: 398346 - RNA, 19 nt, Artificial Sequence
  Description of Artificial Sequence: Synthetic oligonucleotide
  Antisense Strand to SEQ ID NO: 398345
uucacuacacuguaagcuc

SEQ ID NO: 398347 - RNA, 19 nt, Artificial Sequence
  Description of Artificial Sequence: Synthetic oligonucleotide
  Sense Strand Starting at position 1014 of SEQ ID NO: 317344
caguguagugaaggguaaa

SEQ ID NO: 398348 - RNA, 19 nt, Artificial Sequence
  Description of Artificial Sequence: Synthetic oligonucleotide
  Antisense Strand to SEQ ID NO: 398347
uuuacccuucacuacacug

SEQ ID NO: 398349 - RNA, 19 nt, Artificial Sequence
  Description of Artificial Sequence: Synthetic oligonucleotide
  Sense Strand Starting at position 1014 of SEQ ID NO: 317432
ggcagaguaaccgaguaau

SEQ ID NO: 398350 - RNA, 19 nt, Artificial Sequence
  Description of Artificial Sequence: Synthetic oligonucleotide
  Antisense Strand to SEQ ID NO: 398349
auuacucgguuacucugcc

SEQ ID NO: 398351 - RNA, 19 nt, Artificial Sequence
  Description of Artificial Sequence: Synthetic oligonucleotide
  Sense Strand Starting at position 1014 of SEQ ID NO: 317458
cacgaaauuagcgaaugga

SEQ ID NO: 398352 - RNA, 19 nt, Artificial Sequence
  Description of Artificial Sequence: Synthetic oligonucleotide
  Antisense Strand to SEQ ID NO: 398351
uccauucgcuaauuucgug

SEQ ID NO: 398353 - RNA, 19 nt, Artificial Sequence
  Description of Artificial Sequence: Synthetic oligonucleotide
  Sense Strand Starting at position 1014 of SEQ ID NO: 317461
gaaauuagcgaauggaaau

SEQ ID NO: 398354 - RNA, 19 nt, Artificial Sequence
  Description of Artificial Sequence: Synthetic oligonucleotide
  Antisense Strand to SEQ ID NO: 398353
auuuccauucgcuaauuuc

SEQ ID NO: 398355 - RNA, 19 nt, Artificial Sequence
  Description of Artificial Sequence: Synthetic oligonucleotide
  Sense Strand Starting at position 1014 of SEQ ID NO: 317487
uucucaagauaggaauuaa

SEQ ID NO: 398356 - RNA, 19 nt, Artificial Sequence
  Description of Artificial Sequence: Synthetic oligonucleotide
  Antisense Strand to SEQ ID NO: 398355
uuaauuccuaucuugagaa

SEQ ID NO: 398357 - RNA, 19 nt, Artificial Sequence
  Description of Artificial Sequence: Synthetic oligonucleotide
  Sense Strand Starting at position 1014 of SEQ ID NO: 317549
agcagccauguuuggaaua

SEQ ID NO: 398358 - RNA, 19 nt, Artificial Sequence
  Description of Artificial Sequence: Synthetic oligonucleotide
  Antisense Strand to SEQ ID NO: 398357
uauuccaaacauggcugcu

SEQ ID NO: 398359 - RNA, 19 nt, Artificial Sequence
  Description of Artificial Sequence: Synthetic oligonucleotide
  Sense Strand Starting at position 1014 of SEQ ID NO: 317554
ccauguuuggaauaugcaa

SEQ ID NO: 398360 - RNA, 19 nt, Artificial Sequence
  Description of Artificial Sequence: Synthetic oligonucleotide
  Antisense Strand to SEQ ID NO: 398359
uugcauauuccaaacaugg

SEQ ID NO: 398361 - RNA, 19 nt, Artificial Sequence
  Description of Artificial Sequence: Synthetic oligonucleotide
  Sense Strand Starting at position 1014 of SEQ ID NO: 317658
ucaccacuuguuugucuaa

SEQ ID NO: 398362 - RNA, 19 nt, Artificial Sequence
  Description of Artificial Sequence: Synthetic oligonucleotide
  Antisense Strand to SEQ ID NO: 398361
uuagacaaacaagugguga

SEQ ID NO: 398363 - RNA, 19 nt, Artificial Sequence
  Description of Artificial Sequence: Synthetic oligonucleotide
  Sense Strand Starting at position 1014 of SEQ ID NO: 317807
ggauguuagcccgcuuucu

SEQ ID NO: 398364 - RNA, 19 nt, Artificial Sequence
  Description of Artificial Sequence: Synthetic oligonucleotide
  Antisense Strand to SEQ ID NO: 398363
agaaagcgggcuaacaucc

SEQ ID NO: 398365 - RNA, 19 nt, Artificial Sequence
  Description of Artificial Sequence: Synthetic oligonucleotide
  Sense Strand Starting at position 1014 of SEQ ID NO: 318149
aaaugacguccuuauguac

SEQ ID NO: 398366 - RNA, 19 nt, Artificial Sequence
  Description of Artificial Sequence: Synthetic oligonucleotide
  Antisense Strand to SEQ ID NO: 398365
guacauaaggacgucauuu

SEQ ID NO: 398367 - RNA, 19 nt, Artificial Sequence
  Description of Artificial Sequence: Synthetic oligonucleotide
  Sense Strand Starting at position 1014 of SEQ ID NO: 318495
uaggaagguuuguucgaca

SEQ ID NO: 398368 - RNA, 19 nt, Artificial Sequence
  Description of Artificial Sequence: Synthetic oligonucleotide
  Antisense Strand to SEQ ID NO: 398367
ugucgaacaaaccuuccua

SEQ ID NO: 398369 - RNA, 19 nt, Artificial Sequence
  Description of Artificial Sequence: Synthetic oligonucleotide
  Sense Strand Starting at position 1014 of SEQ ID NO: 318500
agguuuguucgacacaaca

SEQ ID NO: 398370 - RNA, 19 nt, Artificial Sequence
  Description of Artificial Sequence: Synthetic oligonucleotide
  Antisense Strand to SEQ ID NO: 398369
uguugugucgaacaaaccu

SEQ ID NO: 398371 - RNA, 19 nt, Artificial Sequence
  Description of Artificial Sequence: Synthetic oligonucleotide
  Sense Strand Starting at position 1014 of SEQ ID NO: 318516
acaaauuguuagguaaaca

SEQ ID NO: 398372 - RNA, 19 nt, Artificial Sequence
  Description of Artificial Sequence: Synthetic oligonucleotide
  Antisense Strand to SEQ ID NO: 398371
uguuuaccuaacaauuugu

SEQ ID NO: 398373 - RNA, 19 nt, Artificial Sequence
  Description of Artificial Sequence: Synthetic oligonucleotide
  Sense Strand Starting at position 1014 of SEQ ID NO: 318573
acaguuuaacaggacguaa

SEQ ID NO: 398374 - RNA, 19 nt, Artificial Sequence
  Description of Artificial Sequence: Synthetic oligonucleotide
  Antisense Strand to SEQ ID NO: 398373
uuacguccuguuaaacugu

SEQ ID NO: 398375 - RNA, 19 nt, Artificial Sequence
  Description of Artificial Sequence: Synthetic oligonucleotide
  Sense Strand Starting at position 1014 of SEQ ID NO: 318575
aguuuaacaggacguaauu

SEQ ID NO: 398376 - RNA, 19 nt, Artificial Sequence
  Description of Artificial Sequence: Synthetic oligonucleotide
  Antisense Strand to SEQ ID NO: 398375
aauuacguccuguuaaacu

SEQ ID NO: 398377 - RNA, 19 nt, Artificial Sequence
  Description of Artificial Sequence: Synthetic oligonucleotide
  Sense Strand Starting at position 1014 of SEQ ID NO: 318645
auaagauugaacugaucgu

SEQ ID NO: 398378 - RNA, 19 nt, Artificial Sequence
  Description of Artificial Sequence: Synthetic oligonucleotide
  Antisense Strand to SEQ ID NO: 398377
acgaucaguucaaucuuau

SEQ ID NO: 398379 - RNA, 19 nt, Artificial Sequence
  Description of Artificial Sequence: Synthetic oligonucleotide
  Sense Strand Starting at position 1014 of SEQ ID NO: 318662
guaugcguuaugucuaucu

SEQ ID NO: 398380 - RNA, 19 nt, Artificial Sequence
  Description of Artificial Sequence: Synthetic oligonucleotide
  Antisense Strand to SEQ ID NO: 398379
agauagacauaacgcauac

SEQ ID NO: 398381 - RNA, 19 nt, Artificial Sequence
  Description of Artificial Sequence: Synthetic oligonucleotide
  Sense Strand Starting at position 1014 of SEQ ID NO: 318812
uauccaucaguaggagaua

SEQ ID NO: 398382 - RNA, 19 nt, Artificial Sequence
  Description of Artificial Sequence: Synthetic oligonucleotide
  Antisense Strand to SEQ ID NO: 398381
uaucuccuacugauggaua

SEQ ID NO: 398383 - RNA, 19 nt, Artificial Sequence
  Description of Artificial Sequence: Synthetic oligonucleotide
  Sense Strand Starting at position 1015 of SEQ ID NO: 315397
ucucaaguuuacucuaugu

SEQ ID NO: 398384 - RNA, 19 nt, Artificial Sequence
  Description of Artificial Sequence: Synthetic oligonucleotide
  Antisense Strand to SEQ ID NO: 398383
acauagaguaaacuugaga

SEQ ID NO: 398385 - RNA, 19 nt, Artificial Sequence
  Description of Artificial Sequence: Synthetic oligonucleotide
  Sense Strand Starting at position 1015 of SEQ ID NO: 315401
aaguuuacucuauguggca

SEQ ID NO: 398386 - RNA, 19 nt, Artificial Sequence
  Description of Artificial Sequence: Synthetic oligonucleotide
  Antisense Strand to SEQ ID NO: 398385
ugccacauagaguaaacuu

SEQ ID NO: 398387 - RNA, 19 nt, Artificial Sequence
  Description of Artificial Sequence: Synthetic oligonucleotide
  Sense Strand Starting at position 1015 of SEQ ID NO: 315610
auuccaucauugguucuua

SEQ ID NO: 398388 - RNA, 19 nt, Artificial Sequence
  Description of Artificial Sequence: Synthetic oligonucleotide
  Antisense Strand to SEQ ID NO: 398387
uaagaaccaaugauggaau

SEQ ID NO: 398389 - RNA, 19 nt, Artificial Sequence
  Description of Artificial Sequence: Synthetic oligonucleotide
  Sense Strand Starting at position 1015 of SEQ ID NO: 315730
uugguagcuuuaucucuaa

SEQ ID NO: 398390 - RNA, 19 nt, Artificial Sequence
  Description of Artificial Sequence: Synthetic oligonucleotide
  Antisense Strand to SEQ ID NO: 398389
uuagagauaaagcuaccaa

SEQ ID NO: 398391 - RNA, 19 nt, Artificial Sequence
  Description of Artificial Sequence: Synthetic oligonucleotide
  Sense Strand Starting at position 1015 of SEQ ID NO: 315752
aaguaagugccuuagccaa

SEQ ID NO: 398392 - RNA, 19 nt, Artificial Sequence
  Description of Artificial Sequence: Synthetic oligonucleotide
  Antisense Strand to SEQ ID NO: 398391
uuggcuaaggcacuuacuu

SEQ ID NO: 398393 - RNA, 19 nt, Artificial Sequence
  Description of Artificial Sequence: Synthetic oligonucleotide
  Sense Strand Starting at position 1015 of SEQ ID NO: 315853
ucaauagccuguguaagua

SEQ ID NO: 398394 - RNA, 19 nt, Artificial Sequence
  Description of Artificial Sequence: Synthetic oligonucleotide
  Antisense Strand to SEQ ID NO: 398393
uacuuacacaggcuauuga

SEQ ID NO: 398395 - RNA, 19 nt, Artificial Sequence
  Description of Artificial Sequence: Synthetic oligonucleotide
  Sense Strand Starting at position 1015 of SEQ ID NO: 315861
cuguguaaguaccuaugaa

SEQ ID NO: 398396 - RNA, 19 nt, Artificial Sequence
  Description of Artificial Sequence: Synthetic oligonucleotide
  Antisense Strand to SEQ ID NO: 398395
uucauagguacuuacacag

SEQ ID NO: 398397 - RNA, 19 nt, Artificial Sequence
  Description of Artificial Sequence: Synthetic oligonucleotide
  Sense Strand Starting at position 1015 of SEQ ID NO: 315862
uguguaaguaccuaugaag

SEQ ID NO: 398398 - RNA, 19 nt, Artificial Sequence
  Description of Artificial Sequence: Synthetic oligonucleotide
  Antisense Strand to SEQ ID NO: 398397
cuucauagguacuuacaca

SEQ ID NO: 398399 - RNA, 19 nt, Artificial Sequence
  Description of Artificial Sequence: Synthetic oligonucleotide
  Sense Strand Starting at position 1015 of SEQ ID NO: 316119
uguacuuacagcuggagua

SEQ ID NO: 398400 - RNA, 19 nt, Artificial Sequence
  Description of Artificial Sequence: Synthetic oligonucleotide
  Antisense Strand to SEQ ID NO: 398399
uacuccagcuguaaguaca

SEQ ID NO: 398401 - RNA, 19 nt, Artificial Sequence
  Description of Artificial Sequence: Synthetic oligonucleotide
  Sense Strand Starting at position 1015 of SEQ ID NO: 316120
guacuuacagcuggaguaa

SEQ ID NO: 398402 - RNA, 19 nt, Artificial Sequence
  Description of Artificial Sequence: Synthetic oligonucleotide
  Antisense Strand to SEQ ID NO: 398401
uuacuccagcuguaaguac

SEQ ID NO: 398403 - RNA, 19 nt, Artificial Sequence
  Description of Artificial Sequence: Synthetic oligonucleotide
  Sense Strand Starting at position 1015 of SEQ ID NO: 316357
ucauuccauugaguuaagu

SEQ ID NO: 398404 - RNA, 19 nt, Artificial Sequence
  Description of Artificial Sequence: Synthetic oligonucleotide
  Antisense Strand to SEQ ID NO: 398403
acuuaacucaauggaauga

SEQ ID NO: 398405 - RNA, 19 nt, Artificial Sequence
  Description of Artificial Sequence: Synthetic oligonucleotide
  Sense Strand Starting at position 1015 of SEQ ID NO: 316418
gugucaggcauugagcuua

SEQ ID NO: 398406 - RNA, 19 nt, Artificial Sequence
  Description of Artificial Sequence: Synthetic oligonucleotide
  Antisense Strand to SEQ ID NO: 398405
uaagcucaaugccugacac

SEQ ID NO: 398407 - RNA, 19 nt, Artificial Sequence
  Description of Artificial Sequence: Synthetic oligonucleotide
  Sense Strand Starting at position 1015 of SEQ ID NO: 316430
gagcuuacaguguagugaa

SEQ ID NO: 398408 - RNA, 19 nt, Artificial Sequence
  Description of Artificial Sequence: Synthetic oligonucleotide
  Antisense Strand to SEQ ID NO: 398407
uucacuacacuguaagcuc

SEQ ID NO: 398409 - RNA, 19 nt, Artificial Sequence
  Description of Artificial Sequence: Synthetic oligonucleotide
  Sense Strand Starting at position 1015 of SEQ ID NO: 316437
caguguagugaaggguaaa

SEQ ID NO: 398410 - RNA, 19 nt, Artificial Sequence
  Description of Artificial Sequence: Synthetic oligonucleotide
  Antisense Strand to SEQ ID NO: 398409
uuuacccuucacuacacug

SEQ ID NO: 398411 - RNA, 19 nt, Artificial Sequence
  Description of Artificial Sequence: Synthetic oligonucleotide
  Sense Strand Starting at position 1015 of SEQ ID NO: 316525
ggcagaguaaccgaguaau

SEQ ID NO: 398412 - RNA, 19 nt, Artificial Sequence
  Description of Artificial Sequence: Synthetic oligonucleotide
  Antisense Strand to SEQ ID NO: 398411
auuacucgguuacucugcc

SEQ ID NO: 398413 - RNA, 19 nt, Artificial Sequence
  Description of Artificial Sequence: Synthetic oligonucleotide
  Sense Strand Starting at position 1015 of SEQ ID NO: 316551
cacgaaauuagcgaaugga

SEQ ID NO: 398414 - RNA, 19 nt, Artificial Sequence
  Description of Artificial Sequence: Synthetic oligonucleotide
  Antisense Strand to SEQ ID NO: 398413
uccauucgcuaauuucgug

SEQ ID NO: 398415 - RNA, 19 nt, Artificial Sequence
  Description of Artificial Sequence: Synthetic oligonucleotide
  Sense Strand Starting at position 1015 of SEQ ID NO: 316554
gaaauuagcgaauggaaau

SEQ ID NO: 398416 - RNA, 19 nt, Artificial Sequence
  Description of Artificial Sequence: Synthetic oligonucleotide
  Antisense Strand to SEQ ID NO: 398415
auuuccauucgcuaauuuc

SEQ ID NO: 398417 - RNA, 19 nt, Artificial Sequence
  Description of Artificial Sequence: Synthetic oligonucleotide
  Sense Strand Starting at position 1015 of SEQ ID NO: 316580
uucucaagauaggaauuaa

SEQ ID NO: 398418 - RNA, 19 nt, Artificial Sequence
  Description of Artificial Sequence: Synthetic oligonucleotide
  Antisense Strand to SEQ ID NO: 398417
uuaauuccuaucuugagaa

SEQ ID NO: 398419 - RNA, 19 nt, Artificial Sequence
  Description of Artificial Sequence: Synthetic oligonucleotide
  Sense Strand Starting at position 1015 of SEQ ID NO: 316642
agcagccauguuuggaaua

SEQ ID NO: 398420 - RNA, 19 nt, Artificial Sequence
  Description of Artificial Sequence: Synthetic oligonucleotide
  Antisense Strand to SEQ ID NO: 398419
uauuccaaacauggcugcu

SEQ ID NO: 398421 - RNA, 19 nt, Artificial Sequence
  Description of Artificial Sequence: Synthetic oligonucleotide
  Sense Strand Starting at position 1015 of SEQ ID NO: 316647
ccauguuuggaauaugcaa

SEQ ID NO: 398422 - RNA, 19 nt, Artificial Sequence
  Description of Artificial Sequence: Synthetic oligonucleotide
  Antisense Strand to SEQ ID NO: 398421
uugcauauuccaaacaugg

SEQ ID NO: 398423 - RNA, 19 nt, Artificial Sequence
  Description of Artificial Sequence: Synthetic oligonucleotide
  Sense Strand Starting at position 1015 of SEQ ID NO: 316751
ucaccacuuguuugucuaa

SEQ ID NO: 398424 - RNA, 19 nt, Artificial Sequence
  Description of Artificial Sequence: Synthetic oligonucleotide
  Antisense Strand to SEQ ID NO: 398423
uuagacaaacaagugguga

SEQ ID NO: 398425 - RNA, 19 nt, Artificial Sequence
  Description of Artificial Sequence: Synthetic oligonucleotide
  Sense Strand Starting at position 1015 of SEQ ID NO: 316900
ggauguuagcccgcuuucu

SEQ ID NO: 398426 - RNA, 19 nt, Artificial Sequence
  Description of Artificial Sequence: Synthetic oligonucleotide
  Antisense Strand to SEQ ID NO: 398425
agaaagcgggcuaacaucc

SEQ ID NO: 398427 - RNA, 19 nt, Artificial Sequence
  Description of Artificial Sequence: Synthetic oligonucleotide
  Sense Strand Starting at position 1015 of SEQ ID NO: 317242
aaaugacguccuuauguac

SEQ ID NO: 398428 - RNA, 19 nt, Artificial Sequence
  Description of Artificial Sequence: Synthetic oligonucleotide
  Antisense Strand to SEQ ID NO: 398427
guacauaaggacgucauuu

SEQ ID NO: 398429 - RNA, 19 nt, Artificial Sequence
  Description of Artificial Sequence: Synthetic oligonucleotide
  Sense Strand Starting at position 1015 of SEQ ID NO: 317588
uaggaagguuuguucgaca

SEQ ID NO: 398430 - RNA, 19 nt, Artificial Sequence
  Description of Artificial Sequence: Synthetic oligonucleotide
  Antisense Strand to SEQ ID NO: 398429
ugucgaacaaaccuuccua

SEQ ID NO: 398431 - RNA, 19 nt, Artificial Sequence
  Description of Artificial Sequence: Synthetic oligonucleotide
  Sense Strand Starting at position 1015 of SEQ ID NO: 317593
agguuuguucgacacaaca

SEQ ID NO: 398432 - RNA, 19 nt, Artificial Sequence
  Description of Artificial Sequence: Synthetic oligonucleotide
  Antisense Strand to SEQ ID NO: 398431
uguugugucgaacaaaccu

SEQ ID NO: 398433 - RNA, 19 nt, Artificial Sequence
  Description of Artificial Sequence: Synthetic oligonucleotide
  Sense Strand Starting at position 1015 of SEQ ID NO: 317609
acaaauuguuagguaaaca

SEQ ID NO: 398434 - RNA, 19 nt, Artificial Sequence
  Description of Artificial Sequence: Synthetic oligonucleotide
  Antisense Strand to SEQ ID NO: 398433
uguuuaccuaacaauuugu

SEQ ID NO: 398435 - RNA, 19 nt, Artificial Sequence
  Description of Artificial Sequence: Synthetic oligonucleotide
  Sense Strand Starting at position 1015 of SEQ ID NO: 317666
acaguuuaacaggacguaa

SEQ ID NO: 398436 - RNA, 19 nt, Artificial Sequence
  Description of Artificial Sequence: Synthetic oligonucleotide
  Antisense Strand to SEQ ID NO: 398435
uuacguccuguuaaacugu

SEQ ID NO: 398437 - RNA, 19 nt, Artificial Sequence
  Description of Artificial Sequence: Synthetic oligonucleotide
  Sense Strand Starting at position 1015 of SEQ ID NO: 317668
aguuuaacaggacguaauu

SEQ ID NO: 398438 - RNA, 19 nt, Artificial Sequence
  Description of Artificial Sequence: Synthetic oligonucleotide
  Antisense Strand to SEQ ID NO: 398437
aauuacguccuguuaaacu

SEQ ID NO: 398439 - RNA, 19 nt, Artificial Sequence
  Description of Artificial Sequence: Synthetic oligonucleotide
  Sense Strand Starting at position 1015 of SEQ ID NO: 317738
auaagauugaacugaucgu

SEQ ID NO: 398440 - RNA, 19 nt, Artificial Sequence
  Description of Artificial Sequence: Synthetic oligonucleotide
  Antisense Strand to SEQ ID NO: 398439
acgaucaguucaaucuuau

SEQ ID NO: 398441 - RNA, 19 nt, Artificial Sequence
  Description of Artificial Sequence: Synthetic oligonucleotide
  Sense Strand Starting at position 1015 of SEQ ID NO: 317755
guaugcguuaugucuaucu

SEQ ID NO: 398442 - RNA, 19 nt, Artificial Sequence
  Description of Artificial Sequence: Synthetic oligonucleotide
  Antisense Strand to SEQ ID NO: 398441
agauagacauaacgcauac

SEQ ID NO: 398443 - RNA, 19 nt, Artificial Sequence
  Description of Artificial Sequence: Synthetic oligonucleotide
  Sense Strand Starting at position 1015 of SEQ ID NO: 317905
uauccaucaguaggagaua

SEQ ID NO: 398444 - RNA, 19 nt, Artificial Sequence
  Description of Artificial Sequence: Synthetic oligonucleotide
  Antisense Strand to SEQ ID NO: 398443
uaucuccuacugauggaua

SEQ ID NO: 398445 - RNA, 19 nt, Artificial Sequence
  Description of Artificial Sequence: Synthetic oligonucleotide
  Sense Strand Starting at position 1015 of SEQ ID NO: 318543
cugagucaaucugauuucu

SEQ ID NO: 398446 - RNA, 19 nt, Artificial Sequence
  Description of Artificial Sequence: Synthetic oligonucleotide
  Antisense Strand to SEQ ID NO: 398445
agaaaucagauugacucag

SEQ ID NO: 398447 - RNA, 19 nt, Artificial Sequence
  Description of Artificial Sequence: Synthetic oligonucleotide
  Sense Strand Starting at position 1015 of SEQ ID NO: 318653
cacugaagccaguaugauu

SEQ ID NO: 398448 - RNA, 19 nt, Artificial Sequence
  Description of Artificial Sequence: Synthetic oligonucleotide
  Antisense Strand to SEQ ID NO: 398447
aaucauacuggcuucagug

SEQ ID NO: 398449 - RNA, 19 nt, Artificial Sequence
  Description of Artificial Sequence: Synthetic oligonucleotide
  Sense Strand Starting at position 1015 of SEQ ID NO: 318817
ccgcuucuacgcuuuguua

SEQ ID NO: 398450 - RNA, 19 nt, Artificial Sequence
  Description of Artificial Sequence: Synthetic oligonucleotide
  Antisense Strand to SEQ ID NO: 398449
uaacaaagcguagaagcgg

SEQ ID NO: 398451 - RNA, 19 nt, Artificial Sequence
  Description of Artificial Sequence: Synthetic oligonucleotide
  Sense Strand Starting at position 1015 of SEQ ID NO: 318818
cgcuucuacgcuuuguuau

SEQ ID NO: 398452 - RNA, 19 nt, Artificial Sequence
  Description of Artificial Sequence: Synthetic oligonucleotide
  Antisense Strand to SEQ ID NO: 398451
auaacaaagcguagaagcg

SEQ ID NO: 398453 - RNA, 19 nt, Artificial Sequence
  Description of Artificial Sequence: Synthetic oligonucleotide
  Sense Strand Starting at position 1015 of SEQ ID NO: 318826
cgcuuuguuaugggaagag

SEQ ID NO: 398454 - RNA, 19 nt, Artificial Sequence
  Description of Artificial Sequence: Synthetic oligonucleotide
  Antisense Strand to SEQ ID NO: 398453
cucuucccauaacaaagcg

SEQ ID NO: 398455 - RNA, 19 nt, Artificial Sequence
  Description of Artificial Sequence: Synthetic oligonucleotide
  Sense Strand Starting at position 1015 of SEQ ID NO: 318955
ucacguguggauugggauu

SEQ ID NO: 398456 - RNA, 19 nt, Artificial Sequence
  Description of Artificial Sequence: Synthetic oligonucleotide
  Antisense Strand to SEQ ID NO: 398455
aaucccaauccacacguga

SEQ ID NO: 398457 - RNA, 19 nt, Artificial Sequence
  Description of Artificial Sequence: Synthetic oligonucleotide
  Sense Strand Starting at position 1015 of SEQ ID NO: 318967
ugggauugcugaguaguga

SEQ ID NO: 398458 - RNA, 19 nt, Artificial Sequence
  Description of Artificial Sequence: Synthetic oligonucleotide
  Antisense Strand to SEQ ID NO: 398457
ucacuacucagcaauccca

SEQ ID NO: 398459 - RNA, 19 nt, Artificial Sequence
  Description of Artificial Sequence: Synthetic oligonucleotide
  Sense Strand Starting at position 1015 of SEQ ID NO: 319078
cagaaucucugagugagac

SEQ ID NO: 398460 - RNA, 19 nt, Artificial Sequence
  Description of Artificial Sequence: Synthetic oligonucleotide
  Antisense Strand to SEQ ID NO: 398459
gucucacucagagauucug

SEQ ID NO: 398461 - RNA, 19 nt, Artificial Sequence
  Description of Artificial Sequence: Synthetic oligonucleotide
  Sense Strand Starting at position 1015 of SEQ ID NO: 319086
cugagugagacccaagcau

SEQ ID NO: 398462 - RNA, 19 nt, Artificial Sequence
  Description of Artificial Sequence: Synthetic oligonucleotide
  Antisense Strand to SEQ ID NO: 398461
augcuugggucucacucag

SEQ ID NO: 398463 - RNA, 19 nt, Artificial Sequence
  Description of Artificial Sequence: Synthetic oligonucleotide
  Sense Strand Starting at position 1016 of SEQ ID NO: 315411
cauaccugucacugguaga

SEQ ID NO: 398464 - RNA, 19 nt, Artificial Sequence
  Description of Artificial Sequence: Synthetic oligonucleotide
  Antisense Strand to SEQ ID NO: 398463
ucuaccagugacagguaug

SEQ ID NO: 398465 - RNA, 19 nt, Artificial Sequence
  Description of Artificial Sequence: Synthetic oligonucleotide
  Sense Strand Starting at position 1016 of SEQ ID NO: 315566
ucaugacucucagacauga

SEQ ID NO: 398466 - RNA, 19 nt, Artificial Sequence
  Description of Artificial Sequence: Synthetic oligonucleotide
  Antisense Strand to SEQ ID NO: 398465
ucaugucugagagucauga

SEQ ID NO: 398467 - RNA, 19 nt, Artificial Sequence
  Description of Artificial Sequence: Synthetic oligonucleotide
  Sense Strand Starting at position 1016 of SEQ ID NO: 315689
aucaucuuggcucaaaugu

SEQ ID NO: 398468 - RNA, 19 nt, Artificial Sequence
  Description of Artificial Sequence: Synthetic oligonucleotide
  Antisense Strand to SEQ ID NO: 398467
acauuugagccaagaugau

SEQ ID NO: 398469 - RNA, 19 nt, Artificial Sequence
  Description of Artificial Sequence: Synthetic oligonucleotide
  Sense Strand Starting at position 1016 of SEQ ID NO: 315713
cacggagaggucugaaucu

SEQ ID NO: 398470 - RNA, 19 nt, Artificial Sequence
  Description of Artificial Sequence: Synthetic oligonucleotide
  Antisense Strand to SEQ ID NO: 398469
agauucagaccucuccgug

SEQ ID NO: 398471 - RNA, 19 nt, Artificial Sequence
  Description of Artificial Sequence: Synthetic oligonucleotide
  Sense Strand Starting at position 1016 of SEQ ID NO: 315756
ugcaguuccucaccaucau

SEQ ID NO: 398472 - RNA, 19 nt, Artificial Sequence
  Description of Artificial Sequence: Synthetic oligonucleotide
  Antisense Strand to SEQ ID NO: 398471
augauggugaggaacugca

SEQ ID NO: 398473 - RNA, 19 nt, Artificial Sequence
  Description of Artificial Sequence: Synthetic oligonucleotide
  Sense Strand Starting at position 1016 of SEQ ID NO: 315757
gcaguuccucaccaucaua

SEQ ID NO: 398474 - RNA, 19 nt, Artificial Sequence
  Description of Artificial Sequence: Synthetic oligonucleotide
  Antisense Strand to SEQ ID NO: 398473
uaugauggugaggaacugc

SEQ ID NO: 398475 - RNA, 19 nt, Artificial Sequence
  Description of Artificial Sequence: Synthetic oligonucleotide
  Sense Strand Starting at position 1016 of SEQ ID NO: 315786
uuaguuuaugcauagcacu

SEQ ID NO: 398476 - RNA, 19 nt, Artificial Sequence
  Description of Artificial Sequence: Synthetic oligonucleotide
  Antisense Strand to SEQ ID NO: 398475
agugcuaugcauaaacuaa

SEQ ID NO: 398477 - RNA, 19 nt, Artificial Sequence
  Description of Artificial Sequence: Synthetic oligonucleotide
  Sense Strand Starting at position 1016 of SEQ ID NO: 315836
acauccauuucucccguua

SEQ ID NO: 398478 - RNA, 19 nt, Artificial Sequence
  Description of Artificial Sequence: Synthetic oligonucleotide
  Antisense Strand to SEQ ID NO: 398477
uaacgggagaaauggaugu

SEQ ID NO: 398479 - RNA, 19 nt, Artificial Sequence
  Description of Artificial Sequence: Synthetic oligonucleotide
  Sense Strand Starting at position 1016 of SEQ ID NO: 315838
auccauuucucccguuaga

SEQ ID NO: 398480 - RNA, 19 nt, Artificial Sequence
  Description of Artificial Sequence: Synthetic oligonucleotide
  Antisense Strand to SEQ ID NO: 398479
ucuaacgggagaaauggau

SEQ ID NO: 398481 - RNA, 19 nt, Artificial Sequence
  Description of Artificial Sequence: Synthetic oligonucleotide
  Sense Strand Starting at position 1016 of SEQ ID NO: 315845
ucucccguuagagagaaau

SEQ ID NO: 398482 - RNA, 19 nt, Artificial Sequence
  Description of Artificial Sequence: Synthetic oligonucleotide
  Antisense Strand to SEQ ID NO: 398481
auuucucucuaacgggaga

SEQ ID NO: 398483 - RNA, 19 nt, Artificial Sequence
  Description of Artificial Sequence: Synthetic oligonucleotide
  Sense Strand Starting at position 1016 of SEQ ID NO: 316083
uuuguccgucgauaaauaa

SEQ ID NO: 398484 - RNA, 19 nt, Artificial Sequence
  Description of Artificial Sequence: Synthetic oligonucleotide
  Antisense Strand to SEQ ID NO: 398483
uuauuuaucgacggacaaa

SEQ ID NO: 398485 - RNA, 19 nt, Artificial Sequence
  Description of Artificial Sequence: Synthetic oligonucleotide
  Sense Strand Starting at position 1016 of SEQ ID NO: 316454
gugcaaggcucgguaguua

SEQ ID NO: 398486 - RNA, 19 nt, Artificial Sequence
  Description of Artificial Sequence: Synthetic oligonucleotide
  Antisense Strand to SEQ ID NO: 398485
uaacuaccgagccuugcac

SEQ ID NO: 398487 - RNA, 19 nt, Artificial Sequence
  Description of Artificial Sequence: Synthetic oligonucleotide
  Sense Strand Starting at position 1016 of SEQ ID NO: 317018
ucggguaacaucuaccuga

SEQ ID NO: 398488 - RNA, 19 nt, Artificial Sequence
  Description of Artificial Sequence: Synthetic oligonucleotide
  Antisense Strand to SEQ ID NO: 398487
ucagguagauguuacccga

SEQ ID NO: 398489 - RNA, 19 nt, Artificial Sequence
  Description of Artificial Sequence: Synthetic oligonucleotide
  Sense Strand Starting at position 1016 of SEQ ID NO: 317269
cgcugauuggucagcugga

SEQ ID NO: 398490 - RNA, 19 nt, Artificial Sequence
  Description of Artificial Sequence: Synthetic oligonucleotide
  Antisense Strand to SEQ ID NO: 398489
uccagcugaccaaucagcg

SEQ ID NO: 398491 - RNA, 19 nt, Artificial Sequence
  Description of Artificial Sequence: Synthetic oligonucleotide
  Sense Strand Starting at position 1016 of SEQ ID NO: 317284
uggagugucaaucggaaug

SEQ ID NO: 398492 - RNA, 19 nt, Artificial Sequence
  Description of Artificial Sequence: Synthetic oligonucleotide
  Antisense Strand to SEQ ID NO: 398491
cauuccgauugacacucca

SEQ ID NO: 398493 - RNA, 19 nt, Artificial Sequence
  Description of Artificial Sequence: Synthetic oligonucleotide
  Sense Strand Starting at position 1016 of SEQ ID NO: 317394
agcgcuguagcagaagaau

SEQ ID NO: 398494 - RNA, 19 nt, Artificial Sequence
  Description of Artificial Sequence: Synthetic oligonucleotide
  Antisense Strand to SEQ ID NO: 398493
auucuucugcuacagcgcu

SEQ ID NO: 398495 - RNA, 19 nt, Artificial Sequence
  Description of Artificial Sequence: Synthetic oligonucleotide
  Sense Strand Starting at position 1016 of SEQ ID NO: 317403
gcagaagaauuugaucuga

SEQ ID NO: 398496 - RNA, 19 nt, Artificial Sequence
  Description of Artificial Sequence: Synthetic oligonucleotide
  Antisense Strand to SEQ ID NO: 398495
ucagaucaaauucuucugc

SEQ ID NO: 398497 - RNA, 19 nt, Artificial Sequence
  Description of Artificial Sequence: Synthetic oligonucleotide
  Sense Strand Starting at position 1016 of SEQ ID NO: 317408
agaauuugaucugaucaaa

SEQ ID NO: 398498 - RNA, 19 nt, Artificial Sequence
  Description of Artificial Sequence: Synthetic oligonucleotide
  Antisense Strand to SEQ ID NO: 398497
uuugaucagaucaaauucu

SEQ ID NO: 398499 - RNA, 19 nt, Artificial Sequence
  Description of Artificial Sequence: Synthetic oligonucleotide
  Sense Strand Starting at position 1016 of SEQ ID NO: 317490
gcgaaagagaucugaucua

SEQ ID NO: 398500 - RNA, 19 nt, Artificial Sequence
  Description of Artificial Sequence: Synthetic oligonucleotide
  Antisense Strand to SEQ ID NO: 398499
uagaucagaucucuuucgc

SEQ ID NO: 398501 - RNA, 19 nt, Artificial Sequence
  Description of Artificial Sequence: Synthetic oligonucleotide
  Sense Strand Starting at position 1016 of SEQ ID NO: 317580
gggagaaauuaguucguag

SEQ ID NO: 398502 - RNA, 19 nt, Artificial Sequence
  Description of Artificial Sequence: Synthetic oligonucleotide
  Antisense Strand to SEQ ID NO: 398501
cuacgaacuaauuucuccc

SEQ ID NO: 398503 - RNA, 19 nt, Artificial Sequence
  Description of Artificial Sequence: Synthetic oligonucleotide
  Sense Strand Starting at position 1016 of SEQ ID NO: 317582
gagaaauuaguucguaguc

SEQ ID NO: 398504 - RNA, 19 nt, Artificial Sequence
  Description of Artificial Sequence: Synthetic oligonucleotide
  Antisense Strand to SEQ ID NO: 398503
gacuacgaacuaauuucuc

SEQ ID NO: 398505 - RNA, 19 nt, Artificial Sequence
  Description of Artificial Sequence: Synthetic oligonucleotide
  Sense Strand Starting at position 1016 of SEQ ID NO: 317583
agaaauuaguucguagucu

SEQ ID NO: 398506 - RNA, 19 nt, Artificial Sequence
  Description of Artificial Sequence: Synthetic oligonucleotide
  Antisense Strand to SEQ ID NO: 398505
agacuacgaacuaauuucu

SEQ ID NO: 398507 - RNA, 19 nt, Artificial Sequence
  Description of Artificial Sequence: Synthetic oligonucleotide
  Sense Strand Starting at position 1016 of SEQ ID NO: 317587
auuaguucguagucuaaau

SEQ ID NO: 398508 - RNA, 19 nt, Artificial Sequence
  Description of Artificial Sequence: Synthetic oligonucleotide
  Antisense Strand to SEQ ID NO: 398507
auuuagacuacgaacuaau

SEQ ID NO: 398509 - RNA, 19 nt, Artificial Sequence
  Description of Artificial Sequence: Synthetic oligonucleotide
  Sense Strand Starting at position 1016 of SEQ ID NO: 317589
uaguucguagucuaaauga

SEQ ID NO: 398510 - RNA, 19 nt, Artificial Sequence
  Description of Artificial Sequence: Synthetic oligonucleotide
  Antisense Strand to SEQ ID NO: 398509
ucauuuagacuacgaacua

SEQ ID NO: 398511 - RNA, 19 nt, Artificial Sequence
  Description of Artificial Sequence: Synthetic oligonucleotide
  Sense Strand Starting at position 1016 of SEQ ID NO: 317660
ccagguuaggaguaguaga

SEQ ID NO: 398512 - RNA, 19 nt, Artificial Sequence
  Description of Artificial Sequence: Synthetic oligonucleotide
  Antisense Strand to SEQ ID NO: 398511
ucuacuacuccuaaccugg

SEQ ID NO: 398513 - RNA, 19 nt, Artificial Sequence
  Description of Artificial Sequence: Synthetic oligonucleotide
  Sense Strand Starting at position 1016 of SEQ ID NO: 317683
ccugaauucugcuaagggu

SEQ ID NO: 398514 - RNA, 19 nt, Artificial Sequence
  Description of Artificial Sequence: Synthetic oligonucleotide
  Antisense Strand to SEQ ID NO: 398513
acccuuagcagaauucagg

SEQ ID NO: 398515 - RNA, 19 nt, Artificial Sequence
  Description of Artificial Sequence: Synthetic oligonucleotide
  Sense Strand Starting at position 1016 of SEQ ID NO: 317700
guuagagguaacugauuac

SEQ ID NO: 398516 - RNA, 19 nt, Artificial Sequence
  Description of Artificial Sequence: Synthetic oligonucleotide
  Antisense Strand to SEQ ID NO: 398515
guaaucaguuaccucuaac

SEQ ID NO: 398517 - RNA, 19 nt, Artificial Sequence
  Description of Artificial Sequence: Synthetic oligonucleotide
  Sense Strand Starting at position 1016 of SEQ ID NO: 317710
acugauuaccagcgguuau

SEQ ID NO: 398518 - RNA, 19 nt, Artificial Sequence
  Description of Artificial Sequence: Synthetic oligonucleotide
  Antisense Strand to SEQ ID NO: 398517
auaaccgcugguaaucagu

SEQ ID NO: 398519 - RNA, 19 nt, Artificial Sequence
  Description of Artificial Sequence: Synthetic oligonucleotide
  Sense Strand Starting at position 1016 of SEQ ID NO: 317711
cugauuaccagcgguuauu

SEQ ID NO: 398520 - RNA, 19 nt, Artificial Sequence
  Description of Artificial Sequence: Synthetic oligonucleotide
  Antisense Strand to SEQ ID NO: 398519
aauaaccgcugguaaucag

SEQ ID NO: 398521 - RNA, 19 nt, Artificial Sequence
  Description of Artificial Sequence: Synthetic oligonucleotide
  Sense Strand Starting at position 1016 of SEQ ID NO: 317721
gcgguuauuccggagguca

SEQ ID NO: 398522 - RNA, 19 nt, Artificial Sequence
  Description of Artificial Sequence: Synthetic oligonucleotide
  Antisense Strand to SEQ ID NO: 398521
ugaccuccggaauaaccgc

SEQ ID NO: 398523 - RNA, 19 nt, Artificial Sequence
  Description of Artificial Sequence: Synthetic oligonucleotide
  Sense Strand Starting at position 1016 of SEQ ID NO: 317722
cgguuauuccggaggucac

SEQ ID NO: 398524 - RNA, 19 nt, Artificial Sequence
  Description of Artificial Sequence: Synthetic oligonucleotide
  Antisense Strand to SEQ ID NO: 398523
gugaccuccggaauaaccg

SEQ ID NO: 398525 - RNA, 19 nt, Artificial Sequence
  Description of Artificial Sequence: Synthetic oligonucleotide
  Sense Strand Starting at position 1016 of SEQ ID NO: 317723
gguuauuccggaggucaca

SEQ ID NO: 398526 - RNA, 19 nt, Artificial Sequence
  Description of Artificial Sequence: Synthetic oligonucleotide
  Antisense Strand to SEQ ID NO: 398525
ugugaccuccggaauaacc

SEQ ID NO: 398527 - RNA, 19 nt, Artificial Sequence
  Description of Artificial Sequence: Synthetic oligonucleotide
  Sense Strand Starting at position 1016 of SEQ ID NO: 317779
gagauuggccuuuggagau

SEQ ID NO: 398528 - RNA, 19 nt, Artificial Sequence
  Description of Artificial Sequence: Synthetic oligonucleotide
  Antisense Strand to SEQ ID NO: 398527
aucuccaaaggccaaucuc

SEQ ID NO: 398529 - RNA, 19 nt, Artificial Sequence
  Description of Artificial Sequence: Synthetic oligonucleotide
  Sense Strand Starting at position 1016 of SEQ ID NO: 317792
ggagaugucuuuccaggcu

SEQ ID NO: 398530 - RNA, 19 nt, Artificial Sequence
  Description of Artificial Sequence: Synthetic oligonucleotide
  Antisense Strand to SEQ ID NO: 398529
agccuggaaagacaucucc

SEQ ID NO: 398531 - RNA, 19 nt, Artificial Sequence
  Description of Artificial Sequence: Synthetic oligonucleotide
  Sense Strand Starting at position 1016 of SEQ ID NO: 318188
cagaauuagucauugugaa

SEQ ID NO: 398532 - RNA, 19 nt, Artificial Sequence
  Description of Artificial Sequence: Synthetic oligonucleotide
  Antisense Strand to SEQ ID NO: 398531
uucacaaugacuaauucug

SEQ ID NO: 398533 - RNA, 19 nt, Artificial Sequence
  Description of Artificial Sequence: Synthetic oligonucleotide
  Sense Strand Starting at position 1016 of SEQ ID NO: 318189
agaauuagucauugugaaa

SEQ ID NO: 398534 - RNA, 19 nt, Artificial Sequence
  Description of Artificial Sequence: Synthetic oligonucleotide
  Antisense Strand to SEQ ID NO: 398533
uuucacaaugacuaauucu

SEQ ID NO: 398535 - RNA, 19 nt, Artificial Sequence
  Description of Artificial Sequence: Synthetic oligonucleotide
  Sense Strand Starting at position 1016 of SEQ ID NO: 318192
auuagucauugugaaacaa

SEQ ID NO: 398536 - RNA, 19 nt, Artificial Sequence
  Description of Artificial Sequence: Synthetic oligonucleotide
  Antisense Strand to SEQ ID NO: 398535
uuguuucacaaugacuaau

SEQ ID NO: 398537 - RNA, 19 nt, Artificial Sequence
  Description of Artificial Sequence: Synthetic oligonucleotide
  Sense Strand Starting at position 1016 of SEQ ID NO: 318321
uugaguuuggugugaacau

SEQ ID NO: 398538 - RNA, 19 nt, Artificial Sequence
  Description of Artificial Sequence: Synthetic oligonucleotide
  Antisense Strand to SEQ ID NO: 398537
auguucacaccaaacucaa

SEQ ID NO: 398539 - RNA, 19 nt, Artificial Sequence
  Description of Artificial Sequence: Synthetic oligonucleotide
  Sense Strand Starting at position 1016 of SEQ ID NO: 318322
ugaguuuggugugaacauu

SEQ ID NO: 398540 - RNA, 19 nt, Artificial Sequence
  Description of Artificial Sequence: Synthetic oligonucleotide
  Antisense Strand to SEQ ID NO: 398539
aauguucacaccaaacuca

SEQ ID NO: 398541 - RNA, 19 nt, Artificial Sequence
  Description of Artificial Sequence: Synthetic oligonucleotide
  Sense Strand Starting at position 1016 of SEQ ID NO: 318998
gggccuuugacagacacuu

SEQ ID NO: 398542 - RNA, 19 nt, Artificial Sequence
  Description of Artificial Sequence: Synthetic oligonucleotide
  Antisense Strand to SEQ ID NO: 398541
aagugucugucaaaggccc

SEQ ID NO: 398543 - RNA, 19 nt, Artificial Sequence
  Description of Artificial Sequence: Synthetic oligonucleotide
  Sense Strand Starting at position 1017 of SEQ ID NO: 315649
cuaggauucucugguccaa

SEQ ID NO: 398544 - RNA, 19 nt, Artificial Sequence
  Description of Artificial Sequence: Synthetic oligonucleotide
  Antisense Strand to SEQ ID NO: 398543
uuggaccagagaauccuag

SEQ ID NO: 398545 - RNA, 19 nt, Artificial Sequence
  Description of Artificial Sequence: Synthetic oligonucleotide
  Sense Strand Starting at position 1017 of SEQ ID NO: 315862
gagagcagugcaugaucau

SEQ ID NO: 398546 - RNA, 19 nt, Artificial Sequence
  Description of Artificial Sequence: Synthetic oligonucleotide
  Antisense Strand to SEQ ID NO: 398545
augaucaugcacugcucuc

SEQ ID NO: 398547 - RNA, 19 nt, Artificial Sequence
  Description of Artificial Sequence: Synthetic oligonucleotide
  Sense Strand Starting at position 1017 of SEQ ID NO: 315863
agagcagugcaugaucaua

SEQ ID NO: 398548 - RNA, 19 nt, Artificial Sequence
  Description of Artificial Sequence: Synthetic oligonucleotide
  Antisense Strand to SEQ ID NO: 398547
uaugaucaugcacugcucu

SEQ ID NO: 398549 - RNA, 19 nt, Artificial Sequence
  Description of Artificial Sequence: Synthetic oligonucleotide
  Sense Strand Starting at position 1017 of SEQ ID NO: 315865
agcagugcaugaucauagu

SEQ ID NO: 398550 - RNA, 19 nt, Artificial Sequence
  Description of Artificial Sequence: Synthetic oligonucleotide
  Antisense Strand to SEQ ID NO: 398549
acuaugaucaugcacugcu

SEQ ID NO: 398551 - RNA, 19 nt, Artificial Sequence
  Description of Artificial Sequence: Synthetic oligonucleotide
  Sense Strand Starting at position 1017 of SEQ ID NO: 316180
ccuaccucuccgugagaga

SEQ ID NO: 398552 - RNA, 19 nt, Artificial Sequence
  Description of Artificial Sequence: Synthetic oligonucleotide
  Antisense Strand to SEQ ID NO: 398551
ucucucacggagagguagg

SEQ ID NO: 398553 - RNA, 19 nt, Artificial Sequence
  Description of Artificial Sequence: Synthetic oligonucleotide
  Sense Strand Starting at position 1017 of SEQ ID NO: 316331
ggcagugccuggcauguua

SEQ ID NO: 398554 - RNA, 19 nt, Artificial Sequence
  Description of Artificial Sequence: Synthetic oligonucleotide
  Antisense Strand to SEQ ID NO: 398553
uaacaugccaggcacugcc

SEQ ID NO: 398555 - RNA, 19 nt, Artificial Sequence
  Description of Artificial Sequence: Synthetic oligonucleotide
  Sense Strand Starting at position 1017 of SEQ ID NO: 316411
agaaauacuugacagcuuu

SEQ ID NO: 398556 - RNA, 19 nt, Artificial Sequence
  Description of Artificial Sequence: Synthetic oligonucleotide
  Antisense Strand to SEQ ID NO: 398555
aaagcugucaaguauuucu

SEQ ID NO: 398557 - RNA, 19 nt, Artificial Sequence
  Description of Artificial Sequence: Synthetic oligonucleotide
  Sense Strand Starting at position 1017 of SEQ ID NO: 316596
gggacagagucuuggauuc

SEQ ID NO: 398558 - RNA, 19 nt, Artificial Sequence
  Description of Artificial Sequence: Synthetic oligonucleotide
  Antisense Strand to SEQ ID NO: 398557
gaauccaagacucuguccc

SEQ ID NO: 398559 - RNA, 19 nt, Artificial Sequence
  Description of Artificial Sequence: Synthetic oligonucleotide
  Sense Strand Starting at position 1017 of SEQ ID NO: 316598
gacagagucuuggauucua

SEQ ID NO: 398560 - RNA, 19 nt, Artificial Sequence
  Description of Artificial Sequence: Synthetic oligonucleotide
  Antisense Strand to SEQ ID NO: 398559
uagaauccaagacucuguc

SEQ ID NO: 398561 - RNA, 19 nt, Artificial Sequence
  Description of Artificial Sequence: Synthetic oligonucleotide
  Sense Strand Starting at position 1017 of SEQ ID NO: 316606
cuuggauucuaggcucagu

SEQ ID NO: 398562 - RNA, 19 nt, Artificial Sequence
  Description of Artificial Sequence: Synthetic oligonucleotide
  Antisense Strand to SEQ ID NO: 398561
acugagccuagaauccaag

SEQ ID NO: 398563 - RNA, 19 nt, Artificial Sequence
  Description of Artificial Sequence: Synthetic oligonucleotide
  Sense Strand Starting at position 1017 of SEQ ID NO: 316620
ucaguucuguucggacuca

SEQ ID NO: 398564 - RNA, 19 nt, Artificial Sequence
  Description of Artificial Sequence: Synthetic oligonucleotide
  Antisense Strand to SEQ ID NO: 398563
ugaguccgaacagaacuga

SEQ ID NO: 398565 - RNA, 19 nt, Artificial Sequence
  Description of Artificial Sequence: Synthetic oligonucleotide
  Sense Strand Starting at position 1017 of SEQ ID NO: 316639
cucagucuuccgugcacca

SEQ ID NO: 398566 - RNA, 19 nt, Artificial Sequence
  Description of Artificial Sequence: Synthetic oligonucleotide
  Antisense Strand to SEQ ID NO: 398565
uggugcacggaagacugag

SEQ ID NO: 398567 - RNA, 19 nt, Artificial Sequence
  Description of Artificial Sequence: Synthetic oligonucleotide
  Sense Strand Starting at position 1017 of SEQ ID NO: 316776
cagagucggccugggaauu

SEQ ID NO: 398568 - RNA, 19 nt, Artificial Sequence
  Description of Artificial Sequence: Synthetic oligonucleotide
  Antisense Strand to SEQ ID NO: 398567
aauucccaggccgacucug

SEQ ID NO: 398569 - RNA, 19 nt, Artificial Sequence
  Description of Artificial Sequence: Synthetic oligonucleotide
  Sense Strand Starting at position 1017 of SEQ ID NO: 316777
agagucggccugggaauua

SEQ ID NO: 398570 - RNA, 19 nt, Artificial Sequence
  Description of Artificial Sequence: Synthetic oligonucleotide
  Antisense Strand to SEQ ID NO: 398569
uaauucccaggccgacucu

SEQ ID NO: 398571 - RNA, 19 nt, Artificial Sequence
  Description of Artificial Sequence: Synthetic oligonucleotide
  Sense Strand Starting at position 1017 of SEQ ID NO: 316786
cugggaauuauacggucuu

SEQ ID NO: 398572 - RNA, 19 nt, Artificial Sequence
  Description of Artificial Sequence: Synthetic oligonucleotide
  Antisense Strand to SEQ ID NO: 398571
aagaccguauaauucccag

SEQ ID NO: 398573 - RNA, 19 nt, Artificial Sequence
  Description of Artificial Sequence: Synthetic oligonucleotide
  Sense Strand Starting at position 1017 of SEQ ID NO: 316787
ugggaauuauacggucuuu

SEQ ID NO: 398574 - RNA, 19 nt, Artificial Sequence
  Description of Artificial Sequence: Synthetic oligonucleotide
  Antisense Strand to SEQ ID NO: 398573
aaagaccguauaauuccca

SEQ ID NO: 398575 - RNA, 19 nt, Artificial Sequence
  Description of Artificial Sequence: Synthetic oligonucleotide
  Sense Strand Starting at position 1017 of SEQ ID NO: 316890
gcggugguucccggguuaa

SEQ ID NO: 398576 - RNA, 19 nt, Artificial Sequence
  Description of Artificial Sequence: Synthetic oligonucleotide
  Antisense Strand to SEQ ID NO: 398575
uuaacccgggaaccaccgc

SEQ ID NO: 398577 - RNA, 19 nt, Artificial Sequence
  Description of Artificial Sequence: Synthetic oligonucleotide
  Sense Strand Starting at position 1017 of SEQ ID NO: 317247
gcguauugauaggcuucca

SEQ ID NO: 398578 - RNA, 19 nt, Artificial Sequence
  Description of Artificial Sequence: Synthetic oligonucleotide
  Antisense Strand to SEQ ID NO: 398577
uggaagccuaucaauacgc

SEQ ID NO: 398579 - RNA, 19 nt, Artificial Sequence
  Description of Artificial Sequence: Synthetic oligonucleotide
  Sense Strand Starting at position 1017 of SEQ ID NO: 317480
gcaagagccuucucugugu

SEQ ID NO: 398580 - RNA, 19 nt, Artificial Sequence
  Description of Artificial Sequence: Synthetic oligonucleotide
  Antisense Strand to SEQ ID NO: 398579
acacagagaaggcucuugc

SEQ ID NO: 398581 - RNA, 19 nt, Artificial Sequence
  Description of Artificial Sequence: Synthetic oligonucleotide
  Sense Strand Starting at position 1017 of SEQ ID NO: 317482
aagagccuucucuguguuu

SEQ ID NO: 398582 - RNA, 19 nt, Artificial Sequence
  Description of Artificial Sequence: Synthetic oligonucleotide
  Antisense Strand to SEQ ID NO: 398581
aaacacagagaaggcucuu

SEQ ID NO: 398583 - RNA, 19 nt, Artificial Sequence
  Description of Artificial Sequence: Synthetic oligonucleotide
  Sense Strand Starting at position 1017 of SEQ ID NO: 317538
gcccuuucgcguucuggaa

SEQ ID NO: 398584 - RNA, 19 nt, Artificial Sequence
  Description of Artificial Sequence: Synthetic oligonucleotide
  Antisense Strand to SEQ ID NO: 398583
uuccagaacgcgaaagggc

SEQ ID NO: 398585 - RNA, 19 nt, Artificial Sequence
  Description of Artificial Sequence: Synthetic oligonucleotide
  Sense Strand Starting at position 1017 of SEQ ID NO: 318001
gggugaguguccuaugguc

SEQ ID NO: 398586 - RNA, 19 nt, Artificial Sequence
  Description of Artificial Sequence: Synthetic oligonucleotide
  Antisense Strand to SEQ ID NO: 398585
gaccauaggacacucaccc

SEQ ID NO: 398587 - RNA, 19 nt, Artificial Sequence
  Description of Artificial Sequence: Synthetic oligonucleotide
  Sense Strand Starting at position 1017 of SEQ ID NO: 318058
gccuuugcccucuaucagu

SEQ ID NO: 398588 - RNA, 19 nt, Artificial Sequence
  Description of Artificial Sequence: Synthetic oligonucleotide
  Antisense Strand to SEQ ID NO: 398587
acugauagagggcaaaggc

SEQ ID NO: 398589 - RNA, 19 nt, Artificial Sequence
  Description of Artificial Sequence: Synthetic oligonucleotide
  Sense Strand Starting at position 1017 of SEQ ID NO: 318095
aguucuggcuccucagaac

SEQ ID NO: 398590 - RNA, 19 nt, Artificial Sequence
  Description of Artificial Sequence: Synthetic oligonucleotide
  Antisense Strand to SEQ ID NO: 398589
guucugaggagccagaacu

SEQ ID NO: 398591 - RNA, 19 nt, Artificial Sequence
  Description of Artificial Sequence: Synthetic oligonucleotide
  Sense Strand Starting at position 1017 of SEQ ID NO: 318106
cucagaacucuugagucca

SEQ ID NO: 398592 - RNA, 19 nt, Artificial Sequence
  Description of Artificial Sequence: Synthetic oligonucleotide
  Antisense Strand to SEQ ID NO: 398591
uggacucaagaguucugag

SEQ ID NO: 398593 - RNA, 19 nt, Artificial Sequence
  Description of Artificial Sequence: Synthetic oligonucleotide
  Sense Strand Starting at position 1017 of SEQ ID NO: 318114
ucuugaguccauugggaag

SEQ ID NO: 398594 - RNA, 19 nt, Artificial Sequence
  Description of Artificial Sequence: Synthetic oligonucleotide
  Antisense Strand to SEQ ID NO: 398593
cuucccaauggacucaaga

SEQ ID NO: 398595 - RNA, 19 nt, Artificial Sequence
  Description of Artificial Sequence: Synthetic oligonucleotide
  Sense Strand Starting at position 1017 of SEQ ID NO: 318151
uucuaagcuccgggaggau

SEQ ID NO: 398596 - RNA, 19 nt, Artificial Sequence
  Description of Artificial Sequence: Synthetic oligonucleotide
  Antisense Strand to SEQ ID NO: 398595
auccucccggagcuuagaa

SEQ ID NO: 398597 - RNA, 19 nt, Artificial Sequence
  Description of Artificial Sequence: Synthetic oligonucleotide
  Sense Strand Starting at position 1017 of SEQ ID NO: 318396
uggacagaguccuaaccuu

SEQ ID NO: 398598 - RNA, 19 nt, Artificial Sequence
  Description of Artificial Sequence: Synthetic oligonucleotide
  Antisense Strand to SEQ ID NO: 398597
aagguuaggacucugucca

SEQ ID NO: 398599 - RNA, 19 nt, Artificial Sequence
  Description of Artificial Sequence: Synthetic oligonucleotide
  Sense Strand Starting at position 1017 of SEQ ID NO: 318435
ggguguuucugagugacaa

SEQ ID NO: 398600 - RNA, 19 nt, Artificial Sequence
  Description of Artificial Sequence: Synthetic oligonucleotide
  Antisense Strand to SEQ ID NO: 398599
uugucacucagaaacaccc

SEQ ID NO: 398601 - RNA, 19 nt, Artificial Sequence
  Description of Artificial Sequence: Synthetic oligonucleotide
  Sense Strand Starting at position 1017 of SEQ ID NO: 318436
gguguuucugagugacaaa

SEQ ID NO: 398602 - RNA, 19 nt, Artificial Sequence
  Description of Artificial Sequence: Synthetic oligonucleotide
  Antisense Strand to SEQ ID NO: 398601
uuugucacucagaaacacc

SEQ ID NO: 398603 - RNA, 19 nt, Artificial Sequence
  Description of Artificial Sequence: Synthetic oligonucleotide
  Sense Strand Starting at position 1018 of SEQ ID NO: 315410
uuuguccaguuauugauaa

SEQ ID NO: 398604 - RNA, 19 nt, Artificial Sequence
  Description of Artificial Sequence: Synthetic oligonucleotide
  Antisense Strand to SEQ ID NO: 398603
uuaucaauaacuggacaaa

SEQ ID NO: 398605 - RNA, 19 nt, Artificial Sequence
  Description of Artificial Sequence: Synthetic oligonucleotide
  Sense Strand Starting at position 1018 of SEQ ID NO: 315418
guuauugauaaggguacaa

SEQ ID NO: 398606 - RNA, 19 nt, Artificial Sequence
  Description of Artificial Sequence: Synthetic oligonucleotide
  Antisense Strand to SEQ ID NO: 398605
uuguacccuuaucaauaac

SEQ ID NO: 398607 - RNA, 19 nt, Artificial Sequence
  Description of Artificial Sequence: Synthetic oligonucleotide
  Sense Strand Starting at position 1018 of SEQ ID NO: 315462
aggcaaucaguuugaagaa

SEQ ID NO: 398608 - RNA, 19 nt, Artificial Sequence
  Description of Artificial Sequence: Synthetic oligonucleotide
  Antisense Strand to SEQ ID NO: 398607
uucuucaaacugauugccu

SEQ ID NO: 398609 - RNA, 19 nt, Artificial Sequence
  Description of Artificial Sequence: Synthetic oligonucleotide
  Sense Strand Starting at position 1018 of SEQ ID NO: 316010
augaaaucuuugccugcaa

SEQ ID NO: 398610 - RNA, 19 nt, Artificial Sequence
  Description of Artificial Sequence: Synthetic oligonucleotide
  Antisense Strand to SEQ ID NO: 398609
uugcaggcaaagauuucau

SEQ ID NO: 398611 - RNA, 19 nt, Artificial Sequence
  Description of Artificial Sequence: Synthetic oligonucleotide
  Sense Strand Starting at position 1018 of SEQ ID NO: 316011
ugaaaucuuugccugcaaa

SEQ ID NO: 398612 - RNA, 19 nt, Artificial Sequence
  Description of Artificial Sequence: Synthetic oligonucleotide
  Antisense Strand to SEQ ID NO: 398611
uuugcaggcaaagauuuca

SEQ ID NO: 398613 - RNA, 19 nt, Artificial Sequence
  Description of Artificial Sequence: Synthetic oligonucleotide
  Sense Strand Starting at position 1018 of SEQ ID NO: 316246
ccuaguuagcuggaacaca

SEQ ID NO: 398614 - RNA, 19 nt, Artificial Sequence
  Description of Artificial Sequence: Synthetic oligonucleotide
  Antisense Strand to SEQ ID NO: 398613
uguguuccagcuaacuagg

SEQ ID NO: 398615 - RNA, 19 nt, Artificial Sequence
  Description of Artificial Sequence: Synthetic oligonucleotide
  Sense Strand Starting at position 1018 of SEQ ID NO: 316262
acaauuggguuacugcuaa

SEQ ID NO: 398616 - RNA, 19 nt, Artificial Sequence
  Description of Artificial Sequence: Synthetic oligonucleotide
  Antisense Strand to SEQ ID NO: 398615
uuagcaguaacccaauugu

SEQ ID NO: 398617 - RNA, 19 nt, Artificial Sequence
  Description of Artificial Sequence: Synthetic oligonucleotide
  Sense Strand Starting at position 1018 of SEQ ID NO: 316269
gguuacugcuaauucugaa

SEQ ID NO: 398618 - RNA, 19 nt, Artificial Sequence
  Description of Artificial Sequence: Synthetic oligonucleotide
  Antisense Strand to SEQ ID NO: 398617
uucagaauuagcaguaacc

SEQ ID NO: 398619 - RNA, 19 nt, Artificial Sequence
  Description of Artificial Sequence: Synthetic oligonucleotide
  Sense Strand Starting at position 1018 of SEQ ID NO: 316314
gguuuccagugugcauuua

SEQ ID NO: 398620 - RNA, 19 nt, Artificial Sequence
  Description of Artificial Sequence: Synthetic oligonucleotide
  Antisense Strand to SEQ ID NO: 398619
uaaaugcacacuggaaacc

SEQ ID NO: 398621 - RNA, 19 nt, Artificial Sequence
  Description of Artificial Sequence: Synthetic oligonucleotide
  Sense Strand Starting at position 1018 of SEQ ID NO: 316315
guuuccagugugcauuuaa

SEQ ID NO: 398622 - RNA, 19 nt, Artificial Sequence
  Description of Artificial Sequence: Synthetic oligonucleotide
  Antisense Strand to SEQ ID NO: 398621
uuaaaugcacacuggaaac

SEQ ID NO: 398623 - RNA, 19 nt, Artificial Sequence
  Description of Artificial Sequence: Synthetic oligonucleotide
  Sense Strand Starting at position 1018 of SEQ ID NO: 316353
gagaaauuacgucaagguu

SEQ ID NO: 398624 - RNA, 19 nt, Artificial Sequence
  Description of Artificial Sequence: Synthetic oligonucleotide
  Antisense Strand to SEQ ID NO: 398623
aaccuugacguaauuucuc

SEQ ID NO: 398625 - RNA, 19 nt, Artificial Sequence
  Description of Artificial Sequence: Synthetic oligonucleotide
  Sense Strand Starting at position 1018 of SEQ ID NO: 316356
aaauuacgucaagguuaac

SEQ ID NO: 398626 - RNA, 19 nt, Artificial Sequence
  Description of Artificial Sequence: Synthetic oligonucleotide
  Antisense Strand to SEQ ID NO: 398625
guuaaccuugacguaauuu

SEQ ID NO: 398627 - RNA, 19 nt, Artificial Sequence
  Description of Artificial Sequence: Synthetic oligonucleotide
  Sense Strand Starting at position 1018 of SEQ ID NO: 316499
aggcgagcauauuuauauu

SEQ ID NO: 398628 - RNA, 19 nt, Artificial Sequence
  Description of Artificial Sequence: Synthetic oligonucleotide
  Antisense Strand to SEQ ID NO: 398627
aauauaaauaugcucgccu

SEQ ID NO: 398629 - RNA, 19 nt, Artificial Sequence
  Description of Artificial Sequence: Synthetic oligonucleotide
  Sense Strand Starting at position 1018 of SEQ ID NO: 316794
ccgacauguccucaagaca

SEQ ID NO: 398630 - RNA, 19 nt, Artificial Sequence
  Description of Artificial Sequence: Synthetic oligonucleotide
  Antisense Strand to SEQ ID NO: 398629
ugucuugaggacaugucgg

SEQ ID NO: 398631 - RNA, 19 nt, Artificial Sequence
  Description of Artificial Sequence: Synthetic oligonucleotide
  Sense Strand Starting at position 1018 of SEQ ID NO: 317221
agauaucgagugcaucgau

SEQ ID NO: 398632 - RNA, 19 nt, Artificial Sequence
  Description of Artificial Sequence: Synthetic oligonucleotide
  Antisense Strand to SEQ ID NO: 398631
aucgaugcacucgauaucu

SEQ ID NO: 398633 - RNA, 19 nt, Artificial Sequence
  Description of Artificial Sequence: Synthetic oligonucleotide
  Sense Strand Starting at position 1018 of SEQ ID NO: 317275
gauuguaacgcggccgauu

SEQ ID NO: 398634 - RNA, 19 nt, Artificial Sequence
  Description of Artificial Sequence: Synthetic oligonucleotide
  Antisense Strand to SEQ ID NO: 398633
aaucggccgcguuacaauc

SEQ ID NO: 398635 - RNA, 19 nt, Artificial Sequence
  Description of Artificial Sequence: Synthetic oligonucleotide
  Sense Strand Starting at position 1018 of SEQ ID NO: 317361
gggacuggagaguguuauu

SEQ ID NO: 398636 - RNA, 19 nt, Artificial Sequence
  Description of Artificial Sequence: Synthetic oligonucleotide
  Antisense Strand to SEQ ID NO: 398635
aauaacacucuccaguccc

SEQ ID NO: 398637 - RNA, 19 nt, Artificial Sequence
  Description of Artificial Sequence: Synthetic oligonucleotide
  Sense Strand Starting at position 1018 of SEQ ID NO: 317380
gucuuaguagucgucguua

SEQ ID NO: 398638 - RNA, 19 nt, Artificial Sequence
  Description of Artificial Sequence: Synthetic oligonucleotide
  Antisense Strand to SEQ ID NO: 398637
uaacgacgacuacuaagac

SEQ ID NO: 398639 - RNA, 19 nt, Artificial Sequence
  Description of Artificial Sequence: Synthetic oligonucleotide
  Sense Strand Starting at position 1018 of SEQ ID NO: 317494
gggaaacucgcccaacgau

SEQ ID NO: 398640 - RNA, 19 nt, Artificial Sequence
  Description of Artificial Sequence: Synthetic oligonucleotide
  Antisense Strand to SEQ ID NO: 398639
aucguugggcgaguuuccc

SEQ ID NO: 398641 - RNA, 19 nt, Artificial Sequence
  Description of Artificial Sequence: Synthetic oligonucleotide
  Sense Strand Starting at position 1018 of SEQ ID NO: 317547
gugugauuaaauuguaaug

SEQ ID NO: 398642 - RNA, 19 nt, Artificial Sequence
  Description of Artificial Sequence: Synthetic oligonucleotide
  Antisense Strand to SEQ ID NO: 398641
cauuacaauuuaaucacac

SEQ ID NO: 398643 - RNA, 19 nt, Artificial Sequence
  Description of Artificial Sequence: Synthetic oligonucleotide
  Sense Strand Starting at position 1018 of SEQ ID NO: 317624
cucacaaguugagugcaaa

SEQ ID NO: 398644 - RNA, 19 nt, Artificial Sequence
  Description of Artificial Sequence: Synthetic oligonucleotide
  Antisense Strand to SEQ ID NO: 398643
uuugcacucaacuugugag

SEQ ID NO: 398645 - RNA, 19 nt, Artificial Sequence
  Description of Artificial Sequence: Synthetic oligonucleotide
  Sense Strand Starting at position 1018 of SEQ ID NO: 317625
ucacaaguugagugcaaau

SEQ ID NO: 398646 - RNA, 19 nt, Artificial Sequence
  Description of Artificial Sequence: Synthetic oligonucleotide
  Antisense Strand to SEQ ID NO: 398645
auuugcacucaacuuguga

SEQ ID NO: 398647 - RNA, 19 nt, Artificial Sequence
  Description of Artificial Sequence: Synthetic oligonucleotide
  Sense Strand Starting at position 1018 of SEQ ID NO: 317627
acaaguugagugcaaauua

SEQ ID NO: 398648 - RNA, 19 nt, Artificial Sequence
  Description of Artificial Sequence: Synthetic oligonucleotide
  Antisense Strand to SEQ ID NO: 398647
uaauuugcacucaacuugu

SEQ ID NO: 398649 - RNA, 19 nt, Artificial Sequence
  Description of Artificial Sequence: Synthetic oligonucleotide
  Sense Strand Starting at position 1018 of SEQ ID NO: 317638
gcaaauuaguuucucagau

SEQ ID NO: 398650 - RNA, 19 nt, Artificial Sequence
  Description of Artificial Sequence: Synthetic oligonucleotide
  Antisense Strand to SEQ ID NO: 398649
aucugagaaacuaauuugc

SEQ ID NO: 398651 - RNA, 19 nt, Artificial Sequence
  Description of Artificial Sequence: Synthetic oligonucleotide
  Sense Strand Starting at position 1018 of SEQ ID NO: 317645
aguuucucagauuaaagua

SEQ ID NO: 398652 - RNA, 19 nt, Artificial Sequence
  Description of Artificial Sequence: Synthetic oligonucleotide
  Antisense Strand to SEQ ID NO: 398651
uacuuuaaucugagaaacu

SEQ ID NO: 398653 - RNA, 19 nt, Artificial Sequence
  Description of Artificial Sequence: Synthetic oligonucleotide
  Sense Strand Starting at position 1018 of SEQ ID NO: 317653
agauuaaaguaacugguua

SEQ ID NO: 398654 - RNA, 19 nt, Artificial Sequence
  Description of Artificial Sequence: Synthetic oligonucleotide
  Antisense Strand to SEQ ID NO: 398653
uaaccaguuacuuuaaucu

SEQ ID NO: 398655 - RNA, 19 nt, Artificial Sequence
  Description of Artificial Sequence: Synthetic oligonucleotide
  Sense Strand Starting at position 1018 of SEQ ID NO: 317657
uaaaguaacugguuaguag

SEQ ID NO: 398656 - RNA, 19 nt, Artificial Sequence
  Description of Artificial Sequence: Synthetic oligonucleotide
  Antisense Strand to SEQ ID NO: 398655
cuacuaaccaguuacuuua

SEQ ID NO: 398657 - RNA, 19 nt, Artificial Sequence
  Description of Artificial Sequence: Synthetic oligonucleotide
  Sense Strand Starting at position 1018 of SEQ ID NO: 317901
uuuggucgacuaugagaau

SEQ ID NO: 398658 - RNA, 19 nt, Artificial Sequence
  Description of Artificial Sequence: Synthetic oligonucleotide
  Antisense Strand to SEQ ID NO: 398657
auucucauagucgaccaaa

SEQ ID NO: 398659 - RNA, 19 nt, Artificial Sequence
  Description of Artificial Sequence: Synthetic oligonucleotide
  Sense Strand Starting at position 1018 of SEQ ID NO: 318063
cuacaacacuacguguaua

SEQ ID NO: 398660 - RNA, 19 nt, Artificial Sequence
  Description of Artificial Sequence: Synthetic oligonucleotide
  Antisense Strand to SEQ ID NO: 398659
uauacacguaguguuguag

SEQ ID NO: 398661 - RNA, 19 nt, Artificial Sequence
  Description of Artificial Sequence: Synthetic oligonucleotide
  Sense Strand Starting at position 1018 of SEQ ID NO: 318159
ucagcugagcuuuaccaua

SEQ ID NO: 398662 - RNA, 19 nt, Artificial Sequence
  Description of Artificial Sequence: Synthetic oligonucleotide
  Antisense Strand to SEQ ID NO: 398661
uaugguaaagcucagcuga

SEQ ID NO: 398663 - RNA, 19 nt, Artificial Sequence
  Description of Artificial Sequence: Synthetic oligonucleotide
  Sense Strand Starting at position 1018 of SEQ ID NO: 318161
agcugagcuuuaccauaaa

SEQ ID NO: 398664 - RNA, 19 nt, Artificial Sequence
  Description of Artificial Sequence: Synthetic oligonucleotide
  Antisense Strand to SEQ ID NO: 398663
uuuaugguaaagcucagcu

SEQ ID NO: 398665 - RNA, 19 nt, Artificial Sequence
  Description of Artificial Sequence: Synthetic oligonucleotide
  Sense Strand Starting at position 1018 of SEQ ID NO: 318330
cccuuaggccaguggaaau

SEQ ID NO: 398666 - RNA, 19 nt, Artificial Sequence
  Description of Artificial Sequence: Synthetic oligonucleotide
  Antisense Strand to SEQ ID NO: 398665
auuuccacuggccuaaggg

SEQ ID NO: 398667 - RNA, 19 nt, Artificial Sequence
  Description of Artificial Sequence: Synthetic oligonucleotide
  Sense Strand Starting at position 1018 of SEQ ID NO: 318340
aguggaaaucuguggucag

SEQ ID NO: 398668 - RNA, 19 nt, Artificial Sequence
  Description of Artificial Sequence: Synthetic oligonucleotide
  Antisense Strand to SEQ ID NO: 398667
cugaccacagauuuccacu

SEQ ID NO: 398669 - RNA, 19 nt, Artificial Sequence
  Description of Artificial Sequence: Synthetic oligonucleotide
  Sense Strand Starting at position 1018 of SEQ ID NO: 318343
ggaaaucuguggucagaca

SEQ ID NO: 398670 - RNA, 19 nt, Artificial Sequence
  Description of Artificial Sequence: Synthetic oligonucleotide
  Antisense Strand to SEQ ID NO: 398669
ugucugaccacagauuucc

SEQ ID NO: 398671 - RNA, 19 nt, Artificial Sequence
  Description of Artificial Sequence: Synthetic oligonucleotide
  Sense Strand Starting at position 1018 of SEQ ID NO: 318406
cuaaauaugcaaugagcca

SEQ ID NO: 398672 - RNA, 19 nt, Artificial Sequence
  Description of Artificial Sequence: Synthetic oligonucleotide
  Antisense Strand to SEQ ID NO: 398671
uggcucauugcauauuuag

SEQ ID NO: 398673 - RNA, 19 nt, Artificial Sequence
  Description of Artificial Sequence: Synthetic oligonucleotide
  Sense Strand Starting at position 1018 of SEQ ID NO: 318478
cugugacuucccugauuac

SEQ ID NO: 398674 - RNA, 19 nt, Artificial Sequence
  Description of Artificial Sequence: Synthetic oligonucleotide
  Antisense Strand to SEQ ID NO: 398673
guaaucagggaagucacag

SEQ ID NO: 398675 - RNA, 19 nt, Artificial Sequence
  Description of Artificial Sequence: Synthetic oligonucleotide
  Sense Strand Starting at position 1018 of SEQ ID NO: 318590
ugggucuccugauuccuua

SEQ ID NO: 398676 - RNA, 19 nt, Artificial Sequence
  Description of Artificial Sequence: Synthetic oligonucleotide
  Antisense Strand to SEQ ID NO: 398675
uaaggaaucaggagaccca

SEQ ID NO: 398677 - RNA, 19 nt, Artificial Sequence
  Description of Artificial Sequence: Synthetic oligonucleotide
  Sense Strand Starting at position 1018 of SEQ ID NO: 318612
gacuucuaacagugguuau

SEQ ID NO: 398678 - RNA, 19 nt, Artificial Sequence
  Description of Artificial Sequence: Synthetic oligonucleotide
  Antisense Strand to SEQ ID NO: 398677
auaaccacuguuagaaguc

SEQ ID NO: 398679 - RNA, 19 nt, Artificial Sequence
  Description of Artificial Sequence: Synthetic oligonucleotide
  Sense Strand Starting at position 1018 of SEQ ID NO: 318634
ugaguuauuugugaauaug

SEQ ID NO: 398680 - RNA, 19 nt, Artificial Sequence
  Description of Artificial Sequence: Synthetic oligonucleotide
  Antisense Strand to SEQ ID NO: 398679
cauauucacaaauaacuca

SEQ ID NO: 398681 - RNA, 19 nt, Artificial Sequence
  Description of Artificial Sequence: Synthetic oligonucleotide
  Sense Strand Starting at position 1018 of SEQ ID NO: 318846
uucguauaacuuugaaacu

SEQ ID NO: 398682 - RNA, 19 nt, Artificial Sequence
  Description of Artificial Sequence: Synthetic oligonucleotide
  Antisense Strand to SEQ ID NO: 398681
aguuucaaaguuauacgaa

SEQ ID NO: 398683 - RNA, 19 nt, Artificial Sequence
  Description of Artificial Sequence: Synthetic oligonucleotide
  Sense Strand Starting at position 1019 of SEQ ID NO: 315357
acagcagguuccucaggau

SEQ ID NO: 398684 - RNA, 19 nt, Artificial Sequence
  Description of Artificial Sequence: Synthetic oligonucleotide
  Antisense Strand to SEQ ID NO: 398683
auccugaggaaccugcugu

SEQ ID NO: 398685 - RNA, 19 nt, Artificial Sequence
  Description of Artificial Sequence: Synthetic oligonucleotide
  Sense Strand Starting at position 1019 of SEQ ID NO: 315458
cuuauuccucaugggcaaa

SEQ ID NO: 398686 - RNA, 19 nt, Artificial Sequence
  Description of Artificial Sequence: Synthetic oligonucleotide
  Antisense Strand to SEQ ID NO: 398685
uuugcccaugaggaauaag

SEQ ID NO: 398687 - RNA, 19 nt, Artificial Sequence
  Description of Artificial Sequence: Synthetic oligonucleotide
  Sense Strand Starting at position 1019 of SEQ ID NO: 315554
uguuaacacugacugugaa

SEQ ID NO: 398688 - RNA, 19 nt, Artificial Sequence
  Description of Artificial Sequence: Synthetic oligonucleotide
  Antisense Strand to SEQ ID NO: 398687
uucacagucaguguuaaca

SEQ ID NO: 398689 - RNA, 19 nt, Artificial Sequence
  Description of Artificial Sequence: Synthetic oligonucleotide
  Sense Strand Starting at position 1019 of SEQ ID NO: 315579
agauccaaauuaggagaaa

SEQ ID NO: 398690 - RNA, 19 nt, Artificial Sequence
  Description of Artificial Sequence: Synthetic oligonucleotide
  Antisense Strand to SEQ ID NO: 398689
uuucuccuaauuuggaucu

SEQ ID NO: 398691 - RNA, 19 nt, Artificial Sequence
  Description of Artificial Sequence: Synthetic oligonucleotide
  Sense Strand Starting at position 1019 of SEQ ID NO: 315912
gggacuguuuccucucuca

SEQ ID NO: 398692 - RNA, 19 nt, Artificial Sequence
  Description of Artificial Sequence: Synthetic oligonucleotide
  Antisense Strand to SEQ ID NO: 398691
ugagagaggaaacaguccc

SEQ ID NO: 398693 - RNA, 19 nt, Artificial Sequence
  Description of Artificial Sequence: Synthetic oligonucleotide
  Sense Strand Starting at position 1019 of SEQ ID NO: 316074
guaacaggugcccaguaau

SEQ ID NO: 398694 - RNA, 19 nt, Artificial Sequence
  Description of Artificial Sequence: Synthetic oligonucleotide
  Antisense Strand to SEQ ID NO: 398693
auuacugggcaccuguuac

SEQ ID NO: 398695 - RNA, 19 nt, Artificial Sequence
  Description of Artificial Sequence: Synthetic oligonucleotide
  Sense Strand Starting at position 1019 of SEQ ID NO: 316077
acaggugcccaguaauguu

SEQ ID NO: 398696 - RNA, 19 nt, Artificial Sequence
  Description of Artificial Sequence: Synthetic oligonucleotide
  Antisense Strand to SEQ ID NO: 398695
aacauuacugggcaccugu

SEQ ID NO: 398697 - RNA, 19 nt, Artificial Sequence
  Description of Artificial Sequence: Synthetic oligonucleotide
  Sense Strand Starting at position 1019 of SEQ ID NO: 316085
ccaguaauguuuccugaau

SEQ ID NO: 398698 - RNA, 19 nt, Artificial Sequence
  Description of Artificial Sequence: Synthetic oligonucleotide
  Antisense Strand to SEQ ID NO: 398697
auucaggaaacauuacugg

SEQ ID NO: 398699 - RNA, 19 nt, Artificial Sequence
  Description of Artificial Sequence: Synthetic oligonucleotide
  Sense Strand Starting at position 1019 of SEQ ID NO: 316097
ccugaauugaagugaauug

SEQ ID NO: 398700 - RNA, 19 nt, Artificial Sequence
  Description of Artificial Sequence: Synthetic oligonucleotide
  Antisense Strand to SEQ ID NO: 398699
caauucacuucaauucagg

SEQ ID NO: 398701 - RNA, 19 nt, Artificial Sequence
  Description of Artificial Sequence: Synthetic oligonucleotide
  Sense Strand Starting at position 1019 of SEQ ID NO: 316106
aagugaauuggcugaacca

SEQ ID NO: 398702 - RNA, 19 nt, Artificial Sequence
  Description of Artificial Sequence: Synthetic oligonucleotide
  Antisense Strand to SEQ ID NO: 398701
ugguucagccaauucacuu

SEQ ID NO: 398703 - RNA, 19 nt, Artificial Sequence
  Description of Artificial Sequence: Synthetic oligonucleotide
  Sense Strand Starting at position 1019 of SEQ ID NO: 316335
uaacaaauuccaggugaug

SEQ ID NO: 398704 - RNA, 19 nt, Artificial Sequence
  Description of Artificial Sequence: Synthetic oligonucleotide
  Antisense Strand to SEQ ID NO: 398703
caucaccuggaauuuguua

SEQ ID NO: 398705 - RNA, 19 nt, Artificial Sequence
  Description of Artificial Sequence: Synthetic oligonucleotide
  Sense Strand Starting at position 1019 of SEQ ID NO: 316500
aagugaaauuaaguugagu

SEQ ID NO: 398706 - RNA, 19 nt, Artificial Sequence
  Description of Artificial Sequence: Synthetic oligonucleotide
  Antisense Strand to SEQ ID NO: 398705
acucaacuuaauuucacuu

SEQ ID NO: 398707 - RNA, 19 nt, Artificial Sequence
  Description of Artificial Sequence: Synthetic oligonucleotide
  Sense Strand Starting at position 1019 of SEQ ID NO: 316502
gugaaauuaaguugaguua

SEQ ID NO: 398708 - RNA, 19 nt, Artificial Sequence
  Description of Artificial Sequence: Synthetic oligonucleotide
  Antisense Strand to SEQ ID NO: 398707
uaacucaacuuaauuucac

SEQ ID NO: 398709 - RNA, 19 nt, Artificial Sequence
  Description of Artificial Sequence: Synthetic oligonucleotide
  Sense Strand Starting at position 1019 of SEQ ID NO: 316653
guaggacucauacguauau

SEQ ID NO: 398710 - RNA, 19 nt, Artificial Sequence
  Description of Artificial Sequence: Synthetic oligonucleotide
  Antisense Strand to SEQ ID NO: 398709
auauacguaugaguccuac

SEQ ID NO: 398711 - RNA, 19 nt, Artificial Sequence
  Description of Artificial Sequence: Synthetic oligonucleotide
  Sense Strand Starting at position 1019 of SEQ ID NO: 316654
uaggacucauacguauauu

SEQ ID NO: 398712 - RNA, 19 nt, Artificial Sequence
  Description of Artificial Sequence: Synthetic oligonucleotide
  Antisense Strand to SEQ ID NO: 398711
aauauacguaugaguccua

SEQ ID NO: 398713 - RNA, 19 nt, Artificial Sequence
  Description of Artificial Sequence: Synthetic oligonucleotide
  Sense Strand Starting at position 1019 of SEQ ID NO: 316780
agggacucuuucucugacu

SEQ ID NO: 398714 - RNA, 19 nt, Artificial Sequence
  Description of Artificial Sequence: Synthetic oligonucleotide
  Antisense Strand to SEQ ID NO: 398713
agucagagaaagagucccu

SEQ ID NO: 398715 - RNA, 19 nt, Artificial Sequence
  Description of Artificial Sequence: Synthetic oligonucleotide
  Sense Strand Starting at position 1019 of SEQ ID NO: 316781
gggacucuuucucugacuu

SEQ ID NO: 398716 - RNA, 19 nt, Artificial Sequence
  Description of Artificial Sequence: Synthetic oligonucleotide
  Antisense Strand to SEQ ID NO: 398715
aagucagagaaagaguccc

SEQ ID NO: 398717 - RNA, 19 nt, Artificial Sequence
  Description of Artificial Sequence: Synthetic oligonucleotide
  Sense Strand Starting at position 1019 of SEQ ID NO: 316841
uuggguucuacguaaucuu

SEQ ID NO: 398718 - RNA, 19 nt, Artificial Sequence
  Description of Artificial Sequence: Synthetic oligonucleotide
  Antisense Strand to SEQ ID NO: 398717
aagauuacguagaacccaa

SEQ ID NO: 398719 - RNA, 19 nt, Artificial Sequence
  Description of Artificial Sequence: Synthetic oligonucleotide
  Sense Strand Starting at position 1019 of SEQ ID NO: 317312
gggagucucugaagaggug

SEQ ID NO: 398720 - RNA, 19 nt, Artificial Sequence
  Description of Artificial Sequence: Synthetic oligonucleotide
  Antisense Strand to SEQ ID NO: 398719
caccucuucagagacuccc

SEQ ID NO: 398721 - RNA, 19 nt, Artificial Sequence
  Description of Artificial Sequence: Synthetic oligonucleotide
  Sense Strand Starting at position 1019 of SEQ ID NO: 317361
cagaguuugugggucuaaa

SEQ ID NO: 398722 - RNA, 19 nt, Artificial Sequence
  Description of Artificial Sequence: Synthetic oligonucleotide
  Antisense Strand to SEQ ID NO: 398721
uuuagacccacaaacucug

SEQ ID NO: 398723 - RNA, 19 nt, Artificial Sequence
  Description of Artificial Sequence: Synthetic oligonucleotide
  Sense Strand Starting at position 1019 of SEQ ID NO: 317677
gaggucucuuaaguuauga

SEQ ID NO: 398724 - RNA, 19 nt, Artificial Sequence
  Description of Artificial Sequence: Synthetic oligonucleotide
  Antisense Strand to SEQ ID NO: 398723
ucauaacuuaagagaccuc

SEQ ID NO: 398725 - RNA, 19 nt, Artificial Sequence
  Description of Artificial Sequence: Synthetic oligonucleotide
  Sense Strand Starting at position 1019 of SEQ ID NO: 317696
uuacuauugcugcaguaca

SEQ ID NO: 398726 - RNA, 19 nt, Artificial Sequence
  Description of Artificial Sequence: Synthetic oligonucleotide
  Antisense Strand to SEQ ID NO: 398725
uguacugcagcaauaguaa

SEQ ID NO: 398727 - RNA, 19 nt, Artificial Sequence
  Description of Artificial Sequence: Synthetic oligonucleotide
  Sense Strand Starting at position 1019 of SEQ ID NO: 317728
ggacucaccuagccuauaa

SEQ ID NO: 398728 - RNA, 19 nt, Artificial Sequence
  Description of Artificial Sequence: Synthetic oligonucleotide
  Antisense Strand to SEQ ID NO: 398727
uuauaggcuaggugagucc

SEQ ID NO: 398729 - RNA, 19 nt, Artificial Sequence
  Description of Artificial Sequence: Synthetic oligonucleotide
  Sense Strand Starting at position 1019 of SEQ ID NO: 317887
acugaauaacugugcaaua

SEQ ID NO: 398730 - RNA, 19 nt, Artificial Sequence
  Description of Artificial Sequence: Synthetic oligonucleotide
  Antisense Strand to SEQ ID NO: 398729
uauugcacaguuauucagu

SEQ ID NO: 398731 - RNA, 19 nt, Artificial Sequence
  Description of Artificial Sequence: Synthetic oligonucleotide
  Sense Strand Starting at position 1019 of SEQ ID NO: 317888
cugaauaacugugcaauag

SEQ ID NO: 398732 - RNA, 19 nt, Artificial Sequence
  Description of Artificial Sequence: Synthetic oligonucleotide
  Antisense Strand to SEQ ID NO: 398731
cuauugcacaguuauucag

SEQ ID NO: 398733 - RNA, 19 nt, Artificial Sequence
  Description of Artificial Sequence: Synthetic oligonucleotide
  Sense Strand Starting at position 1019 of SEQ ID NO: 317997
uuuccaagcugauuauaga

SEQ ID NO: 398734 - RNA, 19 nt, Artificial Sequence
  Description of Artificial Sequence: Synthetic oligonucleotide
  Antisense Strand to SEQ ID NO: 398733
ucuauaaucagcuuggaaa

SEQ ID NO: 398735 - RNA, 19 nt, Artificial Sequence
  Description of Artificial Sequence: Synthetic oligonucleotide
  Sense Strand Starting at position 1019 of SEQ ID NO: 318109
aucauauggguuuauucua

SEQ ID NO: 398736 - RNA, 19 nt, Artificial Sequence
  Description of Artificial Sequence: Synthetic oligonucleotide
  Antisense Strand to SEQ ID NO: 398735
uagaauaaacccauaugau

SEQ ID NO: 398737 - RNA, 19 nt, Artificial Sequence
  Description of Artificial Sequence: Synthetic oligonucleotide
  Sense Strand Starting at position 1019 of SEQ ID NO: 318203
uuaacauuacgauauguac

SEQ ID NO: 398738 - RNA, 19 nt, Artificial Sequence
  Description of Artificial Sequence: Synthetic oligonucleotide
  Antisense Strand to SEQ ID NO: 398737
guacauaucguaauguuaa

SEQ ID NO: 398739 - RNA, 19 nt, Artificial Sequence
  Description of Artificial Sequence: Synthetic oligonucleotide
  Sense Strand Starting at position 1019 of SEQ ID NO: 318218
guacaucccgcuuaccauu

SEQ ID NO: 398740 - RNA, 19 nt, Artificial Sequence
  Description of Artificial Sequence: Synthetic oligonucleotide
  Antisense Strand to SEQ ID NO: 398739
aaugguaagcgggauguac

SEQ ID NO: 398741 - RNA, 19 nt, Artificial Sequence
  Description of Artificial Sequence: Synthetic oligonucleotide
  Sense Strand Starting at position 1019 of SEQ ID NO: 318383
ggcuaccuauauucuguua

SEQ ID NO: 398742 - RNA, 19 nt, Artificial Sequence
  Description of Artificial Sequence: Synthetic oligonucleotide
  Antisense Strand to SEQ ID NO: 398741
uaacagaauauagguagcc

SEQ ID NO: 398743 - RNA, 19 nt, Artificial Sequence
  Description of Artificial Sequence: Synthetic oligonucleotide
  Sense Strand Starting at position 1019 of SEQ ID NO: 318396
cuguuauauggauaggcau

SEQ ID NO: 398744 - RNA, 19 nt, Artificial Sequence
  Description of Artificial Sequence: Synthetic oligonucleotide
  Antisense Strand to SEQ ID NO: 398743
augccuauccauauaacag

SEQ ID NO: 398745 - RNA, 19 nt, Artificial Sequence
  Description of Artificial Sequence: Synthetic oligonucleotide
  Sense Strand Starting at position 1019 of SEQ ID NO: 318398
guuauauggauaggcauaa

SEQ ID NO: 398746 - RNA, 19 nt, Artificial Sequence
  Description of Artificial Sequence: Synthetic oligonucleotide
  Antisense Strand to SEQ ID NO: 398745
uuaugccuauccauauaac

SEQ ID NO: 398747 - RNA, 19 nt, Artificial Sequence
  Description of Artificial Sequence: Synthetic oligonucleotide
  Sense Strand Starting at position 1019 of SEQ ID NO: 318399
uuauauggauaggcauaau

SEQ ID NO: 398748 - RNA, 19 nt, Artificial Sequence
  Description of Artificial Sequence: Synthetic oligonucleotide
  Antisense Strand to SEQ ID NO: 398747
auuaugccuauccauauaa

SEQ ID NO: 398749 - RNA, 19 nt, Artificial Sequence
  Description of Artificial Sequence: Synthetic oligonucleotide
  Sense Strand Starting at position 1019 of SEQ ID NO: 318493
uguauaaacuuguugacga

SEQ ID NO: 398750 - RNA, 19 nt, Artificial Sequence
  Description of Artificial Sequence: Synthetic oligonucleotide
  Antisense Strand to SEQ ID NO: 398749
ucgucaacaaguuuauaca

SEQ ID NO: 398751 - RNA, 19 nt, Artificial Sequence
  Description of Artificial Sequence: Synthetic oligonucleotide
  Sense Strand Starting at position 1019 of SEQ ID NO: 318644
ccagcagaucuugaaguuu

SEQ ID NO: 398752 - RNA, 19 nt, Artificial Sequence
  Description of Artificial Sequence: Synthetic oligonucleotide
  Antisense Strand to SEQ ID NO: 398751
aaacuucaagaucugcugg

SEQ ID NO: 398753 - RNA, 19 nt, Artificial Sequence
  Description of Artificial Sequence: Synthetic oligonucleotide
  Sense Strand Starting at position 1019 of SEQ ID NO: 318650
gaucuugaaguuuagugau

SEQ ID NO: 398754 - RNA, 19 nt, Artificial Sequence
  Description of Artificial Sequence: Synthetic oligonucleotide
  Antisense Strand to SEQ ID NO: 398753
aucacuaaacuucaagauc

SEQ ID NO: 398755 - RNA, 19 nt, Artificial Sequence
  Description of Artificial Sequence: Synthetic oligonucleotide
  Sense Strand Starting at position 1019 of SEQ ID NO: 318652
ucuugaaguuuagugauga

SEQ ID NO: 398756 - RNA, 19 nt, Artificial Sequence
  Description of Artificial Sequence: Synthetic oligonucleotide
  Antisense Strand to SEQ ID NO: 398755
ucaucacuaaacuucaaga

SEQ ID NO: 398757 - RNA, 19 nt, Artificial Sequence
  Description of Artificial Sequence: Synthetic oligonucleotide
  Sense Strand Starting at position 1019 of SEQ ID NO: 318742
gauguuugaugccuugauu

SEQ ID NO: 398758 - RNA, 19 nt, Artificial Sequence
  Description of Artificial Sequence: Synthetic oligonucleotide
  Antisense Strand to SEQ ID NO: 398757
aaucaaggcaucaaacauc

SEQ ID NO: 398759 - RNA, 19 nt, Artificial Sequence
  Description of Artificial Sequence: Synthetic oligonucleotide
  Sense Strand Starting at position 1019 of SEQ ID NO: 318785
ucaucuucucagugggaua

SEQ ID NO: 398760 - RNA, 19 nt, Artificial Sequence
  Description of Artificial Sequence: Synthetic oligonucleotide
  Antisense Strand to SEQ ID NO: 398759
uaucccacugagaagauga

SEQ ID NO: 398761 - RNA, 19 nt, Artificial Sequence
  Description of Artificial Sequence: Synthetic oligonucleotide
  Sense Strand Starting at position 1019 of SEQ ID NO: 318787
aucuucucagugggauaau

SEQ ID NO: 398762 - RNA, 19 nt, Artificial Sequence
  Description of Artificial Sequence: Synthetic oligonucleotide
  Antisense Strand to SEQ ID NO: 398761
auuaucccacugagaagau

SEQ ID NO: 398763 - RNA, 19 nt, Artificial Sequence
  Description of Artificial Sequence: Synthetic oligonucleotide
  Sense Strand Starting at position 1020 of SEQ ID NO: 315506
cccaauagaugcuucuuga

SEQ ID NO: 398764 - RNA, 19 nt, Artificial Sequence
  Description of Artificial Sequence: Synthetic oligonucleotide
  Antisense Strand to SEQ ID NO: 398763
ucaagaagcaucuauuggg

SEQ ID NO: 398765 - RNA, 19 nt, Artificial Sequence
  Description of Artificial Sequence: Synthetic oligonucleotide
  Sense Strand Starting at position 1020 of SEQ ID NO: 315516
gcuucuugaguugauggaa

SEQ ID NO: 398766 - RNA, 19 nt, Artificial Sequence
  Description of Artificial Sequence: Synthetic oligonucleotide
  Antisense Strand to SEQ ID NO: 398765
uuccaucaacucaagaagc

SEQ ID NO: 398767 - RNA, 19 nt, Artificial Sequence
  Description of Artificial Sequence: Synthetic oligonucleotide
  Sense Strand Starting at position 1020 of SEQ ID NO: 315582
gcagguuuacuccaauaau

SEQ ID NO: 398768 - RNA, 19 nt, Artificial Sequence
  Description of Artificial Sequence: Synthetic oligonucleotide
  Antisense Strand to SEQ ID NO: 398767
auuauuggaguaaaccugc

SEQ ID NO: 398769 - RNA, 19 nt, Artificial Sequence
  Description of Artificial Sequence: Synthetic oligonucleotide
  Sense Strand Starting at position 1020 of SEQ ID NO: 315593
ccaauaauuccaggucuug

SEQ ID NO: 398770 - RNA, 19 nt, Artificial Sequence
  Description of Artificial Sequence: Synthetic oligonucleotide
  Antisense Strand to SEQ ID NO: 398769
caagaccuggaauuauugg

SEQ ID NO: 398771 - RNA, 19 nt, Artificial Sequence
  Description of Artificial Sequence: Synthetic oligonucleotide
  Sense Strand Starting at position 1020 of SEQ ID NO: 315599
auuccaggucuugggacaa

SEQ ID NO: 398772 - RNA, 19 nt, Artificial Sequence
  Description of Artificial Sequence: Synthetic oligonucleotide
  Antisense Strand to SEQ ID NO: 398771
uugucccaagaccuggaau

SEQ ID NO: 398773 - RNA, 19 nt, Artificial Sequence
  Description of Artificial Sequence: Synthetic oligonucleotide
  Sense Strand Starting at position 1020 of SEQ ID NO: 315674
accauucugcaccaugaga

SEQ ID NO: 398774 - RNA, 19 nt, Artificial Sequence
  Description of Artificial Sequence: Synthetic oligonucleotide
  Antisense Strand to SEQ ID NO: 398773
ucucauggugcagaauggu

SEQ ID NO: 398775 - RNA, 19 nt, Artificial Sequence
  Description of Artificial Sequence: Synthetic oligonucleotide
  Sense Strand Starting at position 1020 of SEQ ID NO: 315743
gcuacaucuccagagcaca

SEQ ID NO: 398776 - RNA, 19 nt, Artificial Sequence
  Description of Artificial Sequence: Synthetic oligonucleotide
  Antisense Strand to SEQ ID NO: 398775
ugugcucuggagauguagc

SEQ ID NO: 398777 - RNA, 19 nt, Artificial Sequence
  Description of Artificial Sequence: Synthetic oligonucleotide
  Sense Strand Starting at position 1020 of SEQ ID NO: 315848
gaauuucuguagucccagu

SEQ ID NO: 398778 - RNA, 19 nt, Artificial Sequence
  Description of Artificial Sequence: Synthetic oligonucleotide
  Antisense Strand to SEQ ID NO: 398777
acugggacuacagaaauuc

SEQ ID NO: 398779 - RNA, 19 nt, Artificial Sequence
  Description of Artificial Sequence: Synthetic oligonucleotide
  Sense Strand Starting at position 1020 of SEQ ID NO: 315986
ggcucuaaguuccuaaaga

SEQ ID NO: 398780 - RNA, 19 nt, Artificial Sequence
  Description of Artificial Sequence: Synthetic oligonucleotide
  Antisense Strand to SEQ ID NO: 398779
ucuuuaggaacuuagagcc

SEQ ID NO: 398781 - RNA, 19 nt, Artificial Sequence
  Description of Artificial Sequence: Synthetic oligonucleotide
  Sense Strand Starting at position 1020 of SEQ ID NO: 316130
gaaacagacuugccaaguu

SEQ ID NO: 398782 - RNA, 19 nt, Artificial Sequence
  Description of Artificial Sequence: Synthetic oligonucleotide
  Antisense Strand to SEQ ID NO: 398781
aacuuggcaagucuguuuc

SEQ ID NO: 398783 - RNA, 19 nt, Artificial Sequence
  Description of Artificial Sequence: Synthetic oligonucleotide
  Sense Strand Starting at position 1020 of SEQ ID NO: 316155
gcuacuuagcuauauagag

SEQ ID NO: 398784 - RNA, 19 nt, Artificial Sequence
  Description of Artificial Sequence: Synthetic oligonucleotide
  Antisense Strand to SEQ ID NO: 398783
cucuauauagcuaaguagc

SEQ ID NO: 398785 - RNA, 19 nt, Artificial Sequence
  Description of Artificial Sequence: Synthetic oligonucleotide
  Sense Strand Starting at position 1020 of SEQ ID NO: 316191
gcagguggucaauaaaugu

SEQ ID NO: 398786 - RNA, 19 nt, Artificial Sequence
  Description of Artificial Sequence: Synthetic oligonucleotide
  Antisense Strand to SEQ ID NO: 398785
acauuuauugaccaccugc

SEQ ID NO: 398787 - RNA, 19 nt, Artificial Sequence
  Description of Artificial Sequence: Synthetic oligonucleotide
  Sense Strand Starting at position 1020 of SEQ ID NO: 316565
ucugucucuccuuggaaag

SEQ ID NO: 398788 - RNA, 19 nt, Artificial Sequence
  Description of Artificial Sequence: Synthetic oligonucleotide
  Antisense Strand to SEQ ID NO: 398787
cuuuccaaggagagacaga

SEQ ID NO: 398789 - RNA, 19 nt, Artificial Sequence
  Description of Artificial Sequence: Synthetic oligonucleotide
  Sense Strand Starting at position 1020 of SEQ ID NO: 316866
cggauagguacgggacaau

SEQ ID NO: 398790 - RNA, 19 nt, Artificial Sequence
  Description of Artificial Sequence: Synthetic oligonucleotide
  Antisense Strand to SEQ ID NO: 398789
auugucccguaccuauccg

SEQ ID NO: 398791 - RNA, 19 nt, Artificial Sequence
  Description of Artificial Sequence: Synthetic oligonucleotide
  Sense Strand Starting at position 1020 of SEQ ID NO: 317393
cccuaaguggcucauccaa

SEQ ID NO: 398792 - RNA, 19 nt, Artificial Sequence
  Description of Artificial Sequence: Synthetic oligonucleotide
  Antisense Strand to SEQ ID NO: 398791
uuggaugagccacuuaggg

SEQ ID NO: 398793 - RNA, 19 nt, Artificial Sequence
  Description of Artificial Sequence: Synthetic oligonucleotide
  Sense Strand Starting at position 1020 of SEQ ID NO: 317395
cuaaguggcucauccaaga

SEQ ID NO: 398794 - RNA, 19 nt, Artificial Sequence
  Description of Artificial Sequence: Synthetic oligonucleotide
  Antisense Strand to SEQ ID NO: 398793
ucuuggaugagccacuuag

SEQ ID NO: 398795 - RNA, 19 nt, Artificial Sequence
  Description of Artificial Sequence: Synthetic oligonucleotide
  Sense Strand Starting at position 1020 of SEQ ID NO: 317436
ccgagcucauuuguuuauu

SEQ ID NO: 398796 - RNA, 19 nt, Artificial Sequence
  Description of Artificial Sequence: Synthetic oligonucleotide
  Antisense Strand to SEQ ID NO: 398795
aauaaacaaaugagcucgg

SEQ ID NO: 398797 - RNA, 19 nt, Artificial Sequence
  Description of Artificial Sequence: Synthetic oligonucleotide
  Sense Strand Starting at position 1020 of SEQ ID NO: 317528
accaguuggugagcuagaa

SEQ ID NO: 398798 - RNA, 19 nt, Artificial Sequence
  Description of Artificial Sequence: Synthetic oligonucleotide
  Antisense Strand to SEQ ID NO: 398797
uucuagcucaccaacuggu

SEQ ID NO: 398799 - RNA, 19 nt, Artificial Sequence
  Description of Artificial Sequence: Synthetic oligonucleotide
  Sense Strand Starting at position 1020 of SEQ ID NO: 317532
guuggugagcuagaaugua

SEQ ID NO: 398800 - RNA, 19 nt, Artificial Sequence
  Description of Artificial Sequence: Synthetic oligonucleotide
  Antisense Strand to SEQ ID NO: 398799
uacauucuagcucaccaac

SEQ ID NO: 398801 - RNA, 19 nt, Artificial Sequence
  Description of Artificial Sequence: Synthetic oligonucleotide
  Sense Strand Starting at position 1020 of SEQ ID NO: 317796
ugguaauccaagugaagac

SEQ ID NO: 398802 - RNA, 19 nt, Artificial Sequence
  Description of Artificial Sequence: Synthetic oligonucleotide
  Antisense Strand to SEQ ID NO: 398801
gucuucacuuggauuacca

SEQ ID NO: 398803 - RNA, 19 nt, Artificial Sequence
  Description of Artificial Sequence: Synthetic oligonucleotide
  Sense Strand Starting at position 1020 of SEQ ID NO: 317911
acgauucuuuaacccggaa

SEQ ID NO: 398804 - RNA, 19 nt, Artificial Sequence
  Description of Artificial Sequence: Synthetic oligonucleotide
  Antisense Strand to SEQ ID NO: 398803
uuccggguuaaagaaucgu

SEQ ID NO: 398805 - RNA, 19 nt, Artificial Sequence
  Description of Artificial Sequence: Synthetic oligonucleotide
  Sense Strand Starting at position 1020 of SEQ ID NO: 317915
uucuuuaacccggaagucu

SEQ ID NO: 398806 - RNA, 19 nt, Artificial Sequence
  Description of Artificial Sequence: Synthetic oligonucleotide
  Antisense Strand to SEQ ID NO: 398805
agacuuccggguuaaagaa

SEQ ID NO: 398807 - RNA, 19 nt, Artificial Sequence
  Description of Artificial Sequence: Synthetic oligonucleotide
  Sense Strand Starting at position 1020 of SEQ ID NO: 317928
aagucuggaucccuagaca

SEQ ID NO: 398808 - RNA, 19 nt, Artificial Sequence
  Description of Artificial Sequence: Synthetic oligonucleotide
  Antisense Strand to SEQ ID NO: 398807
ugucuagggauccagacuu

SEQ ID NO: 398809 - RNA, 19 nt, Artificial Sequence
  Description of Artificial Sequence: Synthetic oligonucleotide
  Sense Strand Starting at position 1020 of SEQ ID NO: 318013
uguugaguugccaaguggu

SEQ ID NO: 398810 - RNA, 19 nt, Artificial Sequence
  Description of Artificial Sequence: Synthetic oligonucleotide
  Antisense Strand to SEQ ID NO: 398809
accacuuggcaacucaaca

SEQ ID NO: 398811 - RNA, 19 nt, Artificial Sequence
  Description of Artificial Sequence: Synthetic oligonucleotide
  Sense Strand Starting at position 1020 of SEQ ID NO: 318041
gugugaagucagggacaau

SEQ ID NO: 398812 - RNA, 19 nt, Artificial Sequence
  Description of Artificial Sequence: Synthetic oligonucleotide
  Antisense Strand to SEQ ID NO: 398811
auugucccugacuucacac

SEQ ID NO: 398813 - RNA, 19 nt, Artificial Sequence
  Description of Artificial Sequence: Synthetic oligonucleotide
  Sense Strand Starting at position 1020 of SEQ ID NO: 318052
gggacaaugucacuggauu

SEQ ID NO: 398814 - RNA, 19 nt, Artificial Sequence
  Description of Artificial Sequence: Synthetic oligonucleotide
  Antisense Strand to SEQ ID NO: 398813
aauccagugacauuguccc

SEQ ID NO: 398815 - RNA, 19 nt, Artificial Sequence
  Description of Artificial Sequence: Synthetic oligonucleotide
  Sense Strand Starting at position 1020 of SEQ ID NO: 318053
ggacaaugucacuggauuc

SEQ ID NO: 398816 - RNA, 19 nt, Artificial Sequence
  Description of Artificial Sequence: Synthetic oligonucleotide
  Antisense Strand to SEQ ID NO: 398815
gaauccagugacauugucc

SEQ ID NO: 398817 - RNA, 19 nt, Artificial Sequence
  Description of Artificial Sequence: Synthetic oligonucleotide
  Sense Strand Starting at position 1020 of SEQ ID NO: 318063
acuggauucucucuugaaa

SEQ ID NO: 398818 - RNA, 19 nt, Artificial Sequence
  Description of Artificial Sequence: Synthetic oligonucleotide
  Antisense Strand to SEQ ID NO: 398817
uuucaagagagaauccagu

SEQ ID NO: 398819 - RNA, 19 nt, Artificial Sequence
  Description of Artificial Sequence: Synthetic oligonucleotide
  Sense Strand Starting at position 1020 of SEQ ID NO: 318126
ggacacaauugucuuugaa

SEQ ID NO: 398820 - RNA, 19 nt, Artificial Sequence
  Description of Artificial Sequence: Synthetic oligonucleotide
  Antisense Strand to SEQ ID NO: 398819
uucaaagacaauugugucc

SEQ ID NO: 398821 - RNA, 19 nt, Artificial Sequence
  Description of Artificial Sequence: Synthetic oligonucleotide
  Sense Strand Starting at position 1020 of SEQ ID NO: 318247
acaacugaggccuggaaau

SEQ ID NO: 398822 - RNA, 19 nt, Artificial Sequence
  Description of Artificial Sequence: Synthetic oligonucleotide
  Antisense Strand to SEQ ID NO: 398821
auuuccaggccucaguugu

SEQ ID NO: 398823 - RNA, 19 nt, Artificial Sequence
  Description of Artificial Sequence: Synthetic oligonucleotide
  Sense Strand Starting at position 1020 of SEQ ID NO: 318499
ggaugagaauugucagggu

SEQ ID NO: 398824 - RNA, 19 nt, Artificial Sequence
  Description of Artificial Sequence: Synthetic oligonucleotide
  Antisense Strand to SEQ ID NO: 398823
acccugacaauucucaucc

SEQ ID NO: 398825 - RNA, 19 nt, Artificial Sequence
  Description of Artificial Sequence: Synthetic oligonucleotide
  Sense Strand Starting at position 1020 of SEQ ID NO: 318503
gagaauugucaggguuuac

SEQ ID NO: 398826 - RNA, 19 nt, Artificial Sequence
  Description of Artificial Sequence: Synthetic oligonucleotide
  Antisense Strand to SEQ ID NO: 398825
guaaacccugacaauucuc

SEQ ID NO: 398827 - RNA, 19 nt, Artificial Sequence
  Description of Artificial Sequence: Synthetic oligonucleotide
  Sense Strand Starting at position 1020 of SEQ ID NO: 318655
acaaucagugagcacaauu

SEQ ID NO: 398828 - RNA, 19 nt, Artificial Sequence
  Description of Artificial Sequence: Synthetic oligonucleotide
  Antisense Strand to SEQ ID NO: 398827
aauugugcucacugauugu

SEQ ID NO: 398829 - RNA, 19 nt, Artificial Sequence
  Description of Artificial Sequence: Synthetic oligonucleotide
  Sense Strand Starting at position 1020 of SEQ ID NO: 318689
cgcgaaugacacuaucuua

SEQ ID NO: 398830 - RNA, 19 nt, Artificial Sequence
  Description of Artificial Sequence: Synthetic oligonucleotide
  Antisense Strand to SEQ ID NO: 398829
uaagauagugucauucgcg

SEQ ID NO: 398831 - RNA, 19 nt, Artificial Sequence
  Description of Artificial Sequence: Synthetic oligonucleotide
  Sense Strand Starting at position 1020 of SEQ ID NO: 319111
caauacauguucuugagga

SEQ ID NO: 398832 - RNA, 19 nt, Artificial Sequence
  Description of Artificial Sequence: Synthetic oligonucleotide
  Antisense Strand to SEQ ID NO: 398831
uccucaagaacauguauug

SEQ ID NO: 398833 - RNA, 19 nt, Artificial Sequence
  Description of Artificial Sequence: Synthetic oligonucleotide
  Sense Strand Starting at position 1020 of SEQ ID NO: 319150
acuccaguccugggaagaa

SEQ ID NO: 398834 - RNA, 19 nt, Artificial Sequence
  Description of Artificial Sequence: Synthetic oligonucleotide
  Antisense Strand to SEQ ID NO: 398833
uucuucccaggacuggagu

SEQ ID NO: 398835 - RNA, 19 nt, Artificial Sequence
  Description of Artificial Sequence: Synthetic oligonucleotide
  Sense Strand Starting at position 1020 of SEQ ID NO: 319184
gccauuguuacugauggga

SEQ ID NO: 398836 - RNA, 19 nt, Artificial Sequence
  Description of Artificial Sequence: Synthetic oligonucleotide
  Antisense Strand to SEQ ID NO: 398835
ucccaucaguaacaauggc

SEQ ID NO: 398837 - RNA, 19 nt, Artificial Sequence
  Description of Artificial Sequence: Synthetic oligonucleotide
  Sense Strand Starting at position 1020 of SEQ ID NO: 319187
auuguuacugaugggauau

SEQ ID NO: 398838 - RNA, 19 nt, Artificial Sequence
  Description of Artificial Sequence: Synthetic oligonucleotide
  Antisense Strand to SEQ ID NO: 398837
auaucccaucaguaacaau

SEQ ID NO: 398839 - RNA, 19 nt, Artificial Sequence
  Description of Artificial Sequence: Synthetic oligonucleotide
  Sense Strand Starting at position 1020 of SEQ ID NO: 319198
ugggauauguugucccaca

SEQ ID NO: 398840 - RNA, 19 nt, Artificial Sequence
  Description of Artificial Sequence: Synthetic oligonucleotide
  Antisense Strand to SEQ ID NO: 398839
ugugggacaacauauccca

SEQ ID NO: 398841 - RNA, 19 nt, Artificial Sequence
  Description of Artificial Sequence: Synthetic oligonucleotide
  Sense Strand Starting at position 1020 of SEQ ID NO: 319199
gggauauguugucccacag

SEQ ID NO: 398842 - RNA, 19 nt, Artificial Sequence
  Description of Artificial Sequence: Synthetic oligonucleotide
  Antisense Strand to SEQ ID NO: 398841
cugugggacaacauauccc

SEQ ID NO: 398843 - RNA, 19 nt, Artificial Sequence
  Description of Artificial Sequence: Synthetic oligonucleotide
  Sense Strand Starting at position 1021 of SEQ ID NO: 315330
ccuauagguggguguugau

SEQ ID NO: 398844 - RNA, 19 nt, Artificial Sequence
  Description of Artificial Sequence: Synthetic oligonucleotide
  Antisense Strand to SEQ ID NO: 398843
aucaacacccaccuauagg

SEQ ID NO: 398845 - RNA, 19 nt, Artificial Sequence
  Description of Artificial Sequence: Synthetic oligonucleotide
  Sense Strand Starting at position 1021 of SEQ ID NO: 315337
guggguguugauuaaguua

SEQ ID NO: 398846 - RNA, 19 nt, Artificial Sequence
  Description of Artificial Sequence: Synthetic oligonucleotide
  Antisense Strand to SEQ ID NO: 398845
uaacuuaaucaacacccac

SEQ ID NO: 398847 - RNA, 19 nt, Artificial Sequence
  Description of Artificial Sequence: Synthetic oligonucleotide
  Sense Strand Starting at position 1021 of SEQ ID NO: 315340
gguguugauuaaguuauag

SEQ ID NO: 398848 - RNA, 19 nt, Artificial Sequence
  Description of Artificial Sequence: Synthetic oligonucleotide
  Antisense Strand to SEQ ID NO: 398847
cuauaacuuaaucaacacc

SEQ ID NO: 398849 - RNA, 19 nt, Artificial Sequence
  Description of Artificial Sequence: Synthetic oligonucleotide
  Sense Strand Starting at position 1021 of SEQ ID NO: 315380
gccugaaguguccaggguu

SEQ ID NO: 398850 - RNA, 19 nt, Artificial Sequence
  Description of Artificial Sequence: Synthetic oligonucleotide
  Antisense Strand to SEQ ID NO: 398849
aacccuggacacuucaggc

SEQ ID NO: 398851 - RNA, 19 nt, Artificial Sequence
  Description of Artificial Sequence: Synthetic oligonucleotide
  Sense Strand Starting at position 1021 of SEQ ID NO: 315405
gaggaaagccuuugccuuu

SEQ ID NO: 398852 - RNA, 19 nt, Artificial Sequence
  Description of Artificial Sequence: Synthetic oligonucleotide
  Antisense Strand to SEQ ID NO: 398851
aaaggcaaaggcuuuccuc

SEQ ID NO: 398853 - RNA, 19 nt, Artificial Sequence
  Description of Artificial Sequence: Synthetic oligonucleotide
  Sense Strand Starting at position 1021 of SEQ ID NO: 315452
cgguauugcagggagauca

SEQ ID NO: 398854 - RNA, 19 nt, Artificial Sequence
  Description of Artificial Sequence: Synthetic oligonucleotide
  Antisense Strand to SEQ ID NO: 398853
ugaucucccugcaauaccg

SEQ ID NO: 398855 - RNA, 19 nt, Artificial Sequence
  Description of Artificial Sequence: Synthetic oligonucleotide
  Sense Strand Starting at position 1021 of SEQ ID NO: 315620
gagcuaagguaucuggaca

SEQ ID NO: 398856 - RNA, 19 nt, Artificial Sequence
  Description of Artificial Sequence: Synthetic oligonucleotide
  Antisense Strand to SEQ ID NO: 398855
uguccagauaccuuagcuc

SEQ ID NO: 398857 - RNA, 19 nt, Artificial Sequence
  Description of Artificial Sequence: Synthetic oligonucleotide
  Sense Strand Starting at position 1021 of SEQ ID NO: 315621
agcuaagguaucuggacaa

SEQ ID NO: 398858 - RNA, 19 nt, Artificial Sequence
  Description of Artificial Sequence: Synthetic oligonucleotide
  Antisense Strand to SEQ ID NO: 398857
uuguccagauaccuuagcu

SEQ ID NO: 398859 - RNA, 19 nt, Artificial Sequence
  Description of Artificial Sequence: Synthetic oligonucleotide
  Sense Strand Starting at position 1021 of SEQ ID NO: 315833
ugaggccagcagugauaua

SEQ ID NO: 398860 - RNA, 19 nt, Artificial Sequence
  Description of Artificial Sequence: Synthetic oligonucleotide
  Antisense Strand to SEQ ID NO: 398859
uauaucacugcuggccuca

SEQ ID NO: 398861 - RNA, 19 nt, Artificial Sequence
  Description of Artificial Sequence: Synthetic oligonucleotide
  Sense Strand Starting at position 1021 of SEQ ID NO: 315845
ugauauauguuccuuccag

SEQ ID NO: 398862 - RNA, 19 nt, Artificial Sequence
  Description of Artificial Sequence: Synthetic oligonucleotide
  Antisense Strand to SEQ ID NO: 398861
cuggaaggaacauauauca

SEQ ID NO: 398863 - RNA, 19 nt, Artificial Sequence
  Description of Artificial Sequence: Synthetic oligonucleotide
  Sense Strand Starting at position 1021 of SEQ ID NO: 315871
cacagaagccuugguaaga

SEQ ID NO: 398864 - RNA, 19 nt, Artificial Sequence
  Description of Artificial Sequence: Synthetic oligonucleotide
  Antisense Strand to SEQ ID NO: 398863
ucuuaccaaggcuucugug

SEQ ID NO: 398865 - RNA, 19 nt, Artificial Sequence
  Description of Artificial Sequence: Synthetic oligonucleotide
  Sense Strand Starting at position 1021 of SEQ ID NO: 315939
aagguuaaaucagugauau

SEQ ID NO: 398866 - RNA, 19 nt, Artificial Sequence
  Description of Artificial Sequence: Synthetic oligonucleotide
  Antisense Strand to SEQ ID NO: 398865
auaucacugauuuaaccuu

SEQ ID NO: 398867 - RNA, 19 nt, Artificial Sequence
  Description of Artificial Sequence: Synthetic oligonucleotide
  Sense Strand Starting at position 1021 of SEQ ID NO: 315940
agguuaaaucagugauauu

SEQ ID NO: 398868 - RNA, 19 nt, Artificial Sequence
  Description of Artificial Sequence: Synthetic oligonucleotide
  Antisense Strand to SEQ ID NO: 398867
aauaucacugauuuaaccu

SEQ ID NO: 398869 - RNA, 19 nt, Artificial Sequence
  Description of Artificial Sequence: Synthetic oligonucleotide
  Sense Strand Starting at position 1021 of SEQ ID NO: 315949
cagugauauuuccagguuu

SEQ ID NO: 398870 - RNA, 19 nt, Artificial Sequence
  Description of Artificial Sequence: Synthetic oligonucleotide
  Antisense Strand to SEQ ID NO: 398869
aaaccuggaaauaucacug

SEQ ID NO: 398871 - RNA, 19 nt, Artificial Sequence
  Description of Artificial Sequence: Synthetic oligonucleotide
  Sense Strand Starting at position 1021 of SEQ ID NO: 315961
cagguuuauuugucacugu

SEQ ID NO: 398872 - RNA, 19 nt, Artificial Sequence
  Description of Artificial Sequence: Synthetic oligonucleotide
  Antisense Strand to SEQ ID NO: 398871
acagugacaaauaaaccug

SEQ ID NO: 398873 - RNA, 19 nt, Artificial Sequence
  Description of Artificial Sequence: Synthetic oligonucleotide
  Sense Strand Starting at position 1021 of SEQ ID NO: 316102
gggugaaugcaagguugaa

SEQ ID NO: 398874 - RNA, 19 nt, Artificial Sequence
  Description of Artificial Sequence: Synthetic oligonucleotide
  Antisense Strand to SEQ ID NO: 398873
uucaaccuugcauucaccc

SEQ ID NO: 398875 - RNA, 19 nt, Artificial Sequence
  Description of Artificial Sequence: Synthetic oligonucleotide
  Sense Strand Starting at position 1021 of SEQ ID NO: 316143
cugugaucacugugagagg

SEQ ID NO: 398876 - RNA, 19 nt, Artificial Sequence
  Description of Artificial Sequence: Synthetic oligonucleotide
  Antisense Strand to SEQ ID NO: 398875
ccucucacagugaucacag

SEQ ID NO: 398877 - RNA, 19 nt, Artificial Sequence
  Description of Artificial Sequence: Synthetic oligonucleotide
  Sense Strand Starting at position 1021 of SEQ ID NO: 316208
cccuguucugagcagaagu

SEQ ID NO: 398878 - RNA, 19 nt, Artificial Sequence
  Description of Artificial Sequence: Synthetic oligonucleotide
  Antisense Strand to SEQ ID NO: 398877
acuucugcucagaacaggg

SEQ ID NO: 398879 - RNA, 19 nt, Artificial Sequence
  Description of Artificial Sequence: Synthetic oligonucleotide
  Sense Strand Starting at position 1021 of SEQ ID NO: 316314
ugcaaugcucccuauggca

SEQ ID NO: 398880 - RNA, 19 nt, Artificial Sequence
  Description of Artificial Sequence: Synthetic oligonucleotide
  Antisense Strand to SEQ ID NO: 398879
ugccauagggagcauugca

SEQ ID NO: 398881 - RNA, 19 nt, Artificial Sequence
  Description of Artificial Sequence: Synthetic oligonucleotide
  Sense Strand Starting at position 1021 of SEQ ID NO: 316539
auucuaucagcucagagua

SEQ ID NO: 398882 - RNA, 19 nt, Artificial Sequence
  Description of Artificial Sequence: Synthetic oligonucleotide
  Antisense Strand to SEQ ID NO: 398881
uacucugagcugauagaau

SEQ ID NO: 398883 - RNA, 19 nt, Artificial Sequence
  Description of Artificial Sequence: Synthetic oligonucleotide
  Sense Strand Starting at position 1021 of SEQ ID NO: 316871
uuacaacuucuuggaugau

SEQ ID NO: 398884 - RNA, 19 nt, Artificial Sequence
  Description of Artificial Sequence: Synthetic oligonucleotide
  Antisense Strand to SEQ ID NO: 398883
aucauccaagaaguuguaa

SEQ ID NO: 398885 - RNA, 19 nt, Artificial Sequence
  Description of Artificial Sequence: Synthetic oligonucleotide
  Sense Strand Starting at position 1021 of SEQ ID NO: 316892
gcaucuuauuacccauagu

SEQ ID NO: 398886 - RNA, 19 nt, Artificial Sequence
  Description of Artificial Sequence: Synthetic oligonucleotide
  Antisense Strand to SEQ ID NO: 398885
acuauggguaauaagaugc

SEQ ID NO: 398887 - RNA, 19 nt, Artificial Sequence
  Description of Artificial Sequence: Synthetic oligonucleotide
  Sense Strand Starting at position 1021 of SEQ ID NO: 317489
gccugugaccuggaacaca

SEQ ID NO: 398888 - RNA, 19 nt, Artificial Sequence
  Description of Artificial Sequence: Synthetic oligonucleotide
  Antisense Strand to SEQ ID NO: 398887
uguguuccaggucacaggc

SEQ ID NO: 398889 - RNA, 19 nt, Artificial Sequence
  Description of Artificial Sequence: Synthetic oligonucleotide
  Sense Strand Starting at position 1021 of SEQ ID NO: 317722
gcugcccacccaugagaaa

SEQ ID NO: 398890 - RNA, 19 nt, Artificial Sequence
  Description of Artificial Sequence: Synthetic oligonucleotide
  Antisense Strand to SEQ ID NO: 398889
uuucucaugggugggcagc

SEQ ID NO: 398891 - RNA, 19 nt, Artificial Sequence
  Description of Artificial Sequence: Synthetic oligonucleotide
  Sense Strand Starting at position 1021 of SEQ ID NO: 317802
ggccauuagcccuaggcaa

SEQ ID NO: 398892 - RNA, 19 nt, Artificial Sequence
  Description of Artificial Sequence: Synthetic oligonucleotide
  Antisense Strand to SEQ ID NO: 398891
uugccuagggcuaauggcc

SEQ ID NO: 398893 - RNA, 19 nt, Artificial Sequence
  Description of Artificial Sequence: Synthetic oligonucleotide
  Sense Strand Starting at position 1021 of SEQ ID NO: 317862
cucugcuuccugcaagaga

SEQ ID NO: 398894 - RNA, 19 nt, Artificial Sequence
  Description of Artificial Sequence: Synthetic oligonucleotide
  Antisense Strand to SEQ ID NO: 398893
ucucuugcaggaagcagag

SEQ ID NO: 398895 - RNA, 19 nt, Artificial Sequence
  Description of Artificial Sequence: Synthetic oligonucleotide
  Sense Strand Starting at position 1021 of SEQ ID NO: 318115
ggaggucuuccagggcagu

SEQ ID NO: 398896 - RNA, 19 nt, Artificial Sequence
  Description of Artificial Sequence: Synthetic oligonucleotide
  Antisense Strand to SEQ ID NO: 398895
acugcccuggaagaccucc

SEQ ID NO: 398897 - RNA, 19 nt, Artificial Sequence
  Description of Artificial Sequence: Synthetic oligonucleotide
  Sense Strand Starting at position 1021 of SEQ ID NO: 318116
gaggucuuccagggcaguu

SEQ ID NO: 398898 - RNA, 19 nt, Artificial Sequence
  Description of Artificial Sequence: Synthetic oligonucleotide
  Antisense Strand to SEQ ID NO: 398897
aacugcccuggaagaccuc

SEQ ID NO: 398899 - RNA, 19 nt, Artificial Sequence
  Description of Artificial Sequence: Synthetic oligonucleotide
  Sense Strand Starting at position 1021 of SEQ ID NO: 318248
uuuguuucucagcauuaga

SEQ ID NO: 398900 - RNA, 19 nt, Artificial Sequence
  Description of Artificial Sequence: Synthetic oligonucleotide
  Antisense Strand to SEQ ID NO: 398899
ucuaaugcugagaaacaaa

SEQ ID NO: 398901 - RNA, 19 nt, Artificial Sequence
  Description of Artificial Sequence: Synthetic oligonucleotide
  Sense Strand Starting at position 1021 of SEQ ID NO: 318272
cccucaguuccagguggau

SEQ ID NO: 398902 - RNA, 19 nt, Artificial Sequence
  Description of Artificial Sequence: Synthetic oligonucleotide
  Antisense Strand to SEQ ID NO: 398901
auccaccuggaacugaggg

SEQ ID NO: 398903 - RNA, 19 nt, Artificial Sequence
  Description of Artificial Sequence: Synthetic oligonucleotide
  Sense Strand Starting at position 1021 of SEQ ID NO: 318453
guuguuacacuuuauugau

SEQ ID NO: 398904 - RNA, 19 nt, Artificial Sequence
  Description of Artificial Sequence: Synthetic oligonucleotide
  Antisense Strand to SEQ ID NO: 398903
aucaauaaaguguaacaac

SEQ ID NO: 398905 - RNA, 19 nt, Artificial Sequence
  Description of Artificial Sequence: Synthetic oligonucleotide
  Sense Strand Starting at position 1021 of SEQ ID NO: 318729
uaaggcuaugcaugguaaa

SEQ ID NO: 398906 - RNA, 19 nt, Artificial Sequence
  Description of Artificial Sequence: Synthetic oligonucleotide
  Antisense Strand to SEQ ID NO: 398905
uuuaccaugcauagccuua

SEQ ID NO: 398907 - RNA, 19 nt, Artificial Sequence
  Description of Artificial Sequence: Synthetic oligonucleotide
  Sense Strand Starting at position 1021 of SEQ ID NO: 318853
agcagacucccuugacuuu

SEQ ID NO: 398908 - RNA, 19 nt, Artificial Sequence
  Description of Artificial Sequence: Synthetic oligonucleotide
  Antisense Strand to SEQ ID NO: 398907
aaagucaagggagucugcu

SEQ ID NO: 398909 - RNA, 19 nt, Artificial Sequence
  Description of Artificial Sequence: Synthetic oligonucleotide
  Sense Strand Starting at position 1021 of SEQ ID NO: 318893
aucuguauacaaggcuuaa

SEQ ID NO: 398910 - RNA, 19 nt, Artificial Sequence
  Description of Artificial Sequence: Synthetic oligonucleotide
  Antisense Strand to SEQ ID NO: 398909
uuaagccuuguauacagau

SEQ ID NO: 398911 - RNA, 19 nt, Artificial Sequence
  Description of Artificial Sequence: Synthetic oligonucleotide
  Sense Strand Starting at position 1021 of SEQ ID NO: 318897
guauacaaggcuuaaguca

SEQ ID NO: 398912 - RNA, 19 nt, Artificial Sequence
  Description of Artificial Sequence: Synthetic oligonucleotide
  Antisense Strand to SEQ ID NO: 398911
ugacuuaagccuuguauac

SEQ ID NO: 398913 - RNA, 19 nt, Artificial Sequence
  Description of Artificial Sequence: Synthetic oligonucleotide
  Sense Strand Starting at position 1021 of SEQ ID NO: 318943
cuuugaaugugaccacauu

SEQ ID NO: 398914 - RNA, 19 nt, Artificial Sequence
  Description of Artificial Sequence: Synthetic oligonucleotide
  Antisense Strand to SEQ ID NO: 398913
aauguggucacauucaaag

SEQ ID NO: 398915 - RNA, 19 nt, Artificial Sequence
  Description of Artificial Sequence: Synthetic oligonucleotide
  Sense Strand Starting at position 1021 of SEQ ID NO: 319083
gcagaacuauuuguuaguu

SEQ ID NO: 398916 - RNA, 19 nt, Artificial Sequence
  Description of Artificial Sequence: Synthetic oligonucleotide
  Antisense Strand to SEQ ID NO: 398915
aacuaacaaauaguucugc

SEQ ID NO: 398917 - RNA, 19 nt, Artificial Sequence
  Description of Artificial Sequence: Synthetic oligonucleotide
  Sense Strand Starting at position 1021 of SEQ ID NO: 319175
agcugugagggacaguuua

SEQ ID NO: 398918 - RNA, 19 nt, Artificial Sequence
  Description of Artificial Sequence: Synthetic oligonucleotide
  Antisense Strand to SEQ ID NO: 398917
uaaacugucccucacagcu

SEQ ID NO: 398919 - RNA, 19 nt, Artificial Sequence
  Description of Artificial Sequence: Synthetic oligonucleotide
  Sense Strand Starting at position 1021 of SEQ ID NO: 319185
gacaguuuauggguaggaa

SEQ ID NO: 398920 - RNA, 19 nt, Artificial Sequence
  Description of Artificial Sequence: Synthetic oligonucleotide
  Antisense Strand to SEQ ID NO: 398919
uuccuacccauaaacuguc

SEQ ID NO: 398921 - RNA, 19 nt, Artificial Sequence
  Description of Artificial Sequence: Synthetic oligonucleotide
  Sense Strand Starting at position 1021 of SEQ ID NO: 319188
aguuuauggguaggaaguu

SEQ ID NO: 398922 - RNA, 19 nt, Artificial Sequence
  Description of Artificial Sequence: Synthetic oligonucleotide
  Antisense Strand to SEQ ID NO: 398921
aacuuccuacccauaaacu

SEQ ID NO: 398923 - RNA, 19 nt, Artificial Sequence
  Description of Artificial Sequence: Synthetic oligonucleotide
  Sense Strand Starting at position 1022 of SEQ ID NO: 315393
ucucucacaccuggagaaa

SEQ ID NO: 398924 - RNA, 19 nt, Artificial Sequence
  Description of Artificial Sequence: Synthetic oligonucleotide
  Antisense Strand to SEQ ID NO: 398923
uuucuccaggugugagaga

SEQ ID NO: 398925 - RNA, 19 nt, Artificial Sequence
  Description of Artificial Sequence: Synthetic oligonucleotide
  Sense Strand Starting at position 1022 of SEQ ID NO: 315422
cccucauaccuggguugaa

SEQ ID NO: 398926 - RNA, 19 nt, Artificial Sequence
  Description of Artificial Sequence: Synthetic oligonucleotide
  Antisense Strand to SEQ ID NO: 398925
uucaacccagguaugaggg

SEQ ID NO: 398927 - RNA, 19 nt, Artificial Sequence
  Description of Artificial Sequence: Synthetic oligonucleotide
  Sense Strand Starting at position 1022 of SEQ ID NO: 315425
ucauaccuggguugaagau

SEQ ID NO: 398928 - RNA, 19 nt, Artificial Sequence
  Description of Artificial Sequence: Synthetic oligonucleotide
  Antisense Strand to SEQ ID NO: 398927
aucuucaacccagguauga

SEQ ID NO: 398929 - RNA, 19 nt, Artificial Sequence
  Description of Artificial Sequence: Synthetic oligonucleotide
  Sense Strand Starting at position 1022 of SEQ ID NO: 315529
uuauauuggcagcaucaaa

SEQ ID NO: 398930 - RNA, 19 nt, Artificial Sequence
  Description of Artificial Sequence: Synthetic oligonucleotide
  Antisense Strand to SEQ ID NO: 398929
uuugaugcugccaauauaa

SEQ ID NO: 398931 - RNA, 19 nt, Artificial Sequence
  Description of Artificial Sequence: Synthetic oligonucleotide
  Sense Strand Starting at position 1022 of SEQ ID NO: 315548
agagacgauguaugugaaa

SEQ ID NO: 398932 - RNA, 19 nt, Artificial Sequence
  Description of Artificial Sequence: Synthetic oligonucleotide
  Antisense Strand to SEQ ID NO: 398931
uuucacauacaucgucucu

SEQ ID NO: 398933 - RNA, 19 nt, Artificial Sequence
  Description of Artificial Sequence: Synthetic oligonucleotide
  Sense Strand Starting at position 1022 of SEQ ID NO: 315719
guuguaagacaucaugagu

SEQ ID NO: 398934 - RNA, 19 nt, Artificial Sequence
  Description of Artificial Sequence: Synthetic oligonucleotide
  Antisense Strand to SEQ ID NO: 398933
acucaugaugucuuacaac

SEQ ID NO: 398935 - RNA, 19 nt, Artificial Sequence
  Description of Artificial Sequence: Synthetic oligonucleotide
  Sense Strand Starting at position 1022 of SEQ ID NO: 315841
agaacuguucuggagacgu

SEQ ID NO: 398936 - RNA, 19 nt, Artificial Sequence
  Description of Artificial Sequence: Synthetic oligonucleotide
  Antisense Strand to SEQ ID NO: 398935
acgucuccagaacaguucu

SEQ ID NO: 398937 - RNA, 19 nt, Artificial Sequence
  Description of Artificial Sequence: Synthetic oligonucleotide
  Sense Strand Starting at position 1022 of SEQ ID NO: 315843
aacuguucuggagacguuu

SEQ ID NO: 398938 - RNA, 19 nt, Artificial Sequence
  Description of Artificial Sequence: Synthetic oligonucleotide
  Antisense Strand to SEQ ID NO: 398937
aaacgucuccagaacaguu

SEQ ID NO: 398939 - RNA, 19 nt, Artificial Sequence
  Description of Artificial Sequence: Synthetic oligonucleotide
  Sense Strand Starting at position 1022 of SEQ ID NO: 315878
acaacagauucugcagcua

SEQ ID NO: 398940 - RNA, 19 nt, Artificial Sequence
  Description of Artificial Sequence: Synthetic oligonucleotide
  Antisense Strand to SEQ ID NO: 398939
uagcugcagaaucuguugu

SEQ ID NO: 398941 - RNA, 19 nt, Artificial Sequence
  Description of Artificial Sequence: Synthetic oligonucleotide
  Sense Strand Starting at position 1022 of SEQ ID NO: 316045
aucuuaugggaauguauac

SEQ ID NO: 398942 - RNA, 19 nt, Artificial Sequence
  Description of Artificial Sequence: Synthetic oligonucleotide
  Antisense Strand to SEQ ID NO: 398941
guauacauucccauaagau

SEQ ID NO: 398943 - RNA, 19 nt, Artificial Sequence
  Description of Artificial Sequence: Synthetic oligonucleotide
  Sense Strand Starting at position 1022 of SEQ ID NO: 316051
ugggaauguauacgaagga

SEQ ID NO: 398944 - RNA, 19 nt, Artificial Sequence
  Description of Artificial Sequence: Synthetic oligonucleotide
  Antisense Strand to SEQ ID NO: 398943
uccuucguauacauuccca

SEQ ID NO: 398945 - RNA, 19 nt, Artificial Sequence
  Description of Artificial Sequence: Synthetic oligonucleotide
  Sense Strand Starting at position 1022 of SEQ ID NO: 316055
aauguauacgaaggaauac

SEQ ID NO: 398946 - RNA, 19 nt, Artificial Sequence
  Description of Artificial Sequence: Synthetic oligonucleotide
  Antisense Strand to SEQ ID NO: 398945
guauuccuucguauacauu

SEQ ID NO: 398947 - RNA, 19 nt, Artificial Sequence
  Description of Artificial Sequence: Synthetic oligonucleotide
  Sense Strand Starting at position 1022 of SEQ ID NO: 316072
acuuacucugccuaggaga

SEQ ID NO: 398948 - RNA, 19 nt, Artificial Sequence
  Description of Artificial Sequence: Synthetic oligonucleotide
  Antisense Strand to SEQ ID NO: 398947
ucuccuaggcagaguaagu

SEQ ID NO: 398949 - RNA, 19 nt, Artificial Sequence
  Description of Artificial Sequence: Synthetic oligonucleotide
  Sense Strand Starting at position 1022 of SEQ ID NO: 316122
uagagugggccuugaagga

SEQ ID NO: 398950 - RNA, 19 nt, Artificial Sequence
  Description of Artificial Sequence: Synthetic oligonucleotide
  Antisense Strand to SEQ ID NO: 398949
uccuucaaggcccacucua

SEQ ID NO: 398951 - RNA, 19 nt, Artificial Sequence
  Description of Artificial Sequence: Synthetic oligonucleotide
  Sense Strand Starting at position 1022 of SEQ ID NO: 316207
ucugaagaugcauggcaua

SEQ ID NO: 398952 - RNA, 19 nt, Artificial Sequence
  Description of Artificial Sequence: Synthetic oligonucleotide
  Antisense Strand to SEQ ID NO: 398951
uaugccaugcaucuucaga

SEQ ID NO: 398953 - RNA, 19 nt, Artificial Sequence
  Description of Artificial Sequence: Synthetic oligonucleotide
  Sense Strand Starting at position 1022 of SEQ ID NO: 316233
guccauaaggaauggagua

SEQ ID NO: 398954 - RNA, 19 nt, Artificial Sequence
  Description of Artificial Sequence: Synthetic oligonucleotide
  Antisense Strand to SEQ ID NO: 398953
uacuccauuccuuauggac

SEQ ID NO: 398955 - RNA, 19 nt, Artificial Sequence
  Description of Artificial Sequence: Synthetic oligonucleotide
  Sense Strand Starting at position 1022 of SEQ ID NO: 316245
uggaguaggccauaccuga

SEQ ID NO: 398956 - RNA, 19 nt, Artificial Sequence
  Description of Artificial Sequence: Synthetic oligonucleotide
  Antisense Strand to SEQ ID NO: 398955
ucagguauggccuacucca

SEQ ID NO: 398957 - RNA, 19 nt, Artificial Sequence
  Description of Artificial Sequence: Synthetic oligonucleotide
  Sense Strand Starting at position 1022 of SEQ ID NO: 316286
agcugaguaauaggucaga

SEQ ID NO: 398958 - RNA, 19 nt, Artificial Sequence
  Description of Artificial Sequence: Synthetic oligonucleotide
  Antisense Strand to SEQ ID NO: 398957
ucugaccuauuacucagcu

SEQ ID NO: 398959 - RNA, 19 nt, Artificial Sequence
  Description of Artificial Sequence: Synthetic oligonucleotide
  Sense Strand Starting at position 1022 of SEQ ID NO: 316350
gauuauccaggucagcaau

SEQ ID NO: 398960 - RNA, 19 nt, Artificial Sequence
  Description of Artificial Sequence: Synthetic oligonucleotide
  Antisense Strand to SEQ ID NO: 398959
auugcugaccuggauaauc

SEQ ID NO: 398961 - RNA, 19 nt, Artificial Sequence
  Description of Artificial Sequence: Synthetic oligonucleotide
  Sense Strand Starting at position 1022 of SEQ ID NO: 316455
aggaguauuacuuggugac

SEQ ID NO: 398962 - RNA, 19 nt, Artificial Sequence
  Description of Artificial Sequence: Synthetic oligonucleotide
  Antisense Strand to SEQ ID NO: 398961
gucaccaaguaauacuccu

SEQ ID NO: 398963 - RNA, 19 nt, Artificial Sequence
  Description of Artificial Sequence: Synthetic oligonucleotide
  Sense Strand Starting at position 1022 of SEQ ID NO: 316456
ggaguauuacuuggugacu

SEQ ID NO: 398964 - RNA, 19 nt, Artificial Sequence
  Description of Artificial Sequence: Synthetic oligonucleotide
  Antisense Strand to SEQ ID NO: 398963
agucaccaaguaauacucc

SEQ ID NO: 398965 - RNA, 19 nt, Artificial Sequence
  Description of Artificial Sequence: Synthetic oligonucleotide
  Sense Strand Starting at position 1022 of SEQ ID NO: 316457
gaguauuacuuggugacuc

SEQ ID NO: 398966 - RNA, 19 nt, Artificial Sequence
  Description of Artificial Sequence: Synthetic oligonucleotide
  Antisense Strand to SEQ ID NO: 398965
gagucaccaaguaauacuc

SEQ ID NO: 398967 - RNA, 19 nt, Artificial Sequence
  Description of Artificial Sequence: Synthetic oligonucleotide
  Sense Strand Starting at position 1022 of SEQ ID NO: 316555
gaguaacugcuugaucuua

SEQ ID NO: 398968 - RNA, 19 nt, Artificial Sequence
  Description of Artificial Sequence: Synthetic oligonucleotide
  Antisense Strand to SEQ ID NO: 398967
uaagaucaagcaguuacuc

SEQ ID NO: 398969 - RNA, 19 nt, Artificial Sequence
  Description of Artificial Sequence: Synthetic oligonucleotide
  Sense Strand Starting at position 1022 of SEQ ID NO: 316720
aacaaaugacguggugaga

SEQ ID NO: 398970 - RNA, 19 nt, Artificial Sequence
  Description of Artificial Sequence: Synthetic oligonucleotide
  Antisense Strand to SEQ ID NO: 398969
ucucaccacgucauuuguu

SEQ ID NO: 398971 - RNA, 19 nt, Artificial Sequence
  Description of Artificial Sequence: Synthetic oligonucleotide
  Sense Strand Starting at position 1022 of SEQ ID NO: 316788
agaaauauuuacggaggga

SEQ ID NO: 398972 - RNA, 19 nt, Artificial Sequence
  Description of Artificial Sequence: Synthetic oligonucleotide
  Antisense Strand to SEQ ID NO: 398971
ucccuccguaaauauuucu

SEQ ID NO: 398973 - RNA, 19 nt, Artificial Sequence
  Description of Artificial Sequence: Synthetic oligonucleotide
  Sense Strand Starting at position 1022 of SEQ ID NO: 316979
cucuucucagaagagcuau

SEQ ID NO: 398974 - RNA, 19 nt, Artificial Sequence
  Description of Artificial Sequence: Synthetic oligonucleotide
  Antisense Strand to SEQ ID NO: 398973
auagcucuucugagaagag

SEQ ID NO: 398975 - RNA, 19 nt, Artificial Sequence
  Description of Artificial Sequence: Synthetic oligonucleotide
  Sense Strand Starting at position 1022 of SEQ ID NO: 316989
aagagcuauugccugggaa

SEQ ID NO: 398976 - RNA, 19 nt, Artificial Sequence
  Description of Artificial Sequence: Synthetic oligonucleotide
  Antisense Strand to SEQ ID NO: 398975
uucccaggcaauagcucuu

SEQ ID NO: 398977 - RNA, 19 nt, Artificial Sequence
  Description of Artificial Sequence: Synthetic oligonucleotide
  Sense Strand Starting at position 1022 of SEQ ID NO: 316990
agagcuauugccugggaaa

SEQ ID NO: 398978 - RNA, 19 nt, Artificial Sequence
  Description of Artificial Sequence: Synthetic oligonucleotide
  Antisense Strand to SEQ ID NO: 398977
uuucccaggcaauagcucu

SEQ ID NO: 398979 - RNA, 19 nt, Artificial Sequence
  Description of Artificial Sequence: Synthetic oligonucleotide
  Sense Strand Starting at position 1022 of SEQ ID NO: 316991
gagcuauugccugggaaac

SEQ ID NO: 398980 - RNA, 19 nt, Artificial Sequence
  Description of Artificial Sequence: Synthetic oligonucleotide
  Antisense Strand to SEQ ID NO: 398979
guuucccaggcaauagcuc

SEQ ID NO: 398981 - RNA, 19 nt, Artificial Sequence
  Description of Artificial Sequence: Synthetic oligonucleotide
  Sense Strand Starting at position 1022 of SEQ ID NO: 317247
uucgguguucgguucaguu

SEQ ID NO: 398982 - RNA, 19 nt, Artificial Sequence
  Description of Artificial Sequence: Synthetic oligonucleotide
  Antisense Strand to SEQ ID NO: 398981
aacugaaccgaacaccgaa

SEQ ID NO: 398983 - RNA, 19 nt, Artificial Sequence
  Description of Artificial Sequence: Synthetic oligonucleotide
  Sense Strand Starting at position 1022 of SEQ ID NO: 317312
uagacugucugaguacaca

SEQ ID NO: 398984 - RNA, 19 nt, Artificial Sequence
  Description of Artificial Sequence: Synthetic oligonucleotide
  Antisense Strand to SEQ ID NO: 398983
uguguacucagacagucua

SEQ ID NO: 398985 - RNA, 19 nt, Artificial Sequence
  Description of Artificial Sequence: Synthetic oligonucleotide
  Sense Strand Starting at position 1022 of SEQ ID NO: 317331
gaacaagucuuuguucuga

SEQ ID NO: 398986 - RNA, 19 nt, Artificial Sequence
  Description of Artificial Sequence: Synthetic oligonucleotide
  Antisense Strand to SEQ ID NO: 398985
ucagaacaaagacuuguuc

SEQ ID NO: 398987 - RNA, 19 nt, Artificial Sequence
  Description of Artificial Sequence: Synthetic oligonucleotide
  Sense Strand Starting at position 1022 of SEQ ID NO: 317333
acaagucuuuguucugaaa

SEQ ID NO: 398988 - RNA, 19 nt, Artificial Sequence
  Description of Artificial Sequence: Synthetic oligonucleotide
  Antisense Strand to SEQ ID NO: 398987
uuucagaacaaagacuugu

SEQ ID NO: 398989 - RNA, 19 nt, Artificial Sequence
  Description of Artificial Sequence: Synthetic oligonucleotide
  Sense Strand Starting at position 1022 of SEQ ID NO: 317400
gauaaagagcucuguucua

SEQ ID NO: 398990 - RNA, 19 nt, Artificial Sequence
  Description of Artificial Sequence: Synthetic oligonucleotide
  Antisense Strand to SEQ ID NO: 398989
uagaacagagcucuuuauc

SEQ ID NO: 398991 - RNA, 19 nt, Artificial Sequence
  Description of Artificial Sequence: Synthetic oligonucleotide
  Sense Strand Starting at position 1022 of SEQ ID NO: 318738
aagaguauccuguagcuaa

SEQ ID NO: 398992 - RNA, 19 nt, Artificial Sequence
  Description of Artificial Sequence: Synthetic oligonucleotide
  Antisense Strand to SEQ ID NO: 398991
uuagcuacaggauacucuu

SEQ ID NO: 398993 - RNA, 19 nt, Artificial Sequence
  Description of Artificial Sequence: Synthetic oligonucleotide
  Sense Strand Starting at position 1022 of SEQ ID NO: 318879
gaaggauuauucuuggagu

SEQ ID NO: 398994 - RNA, 19 nt, Artificial Sequence
  Description of Artificial Sequence: Synthetic oligonucleotide
  Antisense Strand to SEQ ID NO: 398993
acuccaagaauaauccuuc

SEQ ID NO: 398995 - RNA, 19 nt, Artificial Sequence
  Description of Artificial Sequence: Synthetic oligonucleotide
  Sense Strand Starting at position 1022 of SEQ ID NO: 318881
aggauuauucuuggaguuu

SEQ ID NO: 398996 - RNA, 19 nt, Artificial Sequence
  Description of Artificial Sequence: Synthetic oligonucleotide
  Antisense Strand to SEQ ID NO: 398995
aaacuccaagaauaauccu

SEQ ID NO: 398997 - RNA, 19 nt, Artificial Sequence
  Description of Artificial Sequence: Synthetic oligonucleotide
  Sense Strand Starting at position 1022 of SEQ ID NO: 318901
gcagguuaacugcacagaa

SEQ ID NO: 398998 - RNA, 19 nt, Artificial Sequence
  Description of Artificial Sequence: Synthetic oligonucleotide
  Antisense Strand to SEQ ID NO: 398997
uucugugcaguuaaccugc

SEQ ID NO: 398999 - RNA, 19 nt, Artificial Sequence
  Description of Artificial Sequence: Synthetic oligonucleotide
  Sense Strand Starting at position 1022 of SEQ ID NO: 318946
ucaguuaacgagcagugga

SEQ ID NO: 399000 - RNA, 19 nt, Artificial Sequence
  Description of Artificial Sequence: Synthetic oligonucleotide
  Antisense Strand to SEQ ID NO: 398999
uccacugcucguuaacuga

SEQ ID NO: 399001 - RNA, 19 nt, Artificial Sequence
  Description of Artificial Sequence: Synthetic oligonucleotide
  Sense Strand Starting at position 1022 of SEQ ID NO: 319132
agcugcaugaagggauuau

SEQ ID NO: 399002 - RNA, 19 nt, Artificial Sequence
  Description of Artificial Sequence: Synthetic oligonucleotide
  Antisense Strand to SEQ ID NO: 399001
auaaucccuucaugcagcu

SEQ ID NO: 399003 - RNA, 19 nt, Artificial Sequence
  Description of Artificial Sequence: Synthetic oligonucleotide
  Sense Strand Starting at position 1023 of SEQ ID NO: 315240
augugcguuuauuuacaga

SEQ ID NO: 399004 - RNA, 19 nt, Artificial Sequence
  Description of Artificial Sequence: Synthetic oligonucleotide
  Antisense Strand to SEQ ID NO: 399003
ucuguaaauaaacgcacau

SEQ ID NO: 399005 - RNA, 19 nt, Artificial Sequence
  Description of Artificial Sequence: Synthetic oligonucleotide
  Sense Strand Starting at position 1023 of SEQ ID NO: 315311
gugagauaagcuugaauuc

SEQ ID NO: 399006 - RNA, 19 nt, Artificial Sequence
  Description of Artificial Sequence: Synthetic oligonucleotide
  Antisense Strand to SEQ ID NO: 399005
gaauucaagcuuaucucac

SEQ ID NO: 399007 - RNA, 19 nt, Artificial Sequence
  Description of Artificial Sequence: Synthetic oligonucleotide
  Sense Strand Starting at position 1023 of SEQ ID NO: 315442
gggucuuaggcauacagca

SEQ ID NO: 399008 - RNA, 19 nt, Artificial Sequence
  Description of Artificial Sequence: Synthetic oligonucleotide
  Antisense Strand to SEQ ID NO: 399007
ugcuguaugccuaagaccc

SEQ ID NO: 399009 - RNA, 19 nt, Artificial Sequence
  Description of Artificial Sequence: Synthetic oligonucleotide
  Sense Strand Starting at position 1023 of SEQ ID NO: 315462
cacucuuaggcauagagca

SEQ ID NO: 399010 - RNA, 19 nt, Artificial Sequence
  Description of Artificial Sequence: Synthetic oligonucleotide
  Antisense Strand to SEQ ID NO: 399009
ugcucuaugccuaagagug

SEQ ID NO: 399011 - RNA, 19 nt, Artificial Sequence
  Description of Artificial Sequence: Synthetic oligonucleotide
  Sense Strand Starting at position 1023 of SEQ ID NO: 315498
caugcacucuggguuuaaa

SEQ ID NO: 399012 - RNA, 19 nt, Artificial Sequence
  Description of Artificial Sequence: Synthetic oligonucleotide
  Antisense Strand to SEQ ID NO: 399011
uuuaaacccagagugcaug

SEQ ID NO: 399013 - RNA, 19 nt, Artificial Sequence
  Description of Artificial Sequence: Synthetic oligonucleotide
  Sense Strand Starting at position 1023 of SEQ ID NO: 315546
ucgcacuuaccagaugagu

SEQ ID NO: 399014 - RNA, 19 nt, Artificial Sequence
  Description of Artificial Sequence: Synthetic oligonucleotide
  Antisense Strand to SEQ ID NO: 399013
acucaucugguaagugcga

SEQ ID NO: 399015 - RNA, 19 nt, Artificial Sequence
  Description of Artificial Sequence: Synthetic oligonucleotide
  Sense Strand Starting at position 1023 of SEQ ID NO: 315559
augaguaaccuuggaccua

SEQ ID NO: 399016 - RNA, 19 nt, Artificial Sequence
  Description of Artificial Sequence: Synthetic oligonucleotide
  Antisense Strand to SEQ ID NO: 399015
uagguccaagguuacucau

SEQ ID NO: 399017 - RNA, 19 nt, Artificial Sequence
  Description of Artificial Sequence: Synthetic oligonucleotide
  Sense Strand Starting at position 1023 of SEQ ID NO: 315848
caacuaauacguuggauau

SEQ ID NO: 399018 - RNA, 19 nt, Artificial Sequence
  Description of Artificial Sequence: Synthetic oligonucleotide
  Antisense Strand to SEQ ID NO: 399017
auauccaacguauuaguug

SEQ ID NO: 399019 - RNA, 19 nt, Artificial Sequence
  Description of Artificial Sequence: Synthetic oligonucleotide
  Sense Strand Starting at position 1023 of SEQ ID NO: 315849
aacuaauacguuggauaug

SEQ ID NO: 399020 - RNA, 19 nt, Artificial Sequence
  Description of Artificial Sequence: Synthetic oligonucleotide
  Antisense Strand to SEQ ID NO: 399019
cauauccaacguauuaguu

SEQ ID NO: 399021 - RNA, 19 nt, Artificial Sequence
  Description of Artificial Sequence: Synthetic oligonucleotide
  Sense Strand Starting at position 1023 of SEQ ID NO: 315876
guggacauauagcuacuua

SEQ ID NO: 399022 - RNA, 19 nt, Artificial Sequence
  Description of Artificial Sequence: Synthetic oligonucleotide
  Antisense Strand to SEQ ID NO: 399021
uaaguagcuauauguccac

SEQ ID NO: 399023 - RNA, 19 nt, Artificial Sequence
  Description of Artificial Sequence: Synthetic oligonucleotide
  Sense Strand Starting at position 1023 of SEQ ID NO: 315955
cuuaguaagccagggucaa

SEQ ID NO: 399024 - RNA, 19 nt, Artificial Sequence
  Description of Artificial Sequence: Synthetic oligonucleotide
  Antisense Strand to SEQ ID NO: 399023
uugacccuggcuuacuaag

SEQ ID NO: 399025 - RNA, 19 nt, Artificial Sequence
  Description of Artificial Sequence: Synthetic oligonucleotide
  Sense Strand Starting at position 1023 of SEQ ID NO: 315956
uuaguaagccagggucaaa

SEQ ID NO: 399026 - RNA, 19 nt, Artificial Sequence
  Description of Artificial Sequence: Synthetic oligonucleotide
  Antisense Strand to SEQ ID NO: 399025
uuugacccuggcuuacuaa

SEQ ID NO: 399027 - RNA, 19 nt, Artificial Sequence
  Description of Artificial Sequence: Synthetic oligonucleotide
  Sense Strand Starting at position 1023 of SEQ ID NO: 316059
gaggcaguagcuuaacuuu

SEQ ID NO: 399028 - RNA, 19 nt, Artificial Sequence
  Description of Artificial Sequence: Synthetic oligonucleotide
  Antisense Strand to SEQ ID NO: 399027
aaaguuaagcuacugccuc

SEQ ID NO: 399029 - RNA, 19 nt, Artificial Sequence
  Description of Artificial Sequence: Synthetic oligonucleotide
  Sense Strand Starting at position 1023 of SEQ ID NO: 316165
guggcuguaucaucauaga

SEQ ID NO: 399030 - RNA, 19 nt, Artificial Sequence
  Description of Artificial Sequence: Synthetic oligonucleotide
  Antisense Strand to SEQ ID NO: 399029
ucuaugaugauacagccac

SEQ ID NO: 399031 - RNA, 19 nt, Artificial Sequence
  Description of Artificial Sequence: Synthetic oligonucleotide
  Sense Strand Starting at position 1023 of SEQ ID NO: 316225
cagguuuaccguuacuaaa

SEQ ID NO: 399032 - RNA, 19 nt, Artificial Sequence
  Description of Artificial Sequence: Synthetic oligonucleotide
  Antisense Strand to SEQ ID NO: 399031
uuuaguaacgguaaaccug

SEQ ID NO: 399033 - RNA, 19 nt, Artificial Sequence
  Description of Artificial Sequence: Synthetic oligonucleotide
  Sense Strand Starting at position 1023 of SEQ ID NO: 316244
acgagugucaagcauauac

SEQ ID NO: 399034 - RNA, 19 nt, Artificial Sequence
  Description of Artificial Sequence: Synthetic oligonucleotide
  Antisense Strand to SEQ ID NO: 399033
guauaugcuugacacucgu

SEQ ID NO: 399035 - RNA, 19 nt, Artificial Sequence
  Description of Artificial Sequence: Synthetic oligonucleotide
  Sense Strand Starting at position 1023 of SEQ ID NO: 316316
augugaaaguacuuggcau

SEQ ID NO: 399036 - RNA, 19 nt, Artificial Sequence
  Description of Artificial Sequence: Synthetic oligonucleotide
  Antisense Strand to SEQ ID NO: 399035
augccaaguacuuucacau

SEQ ID NO: 399037 - RNA, 19 nt, Artificial Sequence
  Description of Artificial Sequence: Synthetic oligonucleotide
  Sense Strand Starting at position 1023 of SEQ ID NO: 316317
ugugaaaguacuuggcauc

SEQ ID NO: 399038 - RNA, 19 nt, Artificial Sequence
  Description of Artificial Sequence: Synthetic oligonucleotide
  Antisense Strand to SEQ ID NO: 399037
gaugccaaguacuuucaca

SEQ ID NO: 399039 - RNA, 19 nt, Artificial Sequence
  Description of Artificial Sequence: Synthetic oligonucleotide
  Sense Strand Starting at position 1023 of SEQ ID NO: 316318
gugaaaguacuuggcauca

SEQ ID NO: 399040 - RNA, 19 nt, Artificial Sequence
  Description of Artificial Sequence: Synthetic oligonucleotide
  Antisense Strand to SEQ ID NO: 399039
ugaugccaaguacuuucac

SEQ ID NO: 399041 - RNA, 19 nt, Artificial Sequence
  Description of Artificial Sequence: Synthetic oligonucleotide
  Sense Strand Starting at position 1023 of SEQ ID NO: 316354
gagauuuaauuggaauggu

SEQ ID NO: 399042 - RNA, 19 nt, Artificial Sequence
  Description of Artificial Sequence: Synthetic oligonucleotide
  Antisense Strand to SEQ ID NO: 399041
accauuccaauuaaaucuc

SEQ ID NO: 399043 - RNA, 19 nt, Artificial Sequence
  Description of Artificial Sequence: Synthetic oligonucleotide
  Sense Strand Starting at position 1023 of SEQ ID NO: 316393
guggauaaaccagauugcu

SEQ ID NO: 399044 - RNA, 19 nt, Artificial Sequence
  Description of Artificial Sequence: Synthetic oligonucleotide
  Antisense Strand to SEQ ID NO: 399043
agcaaucugguuuauccac

SEQ ID NO: 399045 - RNA, 19 nt, Artificial Sequence
  Description of Artificial Sequence: Synthetic oligonucleotide
  Sense Strand Starting at position 1023 of SEQ ID NO: 316730
gguuuauaucagcacuugu

SEQ ID NO: 399046 - RNA, 19 nt, Artificial Sequence
  Description of Artificial Sequence: Synthetic oligonucleotide
  Antisense Strand to SEQ ID NO: 399045
acaagugcugauauaaacc

SEQ ID NO: 399047 - RNA, 19 nt, Artificial Sequence
  Description of Artificial Sequence: Synthetic oligonucleotide
  Sense Strand Starting at position 1023 of SEQ ID NO: 316738
ucagcacuuguccaugagu

SEQ ID NO: 399048 - RNA, 19 nt, Artificial Sequence
  Description of Artificial Sequence: Synthetic oligonucleotide
  Antisense Strand to SEQ ID NO: 399047
acucauggacaagugcuga

SEQ ID NO: 399049 - RNA, 19 nt, Artificial Sequence
  Description of Artificial Sequence: Synthetic oligonucleotide
  Sense Strand Starting at position 1023 of SEQ ID NO: 316745
uuguccaugaguuggcaaa

SEQ ID NO: 399050 - RNA, 19 nt, Artificial Sequence
  Description of Artificial Sequence: Synthetic oligonucleotide
  Antisense Strand to SEQ ID NO: 399049
uuugccaacucauggacaa

SEQ ID NO: 399051 - RNA, 19 nt, Artificial Sequence
  Description of Artificial Sequence: Synthetic oligonucleotide
  Sense Strand Starting at position 1023 of SEQ ID NO: 316780
guggaucgucacuagguau

SEQ ID NO: 399052 - RNA, 19 nt, Artificial Sequence
  Description of Artificial Sequence: Synthetic oligonucleotide
  Antisense Strand to SEQ ID NO: 399051
auaccuagugacgauccac

SEQ ID NO: 399053 - RNA, 19 nt, Artificial Sequence
  Description of Artificial Sequence: Synthetic oligonucleotide
  Sense Strand Starting at position 1023 of SEQ ID NO: 317492
cguccuauccauuagcaca

SEQ ID NO: 399054 - RNA, 19 nt, Artificial Sequence
  Description of Artificial Sequence: Synthetic oligonucleotide
  Antisense Strand to SEQ ID NO: 399053
ugugcuaauggauaggacg

SEQ ID NO: 399055 - RNA, 19 nt, Artificial Sequence
  Description of Artificial Sequence: Synthetic oligonucleotide
  Sense Strand Starting at position 1023 of SEQ ID NO: 317538
ucaaguuauuauuuccguu

SEQ ID NO: 399056 - RNA, 19 nt, Artificial Sequence
  Description of Artificial Sequence: Synthetic oligonucleotide
  Antisense Strand to SEQ ID NO: 399055
aacggaaauaauaacuuga

SEQ ID NO: 399057 - RNA, 19 nt, Artificial Sequence
  Description of Artificial Sequence: Synthetic oligonucleotide
  Sense Strand Starting at position 1023 of SEQ ID NO: 317592
ugggauugguuacuaacca

SEQ ID NO: 399058 - RNA, 19 nt, Artificial Sequence
  Description of Artificial Sequence: Synthetic oligonucleotide
  Antisense Strand to SEQ ID NO: 399057
ugguuaguaaccaauccca

SEQ ID NO: 399059 - RNA, 19 nt, Artificial Sequence
  Description of Artificial Sequence: Synthetic oligonucleotide
  Sense Strand Starting at position 1023 of SEQ ID NO: 317631
cuuugcaucucccuggaaa

SEQ ID NO: 399060 - RNA, 19 nt, Artificial Sequence
  Description of Artificial Sequence: Synthetic oligonucleotide
  Antisense Strand to SEQ ID NO: 399059
uuuccagggagaugcaaag

SEQ ID NO: 399061 - RNA, 19 nt, Artificial Sequence
  Description of Artificial Sequence: Synthetic oligonucleotide
  Sense Strand Starting at position 1023 of SEQ ID NO: 317632
uuugcaucucccuggaaag

SEQ ID NO: 399062 - RNA, 19 nt, Artificial Sequence
  Description of Artificial Sequence: Synthetic oligonucleotide
  Antisense Strand to SEQ ID NO: 399061
cuuuccagggagaugcaaa

SEQ ID NO: 399063 - RNA, 19 nt, Artificial Sequence
  Description of Artificial Sequence: Synthetic oligonucleotide
  Sense Strand Starting at position 1023 of SEQ ID NO: 317720
gagauaagguuccugcuga

SEQ ID NO: 399064 - RNA, 19 nt, Artificial Sequence
  Description of Artificial Sequence: Synthetic oligonucleotide
  Antisense Strand to SEQ ID NO: 399063
ucagcaggaaccuuaucuc

SEQ ID NO: 399065 - RNA, 19 nt, Artificial Sequence
  Description of Artificial Sequence: Synthetic oligonucleotide
  Sense Strand Starting at position 1023 of SEQ ID NO: 317835
ggcccauccgcccaagaaa

SEQ ID NO: 399066 - RNA, 19 nt, Artificial Sequence
  Description of Artificial Sequence: Synthetic oligonucleotide
  Antisense Strand to SEQ ID NO: 399065
uuucuugggcggaugggcc

SEQ ID NO: 399067 - RNA, 19 nt, Artificial Sequence
  Description of Artificial Sequence: Synthetic oligonucleotide
  Sense Strand Starting at position 1023 of SEQ ID NO: 318120
gugagaugugcugagacag

SEQ ID NO: 399068 - RNA, 19 nt, Artificial Sequence
  Description of Artificial Sequence: Synthetic oligonucleotide
  Antisense Strand to SEQ ID NO: 399067
cugucucagcacaucucac

SEQ ID NO: 399069 - RNA, 19 nt, Artificial Sequence
  Description of Artificial Sequence: Synthetic oligonucleotide
  Sense Strand Starting at position 1023 of SEQ ID NO: 318203
gcaucaugaaggugauguu

SEQ ID NO: 399070 - RNA, 19 nt, Artificial Sequence
  Description of Artificial Sequence: Synthetic oligonucleotide
  Antisense Strand to SEQ ID NO: 399069
aacaucaccuucaugaugc

SEQ ID NO: 399071 - RNA, 19 nt, Artificial Sequence
  Description of Artificial Sequence: Synthetic oligonucleotide
  Sense Strand Starting at position 1023 of SEQ ID NO: 318338
aggagaguuuauguuagaa

SEQ ID NO: 399072 - RNA, 19 nt, Artificial Sequence
  Description of Artificial Sequence: Synthetic oligonucleotide
  Antisense Strand to SEQ ID NO: 399071
uucuaacauaaacucuccu

SEQ ID NO: 399073 - RNA, 19 nt, Artificial Sequence
  Description of Artificial Sequence: Synthetic oligonucleotide
  Sense Strand Starting at position 1023 of SEQ ID NO: 318733
cuuguacaucuugauucua

SEQ ID NO: 399074 - RNA, 19 nt, Artificial Sequence
  Description of Artificial Sequence: Synthetic oligonucleotide
  Antisense Strand to SEQ ID NO: 399073
uagaaucaagauguacaag

SEQ ID NO: 399075 - RNA, 19 nt, Artificial Sequence
  Description of Artificial Sequence: Synthetic oligonucleotide
  Sense Strand Starting at position 1023 of SEQ ID NO: 318794
gaaucuagguuucuaauga

SEQ ID NO: 399076 - RNA, 19 nt, Artificial Sequence
  Description of Artificial Sequence: Synthetic oligonucleotide
  Antisense Strand to SEQ ID NO: 399075
ucauuagaaaccuagauuc

SEQ ID NO: 399077 - RNA, 19 nt, Artificial Sequence
  Description of Artificial Sequence: Synthetic oligonucleotide
  Sense Strand Starting at position 1023 of SEQ ID NO: 318817
cauaauuacugggucaaug

SEQ ID NO: 399078 - RNA, 19 nt, Artificial Sequence
  Description of Artificial Sequence: Synthetic oligonucleotide
  Antisense Strand to SEQ ID NO: 399077
cauugacccaguaauuaug

SEQ ID NO: 399079 - RNA, 19 nt, Artificial Sequence
  Description of Artificial Sequence: Synthetic oligonucleotide
  Sense Strand Starting at position 1023 of SEQ ID NO: 318819
uaauuacugggucaauguu

SEQ ID NO: 399080 - RNA, 19 nt, Artificial Sequence
  Description of Artificial Sequence: Synthetic oligonucleotide
  Antisense Strand to SEQ ID NO: 399079
aacauugacccaguaauua

SEQ ID NO: 399081 - RNA, 19 nt, Artificial Sequence
  Description of Artificial Sequence: Synthetic oligonucleotide
  Sense Strand Starting at position 1023 of SEQ ID NO: 319211
ccuggucauuacucuuaga

SEQ ID NO: 399082 - RNA, 19 nt, Artificial Sequence
  Description of Artificial Sequence: Synthetic oligonucleotide
  Antisense Strand to SEQ ID NO: 399081
ucuaagaguaaugaccagg

SEQ ID NO: 399083 - RNA, 19 nt, Artificial Sequence
  Description of Artificial Sequence: Synthetic oligonucleotide
  Sense Strand Starting at position 1024 of SEQ ID NO: 315265
cucgaagacccuuaaagua

SEQ ID NO: 399084 - RNA, 19 nt, Artificial Sequence
  Description of Artificial Sequence: Synthetic oligonucleotide
  Antisense Strand to SEQ ID NO: 399083
uacuuuaagggucuucgag

SEQ ID NO: 399085 - RNA, 19 nt, Artificial Sequence
  Description of Artificial Sequence: Synthetic oligonucleotide
  Sense Strand Starting at position 1024 of SEQ ID NO: 315287
gccuuucccuguuccugaa

SEQ ID NO: 399086 - RNA, 19 nt, Artificial Sequence
  Description of Artificial Sequence: Synthetic oligonucleotide
  Antisense Strand to SEQ ID NO: 399085
uucaggaacagggaaaggc

SEQ ID NO: 399087 - RNA, 19 nt, Artificial Sequence
  Description of Artificial Sequence: Synthetic oligonucleotide
  Sense Strand Starting at position 1024 of SEQ ID NO: 315291
uucccuguuccugaauaga

SEQ ID NO: 399088 - RNA, 19 nt, Artificial Sequence
  Description of Artificial Sequence: Synthetic oligonucleotide
  Antisense Strand to SEQ ID NO: 399087
ucuauucaggaacagggaa

SEQ ID NO: 399089 - RNA, 19 nt, Artificial Sequence
  Description of Artificial Sequence: Synthetic oligonucleotide
  Sense Strand Starting at position 1024 of SEQ ID NO: 315501
agauaaucauucccagcga

SEQ ID NO: 399090 - RNA, 19 nt, Artificial Sequence
  Description of Artificial Sequence: Synthetic oligonucleotide
  Antisense Strand to SEQ ID NO: 399089
ucgcugggaaugauuaucu

SEQ ID NO: 399091 - RNA, 19 nt, Artificial Sequence
  Description of Artificial Sequence: Synthetic oligonucleotide
  Sense Strand Starting at position 1024 of SEQ ID NO: 315515
agcgauaaaucagacauaa

SEQ ID NO: 399092 - RNA, 19 nt, Artificial Sequence
  Description of Artificial Sequence: Synthetic oligonucleotide
  Antisense Strand to SEQ ID NO: 399091
uuaugucugauuuaucgcu

SEQ ID NO: 399093 - RNA, 19 nt, Artificial Sequence
  Description of Artificial Sequence: Synthetic oligonucleotide
  Sense Strand Starting at position 1024 of SEQ ID NO: 315564
ccaguaauguucucaaguu

SEQ ID NO: 399094 - RNA, 19 nt, Artificial Sequence
  Description of Artificial Sequence: Synthetic oligonucleotide
  Antisense Strand to SEQ ID NO: 399093
aacuugagaacauuacugg

SEQ ID NO: 399095 - RNA, 19 nt, Artificial Sequence
  Description of Artificial Sequence: Synthetic oligonucleotide
  Sense Strand Starting at position 1024 of SEQ ID NO: 315875
caacguauggaguaauauu

SEQ ID NO: 399096 - RNA, 19 nt, Artificial Sequence
  Description of Artificial Sequence: Synthetic oligonucleotide
  Antisense Strand to SEQ ID NO: 399095
aauauuacuccauacguug

SEQ ID NO: 399097 - RNA, 19 nt, Artificial Sequence
  Description of Artificial Sequence: Synthetic oligonucleotide
  Sense Strand Starting at position 1024 of SEQ ID NO: 316167
ggcaaucaacuguaauguu

SEQ ID NO: 399098 - RNA, 19 nt, Artificial Sequence
  Description of Artificial Sequence: Synthetic oligonucleotide
  Antisense Strand to SEQ ID NO: 399097
aacauuacaguugauugcc

SEQ ID NO: 399099 - RNA, 19 nt, Artificial Sequence
  Description of Artificial Sequence: Synthetic oligonucleotide
  Sense Strand Starting at position 1024 of SEQ ID NO: 316350
ccaaguauuuaugaauguu

SEQ ID NO: 399100 - RNA, 19 nt, Artificial Sequence
  Description of Artificial Sequence: Synthetic oligonucleotide
  Antisense Strand to SEQ ID NO: 399099
aacauucauaaauacuugg

SEQ ID NO: 399101 - RNA, 19 nt, Artificial Sequence
  Description of Artificial Sequence: Synthetic oligonucleotide
  Sense Strand Starting at position 1024 of SEQ ID NO: 316777
uccuacaauccauagcgau

SEQ ID NO: 399102 - RNA, 19 nt, Artificial Sequence
  Description of Artificial Sequence: Synthetic oligonucleotide
  Antisense Strand to SEQ ID NO: 399101
aucgcuauggauuguagga

SEQ ID NO: 399103 - RNA, 19 nt, Artificial Sequence
  Description of Artificial Sequence: Synthetic oligonucleotide
  Sense Strand Starting at position 1024 of SEQ ID NO: 316783
aauccauagcgauaguacu

SEQ ID NO: 399104 - RNA, 19 nt, Artificial Sequence
  Description of Artificial Sequence: Synthetic oligonucleotide
  Antisense Strand to SEQ ID NO: 399103
aguacuaucgcuauggauu

SEQ ID NO: 399105 - RNA, 19 nt, Artificial Sequence
  Description of Artificial Sequence: Synthetic oligonucleotide
  Sense Strand Starting at position 1024 of SEQ ID NO: 316839
agacacaagugucaaauaa

SEQ ID NO: 399106 - RNA, 19 nt, Artificial Sequence
  Description of Artificial Sequence: Synthetic oligonucleotide
  Antisense Strand to SEQ ID NO: 399105
uuauuugacacuugugucu

SEQ ID NO: 399107 - RNA, 19 nt, Artificial Sequence
  Description of Artificial Sequence: Synthetic oligonucleotide
  Sense Strand Starting at position 1024 of SEQ ID NO: 316852
aaauaaauccaguguccgu

SEQ ID NO: 399108 - RNA, 19 nt, Artificial Sequence
  Description of Artificial Sequence: Synthetic oligonucleotide
  Antisense Strand to SEQ ID NO: 399107
acggacacuggauuuauuu

SEQ ID NO: 399109 - RNA, 19 nt, Artificial Sequence
  Description of Artificial Sequence: Synthetic oligonucleotide
  Sense Strand Starting at position 1024 of SEQ ID NO: 316857
aauccaguguccguuugaa

SEQ ID NO: 399110 - RNA, 19 nt, Artificial Sequence
  Description of Artificial Sequence: Synthetic oligonucleotide
  Antisense Strand to SEQ ID NO: 399109
uucaaacggacacuggauu

SEQ ID NO: 399111 - RNA, 19 nt, Artificial Sequence
  Description of Artificial Sequence: Synthetic oligonucleotide
  Sense Strand Starting at position 1024 of SEQ ID NO: 317113
ggaggugccuuuccucaca

SEQ ID NO: 399112 - RNA, 19 nt, Artificial Sequence
  Description of Artificial Sequence: Synthetic oligonucleotide
  Antisense Strand to SEQ ID NO: 399111
ugugaggaaaggcaccucc

SEQ ID NO: 399113 - RNA, 19 nt, Artificial Sequence
  Description of Artificial Sequence: Synthetic oligonucleotide
  Sense Strand Starting at position 1024 of SEQ ID NO: 317316
gcgggugagccgucguaau

SEQ ID NO: 399114 - RNA, 19 nt, Artificial Sequence
  Description of Artificial Sequence: Synthetic oligonucleotide
  Antisense Strand to SEQ ID NO: 399113
auuacgacggcucacccgc

SEQ ID NO: 399115 - RNA, 19 nt, Artificial Sequence
  Description of Artificial Sequence: Synthetic oligonucleotide
  Sense Strand Starting at position 1024 of SEQ ID NO: 317326
cgucguaauuucgcaggaa

SEQ ID NO: 399116 - RNA, 19 nt, Artificial Sequence
  Description of Artificial Sequence: Synthetic oligonucleotide
  Antisense Strand to SEQ ID NO: 399115
uuccugcgaaauuacgacg

SEQ ID NO: 399117 - RNA, 19 nt, Artificial Sequence
  Description of Artificial Sequence: Synthetic oligonucleotide
  Sense Strand Starting at position 1024 of SEQ ID NO: 317338
gcaggaauccagugcugga

SEQ ID NO: 399118 - RNA, 19 nt, Artificial Sequence
  Description of Artificial Sequence: Synthetic oligonucleotide
  Antisense Strand to SEQ ID NO: 399117
uccagcacuggauuccugc

SEQ ID NO: 399119 - RNA, 19 nt, Artificial Sequence
  Description of Artificial Sequence: Synthetic oligonucleotide
  Sense Strand Starting at position 1024 of SEQ ID NO: 317342
gaauccagugcuggaaacu

SEQ ID NO: 399120 - RNA, 19 nt, Artificial Sequence
  Description of Artificial Sequence: Synthetic oligonucleotide
  Antisense Strand to SEQ ID NO: 399119
aguuuccagcacuggauuc

SEQ ID NO: 399121 - RNA, 19 nt, Artificial Sequence
  Description of Artificial Sequence: Synthetic oligonucleotide
  Sense Strand Starting at position 1024 of SEQ ID NO: 317343
aauccagugcuggaaacuu

SEQ ID NO: 399122 - RNA, 19 nt, Artificial Sequence
  Description of Artificial Sequence: Synthetic oligonucleotide
  Antisense Strand to SEQ ID NO: 399121
aaguuuccagcacuggauu

SEQ ID NO: 399123 - RNA, 19 nt, Artificial Sequence
  Description of Artificial Sequence: Synthetic oligonucleotide
  Sense Strand Starting at position 1024 of SEQ ID NO: 317354
ggaaacuucgcucgggaga

SEQ ID NO: 399124 - RNA, 19 nt, Artificial Sequence
  Description of Artificial Sequence: Synthetic oligonucleotide
  Antisense Strand to SEQ ID NO: 399123
ucucccgagcgaaguuucc

SEQ ID NO: 399125 - RNA, 19 nt, Artificial Sequence
  Description of Artificial Sequence: Synthetic oligonucleotide
  Sense Strand Starting at position 1024 of SEQ ID NO: 317694
gguuaaauccaucacaguc

SEQ ID NO: 399126 - RNA, 19 nt, Artificial Sequence
  Description of Artificial Sequence: Synthetic oligonucleotide
  Antisense Strand to SEQ ID NO: 399125
gacugugauggauuuaacc

SEQ ID NO: 399127 - RNA, 19 nt, Artificial Sequence
  Description of Artificial Sequence: Synthetic oligonucleotide
  Sense Strand Starting at position 1024 of SEQ ID NO: 318235
guauuugccucuucugaag

SEQ ID NO: 399128 - RNA, 19 nt, Artificial Sequence
  Description of Artificial Sequence: Synthetic oligonucleotide
  Antisense Strand to SEQ ID NO: 399127
cuucagaagaggcaaauac

SEQ ID NO: 399129 - RNA, 19 nt, Artificial Sequence
  Description of Artificial Sequence: Synthetic oligonucleotide
  Sense Strand Starting at position 1024 of SEQ ID NO: 318326
agagaaagggcguggcaua

SEQ ID NO: 399130 - RNA, 19 nt, Artificial Sequence
  Description of Artificial Sequence: Synthetic oligonucleotide
  Antisense Strand to SEQ ID NO: 399129
uaugccacgcccuuucucu

SEQ ID NO: 399131 - RNA, 19 nt, Artificial Sequence
  Description of Artificial Sequence: Synthetic oligonucleotide
  Sense Strand Starting at position 1024 of SEQ ID NO: 318451
ucaaauucuggcgaccaca

SEQ ID NO: 399132 - RNA, 19 nt, Artificial Sequence
  Description of Artificial Sequence: Synthetic oligonucleotide
  Antisense Strand to SEQ ID NO: 399131
uguggucgccagaauuuga

SEQ ID NO: 399133 - RNA, 19 nt, Artificial Sequence
  Description of Artificial Sequence: Synthetic oligonucleotide
  Sense Strand Starting at position 1024 of SEQ ID NO: 318464
accacaugcccgcauuaaa

SEQ ID NO: 399134 - RNA, 19 nt, Artificial Sequence
  Description of Artificial Sequence: Synthetic oligonucleotide
  Antisense Strand to SEQ ID NO: 399133
uuuaaugcgggcauguggu

SEQ ID NO: 399135 - RNA, 19 nt, Artificial Sequence
  Description of Artificial Sequence: Synthetic oligonucleotide
  Sense Strand Starting at position 1024 of SEQ ID NO: 318538
uuugaauauucggagaaau

SEQ ID NO: 399136 - RNA, 19 nt, Artificial Sequence
  Description of Artificial Sequence: Synthetic oligonucleotide
  Antisense Strand to SEQ ID NO: 399135
auuucuccgaauauucaaa

SEQ ID NO: 399137 - RNA, 19 nt, Artificial Sequence
  Description of Artificial Sequence: Synthetic oligonucleotide
  Sense Strand Starting at position 1024 of SEQ ID NO: 318618
gguauuaggagcuauuaua

SEQ ID NO: 399138 - RNA, 19 nt, Artificial Sequence
  Description of Artificial Sequence: Synthetic oligonucleotide
  Antisense Strand to SEQ ID NO: 399137
uauaauagcuccuaauacc

SEQ ID NO: 399139 - RNA, 19 nt, Artificial Sequence
  Description of Artificial Sequence: Synthetic oligonucleotide
  Sense Strand Starting at position 1024 of SEQ ID NO: 318629
cuauuauaacugggccuga

SEQ ID NO: 399140 - RNA, 19 nt, Artificial Sequence
  Description of Artificial Sequence: Synthetic oligonucleotide
  Antisense Strand to SEQ ID NO: 399139
ucaggcccaguuauaauag

SEQ ID NO: 399141 - RNA, 19 nt, Artificial Sequence
  Description of Artificial Sequence: Synthetic oligonucleotide
  Sense Strand Starting at position 1024 of SEQ ID NO: 318642
gccugaauugugcaccauu

SEQ ID NO: 399142 - RNA, 19 nt, Artificial Sequence
  Description of Artificial Sequence: Synthetic oligonucleotide
  Antisense Strand to SEQ ID NO: 399141
aauggugcacaauucaggc

SEQ ID NO: 399143 - RNA, 19 nt, Artificial Sequence
  Description of Artificial Sequence: Synthetic oligonucleotide
  Sense Strand Starting at position 1024 of SEQ ID NO: 318735
gccaaauugacuugaacgu

SEQ ID NO: 399144 - RNA, 19 nt, Artificial Sequence
  Description of Artificial Sequence: Synthetic oligonucleotide
  Antisense Strand to SEQ ID NO: 399143
acguucaagucaauuuggc

SEQ ID NO: 399145 - RNA, 19 nt, Artificial Sequence
  Description of Artificial Sequence: Synthetic oligonucleotide
  Sense Strand Starting at position 1024 of SEQ ID NO: 318741
uugacuugaacgugacuca

SEQ ID NO: 399146 - RNA, 19 nt, Artificial Sequence
  Description of Artificial Sequence: Synthetic oligonucleotide
  Antisense Strand to SEQ ID NO: 399145
ugagucacguucaagucaa

SEQ ID NO: 399147 - RNA, 19 nt, Artificial Sequence
  Description of Artificial Sequence: Synthetic oligonucleotide
  Sense Strand Starting at position 1024 of SEQ ID NO: 318921
gacccucagccagguuuau

SEQ ID NO: 399148 - RNA, 19 nt, Artificial Sequence
  Description of Artificial Sequence: Synthetic oligonucleotide
  Antisense Strand to SEQ ID NO: 399147
auaaaccuggcugaggguc

SEQ ID NO: 399149 - RNA, 19 nt, Artificial Sequence
  Description of Artificial Sequence: Synthetic oligonucleotide
  Sense Strand Starting at position 1024 of SEQ ID NO: 318930
ccagguuuauaugcaaaua

SEQ ID NO: 399150 - RNA, 19 nt, Artificial Sequence
  Description of Artificial Sequence: Synthetic oligonucleotide
  Antisense Strand to SEQ ID NO: 399149
uauuugcauauaaaccugg

SEQ ID NO: 399151 - RNA, 19 nt, Artificial Sequence
  Description of Artificial Sequence: Synthetic oligonucleotide
  Sense Strand Starting at position 1024 of SEQ ID NO: 319008
agggaagcucacugagacu

SEQ ID NO: 399152 - RNA, 19 nt, Artificial Sequence
  Description of Artificial Sequence: Synthetic oligonucleotide
  Antisense Strand to SEQ ID NO: 399151
agucucagugagcuucccu

SEQ ID NO: 399153 - RNA, 19 nt, Artificial Sequence
  Description of Artificial Sequence: Synthetic oligonucleotide
  Sense Strand Starting at position 1024 of SEQ ID NO: 319039
agcagaaauuccuagagau

SEQ ID NO: 399154 - RNA, 19 nt, Artificial Sequence
  Description of Artificial Sequence: Synthetic oligonucleotide
  Antisense Strand to SEQ ID NO: 399153
aucucuaggaauuucugcu

SEQ ID NO: 399155 - RNA, 19 nt, Artificial Sequence
  Description of Artificial Sequence: Synthetic oligonucleotide
  Sense Strand Starting at position 1024 of SEQ ID NO: 319090
agagaaugaaugugucaac

SEQ ID NO: 399156 - RNA, 19 nt, Artificial Sequence
  Description of Artificial Sequence: Synthetic oligonucleotide
  Antisense Strand to SEQ ID NO: 399155
guugacacauucauucucu

SEQ ID NO: 399157 - RNA, 19 nt, Artificial Sequence
  Description of Artificial Sequence: Synthetic oligonucleotide
  Sense Strand Starting at position 1024 of SEQ ID NO: 319091
gagaaugaaugugucaaca

SEQ ID NO: 399158 - RNA, 19 nt, Artificial Sequence
  Description of Artificial Sequence: Synthetic oligonucleotide
  Antisense Strand to SEQ ID NO: 399157
uguugacacauucauucuc

SEQ ID NO: 399159 - RNA, 19 nt, Artificial Sequence
  Description of Artificial Sequence: Synthetic oligonucleotide
  Sense Strand Starting at position 1024 of SEQ ID NO: 319093
gaaugaaugugucaacaau

SEQ ID NO: 399160 - RNA, 19 nt, Artificial Sequence
  Description of Artificial Sequence: Synthetic oligonucleotide
  Antisense Strand to SEQ ID NO: 399159
auuguugacacauucauuc

SEQ ID NO: 399161 - RNA, 19 nt, Artificial Sequence
  Description of Artificial Sequence: Synthetic oligonucleotide
  Sense Strand Starting at position 1024 of SEQ ID NO: 319099
augugucaacaauaaguuu

SEQ ID NO: 399162 - RNA, 19 nt, Artificial Sequence
  Description of Artificial Sequence: Synthetic oligonucleotide
  Antisense Strand to SEQ ID NO: 399161
aaacuuauuguugacacau

SEQ ID NO: 399163 - RNA, 19 nt, Artificial Sequence
  Description of Artificial Sequence: Synthetic oligonucleotide
  Sense Strand Starting at position 1025 of SEQ ID NO: 315494
uuuguuuacccauguaaac

SEQ ID NO: 399164 - RNA, 19 nt, Artificial Sequence
  Description of Artificial Sequence: Synthetic oligonucleotide
  Antisense Strand to SEQ ID NO: 399163
guuuacauggguaaacaaa

SEQ ID NO: 399165 - RNA, 19 nt, Artificial Sequence
  Description of Artificial Sequence: Synthetic oligonucleotide
  Sense Strand Starting at position 1025 of SEQ ID NO: 315515
agucacaagcuauauaagu

SEQ ID NO: 399166 - RNA, 19 nt, Artificial Sequence
  Description of Artificial Sequence: Synthetic oligonucleotide
  Antisense Strand to SEQ ID NO: 399165
acuuauauagcuugugacu

SEQ ID NO: 399167 - RNA, 19 nt, Artificial Sequence
  Description of Artificial Sequence: Synthetic oligonucleotide
  Sense Strand Starting at position 1025 of SEQ ID NO: 315622
uccuaaaucuuagucuugu

SEQ ID NO: 399168 - RNA, 19 nt, Artificial Sequence
  Description of Artificial Sequence: Synthetic oligonucleotide
  Antisense Strand to SEQ ID NO: 399167
acaagacuaagauuuagga

SEQ ID NO: 399169 - RNA, 19 nt, Artificial Sequence
  Description of Artificial Sequence: Synthetic oligonucleotide
  Sense Strand Starting at position 1025 of SEQ ID NO: 315743
gagcauucuucuuuggcua

SEQ ID NO: 399170 - RNA, 19 nt, Artificial Sequence
  Description of Artificial Sequence: Synthetic oligonucleotide
  Antisense Strand to SEQ ID NO: 399169
uagccaaagaagaaugcuc

SEQ ID NO: 399171 - RNA, 19 nt, Artificial Sequence
  Description of Artificial Sequence: Synthetic oligonucleotide
  Sense Strand Starting at position 1025 of SEQ ID NO: 315744
agcauucuucuuuggcuaa

SEQ ID NO: 399172 - RNA, 19 nt, Artificial Sequence
  Description of Artificial Sequence: Synthetic oligonucleotide
  Antisense Strand to SEQ ID NO: 399171
uuagccaaagaagaaugcu

SEQ ID NO: 399173 - RNA, 19 nt, Artificial Sequence
  Description of Artificial Sequence: Synthetic oligonucleotide
  Sense Strand Starting at position 1025 of SEQ ID NO: 315765
acugcaaauccguacaugu

SEQ ID NO: 399174 - RNA, 19 nt, Artificial Sequence
  Description of Artificial Sequence: Synthetic oligonucleotide
  Antisense Strand to SEQ ID NO: 399173
acauguacggauuugcagu

SEQ ID NO: 399175 - RNA, 19 nt, Artificial Sequence
  Description of Artificial Sequence: Synthetic oligonucleotide
  Sense Strand Starting at position 1025 of SEQ ID NO: 315767
ugcaaauccguacauguaa

SEQ ID NO: 399176 - RNA, 19 nt, Artificial Sequence
  Description of Artificial Sequence: Synthetic oligonucleotide
  Antisense Strand to SEQ ID NO: 399175
uuacauguacggauuugca

SEQ ID NO: 399177 - RNA, 19 nt, Artificial Sequence
  Description of Artificial Sequence: Synthetic oligonucleotide
  Sense Strand Starting at position 1025 of SEQ ID NO: 316025
ccugucagaucuuccucua

SEQ ID NO: 399178 - RNA, 19 nt, Artificial Sequence
  Description of Artificial Sequence: Synthetic oligonucleotide
  Antisense Strand to SEQ ID NO: 399177
uagaggaagaucugacagg

SEQ ID NO: 399179 - RNA, 19 nt, Artificial Sequence
  Description of Artificial Sequence: Synthetic oligonucleotide
  Sense Strand Starting at position 1025 of SEQ ID NO: 316028
gucagaucuuccucuaagg

SEQ ID NO: 399180 - RNA, 19 nt, Artificial Sequence
  Description of Artificial Sequence: Synthetic oligonucleotide
  Antisense Strand to SEQ ID NO: 399179
ccuuagaggaagaucugac

SEQ ID NO: 399181 - RNA, 19 nt, Artificial Sequence
  Description of Artificial Sequence: Synthetic oligonucleotide
  Sense Strand Starting at position 1025 of SEQ ID NO: 316209
aguacagagucaguccaaa

SEQ ID NO: 399182 - RNA, 19 nt, Artificial Sequence
  Description of Artificial Sequence: Synthetic oligonucleotide
  Antisense Strand to SEQ ID NO: 399181
uuuggacugacucuguacu

SEQ ID NO: 399183 - RNA, 19 nt, Artificial Sequence
  Description of Artificial Sequence: Synthetic oligonucleotide
  Sense Strand Starting at position 1025 of SEQ ID NO: 316312
cuuagaaucuaagcauaug

SEQ ID NO: 399184 - RNA, 19 nt, Artificial Sequence
  Description of Artificial Sequence: Synthetic oligonucleotide
  Antisense Strand to SEQ ID NO: 399183
cauaugcuuagauucuaag

SEQ ID NO: 399185 - RNA, 19 nt, Artificial Sequence
  Description of Artificial Sequence: Synthetic oligonucleotide
  Sense Strand Starting at position 1025 of SEQ ID NO: 316355
ggaggcugccacgaacauu

SEQ ID NO: 399186 - RNA, 19 nt, Artificial Sequence
  Description of Artificial Sequence: Synthetic oligonucleotide
  Antisense Strand to SEQ ID NO: 399185
aauguucguggcagccucc

SEQ ID NO: 399187 - RNA, 19 nt, Artificial Sequence
  Description of Artificial Sequence: Synthetic oligonucleotide
  Sense Strand Starting at position 1025 of SEQ ID NO: 316663
gggugaaucugggucuauc

SEQ ID NO: 399188 - RNA, 19 nt, Artificial Sequence
  Description of Artificial Sequence: Synthetic oligonucleotide
  Antisense Strand to SEQ ID NO: 399187
gauagacccagauucaccc

SEQ ID NO: 399189 - RNA, 19 nt, Artificial Sequence
  Description of Artificial Sequence: Synthetic oligonucleotide
  Sense Strand Starting at position 1025 of SEQ ID NO: 317512
cggucacugcgucuaaugu

SEQ ID NO: 399190 - RNA, 19 nt, Artificial Sequence
  Description of Artificial Sequence: Synthetic oligonucleotide
  Antisense Strand to SEQ ID NO: 399189
acauuagacgcagugaccg

SEQ ID NO: 399191 - RNA, 19 nt, Artificial Sequence
  Description of Artificial Sequence: Synthetic oligonucleotide
  Sense Strand Starting at position 1025 of SEQ ID NO: 317537
gucuauugucuguaacccu

SEQ ID NO: 399192 - RNA, 19 nt, Artificial Sequence
  Description of Artificial Sequence: Synthetic oligonucleotide
  Antisense Strand to SEQ ID NO: 399191
aggguuacagacaauagac

SEQ ID NO: 399193 - RNA, 19 nt, Artificial Sequence
  Description of Artificial Sequence: Synthetic oligonucleotide
  Sense Strand Starting at position 1025 of SEQ ID NO: 317667
gcaugcuuuccuguuuagu

SEQ ID NO: 399194 - RNA, 19 nt, Artificial Sequence
  Description of Artificial Sequence: Synthetic oligonucleotide
  Antisense Strand to SEQ ID NO: 399193
acuaaacaggaaagcaugc

SEQ ID NO: 399195 - RNA, 19 nt, Artificial Sequence
  Description of Artificial Sequence: Synthetic oligonucleotide
  Sense Strand Starting at position 1025 of SEQ ID NO: 317716
uuaucuuaccaucggugau

SEQ ID NO: 399196 - RNA, 19 nt, Artificial Sequence
  Description of Artificial Sequence: Synthetic oligonucleotide
  Antisense Strand to SEQ ID NO: 399195
aucaccgaugguaagauaa

SEQ ID NO: 399197 - RNA, 19 nt, Artificial Sequence
  Description of Artificial Sequence: Synthetic oligonucleotide
  Sense Strand Starting at position 1025 of SEQ ID NO: 317719
ucuuaccaucggugaucaa

SEQ ID NO: 399198 - RNA, 19 nt, Artificial Sequence
  Description of Artificial Sequence: Synthetic oligonucleotide
  Antisense Strand to SEQ ID NO: 399197
uugaucaccgaugguaaga

SEQ ID NO: 399199 - RNA, 19 nt, Artificial Sequence
  Description of Artificial Sequence: Synthetic oligonucleotide
  Sense Strand Starting at position 1025 of SEQ ID NO: 317722
uaccaucggugaucaacuu

SEQ ID NO: 399200 - RNA, 19 nt, Artificial Sequence
  Description of Artificial Sequence: Synthetic oligonucleotide
  Antisense Strand to SEQ ID NO: 399199
aaguugaucaccgauggua

SEQ ID NO: 399201 - RNA, 19 nt, Artificial Sequence
  Description of Artificial Sequence: Synthetic oligonucleotide
  Sense Strand Starting at position 1025 of SEQ ID NO: 317729
ggugaucaacuuuaucguu

SEQ ID NO: 399202 - RNA, 19 nt, Artificial Sequence
  Description of Artificial Sequence: Synthetic oligonucleotide
  Antisense Strand to SEQ ID NO: 399201
aacgauaaaguugaucacc

SEQ ID NO: 399203 - RNA, 19 nt, Artificial Sequence
  Description of Artificial Sequence: Synthetic oligonucleotide
  Sense Strand Starting at position 1025 of SEQ ID NO: 317749
ccguaucuauuauuagaau

SEQ ID NO: 399204 - RNA, 19 nt, Artificial Sequence
  Description of Artificial Sequence: Synthetic oligonucleotide
  Antisense Strand to SEQ ID NO: 399203
auucuaauaauagauacgg

SEQ ID NO: 399205 - RNA, 19 nt, Artificial Sequence
  Description of Artificial Sequence: Synthetic oligonucleotide
  Sense Strand Starting at position 1025 of SEQ ID NO: 318178
aucguucugcaucacuaua

SEQ ID NO: 399206 - RNA, 19 nt, Artificial Sequence
  Description of Artificial Sequence: Synthetic oligonucleotide
  Antisense Strand to SEQ ID NO: 399205
uauagugaugcagaacgau

SEQ ID NO: 399207 - RNA, 19 nt, Artificial Sequence
  Description of Artificial Sequence: Synthetic oligonucleotide
  Sense Strand Starting at position 1025 of SEQ ID NO: 318217
guuaaucugugguccauac

SEQ ID NO: 399208 - RNA, 19 nt, Artificial Sequence
  Description of Artificial Sequence: Synthetic oligonucleotide
  Antisense Strand to SEQ ID NO: 399207
guauggaccacagauuaac

SEQ ID NO: 399209 - RNA, 19 nt, Artificial Sequence
  Description of Artificial Sequence: Synthetic oligonucleotide
  Sense Strand Starting at position 1025 of SEQ ID NO: 318259
auaugaaacugugugcaaa

SEQ ID NO: 399210 - RNA, 19 nt, Artificial Sequence
  Description of Artificial Sequence: Synthetic oligonucleotide
  Antisense Strand to SEQ ID NO: 399209
uuugcacacaguuucauau

SEQ ID NO: 399211 - RNA, 19 nt, Artificial Sequence
  Description of Artificial Sequence: Synthetic oligonucleotide
  Sense Strand Starting at position 1025 of SEQ ID NO: 318283
augugucuccgugcguauu

SEQ ID NO: 399212 - RNA, 19 nt, Artificial Sequence
  Description of Artificial Sequence: Synthetic oligonucleotide
  Antisense Strand to SEQ ID NO: 399211
aauacgcacggagacacau

SEQ ID NO: 399213 - RNA, 19 nt, Artificial Sequence
  Description of Artificial Sequence: Synthetic oligonucleotide
  Sense Strand Starting at position 1025 of SEQ ID NO: 318357
ggugguaugucaucauuug

SEQ ID NO: 399214 - RNA, 19 nt, Artificial Sequence
  Description of Artificial Sequence: Synthetic oligonucleotide
  Antisense Strand to SEQ ID NO: 399213
caaaugaugacauaccacc

SEQ ID NO: 399215 - RNA, 19 nt, Artificial Sequence
  Description of Artificial Sequence: Synthetic oligonucleotide
  Sense Strand Starting at position 1025 of SEQ ID NO: 318358
gugguaugucaucauuugu

SEQ ID NO: 399216 - RNA, 19 nt, Artificial Sequence
  Description of Artificial Sequence: Synthetic oligonucleotide
  Antisense Strand to SEQ ID NO: 399215
acaaaugaugacauaccac

SEQ ID NO: 399217 - RNA, 19 nt, Artificial Sequence
  Description of Artificial Sequence: Synthetic oligonucleotide
  Sense Strand Starting at position 1025 of SEQ ID NO: 318367
caucauuuguucuagggag

SEQ ID NO: 399218 - RNA, 19 nt, Artificial Sequence
  Description of Artificial Sequence: Synthetic oligonucleotide
  Antisense Strand to SEQ ID NO: 399217
cucccuagaacaaaugaug

SEQ ID NO: 399219 - RNA, 19 nt, Artificial Sequence
  Description of Artificial Sequence: Synthetic oligonucleotide
  Sense Strand Starting at position 1025 of SEQ ID NO: 318419
auagaccucguguacuuaa

SEQ ID NO: 399220 - RNA, 19 nt, Artificial Sequence
  Description of Artificial Sequence: Synthetic oligonucleotide
  Antisense Strand to SEQ ID NO: 399219
uuaaguacacgaggucuau

SEQ ID NO: 399221 - RNA, 19 nt, Artificial Sequence
  Description of Artificial Sequence: Synthetic oligonucleotide
  Sense Strand Starting at position 1025 of SEQ ID NO: 318758
gagggaagugcuggaacuu

SEQ ID NO: 399222 - RNA, 19 nt, Artificial Sequence
  Description of Artificial Sequence: Synthetic oligonucleotide
  Antisense Strand to SEQ ID NO: 399221
aaguuccagcacuucccuc

SEQ ID NO: 399223 - RNA, 19 nt, Artificial Sequence
  Description of Artificial Sequence: Synthetic oligonucleotide
  Sense Strand Starting at position 1025 of SEQ ID NO: 318794
gcaagauacacggauucca

SEQ ID NO: 399224 - RNA, 19 nt, Artificial Sequence
  Description of Artificial Sequence: Synthetic oligonucleotide
  Antisense Strand to SEQ ID NO: 399223
uggaauccguguaucuugc

SEQ ID NO: 399225 - RNA, 19 nt, Artificial Sequence
  Description of Artificial Sequence: Synthetic oligonucleotide
  Sense Strand Starting at position 1025 of SEQ ID NO: 318805
ggauuccauuuagagauag

SEQ ID NO: 399226 - RNA, 19 nt, Artificial Sequence
  Description of Artificial Sequence: Synthetic oligonucleotide
  Antisense Strand to SEQ ID NO: 399225
cuaucucuaaauggaaucc

SEQ ID NO: 399227 - RNA, 19 nt, Artificial Sequence
  Description of Artificial Sequence: Synthetic oligonucleotide
  Sense Strand Starting at position 1025 of SEQ ID NO: 318817
gagauaggcuggccucaau

SEQ ID NO: 399228 - RNA, 19 nt, Artificial Sequence
  Description of Artificial Sequence: Synthetic oligonucleotide
  Antisense Strand to SEQ ID NO: 399227
auugaggccagccuaucuc

SEQ ID NO: 399229 - RNA, 19 nt, Artificial Sequence
  Description of Artificial Sequence: Synthetic oligonucleotide
  Sense Strand Starting at position 1025 of SEQ ID NO: 318827
ggccucaauuugucaagcu

SEQ ID NO: 399230 - RNA, 19 nt, Artificial Sequence
  Description of Artificial Sequence: Synthetic oligonucleotide
  Antisense Strand to SEQ ID NO: 399229
agcuugacaaauugaggcc

SEQ ID NO: 399231 - RNA, 19 nt, Artificial Sequence
  Description of Artificial Sequence: Synthetic oligonucleotide
  Sense Strand Starting at position 1025 of SEQ ID NO: 319023
aaacauguugugugaacag

SEQ ID NO: 399232 - RNA, 19 nt, Artificial Sequence
  Description of Artificial Sequence: Synthetic oligonucleotide
  Antisense Strand to SEQ ID NO: 399231
cuguucacacaacauguuu

SEQ ID NO: 399233 - RNA, 19 nt, Artificial Sequence
  Description of Artificial Sequence: Synthetic oligonucleotide
  Sense Strand Starting at position 1025 of SEQ ID NO: 319105
agcucacaguccucaaaga

SEQ ID NO: 399234 - RNA, 19 nt, Artificial Sequence
  Description of Artificial Sequence: Synthetic oligonucleotide
  Antisense Strand to SEQ ID NO: 399233
ucuuugaggacugugagcu

SEQ ID NO: 399235 - RNA, 19 nt, Artificial Sequence
  Description of Artificial Sequence: Synthetic oligonucleotide
  Sense Strand Starting at position 1025 of SEQ ID NO: 319139
ucucgagguucuuuaauua

SEQ ID NO: 399236 - RNA, 19 nt, Artificial Sequence
  Description of Artificial Sequence: Synthetic oligonucleotide
  Antisense Strand to SEQ ID NO: 399235
uaauuaaagaaccucgaga

SEQ ID NO: 399237 - RNA, 19 nt, Artificial Sequence
  Description of Artificial Sequence: Synthetic oligonucleotide
  Sense Strand Starting at position 1025 of SEQ ID NO: 319159
uaggucuugucagugacuu

SEQ ID NO: 399238 - RNA, 19 nt, Artificial Sequence
  Description of Artificial Sequence: Synthetic oligonucleotide
  Antisense Strand to SEQ ID NO: 399237
aagucacugacaagaccua

SEQ ID NO: 399239 - RNA, 19 nt, Artificial Sequence
  Description of Artificial Sequence: Synthetic oligonucleotide
  Sense Strand Starting at position 1025 of SEQ ID NO: 319160
aggucuugucagugacuuc

SEQ ID NO: 399240 - RNA, 19 nt, Artificial Sequence
  Description of Artificial Sequence: Synthetic oligonucleotide
  Antisense Strand to SEQ ID NO: 399239
gaagucacugacaagaccu

SEQ ID NO: 399241 - RNA, 19 nt, Artificial Sequence
  Description of Artificial Sequence: Synthetic oligonucleotide
  Sense Strand Starting at position 1025 of SEQ ID NO: 319161
ggucuugucagugacuucu

SEQ ID NO: 399242 - RNA, 19 nt, Artificial Sequence
  Description of Artificial Sequence: Synthetic oligonucleotide
  Antisense Strand to SEQ ID NO: 399241
agaagucacugacaagacc

SEQ ID NO: 399243 - RNA, 19 nt, Artificial Sequence
  Description of Artificial Sequence: Synthetic oligonucleotide
  Sense Strand Starting at position 1026 of SEQ ID NO: 315413
uuauguaugcgaggauuug

SEQ ID NO: 399244 - RNA, 19 nt, Artificial Sequence
  Description of Artificial Sequence: Synthetic oligonucleotide
  Antisense Strand to SEQ ID NO: 399243
caaauccucgcauacauaa

SEQ ID NO: 399245 - RNA, 19 nt, Artificial Sequence
  Description of Artificial Sequence: Synthetic oligonucleotide
  Sense Strand Starting at position 1026 of SEQ ID NO: 315421
gcgaggauuuggguuuguu

SEQ ID NO: 399246 - RNA, 19 nt, Artificial Sequence
  Description of Artificial Sequence: Synthetic oligonucleotide
  Antisense Strand to SEQ ID NO: 399245
aacaaacccaaauccucgc

SEQ ID NO: 399247 - RNA, 19 nt, Artificial Sequence
  Description of Artificial Sequence: Synthetic oligonucleotide
  Sense Strand Starting at position 1026 of SEQ ID NO: 315457
uaaauuuaguguucuggca

SEQ ID NO: 399248 - RNA, 19 nt, Artificial Sequence
  Description of Artificial Sequence: Synthetic oligonucleotide
  Antisense Strand to SEQ ID NO: 399247
ugccagaacacuaaauuua

SEQ ID NO: 399249 - RNA, 19 nt, Artificial Sequence
  Description of Artificial Sequence: Synthetic oligonucleotide
  Sense Strand Starting at position 1026 of SEQ ID NO: 316017
aaagaaaugcgguaucuau

SEQ ID NO: 399250 - RNA, 19 nt, Artificial Sequence
  Description of Artificial Sequence: Synthetic oligonucleotide
  Antisense Strand to SEQ ID NO: 399249
auagauaccgcauuucuuu

SEQ ID NO: 399251 - RNA, 19 nt, Artificial Sequence
  Description of Artificial Sequence: Synthetic oligonucleotide
  Sense Strand Starting at position 1026 of SEQ ID NO: 316058
gcucauauacagggauaga

SEQ ID NO: 399252 - RNA, 19 nt, Artificial Sequence
  Description of Artificial Sequence: Synthetic oligonucleotide
  Antisense Strand to SEQ ID NO: 399251
ucuaucccuguauaugagc

SEQ ID NO: 399253 - RNA, 19 nt, Artificial Sequence
  Description of Artificial Sequence: Synthetic oligonucleotide
  Sense Strand Starting at position 1026 of SEQ ID NO: 316068
agggauagauaagcuucua

SEQ ID NO: 399254 - RNA, 19 nt, Artificial Sequence
  Description of Artificial Sequence: Synthetic oligonucleotide
  Antisense Strand to SEQ ID NO: 399253
uagaagcuuaucuaucccu

SEQ ID NO: 399255 - RNA, 19 nt, Artificial Sequence
  Description of Artificial Sequence: Synthetic oligonucleotide
  Sense Strand Starting at position 1026 of SEQ ID NO: 316400
ugucgacacugacuuaaga

SEQ ID NO: 399256 - RNA, 19 nt, Artificial Sequence
  Description of Artificial Sequence: Synthetic oligonucleotide
  Antisense Strand to SEQ ID NO: 399255
ucuuaagucagugucgaca

SEQ ID NO: 399257 - RNA, 19 nt, Artificial Sequence
  Description of Artificial Sequence: Synthetic oligonucleotide
  Sense Strand Starting at position 1026 of SEQ ID NO: 316531
aggcuucgguacccagaua

SEQ ID NO: 399258 - RNA, 19 nt, Artificial Sequence
  Description of Artificial Sequence: Synthetic oligonucleotide
  Antisense Strand to SEQ ID NO: 399257
uaucuggguaccgaagccu

SEQ ID NO: 399259 - RNA, 19 nt, Artificial Sequence
  Description of Artificial Sequence: Synthetic oligonucleotide
  Sense Strand Starting at position 1026 of SEQ ID NO: 316543
ccagauaggcuguaagcaa

SEQ ID NO: 399260 - RNA, 19 nt, Artificial Sequence
  Description of Artificial Sequence: Synthetic oligonucleotide
  Antisense Strand to SEQ ID NO: 399259
uugcuuacagccuaucugg

SEQ ID NO: 399261 - RNA, 19 nt, Artificial Sequence
  Description of Artificial Sequence: Synthetic oligonucleotide
  Sense Strand Starting at position 1026 of SEQ ID NO: 316572
uguugauuugugcguagac

SEQ ID NO: 399262 - RNA, 19 nt, Artificial Sequence
  Description of Artificial Sequence: Synthetic oligonucleotide
  Antisense Strand to SEQ ID NO: 399261
gucuacgcacaaaucaaca

SEQ ID NO: 399263 - RNA, 19 nt, Artificial Sequence
  Description of Artificial Sequence: Synthetic oligonucleotide
  Sense Strand Starting at position 1026 of SEQ ID NO: 316573
guugauuugugcguagacu

SEQ ID NO: 399264 - RNA, 19 nt, Artificial Sequence
  Description of Artificial Sequence: Synthetic oligonucleotide
  Antisense Strand to SEQ ID NO: 399263
agucuacgcacaaaucaac

SEQ ID NO: 399265 - RNA, 19 nt, Artificial Sequence
  Description of Artificial Sequence: Synthetic oligonucleotide
  Sense Strand Starting at position 1026 of SEQ ID NO: 316574
uugauuugugcguagacuc

SEQ ID NO: 399266 - RNA, 19 nt, Artificial Sequence
  Description of Artificial Sequence: Synthetic oligonucleotide
  Antisense Strand to SEQ ID NO: 399265
gagucuacgcacaaaucaa

SEQ ID NO: 399267 - RNA, 19 nt, Artificial Sequence
  Description of Artificial Sequence: Synthetic oligonucleotide
  Sense Strand Starting at position 1026 of SEQ ID NO: 316581
gugcguagacucuaaauug

SEQ ID NO: 399268 - RNA, 19 nt, Artificial Sequence
  Description of Artificial Sequence: Synthetic oligonucleotide
  Antisense Strand to SEQ ID NO: 399267
caauuuagagucuacgcac

SEQ ID NO: 399269 - RNA, 19 nt, Artificial Sequence
  Description of Artificial Sequence: Synthetic oligonucleotide
  Sense Strand Starting at position 1026 of SEQ ID NO: 316602
gcuguagguccguuaagua

SEQ ID NO: 399270 - RNA, 19 nt, Artificial Sequence
  Description of Artificial Sequence: Synthetic oligonucleotide
  Antisense Strand to SEQ ID NO: 399269
uacuuaacggaccuacagc

SEQ ID NO: 399271 - RNA, 19 nt, Artificial Sequence
  Description of Artificial Sequence: Synthetic oligonucleotide
  Sense Strand Starting at position 1026 of SEQ ID NO: 316607
agguccguuaaguaagaga

SEQ ID NO: 399272 - RNA, 19 nt, Artificial Sequence
  Description of Artificial Sequence: Synthetic oligonucleotide
  Antisense Strand to SEQ ID NO: 399271
ucucuuacuuaacggaccu

SEQ ID NO: 399273 - RNA, 19 nt, Artificial Sequence
  Description of Artificial Sequence: Synthetic oligonucleotide
  Sense Strand Starting at position 1026 of SEQ ID NO: 316667
gguagcucugcauagaaag

SEQ ID NO: 399274 - RNA, 19 nt, Artificial Sequence
  Description of Artificial Sequence: Synthetic oligonucleotide
  Antisense Strand to SEQ ID NO: 399273
cuuucuaugcagagcuacc

SEQ ID NO: 399275 - RNA, 19 nt, Artificial Sequence
  Description of Artificial Sequence: Synthetic oligonucleotide
  Sense Strand Starting at position 1026 of SEQ ID NO: 316701
ccugaagggccgcaucaua

SEQ ID NO: 399276 - RNA, 19 nt, Artificial Sequence
  Description of Artificial Sequence: Synthetic oligonucleotide
  Antisense Strand to SEQ ID NO: 399275
uaugaugcggcccuucagg

SEQ ID NO: 399277 - RNA, 19 nt, Artificial Sequence
  Description of Artificial Sequence: Synthetic oligonucleotide
  Sense Strand Starting at position 1026 of SEQ ID NO: 317383
guauaagggugaucagcua

SEQ ID NO: 399278 - RNA, 19 nt, Artificial Sequence
  Description of Artificial Sequence: Synthetic oligonucleotide
  Antisense Strand to SEQ ID NO: 399277
uagcugaucacccuuauac

SEQ ID NO: 399279 - RNA, 19 nt, Artificial Sequence
  Description of Artificial Sequence: Synthetic oligonucleotide
  Sense Strand Starting at position 1026 of SEQ ID NO: 317405
cggagaaggcuuuagcaag

SEQ ID NO: 399280 - RNA, 19 nt, Artificial Sequence
  Description of Artificial Sequence: Synthetic oligonucleotide
  Antisense Strand to SEQ ID NO: 399279
cuugcuaaagccuucuccg

SEQ ID NO: 399281 - RNA, 19 nt, Artificial Sequence
  Description of Artificial Sequence: Synthetic oligonucleotide
  Sense Strand Starting at position 1026 of SEQ ID NO: 317516
acacuugacccauguacua

SEQ ID NO: 399282 - RNA, 19 nt, Artificial Sequence
  Description of Artificial Sequence: Synthetic oligonucleotide
  Antisense Strand to SEQ ID NO: 399281
uaguacaugggucaagugu

SEQ ID NO: 399283 - RNA, 19 nt, Artificial Sequence
  Description of Artificial Sequence: Synthetic oligonucleotide
  Sense Strand Starting at position 1026 of SEQ ID NO: 317537
gggucuuguaaagauguau

SEQ ID NO: 399284 - RNA, 19 nt, Artificial Sequence
  Description of Artificial Sequence: Synthetic oligonucleotide
  Antisense Strand to SEQ ID NO: 399283
auacaucuuuacaagaccc

SEQ ID NO: 399285 - RNA, 19 nt, Artificial Sequence
  Description of Artificial Sequence: Synthetic oligonucleotide
  Sense Strand Starting at position 1026 of SEQ ID NO: 317583
cuuggaaagguguaugguu

SEQ ID NO: 399286 - RNA, 19 nt, Artificial Sequence
  Description of Artificial Sequence: Synthetic oligonucleotide
  Antisense Strand to SEQ ID NO: 399285
aaccauacaccuuuccaag

SEQ ID NO: 399287 - RNA, 19 nt, Artificial Sequence
  Description of Artificial Sequence: Synthetic oligonucleotide
  Sense Strand Starting at position 1026 of SEQ ID NO: 317588
aaagguguaugguuagaau

SEQ ID NO: 399288 - RNA, 19 nt, Artificial Sequence
  Description of Artificial Sequence: Synthetic oligonucleotide
  Antisense Strand to SEQ ID NO: 399287
auucuaaccauacaccuuu

SEQ ID NO: 399289 - RNA, 19 nt, Artificial Sequence
  Description of Artificial Sequence: Synthetic oligonucleotide
  Sense Strand Starting at position 1026 of SEQ ID NO: 317596
augguuagaaugugaaagu

SEQ ID NO: 399290 - RNA, 19 nt, Artificial Sequence
  Description of Artificial Sequence: Synthetic oligonucleotide
  Antisense Strand to SEQ ID NO: 399289
acuuucacauucuaaccau

SEQ ID NO: 399291 - RNA, 19 nt, Artificial Sequence
  Description of Artificial Sequence: Synthetic oligonucleotide
  Sense Strand Starting at position 1026 of SEQ ID NO: 317664
ccuuuaaaccuggaguugu

SEQ ID NO: 399292 - RNA, 19 nt, Artificial Sequence
  Description of Artificial Sequence: Synthetic oligonucleotide
  Antisense Strand to SEQ ID NO: 399291
acaacuccagguuuaaagg

SEQ ID NO: 399293 - RNA, 19 nt, Artificial Sequence
  Description of Artificial Sequence: Synthetic oligonucleotide
  Sense Strand Starting at position 1026 of SEQ ID NO: 317728
accugagaagucuguaaau

SEQ ID NO: 399294 - RNA, 19 nt, Artificial Sequence
  Description of Artificial Sequence: Synthetic oligonucleotide
  Antisense Strand to SEQ ID NO: 399293
auuuacagacuucucaggu

SEQ ID NO: 399295 - RNA, 19 nt, Artificial Sequence
  Description of Artificial Sequence: Synthetic oligonucleotide
  Sense Strand Starting at position 1026 of SEQ ID NO: 317811
agguuagcaaccggaugau

SEQ ID NO: 399296 - RNA, 19 nt, Artificial Sequence
  Description of Artificial Sequence: Synthetic oligonucleotide
  Antisense Strand to SEQ ID NO: 399295
aucauccgguugcuaaccu

SEQ ID NO: 399297 - RNA, 19 nt, Artificial Sequence
  Description of Artificial Sequence: Synthetic oligonucleotide
  Sense Strand Starting at position 1026 of SEQ ID NO: 317836
gcguauuuaaggcagcagu

SEQ ID NO: 399298 - RNA, 19 nt, Artificial Sequence
  Description of Artificial Sequence: Synthetic oligonucleotide
  Antisense Strand to SEQ ID NO: 399297
acugcugccuuaaauacgc

SEQ ID NO: 399299 - RNA, 19 nt, Artificial Sequence
  Description of Artificial Sequence: Synthetic oligonucleotide
  Sense Strand Starting at position 1026 of SEQ ID NO: 317886
cccauagugaugugagaag

SEQ ID NO: 399300 - RNA, 19 nt, Artificial Sequence
  Description of Artificial Sequence: Synthetic oligonucleotide
  Antisense Strand to SEQ ID NO: 399299
cuucucacaucacuauggg

SEQ ID NO: 399301 - RNA, 19 nt, Artificial Sequence
  Description of Artificial Sequence: Synthetic oligonucleotide
  Sense Strand Starting at position 1026 of SEQ ID NO: 318115
gaccucagguaaucuagua

SEQ ID NO: 399302 - RNA, 19 nt, Artificial Sequence
  Description of Artificial Sequence: Synthetic oligonucleotide
  Antisense Strand to SEQ ID NO: 399301
uacuagauuaccugagguc

SEQ ID NO: 399303 - RNA, 19 nt, Artificial Sequence
  Description of Artificial Sequence: Synthetic oligonucleotide
  Sense Strand Starting at position 1026 of SEQ ID NO: 318220
uuauaugagucaucggaca

SEQ ID NO: 399304 - RNA, 19 nt, Artificial Sequence
  Description of Artificial Sequence: Synthetic oligonucleotide
  Antisense Strand to SEQ ID NO: 399303
uguccgaugacucauauaa

SEQ ID NO: 399305 - RNA, 19 nt, Artificial Sequence
  Description of Artificial Sequence: Synthetic oligonucleotide
  Sense Strand Starting at position 1026 of SEQ ID NO: 318222
auaugagucaucggacacu

SEQ ID NO: 399306 - RNA, 19 nt, Artificial Sequence
  Description of Artificial Sequence: Synthetic oligonucleotide
  Antisense Strand to SEQ ID NO: 399305
aguguccgaugacucauau

SEQ ID NO: 399307 - RNA, 19 nt, Artificial Sequence
  Description of Artificial Sequence: Synthetic oligonucleotide
  Sense Strand Starting at position 1026 of SEQ ID NO: 318235
gacacuguccguuaaccaa

SEQ ID NO: 399308 - RNA, 19 nt, Artificial Sequence
  Description of Artificial Sequence: Synthetic oligonucleotide
  Antisense Strand to SEQ ID NO: 399307
uugguuaacggacaguguc

SEQ ID NO: 399309 - RNA, 19 nt, Artificial Sequence
  Description of Artificial Sequence: Synthetic oligonucleotide
  Sense Strand Starting at position 1026 of SEQ ID NO: 318337
ggaauauuaacgcgauucc

SEQ ID NO: 399310 - RNA, 19 nt, Artificial Sequence
  Description of Artificial Sequence: Synthetic oligonucleotide
  Antisense Strand to SEQ ID NO: 399309
ggaaucgcguuaauauucc

SEQ ID NO: 399311 - RNA, 19 nt, Artificial Sequence
  Description of Artificial Sequence: Synthetic oligonucleotide
  Sense Strand Starting at position 1026 of SEQ ID NO: 318617
aaugaugcugcuuaggagu

SEQ ID NO: 399312 - RNA, 19 nt, Artificial Sequence
  Description of Artificial Sequence: Synthetic oligonucleotide
  Antisense Strand to SEQ ID NO: 399311
acuccuaagcagcaucauu

SEQ ID NO: 399313 - RNA, 19 nt, Artificial Sequence
  Description of Artificial Sequence: Synthetic oligonucleotide
  Sense Strand Starting at position 1026 of SEQ ID NO: 318840
agacccuguguugaauuau

SEQ ID NO: 399314 - RNA, 19 nt, Artificial Sequence
  Description of Artificial Sequence: Synthetic oligonucleotide
  Antisense Strand to SEQ ID NO: 399313
auaauucaacacagggucu

SEQ ID NO: 399315 - RNA, 19 nt, Artificial Sequence
  Description of Artificial Sequence: Synthetic oligonucleotide
  Sense Strand Starting at position 1026 of SEQ ID NO: 319144
ggccgaauuauuugucuua

SEQ ID NO: 399316 - RNA, 19 nt, Artificial Sequence
  Description of Artificial Sequence: Synthetic oligonucleotide
  Antisense Strand to SEQ ID NO: 399315
uaagacaaauaauucggcc

SEQ ID NO: 399317 - RNA, 19 nt, Artificial Sequence
  Description of Artificial Sequence: Synthetic oligonucleotide
  Sense Strand Starting at position 1026 of SEQ ID NO: 319145
gccgaauuauuugucuuac

SEQ ID NO: 399318 - RNA, 19 nt, Artificial Sequence
  Description of Artificial Sequence: Synthetic oligonucleotide
  Antisense Strand to SEQ ID NO: 399317
guaagacaaauaauucggc

SEQ ID NO: 399319 - RNA, 19 nt, Artificial Sequence
  Description of Artificial Sequence: Synthetic oligonucleotide
  Sense Strand Starting at position 1026 of SEQ ID NO: 319159
cuuacaaauuucuagaggu

SEQ ID NO: 399320 - RNA, 19 nt, Artificial Sequence
  Description of Artificial Sequence: Synthetic oligonucleotide
  Antisense Strand to SEQ ID NO: 399319
accucuagaaauuuguaag

SEQ ID NO: 399321 - RNA, 19 nt, Artificial Sequence
  Description of Artificial Sequence: Synthetic oligonucleotide
  Sense Strand Starting at position 1026 of SEQ ID NO: 319188
gguggacaucuguaagguc

SEQ ID NO: 399322 - RNA, 19 nt, Artificial Sequence
  Description of Artificial Sequence: Synthetic oligonucleotide
  Antisense Strand to SEQ ID NO: 399321
gaccuuacagauguccacc

SEQ ID NO: 399323 - RNA, 19 nt, Artificial Sequence
  Description of Artificial Sequence: Synthetic oligonucleotide
  Sense Strand Starting at position 1027 of SEQ ID NO: 315464
aacugauuagggcaguagu

SEQ ID NO: 399324 - RNA, 19 nt, Artificial Sequence
  Description of Artificial Sequence: Synthetic oligonucleotide
  Antisense Strand to SEQ ID NO: 399323
acuacugcccuaaucaguu

SEQ ID NO: 399325 - RNA, 19 nt, Artificial Sequence
  Description of Artificial Sequence: Synthetic oligonucleotide
  Sense Strand Starting at position 1027 of SEQ ID NO: 315514
uugccaaaucagcagauau

SEQ ID NO: 399326 - RNA, 19 nt, Artificial Sequence
  Description of Artificial Sequence: Synthetic oligonucleotide
  Antisense Strand to SEQ ID NO: 399325
auaucugcugauuuggcaa

SEQ ID NO: 399327 - RNA, 19 nt, Artificial Sequence
  Description of Artificial Sequence: Synthetic oligonucleotide
  Sense Strand Starting at position 1027 of SEQ ID NO: 315516
gccaaaucagcagauauuc

SEQ ID NO: 399328 - RNA, 19 nt, Artificial Sequence
  Description of Artificial Sequence: Synthetic oligonucleotide
  Antisense Strand to SEQ ID NO: 399327
gaauaucugcugauuuggc

SEQ ID NO: 399329 - RNA, 19 nt, Artificial Sequence
  Description of Artificial Sequence: Synthetic oligonucleotide
  Sense Strand Starting at position 1027 of SEQ ID NO: 315582
auuugucuguuauuggcua

SEQ ID NO: 399330 - RNA, 19 nt, Artificial Sequence
  Description of Artificial Sequence: Synthetic oligonucleotide
  Antisense Strand to SEQ ID NO: 399329
uagccaauaacagacaaau

SEQ ID NO: 399331 - RNA, 19 nt, Artificial Sequence
  Description of Artificial Sequence: Synthetic oligonucleotide
  Sense Strand Starting at position 1027 of SEQ ID NO: 315655
ugacuaaucguauguagaa

SEQ ID NO: 399332 - RNA, 19 nt, Artificial Sequence
  Description of Artificial Sequence: Synthetic oligonucleotide
  Antisense Strand to SEQ ID NO: 399331
uucuacauacgauuaguca

SEQ ID NO: 399333 - RNA, 19 nt, Artificial Sequence
  Description of Artificial Sequence: Synthetic oligonucleotide
  Sense Strand Starting at position 1027 of SEQ ID NO: 315656
gacuaaucguauguagaau

SEQ ID NO: 399334 - RNA, 19 nt, Artificial Sequence
  Description of Artificial Sequence: Synthetic oligonucleotide
  Antisense Strand to SEQ ID NO: 399333
auucuacauacgauuaguc

SEQ ID NO: 399335 - RNA, 19 nt, Artificial Sequence
  Description of Artificial Sequence: Synthetic oligonucleotide
  Sense Strand Starting at position 1027 of SEQ ID NO: 316143
aggcauaagcuuuaggacu

SEQ ID NO: 399336 - RNA, 19 nt, Artificial Sequence
  Description of Artificial Sequence: Synthetic oligonucleotide
  Antisense Strand to SEQ ID NO: 399335
aguccuaaagcuuaugccu

SEQ ID NO: 399337 - RNA, 19 nt, Artificial Sequence
  Description of Artificial Sequence: Synthetic oligonucleotide
  Sense Strand Starting at position 1027 of SEQ ID NO: 316201
cauugaagacaguggguua

SEQ ID NO: 399338 - RNA, 19 nt, Artificial Sequence
  Description of Artificial Sequence: Synthetic oligonucleotide
  Antisense Strand to SEQ ID NO: 399337
uaacccacugucuucaaug

SEQ ID NO: 399339 - RNA, 19 nt, Artificial Sequence
  Description of Artificial Sequence: Synthetic oligonucleotide
  Sense Strand Starting at position 1027 of SEQ ID NO: 316283
ccaugucuucuugaaaugu

SEQ ID NO: 399340 - RNA, 19 nt, Artificial Sequence
  Description of Artificial Sequence: Synthetic oligonucleotide
  Antisense Strand to SEQ ID NO: 399339
acauuucaagaagacaugg

SEQ ID NO: 399341 - RNA, 19 nt, Artificial Sequence
  Description of Artificial Sequence: Synthetic oligonucleotide
  Sense Strand Starting at position 1027 of SEQ ID NO: 316455
ugaagcaaaguccauuaua

SEQ ID NO: 399342 - RNA, 19 nt, Artificial Sequence
  Description of Artificial Sequence: Synthetic oligonucleotide
  Antisense Strand to SEQ ID NO: 399341
uauaauggacuuugcuuca

SEQ ID NO: 399343 - RNA, 19 nt, Artificial Sequence
  Description of Artificial Sequence: Synthetic oligonucleotide
  Sense Strand Starting at position 1027 of SEQ ID NO: 316524
aacugaauaguagguguuu

SEQ ID NO: 399344 - RNA, 19 nt, Artificial Sequence
  Description of Artificial Sequence: Synthetic oligonucleotide
  Antisense Strand to SEQ ID NO: 399343
aaacaccuacuauucaguu

SEQ ID NO: 399345 - RNA, 19 nt, Artificial Sequence
  Description of Artificial Sequence: Synthetic oligonucleotide
  Sense Strand Starting at position 1027 of SEQ ID NO: 316595
ucaugauuaucauugauug

SEQ ID NO: 399346 - RNA, 19 nt, Artificial Sequence
  Description of Artificial Sequence: Synthetic oligonucleotide
  Antisense Strand to SEQ ID NO: 399345
caaucaaugauaaucauga

SEQ ID NO: 399347 - RNA, 19 nt, Artificial Sequence
  Description of Artificial Sequence: Synthetic oligonucleotide
  Sense Strand Starting at position 1027 of SEQ ID NO: 316607
uugauuguuccucaauguu

SEQ ID NO: 399348 - RNA, 19 nt, Artificial Sequence
  Description of Artificial Sequence: Synthetic oligonucleotide
  Antisense Strand to SEQ ID NO: 399347
aacauugaggaacaaucaa

SEQ ID NO: 399349 - RNA, 19 nt, Artificial Sequence
  Description of Artificial Sequence: Synthetic oligonucleotide
  Sense Strand Starting at position 1027 of SEQ ID NO: 316740
agcaguaauacauagaggu

SEQ ID NO: 399350 - RNA, 19 nt, Artificial Sequence
  Description of Artificial Sequence: Synthetic oligonucleotide
  Antisense Strand to SEQ ID NO: 399349
accucuauguauuacugcu

SEQ ID NO: 399351 - RNA, 19 nt, Artificial Sequence
  Description of Artificial Sequence: Synthetic oligonucleotide
  Sense Strand Starting at position 1027 of SEQ ID NO: 316895
guaggagugguauaucauc

SEQ ID NO: 399352 - RNA, 19 nt, Artificial Sequence
  Description of Artificial Sequence: Synthetic oligonucleotide
  Antisense Strand to SEQ ID NO: 399351
gaugauauaccacuccuac

SEQ ID NO: 399353 - RNA, 19 nt, Artificial Sequence
  Description of Artificial Sequence: Synthetic oligonucleotide
  Sense Strand Starting at position 1027 of SEQ ID NO: 316900
agugguauaucaucuuuac

SEQ ID NO: 399354 - RNA, 19 nt, Artificial Sequence
  Description of Artificial Sequence: Synthetic oligonucleotide
  Antisense Strand to SEQ ID NO: 399353
guaaagaugauauaccacu

SEQ ID NO: 399355 - RNA, 19 nt, Artificial Sequence
  Description of Artificial Sequence: Synthetic oligonucleotide
  Sense Strand Starting at position 1027 of SEQ ID NO: 316911
aucuuuacucguuaguaac

SEQ ID NO: 399356 - RNA, 19 nt, Artificial Sequence
  Description of Artificial Sequence: Synthetic oligonucleotide
  Antisense Strand to SEQ ID NO: 399355
guuacuaacgaguaaagau

SEQ ID NO: 399357 - RNA, 19 nt, Artificial Sequence
  Description of Artificial Sequence: Synthetic oligonucleotide
  Sense Strand Starting at position 1027 of SEQ ID NO: 316931
ucagucaaguaggaauuua

SEQ ID NO: 399358 - RNA, 19 nt, Artificial Sequence
  Description of Artificial Sequence: Synthetic oligonucleotide
  Antisense Strand to SEQ ID NO: 399357
uaaauuccuacuugacuga

SEQ ID NO: 399359 - RNA, 19 nt, Artificial Sequence
  Description of Artificial Sequence: Synthetic oligonucleotide
  Sense Strand Starting at position 1027 of SEQ ID NO: 316967
aguaauagccaguaaaguc

SEQ ID NO: 399360 - RNA, 19 nt, Artificial Sequence
  Description of Artificial Sequence: Synthetic oligonucleotide
  Antisense Strand to SEQ ID NO: 399359
gacuuuacuggcuauuacu

SEQ ID NO: 399361 - RNA, 19 nt, Artificial Sequence
  Description of Artificial Sequence: Synthetic oligonucleotide
  Sense Strand Starting at position 1027 of SEQ ID NO: 316974
gccaguaaagucuacacau

SEQ ID NO: 399362 - RNA, 19 nt, Artificial Sequence
  Description of Artificial Sequence: Synthetic oligonucleotide
  Antisense Strand to SEQ ID NO: 399361
auguguagacuuuacuggc

SEQ ID NO: 399363 - RNA, 19 nt, Artificial Sequence
  Description of Artificial Sequence: Synthetic oligonucleotide
  Sense Strand Starting at position 1027 of SEQ ID NO: 317055
cagaguaacuggccucaau

SEQ ID NO: 399364 - RNA, 19 nt, Artificial Sequence
  Description of Artificial Sequence: Synthetic oligonucleotide
  Antisense Strand to SEQ ID NO: 399363
auugaggccaguuacucug

SEQ ID NO: 399365 - RNA, 19 nt, Artificial Sequence
  Description of Artificial Sequence: Synthetic oligonucleotide
  Sense Strand Starting at position 1027 of SEQ ID NO: 317078
ggcuaaucaauguguagag

SEQ ID NO: 399366 - RNA, 19 nt, Artificial Sequence
  Description of Artificial Sequence: Synthetic oligonucleotide
  Antisense Strand to SEQ ID NO: 399365
cucuacacauugauuagcc

SEQ ID NO: 399367 - RNA, 19 nt, Artificial Sequence
  Description of Artificial Sequence: Synthetic oligonucleotide
  Sense Strand Starting at position 1027 of SEQ ID NO: 317080
cuaaucaauguguagaguu

SEQ ID NO: 399368 - RNA, 19 nt, Artificial Sequence
  Description of Artificial Sequence: Synthetic oligonucleotide
  Antisense Strand to SEQ ID NO: 399367
aacucuacacauugauuag

SEQ ID NO: 399369 - RNA, 19 nt, Artificial Sequence
  Description of Artificial Sequence: Synthetic oligonucleotide
  Sense Strand Starting at position 1027 of SEQ ID NO: 317093
agaguuacauacuuacauc

SEQ ID NO: 399370 - RNA, 19 nt, Artificial Sequence
  Description of Artificial Sequence: Synthetic oligonucleotide
  Antisense Strand to SEQ ID NO: 399369
gauguaaguauguaacucu

SEQ ID NO: 399371 - RNA, 19 nt, Artificial Sequence
  Description of Artificial Sequence: Synthetic oligonucleotide
  Sense Strand Starting at position 1027 of SEQ ID NO: 317279
cuaaguugauuaguccuau

SEQ ID NO: 399372 - RNA, 19 nt, Artificial Sequence
  Description of Artificial Sequence: Synthetic oligonucleotide
  Antisense Strand to SEQ ID NO: 399371
auaggacuaaucaacuuag

SEQ ID NO: 399373 - RNA, 19 nt, Artificial Sequence
  Description of Artificial Sequence: Synthetic oligonucleotide
  Sense Strand Starting at position 1027 of SEQ ID NO: 317380
gcauaaaccugucucagag

SEQ ID NO: 399374 - RNA, 19 nt, Artificial Sequence
  Description of Artificial Sequence: Synthetic oligonucleotide
  Antisense Strand to SEQ ID NO: 399373
cucugagacagguuuaugc

SEQ ID NO: 399375 - RNA, 19 nt, Artificial Sequence
  Description of Artificial Sequence: Synthetic oligonucleotide
  Sense Strand Starting at position 1027 of SEQ ID NO: 317419
uuccuuagccuuuaagaug

SEQ ID NO: 399376 - RNA, 19 nt, Artificial Sequence
  Description of Artificial Sequence: Synthetic oligonucleotide
  Antisense Strand to SEQ ID NO: 399375
caucuuaaaggcuaaggaa

SEQ ID NO: 399377 - RNA, 19 nt, Artificial Sequence
  Description of Artificial Sequence: Synthetic oligonucleotide
  Sense Strand Starting at position 1027 of SEQ ID NO: 317615
gcugaaacauuugaugaaa

SEQ ID NO: 399378 - RNA, 19 nt, Artificial Sequence
  Description of Artificial Sequence: Synthetic oligonucleotide
  Antisense Strand to SEQ ID NO: 399377
uuucaucaaauguuucagc

SEQ ID NO: 399379 - RNA, 19 nt, Artificial Sequence
  Description of Artificial Sequence: Synthetic oligonucleotide
  Sense Strand Starting at position 1027 of SEQ ID NO: 317617
ugaaacauuugaugaaaga

SEQ ID NO: 399380 - RNA, 19 nt, Artificial Sequence
  Description of Artificial Sequence: Synthetic oligonucleotide
  Antisense Strand to SEQ ID NO: 399379
ucuuucaucaaauguuuca

SEQ ID NO: 399381 - RNA, 19 nt, Artificial Sequence
  Description of Artificial Sequence: Synthetic oligonucleotide
  Sense Strand Starting at position 1027 of SEQ ID NO: 317710
uuuaucaucugugugagag

SEQ ID NO: 399382 - RNA, 19 nt, Artificial Sequence
  Description of Artificial Sequence: Synthetic oligonucleotide
  Antisense Strand to SEQ ID NO: 399381
cucucacacagaugauaaa

SEQ ID NO: 399383 - RNA, 19 nt, Artificial Sequence
  Description of Artificial Sequence: Synthetic oligonucleotide
  Sense Strand Starting at position 1027 of SEQ ID NO: 317727
agcugugaucuauauaaga

SEQ ID NO: 399384 - RNA, 19 nt, Artificial Sequence
  Description of Artificial Sequence: Synthetic oligonucleotide
  Antisense Strand to SEQ ID NO: 399383
ucuuauauagaucacagcu

SEQ ID NO: 399385 - RNA, 19 nt, Artificial Sequence
  Description of Artificial Sequence: Synthetic oligonucleotide
  Sense Strand Starting at position 1027 of SEQ ID NO: 317839
guaauuuacuaguaggaag

SEQ ID NO: 399386 - RNA, 19 nt, Artificial Sequence
  Description of Artificial Sequence: Synthetic oligonucleotide
  Antisense Strand to SEQ ID NO: 399385
cuuccuacuaguaaauuac

SEQ ID NO: 399387 - RNA, 19 nt, Artificial Sequence
  Description of Artificial Sequence: Synthetic oligonucleotide
  Sense Strand Starting at position 1027 of SEQ ID NO: 317983
uaagaaauagcauguggaa

SEQ ID NO: 399388 - RNA, 19 nt, Artificial Sequence
  Description of Artificial Sequence: Synthetic oligonucleotide
  Antisense Strand to SEQ ID NO: 399387
uuccacaugcuauuucuua

SEQ ID NO: 399389 - RNA, 19 nt, Artificial Sequence
  Description of Artificial Sequence: Synthetic oligonucleotide
  Sense Strand Starting at position 1027 of SEQ ID NO: 317985
agaaauagcauguggaacu

SEQ ID NO: 399390 - RNA, 19 nt, Artificial Sequence
  Description of Artificial Sequence: Synthetic oligonucleotide
  Antisense Strand to SEQ ID NO: 399389
aguuccacaugcuauuucu

SEQ ID NO: 399391 - RNA, 19 nt, Artificial Sequence
  Description of Artificial Sequence: Synthetic oligonucleotide
  Sense Strand Starting at position 1027 of SEQ ID NO: 318232
ccauuauguuagguaacua

SEQ ID NO: 399392 - RNA, 19 nt, Artificial Sequence
  Description of Artificial Sequence: Synthetic oligonucleotide
  Antisense Strand to SEQ ID NO: 399391
uaguuaccuaacauaaugg

SEQ ID NO: 399393 - RNA, 19 nt, Artificial Sequence
  Description of Artificial Sequence: Synthetic oligonucleotide
  Sense Strand Starting at position 1027 of SEQ ID NO: 318256
cacagaguccucuguugag

SEQ ID NO: 399394 - RNA, 19 nt, Artificial Sequence
  Description of Artificial Sequence: Synthetic oligonucleotide
  Antisense Strand to SEQ ID NO: 399393
cucaacagaggacucugug

SEQ ID NO: 399395 - RNA, 19 nt, Artificial Sequence
  Description of Artificial Sequence: Synthetic oligonucleotide
  Sense Strand Starting at position 1027 of SEQ ID NO: 318300
cuuguaguacuagggacaa

SEQ ID NO: 399396 - RNA, 19 nt, Artificial Sequence
  Description of Artificial Sequence: Synthetic oligonucleotide
  Antisense Strand to SEQ ID NO: 399395
uugucccuaguacuacaag

SEQ ID NO: 399397 - RNA, 19 nt, Artificial Sequence
  Description of Artificial Sequence: Synthetic oligonucleotide
  Sense Strand Starting at position 1027 of SEQ ID NO: 318440
ugccuuuaggcaugcauuu

SEQ ID NO: 399398 - RNA, 19 nt, Artificial Sequence
  Description of Artificial Sequence: Synthetic oligonucleotide
  Antisense Strand to SEQ ID NO: 399397
aaaugcaugccuaaaggca

SEQ ID NO: 399399 - RNA, 19 nt, Artificial Sequence
  Description of Artificial Sequence: Synthetic oligonucleotide
  Sense Strand Starting at position 1027 of SEQ ID NO: 318793
agaaaugaucuauggcuuc

SEQ ID NO: 399400 - RNA, 19 nt, Artificial Sequence
  Description of Artificial Sequence: Synthetic oligonucleotide
  Antisense Strand to SEQ ID NO: 399399
gaagccauagaucauuucu

SEQ ID NO: 399401 - RNA, 19 nt, Artificial Sequence
  Description of Artificial Sequence: Synthetic oligonucleotide
  Sense Strand Starting at position 1027 of SEQ ID NO: 318870
uuguguuguauaugcauuu

SEQ ID NO: 399402 - RNA, 19 nt, Artificial Sequence
  Description of Artificial Sequence: Synthetic oligonucleotide
  Antisense Strand to SEQ ID NO: 399401
aaaugcauauacaacacaa

SEQ ID NO: 399403 - RNA, 19 nt, Artificial Sequence
  Description of Artificial Sequence: Synthetic oligonucleotide
  Sense Strand Starting at position 1028 of SEQ ID NO: 315368
guuaaccaauuugauagaa

SEQ ID NO: 399404 - RNA, 19 nt, Artificial Sequence
  Description of Artificial Sequence: Synthetic oligonucleotide
  Antisense Strand to SEQ ID NO: 399403
uucuaucaaauugguuaac

SEQ ID NO: 399405 - RNA, 19 nt, Artificial Sequence
  Description of Artificial Sequence: Synthetic oligonucleotide
  Sense Strand Starting at position 1028 of SEQ ID NO: 315378
uugauagaauugucuaagu

SEQ ID NO: 399406 - RNA, 19 nt, Artificial Sequence
  Description of Artificial Sequence: Synthetic oligonucleotide
  Antisense Strand to SEQ ID NO: 399405
acuuagacaauucuaucaa

SEQ ID NO: 399407 - RNA, 19 nt, Artificial Sequence
  Description of Artificial Sequence: Synthetic oligonucleotide
  Sense Strand Starting at position 1028 of SEQ ID NO: 315477
guuugagauuuagacaaug

SEQ ID NO: 399408 - RNA, 19 nt, Artificial Sequence
  Description of Artificial Sequence: Synthetic oligonucleotide
  Antisense Strand to SEQ ID NO: 399407
cauugucuaaaucucaaac

SEQ ID NO: 399409 - RNA, 19 nt, Artificial Sequence
  Description of Artificial Sequence: Synthetic oligonucleotide
  Sense Strand Starting at position 1028 of SEQ ID NO: 315506
agaacuaccucugugauua

SEQ ID NO: 399410 - RNA, 19 nt, Artificial Sequence
  Description of Artificial Sequence: Synthetic oligonucleotide
  Antisense Strand to SEQ ID NO: 399409
uaaucacagagguaguucu

SEQ ID NO: 399411 - RNA, 19 nt, Artificial Sequence
  Description of Artificial Sequence: Synthetic oligonucleotide
  Sense Strand Starting at position 1028 of SEQ ID NO: 315519
ugauuaacugcugaaaugu

SEQ ID NO: 399412 - RNA, 19 nt, Artificial Sequence
  Description of Artificial Sequence: Synthetic oligonucleotide
  Antisense Strand to SEQ ID NO: 399411
acauuucagcaguuaauca

SEQ ID NO: 399413 - RNA, 19 nt, Artificial Sequence
  Description of Artificial Sequence: Synthetic oligonucleotide
  Sense Strand Starting at position 1028 of SEQ ID NO: 315921
guauguuaagaguauacau

SEQ ID NO: 399414 - RNA, 19 nt, Artificial Sequence
  Description of Artificial Sequence: Synthetic oligonucleotide
  Antisense Strand to SEQ ID NO: 399413
auguauacucuuaacauac

SEQ ID NO: 399415 - RNA, 19 nt, Artificial Sequence
  Description of Artificial Sequence: Synthetic oligonucleotide
  Sense Strand Starting at position 1028 of SEQ ID NO: 316063
acaaacugucauuguuaaa

SEQ ID NO: 399416 - RNA, 19 nt, Artificial Sequence
  Description of Artificial Sequence: Synthetic oligonucleotide
  Antisense Strand to SEQ ID NO: 399415
uuuaacaaugacaguuugu

SEQ ID NO: 399417 - RNA, 19 nt, Artificial Sequence
  Description of Artificial Sequence: Synthetic oligonucleotide
  Sense Strand Starting at position 1028 of SEQ ID NO: 316202
ggagaucacugucuaccau

SEQ ID NO: 399418 - RNA, 19 nt, Artificial Sequence
  Description of Artificial Sequence: Synthetic oligonucleotide
  Antisense Strand to SEQ ID NO: 399417
augguagacagugaucucc

SEQ ID NO: 399419 - RNA, 19 nt, Artificial Sequence
  Description of Artificial Sequence: Synthetic oligonucleotide
  Sense Strand Starting at position 1028 of SEQ ID NO: 316482
gcuaauuauggauaugcua

SEQ ID NO: 399420 - RNA, 19 nt, Artificial Sequence
  Description of Artificial Sequence: Synthetic oligonucleotide
  Antisense Strand to SEQ ID NO: 399419
uagcauauccauaauuagc

SEQ ID NO: 399421 - RNA, 19 nt, Artificial Sequence
  Description of Artificial Sequence: Synthetic oligonucleotide
  Sense Strand Starting at position 1028 of SEQ ID NO: 316810
auaauucucccugggaacu

SEQ ID NO: 399422 - RNA, 19 nt, Artificial Sequence
  Description of Artificial Sequence: Synthetic oligonucleotide
  Antisense Strand to SEQ ID NO: 399421
aguucccagggagaauuau

SEQ ID NO: 399423 - RNA, 19 nt, Artificial Sequence
  Description of Artificial Sequence: Synthetic oligonucleotide
  Sense Strand Starting at position 1028 of SEQ ID NO: 316996
guaacauuacaguaacuuu

SEQ ID NO: 399424 - RNA, 19 nt, Artificial Sequence
  Description of Artificial Sequence: Synthetic oligonucleotide
  Antisense Strand to SEQ ID NO: 399423
aaaguuacuguaauguuac

SEQ ID NO: 399425 - RNA, 19 nt, Artificial Sequence
  Description of Artificial Sequence: Synthetic oligonucleotide
  Sense Strand Starting at position 1028 of SEQ ID NO: 317084
guagucuuugaugagguga

SEQ ID NO: 399426 - RNA, 19 nt, Artificial Sequence
  Description of Artificial Sequence: Synthetic oligonucleotide
  Antisense Strand to SEQ ID NO: 399425
ucaccucaucaaagacuac

SEQ ID NO: 399427 - RNA, 19 nt, Artificial Sequence
  Description of Artificial Sequence: Synthetic oligonucleotide
  Sense Strand Starting at position 1028 of SEQ ID NO: 317151
aaaugaggugguuaccagu

SEQ ID NO: 399428 - RNA, 19 nt, Artificial Sequence
  Description of Artificial Sequence: Synthetic oligonucleotide
  Antisense Strand to SEQ ID NO: 399427
acugguaaccaccucauuu

SEQ ID NO: 399429 - RNA, 19 nt, Artificial Sequence
  Description of Artificial Sequence: Synthetic oligonucleotide
  Sense Strand Starting at position 1028 of SEQ ID NO: 317316
agcuuaaguccacauaggu

SEQ ID NO: 399430 - RNA, 19 nt, Artificial Sequence
  Description of Artificial Sequence: Synthetic oligonucleotide
  Antisense Strand to SEQ ID NO: 399429
accuauguggacuuaagcu

SEQ ID NO: 399431 - RNA, 19 nt, Artificial Sequence
  Description of Artificial Sequence: Synthetic oligonucleotide
  Sense Strand Starting at position 1028 of SEQ ID NO: 317427
aaaugugugcaacaauaag

SEQ ID NO: 399432 - RNA, 19 nt, Artificial Sequence
  Description of Artificial Sequence: Synthetic oligonucleotide
  Antisense Strand to SEQ ID NO: 399431
cuuauuguugcacacauuu

SEQ ID NO: 399433 - RNA, 19 nt, Artificial Sequence
  Description of Artificial Sequence: Synthetic oligonucleotide
  Sense Strand Starting at position 1028 of SEQ ID NO: 317457
augagugaggaguguaaua

SEQ ID NO: 399434 - RNA, 19 nt, Artificial Sequence
  Description of Artificial Sequence: Synthetic oligonucleotide
  Antisense Strand to SEQ ID NO: 399433
uauuacacuccucacucau

SEQ ID NO: 399435 - RNA, 19 nt, Artificial Sequence
  Description of Artificial Sequence: Synthetic oligonucleotide
  Sense Strand Starting at position 1028 of SEQ ID NO: 317949
gaaauaauguguguuaaug

SEQ ID NO: 399436 - RNA, 19 nt, Artificial Sequence
  Description of Artificial Sequence: Synthetic oligonucleotide
  Antisense Strand to SEQ ID NO: 399435
cauuaacacacauuauuuc

SEQ ID NO: 399437 - RNA, 19 nt, Artificial Sequence
  Description of Artificial Sequence: Synthetic oligonucleotide
  Sense Strand Starting at position 1028 of SEQ ID NO: 317960
uguuaauguguugaucaca

SEQ ID NO: 399438 - RNA, 19 nt, Artificial Sequence
  Description of Artificial Sequence: Synthetic oligonucleotide
  Antisense Strand to SEQ ID NO: 399437
ugugaucaacacauuaaca

SEQ ID NO: 399439 - RNA, 19 nt, Artificial Sequence
  Description of Artificial Sequence: Synthetic oligonucleotide
  Sense Strand Starting at position 1028 of SEQ ID NO: 318128
auauucuacccugauguca

SEQ ID NO: 399440 - RNA, 19 nt, Artificial Sequence
  Description of Artificial Sequence: Synthetic oligonucleotide
  Antisense Strand to SEQ ID NO: 399439
ugacaucaggguagaauau

SEQ ID NO: 399441 - RNA, 19 nt, Artificial Sequence
  Description of Artificial Sequence: Synthetic oligonucleotide
  Sense Strand Starting at position 1028 of SEQ ID NO: 318136
cccugaugucaguggaaua

SEQ ID NO: 399442 - RNA, 19 nt, Artificial Sequence
  Description of Artificial Sequence: Synthetic oligonucleotide
  Antisense Strand to SEQ ID NO: 399441
uauuccacugacaucaggg

SEQ ID NO: 399443 - RNA, 19 nt, Artificial Sequence
  Description of Artificial Sequence: Synthetic oligonucleotide
  Sense Strand Starting at position 1028 of SEQ ID NO: 318137
ccugaugucaguggaauau

SEQ ID NO: 399444 - RNA, 19 nt, Artificial Sequence
  Description of Artificial Sequence: Synthetic oligonucleotide
  Antisense Strand to SEQ ID NO: 399443
auauuccacugacaucagg

SEQ ID NO: 399445 - RNA, 19 nt, Artificial Sequence
  Description of Artificial Sequence: Synthetic oligonucleotide
  Sense Strand Starting at position 1028 of SEQ ID NO: 318141
augucaguggaauauguga

SEQ ID NO: 399446 - RNA, 19 nt, Artificial Sequence
  Description of Artificial Sequence: Synthetic oligonucleotide
  Antisense Strand to SEQ ID NO: 399445
ucacauauuccacugacau

SEQ ID NO: 399447 - RNA, 19 nt, Artificial Sequence
  Description of Artificial Sequence: Synthetic oligonucleotide
  Sense Strand Starting at position 1028 of SEQ ID NO: 318148
uggaauaugugacuaggua

SEQ ID NO: 399448 - RNA, 19 nt, Artificial Sequence
  Description of Artificial Sequence: Synthetic oligonucleotide
  Antisense Strand to SEQ ID NO: 399447
uaccuagucacauauucca

SEQ ID NO: 399449 - RNA, 19 nt, Artificial Sequence
  Description of Artificial Sequence: Synthetic oligonucleotide
  Sense Strand Starting at position 1028 of SEQ ID NO: 318152
auaugugacuagguauuga

SEQ ID NO: 399450 - RNA, 19 nt, Artificial Sequence
  Description of Artificial Sequence: Synthetic oligonucleotide
  Antisense Strand to SEQ ID NO: 399449
ucaauaccuagucacauau

SEQ ID NO: 399451 - RNA, 19 nt, Artificial Sequence
  Description of Artificial Sequence: Synthetic oligonucleotide
  Sense Strand Starting at position 1028 of SEQ ID NO: 318165
uauugauaacuguguauag

SEQ ID NO: 399452 - RNA, 19 nt, Artificial Sequence
  Description of Artificial Sequence: Synthetic oligonucleotide
  Antisense Strand to SEQ ID NO: 399451
cuauacacaguuaucaaua

SEQ ID NO: 399453 - RNA, 19 nt, Artificial Sequence
  Description of Artificial Sequence: Synthetic oligonucleotide
  Sense Strand Starting at position 1028 of SEQ ID NO: 318166
auugauaacuguguauaga

SEQ ID NO: 399454 - RNA, 19 nt, Artificial Sequence
  Description of Artificial Sequence: Synthetic oligonucleotide
  Antisense Strand to SEQ ID NO: 399453
ucuauacacaguuaucaau

SEQ ID NO: 399455 - RNA, 19 nt, Artificial Sequence
  Description of Artificial Sequence: Synthetic oligonucleotide
  Sense Strand Starting at position 1028 of SEQ ID NO: 318167
uugauaacuguguauagac

SEQ ID NO: 399456 - RNA, 19 nt, Artificial Sequence
  Description of Artificial Sequence: Synthetic oligonucleotide
  Antisense Strand to SEQ ID NO: 399455
gucuauacacaguuaucaa

SEQ ID NO: 399457 - RNA, 19 nt, Artificial Sequence
  Description of Artificial Sequence: Synthetic oligonucleotide
  Sense Strand Starting at position 1028 of SEQ ID NO: 318177
uguauagacaguuaagugu

SEQ ID NO: 399458 - RNA, 19 nt, Artificial Sequence
  Description of Artificial Sequence: Synthetic oligonucleotide
  Antisense Strand to SEQ ID NO: 399457
acacuuaacugucuauaca

SEQ ID NO: 399459 - RNA, 19 nt, Artificial Sequence
  Description of Artificial Sequence: Synthetic oligonucleotide
  Sense Strand Starting at position 1028 of SEQ ID NO: 318540
ggagacacuuuauugaagu

SEQ ID NO: 399460 - RNA, 19 nt, Artificial Sequence
  Description of Artificial Sequence: Synthetic oligonucleotide
  Antisense Strand to SEQ ID NO: 399459
acuucaauaaagugucucc

SEQ ID NO: 399461 - RNA, 19 nt, Artificial Sequence
  Description of Artificial Sequence: Synthetic oligonucleotide
  Sense Strand Starting at position 1028 of SEQ ID NO: 318553
ugaaguuauuaucugagga

SEQ ID NO: 399462 - RNA, 19 nt, Artificial Sequence
  Description of Artificial Sequence: Synthetic oligonucleotide
  Antisense Strand to SEQ ID NO: 399461
uccucagauaauaacuuca

SEQ ID NO: 399463 - RNA, 19 nt, Artificial Sequence
  Description of Artificial Sequence: Synthetic oligonucleotide
  Sense Strand Starting at position 1028 of SEQ ID NO: 318659
uugcuuuaagaugacuauu

SEQ ID NO: 399464 - RNA, 19 nt, Artificial Sequence
  Description of Artificial Sequence: Synthetic oligonucleotide
  Antisense Strand to SEQ ID NO: 399463
aauagucaucuuaaagcaa

SEQ ID NO: 399465 - RNA, 19 nt, Artificial Sequence
  Description of Artificial Sequence: Synthetic oligonucleotide
  Sense Strand Starting at position 1028 of SEQ ID NO: 318709
gauguuauaguugagguau

SEQ ID NO: 399466 - RNA, 19 nt, Artificial Sequence
  Description of Artificial Sequence: Synthetic oligonucleotide
  Antisense Strand to SEQ ID NO: 399465
auaccucaacuauaacauc

SEQ ID NO: 399467 - RNA, 19 nt, Artificial Sequence
  Description of Artificial Sequence: Synthetic oligonucleotide
  Sense Strand Starting at position 1028 of SEQ ID NO: 318715
auaguugagguaugcaaag

SEQ ID NO: 399468 - RNA, 19 nt, Artificial Sequence
  Description of Artificial Sequence: Synthetic oligonucleotide
  Antisense Strand to SEQ ID NO: 399467
cuuugcauaccucaacuau

SEQ ID NO: 399469 - RNA, 19 nt, Artificial Sequence
  Description of Artificial Sequence: Synthetic oligonucleotide
  Sense Strand Starting at position 1028 of SEQ ID NO: 318717
aguugagguaugcaaagua

SEQ ID NO: 399470 - RNA, 19 nt, Artificial Sequence
  Description of Artificial Sequence: Synthetic oligonucleotide
  Antisense Strand to SEQ ID NO: 399469
uacuuugcauaccucaacu

SEQ ID NO: 399471 - RNA, 19 nt, Artificial Sequence
  Description of Artificial Sequence: Synthetic oligonucleotide
  Sense Strand Starting at position 1028 of SEQ ID NO: 318785
agaugaaauuacuugucuu

SEQ ID NO: 399472 - RNA, 19 nt, Artificial Sequence
  Description of Artificial Sequence: Synthetic oligonucleotide
  Antisense Strand to SEQ ID NO: 399471
aagacaaguaauuucaucu

SEQ ID NO: 399473 - RNA, 19 nt, Artificial Sequence
  Description of Artificial Sequence: Synthetic oligonucleotide
  Sense Strand Starting at position 1028 of SEQ ID NO: 318870
ucugaagcccuggauuaua

SEQ ID NO: 399474 - RNA, 19 nt, Artificial Sequence
  Description of Artificial Sequence: Synthetic oligonucleotide
  Antisense Strand to SEQ ID NO: 399473
uauaauccagggcuucaga

SEQ ID NO: 399475 - RNA, 19 nt, Artificial Sequence
  Description of Artificial Sequence: Synthetic oligonucleotide
  Sense Strand Starting at position 1028 of SEQ ID NO: 318917
agccguuauuuagugguga

SEQ ID NO: 399476 - RNA, 19 nt, Artificial Sequence
  Description of Artificial Sequence: Synthetic oligonucleotide
  Antisense Strand to SEQ ID NO: 399475
ucaccacuaaauaacggcu

SEQ ID NO: 399477 - RNA, 19 nt, Artificial Sequence
  Description of Artificial Sequence: Synthetic oligonucleotide
  Sense Strand Starting at position 1028 of SEQ ID NO: 318919
ccguuauuuaguggugaca

SEQ ID NO: 399478 - RNA, 19 nt, Artificial Sequence
  Description of Artificial Sequence: Synthetic oligonucleotide
  Antisense Strand to SEQ ID NO: 399477
ugucaccacuaaauaacgg

SEQ ID NO: 399479 - RNA, 19 nt, Artificial Sequence
  Description of Artificial Sequence: Synthetic oligonucleotide
  Sense Strand Starting at position 1028 of SEQ ID NO: 318980
ucaggaagguaaguaauau

SEQ ID NO: 399480 - RNA, 19 nt, Artificial Sequence
  Description of Artificial Sequence: Synthetic oligonucleotide
  Antisense Strand to SEQ ID NO: 399479
auauuacuuaccuuccuga

SEQ ID NO: 399481 - RNA, 19 nt, Artificial Sequence
  Description of Artificial Sequence: Synthetic oligonucleotide
  Sense Strand Starting at position 1028 of SEQ ID NO: 319115
gcucaucaugcugaaacau

SEQ ID NO: 399482 - RNA, 19 nt, Artificial Sequence
  Description of Artificial Sequence: Synthetic oligonucleotide
  Antisense Strand to SEQ ID NO: 399481
auguuucagcaugaugagc

SEQ ID NO: 399483 - RNA, 19 nt, Artificial Sequence
  Description of Artificial Sequence: Synthetic oligonucleotide
  Sense Strand Starting at position 1029 of SEQ ID NO: 315583
cggguucuugaagagaagu

SEQ ID NO: 399484 - RNA, 19 nt, Artificial Sequence
  Description of Artificial Sequence: Synthetic oligonucleotide
  Antisense Strand to SEQ ID NO: 399483
acuucucuucaagaacccg

SEQ ID NO: 399485 - RNA, 19 nt, Artificial Sequence
  Description of Artificial Sequence: Synthetic oligonucleotide
  Sense Strand Starting at position 1029 of SEQ ID NO: 316591
uccagaguccgagguaaac

SEQ ID NO: 399486 - RNA, 19 nt, Artificial Sequence
  Description of Artificial Sequence: Synthetic oligonucleotide
  Antisense Strand to SEQ ID NO: 399485
guuuaccucggacucugga

SEQ ID NO: 399487 - RNA, 19 nt, Artificial Sequence
  Description of Artificial Sequence: Synthetic oligonucleotide
  Sense Strand Starting at position 1029 of SEQ ID NO: 316680
aguuucccgaaaugaaaga

SEQ ID NO: 399488 - RNA, 19 nt, Artificial Sequence
  Description of Artificial Sequence: Synthetic oligonucleotide
  Antisense Strand to SEQ ID NO: 399487
ucuuucauuucgggaaacu

SEQ ID NO: 399489 - RNA, 19 nt, Artificial Sequence
  Description of Artificial Sequence: Synthetic oligonucleotide
  Sense Strand Starting at position 1029 of SEQ ID NO: 317434
guaacuagugaaugaguga

SEQ ID NO: 399490 - RNA, 19 nt, Artificial Sequence
  Description of Artificial Sequence: Synthetic oligonucleotide
  Antisense Strand to SEQ ID NO: 399489
ucacucauucacuaguuac

SEQ ID NO: 399491 - RNA, 19 nt, Artificial Sequence
  Description of Artificial Sequence: Synthetic oligonucleotide
  Sense Strand Starting at position 1029 of SEQ ID NO: 317488
cgcgcaagaauuuguaaug

SEQ ID NO: 399492 - RNA, 19 nt, Artificial Sequence
  Description of Artificial Sequence: Synthetic oligonucleotide
  Antisense Strand to SEQ ID NO: 399491
cauuacaaauucuugcgcg

SEQ ID NO: 399493 - RNA, 19 nt, Artificial Sequence
  Description of Artificial Sequence: Synthetic oligonucleotide
  Sense Strand Starting at position 1029 of SEQ ID NO: 317489
gcgcaagaauuuguaauga

SEQ ID NO: 399494 - RNA, 19 nt, Artificial Sequence
  Description of Artificial Sequence: Synthetic oligonucleotide
  Antisense Strand to SEQ ID NO: 399493
ucauuacaaauucuugcgc

SEQ ID NO: 399495 - RNA, 19 nt, Artificial Sequence
  Description of Artificial Sequence: Synthetic oligonucleotide
  Sense Strand Starting at position 1029 of SEQ ID NO: 317499
uuguaaugagcuugauuag

SEQ ID NO: 399496 - RNA, 19 nt, Artificial Sequence
  Description of Artificial Sequence: Synthetic oligonucleotide
  Antisense Strand to SEQ ID NO: 399495
cuaaucaagcucauuacaa

SEQ ID NO: 399497 - RNA, 19 nt, Artificial Sequence
  Description of Artificial Sequence: Synthetic oligonucleotide
  Sense Strand Starting at position 1029 of SEQ ID NO: 317500
uguaaugagcuugauuaga

SEQ ID NO: 399498 - RNA, 19 nt, Artificial Sequence
  Description of Artificial Sequence: Synthetic oligonucleotide
  Antisense Strand to SEQ ID NO: 399497
ucuaaucaagcucauuaca

SEQ ID NO: 399499 - RNA, 19 nt, Artificial Sequence
  Description of Artificial Sequence: Synthetic oligonucleotide
  Sense Strand Starting at position 1029 of SEQ ID NO: 317502
uaaugagcuugauuagagu

SEQ ID NO: 399500 - RNA, 19 nt, Artificial Sequence
  Description of Artificial Sequence: Synthetic oligonucleotide
  Antisense Strand to SEQ ID NO: 399499
acucuaaucaagcucauua

SEQ ID NO: 399501 - RNA, 19 nt, Artificial Sequence
  Description of Artificial Sequence: Synthetic oligonucleotide
  Sense Strand Starting at position 1029 of SEQ ID NO: 318029
aaacguguacagcaauaaa

SEQ ID NO: 399502 - RNA, 19 nt, Artificial Sequence
  Description of Artificial Sequence: Synthetic oligonucleotide
  Antisense Strand to SEQ ID NO: 399501
uuuauugcuguacacguuu

SEQ ID NO: 399503 - RNA, 19 nt, Artificial Sequence
  Description of Artificial Sequence: Synthetic oligonucleotide
  Sense Strand Starting at position 1029 of SEQ ID NO: 318071
gaauguuuauccucuaagg

SEQ ID NO: 399504 - RNA, 19 nt, Artificial Sequence
  Description of Artificial Sequence: Synthetic oligonucleotide
  Antisense Strand to SEQ ID NO: 399503
ccuuagaggauaaacauuc

SEQ ID NO: 399505 - RNA, 19 nt, Artificial Sequence
  Description of Artificial Sequence: Synthetic oligonucleotide
  Sense Strand Starting at position 1029 of SEQ ID NO: 318089
gagggugguccuuaaacua

SEQ ID NO: 399506 - RNA, 19 nt, Artificial Sequence
  Description of Artificial Sequence: Synthetic oligonucleotide
  Antisense Strand to SEQ ID NO: 399505
uaguuuaaggaccacccuc

SEQ ID NO: 399507 - RNA, 19 nt, Artificial Sequence
  Description of Artificial Sequence: Synthetic oligonucleotide
  Sense Strand Starting at position 1029 of SEQ ID NO: 318096
guccuuaaacuaugaggag

SEQ ID NO: 399508 - RNA, 19 nt, Artificial Sequence
  Description of Artificial Sequence: Synthetic oligonucleotide
  Antisense Strand to SEQ ID NO: 399507
cuccucauaguuuaaggac

SEQ ID NO: 399509 - RNA, 19 nt, Artificial Sequence
  Description of Artificial Sequence: Synthetic oligonucleotide
  Sense Strand Starting at position 1029 of SEQ ID NO: 318188
gccauagaauacuuuggaa

SEQ ID NO: 399510 - RNA, 19 nt, Artificial Sequence
  Description of Artificial Sequence: Synthetic oligonucleotide
  Antisense Strand to SEQ ID NO: 399509
uuccaaaguauucuauggc

SEQ ID NO: 399511 - RNA, 19 nt, Artificial Sequence
  Description of Artificial Sequence: Synthetic oligonucleotide
  Sense Strand Starting at position 1029 of SEQ ID NO: 318253
agaccugacuuguuauuau

SEQ ID NO: 399512 - RNA, 19 nt, Artificial Sequence
  Description of Artificial Sequence: Synthetic oligonucleotide
  Antisense Strand to SEQ ID NO: 399511
auaauaacaagucaggucu

SEQ ID NO: 399513 - RNA, 19 nt, Artificial Sequence
  Description of Artificial Sequence: Synthetic oligonucleotide
  Sense Strand Starting at position 1029 of SEQ ID NO: 318320
aggaaaguuuggguuggua

SEQ ID NO: 399514 - RNA, 19 nt, Artificial Sequence
  Description of Artificial Sequence: Synthetic oligonucleotide
  Antisense Strand to SEQ ID NO: 399513
uaccaacccaaacuuuccu

SEQ ID NO: 399515 - RNA, 19 nt, Artificial Sequence
  Description of Artificial Sequence: Synthetic oligonucleotide
  Sense Strand Starting at position 1029 of SEQ ID NO: 318322
gaaaguuuggguugguaaa

SEQ ID NO: 399516 - RNA, 19 nt, Artificial Sequence
  Description of Artificial Sequence: Synthetic oligonucleotide
  Antisense Strand to SEQ ID NO: 399515
uuuaccaacccaaacuuuc

SEQ ID NO: 399517 - RNA, 19 nt, Artificial Sequence
  Description of Artificial Sequence: Synthetic oligonucleotide
  Sense Strand Starting at position 1029 of SEQ ID NO: 318323
aaaguuuggguugguaaau

SEQ ID NO: 399518 - RNA, 19 nt, Artificial Sequence
  Description of Artificial Sequence: Synthetic oligonucleotide
  Antisense Strand to SEQ ID NO: 399517
auuuaccaacccaaacuuu

SEQ ID NO: 399519 - RNA, 19 nt, Artificial Sequence
  Description of Artificial Sequence: Synthetic oligonucleotide
  Sense Strand Starting at position 1029 of SEQ ID NO: 318324
aaguuuggguugguaaaua

SEQ ID NO: 399520 - RNA, 19 nt, Artificial Sequence
  Description of Artificial Sequence: Synthetic oligonucleotide
  Antisense Strand to SEQ ID NO: 399519
uauuuaccaacccaaacuu

SEQ ID NO: 399521 - RNA, 19 nt, Artificial Sequence
  Description of Artificial Sequence: Synthetic oligonucleotide
  Sense Strand Starting at position 1029 of SEQ ID NO: 318366
ucugcuguaaucuagggua

SEQ ID NO: 399522 - RNA, 19 nt, Artificial Sequence
  Description of Artificial Sequence: Synthetic oligonucleotide
  Antisense Strand to SEQ ID NO: 399521
uacccuagauuacagcaga

SEQ ID NO: 399523 - RNA, 19 nt, Artificial Sequence
  Description of Artificial Sequence: Synthetic oligonucleotide
  Sense Strand Starting at position 1029 of SEQ ID NO: 318371
uguaaucuaggguagguua

SEQ ID NO: 399524 - RNA, 19 nt, Artificial Sequence
  Description of Artificial Sequence: Synthetic oligonucleotide
  Antisense Strand to SEQ ID NO: 399523
uaaccuacccuagauuaca

SEQ ID NO: 399525 - RNA, 19 nt, Artificial Sequence
  Description of Artificial Sequence: Synthetic oligonucleotide
  Sense Strand Starting at position 1029 of SEQ ID NO: 318395
uuagauaaauggucauuac

SEQ ID NO: 399526 - RNA, 19 nt, Artificial Sequence
  Description of Artificial Sequence: Synthetic oligonucleotide
  Antisense Strand to SEQ ID NO: 399525
guaaugaccauuuaucuaa

SEQ ID NO: 399527 - RNA, 19 nt, Artificial Sequence
  Description of Artificial Sequence: Synthetic oligonucleotide
  Sense Strand Starting at position 1029 of SEQ ID NO: 318404
uggucauuaccacauaagu

SEQ ID NO: 399528 - RNA, 19 nt, Artificial Sequence
  Description of Artificial Sequence: Synthetic oligonucleotide
  Antisense Strand to SEQ ID NO: 399527
acuuaugugguaaugacca

SEQ ID NO: 399529 - RNA, 19 nt, Artificial Sequence
  Description of Artificial Sequence: Synthetic oligonucleotide
  Sense Strand Starting at position 1029 of SEQ ID NO: 318502
augccucauuuaucgcuua

SEQ ID NO: 399530 - RNA, 19 nt, Artificial Sequence
  Description of Artificial Sequence: Synthetic oligonucleotide
  Antisense Strand to SEQ ID NO: 399529
uaagcgauaaaugaggcau

SEQ ID NO: 399531 - RNA, 19 nt, Artificial Sequence
  Description of Artificial Sequence: Synthetic oligonucleotide
  Sense Strand Starting at position 1029 of SEQ ID NO: 318505
ccucauuuaucgcuuaggu

SEQ ID NO: 399532 - RNA, 19 nt, Artificial Sequence
  Description of Artificial Sequence: Synthetic oligonucleotide
  Antisense Strand to SEQ ID NO: 399531
accuaagcgauaaaugagg

SEQ ID NO: 399533 - RNA, 19 nt, Artificial Sequence
  Description of Artificial Sequence: Synthetic oligonucleotide
  Sense Strand Starting at position 1029 of SEQ ID NO: 318507
ucauuuaucgcuuagguuu

SEQ ID NO: 399534 - RNA, 19 nt, Artificial Sequence
  Description of Artificial Sequence: Synthetic oligonucleotide
  Antisense Strand to SEQ ID NO: 399533
aaaccuaagcgauaaauga

SEQ ID NO: 399535 - RNA, 19 nt, Artificial Sequence
  Description of Artificial Sequence: Synthetic oligonucleotide
  Sense Strand Starting at position 1029 of SEQ ID NO: 318552
ggcaguuaaucauuaacaa

SEQ ID NO: 399536 - RNA, 19 nt, Artificial Sequence
  Description of Artificial Sequence: Synthetic oligonucleotide
  Antisense Strand to SEQ ID NO: 399535
uuguuaaugauuaacugcc

SEQ ID NO: 399537 - RNA, 19 nt, Artificial Sequence
  Description of Artificial Sequence: Synthetic oligonucleotide
  Sense Strand Starting at position 1029 of SEQ ID NO: 318590
agaauuugcugguagggaa

SEQ ID NO: 399538 - RNA, 19 nt, Artificial Sequence
  Description of Artificial Sequence: Synthetic oligonucleotide
  Antisense Strand to SEQ ID NO: 399537
uucccuaccagcaaauucu

SEQ ID NO: 399539 - RNA, 19 nt, Artificial Sequence
  Description of Artificial Sequence: Synthetic oligonucleotide
  Sense Strand Starting at position 1029 of SEQ ID NO: 318788
aggaaaugauggccuccua

SEQ ID NO: 399540 - RNA, 19 nt, Artificial Sequence
  Description of Artificial Sequence: Synthetic oligonucleotide
  Antisense Strand to SEQ ID NO: 399539
uaggaggccaucauuuccu

SEQ ID NO: 399541 - RNA, 19 nt, Artificial Sequence
  Description of Artificial Sequence: Synthetic oligonucleotide
  Sense Strand Starting at position 1029 of SEQ ID NO: 318878
ccagaaagguuagccaaau

SEQ ID NO: 399542 - RNA, 19 nt, Artificial Sequence
  Description of Artificial Sequence: Synthetic oligonucleotide
  Antisense Strand to SEQ ID NO: 399541
auuuggcuaaccuuucugg

SEQ ID NO: 399543 - RNA, 19 nt, Artificial Sequence
  Description of Artificial Sequence: Synthetic oligonucleotide
  Sense Strand Starting at position 1029 of SEQ ID NO: 318879
cagaaagguuagccaaauc

SEQ ID NO: 399544 - RNA, 19 nt, Artificial Sequence
  Description of Artificial Sequence: Synthetic oligonucleotide
  Antisense Strand to SEQ ID NO: 399543
gauuuggcuaaccuuucug

SEQ ID NO: 399545 - RNA, 19 nt, Artificial Sequence
  Description of Artificial Sequence: Synthetic oligonucleotide
  Sense Strand Starting at position 1029 of SEQ ID NO: 318901
gaaggcaaccgugaaucuu

SEQ ID NO: 399546 - RNA, 19 nt, Artificial Sequence
  Description of Artificial Sequence: Synthetic oligonucleotide
  Antisense Strand to SEQ ID NO: 399545
aagauucacgguugccuuc

SEQ ID NO: 399547 - RNA, 19 nt, Artificial Sequence
  Description of Artificial Sequence: Synthetic oligonucleotide
  Sense Strand Starting at position 1029 of SEQ ID NO: 319073
gaagauauguuagcuaaag

SEQ ID NO: 399548 - RNA, 19 nt, Artificial Sequence
  Description of Artificial Sequence: Synthetic oligonucleotide
  Antisense Strand to SEQ ID NO: 399547
cuuuagcuaacauaucuuc

SEQ ID NO: 399549 - RNA, 19 nt, Artificial Sequence
  Description of Artificial Sequence: Synthetic oligonucleotide
  Sense Strand Starting at position 1029 of SEQ ID NO: 319074
aagauauguuagcuaaagu

SEQ ID NO: 399550 - RNA, 19 nt, Artificial Sequence
  Description of Artificial Sequence: Synthetic oligonucleotide
  Antisense Strand to SEQ ID NO: 399549
acuuuagcuaacauaucuu

SEQ ID NO: 399551 - RNA, 19 nt, Artificial Sequence
  Description of Artificial Sequence: Synthetic oligonucleotide
  Sense Strand Starting at position 1029 of SEQ ID NO: 319103
gaaauaugguagguuaaau

SEQ ID NO: 399552 - RNA, 19 nt, Artificial Sequence
  Description of Artificial Sequence: Synthetic oligonucleotide
  Antisense Strand to SEQ ID NO: 399551
auuuaaccuaccauauuuc

SEQ ID NO: 399553 - RNA, 19 nt, Artificial Sequence
  Description of Artificial Sequence: Synthetic oligonucleotide
  Sense Strand Starting at position 1029 of SEQ ID NO: 319161
acuaguaaugccugacaug

SEQ ID NO: 399554 - RNA, 19 nt, Artificial Sequence
  Description of Artificial Sequence: Synthetic oligonucleotide
  Antisense Strand to SEQ ID NO: 399553
caugucaggcauuacuagu

SEQ ID NO: 399555 - RNA, 19 nt, Artificial Sequence
  Description of Artificial Sequence: Synthetic oligonucleotide
  Sense Strand Starting at position 1029 of SEQ ID NO: 319162
cuaguaaugccugacaugu

SEQ ID NO: 399556 - RNA, 19 nt, Artificial Sequence
  Description of Artificial Sequence: Synthetic oligonucleotide
  Antisense Strand to SEQ ID NO: 399555
acaugucaggcauuacuag

SEQ ID NO: 399557 - RNA, 19 nt, Artificial Sequence
  Description of Artificial Sequence: Synthetic oligonucleotide
  Sense Strand Starting at position 1029 of SEQ ID NO: 319171
ccugacauguuucccugaa

SEQ ID NO: 399558 - RNA, 19 nt, Artificial Sequence
  Description of Artificial Sequence: Synthetic oligonucleotide
  Antisense Strand to SEQ ID NO: 399557
uucagggaaacaugucagg

SEQ ID NO: 399559 - RNA, 19 nt, Artificial Sequence
  Description of Artificial Sequence: Synthetic oligonucleotide
  Sense Strand Starting at position 1029 of SEQ ID NO: 319172
cugacauguuucccugaaa

SEQ ID NO: 399560 - RNA, 19 nt, Artificial Sequence
  Description of Artificial Sequence: Synthetic oligonucleotide
  Antisense Strand to SEQ ID NO: 399559
uuucagggaaacaugucag

SEQ ID NO: 399561 - RNA, 19 nt, Artificial Sequence
  Description of Artificial Sequence: Synthetic oligonucleotide
  Sense Strand Starting at position 1029 of SEQ ID NO: 319173
ugacauguuucccugaaac

SEQ ID NO: 399562 - RNA, 19 nt, Artificial Sequence
  Description of Artificial Sequence: Synthetic oligonucleotide
  Antisense Strand to SEQ ID NO: 399561
guuucagggaaacauguca

SEQ ID NO: 399563 - RNA, 19 nt, Artificial Sequence
  Description of Artificial Sequence: Synthetic oligonucleotide
  Sense Strand Starting at position 1030 of SEQ ID NO: 315707
ucaugugcucagugggaau

SEQ ID NO: 399564 - RNA, 19 nt, Artificial Sequence
  Description of Artificial Sequence: Synthetic oligonucleotide
  Antisense Strand to SEQ ID NO: 399563
auucccacugagcacauga

SEQ ID NO: 399565 - RNA, 19 nt, Artificial Sequence
  Description of Artificial Sequence: Synthetic oligonucleotide
  Sense Strand Starting at position 1030 of SEQ ID NO: 315710
ugugcucagugggaauacu

SEQ ID NO: 399566 - RNA, 19 nt, Artificial Sequence
  Description of Artificial Sequence: Synthetic oligonucleotide
  Antisense Strand to SEQ ID NO: 399565
aguauucccacugagcaca

SEQ ID NO: 399567 - RNA, 19 nt, Artificial Sequence
  Description of Artificial Sequence: Synthetic oligonucleotide
  Sense Strand Starting at position 1030 of SEQ ID NO: 315718
gugggaauacugcaaaugu

SEQ ID NO: 399568 - RNA, 19 nt, Artificial Sequence
  Description of Artificial Sequence: Synthetic oligonucleotide
  Antisense Strand to SEQ ID NO: 399567
acauuugcaguauucccac

SEQ ID NO: 399569 - RNA, 19 nt, Artificial Sequence
  Description of Artificial Sequence: Synthetic oligonucleotide
  Sense Strand Starting at position 1030 of SEQ ID NO: 315835
gaggccaaggcuuguauaa

SEQ ID NO: 399570 - RNA, 19 nt, Artificial Sequence
  Description of Artificial Sequence: Synthetic oligonucleotide
  Antisense Strand to SEQ ID NO: 399569
uuauacaagccuuggccuc

SEQ ID NO: 399571 - RNA, 19 nt, Artificial Sequence
  Description of Artificial Sequence: Synthetic oligonucleotide
  Sense Strand Starting at position 1030 of SEQ ID NO: 315837
ggccaaggcuuguauaaug

SEQ ID NO: 399572 - RNA, 19 nt, Artificial Sequence
  Description of Artificial Sequence: Synthetic oligonucleotide
  Antisense Strand to SEQ ID NO: 399571
cauuauacaagccuuggcc

SEQ ID NO: 399573 - RNA, 19 nt, Artificial Sequence
  Description of Artificial Sequence: Synthetic oligonucleotide
  Sense Strand Starting at position 1030 of SEQ ID NO: 316191
gcucaauauccugaccuga

SEQ ID NO: 399574 - RNA, 19 nt, Artificial Sequence
  Description of Artificial Sequence: Synthetic oligonucleotide
  Antisense Strand to SEQ ID NO: 399573
ucaggucaggauauugagc

SEQ ID NO: 399575 - RNA, 19 nt, Artificial Sequence
  Description of Artificial Sequence: Synthetic oligonucleotide
  Sense Strand Starting at position 1030 of SEQ ID NO: 316305
gccgcuucacgauaaguau

SEQ ID NO: 399576 - RNA, 19 nt, Artificial Sequence
  Description of Artificial Sequence: Synthetic oligonucleotide
  Antisense Strand to SEQ ID NO: 399575
auacuuaucgugaagcggc

SEQ ID NO: 399577 - RNA, 19 nt, Artificial Sequence
  Description of Artificial Sequence: Synthetic oligonucleotide
  Sense Strand Starting at position 1030 of SEQ ID NO: 316465
gcacaacuuucugugauuc

SEQ ID NO: 399578 - RNA, 19 nt, Artificial Sequence
  Description of Artificial Sequence: Synthetic oligonucleotide
  Antisense Strand to SEQ ID NO: 399577
gaaucacagaaaguugugc

SEQ ID NO: 399579 - RNA, 19 nt, Artificial Sequence
  Description of Artificial Sequence: Synthetic oligonucleotide
  Sense Strand Starting at position 1030 of SEQ ID NO: 316514
uaacgcuaucgugacauua

SEQ ID NO: 399580 - RNA, 19 nt, Artificial Sequence
  Description of Artificial Sequence: Synthetic oligonucleotide
  Antisense Strand to SEQ ID NO: 399579
uaaugucacgauagcguua

SEQ ID NO: 399581 - RNA, 19 nt, Artificial Sequence
  Description of Artificial Sequence: Synthetic oligonucleotide
  Sense Strand Starting at position 1030 of SEQ ID NO: 316516
acgcuaucgugacauuaua

SEQ ID NO: 399582 - RNA, 19 nt, Artificial Sequence
  Description of Artificial Sequence: Synthetic oligonucleotide
  Antisense Strand to SEQ ID NO: 399581
uauaaugucacgauagcgu

SEQ ID NO: 399583 - RNA, 19 nt, Artificial Sequence
  Description of Artificial Sequence: Synthetic oligonucleotide
  Sense Strand Starting at position 1030 of SEQ ID NO: 316527
acauuauaagccgguuaaa

SEQ ID NO: 399584 - RNA, 19 nt, Artificial Sequence
  Description of Artificial Sequence: Synthetic oligonucleotide
  Antisense Strand to SEQ ID NO: 399583
uuuaaccggcuuauaaugu

SEQ ID NO: 399585 - RNA, 19 nt, Artificial Sequence
  Description of Artificial Sequence: Synthetic oligonucleotide
  Sense Strand Starting at position 1030 of SEQ ID NO: 316530
uuauaagccgguuaaauac

SEQ ID NO: 399586 - RNA, 19 nt, Artificial Sequence
  Description of Artificial Sequence: Synthetic oligonucleotide
  Antisense Strand to SEQ ID NO: 399585
guauuuaaccggcuuauaa

SEQ ID NO: 399587 - RNA, 19 nt, Artificial Sequence
  Description of Artificial Sequence: Synthetic oligonucleotide
  Sense Strand Starting at position 1030 of SEQ ID NO: 316538
cgguuaaauacugagguca

SEQ ID NO: 399588 - RNA, 19 nt, Artificial Sequence
  Description of Artificial Sequence: Synthetic oligonucleotide
  Antisense Strand to SEQ ID NO: 399587
ugaccucaguauuuaaccg

SEQ ID NO: 399589 - RNA, 19 nt, Artificial Sequence
  Description of Artificial Sequence: Synthetic oligonucleotide
  Sense Strand Starting at position 1030 of SEQ ID NO: 316540
guuaaauacugaggucaua

SEQ ID NO: 399590 - RNA, 19 nt, Artificial Sequence
  Description of Artificial Sequence: Synthetic oligonucleotide
  Antisense Strand to SEQ ID NO: 399589
uaugaccucaguauuuaac

SEQ ID NO: 399591 - RNA, 19 nt, Artificial Sequence
  Description of Artificial Sequence: Synthetic oligonucleotide
  Sense Strand Starting at position 1030 of SEQ ID NO: 316583
caacauuagugagcaaagu

SEQ ID NO: 399592 - RNA, 19 nt, Artificial Sequence
  Description of Artificial Sequence: Synthetic oligonucleotide
  Antisense Strand to SEQ ID NO: 399591
acuuugcucacuaauguug

SEQ ID NO: 399593 - RNA, 19 nt, Artificial Sequence
  Description of Artificial Sequence: Synthetic oligonucleotide
  Sense Strand Starting at position 1030 of SEQ ID NO: 316584
aacauuagugagcaaaguu

SEQ ID NO: 399594 - RNA, 19 nt, Artificial Sequence
  Description of Artificial Sequence: Synthetic oligonucleotide
  Antisense Strand to SEQ ID NO: 399593
aacuuugcucacuaauguu

SEQ ID NO: 399595 - RNA, 19 nt, Artificial Sequence
  Description of Artificial Sequence: Synthetic oligonucleotide
  Sense Strand Starting at position 1030 of SEQ ID NO: 316593
gagcaaaguugagguuuaa

SEQ ID NO: 399596 - RNA, 19 nt, Artificial Sequence
  Description of Artificial Sequence: Synthetic oligonucleotide
  Antisense Strand to SEQ ID NO: 399595
uuaaaccucaacuuugcuc

SEQ ID NO: 399597 - RNA, 19 nt, Artificial Sequence
  Description of Artificial Sequence: Synthetic oligonucleotide
  Sense Strand Starting at position 1030 of SEQ ID NO: 316597
aaaguugagguuuaagcaa

SEQ ID NO: 399598 - RNA, 19 nt, Artificial Sequence
  Description of Artificial Sequence: Synthetic oligonucleotide
  Antisense Strand to SEQ ID NO: 399597
uugcuuaaaccucaacuuu

SEQ ID NO: 399599 - RNA, 19 nt, Artificial Sequence
  Description of Artificial Sequence: Synthetic oligonucleotide
  Sense Strand Starting at position 1030 of SEQ ID NO: 316604
agguuuaagcaauacggaa

SEQ ID NO: 399600 - RNA, 19 nt, Artificial Sequence
  Description of Artificial Sequence: Synthetic oligonucleotide
  Antisense Strand to SEQ ID NO: 399599
uuccguauugcuuaaaccu

SEQ ID NO: 399601 - RNA, 19 nt, Artificial Sequence
  Description of Artificial Sequence: Synthetic oligonucleotide
  Sense Strand Starting at position 1030 of SEQ ID NO: 316656
agcguugucucucaauaag

SEQ ID NO: 399602 - RNA, 19 nt, Artificial Sequence
  Description of Artificial Sequence: Synthetic oligonucleotide
  Antisense Strand to SEQ ID NO: 399601
cuuauugagagacaacgcu

SEQ ID NO: 399603 - RNA, 19 nt, Artificial Sequence
  Description of Artificial Sequence: Synthetic oligonucleotide
  Sense Strand Starting at position 1030 of SEQ ID NO: 316659
guugucucucaauaagauc

SEQ ID NO: 399604 - RNA, 19 nt, Artificial Sequence
  Description of Artificial Sequence: Synthetic oligonucleotide
  Antisense Strand to SEQ ID NO: 399603
gaucuuauugagagacaac

SEQ ID NO: 399605 - RNA, 19 nt, Artificial Sequence
  Description of Artificial Sequence: Synthetic oligonucleotide
  Sense Strand Starting at position 1030 of SEQ ID NO: 317433
ucucaucggucaucaagaa

SEQ ID NO: 399606 - RNA, 19 nt, Artificial Sequence
  Description of Artificial Sequence: Synthetic oligonucleotide
  Antisense Strand to SEQ ID NO: 399605
uucuugaugaccgaugaga

SEQ ID NO: 399607 - RNA, 19 nt, Artificial Sequence
  Description of Artificial Sequence: Synthetic oligonucleotide
  Sense Strand Starting at position 1030 of SEQ ID NO: 317471
gguggcucgcgguuguaau

SEQ ID NO: 399608 - RNA, 19 nt, Artificial Sequence
  Description of Artificial Sequence: Synthetic oligonucleotide
  Antisense Strand to SEQ ID NO: 399607
auuacaaccgcgagccacc

SEQ ID NO: 399609 - RNA, 19 nt, Artificial Sequence
  Description of Artificial Sequence: Synthetic oligonucleotide
  Sense Strand Starting at position 1030 of SEQ ID NO: 317817
cuaguuucccuauagacau

SEQ ID NO: 399610 - RNA, 19 nt, Artificial Sequence
  Description of Artificial Sequence: Synthetic oligonucleotide
  Antisense Strand to SEQ ID NO: 399609
augucuauagggaaacuag

SEQ ID NO: 399611 - RNA, 19 nt, Artificial Sequence
  Description of Artificial Sequence: Synthetic oligonucleotide
  Sense Strand Starting at position 1030 of SEQ ID NO: 317841
agcauaaguugacauuuaa

SEQ ID NO: 399612 - RNA, 19 nt, Artificial Sequence
  Description of Artificial Sequence: Synthetic oligonucleotide
  Antisense Strand to SEQ ID NO: 399611
uuaaaugucaacuuaugcu

SEQ ID NO: 399613 - RNA, 19 nt, Artificial Sequence
  Description of Artificial Sequence: Synthetic oligonucleotide
  Sense Strand Starting at position 1030 of SEQ ID NO: 317909
cacuguuuacuagguguca

SEQ ID NO: 399614 - RNA, 19 nt, Artificial Sequence
  Description of Artificial Sequence: Synthetic oligonucleotide
  Antisense Strand to SEQ ID NO: 399613
ugacaccuaguaaacagug

SEQ ID NO: 399615 - RNA, 19 nt, Artificial Sequence
  Description of Artificial Sequence: Synthetic oligonucleotide
  Sense Strand Starting at position 1030 of SEQ ID NO: 317911
cuguuuacuaggugucagu

SEQ ID NO: 399616 - RNA, 19 nt, Artificial Sequence
  Description of Artificial Sequence: Synthetic oligonucleotide
  Antisense Strand to SEQ ID NO: 399615
acugacaccuaguaaacag

SEQ ID NO: 399617 - RNA, 19 nt, Artificial Sequence
  Description of Artificial Sequence: Synthetic oligonucleotide
  Sense Strand Starting at position 1030 of SEQ ID NO: 317943
uuguacauguccucgcauu

SEQ ID NO: 399618 - RNA, 19 nt, Artificial Sequence
  Description of Artificial Sequence: Synthetic oligonucleotide
  Antisense Strand to SEQ ID NO: 399617
aaugcgaggacauguacaa

SEQ ID NO: 399619 - RNA, 19 nt, Artificial Sequence
  Description of Artificial Sequence: Synthetic oligonucleotide
  Sense Strand Starting at position 1030 of SEQ ID NO: 317944
uguacauguccucgcauuu

SEQ ID NO: 399620 - RNA, 19 nt, Artificial Sequence
  Description of Artificial Sequence: Synthetic oligonucleotide
  Antisense Strand to SEQ ID NO: 399619
aaaugcgaggacauguaca

SEQ ID NO: 399621 - RNA, 19 nt, Artificial Sequence
  Description of Artificial Sequence: Synthetic oligonucleotide
  Sense Strand Starting at position 1030 of SEQ ID NO: 318105
ggacuuugaucaugcuacu

SEQ ID NO: 399622 - RNA, 19 nt, Artificial Sequence
  Description of Artificial Sequence: Synthetic oligonucleotide
  Antisense Strand to SEQ ID NO: 399621
aguagcaugaucaaagucc

SEQ ID NO: 399623 - RNA, 19 nt, Artificial Sequence
  Description of Artificial Sequence: Synthetic oligonucleotide
  Sense Strand Starting at position 1030 of SEQ ID NO: 318144
ggucuugugucagagguaa

SEQ ID NO: 399624 - RNA, 19 nt, Artificial Sequence
  Description of Artificial Sequence: Synthetic oligonucleotide
  Antisense Strand to SEQ ID NO: 399623
uuaccucugacacaagacc

SEQ ID NO: 399625 - RNA, 19 nt, Artificial Sequence
  Description of Artificial Sequence: Synthetic oligonucleotide
  Sense Strand Starting at position 1030 of SEQ ID NO: 318256
ccagcaaacuucucuggga

SEQ ID NO: 399626 - RNA, 19 nt, Artificial Sequence
  Description of Artificial Sequence: Synthetic oligonucleotide
  Antisense Strand to SEQ ID NO: 399625
ucccagagaaguuugcugg

SEQ ID NO: 399627 - RNA, 19 nt, Artificial Sequence
  Description of Artificial Sequence: Synthetic oligonucleotide
  Sense Strand Starting at position 1030 of SEQ ID NO: 318258
agcaaacuucucugggagu

SEQ ID NO: 399628 - RNA, 19 nt, Artificial Sequence
  Description of Artificial Sequence: Synthetic oligonucleotide
  Antisense Strand to SEQ ID NO: 399627
acucccagagaaguuugcu

SEQ ID NO: 399629 - RNA, 19 nt, Artificial Sequence
  Description of Artificial Sequence: Synthetic oligonucleotide
  Sense Strand Starting at position 1030 of SEQ ID NO: 318259
gcaaacuucucugggaguu

SEQ ID NO: 399630 - RNA, 19 nt, Artificial Sequence
  Description of Artificial Sequence: Synthetic oligonucleotide
  Antisense Strand to SEQ ID NO: 399629
aacucccagagaaguuugc

SEQ ID NO: 399631 - RNA, 19 nt, Artificial Sequence
  Description of Artificial Sequence: Synthetic oligonucleotide
  Sense Strand Starting at position 1030 of SEQ ID NO: 318260
caaacuucucugggaguuc

SEQ ID NO: 399632 - RNA, 19 nt, Artificial Sequence
  Description of Artificial Sequence: Synthetic oligonucleotide
  Antisense Strand to SEQ ID NO: 399631
gaacucccagagaaguuug

SEQ ID NO: 399633 - RNA, 19 nt, Artificial Sequence
  Description of Artificial Sequence: Synthetic oligonucleotide
  Sense Strand Starting at position 1030 of SEQ ID NO: 318289
agaucuagucaccaaugca

SEQ ID NO: 399634 - RNA, 19 nt, Artificial Sequence
  Description of Artificial Sequence: Synthetic oligonucleotide
  Antisense Strand to SEQ ID NO: 399633
ugcauuggugacuagaucu

SEQ ID NO: 399635 - RNA, 19 nt, Artificial Sequence
  Description of Artificial Sequence: Synthetic oligonucleotide
  Sense Strand Starting at position 1030 of SEQ ID NO: 318516
uuggcuuaauaugggaauu

SEQ ID NO: 399636 - RNA, 19 nt, Artificial Sequence
  Description of Artificial Sequence: Synthetic oligonucleotide
  Antisense Strand to SEQ ID NO: 399635
aauucccauauuaagccaa

SEQ ID NO: 399637 - RNA, 19 nt, Artificial Sequence
  Description of Artificial Sequence: Synthetic oligonucleotide
  Sense Strand Starting at position 1030 of SEQ ID NO: 319172
gcccauccuguuuguugua

SEQ ID NO: 399638 - RNA, 19 nt, Artificial Sequence
  Description of Artificial Sequence: Synthetic oligonucleotide
  Antisense Strand to SEQ ID NO: 399637
uacaacaaacaggaugggc

SEQ ID NO: 399639 - RNA, 19 nt, Artificial Sequence
  Description of Artificial Sequence: Synthetic oligonucleotide
  Sense Strand Starting at position 1030 of SEQ ID NO: 319177
uccuguuuguuguauuaaa

SEQ ID NO: 399640 - RNA, 19 nt, Artificial Sequence
  Description of Artificial Sequence: Synthetic oligonucleotide
  Antisense Strand to SEQ ID NO: 399639
uuuaauacaacaaacagga

SEQ ID NO: 399641 - RNA, 19 nt, Artificial Sequence
  Description of Artificial Sequence: Synthetic oligonucleotide
  Sense Strand Starting at position 1030 of SEQ ID NO: 319184
uguuguauuaaaugagaga

SEQ ID NO: 399642 - RNA, 19 nt, Artificial Sequence
  Description of Artificial Sequence: Synthetic oligonucleotide
  Antisense Strand to SEQ ID NO: 399641
ucucucauuuaauacaaca

SEQ ID NO: 399643 - RNA, 19 nt, Artificial Sequence
  Description of Artificial Sequence: Synthetic oligonucleotide
  Sense Strand Starting at position 1031 of SEQ ID NO: 315318
uggaaauuaucaguggauc

SEQ ID NO: 399644 - RNA, 19 nt, Artificial Sequence
  Description of Artificial Sequence: Synthetic oligonucleotide
  Antisense Strand to SEQ ID NO: 399643
gauccacugauaauuucca

SEQ ID NO: 399645 - RNA, 19 nt, Artificial Sequence
  Description of Artificial Sequence: Synthetic oligonucleotide
  Sense Strand Starting at position 1031 of SEQ ID NO: 315319
ggaaauuaucaguggaucu

SEQ ID NO: 399646 - RNA, 19 nt, Artificial Sequence
  Description of Artificial Sequence: Synthetic oligonucleotide
  Antisense Strand to SEQ ID NO: 399645
agauccacugauaauuucc

SEQ ID NO: 399647 - RNA, 19 nt, Artificial Sequence
  Description of Artificial Sequence: Synthetic oligonucleotide
  Sense Strand Starting at position 1031 of SEQ ID NO: 315331
uggaucuauugagcaaaga

SEQ ID NO: 399648 - RNA, 19 nt, Artificial Sequence
  Description of Artificial Sequence: Synthetic oligonucleotide
  Antisense Strand to SEQ ID NO: 399647
ucuuugcucaauagaucca

SEQ ID NO: 399649 - RNA, 19 nt, Artificial Sequence
  Description of Artificial Sequence: Synthetic oligonucleotide
  Sense Strand Starting at position 1031 of SEQ ID NO: 315541
ggaggucaagcugaguaaa

SEQ ID NO: 399650 - RNA, 19 nt, Artificial Sequence
  Description of Artificial Sequence: Synthetic oligonucleotide
  Antisense Strand to SEQ ID NO: 399649
uuuacucagcuugaccucc

SEQ ID NO: 399651 - RNA, 19 nt, Artificial Sequence
  Description of Artificial Sequence: Synthetic oligonucleotide
  Sense Strand Starting at position 1031 of SEQ ID NO: 315543
aggucaagcugaguaaauu

SEQ ID NO: 399652 - RNA, 19 nt, Artificial Sequence
  Description of Artificial Sequence: Synthetic oligonucleotide
  Antisense Strand to SEQ ID NO: 399651
aauuuacucagcuugaccu

SEQ ID NO: 399653 - RNA, 19 nt, Artificial Sequence
  Description of Artificial Sequence: Synthetic oligonucleotide
  Sense Strand Starting at position 1031 of SEQ ID NO: 315544
ggucaagcugaguaaauug

SEQ ID NO: 399654 - RNA, 19 nt, Artificial Sequence
  Description of Artificial Sequence: Synthetic oligonucleotide
  Antisense Strand to SEQ ID NO: 399653
caauuuacucagcuugacc

SEQ ID NO: 399655 - RNA, 19 nt, Artificial Sequence
  Description of Artificial Sequence: Synthetic oligonucleotide
  Sense Strand Starting at position 1031 of SEQ ID NO: 315691
aaguuuaauuggccugaga

SEQ ID NO: 399656 - RNA, 19 nt, Artificial Sequence
  Description of Artificial Sequence: Synthetic oligonucleotide
  Antisense Strand to SEQ ID NO: 399655
ucucaggccaauuaaacuu

SEQ ID NO: 399657 - RNA, 19 nt, Artificial Sequence
  Description of Artificial Sequence: Synthetic oligonucleotide
  Sense Strand Starting at position 1031 of SEQ ID NO: 315693
guuuaauuggccugagaaa

SEQ ID NO: 399658 - RNA, 19 nt, Artificial Sequence
  Description of Artificial Sequence: Synthetic oligonucleotide
  Antisense Strand to SEQ ID NO: 399657
uuucucaggccaauuaaac

SEQ ID NO: 399659 - RNA, 19 nt, Artificial Sequence
  Description of Artificial Sequence: Synthetic oligonucleotide
  Sense Strand Starting at position 1031 of SEQ ID NO: 315797
gggucauucuggguaguaa

SEQ ID NO: 399660 - RNA, 19 nt, Artificial Sequence
  Description of Artificial Sequence: Synthetic oligonucleotide
  Antisense Strand to SEQ ID NO: 399659
uuacuacccagaaugaccc

SEQ ID NO: 399661 - RNA, 19 nt, Artificial Sequence
  Description of Artificial Sequence: Synthetic oligonucleotide
  Sense Strand Starting at position 1031 of SEQ ID NO: 315798
ggucauucuggguaguaau

SEQ ID NO: 399662 - RNA, 19 nt, Artificial Sequence
  Description of Artificial Sequence: Synthetic oligonucleotide
  Antisense Strand to SEQ ID NO: 399661
auuacuacccagaaugacc

SEQ ID NO: 399663 - RNA, 19 nt, Artificial Sequence
  Description of Artificial Sequence: Synthetic oligonucleotide
  Sense Strand Starting at position 1031 of SEQ ID NO: 315822
guauuauuucuucguuggu

SEQ ID NO: 399664 - RNA, 19 nt, Artificial Sequence
  Description of Artificial Sequence: Synthetic oligonucleotide
  Antisense Strand to SEQ ID NO: 399663
accaacgaagaaauaauac

SEQ ID NO: 399665 - RNA, 19 nt, Artificial Sequence
  Description of Artificial Sequence: Synthetic oligonucleotide
  Sense Strand Starting at position 1031 of SEQ ID NO: 315823
uauuauuucuucguugguu

SEQ ID NO: 399666 - RNA, 19 nt, Artificial Sequence
  Description of Artificial Sequence: Synthetic oligonucleotide
  Antisense Strand to SEQ ID NO: 399665
aaccaacgaagaaauaaua

SEQ ID NO: 399667 - RNA, 19 nt, Artificial Sequence
  Description of Artificial Sequence: Synthetic oligonucleotide
  Sense Strand Starting at position 1031 of SEQ ID NO: 315927
uauuucugguuugaagauu

SEQ ID NO: 399668 - RNA, 19 nt, Artificial Sequence
  Description of Artificial Sequence: Synthetic oligonucleotide
  Antisense Strand to SEQ ID NO: 399667
aaucuucaaaccagaaaua

SEQ ID NO: 399669 - RNA, 19 nt, Artificial Sequence
  Description of Artificial Sequence: Synthetic oligonucleotide
  Sense Strand Starting at position 1031 of SEQ ID NO: 316234
gagagucuugugcauacaa

SEQ ID NO: 399670 - RNA, 19 nt, Artificial Sequence
  Description of Artificial Sequence: Synthetic oligonucleotide
  Antisense Strand to SEQ ID NO: 399669
uuguaugcacaagacucuc

SEQ ID NO: 399671 - RNA, 19 nt, Artificial Sequence
  Description of Artificial Sequence: Synthetic oligonucleotide
  Sense Strand Starting at position 1031 of SEQ ID NO: 316236
gagucuugugcauacaaag

SEQ ID NO: 399672 - RNA, 19 nt, Artificial Sequence
  Description of Artificial Sequence: Synthetic oligonucleotide
  Antisense Strand to SEQ ID NO: 399671
cuuuguaugcacaagacuc

SEQ ID NO: 399673 - RNA, 19 nt, Artificial Sequence
  Description of Artificial Sequence: Synthetic oligonucleotide
  Sense Strand Starting at position 1031 of SEQ ID NO: 316253
agggcaacagauuguacau

SEQ ID NO: 399674 - RNA, 19 nt, Artificial Sequence
  Description of Artificial Sequence: Synthetic oligonucleotide
  Antisense Strand to SEQ ID NO: 399673
auguacaaucuguugcccu

SEQ ID NO: 399675 - RNA, 19 nt, Artificial Sequence
  Description of Artificial Sequence: Synthetic oligonucleotide
  Sense Strand Starting at position 1031 of SEQ ID NO: 316255
ggcaacagauuguacauuu

SEQ ID NO: 399676 - RNA, 19 nt, Artificial Sequence
  Description of Artificial Sequence: Synthetic oligonucleotide
  Antisense Strand to SEQ ID NO: 399675
aaauguacaaucuguugcc

SEQ ID NO: 399677 - RNA, 19 nt, Artificial Sequence
  Description of Artificial Sequence: Synthetic oligonucleotide
  Sense Strand Starting at position 1031 of SEQ ID NO: 316509
aaaguuacuuaguucgacu

SEQ ID NO: 399678 - RNA, 19 nt, Artificial Sequence
  Description of Artificial Sequence: Synthetic oligonucleotide
  Antisense Strand to SEQ ID NO: 399677
agucgaacuaaguaacuuu

SEQ ID NO: 399679 - RNA, 19 nt, Artificial Sequence
  Description of Artificial Sequence: Synthetic oligonucleotide
  Sense Strand Starting at position 1031 of SEQ ID NO: 317276
ugaugucaucucuaaagca

SEQ ID NO: 399680 - RNA, 19 nt, Artificial Sequence
  Description of Artificial Sequence: Synthetic oligonucleotide
  Antisense Strand to SEQ ID NO: 399679
ugcuuuagagaugacauca

SEQ ID NO: 399681 - RNA, 19 nt, Artificial Sequence
  Description of Artificial Sequence: Synthetic oligonucleotide
  Sense Strand Starting at position 1031 of SEQ ID NO: 317323
aguccuucuagugaaguau

SEQ ID NO: 399682 - RNA, 19 nt, Artificial Sequence
  Description of Artificial Sequence: Synthetic oligonucleotide
  Antisense Strand to SEQ ID NO: 399681
auacuucacuagaaggacu

SEQ ID NO: 399683 - RNA, 19 nt, Artificial Sequence
  Description of Artificial Sequence: Synthetic oligonucleotide
  Sense Strand Starting at position 1031 of SEQ ID NO: 317380
auagcauggucuucuauca

SEQ ID NO: 399684 - RNA, 19 nt, Artificial Sequence
  Description of Artificial Sequence: Synthetic oligonucleotide
  Antisense Strand to SEQ ID NO: 399683
ugauagaagaccaugcuau

SEQ ID NO: 399685 - RNA, 19 nt, Artificial Sequence
  Description of Artificial Sequence: Synthetic oligonucleotide
  Sense Strand Starting at position 1031 of SEQ ID NO: 317416
gauacagugccaugaagag

SEQ ID NO: 399686 - RNA, 19 nt, Artificial Sequence
  Description of Artificial Sequence: Synthetic oligonucleotide
  Antisense Strand to SEQ ID NO: 399685
cucuucauggcacuguauc

SEQ ID NO: 399687 - RNA, 19 nt, Artificial Sequence
  Description of Artificial Sequence: Synthetic oligonucleotide
  Sense Strand Starting at position 1031 of SEQ ID NO: 317439
ucaauuugcugcucauaug

SEQ ID NO: 399688 - RNA, 19 nt, Artificial Sequence
  Description of Artificial Sequence: Synthetic oligonucleotide
  Antisense Strand to SEQ ID NO: 399687
cauaugagcagcaaauuga

SEQ ID NO: 399689 - RNA, 19 nt, Artificial Sequence
  Description of Artificial Sequence: Synthetic oligonucleotide
  Sense Strand Starting at position 1031 of SEQ ID NO: 317521
ugccauuaauuugugguga

SEQ ID NO: 399690 - RNA, 19 nt, Artificial Sequence
  Description of Artificial Sequence: Synthetic oligonucleotide
  Antisense Strand to SEQ ID NO: 399689
ucaccacaaauuaauggca

SEQ ID NO: 399691 - RNA, 19 nt, Artificial Sequence
  Description of Artificial Sequence: Synthetic oligonucleotide
  Sense Strand Starting at position 1031 of SEQ ID NO: 317774
cucugaaacgauuggagua

SEQ ID NO: 399692 - RNA, 19 nt, Artificial Sequence
  Description of Artificial Sequence: Synthetic oligonucleotide
  Antisense Strand to SEQ ID NO: 399691
uacuccaaucguuucagag

SEQ ID NO: 399693 - RNA, 19 nt, Artificial Sequence
  Description of Artificial Sequence: Synthetic oligonucleotide
  Sense Strand Starting at position 1031 of SEQ ID NO: 317775
ucugaaacgauuggaguau

SEQ ID NO: 399694 - RNA, 19 nt, Artificial Sequence
  Description of Artificial Sequence: Synthetic oligonucleotide
  Antisense Strand to SEQ ID NO: 399693
auacuccaaucguuucaga

SEQ ID NO: 399695 - RNA, 19 nt, Artificial Sequence
  Description of Artificial Sequence: Synthetic oligonucleotide
  Sense Strand Starting at position 1031 of SEQ ID NO: 317798
ucaaguguugguuaaagaa

SEQ ID NO: 399696 - RNA, 19 nt, Artificial Sequence
  Description of Artificial Sequence: Synthetic oligonucleotide
  Antisense Strand to SEQ ID NO: 399695
uucuuuaaccaacacuuga

SEQ ID NO: 399697 - RNA, 19 nt, Artificial Sequence
  Description of Artificial Sequence: Synthetic oligonucleotide
  Sense Strand Starting at position 1031 of SEQ ID NO: 317946
auguuuaaaugagcaaugu

SEQ ID NO: 399698 - RNA, 19 nt, Artificial Sequence
  Description of Artificial Sequence: Synthetic oligonucleotide
  Antisense Strand to SEQ ID NO: 399697
acauugcucauuuaaacau

SEQ ID NO: 399699 - RNA, 19 nt, Artificial Sequence
  Description of Artificial Sequence: Synthetic oligonucleotide
  Sense Strand Starting at position 1031 of SEQ ID NO: 317950
uuaaaugagcaauguccau

SEQ ID NO: 399700 - RNA, 19 nt, Artificial Sequence
  Description of Artificial Sequence: Synthetic oligonucleotide
  Antisense Strand to SEQ ID NO: 399699
auggacauugcucauuuaa

SEQ ID NO: 399701 - RNA, 19 nt, Artificial Sequence
  Description of Artificial Sequence: Synthetic oligonucleotide
  Sense Strand Starting at position 1031 of SEQ ID NO: 317956
gagcaauguccaugaucau

SEQ ID NO: 399702 - RNA, 19 nt, Artificial Sequence
  Description of Artificial Sequence: Synthetic oligonucleotide
  Antisense Strand to SEQ ID NO: 399701
augaucauggacauugcuc

SEQ ID NO: 399703 - RNA, 19 nt, Artificial Sequence
  Description of Artificial Sequence: Synthetic oligonucleotide
  Sense Strand Starting at position 1031 of SEQ ID NO: 317957
agcaauguccaugaucauu

SEQ ID NO: 399704 - RNA, 19 nt, Artificial Sequence
  Description of Artificial Sequence: Synthetic oligonucleotide
  Antisense Strand to SEQ ID NO: 399703
aaugaucauggacauugcu

SEQ ID NO: 399705 - RNA, 19 nt, Artificial Sequence
  Description of Artificial Sequence: Synthetic oligonucleotide
  Sense Strand Starting at position 1031 of SEQ ID NO: 318095
auucuuauagcccaaguga

SEQ ID NO: 399706 - RNA, 19 nt, Artificial Sequence
  Description of Artificial Sequence: Synthetic oligonucleotide
  Antisense Strand to SEQ ID NO: 399705
ucacuugggcuauaagaau

SEQ ID NO: 399707 - RNA, 19 nt, Artificial Sequence
  Description of Artificial Sequence: Synthetic oligonucleotide
  Sense Strand Starting at position 1031 of SEQ ID NO: 318198
ccuuuaagagcacaguauu

SEQ ID NO: 399708 - RNA, 19 nt, Artificial Sequence
  Description of Artificial Sequence: Synthetic oligonucleotide
  Antisense Strand to SEQ ID NO: 399707
aauacugugcucuuaaagg

SEQ ID NO: 399709 - RNA, 19 nt, Artificial Sequence
  Description of Artificial Sequence: Synthetic oligonucleotide
  Sense Strand Starting at position 1031 of SEQ ID NO: 318294
cuauuaaagcaauggugau

SEQ ID NO: 399710 - RNA, 19 nt, Artificial Sequence
  Description of Artificial Sequence: Synthetic oligonucleotide
  Antisense Strand to SEQ ID NO: 399709
aucaccauugcuuuaauag

SEQ ID NO: 399711 - RNA, 19 nt, Artificial Sequence
  Description of Artificial Sequence: Synthetic oligonucleotide
  Sense Strand Starting at position 1031 of SEQ ID NO: 318304
aauggugauuguucuggca

SEQ ID NO: 399712 - RNA, 19 nt, Artificial Sequence
  Description of Artificial Sequence: Synthetic oligonucleotide
  Antisense Strand to SEQ ID NO: 399711
ugccagaacaaucaccauu

SEQ ID NO: 399713 - RNA, 19 nt, Artificial Sequence
  Description of Artificial Sequence: Synthetic oligonucleotide
  Sense Strand Starting at position 1031 of SEQ ID NO: 318316
ucuggcaucucaucaggaa

SEQ ID NO: 399714 - RNA, 19 nt, Artificial Sequence
  Description of Artificial Sequence: Synthetic oligonucleotide
  Antisense Strand to SEQ ID NO: 399713
uuccugaugagaugccaga

SEQ ID NO: 399715 - RNA, 19 nt, Artificial Sequence
  Description of Artificial Sequence: Synthetic oligonucleotide
  Sense Strand Starting at position 1031 of SEQ ID NO: 318350
gcuucucaccgcguaucua

SEQ ID NO: 399716 - RNA, 19 nt, Artificial Sequence
  Description of Artificial Sequence: Synthetic oligonucleotide
  Antisense Strand to SEQ ID NO: 399715
uagauacgcggugagaagc

SEQ ID NO: 399717 - RNA, 19 nt, Artificial Sequence
  Description of Artificial Sequence: Synthetic oligonucleotide
  Sense Strand Starting at position 1031 of SEQ ID NO: 319008
acaugauagaucuguugug

SEQ ID NO: 399718 - RNA, 19 nt, Artificial Sequence
  Description of Artificial Sequence: Synthetic oligonucleotide
  Antisense Strand to SEQ ID NO: 399717
cacaacagaucuaucaugu

SEQ ID NO: 399719 - RNA, 19 nt, Artificial Sequence
  Description of Artificial Sequence: Synthetic oligonucleotide
  Sense Strand Starting at position 1031 of SEQ ID NO: 319024
gugguucuggaauaugcau

SEQ ID NO: 399720 - RNA, 19 nt, Artificial Sequence
  Description of Artificial Sequence: Synthetic oligonucleotide
  Antisense Strand to SEQ ID NO: 399719
augcauauuccagaaccac

SEQ ID NO: 399721 - RNA, 19 nt, Artificial Sequence
  Description of Artificial Sequence: Synthetic oligonucleotide
  Sense Strand Starting at position 1031 of SEQ ID NO: 319187
uccugaaguauccaguguu

SEQ ID NO: 399722 - RNA, 19 nt, Artificial Sequence
  Description of Artificial Sequence: Synthetic oligonucleotide
  Antisense Strand to SEQ ID NO: 399721
aacacuggauacuucagga

SEQ ID NO: 399723 - RNA, 19 nt, Artificial Sequence
  Description of Artificial Sequence: Synthetic oligonucleotide
  Sense Strand Starting at position 1032 of SEQ ID NO: 315370
gaagaaguagaaugcuaau

SEQ ID NO: 399724 - RNA, 19 nt, Artificial Sequence
  Description of Artificial Sequence: Synthetic oligonucleotide
  Antisense Strand to SEQ ID NO: 399723
auuagcauucuacuucuuc

SEQ ID NO: 399725 - RNA, 19 nt, Artificial Sequence
  Description of Artificial Sequence: Synthetic oligonucleotide
  Sense Strand Starting at position 1032 of SEQ ID NO: 315579
ccaugccauguguagauua

SEQ ID NO: 399726 - RNA, 19 nt, Artificial Sequence
  Description of Artificial Sequence: Synthetic oligonucleotide
  Antisense Strand to SEQ ID NO: 399725
uaaucuacacauggcaugg

SEQ ID NO: 399727 - RNA, 19 nt, Artificial Sequence
  Description of Artificial Sequence: Synthetic oligonucleotide
  Sense Strand Starting at position 1032 of SEQ ID NO: 315592
agauuaggcucucuaugga

SEQ ID NO: 399728 - RNA, 19 nt, Artificial Sequence
  Description of Artificial Sequence: Synthetic oligonucleotide
  Antisense Strand to SEQ ID NO: 399727
uccauagagagccuaaucu

SEQ ID NO: 399729 - RNA, 19 nt, Artificial Sequence
  Description of Artificial Sequence: Synthetic oligonucleotide
  Sense Strand Starting at position 1032 of SEQ ID NO: 315599
gcucucuauggauacuuga

SEQ ID NO: 399730 - RNA, 19 nt, Artificial Sequence
  Description of Artificial Sequence: Synthetic oligonucleotide
  Antisense Strand to SEQ ID NO: 399729
ucaaguauccauagagagc

SEQ ID NO: 399731 - RNA, 19 nt, Artificial Sequence
  Description of Artificial Sequence: Synthetic oligonucleotide
  Sense Strand Starting at position 1032 of SEQ ID NO: 315602
cucuauggauacuugacau

SEQ ID NO: 399732 - RNA, 19 nt, Artificial Sequence
  Description of Artificial Sequence: Synthetic oligonucleotide
  Antisense Strand to SEQ ID NO: 399731
augucaaguauccauagag

SEQ ID NO: 399733 - RNA, 19 nt, Artificial Sequence
  Description of Artificial Sequence: Synthetic oligonucleotide
  Sense Strand Starting at position 1032 of SEQ ID NO: 315628
ccucaaguucuguauuaug

SEQ ID NO: 399734 - RNA, 19 nt, Artificial Sequence
  Description of Artificial Sequence: Synthetic oligonucleotide
  Antisense Strand to SEQ ID NO: 399733
cauaauacagaacuugagg

SEQ ID NO: 399735 - RNA, 19 nt, Artificial Sequence
  Description of Artificial Sequence: Synthetic oligonucleotide
  Sense Strand Starting at position 1032 of SEQ ID NO: 315637
cuguauuauguguaaguga

SEQ ID NO: 399736 - RNA, 19 nt, Artificial Sequence
  Description of Artificial Sequence: Synthetic oligonucleotide
  Antisense Strand to SEQ ID NO: 399735
ucacuuacacauaauacag

SEQ ID NO: 399737 - RNA, 19 nt, Artificial Sequence
  Description of Artificial Sequence: Synthetic oligonucleotide
  Sense Strand Starting at position 1032 of SEQ ID NO: 315640
uauuauguguaagugacau

SEQ ID NO: 399738 - RNA, 19 nt, Artificial Sequence
  Description of Artificial Sequence: Synthetic oligonucleotide
  Antisense Strand to SEQ ID NO: 399737
augucacuuacacauaaua

SEQ ID NO: 399739 - RNA, 19 nt, Artificial Sequence
  Description of Artificial Sequence: Synthetic oligonucleotide
  Sense Strand Starting at position 1032 of SEQ ID NO: 315686
cccuuucucguggaaagaa

SEQ ID NO: 399740 - RNA, 19 nt, Artificial Sequence
  Description of Artificial Sequence: Synthetic oligonucleotide
  Antisense Strand to SEQ ID NO: 399739
uucuuuccacgagaaaggg

SEQ ID NO: 399741 - RNA, 19 nt, Artificial Sequence
  Description of Artificial Sequence: Synthetic oligonucleotide
  Sense Strand Starting at position 1032 of SEQ ID NO: 315735
gaucuauggcccuaaaugu

SEQ ID NO: 399742 - RNA, 19 nt, Artificial Sequence
  Description of Artificial Sequence: Synthetic oligonucleotide
  Antisense Strand to SEQ ID NO: 399741
acauuuagggccauagauc

SEQ ID NO: 399743 - RNA, 19 nt, Artificial Sequence
  Description of Artificial Sequence: Synthetic oligonucleotide
  Sense Strand Starting at position 1032 of SEQ ID NO: 315845
cacguuacuuagcugagaa

SEQ ID NO: 399744 - RNA, 19 nt, Artificial Sequence
  Description of Artificial Sequence: Synthetic oligonucleotide
  Antisense Strand to SEQ ID NO: 399743
uucucagcuaaguaacgug

SEQ ID NO: 399745 - RNA, 19 nt, Artificial Sequence
  Description of Artificial Sequence: Synthetic oligonucleotide
  Sense Strand Starting at position 1032 of SEQ ID NO: 315846
acguuacuuagcugagaaa

SEQ ID NO: 399746 - RNA, 19 nt, Artificial Sequence
  Description of Artificial Sequence: Synthetic oligonucleotide
  Antisense Strand to SEQ ID NO: 399745
uuucucagcuaaguaacgu

SEQ ID NO: 399747 - RNA, 19 nt, Artificial Sequence
  Description of Artificial Sequence: Synthetic oligonucleotide
  Sense Strand Starting at position 1032 of SEQ ID NO: 315847
cguuacuuagcugagaaac

SEQ ID NO: 399748 - RNA, 19 nt, Artificial Sequence
  Description of Artificial Sequence: Synthetic oligonucleotide
  Antisense Strand to SEQ ID NO: 399747
guuucucagcuaaguaacg

SEQ ID NO: 399749 - RNA, 19 nt, Artificial Sequence
  Description of Artificial Sequence: Synthetic oligonucleotide
  Sense Strand Starting at position 1032 of SEQ ID NO: 315876
agucuugugaaauguacua

SEQ ID NO: 399750 - RNA, 19 nt, Artificial Sequence
  Description of Artificial Sequence: Synthetic oligonucleotide
  Antisense Strand to SEQ ID NO: 399749
uaguacauuucacaagacu

SEQ ID NO: 399751 - RNA, 19 nt, Artificial Sequence
  Description of Artificial Sequence: Synthetic oligonucleotide
  Sense Strand Starting at position 1032 of SEQ ID NO: 315918
ugugaaaucugaccuuaug

SEQ ID NO: 399752 - RNA, 19 nt, Artificial Sequence
  Description of Artificial Sequence: Synthetic oligonucleotide
  Antisense Strand to SEQ ID NO: 399751
cauaaggucagauuucaca

SEQ ID NO: 399753 - RNA, 19 nt, Artificial Sequence
  Description of Artificial Sequence: Synthetic oligonucleotide
  Sense Strand Starting at position 1032 of SEQ ID NO: 315977
gaagaagcauuguuaaguu

SEQ ID NO: 399754 - RNA, 19 nt, Artificial Sequence
  Description of Artificial Sequence: Synthetic oligonucleotide
  Antisense Strand to SEQ ID NO: 399753
aacuuaacaaugcuucuuc

SEQ ID NO: 399755 - RNA, 19 nt, Artificial Sequence
  Description of Artificial Sequence: Synthetic oligonucleotide
  Sense Strand Starting at position 1032 of SEQ ID NO: 315997
gagaauuggucucucagag

SEQ ID NO: 399756 - RNA, 19 nt, Artificial Sequence
  Description of Artificial Sequence: Synthetic oligonucleotide
  Antisense Strand to SEQ ID NO: 399755
cucugagagaccaauucuc

SEQ ID NO: 399757 - RNA, 19 nt, Artificial Sequence
  Description of Artificial Sequence: Synthetic oligonucleotide
  Sense Strand Starting at position 1032 of SEQ ID NO: 316016
auucuaaacucagucaguu

SEQ ID NO: 399758 - RNA, 19 nt, Artificial Sequence
  Description of Artificial Sequence: Synthetic oligonucleotide
  Antisense Strand to SEQ ID NO: 399757
aacugacugaguuuagaau

SEQ ID NO: 399759 - RNA, 19 nt, Artificial Sequence
  Description of Artificial Sequence: Synthetic oligonucleotide
  Sense Strand Starting at position 1032 of SEQ ID NO: 316025
ucagucaguugaguaauau

SEQ ID NO: 399760 - RNA, 19 nt, Artificial Sequence
  Description of Artificial Sequence: Synthetic oligonucleotide
  Antisense Strand to SEQ ID NO: 399759
auauuacucaacugacuga

SEQ ID NO: 399761 - RNA, 19 nt, Artificial Sequence
  Description of Artificial Sequence: Synthetic oligonucleotide
  Sense Strand Starting at position 1032 of SEQ ID NO: 316026
cagucaguugaguaauauc

SEQ ID NO: 399762 - RNA, 19 nt, Artificial Sequence
  Description of Artificial Sequence: Synthetic oligonucleotide
  Antisense Strand to SEQ ID NO: 399761
gauauuacucaacugacug

SEQ ID NO: 399763 - RNA, 19 nt, Artificial Sequence
  Description of Artificial Sequence: Synthetic oligonucleotide
  Sense Strand Starting at position 1032 of SEQ ID NO: 316095
agcaauuucucugagaaca

SEQ ID NO: 399764 - RNA, 19 nt, Artificial Sequence
  Description of Artificial Sequence: Synthetic oligonucleotide
  Antisense Strand to SEQ ID NO: 399763
uguucucagagaaauugcu

SEQ ID NO: 399765 - RNA, 19 nt, Artificial Sequence
  Description of Artificial Sequence: Synthetic oligonucleotide
  Sense Strand Starting at position 1032 of SEQ ID NO: 316166
aaguccuaccaaggaguua

SEQ ID NO: 399766 - RNA, 19 nt, Artificial Sequence
  Description of Artificial Sequence: Synthetic oligonucleotide
  Antisense Strand to SEQ ID NO: 399765
uaacuccuugguaggacuu

SEQ ID NO: 399767 - RNA, 19 nt, Artificial Sequence
  Description of Artificial Sequence: Synthetic oligonucleotide
  Sense Strand Starting at position 1032 of SEQ ID NO: 316207
uuugaaauugucuaagugu

SEQ ID NO: 399768 - RNA, 19 nt, Artificial Sequence
  Description of Artificial Sequence: Synthetic oligonucleotide
  Antisense Strand to SEQ ID NO: 399767
acacuuagacaauuucaaa

SEQ ID NO: 399769 - RNA, 19 nt, Artificial Sequence
  Description of Artificial Sequence: Synthetic oligonucleotide
  Sense Strand Starting at position 1032 of SEQ ID NO: 316210
gaaauugucuaaguguuua

SEQ ID NO: 399770 - RNA, 19 nt, Artificial Sequence
  Description of Artificial Sequence: Synthetic oligonucleotide
  Antisense Strand to SEQ ID NO: 399769
uaaacacuuagacaauuuc

SEQ ID NO: 399771 - RNA, 19 nt, Artificial Sequence
  Description of Artificial Sequence: Synthetic oligonucleotide
  Sense Strand Starting at position 1032 of SEQ ID NO: 316304
gcauguugauacuuuaaug

SEQ ID NO: 399772 - RNA, 19 nt, Artificial Sequence
  Description of Artificial Sequence: Synthetic oligonucleotide
  Antisense Strand to SEQ ID NO: 399771
cauuaaaguaucaacaugc

SEQ ID NO: 399773 - RNA, 19 nt, Artificial Sequence
  Description of Artificial Sequence: Synthetic oligonucleotide
  Sense Strand Starting at position 1032 of SEQ ID NO: 316438
aucaaucgcgacuaucuau

SEQ ID NO: 399774 - RNA, 19 nt, Artificial Sequence
  Description of Artificial Sequence: Synthetic oligonucleotide
  Antisense Strand to SEQ ID NO: 399773
auagauagucgcgauugau

SEQ ID NO: 399775 - RNA, 19 nt, Artificial Sequence
  Description of Artificial Sequence: Synthetic oligonucleotide
  Sense Strand Starting at position 1032 of SEQ ID NO: 316650
acauaucaccuccgugaau

SEQ ID NO: 399776 - RNA, 19 nt, Artificial Sequence
  Description of Artificial Sequence: Synthetic oligonucleotide
  Antisense Strand to SEQ ID NO: 399775
auucacggaggugauaugu

SEQ ID NO: 399777 - RNA, 19 nt, Artificial Sequence
  Description of Artificial Sequence: Synthetic oligonucleotide
  Sense Strand Starting at position 1032 of SEQ ID NO: 316743
agauacugcacgugaugaa

SEQ ID NO: 399778 - RNA, 19 nt, Artificial Sequence
  Description of Artificial Sequence: Synthetic oligonucleotide
  Antisense Strand to SEQ ID NO: 399777
uucaucacgugcaguaucu

SEQ ID NO: 399779 - RNA, 19 nt, Artificial Sequence
  Description of Artificial Sequence: Synthetic oligonucleotide
  Sense Strand Starting at position 1032 of SEQ ID NO: 317269
gcuuuaugaaggcaguuaa

SEQ ID NO: 399780 - RNA, 19 nt, Artificial Sequence
  Description of Artificial Sequence: Synthetic oligonucleotide
  Antisense Strand to SEQ ID NO: 399779
uuaacugccuucauaaagc

SEQ ID NO: 399781 - RNA, 19 nt, Artificial Sequence
  Description of Artificial Sequence: Synthetic oligonucleotide
  Sense Strand Starting at position 1032 of SEQ ID NO: 317282
aguuaacugauguggaaac

SEQ ID NO: 399782 - RNA, 19 nt, Artificial Sequence
  Description of Artificial Sequence: Synthetic oligonucleotide
  Antisense Strand to SEQ ID NO: 399781
guuuccacaucaguuaacu

SEQ ID NO: 399783 - RNA, 19 nt, Artificial Sequence
  Description of Artificial Sequence: Synthetic oligonucleotide
  Sense Strand Starting at position 1032 of SEQ ID NO: 317423
uuggcuggugcuuaucaaa

SEQ ID NO: 399784 - RNA, 19 nt, Artificial Sequence
  Description of Artificial Sequence: Synthetic oligonucleotide
  Antisense Strand to SEQ ID NO: 399783
uuugauaagcaccagccaa

SEQ ID NO: 399785 - RNA, 19 nt, Artificial Sequence
  Description of Artificial Sequence: Synthetic oligonucleotide
  Sense Strand Starting at position 1032 of SEQ ID NO: 317578
guuugucaacuuuauaacu

SEQ ID NO: 399786 - RNA, 19 nt, Artificial Sequence
  Description of Artificial Sequence: Synthetic oligonucleotide
  Antisense Strand to SEQ ID NO: 399785
aguuauaaaguugacaaac

SEQ ID NO: 399787 - RNA, 19 nt, Artificial Sequence
  Description of Artificial Sequence: Synthetic oligonucleotide
  Sense Strand Starting at position 1032 of SEQ ID NO: 317809
auguaaggcuuuguacaua

SEQ ID NO: 399788 - RNA, 19 nt, Artificial Sequence
  Description of Artificial Sequence: Synthetic oligonucleotide
  Antisense Strand to SEQ ID NO: 399787
uauguacaaagccuuacau

SEQ ID NO: 399789 - RNA, 19 nt, Artificial Sequence
  Description of Artificial Sequence: Synthetic oligonucleotide
  Sense Strand Starting at position 1032 of SEQ ID NO: 317925
ucuggacuugcggacaaua

SEQ ID NO: 399790 - RNA, 19 nt, Artificial Sequence
  Description of Artificial Sequence: Synthetic oligonucleotide
  Antisense Strand to SEQ ID NO: 399789
uauuguccgcaaguccaga

SEQ ID NO: 399791 - RNA, 19 nt, Artificial Sequence
  Description of Artificial Sequence: Synthetic oligonucleotide
  Sense Strand Starting at position 1032 of SEQ ID NO: 317966
caauacauguuucugggaa

SEQ ID NO: 399792 - RNA, 19 nt, Artificial Sequence
  Description of Artificial Sequence: Synthetic oligonucleotide
  Antisense Strand to SEQ ID NO: 399791
uucccagaaacauguauug

SEQ ID NO: 399793 - RNA, 19 nt, Artificial Sequence
  Description of Artificial Sequence: Synthetic oligonucleotide
  Sense Strand Starting at position 1032 of SEQ ID NO: 318488
ccauguuguuucuuaauaa

SEQ ID NO: 399794 - RNA, 19 nt, Artificial Sequence
  Description of Artificial Sequence: Synthetic oligonucleotide
  Antisense Strand to SEQ ID NO: 399793
uuauuaagaaacaacaugg

SEQ ID NO: 399795 - RNA, 19 nt, Artificial Sequence
  Description of Artificial Sequence: Synthetic oligonucleotide
  Sense Strand Starting at position 1032 of SEQ ID NO: 318725
auggaauugacauguuuga

SEQ ID NO: 399796 - RNA, 19 nt, Artificial Sequence
  Description of Artificial Sequence: Synthetic oligonucleotide
  Antisense Strand to SEQ ID NO: 399795
ucaaacaugucaauuccau

SEQ ID NO: 399797 - RNA, 19 nt, Artificial Sequence
  Description of Artificial Sequence: Synthetic oligonucleotide
  Sense Strand Starting at position 1032 of SEQ ID NO: 318729
aauugacauguuugacaag

SEQ ID NO: 399798 - RNA, 19 nt, Artificial Sequence
  Description of Artificial Sequence: Synthetic oligonucleotide
  Antisense Strand to SEQ ID NO: 399797
cuugucaaacaugucaauu

SEQ ID NO: 399799 - RNA, 19 nt, Artificial Sequence
  Description of Artificial Sequence: Synthetic oligonucleotide
  Sense Strand Starting at position 1032 of SEQ ID NO: 318777
gugggaguuuauguuagga

SEQ ID NO: 399800 - RNA, 19 nt, Artificial Sequence
  Description of Artificial Sequence: Synthetic oligonucleotide
  Antisense Strand to SEQ ID NO: 399799
uccuaacauaaacucccac

SEQ ID NO: 399801 - RNA, 19 nt, Artificial Sequence
  Description of Artificial Sequence: Synthetic oligonucleotide
  Sense Strand Starting at position 1032 of SEQ ID NO: 319063
ggagacucaccgugcagaa

SEQ ID NO: 399802 - RNA, 19 nt, Artificial Sequence
  Description of Artificial Sequence: Synthetic oligonucleotide
  Antisense Strand to SEQ ID NO: 399801
uucugcacggugagucucc

SEQ ID NO: 399803 - RNA, 19 nt, Artificial Sequence
  Description of Artificial Sequence: Synthetic oligonucleotide
  Sense Strand Starting at position 1033 of SEQ ID NO: 315253
gaggcaaucgugcaaagga

SEQ ID NO: 399804 - RNA, 19 nt, Artificial Sequence
  Description of Artificial Sequence: Synthetic oligonucleotide
  Antisense Strand to SEQ ID NO: 399803
uccuuugcacgauugccuc

SEQ ID NO: 399805 - RNA, 19 nt, Artificial Sequence
  Description of Artificial Sequence: Synthetic oligonucleotide
  Sense Strand Starting at position 1033 of SEQ ID NO: 315357
gggaaaugguccucccuuu

SEQ ID NO: 399806 - RNA, 19 nt, Artificial Sequence
  Description of Artificial Sequence: Synthetic oligonucleotide
  Antisense Strand to SEQ ID NO: 399805
aaagggaggaccauuuccc

SEQ ID NO: 399807 - RNA, 19 nt, Artificial Sequence
  Description of Artificial Sequence: Synthetic oligonucleotide
  Sense Strand Starting at position 1033 of SEQ ID NO: 315481
ucaggcuuaugagcaagaa

SEQ ID NO: 399808 - RNA, 19 nt, Artificial Sequence
  Description of Artificial Sequence: Synthetic oligonucleotide
  Antisense Strand to SEQ ID NO: 399807
uucuugcucauaagccuga

SEQ ID NO: 399809 - RNA, 19 nt, Artificial Sequence
  Description of Artificial Sequence: Synthetic oligonucleotide
  Sense Strand Starting at position 1033 of SEQ ID NO: 315505
cugggaacuacaggucaau

SEQ ID NO: 399810 - RNA, 19 nt, Artificial Sequence
  Description of Artificial Sequence: Synthetic oligonucleotide
  Antisense Strand to SEQ ID NO: 399809
auugaccuguaguucccag

SEQ ID NO: 399811 - RNA, 19 nt, Artificial Sequence
  Description of Artificial Sequence: Synthetic oligonucleotide
  Sense Strand Starting at position 1033 of SEQ ID NO: 315511
acuacaggucaaugagagu

SEQ ID NO: 399812 - RNA, 19 nt, Artificial Sequence
  Description of Artificial Sequence: Synthetic oligonucleotide
  Antisense Strand to SEQ ID NO: 399811
acucucauugaccuguagu

SEQ ID NO: 399813 - RNA, 19 nt, Artificial Sequence
  Description of Artificial Sequence: Synthetic oligonucleotide
  Sense Strand Starting at position 1033 of SEQ ID NO: 315666
aauccucaggcugguaaga

SEQ ID NO: 399814 - RNA, 19 nt, Artificial Sequence
  Description of Artificial Sequence: Synthetic oligonucleotide
  Antisense Strand to SEQ ID NO: 399813
ucuuaccagccugaggauu

SEQ ID NO: 399815 - RNA, 19 nt, Artificial Sequence
  Description of Artificial Sequence: Synthetic oligonucleotide
  Sense Strand Starting at position 1033 of SEQ ID NO: 315723
ugaaguuaugguugcauuu

SEQ ID NO: 399816 - RNA, 19 nt, Artificial Sequence
  Description of Artificial Sequence: Synthetic oligonucleotide
  Antisense Strand to SEQ ID NO: 399815
aaaugcaaccauaacuuca

SEQ ID NO: 399817 - RNA, 19 nt, Artificial Sequence
  Description of Artificial Sequence: Synthetic oligonucleotide
  Sense Strand Starting at position 1033 of SEQ ID NO: 315862
gaacucuuggcaugggaga

SEQ ID NO: 399818 - RNA, 19 nt, Artificial Sequence
  Description of Artificial Sequence: Synthetic oligonucleotide
  Antisense Strand to SEQ ID NO: 399817
ucucccaugccaagaguuc

SEQ ID NO: 399819 - RNA, 19 nt, Artificial Sequence
  Description of Artificial Sequence: Synthetic oligonucleotide
  Sense Strand Starting at position 1033 of SEQ ID NO: 316013
aggugagauaauugucaug

SEQ ID NO: 399820 - RNA, 19 nt, Artificial Sequence
  Description of Artificial Sequence: Synthetic oligonucleotide
  Antisense Strand to SEQ ID NO: 399819
caugacaauuaucucaccu

SEQ ID NO: 399821 - RNA, 19 nt, Artificial Sequence
  Description of Artificial Sequence: Synthetic oligonucleotide
  Sense Strand Starting at position 1033 of SEQ ID NO: 316015
gugagauaauugucaugaa

SEQ ID NO: 399822 - RNA, 19 nt, Artificial Sequence
  Description of Artificial Sequence: Synthetic oligonucleotide
  Antisense Strand to SEQ ID NO: 399821
uucaugacaauuaucucac

SEQ ID NO: 399823 - RNA, 19 nt, Artificial Sequence
  Description of Artificial Sequence: Synthetic oligonucleotide
  Sense Strand Starting at position 1033 of SEQ ID NO: 316033
agaagcucuuguuuaaacu

SEQ ID NO: 399824 - RNA, 19 nt, Artificial Sequence
  Description of Artificial Sequence: Synthetic oligonucleotide
  Antisense Strand to SEQ ID NO: 399823
aguuuaaacaagagcuucu

SEQ ID NO: 399825 - RNA, 19 nt, Artificial Sequence
  Description of Artificial Sequence: Synthetic oligonucleotide
  Sense Strand Starting at position 1033 of SEQ ID NO: 316141
uuguuuaugccagauauau

SEQ ID NO: 399826 - RNA, 19 nt, Artificial Sequence
  Description of Artificial Sequence: Synthetic oligonucleotide
  Antisense Strand to SEQ ID NO: 399825
auauaucuggcauaaacaa

SEQ ID NO: 399827 - RNA, 19 nt, Artificial Sequence
  Description of Artificial Sequence: Synthetic oligonucleotide
  Sense Strand Starting at position 1033 of SEQ ID NO: 316236
guuguauguauauacauag

SEQ ID NO: 399828 - RNA, 19 nt, Artificial Sequence
  Description of Artificial Sequence: Synthetic oligonucleotide
  Antisense Strand to SEQ ID NO: 399827
cuauguauauacauacaac

SEQ ID NO: 399829 - RNA, 19 nt, Artificial Sequence
  Description of Artificial Sequence: Synthetic oligonucleotide
  Sense Strand Starting at position 1033 of SEQ ID NO: 316271
aguguauagauguauacac

SEQ ID NO: 399830 - RNA, 19 nt, Artificial Sequence
  Description of Artificial Sequence: Synthetic oligonucleotide
  Antisense Strand to SEQ ID NO: 399829
guguauacaucuauacacu

SEQ ID NO: 399831 - RNA, 19 nt, Artificial Sequence
  Description of Artificial Sequence: Synthetic oligonucleotide
  Sense Strand Starting at position 1033 of SEQ ID NO: 316482
auccaaguauuguuauaca

SEQ ID NO: 399832 - RNA, 19 nt, Artificial Sequence
  Description of Artificial Sequence: Synthetic oligonucleotide
  Antisense Strand to SEQ ID NO: 399831
uguauaacaauacuuggau

SEQ ID NO: 399833 - RNA, 19 nt, Artificial Sequence
  Description of Artificial Sequence: Synthetic oligonucleotide
  Sense Strand Starting at position 1033 of SEQ ID NO: 316567
gaggaccacuggcuuaaau

SEQ ID NO: 399834 - RNA, 19 nt, Artificial Sequence
  Description of Artificial Sequence: Synthetic oligonucleotide
  Antisense Strand to SEQ ID NO: 399833
auuuaagccagugguccuc

SEQ ID NO: 399835 - RNA, 19 nt, Artificial Sequence
  Description of Artificial Sequence: Synthetic oligonucleotide
  Sense Strand Starting at position 1033 of SEQ ID NO: 316569
ggaccacuggcuuaaauuc

SEQ ID NO: 399836 - RNA, 19 nt, Artificial Sequence
  Description of Artificial Sequence: Synthetic oligonucleotide
  Antisense Strand to SEQ ID NO: 399835
gaauuuaagccaguggucc

SEQ ID NO: 399837 - RNA, 19 nt, Artificial Sequence
  Description of Artificial Sequence: Synthetic oligonucleotide
  Sense Strand Starting at position 1033 of SEQ ID NO: 316705
agccaacuuucccugaaag

SEQ ID NO: 399838 - RNA, 19 nt, Artificial Sequence
  Description of Artificial Sequence: Synthetic oligonucleotide
  Antisense Strand to SEQ ID NO: 399837
cuuucagggaaaguuggcu

SEQ ID NO: 399839 - RNA, 19 nt, Artificial Sequence
  Description of Artificial Sequence: Synthetic oligonucleotide
  Sense Strand Starting at position 1033 of SEQ ID NO: 316848
acggaaucuuuagcagacu

SEQ ID NO: 399840 - RNA, 19 nt, Artificial Sequence
  Description of Artificial Sequence: Synthetic oligonucleotide
  Antisense Strand to SEQ ID NO: 399839
agucugcuaaagauuccgu

SEQ ID NO: 399841 - RNA, 19 nt, Artificial Sequence
  Description of Artificial Sequence: Synthetic oligonucleotide
  Sense Strand Starting at position 1033 of SEQ ID NO: 317147
gcagcaauuugcuucucua

SEQ ID NO: 399842 - RNA, 19 nt, Artificial Sequence
  Description of Artificial Sequence: Synthetic oligonucleotide
  Antisense Strand to SEQ ID NO: 399841
uagagaagcaaauugcugc

SEQ ID NO: 399843 - RNA, 19 nt, Artificial Sequence
  Description of Artificial Sequence: Synthetic oligonucleotide
  Sense Strand Starting at position 1033 of SEQ ID NO: 317204
uuaguuucgagggauccaa

SEQ ID NO: 399844 - RNA, 19 nt, Artificial Sequence
  Description of Artificial Sequence: Synthetic oligonucleotide
  Antisense Strand to SEQ ID NO: 399843
uuggaucccucgaaacuaa

SEQ ID NO: 399845 - RNA, 19 nt, Artificial Sequence
  Description of Artificial Sequence: Synthetic oligonucleotide
  Sense Strand Starting at position 1033 of SEQ ID NO: 317266
cucuuauaagaguggacau

SEQ ID NO: 399846 - RNA, 19 nt, Artificial Sequence
  Description of Artificial Sequence: Synthetic oligonucleotide
  Antisense Strand to SEQ ID NO: 399845
auguccacucuuauaagag

SEQ ID NO: 399847 - RNA, 19 nt, Artificial Sequence
  Description of Artificial Sequence: Synthetic oligonucleotide
  Sense Strand Starting at position 1033 of SEQ ID NO: 317334
ucccaucuugauugucaga

SEQ ID NO: 399848 - RNA, 19 nt, Artificial Sequence
  Description of Artificial Sequence: Synthetic oligonucleotide
  Antisense Strand to SEQ ID NO: 399847
ucugacaaucaagauggga

SEQ ID NO: 399849 - RNA, 19 nt, Artificial Sequence
  Description of Artificial Sequence: Synthetic oligonucleotide
  Sense Strand Starting at position 1033 of SEQ ID NO: 317336
ccaucuugauugucagaac

SEQ ID NO: 399850 - RNA, 19 nt, Artificial Sequence
  Description of Artificial Sequence: Synthetic oligonucleotide
  Antisense Strand to SEQ ID NO: 399849
guucugacaaucaagaugg

SEQ ID NO: 399851 - RNA, 19 nt, Artificial Sequence
  Description of Artificial Sequence: Synthetic oligonucleotide
  Sense Strand Starting at position 1033 of SEQ ID NO: 317624
caaagacuuugguuuauag

SEQ ID NO: 399852 - RNA, 19 nt, Artificial Sequence
  Description of Artificial Sequence: Synthetic oligonucleotide
  Antisense Strand to SEQ ID NO: 399851
cuauaaaccaaagucuuug

SEQ ID NO: 399853 - RNA, 19 nt, Artificial Sequence
  Description of Artificial Sequence: Synthetic oligonucleotide
  Sense Strand Starting at position 1033 of SEQ ID NO: 317633
ugguuuauagucuacuuua

SEQ ID NO: 399854 - RNA, 19 nt, Artificial Sequence
  Description of Artificial Sequence: Synthetic oligonucleotide
  Antisense Strand to SEQ ID NO: 399853
uaaaguagacuauaaacca

SEQ ID NO: 399855 - RNA, 19 nt, Artificial Sequence
  Description of Artificial Sequence: Synthetic oligonucleotide
  Sense Strand Starting at position 1033 of SEQ ID NO: 317846
agauuagaccuguggucca

SEQ ID NO: 399856 - RNA, 19 nt, Artificial Sequence
  Description of Artificial Sequence: Synthetic oligonucleotide
  Antisense Strand to SEQ ID NO: 399855
uggaccacaggucuaaucu

SEQ ID NO: 399857 - RNA, 19 nt, Artificial Sequence
  Description of Artificial Sequence: Synthetic oligonucleotide
  Sense Strand Starting at position 1033 of SEQ ID NO: 317851
agaccugugguccacaauu

SEQ ID NO: 399858 - RNA, 19 nt, Artificial Sequence
  Description of Artificial Sequence: Synthetic oligonucleotide
  Antisense Strand to SEQ ID NO: 399857
aauuguggaccacaggucu

SEQ ID NO: 399859 - RNA, 19 nt, Artificial Sequence
  Description of Artificial Sequence: Synthetic oligonucleotide
  Sense Strand Starting at position 1033 of SEQ ID NO: 317958
caguauugccugggaauca

SEQ ID NO: 399860 - RNA, 19 nt, Artificial Sequence
  Description of Artificial Sequence: Synthetic oligonucleotide
  Antisense Strand to SEQ ID NO: 399859
ugauucccaggcaauacug

SEQ ID NO: 399861 - RNA, 19 nt, Artificial Sequence
  Description of Artificial Sequence: Synthetic oligonucleotide
  Sense Strand Starting at position 1033 of SEQ ID NO: 317967
cugggaaucauaugguauc

SEQ ID NO: 399862 - RNA, 19 nt, Artificial Sequence
  Description of Artificial Sequence: Synthetic oligonucleotide
  Antisense Strand to SEQ ID NO: 399861
gauaccauaugauucccag

SEQ ID NO: 399863 - RNA, 19 nt, Artificial Sequence
  Description of Artificial Sequence: Synthetic oligonucleotide
  Sense Strand Starting at position 1033 of SEQ ID NO: 318184
agagguaucuuccuacauu

SEQ ID NO: 399864 - RNA, 19 nt, Artificial Sequence
  Description of Artificial Sequence: Synthetic oligonucleotide
  Antisense Strand to SEQ ID NO: 399863
aauguaggaagauaccucu

SEQ ID NO: 399865 - RNA, 19 nt, Artificial Sequence
  Description of Artificial Sequence: Synthetic oligonucleotide
  Sense Strand Starting at position 1033 of SEQ ID NO: 318187
gguaucuuccuacauucua

SEQ ID NO: 399866 - RNA, 19 nt, Artificial Sequence
  Description of Artificial Sequence: Synthetic oligonucleotide
  Antisense Strand to SEQ ID NO: 399865
uagaauguaggaagauacc

SEQ ID NO: 399867 - RNA, 19 nt, Artificial Sequence
  Description of Artificial Sequence: Synthetic oligonucleotide
  Sense Strand Starting at position 1033 of SEQ ID NO: 318924
ucccauacaugauugugaa

SEQ ID NO: 399868 - RNA, 19 nt, Artificial Sequence
  Description of Artificial Sequence: Synthetic oligonucleotide
  Antisense Strand to SEQ ID NO: 399867
uucacaaucauguauggga

SEQ ID NO: 399869 - RNA, 19 nt, Artificial Sequence
  Description of Artificial Sequence: Synthetic oligonucleotide
  Sense Strand Starting at position 1033 of SEQ ID NO: 318925
cccauacaugauugugaau

SEQ ID NO: 399870 - RNA, 19 nt, Artificial Sequence
  Description of Artificial Sequence: Synthetic oligonucleotide
  Antisense Strand to SEQ ID NO: 399869
auucacaaucauguauggg

SEQ ID NO: 399871 - RNA, 19 nt, Artificial Sequence
  Description of Artificial Sequence: Synthetic oligonucleotide
  Sense Strand Starting at position 1033 of SEQ ID NO: 319079
guaccugugaaguauuauc

SEQ ID NO: 399872 - RNA, 19 nt, Artificial Sequence
  Description of Artificial Sequence: Synthetic oligonucleotide
  Antisense Strand to SEQ ID NO: 399871
gauaauacuucacagguac

SEQ ID NO: 399873 - RNA, 19 nt, Artificial Sequence
  Description of Artificial Sequence: Synthetic oligonucleotide
  Sense Strand Starting at position 1033 of SEQ ID NO: 319084
ugugaaguauuaucucuaa

SEQ ID NO: 399874 - RNA, 19 nt, Artificial Sequence
  Description of Artificial Sequence: Synthetic oligonucleotide
  Antisense Strand to SEQ ID NO: 399873
uuagagauaauacuucaca

SEQ ID NO: 399875 - RNA, 19 nt, Artificial Sequence
  Description of Artificial Sequence: Synthetic oligonucleotide
  Sense Strand Starting at position 1033 of SEQ ID NO: 319151
auuacuaaugaguggcaga

SEQ ID NO: 399876 - RNA, 19 nt, Artificial Sequence
  Description of Artificial Sequence: Synthetic oligonucleotide
  Antisense Strand to SEQ ID NO: 399875
ucugccacucauuaguaau

SEQ ID NO: 399877 - RNA, 19 nt, Artificial Sequence
  Description of Artificial Sequence: Synthetic oligonucleotide
  Sense Strand Starting at position 1033 of SEQ ID NO: 319152
uuacuaaugaguggcagaa

SEQ ID NO: 399878 - RNA, 19 nt, Artificial Sequence
  Description of Artificial Sequence: Synthetic oligonucleotide
  Antisense Strand to SEQ ID NO: 399877
uucugccacucauuaguaa

SEQ ID NO: 399879 - RNA, 19 nt, Artificial Sequence
  Description of Artificial Sequence: Synthetic oligonucleotide
  Sense Strand Starting at position 1033 of SEQ ID NO: 319162
guggcagaacgguacuuaa

SEQ ID NO: 399880 - RNA, 19 nt, Artificial Sequence
  Description of Artificial Sequence: Synthetic oligonucleotide
  Antisense Strand to SEQ ID NO: 399879
uuaaguaccguucugccac

SEQ ID NO: 399881 - RNA, 19 nt, Artificial Sequence
  Description of Artificial Sequence: Synthetic oligonucleotide
  Sense Strand Starting at position 1033 of SEQ ID NO: 319193
uugccacaaucucuuggaa

SEQ ID NO: 399882 - RNA, 19 nt, Artificial Sequence
  Description of Artificial Sequence: Synthetic oligonucleotide
  Antisense Strand to SEQ ID NO: 399881
uuccaagagauuguggcaa

SEQ ID NO: 399883 - RNA, 19 nt, Artificial Sequence
  Description of Artificial Sequence: Synthetic oligonucleotide
  Sense Strand Starting at position 1034 of SEQ ID NO: 315815
cagaaaggguuuguuaaua

SEQ ID NO: 399884 - RNA, 19 nt, Artificial Sequence
  Description of Artificial Sequence: Synthetic oligonucleotide
  Antisense Strand to SEQ ID NO: 399883
uauuaacaaacccuuucug

SEQ ID NO: 399885 - RNA, 19 nt, Artificial Sequence
  Description of Artificial Sequence: Synthetic oligonucleotide
  Sense Strand Starting at position 1034 of SEQ ID NO: 315826
uguuaauaggguuacucua

SEQ ID NO: 399886 - RNA, 19 nt, Artificial Sequence
  Description of Artificial Sequence: Synthetic oligonucleotide
  Antisense Strand to SEQ ID NO: 399885
uagaguaacccuauuaaca

SEQ ID NO: 399887 - RNA, 19 nt, Artificial Sequence
  Description of Artificial Sequence: Synthetic oligonucleotide
  Sense Strand Starting at position 1034 of SEQ ID NO: 315851
gauaauagcuucuuugagg

SEQ ID NO: 399888 - RNA, 19 nt, Artificial Sequence
  Description of Artificial Sequence: Synthetic oligonucleotide
  Antisense Strand to SEQ ID NO: 399887
ccucaaagaagcuauuauc

SEQ ID NO: 399889 - RNA, 19 nt, Artificial Sequence
  Description of Artificial Sequence: Synthetic oligonucleotide
  Sense Strand Starting at position 1034 of SEQ ID NO: 315852
auaauagcuucuuugagga

SEQ ID NO: 399890 - RNA, 19 nt, Artificial Sequence
  Description of Artificial Sequence: Synthetic oligonucleotide
  Antisense Strand to SEQ ID NO: 399889
uccucaaagaagcuauuau

SEQ ID NO: 399891 - RNA, 19 nt, Artificial Sequence
  Description of Artificial Sequence: Synthetic oligonucleotide
  Sense Strand Starting at position 1034 of SEQ ID NO: 316100
aggcacuaacggugaagaa

SEQ ID NO: 399892 - RNA, 19 nt, Artificial Sequence
  Description of Artificial Sequence: Synthetic oligonucleotide
  Antisense Strand to SEQ ID NO: 399891
uucuucaccguuagugccu

SEQ ID NO: 399893 - RNA, 19 nt, Artificial Sequence
  Description of Artificial Sequence: Synthetic oligonucleotide
  Sense Strand Starting at position 1034 of SEQ ID NO: 316141
uacacuguccuggaguagu

SEQ ID NO: 399894 - RNA, 19 nt, Artificial Sequence
  Description of Artificial Sequence: Synthetic oligonucleotide
  Antisense Strand to SEQ ID NO: 399893
acuacuccaggacagugua

SEQ ID NO: 399895 - RNA, 19 nt, Artificial Sequence
  Description of Artificial Sequence: Synthetic oligonucleotide
  Sense Strand Starting at position 1034 of SEQ ID NO: 316223
uaugucuaugcauaggaua

SEQ ID NO: 399896 - RNA, 19 nt, Artificial Sequence
  Description of Artificial Sequence: Synthetic oligonucleotide
  Antisense Strand to SEQ ID NO: 399895
uauccuaugcauagacaua

SEQ ID NO: 399897 - RNA, 19 nt, Artificial Sequence
  Description of Artificial Sequence: Synthetic oligonucleotide
  Sense Strand Starting at position 1034 of SEQ ID NO: 316235
uaggauaggugucucauca

SEQ ID NO: 399898 - RNA, 19 nt, Artificial Sequence
  Description of Artificial Sequence: Synthetic oligonucleotide
  Antisense Strand to SEQ ID NO: 399897
ugaugagacaccuauccua

SEQ ID NO: 399899 - RNA, 19 nt, Artificial Sequence
  Description of Artificial Sequence: Synthetic oligonucleotide
  Sense Strand Starting at position 1034 of SEQ ID NO: 316279
cagggacuguuguccaaac

SEQ ID NO: 399900 - RNA, 19 nt, Artificial Sequence
  Description of Artificial Sequence: Synthetic oligonucleotide
  Antisense Strand to SEQ ID NO: 399899
guuuggacaacagucccug

SEQ ID NO: 399901 - RNA, 19 nt, Artificial Sequence
  Description of Artificial Sequence: Synthetic oligonucleotide
  Sense Strand Starting at position 1034 of SEQ ID NO: 316281
gggacuguuguccaaaccu

SEQ ID NO: 399902 - RNA, 19 nt, Artificial Sequence
  Description of Artificial Sequence: Synthetic oligonucleotide
  Antisense Strand to SEQ ID NO: 399901
agguuuggacaacaguccc

SEQ ID NO: 399903 - RNA, 19 nt, Artificial Sequence
  Description of Artificial Sequence: Synthetic oligonucleotide
  Sense Strand Starting at position 1034 of SEQ ID NO: 316381
gcaaauaguguguacagga

SEQ ID NO: 399904 - RNA, 19 nt, Artificial Sequence
  Description of Artificial Sequence: Synthetic oligonucleotide
  Antisense Strand to SEQ ID NO: 399903
uccuguacacacuauuugc

SEQ ID NO: 399905 - RNA, 19 nt, Artificial Sequence
  Description of Artificial Sequence: Synthetic oligonucleotide
  Sense Strand Starting at position 1034 of SEQ ID NO: 316519
cuguaaucuuugguaaaga

SEQ ID NO: 399906 - RNA, 19 nt, Artificial Sequence
  Description of Artificial Sequence: Synthetic oligonucleotide
  Antisense Strand to SEQ ID NO: 399905
ucuuuaccaaagauuacag

SEQ ID NO: 399907 - RNA, 19 nt, Artificial Sequence
  Description of Artificial Sequence: Synthetic oligonucleotide
  Sense Strand Starting at position 1034 of SEQ ID NO: 316530
gguaaagaucauggacuuc

SEQ ID NO: 399908 - RNA, 19 nt, Artificial Sequence
  Description of Artificial Sequence: Synthetic oligonucleotide
  Antisense Strand to SEQ ID NO: 399907
gaaguccaugaucuuuacc

SEQ ID NO: 399909 - RNA, 19 nt, Artificial Sequence
  Description of Artificial Sequence: Synthetic oligonucleotide
  Sense Strand Starting at position 1034 of SEQ ID NO: 316684
ugggaauuggcagggauau

SEQ ID NO: 399910 - RNA, 19 nt, Artificial Sequence
  Description of Artificial Sequence: Synthetic oligonucleotide
  Antisense Strand to SEQ ID NO: 399909
auaucccugccaauuccca

SEQ ID NO: 399911 - RNA, 19 nt, Artificial Sequence
  Description of Artificial Sequence: Synthetic oligonucleotide
  Sense Strand Starting at position 1034 of SEQ ID NO: 316776
gugggagcuaaaugauaga

SEQ ID NO: 399912 - RNA, 19 nt, Artificial Sequence
  Description of Artificial Sequence: Synthetic oligonucleotide
  Antisense Strand to SEQ ID NO: 399911
ucuaucauuuagcucccac

SEQ ID NO: 399913 - RNA, 19 nt, Artificial Sequence
  Description of Artificial Sequence: Synthetic oligonucleotide
  Sense Strand Starting at position 1034 of SEQ ID NO: 317078
agaagugagcuuggaaacu

SEQ ID NO: 399914 - RNA, 19 nt, Artificial Sequence
  Description of Artificial Sequence: Synthetic oligonucleotide
  Antisense Strand to SEQ ID NO: 399913
aguuuccaagcucacuucu

SEQ ID NO: 399915 - RNA, 19 nt, Artificial Sequence
  Description of Artificial Sequence: Synthetic oligonucleotide
  Sense Strand Starting at position 1034 of SEQ ID NO: 317171
ugagauuaaugggaagaga

SEQ ID NO: 399916 - RNA, 19 nt, Artificial Sequence
  Description of Artificial Sequence: Synthetic oligonucleotide
  Antisense Strand to SEQ ID NO: 399915
ucucuucccauuaaucuca

SEQ ID NO: 399917 - RNA, 19 nt, Artificial Sequence
  Description of Artificial Sequence: Synthetic oligonucleotide
  Sense Strand Starting at position 1034 of SEQ ID NO: 317197
gagggaugguccuuaccga

SEQ ID NO: 399918 - RNA, 19 nt, Artificial Sequence
  Description of Artificial Sequence: Synthetic oligonucleotide
  Antisense Strand to SEQ ID NO: 399917
ucgguaaggaccaucccuc

SEQ ID NO: 399919 - RNA, 19 nt, Artificial Sequence
  Description of Artificial Sequence: Synthetic oligonucleotide
  Sense Strand Starting at position 1034 of SEQ ID NO: 317204
gguccuuaccgagauuccu

SEQ ID NO: 399920 - RNA, 19 nt, Artificial Sequence
  Description of Artificial Sequence: Synthetic oligonucleotide
  Antisense Strand to SEQ ID NO: 399919
aggaaucucgguaaggacc

SEQ ID NO: 399921 - RNA, 19 nt, Artificial Sequence
  Description of Artificial Sequence: Synthetic oligonucleotide
  Sense Strand Starting at position 1034 of SEQ ID NO: 317216
gauuccuggcuugagcaga

SEQ ID NO: 399922 - RNA, 19 nt, Artificial Sequence
  Description of Artificial Sequence: Synthetic oligonucleotide
  Antisense Strand to SEQ ID NO: 399921
ucugcucaagccaggaauc

SEQ ID NO: 399923 - RNA, 19 nt, Artificial Sequence
  Description of Artificial Sequence: Synthetic oligonucleotide
  Sense Strand Starting at position 1034 of SEQ ID NO: 317221
cuggcuugagcagaugaga

SEQ ID NO: 399924 - RNA, 19 nt, Artificial Sequence
  Description of Artificial Sequence: Synthetic oligonucleotide
  Antisense Strand to SEQ ID NO: 399923
ucucaucugcucaagccag

SEQ ID NO: 399925 - RNA, 19 nt, Artificial Sequence
  Description of Artificial Sequence: Synthetic oligonucleotide
  Sense Strand Starting at position 1034 of SEQ ID NO: 317574
caaacaaaguaguuggauu

SEQ ID NO: 399926 - RNA, 19 nt, Artificial Sequence
  Description of Artificial Sequence: Synthetic oligonucleotide
  Antisense Strand to SEQ ID NO: 399925
aauccaacuacuuuguuug

SEQ ID NO: 399927 - RNA, 19 nt, Artificial Sequence
  Description of Artificial Sequence: Synthetic oligonucleotide
  Sense Strand Starting at position 1034 of SEQ ID NO: 317593
guguuucagggccaugaua

SEQ ID NO: 399928 - RNA, 19 nt, Artificial Sequence
  Description of Artificial Sequence: Synthetic oligonucleotide
  Antisense Strand to SEQ ID NO: 399927
uaucauggcccugaaacac

SEQ ID NO: 399929 - RNA, 19 nt, Artificial Sequence
  Description of Artificial Sequence: Synthetic oligonucleotide
  Sense Strand Starting at position 1034 of SEQ ID NO: 317607
ugauaaaggcaauguauga

SEQ ID NO: 399930 - RNA, 19 nt, Artificial Sequence
  Description of Artificial Sequence: Synthetic oligonucleotide
  Antisense Strand to SEQ ID NO: 399929
ucauacauugccuuuauca

SEQ ID NO: 399931 - RNA, 19 nt, Artificial Sequence
  Description of Artificial Sequence: Synthetic oligonucleotide
  Sense Strand Starting at position 1034 of SEQ ID NO: 317630
ucaaguauacuaugauuag

SEQ ID NO: 399932 - RNA, 19 nt, Artificial Sequence
  Description of Artificial Sequence: Synthetic oligonucleotide
  Antisense Strand to SEQ ID NO: 399931
cuaaucauaguauacuuga

SEQ ID NO: 399933 - RNA, 19 nt, Artificial Sequence
  Description of Artificial Sequence: Synthetic oligonucleotide
  Sense Strand Starting at position 1034 of SEQ ID NO: 317639
cuaugauuagggcaagcaa

SEQ ID NO: 399934 - RNA, 19 nt, Artificial Sequence
  Description of Artificial Sequence: Synthetic oligonucleotide
  Antisense Strand to SEQ ID NO: 399933
uugcuugcccuaaucauag

SEQ ID NO: 399935 - RNA, 19 nt, Artificial Sequence
  Description of Artificial Sequence: Synthetic oligonucleotide
  Sense Strand Starting at position 1034 of SEQ ID NO: 317646
uagggcaagcaaugauaau

SEQ ID NO: 399936 - RNA, 19 nt, Artificial Sequence
  Description of Artificial Sequence: Synthetic oligonucleotide
  Antisense Strand to SEQ ID NO: 399935
auuaucauugcuugcccua

SEQ ID NO: 399937 - RNA, 19 nt, Artificial Sequence
  Description of Artificial Sequence: Synthetic oligonucleotide
  Sense Strand Starting at position 1034 of SEQ ID NO: 317666
cugugagagccauauguca

SEQ ID NO: 399938 - RNA, 19 nt, Artificial Sequence
  Description of Artificial Sequence: Synthetic oligonucleotide
  Antisense Strand to SEQ ID NO: 399937
ugacauauggcucucacag

SEQ ID NO: 399939 - RNA, 19 nt, Artificial Sequence
  Description of Artificial Sequence: Synthetic oligonucleotide
  Sense Strand Starting at position 1034 of SEQ ID NO: 317740
gagucaagcucauuauuga

SEQ ID NO: 399940 - RNA, 19 nt, Artificial Sequence
  Description of Artificial Sequence: Synthetic oligonucleotide
  Antisense Strand to SEQ ID NO: 399939
ucaauaaugagcuugacuc

SEQ ID NO: 399941 - RNA, 19 nt, Artificial Sequence
  Description of Artificial Sequence: Synthetic oligonucleotide
  Sense Strand Starting at position 1034 of SEQ ID NO: 317741
agucaagcucauuauugau

SEQ ID NO: 399942 - RNA, 19 nt, Artificial Sequence
  Description of Artificial Sequence: Synthetic oligonucleotide
  Antisense Strand to SEQ ID NO: 399941
aucaauaaugagcuugacu

SEQ ID NO: 399943 - RNA, 19 nt, Artificial Sequence
  Description of Artificial Sequence: Synthetic oligonucleotide
  Sense Strand Starting at position 1034 of SEQ ID NO: 317750
cauuauugauaggucugga

SEQ ID NO: 399944 - RNA, 19 nt, Artificial Sequence
  Description of Artificial Sequence: Synthetic oligonucleotide
  Antisense Strand to SEQ ID NO: 399943
uccagaccuaucaauaaug

SEQ ID NO: 399945 - RNA, 19 nt, Artificial Sequence
  Description of Artificial Sequence: Synthetic oligonucleotide
  Sense Strand Starting at position 1034 of SEQ ID NO: 317753
uauugauaggucuggauga

SEQ ID NO: 399946 - RNA, 19 nt, Artificial Sequence
  Description of Artificial Sequence: Synthetic oligonucleotide
  Antisense Strand to SEQ ID NO: 399945
ucauccagaccuaucaaua

SEQ ID NO: 399947 - RNA, 19 nt, Artificial Sequence
  Description of Artificial Sequence: Synthetic oligonucleotide
  Sense Strand Starting at position 1034 of SEQ ID NO: 317806
ucaugaacauguguaauug

SEQ ID NO: 399948 - RNA, 19 nt, Artificial Sequence
  Description of Artificial Sequence: Synthetic oligonucleotide
  Antisense Strand to SEQ ID NO: 399947
caauuacacauguucauga

SEQ ID NO: 399949 - RNA, 19 nt, Artificial Sequence
  Description of Artificial Sequence: Synthetic oligonucleotide
  Sense Strand Starting at position 1034 of SEQ ID NO: 317810
gaacauguguaauugaauu

SEQ ID NO: 399950 - RNA, 19 nt, Artificial Sequence
  Description of Artificial Sequence: Synthetic oligonucleotide
  Antisense Strand to SEQ ID NO: 399949
aauucaauuacacauguuc

SEQ ID NO: 399951 - RNA, 19 nt, Artificial Sequence
  Description of Artificial Sequence: Synthetic oligonucleotide
  Sense Strand Starting at position 1034 of SEQ ID NO: 317830
guaugaaugaagugggcau

SEQ ID NO: 399952 - RNA, 19 nt, Artificial Sequence
  Description of Artificial Sequence: Synthetic oligonucleotide
  Antisense Strand to SEQ ID NO: 399951
augcccacuucauucauac

SEQ ID NO: 399953 - RNA, 19 nt, Artificial Sequence
  Description of Artificial Sequence: Synthetic oligonucleotide
  Sense Strand Starting at position 1034 of SEQ ID NO: 317925
acacaauauggaugcuagu

SEQ ID NO: 399954 - RNA, 19 nt, Artificial Sequence
  Description of Artificial Sequence: Synthetic oligonucleotide
  Antisense Strand to SEQ ID NO: 399953
acuagcauccauauugugu

SEQ ID NO: 399955 - RNA, 19 nt, Artificial Sequence
  Description of Artificial Sequence: Synthetic oligonucleotide
  Sense Strand Starting at position 1034 of SEQ ID NO: 318335
ggcuaaggcagauggauua

SEQ ID NO: 399956 - RNA, 19 nt, Artificial Sequence
  Description of Artificial Sequence: Synthetic oligonucleotide
  Antisense Strand to SEQ ID NO: 399955
uaauccaucugccuuagcc

SEQ ID NO: 399957 - RNA, 19 nt, Artificial Sequence
  Description of Artificial Sequence: Synthetic oligonucleotide
  Sense Strand Starting at position 1034 of SEQ ID NO: 318642
gcagacagauugcuugaua

SEQ ID NO: 399958 - RNA, 19 nt, Artificial Sequence
  Description of Artificial Sequence: Synthetic oligonucleotide
  Antisense Strand to SEQ ID NO: 399957
uaucaagcaaucugucugc

SEQ ID NO: 399959 - RNA, 19 nt, Artificial Sequence
  Description of Artificial Sequence: Synthetic oligonucleotide
  Sense Strand Starting at position 1034 of SEQ ID NO: 318643
cagacagauugcuugauac

SEQ ID NO: 399960 - RNA, 19 nt, Artificial Sequence
  Description of Artificial Sequence: Synthetic oligonucleotide
  Antisense Strand to SEQ ID NO: 399959
guaucaagcaaucugucug

SEQ ID NO: 399961 - RNA, 19 nt, Artificial Sequence
  Description of Artificial Sequence: Synthetic oligonucleotide
  Sense Strand Starting at position 1034 of SEQ ID NO: 319174
uggugaaauuuguacagaa

SEQ ID NO: 399962 - RNA, 19 nt, Artificial Sequence
  Description of Artificial Sequence: Synthetic oligonucleotide
  Antisense Strand to SEQ ID NO: 399961
uucuguacaaauuucacca

SEQ ID NO: 399963 - RNA, 19 nt, Artificial Sequence
  Description of Artificial Sequence: Synthetic oligonucleotide
  Sense Strand Starting at position 1035 of SEQ ID NO: 315280
agugcuaaucaugaucaca

SEQ ID NO: 399964 - RNA, 19 nt, Artificial Sequence
  Description of Artificial Sequence: Synthetic oligonucleotide
  Antisense Strand to SEQ ID NO: 399963
ugugaucaugauuagcacu

SEQ ID NO: 399965 - RNA, 19 nt, Artificial Sequence
  Description of Artificial Sequence: Synthetic oligonucleotide
  Sense Strand Starting at position 1035 of SEQ ID NO: 315354
gcucuaaacagauaucgug

SEQ ID NO: 399966 - RNA, 19 nt, Artificial Sequence
  Description of Artificial Sequence: Synthetic oligonucleotide
  Antisense Strand to SEQ ID NO: 399965
cacgauaucuguuuagagc

SEQ ID NO: 399967 - RNA, 19 nt, Artificial Sequence
  Description of Artificial Sequence: Synthetic oligonucleotide
  Sense Strand Starting at position 1035 of SEQ ID NO: 315369
cgugucuucuuauuuaaag

SEQ ID NO: 399968 - RNA, 19 nt, Artificial Sequence
  Description of Artificial Sequence: Synthetic oligonucleotide
  Antisense Strand to SEQ ID NO: 399967
cuuuaaauaagaagacacg

SEQ ID NO: 399969 - RNA, 19 nt, Artificial Sequence
  Description of Artificial Sequence: Synthetic oligonucleotide
  Sense Strand Starting at position 1035 of SEQ ID NO: 315596
aggagaaacauuggagugu

SEQ ID NO: 399970 - RNA, 19 nt, Artificial Sequence
  Description of Artificial Sequence: Synthetic oligonucleotide
  Antisense Strand to SEQ ID NO: 399969
acacuccaauguuucuccu

SEQ ID NO: 399971 - RNA, 19 nt, Artificial Sequence
  Description of Artificial Sequence: Synthetic oligonucleotide
  Sense Strand Starting at position 1035 of SEQ ID NO: 315740
aggcaaucuuucuuugaaa

SEQ ID NO: 399972 - RNA, 19 nt, Artificial Sequence
  Description of Artificial Sequence: Synthetic oligonucleotide
  Antisense Strand to SEQ ID NO: 399971
uuucaaagaaagauugccu

SEQ ID NO: 399973 - RNA, 19 nt, Artificial Sequence
  Description of Artificial Sequence: Synthetic oligonucleotide
  Sense Strand Starting at position 1035 of SEQ ID NO: 315741
ggcaaucuuucuuugaaag

SEQ ID NO: 399974 - RNA, 19 nt, Artificial Sequence
  Description of Artificial Sequence: Synthetic oligonucleotide
  Antisense Strand to SEQ ID NO: 399973
cuuucaaagaaagauugcc

SEQ ID NO: 399975 - RNA, 19 nt, Artificial Sequence
  Description of Artificial Sequence: Synthetic oligonucleotide
  Sense Strand Starting at position 1035 of SEQ ID NO: 315742
gcaaucuuucuuugaaagg

SEQ ID NO: 399976 - RNA, 19 nt, Artificial Sequence
  Description of Artificial Sequence: Synthetic oligonucleotide
  Antisense Strand to SEQ ID NO: 399975
ccuuucaaagaaagauugc

SEQ ID NO: 399977 - RNA, 19 nt, Artificial Sequence
  Description of Artificial Sequence: Synthetic oligonucleotide
  Sense Strand Starting at position 1035 of SEQ ID NO: 315757
aaggucaguuucuuaugga

SEQ ID NO: 399978 - RNA, 19 nt, Artificial Sequence
  Description of Artificial Sequence: Synthetic oligonucleotide
  Antisense Strand to SEQ ID NO: 399977
uccauaagaaacugaccuu

SEQ ID NO: 399979 - RNA, 19 nt, Artificial Sequence
  Description of Artificial Sequence: Synthetic oligonucleotide
  Sense Strand Starting at position 1035 of SEQ ID NO: 315771
auggaugccagccaaagau

SEQ ID NO: 399980 - RNA, 19 nt, Artificial Sequence
  Description of Artificial Sequence: Synthetic oligonucleotide
  Antisense Strand to SEQ ID NO: 399979
aucuuuggcuggcauccau

SEQ ID NO: 399981 - RNA, 19 nt, Artificial Sequence
  Description of Artificial Sequence: Synthetic oligonucleotide
  Sense Strand Starting at position 1035 of SEQ ID NO: 315919
uucugagccuuuccugaaa

SEQ ID NO: 399982 - RNA, 19 nt, Artificial Sequence
  Description of Artificial Sequence: Synthetic oligonucleotide
  Antisense Strand to SEQ ID NO: 399981
uuucaggaaaggcucagaa

SEQ ID NO: 399983 - RNA, 19 nt, Artificial Sequence
  Description of Artificial Sequence: Synthetic oligonucleotide
  Sense Strand Starting at position 1035 of SEQ ID NO: 316296
uuuguaucaguauaaugca

SEQ ID NO: 399984 - RNA, 19 nt, Artificial Sequence
  Description of Artificial Sequence: Synthetic oligonucleotide
  Antisense Strand to SEQ ID NO: 399983
ugcauuauacugauacaaa

SEQ ID NO: 399985 - RNA, 19 nt, Artificial Sequence
  Description of Artificial Sequence: Synthetic oligonucleotide
  Sense Strand Starting at position 1035 of SEQ ID NO: 316304
aguauaaugcauuauagug

SEQ ID NO: 399986 - RNA, 19 nt, Artificial Sequence
  Description of Artificial Sequence: Synthetic oligonucleotide
  Antisense Strand to SEQ ID NO: 399985
cacuauaaugcauuauacu

SEQ ID NO: 399987 - RNA, 19 nt, Artificial Sequence
  Description of Artificial Sequence: Synthetic oligonucleotide
  Sense Strand Starting at position 1035 of SEQ ID NO: 316341
augucuaugcucuaaggua

SEQ ID NO: 399988 - RNA, 19 nt, Artificial Sequence
  Description of Artificial Sequence: Synthetic oligonucleotide
  Antisense Strand to SEQ ID NO: 399987
uaccuuagagcauagacau

SEQ ID NO: 399989 - RNA, 19 nt, Artificial Sequence
  Description of Artificial Sequence: Synthetic oligonucleotide
  Sense Strand Starting at position 1035 of SEQ ID NO: 316397
aagugaagauuaguaaagu

SEQ ID NO: 399990 - RNA, 19 nt, Artificial Sequence
  Description of Artificial Sequence: Synthetic oligonucleotide
  Antisense Strand to SEQ ID NO: 399989
acuuuacuaaucuucacuu

SEQ ID NO: 399991 - RNA, 19 nt, Artificial Sequence
  Description of Artificial Sequence: Synthetic oligonucleotide
  Sense Strand Starting at position 1035 of SEQ ID NO: 316403
agauuaguaaagugacuug

SEQ ID NO: 399992 - RNA, 19 nt, Artificial Sequence
  Description of Artificial Sequence: Synthetic oligonucleotide
  Antisense Strand to SEQ ID NO: 399991
caagucacuuuacuaaucu

SEQ ID NO: 399993 - RNA, 19 nt, Artificial Sequence
  Description of Artificial Sequence: Synthetic oligonucleotide
  Sense Strand Starting at position 1035 of SEQ ID NO: 316446
ugaaauggccuguaucuaa

SEQ ID NO: 399994 - RNA, 19 nt, Artificial Sequence
  Description of Artificial Sequence: Synthetic oligonucleotide
  Antisense Strand to SEQ ID NO: 399993
uuagauacaggccauuuca

SEQ ID NO: 399995 - RNA, 19 nt, Artificial Sequence
  Description of Artificial Sequence: Synthetic oligonucleotide
  Sense Strand Starting at position 1035 of SEQ ID NO: 316665
ugcuauaaacccuaagagu

SEQ ID NO: 399996 - RNA, 19 nt, Artificial Sequence
  Description of Artificial Sequence: Synthetic oligonucleotide
  Antisense Strand to SEQ ID NO: 399995
acucuuaggguuuauagca

SEQ ID NO: 399997 - RNA, 19 nt, Artificial Sequence
  Description of Artificial Sequence: Synthetic oligonucleotide
  Sense Strand Starting at position 1035 of SEQ ID NO: 316678
aagagugguguuuggagaa

SEQ ID NO: 399998 - RNA, 19 nt, Artificial Sequence
  Description of Artificial Sequence: Synthetic oligonucleotide
  Antisense Strand to SEQ ID NO: 399997
uucuccaaacaccacucuu

SEQ ID NO: 399999 - RNA, 19 nt, Artificial Sequence
  Description of Artificial Sequence: Synthetic oligonucleotide
  Sense Strand Starting at position 1035 of SEQ ID NO: 316782
guagaauggguccaagucu

SEQ ID NO: 400000 - RNA, 19 nt, Artificial Sequence
  Description of Artificial Sequence: Synthetic oligonucleotide
  Antisense Strand to SEQ ID NO: 399999
agacuuggacccauucuac

SEQ ID NO: 400001 - RNA, 19 nt, Artificial Sequence
  Description of Artificial Sequence: Synthetic oligonucleotide
  Sense Strand Starting at position 1035 of SEQ ID NO: 316793
ccaagucuuccagaggcuu

SEQ ID NO: 400002 - RNA, 19 nt, Artificial Sequence
  Description of Artificial Sequence: Synthetic oligonucleotide
  Antisense Strand to SEQ ID NO: 400001
aagccucuggaagacuugg

SEQ ID NO: 400003 - RNA, 19 nt, Artificial Sequence
  Description of Artificial Sequence: Synthetic oligonucleotide
  Sense Strand Starting at position 1035 of SEQ ID NO: 316801
uccagaggcuuuccuauga

SEQ ID NO: 400004 - RNA, 19 nt, Artificial Sequence
  Description of Artificial Sequence: Synthetic oligonucleotide
  Antisense Strand to SEQ ID NO: 400003
ucauaggaaagccucugga

SEQ ID NO: 400005 - RNA, 19 nt, Artificial Sequence
  Description of Artificial Sequence: Synthetic oligonucleotide
  Sense Strand Starting at position 1035 of SEQ ID NO: 316814
cuaugagcucacgaggaau

SEQ ID NO: 400006 - RNA, 19 nt, Artificial Sequence
  Description of Artificial Sequence: Synthetic oligonucleotide
  Antisense Strand to SEQ ID NO: 400005
auuccucgugagcucauag

SEQ ID NO: 400007 - RNA, 19 nt, Artificial Sequence
  Description of Artificial Sequence: Synthetic oligonucleotide
  Sense Strand Starting at position 1035 of SEQ ID NO: 316826
gaggaaugucgccauagag

SEQ ID NO: 400008 - RNA, 19 nt, Artificial Sequence
  Description of Artificial Sequence: Synthetic oligonucleotide
  Antisense Strand to SEQ ID NO: 400007
cucuauggcgacauuccuc

SEQ ID NO: 400009 - RNA, 19 nt, Artificial Sequence
  Description of Artificial Sequence: Synthetic oligonucleotide
  Sense Strand Starting at position 1035 of SEQ ID NO: 316904
cugucuggucuuuagacuu

SEQ ID NO: 400010 - RNA, 19 nt, Artificial Sequence
  Description of Artificial Sequence: Synthetic oligonucleotide
  Antisense Strand to SEQ ID NO: 400009
aagucuaaagaccagacag

SEQ ID NO: 400011 - RNA, 19 nt, Artificial Sequence
  Description of Artificial Sequence: Synthetic oligonucleotide
  Sense Strand Starting at position 1035 of SEQ ID NO: 316994
uccgcucaucuggaaagau

SEQ ID NO: 400012 - RNA, 19 nt, Artificial Sequence
  Description of Artificial Sequence: Synthetic oligonucleotide
  Antisense Strand to SEQ ID NO: 400011
aucuuuccagaugagcgga

SEQ ID NO: 400013 - RNA, 19 nt, Artificial Sequence
  Description of Artificial Sequence: Synthetic oligonucleotide
  Sense Strand Starting at position 1035 of SEQ ID NO: 317006
gaaagauuacuggguagca

SEQ ID NO: 400014 - RNA, 19 nt, Artificial Sequence
  Description of Artificial Sequence: Synthetic oligonucleotide
  Antisense Strand to SEQ ID NO: 400013
ugcuacccaguaaucuuuc

SEQ ID NO: 400015 - RNA, 19 nt, Artificial Sequence
  Description of Artificial Sequence: Synthetic oligonucleotide
  Sense Strand Starting at position 1035 of SEQ ID NO: 317007
aaagauuacuggguagcau

SEQ ID NO: 400016 - RNA, 19 nt, Artificial Sequence
  Description of Artificial Sequence: Synthetic oligonucleotide
  Antisense Strand to SEQ ID NO: 400015
augcuacccaguaaucuuu

SEQ ID NO: 400017 - RNA, 19 nt, Artificial Sequence
  Description of Artificial Sequence: Synthetic oligonucleotide
  Sense Strand Starting at position 1035 of SEQ ID NO: 317059
agccacagauccucagaaa

SEQ ID NO: 400018 - RNA, 19 nt, Artificial Sequence
  Description of Artificial Sequence: Synthetic oligonucleotide
  Antisense Strand to SEQ ID NO: 400017
uuucugaggaucuguggcu

SEQ ID NO: 400019 - RNA, 19 nt, Artificial Sequence
  Description of Artificial Sequence: Synthetic oligonucleotide
  Sense Strand Starting at position 1035 of SEQ ID NO: 317264
ggcaucauuccuggaggac

SEQ ID NO: 400020 - RNA, 19 nt, Artificial Sequence
  Description of Artificial Sequence: Synthetic oligonucleotide
  Antisense Strand to SEQ ID NO: 400019
guccuccaggaaugaugcc

SEQ ID NO: 400021 - RNA, 19 nt, Artificial Sequence
  Description of Artificial Sequence: Synthetic oligonucleotide
  Sense Strand Starting at position 1035 of SEQ ID NO: 317457
agggaauugacugggccau

SEQ ID NO: 400022 - RNA, 19 nt, Artificial Sequence
  Description of Artificial Sequence: Synthetic oligonucleotide
  Antisense Strand to SEQ ID NO: 400021
auggcccagucaauucccu

SEQ ID NO: 400023 - RNA, 19 nt, Artificial Sequence
  Description of Artificial Sequence: Synthetic oligonucleotide
  Sense Strand Starting at position 1035 of SEQ ID NO: 317458
gggaauugacugggccaua

SEQ ID NO: 400024 - RNA, 19 nt, Artificial Sequence
  Description of Artificial Sequence: Synthetic oligonucleotide
  Antisense Strand to SEQ ID NO: 400023
uauggcccagucaauuccc

SEQ ID NO: 400025 - RNA, 19 nt, Artificial Sequence
  Description of Artificial Sequence: Synthetic oligonucleotide
  Sense Strand Starting at position 1035 of SEQ ID NO: 317461
aauugacugggccauaguu

SEQ ID NO: 400026 - RNA, 19 nt, Artificial Sequence
  Description of Artificial Sequence: Synthetic oligonucleotide
  Antisense Strand to SEQ ID NO: 400025
aacuauggcccagucaauu

SEQ ID NO: 400027 - RNA, 19 nt, Artificial Sequence
  Description of Artificial Sequence: Synthetic oligonucleotide
  Sense Strand Starting at position 1035 of SEQ ID NO: 317463
uugacugggccauaguuau

SEQ ID NO: 400028 - RNA, 19 nt, Artificial Sequence
  Description of Artificial Sequence: Synthetic oligonucleotide
  Antisense Strand to SEQ ID NO: 400027
auaacuauggcccagucaa

SEQ ID NO: 400029 - RNA, 19 nt, Artificial Sequence
  Description of Artificial Sequence: Synthetic oligonucleotide
  Sense Strand Starting at position 1035 of SEQ ID NO: 317471
gccauaguuauggauugca

SEQ ID NO: 400030 - RNA, 19 nt, Artificial Sequence
  Description of Artificial Sequence: Synthetic oligonucleotide
  Antisense Strand to SEQ ID NO: 400029
ugcaauccauaacuauggc

SEQ ID NO: 400031 - RNA, 19 nt, Artificial Sequence
  Description of Artificial Sequence: Synthetic oligonucleotide
  Sense Strand Starting at position 1035 of SEQ ID NO: 317523
acauccagucaguaaaguu

SEQ ID NO: 400032 - RNA, 19 nt, Artificial Sequence
  Description of Artificial Sequence: Synthetic oligonucleotide
  Antisense Strand to SEQ ID NO: 400031
aacuuuacugacuggaugu

SEQ ID NO: 400033 - RNA, 19 nt, Artificial Sequence
  Description of Artificial Sequence: Synthetic oligonucleotide
  Sense Strand Starting at position 1035 of SEQ ID NO: 318905
cagaaaggguuuguuaaua

SEQ ID NO: 400034 - RNA, 19 nt, Artificial Sequence
  Description of Artificial Sequence: Synthetic oligonucleotide
  Antisense Strand to SEQ ID NO: 400033
uauuaacaaacccuuucug

SEQ ID NO: 400035 - RNA, 19 nt, Artificial Sequence
  Description of Artificial Sequence: Synthetic oligonucleotide
  Sense Strand Starting at position 1035 of SEQ ID NO: 318916
uguuaauaggguuacucua

SEQ ID NO: 400036 - RNA, 19 nt, Artificial Sequence
  Description of Artificial Sequence: Synthetic oligonucleotide
  Antisense Strand to SEQ ID NO: 400035
uagaguaacccuauuaaca

SEQ ID NO: 400037 - RNA, 19 nt, Artificial Sequence
  Description of Artificial Sequence: Synthetic oligonucleotide
  Sense Strand Starting at position 1035 of SEQ ID NO: 318941
gauaauagcuucuuugagg

SEQ ID NO: 400038 - RNA, 19 nt, Artificial Sequence
  Description of Artificial Sequence: Synthetic oligonucleotide
  Antisense Strand to SEQ ID NO: 400037
ccucaaagaagcuauuauc

SEQ ID NO: 400039 - RNA, 19 nt, Artificial Sequence
  Description of Artificial Sequence: Synthetic oligonucleotide
  Sense Strand Starting at position 1035 of SEQ ID NO: 318942
auaauagcuucuuugagga

SEQ ID NO: 400040 - RNA, 19 nt, Artificial Sequence
  Description of Artificial Sequence: Synthetic oligonucleotide
  Antisense Strand to SEQ ID NO: 400039
uccucaaagaagcuauuau

SEQ ID NO: 400041 - RNA, 19 nt, Artificial Sequence
  Description of Artificial Sequence: Synthetic oligonucleotide
  Sense Strand Starting at position 1035 of SEQ ID NO: 319190
aggcacuaacggugaagaa

SEQ ID NO: 400042 - RNA, 19 nt, Artificial Sequence
  Description of Artificial Sequence: Synthetic oligonucleotide
  Antisense Strand to SEQ ID NO: 400041
uucuucaccguuagugccu

SEQ ID NO: 400043 - RNA, 19 nt, Artificial Sequence
  Description of Artificial Sequence: Synthetic oligonucleotide
  Sense Strand Starting at position 1036 of SEQ ID NO: 315279
caugcugagugagucaaua

SEQ ID NO: 400044 - RNA, 19 nt, Artificial Sequence
  Description of Artificial Sequence: Synthetic oligonucleotide
  Antisense Strand to SEQ ID NO: 400043
uauugacucacucagcaug

SEQ ID NO: 400045 - RNA, 19 nt, Artificial Sequence
  Description of Artificial Sequence: Synthetic oligonucleotide
  Sense Strand Starting at position 1036 of SEQ ID NO: 315281
ugcugagugagucaauacu

SEQ ID NO: 400046 - RNA, 19 nt, Artificial Sequence
  Description of Artificial Sequence: Synthetic oligonucleotide
  Antisense Strand to SEQ ID NO: 400045
aguauugacucacucagca

SEQ ID NO: 400047 - RNA, 19 nt, Artificial Sequence
  Description of Artificial Sequence: Synthetic oligonucleotide
  Sense Strand Starting at position 1036 of SEQ ID NO: 315287
gugagucaauacuagaauu

SEQ ID NO: 400048 - RNA, 19 nt, Artificial Sequence
  Description of Artificial Sequence: Synthetic oligonucleotide
  Antisense Strand to SEQ ID NO: 400047
aauucuaguauugacucac

SEQ ID NO: 400049 - RNA, 19 nt, Artificial Sequence
  Description of Artificial Sequence: Synthetic oligonucleotide
  Sense Strand Starting at position 1036 of SEQ ID NO: 315441
ggcucaguucuaggcuuau

SEQ ID NO: 400050 - RNA, 19 nt, Artificial Sequence
  Description of Artificial Sequence: Synthetic oligonucleotide
  Antisense Strand to SEQ ID NO: 400049
auaagccuagaacugagcc

SEQ ID NO: 400051 - RNA, 19 nt, Artificial Sequence
  Description of Artificial Sequence: Synthetic oligonucleotide
  Sense Strand Starting at position 1036 of SEQ ID NO: 315473
aguagaucucaaggugucu

SEQ ID NO: 400052 - RNA, 19 nt, Artificial Sequence
  Description of Artificial Sequence: Synthetic oligonucleotide
  Antisense Strand to SEQ ID NO: 400051
agacaccuugagaucuacu

SEQ ID NO: 400053 - RNA, 19 nt, Artificial Sequence
  Description of Artificial Sequence: Synthetic oligonucleotide
  Sense Strand Starting at position 1036 of SEQ ID NO: 315514
uccacugauucucuagaug

SEQ ID NO: 400054 - RNA, 19 nt, Artificial Sequence
  Description of Artificial Sequence: Synthetic oligonucleotide
  Antisense Strand to SEQ ID NO: 400053
caucuagagaaucagugga

SEQ ID NO: 400055 - RNA, 19 nt, Artificial Sequence
  Description of Artificial Sequence: Synthetic oligonucleotide
  Sense Strand Starting at position 1036 of SEQ ID NO: 315522
uucucuagaugacauugaa

SEQ ID NO: 400056 - RNA, 19 nt, Artificial Sequence
  Description of Artificial Sequence: Synthetic oligonucleotide
  Antisense Strand to SEQ ID NO: 400055
uucaaugucaucuagagaa

SEQ ID NO: 400057 - RNA, 19 nt, Artificial Sequence
  Description of Artificial Sequence: Synthetic oligonucleotide
  Sense Strand Starting at position 1036 of SEQ ID NO: 315536
uugaauaaguccuugagcu

SEQ ID NO: 400058 - RNA, 19 nt, Artificial Sequence
  Description of Artificial Sequence: Synthetic oligonucleotide
  Antisense Strand to SEQ ID NO: 400057
agcucaaggacuuauucaa

SEQ ID NO: 400059 - RNA, 19 nt, Artificial Sequence
  Description of Artificial Sequence: Synthetic oligonucleotide
  Sense Strand Starting at position 1036 of SEQ ID NO: 315537
ugaauaaguccuugagcuc

SEQ ID NO: 400060 - RNA, 19 nt, Artificial Sequence
  Description of Artificial Sequence: Synthetic oligonucleotide
  Antisense Strand to SEQ ID NO: 400059
gagcucaaggacuuauuca

SEQ ID NO: 400061 - RNA, 19 nt, Artificial Sequence
  Description of Artificial Sequence: Synthetic oligonucleotide
  Sense Strand Starting at position 1036 of SEQ ID NO: 315574
ccacuuguaugauauggua

SEQ ID NO: 400062 - RNA, 19 nt, Artificial Sequence
  Description of Artificial Sequence: Synthetic oligonucleotide
  Antisense Strand to SEQ ID NO: 400061
uaccauaucauacaagugg

SEQ ID NO: 400063 - RNA, 19 nt, Artificial Sequence
  Description of Artificial Sequence: Synthetic oligonucleotide
  Sense Strand Starting at position 1036 of SEQ ID NO: 315576
acuuguaugauaugguagu

SEQ ID NO: 400064 - RNA, 19 nt, Artificial Sequence
  Description of Artificial Sequence: Synthetic oligonucleotide
  Antisense Strand to SEQ ID NO: 400063
acuaccauaucauacaagu

SEQ ID NO: 400065 - RNA, 19 nt, Artificial Sequence
  Description of Artificial Sequence: Synthetic oligonucleotide
  Sense Strand Starting at position 1036 of SEQ ID NO: 315582
augauaugguagugaugac

SEQ ID NO: 400066 - RNA, 19 nt, Artificial Sequence
  Description of Artificial Sequence: Synthetic oligonucleotide
  Antisense Strand to SEQ ID NO: 400065
gucaucacuaccauaucau

SEQ ID NO: 400067 - RNA, 19 nt, Artificial Sequence
  Description of Artificial Sequence: Synthetic oligonucleotide
  Sense Strand Starting at position 1036 of SEQ ID NO: 315773
gcccaauucuaacugagug

SEQ ID NO: 400068 - RNA, 19 nt, Artificial Sequence
  Description of Artificial Sequence: Synthetic oligonucleotide
  Antisense Strand to SEQ ID NO: 400067
cacucaguuagaauugggc

SEQ ID NO: 400069 - RNA, 19 nt, Artificial Sequence
  Description of Artificial Sequence: Synthetic oligonucleotide
  Sense Strand Starting at position 1036 of SEQ ID NO: 315778
auucuaacugaguggagau

SEQ ID NO: 400070 - RNA, 19 nt, Artificial Sequence
  Description of Artificial Sequence: Synthetic oligonucleotide
  Antisense Strand to SEQ ID NO: 400069
aucuccacucaguuagaau

SEQ ID NO: 400071 - RNA, 19 nt, Artificial Sequence
  Description of Artificial Sequence: Synthetic oligonucleotide
  Sense Strand Starting at position 1036 of SEQ ID NO: 315798
aggucaaacagauggaguu

SEQ ID NO: 400072 - RNA, 19 nt, Artificial Sequence
  Description of Artificial Sequence: Synthetic oligonucleotide
  Antisense Strand to SEQ ID NO: 400071
aacuccaucuguuugaccu

SEQ ID NO: 400073 - RNA, 19 nt, Artificial Sequence
  Description of Artificial Sequence: Synthetic oligonucleotide
  Sense Strand Starting at position 1036 of SEQ ID NO: 315873
cccacuagauccugaagga

SEQ ID NO: 400074 - RNA, 19 nt, Artificial Sequence
  Description of Artificial Sequence: Synthetic oligonucleotide
  Antisense Strand to SEQ ID NO: 400073
uccuucaggaucuaguggg

SEQ ID NO: 400075 - RNA, 19 nt, Artificial Sequence
  Description of Artificial Sequence: Synthetic oligonucleotide
  Sense Strand Starting at position 1036 of SEQ ID NO: 315944
ugguuugccaucuggauga

SEQ ID NO: 400076 - RNA, 19 nt, Artificial Sequence
  Description of Artificial Sequence: Synthetic oligonucleotide
  Antisense Strand to SEQ ID NO: 400075
ucauccagauggcaaacca

SEQ ID NO: 400077 - RNA, 19 nt, Artificial Sequence
  Description of Artificial Sequence: Synthetic oligonucleotide
  Sense Strand Starting at position 1036 of SEQ ID NO: 315948
uugccaucuggaugauacu

SEQ ID NO: 400078 - RNA, 19 nt, Artificial Sequence
  Description of Artificial Sequence: Synthetic oligonucleotide
  Antisense Strand to SEQ ID NO: 400077
aguaucauccagauggcaa

SEQ ID NO: 400079 - RNA, 19 nt, Artificial Sequence
  Description of Artificial Sequence: Synthetic oligonucleotide
  Sense Strand Starting at position 1036 of SEQ ID NO: 315957
ggaugauacugccuaggcu

SEQ ID NO: 400080 - RNA, 19 nt, Artificial Sequence
  Description of Artificial Sequence: Synthetic oligonucleotide
  Antisense Strand to SEQ ID NO: 400079
agccuaggcaguaucaucc

SEQ ID NO: 400081 - RNA, 19 nt, Artificial Sequence
  Description of Artificial Sequence: Synthetic oligonucleotide
  Sense Strand Starting at position 1036 of SEQ ID NO: 316010
cgagcagaugccugggaau

SEQ ID NO: 400082 - RNA, 19 nt, Artificial Sequence
  Description of Artificial Sequence: Synthetic oligonucleotide
  Antisense Strand to SEQ ID NO: 400081
auucccaggcaucugcucg

SEQ ID NO: 400083 - RNA, 19 nt, Artificial Sequence
  Description of Artificial Sequence: Synthetic oligonucleotide
  Sense Strand Starting at position 1036 of SEQ ID NO: 316103
aagagugaguccugcacua

SEQ ID NO: 400084 - RNA, 19 nt, Artificial Sequence
  Description of Artificial Sequence: Synthetic oligonucleotide
  Antisense Strand to SEQ ID NO: 400083
uagugcaggacucacucuu

SEQ ID NO: 400085 - RNA, 19 nt, Artificial Sequence
  Description of Artificial Sequence: Synthetic oligonucleotide
  Sense Strand Starting at position 1036 of SEQ ID NO: 316105
gagugaguccugcacuauc

SEQ ID NO: 400086 - RNA, 19 nt, Artificial Sequence
  Description of Artificial Sequence: Synthetic oligonucleotide
  Antisense Strand to SEQ ID NO: 400085
gauagugcaggacucacuc

SEQ ID NO: 400087 - RNA, 19 nt, Artificial Sequence
  Description of Artificial Sequence: Synthetic oligonucleotide
  Sense Strand Starting at position 1036 of SEQ ID NO: 316108
ugaguccugcacuaucuua

SEQ ID NO: 400088 - RNA, 19 nt, Artificial Sequence
  Description of Artificial Sequence: Synthetic oligonucleotide
  Antisense Strand to SEQ ID NO: 400087
uaagauagugcaggacuca

SEQ ID NO: 400089 - RNA, 19 nt, Artificial Sequence
  Description of Artificial Sequence: Synthetic oligonucleotide
  Sense Strand Starting at position 1036 of SEQ ID NO: 316508
ccgagaucucuacaugguc

SEQ ID NO: 400090 - RNA, 19 nt, Artificial Sequence
  Description of Artificial Sequence: Synthetic oligonucleotide
  Antisense Strand to SEQ ID NO: 400089
gaccauguagagaucucgg

SEQ ID NO: 400091 - RNA, 19 nt, Artificial Sequence
  Description of Artificial Sequence: Synthetic oligonucleotide
  Sense Strand Starting at position 1036 of SEQ ID NO: 316511
agaucucuacauggucuaa

SEQ ID NO: 400092 - RNA, 19 nt, Artificial Sequence
  Description of Artificial Sequence: Synthetic oligonucleotide
  Antisense Strand to SEQ ID NO: 400091
uuagaccauguagagaucu

SEQ ID NO: 400093 - RNA, 19 nt, Artificial Sequence
  Description of Artificial Sequence: Synthetic oligonucleotide
  Sense Strand Starting at position 1036 of SEQ ID NO: 316523
ggucuaaacgcgcagagau

SEQ ID NO: 400094 - RNA, 19 nt, Artificial Sequence
  Description of Artificial Sequence: Synthetic oligonucleotide
  Antisense Strand to SEQ ID NO: 400093
aucucugcgcguuuagacc

SEQ ID NO: 400095 - RNA, 19 nt, Artificial Sequence
  Description of Artificial Sequence: Synthetic oligonucleotide
  Sense Strand Starting at position 1036 of SEQ ID NO: 317199
gagcgaucccugcauccua

SEQ ID NO: 400096 - RNA, 19 nt, Artificial Sequence
  Description of Artificial Sequence: Synthetic oligonucleotide
  Antisense Strand to SEQ ID NO: 400095
uaggaugcagggaucgcuc

SEQ ID NO: 400097 - RNA, 19 nt, Artificial Sequence
  Description of Artificial Sequence: Synthetic oligonucleotide
  Sense Strand Starting at position 1036 of SEQ ID NO: 317777
acacaugcacccugagaca

SEQ ID NO: 400098 - RNA, 19 nt, Artificial Sequence
  Description of Artificial Sequence: Synthetic oligonucleotide
  Antisense Strand to SEQ ID NO: 400097
ugucucagggugcaugugu

SEQ ID NO: 400099 - RNA, 19 nt, Artificial Sequence
  Description of Artificial Sequence: Synthetic oligonucleotide
  Sense Strand Starting at position 1036 of SEQ ID NO: 317950
ccacacuuuccuggagaca

SEQ ID NO: 400100 - RNA, 19 nt, Artificial Sequence
  Description of Artificial Sequence: Synthetic oligonucleotide
  Antisense Strand to SEQ ID NO: 400099
ugucuccaggaaagugugg

SEQ ID NO: 400101 - RNA, 19 nt, Artificial Sequence
  Description of Artificial Sequence: Synthetic oligonucleotide
  Sense Strand Starting at position 1036 of SEQ ID NO: 317984
cagaaaucugcacaauggu

SEQ ID NO: 400102 - RNA, 19 nt, Artificial Sequence
  Description of Artificial Sequence: Synthetic oligonucleotide
  Antisense Strand to SEQ ID NO: 400101
accauugugcagauuucug

SEQ ID NO: 400103 - RNA, 19 nt, Artificial Sequence
  Description of Artificial Sequence: Synthetic oligonucleotide
  Sense Strand Starting at position 1036 of SEQ ID NO: 318219
ggagucacauacuuacaca

SEQ ID NO: 400104 - RNA, 19 nt, Artificial Sequence
  Description of Artificial Sequence: Synthetic oligonucleotide
  Antisense Strand to SEQ ID NO: 400103
uguguaaguaugugacucc

SEQ ID NO: 400105 - RNA, 19 nt, Artificial Sequence
  Description of Artificial Sequence: Synthetic oligonucleotide
  Sense Strand Starting at position 1036 of SEQ ID NO: 318244
guuucucacucagagacau

SEQ ID NO: 400106 - RNA, 19 nt, Artificial Sequence
  Description of Artificial Sequence: Synthetic oligonucleotide
  Antisense Strand to SEQ ID NO: 400105
augucucugagugagaaac

SEQ ID NO: 400107 - RNA, 19 nt, Artificial Sequence
  Description of Artificial Sequence: Synthetic oligonucleotide
  Sense Strand Starting at position 1036 of SEQ ID NO: 318283
ggagacauacgcugacaaa

SEQ ID NO: 400108 - RNA, 19 nt, Artificial Sequence
  Description of Artificial Sequence: Synthetic oligonucleotide
  Antisense Strand to SEQ ID NO: 400107
uuugucagcguaugucucc

SEQ ID NO: 400109 - RNA, 19 nt, Artificial Sequence
  Description of Artificial Sequence: Synthetic oligonucleotide
  Sense Strand Starting at position 1036 of SEQ ID NO: 318335
gggacacacuucuuguuua

SEQ ID NO: 400110 - RNA, 19 nt, Artificial Sequence
  Description of Artificial Sequence: Synthetic oligonucleotide
  Antisense Strand to SEQ ID NO: 400109
uaaacaagaaguguguccc

SEQ ID NO: 400111 - RNA, 19 nt, Artificial Sequence
  Description of Artificial Sequence: Synthetic oligonucleotide
  Sense Strand Starting at position 1036 of SEQ ID NO: 318336
ggacacacuucuuguuuaa

SEQ ID NO: 400112 - RNA, 19 nt, Artificial Sequence
  Description of Artificial Sequence: Synthetic oligonucleotide
  Antisense Strand to SEQ ID NO: 400111
uuaaacaagaagugugucc

SEQ ID NO: 400113 - RNA, 19 nt, Artificial Sequence
  Description of Artificial Sequence: Synthetic oligonucleotide
  Sense Strand Starting at position 1036 of SEQ ID NO: 318513
aaaguacagucauuggaag

SEQ ID NO: 400114 - RNA, 19 nt, Artificial Sequence
  Description of Artificial Sequence: Synthetic oligonucleotide
  Antisense Strand to SEQ ID NO: 400113
cuuccaaugacuguacuuu

SEQ ID NO: 400115 - RNA, 19 nt, Artificial Sequence
  Description of Artificial Sequence: Synthetic oligonucleotide
  Sense Strand Starting at position 1036 of SEQ ID NO: 318804
guaggaaagucaguccaca

SEQ ID NO: 400116 - RNA, 19 nt, Artificial Sequence
  Description of Artificial Sequence: Synthetic oligonucleotide
  Antisense Strand to SEQ ID NO: 400115
uguggacugacuuuccuac

SEQ ID NO: 400117 - RNA, 19 nt, Artificial Sequence
  Description of Artificial Sequence: Synthetic oligonucleotide
  Sense Strand Starting at position 1036 of SEQ ID NO: 318812
gucaguccacaggaaaguu

SEQ ID NO: 400118 - RNA, 19 nt, Artificial Sequence
  Description of Artificial Sequence: Synthetic oligonucleotide
  Antisense Strand to SEQ ID NO: 400117
aacuuuccuguggacugac

SEQ ID NO: 400119 - RNA, 19 nt, Artificial Sequence
  Description of Artificial Sequence: Synthetic oligonucleotide
  Sense Strand Starting at position 1036 of SEQ ID NO: 319106
ugaagcuucuacuugcaaa

SEQ ID NO: 400120 - RNA, 19 nt, Artificial Sequence
  Description of Artificial Sequence: Synthetic oligonucleotide
  Antisense Strand to SEQ ID NO: 400119
uuugcaaguagaagcuuca

SEQ ID NO: 400121 - RNA, 19 nt, Artificial Sequence
  Description of Artificial Sequence: Synthetic oligonucleotide
  Sense Strand Starting at position 1036 of SEQ ID NO: 319201
guccauauguagcagaagu

SEQ ID NO: 400122 - RNA, 19 nt, Artificial Sequence
  Description of Artificial Sequence: Synthetic oligonucleotide
  Antisense Strand to SEQ ID NO: 400121
acuucugcuacauauggac

SEQ ID NO: 400123 - RNA, 19 nt, Artificial Sequence
  Description of Artificial Sequence: Synthetic oligonucleotide
  Sense Strand Starting at position 1037 of SEQ ID NO: 315278
caugcugagugagucaaua

SEQ ID NO: 400124 - RNA, 19 nt, Artificial Sequence
  Description of Artificial Sequence: Synthetic oligonucleotide
  Antisense Strand to SEQ ID NO: 400123
uauugacucacucagcaug

SEQ ID NO: 400125 - RNA, 19 nt, Artificial Sequence
  Description of Artificial Sequence: Synthetic oligonucleotide
  Sense Strand Starting at position 1037 of SEQ ID NO: 315280
ugcugagugagucaauacu

SEQ ID NO: 400126 - RNA, 19 nt, Artificial Sequence
  Description of Artificial Sequence: Synthetic oligonucleotide
  Antisense Strand to SEQ ID NO: 400125
aguauugacucacucagca

SEQ ID NO: 400127 - RNA, 19 nt, Artificial Sequence
  Description of Artificial Sequence: Synthetic oligonucleotide
  Sense Strand Starting at position 1037 of SEQ ID NO: 315286
gugagucaauacuagaauu

SEQ ID NO: 400128 - RNA, 19 nt, Artificial Sequence
  Description of Artificial Sequence: Synthetic oligonucleotide
  Antisense Strand to SEQ ID NO: 400127
aauucuaguauugacucac

SEQ ID NO: 400129 - RNA, 19 nt, Artificial Sequence
  Description of Artificial Sequence: Synthetic oligonucleotide
  Sense Strand Starting at position 1037 of SEQ ID NO: 315440
ggcucaguucuaggcuuau

SEQ ID NO: 400130 - RNA, 19 nt, Artificial Sequence
  Description of Artificial Sequence: Synthetic oligonucleotide
  Antisense Strand to SEQ ID NO: 400129
auaagccuagaacugagcc

SEQ ID NO: 400131 - RNA, 19 nt, Artificial Sequence
  Description of Artificial Sequence: Synthetic oligonucleotide
  Sense Strand Starting at position 1037 of SEQ ID NO: 315472
aguagaucucaaggugucu

SEQ ID NO: 400132 - RNA, 19 nt, Artificial Sequence
  Description of Artificial Sequence: Synthetic oligonucleotide
  Antisense Strand to SEQ ID NO: 400131
agacaccuugagaucuacu

SEQ ID NO: 400133 - RNA, 19 nt, Artificial Sequence
  Description of Artificial Sequence: Synthetic oligonucleotide
  Sense Strand Starting at position 1037 of SEQ ID NO: 315513
uccacugauucucuagaug

SEQ ID NO: 400134 - RNA, 19 nt, Artificial Sequence
  Description of Artificial Sequence: Synthetic oligonucleotide
  Antisense Strand to SEQ ID NO: 400133
caucuagagaaucagugga

SEQ ID NO: 400135 - RNA, 19 nt, Artificial Sequence
  Description of Artificial Sequence: Synthetic oligonucleotide
  Sense Strand Starting at position 1037 of SEQ ID NO: 315521
uucucuagaugacauugaa

SEQ ID NO: 400136 - RNA, 19 nt, Artificial Sequence
  Description of Artificial Sequence: Synthetic oligonucleotide
  Antisense Strand to SEQ ID NO: 400135
uucaaugucaucuagagaa

SEQ ID NO: 400137 - RNA, 19 nt, Artificial Sequence
  Description of Artificial Sequence: Synthetic oligonucleotide
  Sense Strand Starting at position 1037 of SEQ ID NO: 315535
uugaauaaguccuugagcu

SEQ ID NO: 400138 - RNA, 19 nt, Artificial Sequence
  Description of Artificial Sequence: Synthetic oligonucleotide
  Antisense Strand to SEQ ID NO: 400137
agcucaaggacuuauucaa

SEQ ID NO: 400139 - RNA, 19 nt, Artificial Sequence
  Description of Artificial Sequence: Synthetic oligonucleotide
  Sense Strand Starting at position 1037 of SEQ ID NO: 315536
ugaauaaguccuugagcuc

SEQ ID NO: 400140 - RNA, 19 nt, Artificial Sequence
  Description of Artificial Sequence: Synthetic oligonucleotide
  Antisense Strand to SEQ ID NO: 400139
gagcucaaggacuuauuca

SEQ ID NO: 400141 - RNA, 19 nt, Artificial Sequence
  Description of Artificial Sequence: Synthetic oligonucleotide
  Sense Strand Starting at position 1037 of SEQ ID NO: 315573
ccacuuguaugauauggua

SEQ ID NO: 400142 - RNA, 19 nt, Artificial Sequence
  Description of Artificial Sequence: Synthetic oligonucleotide
  Antisense Strand to SEQ ID NO: 400141
uaccauaucauacaagugg

SEQ ID NO: 400143 - RNA, 19 nt, Artificial Sequence
  Description of Artificial Sequence: Synthetic oligonucleotide
  Sense Strand Starting at position 1037 of SEQ ID NO: 315575
acuuguaugauaugguagu

SEQ ID NO: 400144 - RNA, 19 nt, Artificial Sequence
  Description of Artificial Sequence: Synthetic oligonucleotide
  Antisense Strand to SEQ ID NO: 400143
acuaccauaucauacaagu

SEQ ID NO: 400145 - RNA, 19 nt, Artificial Sequence
  Description of Artificial Sequence: Synthetic oligonucleotide
  Sense Strand Starting at position 1037 of SEQ ID NO: 315581
augauaugguagugaugac

SEQ ID NO: 400146 - RNA, 19 nt, Artificial Sequence
  Description of Artificial Sequence: Synthetic oligonucleotide
  Antisense Strand to SEQ ID NO: 400145
gucaucacuaccauaucau

SEQ ID NO: 400147 - RNA, 19 nt, Artificial Sequence
  Description of Artificial Sequence: Synthetic oligonucleotide
  Sense Strand Starting at position 1037 of SEQ ID NO: 315772
gcccaauucuaacugagug

SEQ ID NO: 400148 - RNA, 19 nt, Artificial Sequence
  Description of Artificial Sequence: Synthetic oligonucleotide
  Antisense Strand to SEQ ID NO: 400147
cacucaguuagaauugggc

SEQ ID NO: 400149 - RNA, 19 nt, Artificial Sequence
  Description of Artificial Sequence: Synthetic oligonucleotide
  Sense Strand Starting at position 1037 of SEQ ID NO: 315777
auucuaacugaguggagau

SEQ ID NO: 400150 - RNA, 19 nt, Artificial Sequence
  Description of Artificial Sequence: Synthetic oligonucleotide
  Antisense Strand to SEQ ID NO: 400149
aucuccacucaguuagaau

SEQ ID NO: 400151 - RNA, 19 nt, Artificial Sequence
  Description of Artificial Sequence: Synthetic oligonucleotide
  Sense Strand Starting at position 1037 of SEQ ID NO: 315797
aggucaaacagauggaguu

SEQ ID NO: 400152 - RNA, 19 nt, Artificial Sequence
  Description of Artificial Sequence: Synthetic oligonucleotide
  Antisense Strand to SEQ ID NO: 400151
aacuccaucuguuugaccu

SEQ ID NO: 400153 - RNA, 19 nt, Artificial Sequence
  Description of Artificial Sequence: Synthetic oligonucleotide
  Sense Strand Starting at position 1037 of SEQ ID NO: 315872
cccacuagauccugaagga

SEQ ID NO: 400154 - RNA, 19 nt, Artificial Sequence
  Description of Artificial Sequence: Synthetic oligonucleotide
  Antisense Strand to SEQ ID NO: 400153
uccuucaggaucuaguggg

SEQ ID NO: 400155 - RNA, 19 nt, Artificial Sequence
  Description of Artificial Sequence: Synthetic oligonucleotide
  Sense Strand Starting at position 1037 of SEQ ID NO: 315943
ugguuugccaucuggauga

SEQ ID NO: 400156 - RNA, 19 nt, Artificial Sequence
  Description of Artificial Sequence: Synthetic oligonucleotide
  Antisense Strand to SEQ ID NO: 400155
ucauccagauggcaaacca

SEQ ID NO: 400157 - RNA, 19 nt, Artificial Sequence
  Description of Artificial Sequence: Synthetic oligonucleotide
  Sense Strand Starting at position 1037 of SEQ ID NO: 315947
uugccaucuggaugauacu

SEQ ID NO: 400158 - RNA, 19 nt, Artificial Sequence
  Description of Artificial Sequence: Synthetic oligonucleotide
  Antisense Strand to SEQ ID NO: 400157
aguaucauccagauggcaa

SEQ ID NO: 400159 - RNA, 19 nt, Artificial Sequence
  Description of Artificial Sequence: Synthetic oligonucleotide
  Sense Strand Starting at position 1037 of SEQ ID NO: 315956
ggaugauacugccuaggcu

SEQ ID NO: 400160 - RNA, 19 nt, Artificial Sequence
  Description of Artificial Sequence: Synthetic oligonucleotide
  Antisense Strand to SEQ ID NO: 400159
agccuaggcaguaucaucc

SEQ ID NO: 400161 - RNA, 19 nt, Artificial Sequence
  Description of Artificial Sequence: Synthetic oligonucleotide
  Sense Strand Starting at position 1037 of SEQ ID NO: 316009
cgagcagaugccugggaau

SEQ ID NO: 400162 - RNA, 19 nt, Artificial Sequence
  Description of Artificial Sequence: Synthetic oligonucleotide
  Antisense Strand to SEQ ID NO: 400161
auucccaggcaucugcucg

SEQ ID NO: 400163 - RNA, 19 nt, Artificial Sequence
  Description of Artificial Sequence: Synthetic oligonucleotide
  Sense Strand Starting at position 1037 of SEQ ID NO: 316102
aagagugaguccugcacua

SEQ ID NO: 400164 - RNA, 19 nt, Artificial Sequence
  Description of Artificial Sequence: Synthetic oligonucleotide
  Antisense Strand to SEQ ID NO: 400163
uagugcaggacucacucuu

SEQ ID NO: 400165 - RNA, 19 nt, Artificial Sequence
  Description of Artificial Sequence: Synthetic oligonucleotide
  Sense Strand Starting at position 1037 of SEQ ID NO: 316104
gagugaguccugcacuauc

SEQ ID NO: 400166 - RNA, 19 nt, Artificial Sequence
  Description of Artificial Sequence: Synthetic oligonucleotide
  Antisense Strand to SEQ ID NO: 400165
gauagugcaggacucacuc

SEQ ID NO: 400167 - RNA, 19 nt, Artificial Sequence
  Description of Artificial Sequence: Synthetic oligonucleotide
  Sense Strand Starting at position 1037 of SEQ ID NO: 316107
ugaguccugcacuaucuua

SEQ ID NO: 400168 - RNA, 19 nt, Artificial Sequence
  Description of Artificial Sequence: Synthetic oligonucleotide
  Antisense Strand to SEQ ID NO: 400167
uaagauagugcaggacuca

SEQ ID NO: 400169 - RNA, 19 nt, Artificial Sequence
  Description of Artificial Sequence: Synthetic oligonucleotide
  Sense Strand Starting at position 1037 of SEQ ID NO: 316507
ccgagaucucuacaugguc

SEQ ID NO: 400170 - RNA, 19 nt, Artificial Sequence
  Description of Artificial Sequence: Synthetic oligonucleotide
  Antisense Strand to SEQ ID NO: 400169
gaccauguagagaucucgg

SEQ ID NO: 400171 - RNA, 19 nt, Artificial Sequence
  Description of Artificial Sequence: Synthetic oligonucleotide
  Sense Strand Starting at position 1037 of SEQ ID NO: 316510
agaucucuacauggucuaa

SEQ ID NO: 400172 - RNA, 19 nt, Artificial Sequence
  Description of Artificial Sequence: Synthetic oligonucleotide
  Antisense Strand to SEQ ID NO: 400171
uuagaccauguagagaucu

SEQ ID NO: 400173 - RNA, 19 nt, Artificial Sequence
  Description of Artificial Sequence: Synthetic oligonucleotide
  Sense Strand Starting at position 1037 of SEQ ID NO: 316522
ggucuaaacgcgcagagau

SEQ ID NO: 400174 - RNA, 19 nt, Artificial Sequence
  Description of Artificial Sequence: Synthetic oligonucleotide
  Antisense Strand to SEQ ID NO: 400173
aucucugcgcguuuagacc

SEQ ID NO: 400175 - RNA, 19 nt, Artificial Sequence
  Description of Artificial Sequence: Synthetic oligonucleotide
  Sense Strand Starting at position 1037 of SEQ ID NO: 317198
gagcgaucccugcauccua

SEQ ID NO: 400176 - RNA, 19 nt, Artificial Sequence
  Description of Artificial Sequence: Synthetic oligonucleotide
  Antisense Strand to SEQ ID NO: 400175
uaggaugcagggaucgcuc

SEQ ID NO: 400177 - RNA, 19 nt, Artificial Sequence
  Description of Artificial Sequence: Synthetic oligonucleotide
  Sense Strand Starting at position 1037 of SEQ ID NO: 317776
acacaugcacccugagaca

SEQ ID NO: 400178 - RNA, 19 nt, Artificial Sequence
  Description of Artificial Sequence: Synthetic oligonucleotide
  Antisense Strand to SEQ ID NO: 400177
ugucucagggugcaugugu

SEQ ID NO: 400179 - RNA, 19 nt, Artificial Sequence
  Description of Artificial Sequence: Synthetic oligonucleotide
  Sense Strand Starting at position 1037 of SEQ ID NO: 317949
ccacacuuuccuggagaca

SEQ ID NO: 400180 - RNA, 19 nt, Artificial Sequence
  Description of Artificial Sequence: Synthetic oligonucleotide
  Antisense Strand to SEQ ID NO: 400179
ugucuccaggaaagugugg

SEQ ID NO: 400181 - RNA, 19 nt, Artificial Sequence
  Description of Artificial Sequence: Synthetic oligonucleotide
  Sense Strand Starting at position 1037 of SEQ ID NO: 317983
cagaaaucugcacaauggu

SEQ ID NO: 400182 - RNA, 19 nt, Artificial Sequence
  Description of Artificial Sequence: Synthetic oligonucleotide
  Antisense Strand to SEQ ID NO: 400181
accauugugcagauuucug

SEQ ID NO: 400183 - RNA, 19 nt, Artificial Sequence
  Description of Artificial Sequence: Synthetic oligonucleotide
  Sense Strand Starting at position 1037 of SEQ ID NO: 318218
ggagucacauacuuacaca

SEQ ID NO: 400184 - RNA, 19 nt, Artificial Sequence
  Description of Artificial Sequence: Synthetic oligonucleotide
  Antisense Strand to SEQ ID NO: 400183
uguguaaguaugugacucc

SEQ ID NO: 400185 - RNA, 19 nt, Artificial Sequence
  Description of Artificial Sequence: Synthetic oligonucleotide
  Sense Strand Starting at position 1037 of SEQ ID NO: 318243
guuucucacucagagacau

SEQ ID NO: 400186 - RNA, 19 nt, Artificial Sequence
  Description of Artificial Sequence: Synthetic oligonucleotide
  Antisense Strand to SEQ ID NO: 400185
augucucugagugagaaac

SEQ ID NO: 400187 - RNA, 19 nt, Artificial Sequence
  Description of Artificial Sequence: Synthetic oligonucleotide
  Sense Strand Starting at position 1037 of SEQ ID NO: 318282
ggagacauacgcugacaaa

SEQ ID NO: 400188 - RNA, 19 nt, Artificial Sequence
  Description of Artificial Sequence: Synthetic oligonucleotide
  Antisense Strand to SEQ ID NO: 400187
uuugucagcguaugucucc

SEQ ID NO: 400189 - RNA, 19 nt, Artificial Sequence
  Description of Artificial Sequence: Synthetic oligonucleotide
  Sense Strand Starting at position 1037 of SEQ ID NO: 318334
gggacacacuucuuguuua

SEQ ID NO: 400190 - RNA, 19 nt, Artificial Sequence
  Description of Artificial Sequence: Synthetic oligonucleotide
  Antisense Strand to SEQ ID NO: 400189
uaaacaagaaguguguccc

SEQ ID NO: 400191 - RNA, 19 nt, Artificial Sequence
  Description of Artificial Sequence: Synthetic oligonucleotide
  Sense Strand Starting at position 1037 of SEQ ID NO: 318335
ggacacacuucuuguuuaa

SEQ ID NO: 400192 - RNA, 19 nt, Artificial Sequence
  Description of Artificial Sequence: Synthetic oligonucleotide
  Antisense Strand to SEQ ID NO: 400191
uuaaacaagaagugugucc

SEQ ID NO: 400193 - RNA, 19 nt, Artificial Sequence
  Description of Artificial Sequence: Synthetic oligonucleotide
  Sense Strand Starting at position 1037 of SEQ ID NO: 318512
aaaguacagucauuggaag

SEQ ID NO: 400194 - RNA, 19 nt, Artificial Sequence
  Description of Artificial Sequence: Synthetic oligonucleotide
  Antisense Strand to SEQ ID NO: 400193
cuuccaaugacuguacuuu

SEQ ID NO: 400195 - RNA, 19 nt, Artificial Sequence
  Description of Artificial Sequence: Synthetic oligonucleotide
  Sense Strand Starting at position 1037 of SEQ ID NO: 318803
guaggaaagucaguccaca

SEQ ID NO: 400196 - RNA, 19 nt, Artificial Sequence
  Description of Artificial Sequence: Synthetic oligonucleotide
  Antisense Strand to SEQ ID NO: 400195
uguggacugacuuuccuac

SEQ ID NO: 400197 - RNA, 19 nt, Artificial Sequence
  Description of Artificial Sequence: Synthetic oligonucleotide
  Sense Strand Starting at position 1037 of SEQ ID NO: 318811
gucaguccacaggaaaguu

SEQ ID NO: 400198 - RNA, 19 nt, Artificial Sequence
  Description of Artificial Sequence: Synthetic oligonucleotide
  Antisense Strand to SEQ ID NO: 400197
aacuuuccuguggacugac

SEQ ID NO: 400199 - RNA, 19 nt, Artificial Sequence
  Description of Artificial Sequence: Synthetic oligonucleotide
  Sense Strand Starting at position 1037 of SEQ ID NO: 319105
ugaagcuucuacuugcaaa

SEQ ID NO: 400200 - RNA, 19 nt, Artificial Sequence
  Description of Artificial Sequence: Synthetic oligonucleotide
  Antisense Strand to SEQ ID NO: 400199
uuugcaaguagaagcuuca

SEQ ID NO: 400201 - RNA, 19 nt, Artificial Sequence
  Description of Artificial Sequence: Synthetic oligonucleotide
  Sense Strand Starting at position 1037 of SEQ ID NO: 319200
guccauauguagcagaagu

SEQ ID NO: 400202 - RNA, 19 nt, Artificial Sequence
  Description of Artificial Sequence: Synthetic oligonucleotide
  Antisense Strand to SEQ ID NO: 400201
acuucugcuacauauggac

SEQ ID NO: 400203 - RNA, 19 nt, Artificial Sequence
  Description of Artificial Sequence: Synthetic oligonucleotide
  Sense Strand Starting at position 1038 of SEQ ID NO: 315386
uaaggaguuuccuccaugu

SEQ ID NO: 400204 - RNA, 19 nt, Artificial Sequence
  Description of Artificial Sequence: Synthetic oligonucleotide
  Antisense Strand to SEQ ID NO: 400203
acauggaggaaacuccuua

SEQ ID NO: 400205 - RNA, 19 nt, Artificial Sequence
  Description of Artificial Sequence: Synthetic oligonucleotide
  Sense Strand Starting at position 1038 of SEQ ID NO: 315399
ccaugugccgagcuguaua

SEQ ID NO: 400206 - RNA, 19 nt, Artificial Sequence
  Description of Artificial Sequence: Synthetic oligonucleotide
  Antisense Strand to SEQ ID NO: 400205
uauacagcucggcacaugg

SEQ ID NO: 400207 - RNA, 19 nt, Artificial Sequence
  Description of Artificial Sequence: Synthetic oligonucleotide
  Sense Strand Starting at position 1038 of SEQ ID NO: 315586
uucuaaugcugaguccaca

SEQ ID NO: 400208 - RNA, 19 nt, Artificial Sequence
  Description of Artificial Sequence: Synthetic oligonucleotide
  Antisense Strand to SEQ ID NO: 400207
uguggacucagcauuagaa

SEQ ID NO: 400209 - RNA, 19 nt, Artificial Sequence
  Description of Artificial Sequence: Synthetic oligonucleotide
  Sense Strand Starting at position 1038 of SEQ ID NO: 315625
gccugucuagaauguaaag

SEQ ID NO: 400210 - RNA, 19 nt, Artificial Sequence
  Description of Artificial Sequence: Synthetic oligonucleotide
  Antisense Strand to SEQ ID NO: 400209
cuuuacauucuagacaggc

SEQ ID NO: 400211 - RNA, 19 nt, Artificial Sequence
  Description of Artificial Sequence: Synthetic oligonucleotide
  Sense Strand Starting at position 1038 of SEQ ID NO: 315645
aguuguuacacugaguucu

SEQ ID NO: 400212 - RNA, 19 nt, Artificial Sequence
  Description of Artificial Sequence: Synthetic oligonucleotide
  Antisense Strand to SEQ ID NO: 400211
agaacucaguguaacaacu

SEQ ID NO: 400213 - RNA, 19 nt, Artificial Sequence
  Description of Artificial Sequence: Synthetic oligonucleotide
  Sense Strand Starting at position 1038 of SEQ ID NO: 315653
cacugaguucuguaaagcu

SEQ ID NO: 400214 - RNA, 19 nt, Artificial Sequence
  Description of Artificial Sequence: Synthetic oligonucleotide
  Antisense Strand to SEQ ID NO: 400213
agcuuuacagaacucagug

SEQ ID NO: 400215 - RNA, 19 nt, Artificial Sequence
  Description of Artificial Sequence: Synthetic oligonucleotide
  Sense Strand Starting at position 1038 of SEQ ID NO: 315663
uguaaagcugcgguuaagu

SEQ ID NO: 400216 - RNA, 19 nt, Artificial Sequence
  Description of Artificial Sequence: Synthetic oligonucleotide
  Antisense Strand to SEQ ID NO: 400215
acuuaaccgcagcuuuaca

SEQ ID NO: 400217 - RNA, 19 nt, Artificial Sequence
  Description of Artificial Sequence: Synthetic oligonucleotide
  Sense Strand Starting at position 1038 of SEQ ID NO: 315696
aguuuacugagagguaguu

SEQ ID NO: 400218 - RNA, 19 nt, Artificial Sequence
  Description of Artificial Sequence: Synthetic oligonucleotide
  Antisense Strand to SEQ ID NO: 400217
aacuaccucucaguaaacu

SEQ ID NO: 400219 - RNA, 19 nt, Artificial Sequence
  Description of Artificial Sequence: Synthetic oligonucleotide
  Sense Strand Starting at position 1038 of SEQ ID NO: 315776
accagucaggguugaugaa

SEQ ID NO: 400220 - RNA, 19 nt, Artificial Sequence
  Description of Artificial Sequence: Synthetic oligonucleotide
  Antisense Strand to SEQ ID NO: 400219
uucaucaacccugacuggu

SEQ ID NO: 400221 - RNA, 19 nt, Artificial Sequence
  Description of Artificial Sequence: Synthetic oligonucleotide
  Sense Strand Starting at position 1038 of SEQ ID NO: 316084
gaguacuucuucccaggga

SEQ ID NO: 400222 - RNA, 19 nt, Artificial Sequence
  Description of Artificial Sequence: Synthetic oligonucleotide
  Antisense Strand to SEQ ID NO: 400221
ucccugggaagaaguacuc

SEQ ID NO: 400223 - RNA, 19 nt, Artificial Sequence
  Description of Artificial Sequence: Synthetic oligonucleotide
  Sense Strand Starting at position 1038 of SEQ ID NO: 316109
auuaucuggucccuguuaa

SEQ ID NO: 400224 - RNA, 19 nt, Artificial Sequence
  Description of Artificial Sequence: Synthetic oligonucleotide
  Antisense Strand to SEQ ID NO: 400223
uuaacagggaccagauaau

SEQ ID NO: 400225 - RNA, 19 nt, Artificial Sequence
  Description of Artificial Sequence: Synthetic oligonucleotide
  Sense Strand Starting at position 1038 of SEQ ID NO: 316249
gugagugauuuacaccuaa

SEQ ID NO: 400226 - RNA, 19 nt, Artificial Sequence
  Description of Artificial Sequence: Synthetic oligonucleotide
  Antisense Strand to SEQ ID NO: 400225
uuagguguaaaucacucac

SEQ ID NO: 400227 - RNA, 19 nt, Artificial Sequence
  Description of Artificial Sequence: Synthetic oligonucleotide
  Sense Strand Starting at position 1038 of SEQ ID NO: 316282
agaacacaguguucugauu

SEQ ID NO: 400228 - RNA, 19 nt, Artificial Sequence
  Description of Artificial Sequence: Synthetic oligonucleotide
  Antisense Strand to SEQ ID NO: 400227
aaucagaacacuguguucu

SEQ ID NO: 400229 - RNA, 19 nt, Artificial Sequence
  Description of Artificial Sequence: Synthetic oligonucleotide
  Sense Strand Starting at position 1038 of SEQ ID NO: 316290
guguucugauuucuagguu

SEQ ID NO: 400230 - RNA, 19 nt, Artificial Sequence
  Description of Artificial Sequence: Synthetic oligonucleotide
  Antisense Strand to SEQ ID NO: 400229
aaccuagaaaucagaacac

SEQ ID NO: 400231 - RNA, 19 nt, Artificial Sequence
  Description of Artificial Sequence: Synthetic oligonucleotide
  Sense Strand Starting at position 1038 of SEQ ID NO: 316361
augcauguacuagauauuc

SEQ ID NO: 400232 - RNA, 19 nt, Artificial Sequence
  Description of Artificial Sequence: Synthetic oligonucleotide
  Antisense Strand to SEQ ID NO: 400231
gaauaucuaguacaugcau

SEQ ID NO: 400233 - RNA, 19 nt, Artificial Sequence
  Description of Artificial Sequence: Synthetic oligonucleotide
  Sense Strand Starting at position 1038 of SEQ ID NO: 316370
cuagauauuccaggcucag

SEQ ID NO: 400234 - RNA, 19 nt, Artificial Sequence
  Description of Artificial Sequence: Synthetic oligonucleotide
  Antisense Strand to SEQ ID NO: 400233
cugagccuggaauaucuag

SEQ ID NO: 400235 - RNA, 19 nt, Artificial Sequence
  Description of Artificial Sequence: Synthetic oligonucleotide
  Sense Strand Starting at position 1038 of SEQ ID NO: 316438
ggaguaaguguggagugaa

SEQ ID NO: 400236 - RNA, 19 nt, Artificial Sequence
  Description of Artificial Sequence: Synthetic oligonucleotide
  Antisense Strand to SEQ ID NO: 400235
uucacuccacacuuacucc

SEQ ID NO: 400237 - RNA, 19 nt, Artificial Sequence
  Description of Artificial Sequence: Synthetic oligonucleotide
  Sense Strand Starting at position 1038 of SEQ ID NO: 316452
gugaauguacacugcagau

SEQ ID NO: 400238 - RNA, 19 nt, Artificial Sequence
  Description of Artificial Sequence: Synthetic oligonucleotide
  Antisense Strand to SEQ ID NO: 400237
aucugcaguguacauucac

SEQ ID NO: 400239 - RNA, 19 nt, Artificial Sequence
  Description of Artificial Sequence: Synthetic oligonucleotide
  Sense Strand Starting at position 1038 of SEQ ID NO: 316465
gcagaugccacagagacuu

SEQ ID NO: 400240 - RNA, 19 nt, Artificial Sequence
  Description of Artificial Sequence: Synthetic oligonucleotide
  Antisense Strand to SEQ ID NO: 400239
aagucucuguggcaucugc

SEQ ID NO: 400241 - RNA, 19 nt, Artificial Sequence
  Description of Artificial Sequence: Synthetic oligonucleotide
  Sense Strand Starting at position 1038 of SEQ ID NO: 316582
ucaaucaucucugcuggga

SEQ ID NO: 400242 - RNA, 19 nt, Artificial Sequence
  Description of Artificial Sequence: Synthetic oligonucleotide
  Antisense Strand to SEQ ID NO: 400241
ucccagcagagaugauuga

SEQ ID NO: 400243 - RNA, 19 nt, Artificial Sequence
  Description of Artificial Sequence: Synthetic oligonucleotide
  Sense Strand Starting at position 1038 of SEQ ID NO: 316712
cuguaaaguguugagaaga

SEQ ID NO: 400244 - RNA, 19 nt, Artificial Sequence
  Description of Artificial Sequence: Synthetic oligonucleotide
  Antisense Strand to SEQ ID NO: 400243
ucuucucaacacuuuacag

SEQ ID NO: 400245 - RNA, 19 nt, Artificial Sequence
  Description of Artificial Sequence: Synthetic oligonucleotide
  Sense Strand Starting at position 1038 of SEQ ID NO: 316782
gagggcucgguauacagua

SEQ ID NO: 400246 - RNA, 19 nt, Artificial Sequence
  Description of Artificial Sequence: Synthetic oligonucleotide
  Antisense Strand to SEQ ID NO: 400245
uacuguauaccgagcccuc

SEQ ID NO: 400247 - RNA, 19 nt, Artificial Sequence
  Description of Artificial Sequence: Synthetic oligonucleotide
  Sense Strand Starting at position 1038 of SEQ ID NO: 317841
uggucuuaugaugaauguu

SEQ ID NO: 400248 - RNA, 19 nt, Artificial Sequence
  Description of Artificial Sequence: Synthetic oligonucleotide
  Antisense Strand to SEQ ID NO: 400247
aacauucaucauaagacca

SEQ ID NO: 400249 - RNA, 19 nt, Artificial Sequence
  Description of Artificial Sequence: Synthetic oligonucleotide
  Sense Strand Starting at position 1038 of SEQ ID NO: 317844
ucuuaugaugaauguugua

SEQ ID NO: 400250 - RNA, 19 nt, Artificial Sequence
  Description of Artificial Sequence: Synthetic oligonucleotide
  Antisense Strand to SEQ ID NO: 400249
uacaacauucaucauaaga

SEQ ID NO: 400251 - RNA, 19 nt, Artificial Sequence
  Description of Artificial Sequence: Synthetic oligonucleotide
  Sense Strand Starting at position 1038 of SEQ ID NO: 317854
aauguuguaggaugaguga

SEQ ID NO: 400252 - RNA, 19 nt, Artificial Sequence
  Description of Artificial Sequence: Synthetic oligonucleotide
  Antisense Strand to SEQ ID NO: 400251
ucacucauccuacaacauu

SEQ ID NO: 400253 - RNA, 19 nt, Artificial Sequence
  Description of Artificial Sequence: Synthetic oligonucleotide
  Sense Strand Starting at position 1038 of SEQ ID NO: 317857
guuguaggaugagugacau

SEQ ID NO: 400254 - RNA, 19 nt, Artificial Sequence
  Description of Artificial Sequence: Synthetic oligonucleotide
  Antisense Strand to SEQ ID NO: 400253
augucacucauccuacaac

SEQ ID NO: 400255 - RNA, 19 nt, Artificial Sequence
  Description of Artificial Sequence: Synthetic oligonucleotide
  Sense Strand Starting at position 1038 of SEQ ID NO: 317881
gaguaaguagacuguccua

SEQ ID NO: 400256 - RNA, 19 nt, Artificial Sequence
  Description of Artificial Sequence: Synthetic oligonucleotide
  Antisense Strand to SEQ ID NO: 400255
uaggacagucuacuuacuc

SEQ ID NO: 400257 - RNA, 19 nt, Artificial Sequence
  Description of Artificial Sequence: Synthetic oligonucleotide
  Sense Strand Starting at position 1038 of SEQ ID NO: 317894
guccuagugcuuccuuguu

SEQ ID NO: 400258 - RNA, 19 nt, Artificial Sequence
  Description of Artificial Sequence: Synthetic oligonucleotide
  Antisense Strand to SEQ ID NO: 400257
aacaaggaagcacuaggac

SEQ ID NO: 400259 - RNA, 19 nt, Artificial Sequence
  Description of Artificial Sequence: Synthetic oligonucleotide
  Sense Strand Starting at position 1038 of SEQ ID NO: 318384
ggagauggucacugcuuga

SEQ ID NO: 400260 - RNA, 19 nt, Artificial Sequence
  Description of Artificial Sequence: Synthetic oligonucleotide
  Antisense Strand to SEQ ID NO: 400259
ucaagcagugaccaucucc

SEQ ID NO: 400261 - RNA, 19 nt, Artificial Sequence
  Description of Artificial Sequence: Synthetic oligonucleotide
  Sense Strand Starting at position 1038 of SEQ ID NO: 318388
auggucacugcuugaagga

SEQ ID NO: 400262 - RNA, 19 nt, Artificial Sequence
  Description of Artificial Sequence: Synthetic oligonucleotide
  Antisense Strand to SEQ ID NO: 400261
uccuucaagcagugaccau

SEQ ID NO: 400263 - RNA, 19 nt, Artificial Sequence
  Description of Artificial Sequence: Synthetic oligonucleotide
  Sense Strand Starting at position 1038 of SEQ ID NO: 318389
uggucacugcuugaaggaa

SEQ ID NO: 400264 - RNA, 19 nt, Artificial Sequence
  Description of Artificial Sequence: Synthetic oligonucleotide
  Antisense Strand to SEQ ID NO: 400263
uuccuucaagcagugacca

SEQ ID NO: 400265 - RNA, 19 nt, Artificial Sequence
  Description of Artificial Sequence: Synthetic oligonucleotide
  Sense Strand Starting at position 1038 of SEQ ID NO: 318415
aggcucagagaaugugaua

SEQ ID NO: 400266 - RNA, 19 nt, Artificial Sequence
  Description of Artificial Sequence: Synthetic oligonucleotide
  Antisense Strand to SEQ ID NO: 400265
uaucacauucucugagccu

SEQ ID NO: 400267 - RNA, 19 nt, Artificial Sequence
  Description of Artificial Sequence: Synthetic oligonucleotide
  Sense Strand Starting at position 1038 of SEQ ID NO: 318547
uugcccucuaguggagaaa

SEQ ID NO: 400268 - RNA, 19 nt, Artificial Sequence
  Description of Artificial Sequence: Synthetic oligonucleotide
  Antisense Strand to SEQ ID NO: 400267
uuucuccacuagagggcaa

SEQ ID NO: 400269 - RNA, 19 nt, Artificial Sequence
  Description of Artificial Sequence: Synthetic oligonucleotide
  Sense Strand Starting at position 1038 of SEQ ID NO: 318548
ugcccucuaguggagaaau

SEQ ID NO: 400270 - RNA, 19 nt, Artificial Sequence
  Description of Artificial Sequence: Synthetic oligonucleotide
  Antisense Strand to SEQ ID NO: 400269
auuucuccacuagagggca

SEQ ID NO: 400271 - RNA, 19 nt, Artificial Sequence
  Description of Artificial Sequence: Synthetic oligonucleotide
  Sense Strand Starting at position 1038 of SEQ ID NO: 319009
acugacuuucuaggugaua

SEQ ID NO: 400272 - RNA, 19 nt, Artificial Sequence
  Description of Artificial Sequence: Synthetic oligonucleotide
  Antisense Strand to SEQ ID NO: 400271
uaucaccuagaaagucagu

SEQ ID NO: 400273 - RNA, 19 nt, Artificial Sequence
  Description of Artificial Sequence: Synthetic oligonucleotide
  Sense Strand Starting at position 1038 of SEQ ID NO: 319010
cugacuuucuaggugauaa

SEQ ID NO: 400274 - RNA, 19 nt, Artificial Sequence
  Description of Artificial Sequence: Synthetic oligonucleotide
  Antisense Strand to SEQ ID NO: 400273
uuaucaccuagaaagucag

SEQ ID NO: 400275 - RNA, 19 nt, Artificial Sequence
  Description of Artificial Sequence: Synthetic oligonucleotide
  Sense Strand Starting at position 1038 of SEQ ID NO: 319011
ugacuuucuaggugauaag

SEQ ID NO: 400276 - RNA, 19 nt, Artificial Sequence
  Description of Artificial Sequence: Synthetic oligonucleotide
  Antisense Strand to SEQ ID NO: 400275
cuuaucaccuagaaaguca

SEQ ID NO: 400277 - RNA, 19 nt, Artificial Sequence
  Description of Artificial Sequence: Synthetic oligonucleotide
  Sense Strand Starting at position 1038 of SEQ ID NO: 319054
cacuuucuuugaguggaaa

SEQ ID NO: 400278 - RNA, 19 nt, Artificial Sequence
  Description of Artificial Sequence: Synthetic oligonucleotide
  Antisense Strand to SEQ ID NO: 400277
uuuccacucaaagaaagug

SEQ ID NO: 400279 - RNA, 19 nt, Artificial Sequence
  Description of Artificial Sequence: Synthetic oligonucleotide
  Sense Strand Starting at position 1038 of SEQ ID NO: 319083
gggcauauuagauguaaau

SEQ ID NO: 400280 - RNA, 19 nt, Artificial Sequence
  Description of Artificial Sequence: Synthetic oligonucleotide
  Antisense Strand to SEQ ID NO: 400279
auuuacaucuaauaugccc

SEQ ID NO: 400281 - RNA, 19 nt, Artificial Sequence
  Description of Artificial Sequence: Synthetic oligonucleotide
  Sense Strand Starting at position 1038 of SEQ ID NO: 319140
uuguguagacacugauguu

SEQ ID NO: 400282 - RNA, 19 nt, Artificial Sequence
  Description of Artificial Sequence: Synthetic oligonucleotide
  Antisense Strand to SEQ ID NO: 400281
aacaucagugucuacacaa

SEQ ID NO: 400283 - RNA, 19 nt, Artificial Sequence
  Description of Artificial Sequence: Synthetic oligonucleotide
  Sense Strand Starting at position 1039 of SEQ ID NO: 315265
ucucuuaaauucuugggau

SEQ ID NO: 400284 - RNA, 19 nt, Artificial Sequence
  Description of Artificial Sequence: Synthetic oligonucleotide
  Antisense Strand to SEQ ID NO: 400283
aucccaagaauuuaagaga

SEQ ID NO: 400285 - RNA, 19 nt, Artificial Sequence
  Description of Artificial Sequence: Synthetic oligonucleotide
  Sense Strand Starting at position 1039 of SEQ ID NO: 315267
ucuuaaauucuugggauag

SEQ ID NO: 400286 - RNA, 19 nt, Artificial Sequence
  Description of Artificial Sequence: Synthetic oligonucleotide
  Antisense Strand to SEQ ID NO: 400285
cuaucccaagaauuuaaga

SEQ ID NO: 400287 - RNA, 19 nt, Artificial Sequence
  Description of Artificial Sequence: Synthetic oligonucleotide
  Sense Strand Starting at position 1039 of SEQ ID NO: 315374
uauaaaguuugacuuguga

SEQ ID NO: 400288 - RNA, 19 nt, Artificial Sequence
  Description of Artificial Sequence: Synthetic oligonucleotide
  Antisense Strand to SEQ ID NO: 400287
ucacaagucaaacuuuaua

SEQ ID NO: 400289 - RNA, 19 nt, Artificial Sequence
  Description of Artificial Sequence: Synthetic oligonucleotide
  Sense Strand Starting at position 1039 of SEQ ID NO: 315533
uaaggaguuuccuccaugu

SEQ ID NO: 400290 - RNA, 19 nt, Artificial Sequence
  Description of Artificial Sequence: Synthetic oligonucleotide
  Antisense Strand to SEQ ID NO: 400289
acauggaggaaacuccuua

SEQ ID NO: 400291 - RNA, 19 nt, Artificial Sequence
  Description of Artificial Sequence: Synthetic oligonucleotide
  Sense Strand Starting at position 1039 of SEQ ID NO: 315546
ccaugugccgagcuguaua

SEQ ID NO: 400292 - RNA, 19 nt, Artificial Sequence
  Description of Artificial Sequence: Synthetic oligonucleotide
  Antisense Strand to SEQ ID NO: 400291
uauacagcucggcacaugg

SEQ ID NO: 400293 - RNA, 19 nt, Artificial Sequence
  Description of Artificial Sequence: Synthetic oligonucleotide
  Sense Strand Starting at position 1039 of SEQ ID NO: 315733
uucuaaugcugaguccaca

SEQ ID NO: 400294 - RNA, 19 nt, Artificial Sequence
  Description of Artificial Sequence: Synthetic oligonucleotide
  Antisense Strand to SEQ ID NO: 400293
uguggacucagcauuagaa

SEQ ID NO: 400295 - RNA, 19 nt, Artificial Sequence
  Description of Artificial Sequence: Synthetic oligonucleotide
  Sense Strand Starting at position 1039 of SEQ ID NO: 315772
gccugucuagaauguaaag

SEQ ID NO: 400296 - RNA, 19 nt, Artificial Sequence
  Description of Artificial Sequence: Synthetic oligonucleotide
  Antisense Strand to SEQ ID NO: 400295
cuuuacauucuagacaggc

SEQ ID NO: 400297 - RNA, 19 nt, Artificial Sequence
  Description of Artificial Sequence: Synthetic oligonucleotide
  Sense Strand Starting at position 1039 of SEQ ID NO: 315792
aguuguuacacugaguucu

SEQ ID NO: 400298 - RNA, 19 nt, Artificial Sequence
  Description of Artificial Sequence: Synthetic oligonucleotide
  Antisense Strand to SEQ ID NO: 400297
agaacucaguguaacaacu

SEQ ID NO: 400299 - RNA, 19 nt, Artificial Sequence
  Description of Artificial Sequence: Synthetic oligonucleotide
  Sense Strand Starting at position 1039 of SEQ ID NO: 315800
cacugaguucuguaaagcu

SEQ ID NO: 400300 - RNA, 19 nt, Artificial Sequence
  Description of Artificial Sequence: Synthetic oligonucleotide
  Antisense Strand to SEQ ID NO: 400299
agcuuuacagaacucagug

SEQ ID NO: 400301 - RNA, 19 nt, Artificial Sequence
  Description of Artificial Sequence: Synthetic oligonucleotide
  Sense Strand Starting at position 1039 of SEQ ID NO: 315810
uguaaagcugcgguuaagu

SEQ ID NO: 400302 - RNA, 19 nt, Artificial Sequence
  Description of Artificial Sequence: Synthetic oligonucleotide
  Antisense Strand to SEQ ID NO: 400301
acuuaaccgcagcuuuaca

SEQ ID NO: 400303 - RNA, 19 nt, Artificial Sequence
  Description of Artificial Sequence: Synthetic oligonucleotide
  Sense Strand Starting at position 1039 of SEQ ID NO: 315843
aguuuacugagagguaguu

SEQ ID NO: 400304 - RNA, 19 nt, Artificial Sequence
  Description of Artificial Sequence: Synthetic oligonucleotide
  Antisense Strand to SEQ ID NO: 400303
aacuaccucucaguaaacu

SEQ ID NO: 400305 - RNA, 19 nt, Artificial Sequence
  Description of Artificial Sequence: Synthetic oligonucleotide
  Sense Strand Starting at position 1039 of SEQ ID NO: 315923
accagucaggguugaugaa

SEQ ID NO: 400306 - RNA, 19 nt, Artificial Sequence
  Description of Artificial Sequence: Synthetic oligonucleotide
  Antisense Strand to SEQ ID NO: 400305
uucaucaacccugacuggu

SEQ ID NO: 400307 - RNA, 19 nt, Artificial Sequence
  Description of Artificial Sequence: Synthetic oligonucleotide
  Sense Strand Starting at position 1039 of SEQ ID NO: 316231
gaguacuucuucccaggga

SEQ ID NO: 400308 - RNA, 19 nt, Artificial Sequence
  Description of Artificial Sequence: Synthetic oligonucleotide
  Antisense Strand to SEQ ID NO: 400307
ucccugggaagaaguacuc

SEQ ID NO: 400309 - RNA, 19 nt, Artificial Sequence
  Description of Artificial Sequence: Synthetic oligonucleotide
  Sense Strand Starting at position 1039 of SEQ ID NO: 316396
gugagugauuuacaccuaa

SEQ ID NO: 400310 - RNA, 19 nt, Artificial Sequence
  Description of Artificial Sequence: Synthetic oligonucleotide
  Antisense Strand to SEQ ID NO: 400309
uuagguguaaaucacucac

SEQ ID NO: 400311 - RNA, 19 nt, Artificial Sequence
  Description of Artificial Sequence: Synthetic oligonucleotide
  Sense Strand Starting at position 1039 of SEQ ID NO: 316429
agaacacaguguucugauu

SEQ ID NO: 400312 - RNA, 19 nt, Artificial Sequence
  Description of Artificial Sequence: Synthetic oligonucleotide
  Antisense Strand to SEQ ID NO: 400311
aaucagaacacuguguucu

SEQ ID NO: 400313 - RNA, 19 nt, Artificial Sequence
  Description of Artificial Sequence: Synthetic oligonucleotide
  Sense Strand Starting at position 1039 of SEQ ID NO: 316437
guguucugauuucuagguu

SEQ ID NO: 400314 - RNA, 19 nt, Artificial Sequence
  Description of Artificial Sequence: Synthetic oligonucleotide
  Antisense Strand to SEQ ID NO: 400313
aaccuagaaaucagaacac

SEQ ID NO: 400315 - RNA, 19 nt, Artificial Sequence
  Description of Artificial Sequence: Synthetic oligonucleotide
  Sense Strand Starting at position 1039 of SEQ ID NO: 316508
augcauguacuagauauuc

SEQ ID NO: 400316 - RNA, 19 nt, Artificial Sequence
  Description of Artificial Sequence: Synthetic oligonucleotide
  Antisense Strand to SEQ ID NO: 400315
gaauaucuaguacaugcau

SEQ ID NO: 400317 - RNA, 19 nt, Artificial Sequence
  Description of Artificial Sequence: Synthetic oligonucleotide
  Sense Strand Starting at position 1039 of SEQ ID NO: 316517
cuagauauuccaggcucag

SEQ ID NO: 400318 - RNA, 19 nt, Artificial Sequence
  Description of Artificial Sequence: Synthetic oligonucleotide
  Antisense Strand to SEQ ID NO: 400317
cugagccuggaauaucuag

SEQ ID NO: 400319 - RNA, 19 nt, Artificial Sequence
  Description of Artificial Sequence: Synthetic oligonucleotide
  Sense Strand Starting at position 1039 of SEQ ID NO: 316585
ggaguaaguguggagugaa

SEQ ID NO: 400320 - RNA, 19 nt, Artificial Sequence
  Description of Artificial Sequence: Synthetic oligonucleotide
  Antisense Strand to SEQ ID NO: 400319
uucacuccacacuuacucc

SEQ ID NO: 400321 - RNA, 19 nt, Artificial Sequence
  Description of Artificial Sequence: Synthetic oligonucleotide
  Sense Strand Starting at position 1039 of SEQ ID NO: 316599
gugaauguacacugcagau

SEQ ID NO: 400322 - RNA, 19 nt, Artificial Sequence
  Description of Artificial Sequence: Synthetic oligonucleotide
  Antisense Strand to SEQ ID NO: 400321
aucugcaguguacauucac

SEQ ID NO: 400323 - RNA, 19 nt, Artificial Sequence
  Description of Artificial Sequence: Synthetic oligonucleotide
  Sense Strand Starting at position 1039 of SEQ ID NO: 316612
gcagaugccacagagacuu

SEQ ID NO: 400324 - RNA, 19 nt, Artificial Sequence
  Description of Artificial Sequence: Synthetic oligonucleotide
  Antisense Strand to SEQ ID NO: 400323
aagucucuguggcaucugc

SEQ ID NO: 400325 - RNA, 19 nt, Artificial Sequence
  Description of Artificial Sequence: Synthetic oligonucleotide
  Sense Strand Starting at position 1039 of SEQ ID NO: 316729
ucaaucaucucugcuggga

SEQ ID NO: 400326 - RNA, 19 nt, Artificial Sequence
  Description of Artificial Sequence: Synthetic oligonucleotide
  Antisense Strand to SEQ ID NO: 400325
ucccagcagagaugauuga

SEQ ID NO: 400327 - RNA, 19 nt, Artificial Sequence
  Description of Artificial Sequence: Synthetic oligonucleotide
  Sense Strand Starting at position 1039 of SEQ ID NO: 316859
cuguaaaguguugagaaga

SEQ ID NO: 400328 - RNA, 19 nt, Artificial Sequence
  Description of Artificial Sequence: Synthetic oligonucleotide
  Antisense Strand to SEQ ID NO: 400327
ucuucucaacacuuuacag

SEQ ID NO: 400329 - RNA, 19 nt, Artificial Sequence
  Description of Artificial Sequence: Synthetic oligonucleotide
  Sense Strand Starting at position 1039 of SEQ ID NO: 316929
gagggcucgguauacagua

SEQ ID NO: 400330 - RNA, 19 nt, Artificial Sequence
  Description of Artificial Sequence: Synthetic oligonucleotide
  Antisense Strand to SEQ ID NO: 400329
uacuguauaccgagcccuc

SEQ ID NO: 400331 - RNA, 19 nt, Artificial Sequence
  Description of Artificial Sequence: Synthetic oligonucleotide
  Sense Strand Starting at position 1039 of SEQ ID NO: 317988
uggucuuaugaugaauguu

SEQ ID NO: 400332 - RNA, 19 nt, Artificial Sequence
  Description of Artificial Sequence: Synthetic oligonucleotide
  Antisense Strand to SEQ ID NO: 400331
aacauucaucauaagacca

SEQ ID NO: 400333 - RNA, 19 nt, Artificial Sequence
  Description of Artificial Sequence: Synthetic oligonucleotide
  Sense Strand Starting at position 1039 of SEQ ID NO: 317991
ucuuaugaugaauguugua

SEQ ID NO: 400334 - RNA, 19 nt, Artificial Sequence
  Description of Artificial Sequence: Synthetic oligonucleotide
  Antisense Strand to SEQ ID NO: 400333
uacaacauucaucauaaga

SEQ ID NO: 400335 - RNA, 19 nt, Artificial Sequence
  Description of Artificial Sequence: Synthetic oligonucleotide
  Sense Strand Starting at position 1039 of SEQ ID NO: 318001
aauguuguaggaugaguga

SEQ ID NO: 400336 - RNA, 19 nt, Artificial Sequence
  Description of Artificial Sequence: Synthetic oligonucleotide
  Antisense Strand to SEQ ID NO: 400335
ucacucauccuacaacauu

SEQ ID NO: 400337 - RNA, 19 nt, Artificial Sequence
  Description of Artificial Sequence: Synthetic oligonucleotide
  Sense Strand Starting at position 1039 of SEQ ID NO: 318004
guuguaggaugagugacau

SEQ ID NO: 400338 - RNA, 19 nt, Artificial Sequence
  Description of Artificial Sequence: Synthetic oligonucleotide
  Antisense Strand to SEQ ID NO: 400337
augucacucauccuacaac

SEQ ID NO: 400339 - RNA, 19 nt, Artificial Sequence
  Description of Artificial Sequence: Synthetic oligonucleotide
  Sense Strand Starting at position 1039 of SEQ ID NO: 318028
gaguaaguagacuguccua

SEQ ID NO: 400340 - RNA, 19 nt, Artificial Sequence
  Description of Artificial Sequence: Synthetic oligonucleotide
  Antisense Strand to SEQ ID NO: 400339
uaggacagucuacuuacuc

SEQ ID NO: 400341 - RNA, 19 nt, Artificial Sequence
  Description of Artificial Sequence: Synthetic oligonucleotide
  Sense Strand Starting at position 1039 of SEQ ID NO: 318041
guccuagugcuuccuuguu

SEQ ID NO: 400342 - RNA, 19 nt, Artificial Sequence
  Description of Artificial Sequence: Synthetic oligonucleotide
  Antisense Strand to SEQ ID NO: 400341
aacaaggaagcacuaggac

SEQ ID NO: 400343 - RNA, 19 nt, Artificial Sequence
  Description of Artificial Sequence: Synthetic oligonucleotide
  Sense Strand Starting at position 1039 of SEQ ID NO: 318531
ggagauggucacugcuuga

SEQ ID NO: 400344 - RNA, 19 nt, Artificial Sequence
  Description of Artificial Sequence: Synthetic oligonucleotide
  Antisense Strand to SEQ ID NO: 400343
ucaagcagugaccaucucc

SEQ ID NO: 400345 - RNA, 19 nt, Artificial Sequence
  Description of Artificial Sequence: Synthetic oligonucleotide
  Sense Strand Starting at position 1039 of SEQ ID NO: 318535
auggucacugcuugaagga

SEQ ID NO: 400346 - RNA, 19 nt, Artificial Sequence
  Description of Artificial Sequence: Synthetic oligonucleotide
  Antisense Strand to SEQ ID NO: 400345
uccuucaagcagugaccau

SEQ ID NO: 400347 - RNA, 19 nt, Artificial Sequence
  Description of Artificial Sequence: Synthetic oligonucleotide
  Sense Strand Starting at position 1039 of SEQ ID NO: 318536
uggucacugcuugaaggaa

SEQ ID NO: 400348 - RNA, 19 nt, Artificial Sequence
  Description of Artificial Sequence: Synthetic oligonucleotide
  Antisense Strand to SEQ ID NO: 400347
uuccuucaagcagugacca

SEQ ID NO: 400349 - RNA, 19 nt, Artificial Sequence
  Description of Artificial Sequence: Synthetic oligonucleotide
  Sense Strand Starting at position 1039 of SEQ ID NO: 318562
aggcucagagaaugugaua

SEQ ID NO: 400350 - RNA, 19 nt, Artificial Sequence
  Description of Artificial Sequence: Synthetic oligonucleotide
  Antisense Strand to SEQ ID NO: 400349
uaucacauucucugagccu

SEQ ID NO: 400351 - RNA, 19 nt, Artificial Sequence
  Description of Artificial Sequence: Synthetic oligonucleotide
  Sense Strand Starting at position 1039 of SEQ ID NO: 318694
uugcccucuaguggagaaa

SEQ ID NO: 400352 - RNA, 19 nt, Artificial Sequence
  Description of Artificial Sequence: Synthetic oligonucleotide
  Antisense Strand to SEQ ID NO: 400351
uuucuccacuagagggcaa

SEQ ID NO: 400353 - RNA, 19 nt, Artificial Sequence
  Description of Artificial Sequence: Synthetic oligonucleotide
  Sense Strand Starting at position 1039 of SEQ ID NO: 318695
ugcccucuaguggagaaau

SEQ ID NO: 400354 - RNA, 19 nt, Artificial Sequence
  Description of Artificial Sequence: Synthetic oligonucleotide
  Antisense Strand to SEQ ID NO: 400353
auuucuccacuagagggca

SEQ ID NO: 400355 - RNA, 19 nt, Artificial Sequence
  Description of Artificial Sequence: Synthetic oligonucleotide
  Sense Strand Starting at position 1039 of SEQ ID NO: 319156
acugacuuucuaggugaua

SEQ ID NO: 400356 - RNA, 19 nt, Artificial Sequence
  Description of Artificial Sequence: Synthetic oligonucleotide
  Antisense Strand to SEQ ID NO: 400355
uaucaccuagaaagucagu

SEQ ID NO: 400357 - RNA, 19 nt, Artificial Sequence
  Description of Artificial Sequence: Synthetic oligonucleotide
  Sense Strand Starting at position 1039 of SEQ ID NO: 319157
cugacuuucuaggugauaa

SEQ ID NO: 400358 - RNA, 19 nt, Artificial Sequence
  Description of Artificial Sequence: Synthetic oligonucleotide
  Antisense Strand to SEQ ID NO: 400357
uuaucaccuagaaagucag

SEQ ID NO: 400359 - RNA, 19 nt, Artificial Sequence
  Description of Artificial Sequence: Synthetic oligonucleotide
  Sense Strand Starting at position 1039 of SEQ ID NO: 319158
ugacuuucuaggugauaag

SEQ ID NO: 400360 - RNA, 19 nt, Artificial Sequence
  Description of Artificial Sequence: Synthetic oligonucleotide
  Antisense Strand to SEQ ID NO: 400359
cuuaucaccuagaaaguca

SEQ ID NO: 400361 - RNA, 19 nt, Artificial Sequence
  Description of Artificial Sequence: Synthetic oligonucleotide
  Sense Strand Starting at position 1039 of SEQ ID NO: 319201
cacuuucuuugaguggaaa

SEQ ID NO: 400362 - RNA, 19 nt, Artificial Sequence
  Description of Artificial Sequence: Synthetic oligonucleotide
  Antisense Strand to SEQ ID NO: 400361
uuuccacucaaagaaagug

SEQ ID NO: 400363 - RNA, 19 nt, Artificial Sequence
  Description of Artificial Sequence: Synthetic oligonucleotide
  Sense Strand Starting at position 1040 of SEQ ID NO: 315238
uguauaagaccucaggcuu

SEQ ID NO: 400364 - RNA, 19 nt, Artificial Sequence
  Description of Artificial Sequence: Synthetic oligonucleotide
  Antisense Strand to SEQ ID NO: 400363
aagccugaggucuuauaca

SEQ ID NO: 400365 - RNA, 19 nt, Artificial Sequence
  Description of Artificial Sequence: Synthetic oligonucleotide
  Sense Strand Starting at position 1040 of SEQ ID NO: 315326
uuuauagugccacauaguu

SEQ ID NO: 400366 - RNA, 19 nt, Artificial Sequence
  Description of Artificial Sequence: Synthetic oligonucleotide
  Antisense Strand to SEQ ID NO: 400365
aacuauguggcacuauaaa

SEQ ID NO: 400367 - RNA, 19 nt, Artificial Sequence
  Description of Artificial Sequence: Synthetic oligonucleotide
  Sense Strand Starting at position 1040 of SEQ ID NO: 315630
auauauuguggcuacuaau

SEQ ID NO: 400368 - RNA, 19 nt, Artificial Sequence
  Description of Artificial Sequence: Synthetic oligonucleotide
  Antisense Strand to SEQ ID NO: 400367
auuaguagccacaauauau

SEQ ID NO: 400369 - RNA, 19 nt, Artificial Sequence
  Description of Artificial Sequence: Synthetic oligonucleotide
  Sense Strand Starting at position 1040 of SEQ ID NO: 315705
cauguaaagugccugaaac

SEQ ID NO: 400370 - RNA, 19 nt, Artificial Sequence
  Description of Artificial Sequence: Synthetic oligonucleotide
  Antisense Strand to SEQ ID NO: 400369
guuucaggcacuuuacaug

SEQ ID NO: 400371 - RNA, 19 nt, Artificial Sequence
  Description of Artificial Sequence: Synthetic oligonucleotide
  Sense Strand Starting at position 1040 of SEQ ID NO: 315707
uguaaagugccugaaacau

SEQ ID NO: 400372 - RNA, 19 nt, Artificial Sequence
  Description of Artificial Sequence: Synthetic oligonucleotide
  Antisense Strand to SEQ ID NO: 400371
auguuucaggcacuuuaca

SEQ ID NO: 400373 - RNA, 19 nt, Artificial Sequence
  Description of Artificial Sequence: Synthetic oligonucleotide
  Sense Strand Starting at position 1040 of SEQ ID NO: 315717
cugaaacauugccuuguaa

SEQ ID NO: 400374 - RNA, 19 nt, Artificial Sequence
  Description of Artificial Sequence: Synthetic oligonucleotide
  Antisense Strand to SEQ ID NO: 400373
uuacaaggcaauguuucag

SEQ ID NO: 400375 - RNA, 19 nt, Artificial Sequence
  Description of Artificial Sequence: Synthetic oligonucleotide
  Sense Strand Starting at position 1040 of SEQ ID NO: 315776
auugauuacucuccaugga

SEQ ID NO: 400376 - RNA, 19 nt, Artificial Sequence
  Description of Artificial Sequence: Synthetic oligonucleotide
  Antisense Strand to SEQ ID NO: 400375
uccauggagaguaaucaau

SEQ ID NO: 400377 - RNA, 19 nt, Artificial Sequence
  Description of Artificial Sequence: Synthetic oligonucleotide
  Sense Strand Starting at position 1040 of SEQ ID NO: 315848
agguauuauuaguuccauu

SEQ ID NO: 400378 - RNA, 19 nt, Artificial Sequence
  Description of Artificial Sequence: Synthetic oligonucleotide
  Antisense Strand to SEQ ID NO: 400377
aauggaacuaauaauaccu

SEQ ID NO: 400379 - RNA, 19 nt, Artificial Sequence
  Description of Artificial Sequence: Synthetic oligonucleotide
  Sense Strand Starting at position 1040 of SEQ ID NO: 315963
uucuaacaacucugugaga

SEQ ID NO: 400380 - RNA, 19 nt, Artificial Sequence
  Description of Artificial Sequence: Synthetic oligonucleotide
  Antisense Strand to SEQ ID NO: 400379
ucucacagaguuguuagaa

SEQ ID NO: 400381 - RNA, 19 nt, Artificial Sequence
  Description of Artificial Sequence: Synthetic oligonucleotide
  Sense Strand Starting at position 1040 of SEQ ID NO: 315965
cuaacaacucugugagaca

SEQ ID NO: 400382 - RNA, 19 nt, Artificial Sequence
  Description of Artificial Sequence: Synthetic oligonucleotide
  Antisense Strand to SEQ ID NO: 400381
ugucucacagaguuguuag

SEQ ID NO: 400383 - RNA, 19 nt, Artificial Sequence
  Description of Artificial Sequence: Synthetic oligonucleotide
  Sense Strand Starting at position 1040 of SEQ ID NO: 316111
gcacuaaacagaugugaug

SEQ ID NO: 400384 - RNA, 19 nt, Artificial Sequence
  Description of Artificial Sequence: Synthetic oligonucleotide
  Antisense Strand to SEQ ID NO: 400383
caucacaucuguuuagugc

SEQ ID NO: 400385 - RNA, 19 nt, Artificial Sequence
  Description of Artificial Sequence: Synthetic oligonucleotide
  Sense Strand Starting at position 1040 of SEQ ID NO: 316139
auaggaaauacccgaaugu

SEQ ID NO: 400386 - RNA, 19 nt, Artificial Sequence
  Description of Artificial Sequence: Synthetic oligonucleotide
  Antisense Strand to SEQ ID NO: 400385
acauucggguauuuccuau

SEQ ID NO: 400387 - RNA, 19 nt, Artificial Sequence
  Description of Artificial Sequence: Synthetic oligonucleotide
  Sense Strand Starting at position 1040 of SEQ ID NO: 316156
gucccauuacuuuaggaua

SEQ ID NO: 400388 - RNA, 19 nt, Artificial Sequence
  Description of Artificial Sequence: Synthetic oligonucleotide
  Antisense Strand to SEQ ID NO: 400387
uauccuaaaguaaugggac

SEQ ID NO: 400389 - RNA, 19 nt, Artificial Sequence
  Description of Artificial Sequence: Synthetic oligonucleotide
  Sense Strand Starting at position 1040 of SEQ ID NO: 316173
uauggucacaggugucaga

SEQ ID NO: 400390 - RNA, 19 nt, Artificial Sequence
  Description of Artificial Sequence: Synthetic oligonucleotide
  Antisense Strand to SEQ ID NO: 400389
ucugacaccugugaccaua

SEQ ID NO: 400391 - RNA, 19 nt, Artificial Sequence
  Description of Artificial Sequence: Synthetic oligonucleotide
  Sense Strand Starting at position 1040 of SEQ ID NO: 316182
aggugucagagucaaauac

SEQ ID NO: 400392 - RNA, 19 nt, Artificial Sequence
  Description of Artificial Sequence: Synthetic oligonucleotide
  Antisense Strand to SEQ ID NO: 400391
guauuugacucugacaccu

SEQ ID NO: 400393 - RNA, 19 nt, Artificial Sequence
  Description of Artificial Sequence: Synthetic oligonucleotide
  Sense Strand Starting at position 1040 of SEQ ID NO: 316266
cuuagcauguaagcaaaua

SEQ ID NO: 400394 - RNA, 19 nt, Artificial Sequence
  Description of Artificial Sequence: Synthetic oligonucleotide
  Antisense Strand to SEQ ID NO: 400393
uauuugcuuacaugcuaag

SEQ ID NO: 400395 - RNA, 19 nt, Artificial Sequence
  Description of Artificial Sequence: Synthetic oligonucleotide
  Sense Strand Starting at position 1040 of SEQ ID NO: 317693
cgcaucggucaugcauuau

SEQ ID NO: 400396 - RNA, 19 nt, Artificial Sequence
  Description of Artificial Sequence: Synthetic oligonucleotide
  Antisense Strand to SEQ ID NO: 400395
auaaugcaugaccgaugcg

SEQ ID NO: 400397 - RNA, 19 nt, Artificial Sequence
  Description of Artificial Sequence: Synthetic oligonucleotide
  Sense Strand Starting at position 1040 of SEQ ID NO: 317697
ucggucaugcauuauuaaa

SEQ ID NO: 400398 - RNA, 19 nt, Artificial Sequence
  Description of Artificial Sequence: Synthetic oligonucleotide
  Antisense Strand to SEQ ID NO: 400397
uuuaauaaugcaugaccga

SEQ ID NO: 400399 - RNA, 19 nt, Artificial Sequence
  Description of Artificial Sequence: Synthetic oligonucleotide
  Sense Strand Starting at position 1040 of SEQ ID NO: 317699
ggucaugcauuauuaaaca

SEQ ID NO: 400400 - RNA, 19 nt, Artificial Sequence
  Description of Artificial Sequence: Synthetic oligonucleotide
  Antisense Strand to SEQ ID NO: 400399
uguuuaauaaugcaugacc

SEQ ID NO: 400401 - RNA, 19 nt, Artificial Sequence
  Description of Artificial Sequence: Synthetic oligonucleotide
  Sense Strand Starting at position 1040 of SEQ ID NO: 317718
ggcauuuccugacuguuua

SEQ ID NO: 400402 - RNA, 19 nt, Artificial Sequence
  Description of Artificial Sequence: Synthetic oligonucleotide
  Antisense Strand to SEQ ID NO: 400401
uaaacagucaggaaaugcc

SEQ ID NO: 400403 - RNA, 19 nt, Artificial Sequence
  Description of Artificial Sequence: Synthetic oligonucleotide
  Sense Strand Starting at position 1040 of SEQ ID NO: 317741
gugccaagcaccguguuaa

SEQ ID NO: 400404 - RNA, 19 nt, Artificial Sequence
  Description of Artificial Sequence: Synthetic oligonucleotide
  Antisense Strand to SEQ ID NO: 400403
uuaacacggugcuuggcac

SEQ ID NO: 400405 - RNA, 19 nt, Artificial Sequence
  Description of Artificial Sequence: Synthetic oligonucleotide
  Sense Strand Starting at position 1040 of SEQ ID NO: 317791
gauggaauuuaaggaguaa

SEQ ID NO: 400406 - RNA, 19 nt, Artificial Sequence
  Description of Artificial Sequence: Synthetic oligonucleotide
  Antisense Strand to SEQ ID NO: 400405
uuacuccuuaaauuccauc

SEQ ID NO: 400407 - RNA, 19 nt, Artificial Sequence
  Description of Artificial Sequence: Synthetic oligonucleotide
  Sense Strand Starting at position 1040 of SEQ ID NO: 317987
aggaaauauugugugaggu

SEQ ID NO: 400408 - RNA, 19 nt, Artificial Sequence
  Description of Artificial Sequence: Synthetic oligonucleotide
  Antisense Strand to SEQ ID NO: 400407
accucacacaauauuuccu

SEQ ID NO: 400409 - RNA, 19 nt, Artificial Sequence
  Description of Artificial Sequence: Synthetic oligonucleotide
  Sense Strand Starting at position 1040 of SEQ ID NO: 317988
ggaaauauugugugagguu

SEQ ID NO: 400410 - RNA, 19 nt, Artificial Sequence
  Description of Artificial Sequence: Synthetic oligonucleotide
  Antisense Strand to SEQ ID NO: 400409
aaccucacacaauauuucc

SEQ ID NO: 400411 - RNA, 19 nt, Artificial Sequence
  Description of Artificial Sequence: Synthetic oligonucleotide
  Sense Strand Starting at position 1040 of SEQ ID NO: 318024
cuucuugugcucuaggaac

SEQ ID NO: 400412 - RNA, 19 nt, Artificial Sequence
  Description of Artificial Sequence: Synthetic oligonucleotide
  Antisense Strand to SEQ ID NO: 400411
guuccuagagcacaagaag

SEQ ID NO: 400413 - RNA, 19 nt, Artificial Sequence
  Description of Artificial Sequence: Synthetic oligonucleotide
  Sense Strand Starting at position 1040 of SEQ ID NO: 318091
gcccguugaccuuaagaua

SEQ ID NO: 400414 - RNA, 19 nt, Artificial Sequence
  Description of Artificial Sequence: Synthetic oligonucleotide
  Antisense Strand to SEQ ID NO: 400413
uaucuuaaggucaacgggc

SEQ ID NO: 400415 - RNA, 19 nt, Artificial Sequence
  Description of Artificial Sequence: Synthetic oligonucleotide
  Sense Strand Starting at position 1040 of SEQ ID NO: 318124
gccugaaaucuguaaugug

SEQ ID NO: 400416 - RNA, 19 nt, Artificial Sequence
  Description of Artificial Sequence: Synthetic oligonucleotide
  Antisense Strand to SEQ ID NO: 400415
cacauuacagauuucaggc

SEQ ID NO: 400417 - RNA, 19 nt, Artificial Sequence
  Description of Artificial Sequence: Synthetic oligonucleotide
  Sense Strand Starting at position 1040 of SEQ ID NO: 318133
cuguaauguggccaauaag

SEQ ID NO: 400418 - RNA, 19 nt, Artificial Sequence
  Description of Artificial Sequence: Synthetic oligonucleotide
  Antisense Strand to SEQ ID NO: 400417
cuuauuggccacauuacag

SEQ ID NO: 400419 - RNA, 19 nt, Artificial Sequence
  Description of Artificial Sequence: Synthetic oligonucleotide
  Sense Strand Starting at position 1040 of SEQ ID NO: 318136
uaauguggccaauaagagu

SEQ ID NO: 400420 - RNA, 19 nt, Artificial Sequence
  Description of Artificial Sequence: Synthetic oligonucleotide
  Antisense Strand to SEQ ID NO: 400419
acucuuauuggccacauua

SEQ ID NO: 400421 - RNA, 19 nt, Artificial Sequence
  Description of Artificial Sequence: Synthetic oligonucleotide
  Sense Strand Starting at position 1040 of SEQ ID NO: 318223
ggauccuauuugcauauuu

SEQ ID NO: 400422 - RNA, 19 nt, Artificial Sequence
  Description of Artificial Sequence: Synthetic oligonucleotide
  Antisense Strand to SEQ ID NO: 400421
aaauaugcaaauaggaucc

SEQ ID NO: 400423 - RNA, 19 nt, Artificial Sequence
  Description of Artificial Sequence: Synthetic oligonucleotide
  Sense Strand Starting at position 1040 of SEQ ID NO: 318255
gcuguuuguggagaauagu

SEQ ID NO: 400424 - RNA, 19 nt, Artificial Sequence
  Description of Artificial Sequence: Synthetic oligonucleotide
  Antisense Strand to SEQ ID NO: 400423
acuauucuccacaaacagc

SEQ ID NO: 400425 - RNA, 19 nt, Artificial Sequence
  Description of Artificial Sequence: Synthetic oligonucleotide
  Sense Strand Starting at position 1040 of SEQ ID NO: 318314
ggcaguugcgucaggcaaa

SEQ ID NO: 400426 - RNA, 19 nt, Artificial Sequence
  Description of Artificial Sequence: Synthetic oligonucleotide
  Antisense Strand to SEQ ID NO: 400425
uuugccugacgcaacugcc

SEQ ID NO: 400427 - RNA, 19 nt, Artificial Sequence
  Description of Artificial Sequence: Synthetic oligonucleotide
  Sense Strand Starting at position 1040 of SEQ ID NO: 318354
acuaguguaaugggaguua

SEQ ID NO: 400428 - RNA, 19 nt, Artificial Sequence
  Description of Artificial Sequence: Synthetic oligonucleotide
  Antisense Strand to SEQ ID NO: 400427
uaacucccauuacacuagu

SEQ ID NO: 400429 - RNA, 19 nt, Artificial Sequence
  Description of Artificial Sequence: Synthetic oligonucleotide
  Sense Strand Starting at position 1040 of SEQ ID NO: 318417
aaugguauccaagggacuu

SEQ ID NO: 400430 - RNA, 19 nt, Artificial Sequence
  Description of Artificial Sequence: Synthetic oligonucleotide
  Antisense Strand to SEQ ID NO: 400429
aagucccuuggauaccauu

SEQ ID NO: 400431 - RNA, 19 nt, Artificial Sequence
  Description of Artificial Sequence: Synthetic oligonucleotide
  Sense Strand Starting at position 1040 of SEQ ID NO: 318481
aaggaugacuccuuaagua

SEQ ID NO: 400432 - RNA, 19 nt, Artificial Sequence
  Description of Artificial Sequence: Synthetic oligonucleotide
  Antisense Strand to SEQ ID NO: 400431
uacuuaaggagucauccuu

SEQ ID NO: 400433 - RNA, 19 nt, Artificial Sequence
  Description of Artificial Sequence: Synthetic oligonucleotide
  Sense Strand Starting at position 1040 of SEQ ID NO: 318547
aggagcaaaugguuuggaa

SEQ ID NO: 400434 - RNA, 19 nt, Artificial Sequence
  Description of Artificial Sequence: Synthetic oligonucleotide
  Antisense Strand to SEQ ID NO: 400433
uuccaaaccauuugcuccu

SEQ ID NO: 400435 - RNA, 19 nt, Artificial Sequence
  Description of Artificial Sequence: Synthetic oligonucleotide
  Sense Strand Starting at position 1040 of SEQ ID NO: 318549
gagcaaaugguuuggaaua

SEQ ID NO: 400436 - RNA, 19 nt, Artificial Sequence
  Description of Artificial Sequence: Synthetic oligonucleotide
  Antisense Strand to SEQ ID NO: 400435
uauuccaaaccauuugcuc

SEQ ID NO: 400437 - RNA, 19 nt, Artificial Sequence
  Description of Artificial Sequence: Synthetic oligonucleotide
  Sense Strand Starting at position 1040 of SEQ ID NO: 318556
ugguuuggaauauguuaaa

SEQ ID NO: 400438 - RNA, 19 nt, Artificial Sequence
  Description of Artificial Sequence: Synthetic oligonucleotide
  Antisense Strand to SEQ ID NO: 400437
uuuaacauauuccaaacca

SEQ ID NO: 400439 - RNA, 19 nt, Artificial Sequence
  Description of Artificial Sequence: Synthetic oligonucleotide
  Sense Strand Starting at position 1040 of SEQ ID NO: 318601
caaguagauuuggauaugu

SEQ ID NO: 400440 - RNA, 19 nt, Artificial Sequence
  Description of Artificial Sequence: Synthetic oligonucleotide
  Antisense Strand to SEQ ID NO: 400439
acauauccaaaucuacuug

SEQ ID NO: 400441 - RNA, 19 nt, Artificial Sequence
  Description of Artificial Sequence: Synthetic oligonucleotide
  Sense Strand Starting at position 1040 of SEQ ID NO: 318610
uuggauauguaggucuaga

SEQ ID NO: 400442 - RNA, 19 nt, Artificial Sequence
  Description of Artificial Sequence: Synthetic oligonucleotide
  Antisense Strand to SEQ ID NO: 400441
ucuagaccuacauauccaa

SEQ ID NO: 400443 - RNA, 19 nt, Artificial Sequence
  Description of Artificial Sequence: Synthetic oligonucleotide
  Sense Strand Starting at position 1041 of SEQ ID NO: 315415
cgcccauguaauguguauu

SEQ ID NO: 400444 - RNA, 19 nt, Artificial Sequence
  Description of Artificial Sequence: Synthetic oligonucleotide
  Antisense Strand to SEQ ID NO: 400443
aauacacauuacaugggcg

SEQ ID NO: 400445 - RNA, 19 nt, Artificial Sequence
  Description of Artificial Sequence: Synthetic oligonucleotide
  Sense Strand Starting at position 1041 of SEQ ID NO: 315416
gcccauguaauguguauuu

SEQ ID NO: 400446 - RNA, 19 nt, Artificial Sequence
  Description of Artificial Sequence: Synthetic oligonucleotide
  Antisense Strand to SEQ ID NO: 400445
aaauacacauuacaugggc

SEQ ID NO: 400447 - RNA, 19 nt, Artificial Sequence
  Description of Artificial Sequence: Synthetic oligonucleotide
  Sense Strand Starting at position 1041 of SEQ ID NO: 315887
acgacuguauaucccaaua

SEQ ID NO: 400448 - RNA, 19 nt, Artificial Sequence
  Description of Artificial Sequence: Synthetic oligonucleotide
  Antisense Strand to SEQ ID NO: 400447
uauugggauauacagucgu

SEQ ID NO: 400449 - RNA, 19 nt, Artificial Sequence
  Description of Artificial Sequence: Synthetic oligonucleotide
  Sense Strand Starting at position 1041 of SEQ ID NO: 315912
uguugacacuuacuugaca

SEQ ID NO: 400450 - RNA, 19 nt, Artificial Sequence
  Description of Artificial Sequence: Synthetic oligonucleotide
  Antisense Strand to SEQ ID NO: 400449
ugucaaguaagugucaaca

SEQ ID NO: 400451 - RNA, 19 nt, Artificial Sequence
  Description of Artificial Sequence: Synthetic oligonucleotide
  Sense Strand Starting at position 1041 of SEQ ID NO: 315913
guugacacuuacuugacaa

SEQ ID NO: 400452 - RNA, 19 nt, Artificial Sequence
  Description of Artificial Sequence: Synthetic oligonucleotide
  Antisense Strand to SEQ ID NO: 400451
uugucaaguaagugucaac

SEQ ID NO: 400453 - RNA, 19 nt, Artificial Sequence
  Description of Artificial Sequence: Synthetic oligonucleotide
  Sense Strand Starting at position 1041 of SEQ ID NO: 315974
cacguuaaagacuauguaa

SEQ ID NO: 400454 - RNA, 19 nt, Artificial Sequence
  Description of Artificial Sequence: Synthetic oligonucleotide
  Antisense Strand to SEQ ID NO: 400453
uuacauagucuuuaacgug

SEQ ID NO: 400455 - RNA, 19 nt, Artificial Sequence
  Description of Artificial Sequence: Synthetic oligonucleotide
  Sense Strand Starting at position 1041 of SEQ ID NO: 316039
gagauuuccuagcacagga

SEQ ID NO: 400456 - RNA, 19 nt, Artificial Sequence
  Description of Artificial Sequence: Synthetic oligonucleotide
  Antisense Strand to SEQ ID NO: 400455
uccugugcuaggaaaucuc

SEQ ID NO: 400457 - RNA, 19 nt, Artificial Sequence
  Description of Artificial Sequence: Synthetic oligonucleotide
  Sense Strand Starting at position 1041 of SEQ ID NO: 316308
gaugcagaauggucaguaa

SEQ ID NO: 400458 - RNA, 19 nt, Artificial Sequence
  Description of Artificial Sequence: Synthetic oligonucleotide
  Antisense Strand to SEQ ID NO: 400457
uuacugaccauucugcauc

SEQ ID NO: 400459 - RNA, 19 nt, Artificial Sequence
  Description of Artificial Sequence: Synthetic oligonucleotide
  Sense Strand Starting at position 1041 of SEQ ID NO: 316454
caacgucuuggcuaacgaa

SEQ ID NO: 400460 - RNA, 19 nt, Artificial Sequence
  Description of Artificial Sequence: Synthetic oligonucleotide
  Antisense Strand to SEQ ID NO: 400459
uucguuagccaagacguug

SEQ ID NO: 400461 - RNA, 19 nt, Artificial Sequence
  Description of Artificial Sequence: Synthetic oligonucleotide
  Sense Strand Starting at position 1041 of SEQ ID NO: 316765
gacuguacucucgcgguau

SEQ ID NO: 400462 - RNA, 19 nt, Artificial Sequence
  Description of Artificial Sequence: Synthetic oligonucleotide
  Antisense Strand to SEQ ID NO: 400461
auaccgcgagaguacaguc

SEQ ID NO: 400463 - RNA, 19 nt, Artificial Sequence
  Description of Artificial Sequence: Synthetic oligonucleotide
  Sense Strand Starting at position 1041 of SEQ ID NO: 316769
guacucucgcgguauuugu

SEQ ID NO: 400464 - RNA, 19 nt, Artificial Sequence
  Description of Artificial Sequence: Synthetic oligonucleotide
  Antisense Strand to SEQ ID NO: 400463
acaaauaccgcgagaguac

SEQ ID NO: 400465 - RNA, 19 nt, Artificial Sequence
  Description of Artificial Sequence: Synthetic oligonucleotide
  Sense Strand Starting at position 1041 of SEQ ID NO: 317490
aggugcaguucuuugagga

SEQ ID NO: 400466 - RNA, 19 nt, Artificial Sequence
  Description of Artificial Sequence: Synthetic oligonucleotide
  Antisense Strand to SEQ ID NO: 400465
uccucaaagaacugcaccu

SEQ ID NO: 400467 - RNA, 19 nt, Artificial Sequence
  Description of Artificial Sequence: Synthetic oligonucleotide
  Sense Strand Starting at position 1041 of SEQ ID NO: 317551
ccgauuuccgguuaucuug

SEQ ID NO: 400468 - RNA, 19 nt, Artificial Sequence
  Description of Artificial Sequence: Synthetic oligonucleotide
  Antisense Strand to SEQ ID NO: 400467
caagauaaccggaaaucgg

SEQ ID NO: 400469 - RNA, 19 nt, Artificial Sequence
  Description of Artificial Sequence: Synthetic oligonucleotide
  Sense Strand Starting at position 1041 of SEQ ID NO: 317596
aggaaauauuguguguuuc

SEQ ID NO: 400470 - RNA, 19 nt, Artificial Sequence
  Description of Artificial Sequence: Synthetic oligonucleotide
  Antisense Strand to SEQ ID NO: 400469
gaaacacacaauauuuccu

SEQ ID NO: 400471 - RNA, 19 nt, Artificial Sequence
  Description of Artificial Sequence: Synthetic oligonucleotide
  Sense Strand Starting at position 1041 of SEQ ID NO: 317676
cuagaauuucgugguuccu

SEQ ID NO: 400472 - RNA, 19 nt, Artificial Sequence
  Description of Artificial Sequence: Synthetic oligonucleotide
  Antisense Strand to SEQ ID NO: 400471
aggaaccacgaaauucuag

SEQ ID NO: 400473 - RNA, 19 nt, Artificial Sequence
  Description of Artificial Sequence: Synthetic oligonucleotide
  Sense Strand Starting at position 1041 of SEQ ID NO: 317702
uggcuuagugaagaucuuu

SEQ ID NO: 400474 - RNA, 19 nt, Artificial Sequence
  Description of Artificial Sequence: Synthetic oligonucleotide
  Antisense Strand to SEQ ID NO: 400473
aaagaucuucacuaagcca

SEQ ID NO: 400475 - RNA, 19 nt, Artificial Sequence
  Description of Artificial Sequence: Synthetic oligonucleotide
  Sense Strand Starting at position 1041 of SEQ ID NO: 317721
ugugauaaaccagagcauu

SEQ ID NO: 400476 - RNA, 19 nt, Artificial Sequence
  Description of Artificial Sequence: Synthetic oligonucleotide
  Antisense Strand to SEQ ID NO: 400475
aaugcucugguuuaucaca

SEQ ID NO: 400477 - RNA, 19 nt, Artificial Sequence
  Description of Artificial Sequence: Synthetic oligonucleotide
  Sense Strand Starting at position 1041 of SEQ ID NO: 317766
ugcacuuagcauuaauguu

SEQ ID NO: 400478 - RNA, 19 nt, Artificial Sequence
  Description of Artificial Sequence: Synthetic oligonucleotide
  Antisense Strand to SEQ ID NO: 400477
aacauuaaugcuaagugca

SEQ ID NO: 400479 - RNA, 19 nt, Artificial Sequence
  Description of Artificial Sequence: Synthetic oligonucleotide
  Sense Strand Starting at position 1041 of SEQ ID NO: 317778
uaauguuugucuuuaggga

SEQ ID NO: 400480 - RNA, 19 nt, Artificial Sequence
  Description of Artificial Sequence: Synthetic oligonucleotide
  Antisense Strand to SEQ ID NO: 400479
ucccuaaagacaaacauua

SEQ ID NO: 400481 - RNA, 19 nt, Artificial Sequence
  Description of Artificial Sequence: Synthetic oligonucleotide
  Sense Strand Starting at position 1041 of SEQ ID NO: 317779
aauguuugucuuuagggaa

SEQ ID NO: 400482 - RNA, 19 nt, Artificial Sequence
  Description of Artificial Sequence: Synthetic oligonucleotide
  Antisense Strand to SEQ ID NO: 400481
uucccuaaagacaaacauu

SEQ ID NO: 400483 - RNA, 19 nt, Artificial Sequence
  Description of Artificial Sequence: Synthetic oligonucleotide
  Sense Strand Starting at position 1041 of SEQ ID NO: 317798
uccagacauuuguuagugu

SEQ ID NO: 400484 - RNA, 19 nt, Artificial Sequence
  Description of Artificial Sequence: Synthetic oligonucleotide
  Antisense Strand to SEQ ID NO: 400483
acacuaacaaaugucugga

SEQ ID NO: 400485 - RNA, 19 nt, Artificial Sequence
  Description of Artificial Sequence: Synthetic oligonucleotide
  Sense Strand Starting at position 1041 of SEQ ID NO: 317802
gacauuuguuaguguauuu

SEQ ID NO: 400486 - RNA, 19 nt, Artificial Sequence
  Description of Artificial Sequence: Synthetic oligonucleotide
  Antisense Strand to SEQ ID NO: 400485
aaauacacuaacaaauguc

SEQ ID NO: 400487 - RNA, 19 nt, Artificial Sequence
  Description of Artificial Sequence: Synthetic oligonucleotide
  Sense Strand Starting at position 1041 of SEQ ID NO: 318007
uguucuagggucuggagau

SEQ ID NO: 400488 - RNA, 19 nt, Artificial Sequence
  Description of Artificial Sequence: Synthetic oligonucleotide
  Antisense Strand to SEQ ID NO: 400487
aucuccagacccuagaaca

SEQ ID NO: 400489 - RNA, 19 nt, Artificial Sequence
  Description of Artificial Sequence: Synthetic oligonucleotide
  Sense Strand Starting at position 1041 of SEQ ID NO: 318105
auaacagugacuuguaguu

SEQ ID NO: 400490 - RNA, 19 nt, Artificial Sequence
  Description of Artificial Sequence: Synthetic oligonucleotide
  Antisense Strand to SEQ ID NO: 400489
aacuacaagucacuguuau

SEQ ID NO: 400491 - RNA, 19 nt, Artificial Sequence
  Description of Artificial Sequence: Synthetic oligonucleotide
  Sense Strand Starting at position 1041 of SEQ ID NO: 318110
agugacuuguaguugggau

SEQ ID NO: 400492 - RNA, 19 nt, Artificial Sequence
  Description of Artificial Sequence: Synthetic oligonucleotide
  Antisense Strand to SEQ ID NO: 400491
aucccaacuacaagucacu

SEQ ID NO: 400493 - RNA, 19 nt, Artificial Sequence
  Description of Artificial Sequence: Synthetic oligonucleotide
  Sense Strand Starting at position 1041 of SEQ ID NO: 318111
gugacuuguaguugggaua

SEQ ID NO: 400494 - RNA, 19 nt, Artificial Sequence
  Description of Artificial Sequence: Synthetic oligonucleotide
  Antisense Strand to SEQ ID NO: 400493
uaucccaacuacaagucac

SEQ ID NO: 400495 - RNA, 19 nt, Artificial Sequence
  Description of Artificial Sequence: Synthetic oligonucleotide
  Sense Strand Starting at position 1041 of SEQ ID NO: 318135
uuaauaaguuggucagaca

SEQ ID NO: 400496 - RNA, 19 nt, Artificial Sequence
  Description of Artificial Sequence: Synthetic oligonucleotide
  Antisense Strand to SEQ ID NO: 400495
ugucugaccaacuuauuaa

SEQ ID NO: 400497 - RNA, 19 nt, Artificial Sequence
  Description of Artificial Sequence: Synthetic oligonucleotide
  Sense Strand Starting at position 1041 of SEQ ID NO: 318197
gaugaagugagccguauuu

SEQ ID NO: 400498 - RNA, 19 nt, Artificial Sequence
  Description of Artificial Sequence: Synthetic oligonucleotide
  Antisense Strand to SEQ ID NO: 400497
aaauacggcucacuucauc

SEQ ID NO: 400499 - RNA, 19 nt, Artificial Sequence
  Description of Artificial Sequence: Synthetic oligonucleotide
  Sense Strand Starting at position 1041 of SEQ ID NO: 318350
uuuagcuguguuuagauau

SEQ ID NO: 400500 - RNA, 19 nt, Artificial Sequence
  Description of Artificial Sequence: Synthetic oligonucleotide
  Antisense Strand to SEQ ID NO: 400499
auaucuaaacacagcuaaa

SEQ ID NO: 400501 - RNA, 19 nt, Artificial Sequence
  Description of Artificial Sequence: Synthetic oligonucleotide
  Sense Strand Starting at position 1041 of SEQ ID NO: 318399
cgguauucaguggaguaac

SEQ ID NO: 400502 - RNA, 19 nt, Artificial Sequence
  Description of Artificial Sequence: Synthetic oligonucleotide
  Antisense Strand to SEQ ID NO: 400501
guuacuccacugaauaccg

SEQ ID NO: 400503 - RNA, 19 nt, Artificial Sequence
  Description of Artificial Sequence: Synthetic oligonucleotide
  Sense Strand Starting at position 1041 of SEQ ID NO: 318444
gcaaauagacuauauagcu

SEQ ID NO: 400504 - RNA, 19 nt, Artificial Sequence
  Description of Artificial Sequence: Synthetic oligonucleotide
  Antisense Strand to SEQ ID NO: 400503
agcuauauagucuauuugc

SEQ ID NO: 400505 - RNA, 19 nt, Artificial Sequence
  Description of Artificial Sequence: Synthetic oligonucleotide
  Sense Strand Starting at position 1041 of SEQ ID NO: 318483
ccaucuagguguguuuaaa

SEQ ID NO: 400506 - RNA, 19 nt, Artificial Sequence
  Description of Artificial Sequence: Synthetic oligonucleotide
  Antisense Strand to SEQ ID NO: 400505
uuuaaacacaccuagaugg

SEQ ID NO: 400507 - RNA, 19 nt, Artificial Sequence
  Description of Artificial Sequence: Synthetic oligonucleotide
  Sense Strand Starting at position 1041 of SEQ ID NO: 318525
ugacgaaauugccuaauua

SEQ ID NO: 400508 - RNA, 19 nt, Artificial Sequence
  Description of Artificial Sequence: Synthetic oligonucleotide
  Antisense Strand to SEQ ID NO: 400507
uaauuaggcaauuucguca

SEQ ID NO: 400509 - RNA, 19 nt, Artificial Sequence
  Description of Artificial Sequence: Synthetic oligonucleotide
  Sense Strand Starting at position 1041 of SEQ ID NO: 318557
auccguccugguuauuaaa

SEQ ID NO: 400510 - RNA, 19 nt, Artificial Sequence
  Description of Artificial Sequence: Synthetic oligonucleotide
  Antisense Strand to SEQ ID NO: 400509
uuuaauaaccaggacggau

SEQ ID NO: 400511 - RNA, 19 nt, Artificial Sequence
  Description of Artificial Sequence: Synthetic oligonucleotide
  Sense Strand Starting at position 1041 of SEQ ID NO: 318654
uaagaaauggccuguagga

SEQ ID NO: 400512 - RNA, 19 nt, Artificial Sequence
  Description of Artificial Sequence: Synthetic oligonucleotide
  Antisense Strand to SEQ ID NO: 400511
uccuacaggccauuucuua

SEQ ID NO: 400513 - RNA, 19 nt, Artificial Sequence
  Description of Artificial Sequence: Synthetic oligonucleotide
  Sense Strand Starting at position 1041 of SEQ ID NO: 318813
acuagaaagccuugaugga

SEQ ID NO: 400514 - RNA, 19 nt, Artificial Sequence
  Description of Artificial Sequence: Synthetic oligonucleotide
  Antisense Strand to SEQ ID NO: 400513
uccaucaaggcuuucuagu

SEQ ID NO: 400515 - RNA, 19 nt, Artificial Sequence
  Description of Artificial Sequence: Synthetic oligonucleotide
  Sense Strand Starting at position 1041 of SEQ ID NO: 318851
gugaauccaugcuuuagau

SEQ ID NO: 400516 - RNA, 19 nt, Artificial Sequence
  Description of Artificial Sequence: Synthetic oligonucleotide
  Antisense Strand to SEQ ID NO: 400515
aucuaaagcauggauucac

SEQ ID NO: 400517 - RNA, 19 nt, Artificial Sequence
  Description of Artificial Sequence: Synthetic oligonucleotide
  Sense Strand Starting at position 1041 of SEQ ID NO: 318863
uuuagauaacaggguuauu

SEQ ID NO: 400518 - RNA, 19 nt, Artificial Sequence
  Description of Artificial Sequence: Synthetic oligonucleotide
  Antisense Strand to SEQ ID NO: 400517
aauaacccuguuaucuaaa

SEQ ID NO: 400519 - RNA, 19 nt, Artificial Sequence
  Description of Artificial Sequence: Synthetic oligonucleotide
  Sense Strand Starting at position 1041 of SEQ ID NO: 319131
agauuauaccacugcaugu

SEQ ID NO: 400520 - RNA, 19 nt, Artificial Sequence
  Description of Artificial Sequence: Synthetic oligonucleotide
  Antisense Strand to SEQ ID NO: 400519
acaugcagugguauaaucu

SEQ ID NO: 400521 - RNA, 19 nt, Artificial Sequence
  Description of Artificial Sequence: Synthetic oligonucleotide
  Sense Strand Starting at position 1041 of SEQ ID NO: 319210
aauaguagauugcugaaga

SEQ ID NO: 400522 - RNA, 19 nt, Artificial Sequence
  Description of Artificial Sequence: Synthetic oligonucleotide
  Antisense Strand to SEQ ID NO: 400521
ucuucagcaaucuacuauu

SEQ ID NO: 400523 - RNA, 19 nt, Artificial Sequence
  Description of Artificial Sequence: Synthetic oligonucleotide
  Sense Strand Starting at position 1042 of SEQ ID NO: 315309
auagauuaucucuguucua

SEQ ID NO: 400524 - RNA, 19 nt, Artificial Sequence
  Description of Artificial Sequence: Synthetic oligonucleotide
  Antisense Strand to SEQ ID NO: 400523
uagaacagagauaaucuau

SEQ ID NO: 400525 - RNA, 19 nt, Artificial Sequence
  Description of Artificial Sequence: Synthetic oligonucleotide
  Sense Strand Starting at position 1042 of SEQ ID NO: 315661
ggacuugagaacugguuac

SEQ ID NO: 400526 - RNA, 19 nt, Artificial Sequence
  Description of Artificial Sequence: Synthetic oligonucleotide
  Antisense Strand to SEQ ID NO: 400525
guaaccaguucucaagucc

SEQ ID NO: 400527 - RNA, 19 nt, Artificial Sequence
  Description of Artificial Sequence: Synthetic oligonucleotide
  Sense Strand Starting at position 1042 of SEQ ID NO: 315667
gagaacugguuaccaaauc

SEQ ID NO: 400528 - RNA, 19 nt, Artificial Sequence
  Description of Artificial Sequence: Synthetic oligonucleotide
  Antisense Strand to SEQ ID NO: 400527
gauuugguaaccaguucuc

SEQ ID NO: 400529 - RNA, 19 nt, Artificial Sequence
  Description of Artificial Sequence: Synthetic oligonucleotide
  Sense Strand Starting at position 1042 of SEQ ID NO: 315675
guuaccaaaucuguagauu

SEQ ID NO: 400530 - RNA, 19 nt, Artificial Sequence
  Description of Artificial Sequence: Synthetic oligonucleotide
  Antisense Strand to SEQ ID NO: 400529
aaucuacagauuugguaac

SEQ ID NO: 400531 - RNA, 19 nt, Artificial Sequence
  Description of Artificial Sequence: Synthetic oligonucleotide
  Sense Strand Starting at position 1042 of SEQ ID NO: 315740
gaggucaguuucgucauuu

SEQ ID NO: 400532 - RNA, 19 nt, Artificial Sequence
  Description of Artificial Sequence: Synthetic oligonucleotide
  Antisense Strand to SEQ ID NO: 400531
aaaugacgaaacugaccuc

SEQ ID NO: 400533 - RNA, 19 nt, Artificial Sequence
  Description of Artificial Sequence: Synthetic oligonucleotide
  Sense Strand Starting at position 1042 of SEQ ID NO: 315741
aggucaguuucgucauuug

SEQ ID NO: 400534 - RNA, 19 nt, Artificial Sequence
  Description of Artificial Sequence: Synthetic oligonucleotide
  Antisense Strand to SEQ ID NO: 400533
caaaugacgaaacugaccu

SEQ ID NO: 400535 - RNA, 19 nt, Artificial Sequence
  Description of Artificial Sequence: Synthetic oligonucleotide
  Sense Strand Starting at position 1042 of SEQ ID NO: 315744
ucaguuucgucauuuguua

SEQ ID NO: 400536 - RNA, 19 nt, Artificial Sequence
  Description of Artificial Sequence: Synthetic oligonucleotide
  Antisense Strand to SEQ ID NO: 400535
uaacaaaugacgaaacuga

SEQ ID NO: 400537 - RNA, 19 nt, Artificial Sequence
  Description of Artificial Sequence: Synthetic oligonucleotide
  Sense Strand Starting at position 1042 of SEQ ID NO: 315748
uuucgucauuuguuaggaa

SEQ ID NO: 400538 - RNA, 19 nt, Artificial Sequence
  Description of Artificial Sequence: Synthetic oligonucleotide
  Antisense Strand to SEQ ID NO: 400537
uuccuaacaaaugacgaaa

SEQ ID NO: 400539 - RNA, 19 nt, Artificial Sequence
  Description of Artificial Sequence: Synthetic oligonucleotide
  Sense Strand Starting at position 1042 of SEQ ID NO: 315848
uaaucuauaccggauaggu

SEQ ID NO: 400540 - RNA, 19 nt, Artificial Sequence
  Description of Artificial Sequence: Synthetic oligonucleotide
  Antisense Strand to SEQ ID NO: 400539
accuauccgguauagauua

SEQ ID NO: 400541 - RNA, 19 nt, Artificial Sequence
  Description of Artificial Sequence: Synthetic oligonucleotide
  Sense Strand Starting at position 1042 of SEQ ID NO: 316113
cuguauuaccuugaaguca

SEQ ID NO: 400542 - RNA, 19 nt, Artificial Sequence
  Description of Artificial Sequence: Synthetic oligonucleotide
  Antisense Strand to SEQ ID NO: 400541
ugacuucaagguaauacag

SEQ ID NO: 400543 - RNA, 19 nt, Artificial Sequence
  Description of Artificial Sequence: Synthetic oligonucleotide
  Sense Strand Starting at position 1042 of SEQ ID NO: 316138
ccucucuaugaucauguua

SEQ ID NO: 400544 - RNA, 19 nt, Artificial Sequence
  Description of Artificial Sequence: Synthetic oligonucleotide
  Antisense Strand to SEQ ID NO: 400543
uaacaugaucauagagagg

SEQ ID NO: 400545 - RNA, 19 nt, Artificial Sequence
  Description of Artificial Sequence: Synthetic oligonucleotide
  Sense Strand Starting at position 1042 of SEQ ID NO: 316361
aaauuaucuuuagugggau

SEQ ID NO: 400546 - RNA, 19 nt, Artificial Sequence
  Description of Artificial Sequence: Synthetic oligonucleotide
  Antisense Strand to SEQ ID NO: 400545
aucccacuaaagauaauuu

SEQ ID NO: 400547 - RNA, 19 nt, Artificial Sequence
  Description of Artificial Sequence: Synthetic oligonucleotide
  Sense Strand Starting at position 1042 of SEQ ID NO: 316364
uuaucuuuagugggaucaa

SEQ ID NO: 400548 - RNA, 19 nt, Artificial Sequence
  Description of Artificial Sequence: Synthetic oligonucleotide
  Antisense Strand to SEQ ID NO: 400547
uugaucccacuaaagauaa

SEQ ID NO: 400549 - RNA, 19 nt, Artificial Sequence
  Description of Artificial Sequence: Synthetic oligonucleotide
  Sense Strand Starting at position 1042 of SEQ ID NO: 316422
uugguucugagcuguauuu

SEQ ID NO: 400550 - RNA, 19 nt, Artificial Sequence
  Description of Artificial Sequence: Synthetic oligonucleotide
  Antisense Strand to SEQ ID NO: 400549
aaauacagcucagaaccaa

SEQ ID NO: 400551 - RNA, 19 nt, Artificial Sequence
  Description of Artificial Sequence: Synthetic oligonucleotide
  Sense Strand Starting at position 1042 of SEQ ID NO: 316534
gugcuuuauccuucuggcu

SEQ ID NO: 400552 - RNA, 19 nt, Artificial Sequence
  Description of Artificial Sequence: Synthetic oligonucleotide
  Antisense Strand to SEQ ID NO: 400551
agccagaaggauaaagcac

SEQ ID NO: 400553 - RNA, 19 nt, Artificial Sequence
  Description of Artificial Sequence: Synthetic oligonucleotide
  Sense Strand Starting at position 1042 of SEQ ID NO: 316555
ggagguacauguguaaauc

SEQ ID NO: 400554 - RNA, 19 nt, Artificial Sequence
  Description of Artificial Sequence: Synthetic oligonucleotide
  Antisense Strand to SEQ ID NO: 400553
gauuuacacauguaccucc

SEQ ID NO: 400555 - RNA, 19 nt, Artificial Sequence
  Description of Artificial Sequence: Synthetic oligonucleotide
  Sense Strand Starting at position 1042 of SEQ ID NO: 316556
gagguacauguguaaaucu

SEQ ID NO: 400556 - RNA, 19 nt, Artificial Sequence
  Description of Artificial Sequence: Synthetic oligonucleotide
  Antisense Strand to SEQ ID NO: 400555
agauuuacacauguaccuc

SEQ ID NO: 400557 - RNA, 19 nt, Artificial Sequence
  Description of Artificial Sequence: Synthetic oligonucleotide
  Sense Strand Starting at position 1042 of SEQ ID NO: 316713
gugagcuucgugaaugguu

SEQ ID NO: 400558 - RNA, 19 nt, Artificial Sequence
  Description of Artificial Sequence: Synthetic oligonucleotide
  Antisense Strand to SEQ ID NO: 400557
aaccauucacgaagcucac

SEQ ID NO: 400559 - RNA, 19 nt, Artificial Sequence
  Description of Artificial Sequence: Synthetic oligonucleotide
  Sense Strand Starting at position 1042 of SEQ ID NO: 316718
cuucgugaaugguuaaaga

SEQ ID NO: 400560 - RNA, 19 nt, Artificial Sequence
  Description of Artificial Sequence: Synthetic oligonucleotide
  Antisense Strand to SEQ ID NO: 400559
ucuuuaaccauucacgaag

SEQ ID NO: 400561 - RNA, 19 nt, Artificial Sequence
  Description of Artificial Sequence: Synthetic oligonucleotide
  Sense Strand Starting at position 1042 of SEQ ID NO: 317411
gagauccaagccuguaauu

SEQ ID NO: 400562 - RNA, 19 nt, Artificial Sequence
  Description of Artificial Sequence: Synthetic oligonucleotide
  Antisense Strand to SEQ ID NO: 400561
aauuacaggcuuggaucuc

SEQ ID NO: 400563 - RNA, 19 nt, Artificial Sequence
  Description of Artificial Sequence: Synthetic oligonucleotide
  Sense Strand Starting at position 1042 of SEQ ID NO: 317449
aggagccuucgugaucuaa

SEQ ID NO: 400564 - RNA, 19 nt, Artificial Sequence
  Description of Artificial Sequence: Synthetic oligonucleotide
  Antisense Strand to SEQ ID NO: 400563
uuagaucacgaaggcuccu

SEQ ID NO: 400565 - RNA, 19 nt, Artificial Sequence
  Description of Artificial Sequence: Synthetic oligonucleotide
  Sense Strand Starting at position 1042 of SEQ ID NO: 317977
gaggaaguguguuucagau

SEQ ID NO: 400566 - RNA, 19 nt, Artificial Sequence
  Description of Artificial Sequence: Synthetic oligonucleotide
  Antisense Strand to SEQ ID NO: 400565
aucugaaacacacuuccuc

SEQ ID NO: 400567 - RNA, 19 nt, Artificial Sequence
  Description of Artificial Sequence: Synthetic oligonucleotide
  Sense Strand Starting at position 1042 of SEQ ID NO: 317983
guguguuucagauggagag

SEQ ID NO: 400568 - RNA, 19 nt, Artificial Sequence
  Description of Artificial Sequence: Synthetic oligonucleotide
  Antisense Strand to SEQ ID NO: 400567
cucuccaucugaaacacac

SEQ ID NO: 400569 - RNA, 19 nt, Artificial Sequence
  Description of Artificial Sequence: Synthetic oligonucleotide
  Sense Strand Starting at position 1042 of SEQ ID NO: 317997
gagagauuagcauguauau

SEQ ID NO: 400570 - RNA, 19 nt, Artificial Sequence
  Description of Artificial Sequence: Synthetic oligonucleotide
  Antisense Strand to SEQ ID NO: 400569
auauacaugcuaaucucuc

SEQ ID NO: 400571 - RNA, 19 nt, Artificial Sequence
  Description of Artificial Sequence: Synthetic oligonucleotide
  Sense Strand Starting at position 1042 of SEQ ID NO: 318039
agcuccuuugagggaugaa

SEQ ID NO: 400572 - RNA, 19 nt, Artificial Sequence
  Description of Artificial Sequence: Synthetic oligonucleotide
  Antisense Strand to SEQ ID NO: 400571
uucaucccucaaaggagcu

SEQ ID NO: 400573 - RNA, 19 nt, Artificial Sequence
  Description of Artificial Sequence: Synthetic oligonucleotide
  Sense Strand Starting at position 1042 of SEQ ID NO: 318078
aauggaaaguuagugcuua

SEQ ID NO: 400574 - RNA, 19 nt, Artificial Sequence
  Description of Artificial Sequence: Synthetic oligonucleotide
  Antisense Strand to SEQ ID NO: 400573
uaagcacuaacuuuccauu

SEQ ID NO: 400575 - RNA, 19 nt, Artificial Sequence
  Description of Artificial Sequence: Synthetic oligonucleotide
  Sense Strand Starting at position 1042 of SEQ ID NO: 318082
gaaaguuagugcuuaauag

SEQ ID NO: 400576 - RNA, 19 nt, Artificial Sequence
  Description of Artificial Sequence: Synthetic oligonucleotide
  Antisense Strand to SEQ ID NO: 400575
cuauuaagcacuaacuuuc

SEQ ID NO: 400577 - RNA, 19 nt, Artificial Sequence
  Description of Artificial Sequence: Synthetic oligonucleotide
  Sense Strand Starting at position 1042 of SEQ ID NO: 318185
gccacagaucugcacacuu

SEQ ID NO: 400578 - RNA, 19 nt, Artificial Sequence
  Description of Artificial Sequence: Synthetic oligonucleotide
  Antisense Strand to SEQ ID NO: 400577
aagugugcagaucuguggc

SEQ ID NO: 400579 - RNA, 19 nt, Artificial Sequence
  Description of Artificial Sequence: Synthetic oligonucleotide
  Sense Strand Starting at position 1042 of SEQ ID NO: 318391
ugcuaaagugcagaucaaa

SEQ ID NO: 400580 - RNA, 19 nt, Artificial Sequence
  Description of Artificial Sequence: Synthetic oligonucleotide
  Antisense Strand to SEQ ID NO: 400579
uuugaucugcacuuuagca

SEQ ID NO: 400581 - RNA, 19 nt, Artificial Sequence
  Description of Artificial Sequence: Synthetic oligonucleotide
  Sense Strand Starting at position 1042 of SEQ ID NO: 318695
gauugaucuugagcuccau

SEQ ID NO: 400582 - RNA, 19 nt, Artificial Sequence
  Description of Artificial Sequence: Synthetic oligonucleotide
  Antisense Strand to SEQ ID NO: 400581
auggagcucaagaucaauc

SEQ ID NO: 400583 - RNA, 19 nt, Artificial Sequence
  Description of Artificial Sequence: Synthetic oligonucleotide
  Sense Strand Starting at position 1042 of SEQ ID NO: 318739
cuuugagacuugguuagga

SEQ ID NO: 400584 - RNA, 19 nt, Artificial Sequence
  Description of Artificial Sequence: Synthetic oligonucleotide
  Antisense Strand to SEQ ID NO: 400583
uccuaaccaagucucaaag

SEQ ID NO: 400585 - RNA, 19 nt, Artificial Sequence
  Description of Artificial Sequence: Synthetic oligonucleotide
  Sense Strand Starting at position 1042 of SEQ ID NO: 318842
cuaugaggguguucccaga

SEQ ID NO: 400586 - RNA, 19 nt, Artificial Sequence
  Description of Artificial Sequence: Synthetic oligonucleotide
  Antisense Strand to SEQ ID NO: 400585
ucugggaacacccucauag

SEQ ID NO: 400587 - RNA, 19 nt, Artificial Sequence
  Description of Artificial Sequence: Synthetic oligonucleotide
  Sense Strand Starting at position 1042 of SEQ ID NO: 318858
agaagauauuggcauuuaa

SEQ ID NO: 400588 - RNA, 19 nt, Artificial Sequence
  Description of Artificial Sequence: Synthetic oligonucleotide
  Antisense Strand to SEQ ID NO: 400587
uuaaaugccaauaucuucu

SEQ ID NO: 400589 - RNA, 19 nt, Artificial Sequence
  Description of Artificial Sequence: Synthetic oligonucleotide
  Sense Strand Starting at position 1042 of SEQ ID NO: 318875
aagucaauggacugaguaa

SEQ ID NO: 400590 - RNA, 19 nt, Artificial Sequence
  Description of Artificial Sequence: Synthetic oligonucleotide
  Antisense Strand to SEQ ID NO: 400589
uuacucaguccauugacuu

SEQ ID NO: 400591 - RNA, 19 nt, Artificial Sequence
  Description of Artificial Sequence: Synthetic oligonucleotide
  Sense Strand Starting at position 1042 of SEQ ID NO: 318995
ugcccuuggcaucagaauu

SEQ ID NO: 400592 - RNA, 19 nt, Artificial Sequence
  Description of Artificial Sequence: Synthetic oligonucleotide
  Antisense Strand to SEQ ID NO: 400591
aauucugaugccaagggca

SEQ ID NO: 400593 - RNA, 19 nt, Artificial Sequence
  Description of Artificial Sequence: Synthetic oligonucleotide
  Sense Strand Starting at position 1042 of SEQ ID NO: 319029
cuccuaacucuaggagauu

SEQ ID NO: 400594 - RNA, 19 nt, Artificial Sequence
  Description of Artificial Sequence: Synthetic oligonucleotide
  Antisense Strand to SEQ ID NO: 400593
aaucuccuagaguuaggag

SEQ ID NO: 400595 - RNA, 19 nt, Artificial Sequence
  Description of Artificial Sequence: Synthetic oligonucleotide
  Sense Strand Starting at position 1042 of SEQ ID NO: 319141
gggccuuggacugggagau

SEQ ID NO: 400596 - RNA, 19 nt, Artificial Sequence
  Description of Artificial Sequence: Synthetic oligonucleotide
  Antisense Strand to SEQ ID NO: 400595
aucucccaguccaaggccc

SEQ ID NO: 400597 - RNA, 19 nt, Artificial Sequence
  Description of Artificial Sequence: Synthetic oligonucleotide
  Sense Strand Starting at position 1042 of SEQ ID NO: 319142
ggccuuggacugggagaua

SEQ ID NO: 400598 - RNA, 19 nt, Artificial Sequence
  Description of Artificial Sequence: Synthetic oligonucleotide
  Antisense Strand to SEQ ID NO: 400597
uaucucccaguccaaggcc

SEQ ID NO: 400599 - RNA, 19 nt, Artificial Sequence
  Description of Artificial Sequence: Synthetic oligonucleotide
  Sense Strand Starting at position 1042 of SEQ ID NO: 319196
aagacaggguagucuugaa

SEQ ID NO: 400600 - RNA, 19 nt, Artificial Sequence
  Description of Artificial Sequence: Synthetic oligonucleotide
  Antisense Strand to SEQ ID NO: 400599
uucaagacuacccugucuu

SEQ ID NO: 400601 - RNA, 19 nt, Artificial Sequence
  Description of Artificial Sequence: Synthetic oligonucleotide
  Sense Strand Starting at position 1042 of SEQ ID NO: 319200
caggguagucuugaacuga

SEQ ID NO: 400602 - RNA, 19 nt, Artificial Sequence
  Description of Artificial Sequence: Synthetic oligonucleotide
  Antisense Strand to SEQ ID NO: 400601
ucaguucaagacuacccug

SEQ ID NO: 400603 - RNA, 19 nt, Artificial Sequence
  Description of Artificial Sequence: Synthetic oligonucleotide
  Sense Strand Starting at position 1043 of SEQ ID NO: 315239
agaguaaccugucugaaau

SEQ ID NO: 400604 - RNA, 19 nt, Artificial Sequence
  Description of Artificial Sequence: Synthetic oligonucleotide
  Antisense Strand to SEQ ID NO: 400603
auuucagacagguuacucu

SEQ ID NO: 400605 - RNA, 19 nt, Artificial Sequence
  Description of Artificial Sequence: Synthetic oligonucleotide
  Sense Strand Starting at position 1043 of SEQ ID NO: 315240
gaguaaccugucugaaaug

SEQ ID NO: 400606 - RNA, 19 nt, Artificial Sequence
  Description of Artificial Sequence: Synthetic oligonucleotide
  Antisense Strand to SEQ ID NO: 400605
cauuucagacagguuacuc

SEQ ID NO: 400607 - RNA, 19 nt, Artificial Sequence
  Description of Artificial Sequence: Synthetic oligonucleotide
  Sense Strand Starting at position 1043 of SEQ ID NO: 315258
gaaucuugaugggaaacaa

SEQ ID NO: 400608 - RNA, 19 nt, Artificial Sequence
  Description of Artificial Sequence: Synthetic oligonucleotide
  Antisense Strand to SEQ ID NO: 400607
uuguuucccaucaagauuc

SEQ ID NO: 400609 - RNA, 19 nt, Artificial Sequence
  Description of Artificial Sequence: Synthetic oligonucleotide
  Sense Strand Starting at position 1043 of SEQ ID NO: 315709
ucaugucucccagaguuaa

SEQ ID NO: 400610 - RNA, 19 nt, Artificial Sequence
  Description of Artificial Sequence: Synthetic oligonucleotide
  Antisense Strand to SEQ ID NO: 400609
uuaacucugggagacauga

SEQ ID NO: 400611 - RNA, 19 nt, Artificial Sequence
  Description of Artificial Sequence: Synthetic oligonucleotide
  Sense Strand Starting at position 1043 of SEQ ID NO: 315933
gggcauuuauaugaaacua

SEQ ID NO: 400612 - RNA, 19 nt, Artificial Sequence
  Description of Artificial Sequence: Synthetic oligonucleotide
  Antisense Strand to SEQ ID NO: 400611
uaguuucauauaaaugccc

SEQ ID NO: 400613 - RNA, 19 nt, Artificial Sequence
  Description of Artificial Sequence: Synthetic oligonucleotide
  Sense Strand Starting at position 1043 of SEQ ID NO: 315995
ccaugugaaugcuuuaaca

SEQ ID NO: 400614 - RNA, 19 nt, Artificial Sequence
  Description of Artificial Sequence: Synthetic oligonucleotide
  Antisense Strand to SEQ ID NO: 400613
uguuaaagcauucacaugg

SEQ ID NO: 400615 - RNA, 19 nt, Artificial Sequence
  Description of Artificial Sequence: Synthetic oligonucleotide
  Sense Strand Starting at position 1043 of SEQ ID NO: 315997
augugaaugcuuuaacaac

SEQ ID NO: 400616 - RNA, 19 nt, Artificial Sequence
  Description of Artificial Sequence: Synthetic oligonucleotide
  Antisense Strand to SEQ ID NO: 400615
guuguuaaagcauucacau

SEQ ID NO: 400617 - RNA, 19 nt, Artificial Sequence
  Description of Artificial Sequence: Synthetic oligonucleotide
  Sense Strand Starting at position 1043 of SEQ ID NO: 316177
uaauacaccgucugugaaa

SEQ ID NO: 400618 - RNA, 19 nt, Artificial Sequence
  Description of Artificial Sequence: Synthetic oligonucleotide
  Antisense Strand to SEQ ID NO: 400617
uuucacagacgguguauua

SEQ ID NO: 400619 - RNA, 19 nt, Artificial Sequence
  Description of Artificial Sequence: Synthetic oligonucleotide
  Sense Strand Starting at position 1043 of SEQ ID NO: 316514
aguggaaauuuccacacaa

SEQ ID NO: 400620 - RNA, 19 nt, Artificial Sequence
  Description of Artificial Sequence: Synthetic oligonucleotide
  Antisense Strand to SEQ ID NO: 400619
uuguguggaaauuuccacu

SEQ ID NO: 400621 - RNA, 19 nt, Artificial Sequence
  Description of Artificial Sequence: Synthetic oligonucleotide
  Sense Strand Starting at position 1043 of SEQ ID NO: 316547
gacagcucuccggaauaac

SEQ ID NO: 400622 - RNA, 19 nt, Artificial Sequence
  Description of Artificial Sequence: Synthetic oligonucleotide
  Antisense Strand to SEQ ID NO: 400621
guuauuccggagagcuguc

SEQ ID NO: 400623 - RNA, 19 nt, Artificial Sequence
  Description of Artificial Sequence: Synthetic oligonucleotide
  Sense Strand Starting at position 1043 of SEQ ID NO: 316639
uguaaacuuccagagucca

SEQ ID NO: 400624 - RNA, 19 nt, Artificial Sequence
  Description of Artificial Sequence: Synthetic oligonucleotide
  Antisense Strand to SEQ ID NO: 400623
uggacucuggaaguuuaca

SEQ ID NO: 400625 - RNA, 19 nt, Artificial Sequence
  Description of Artificial Sequence: Synthetic oligonucleotide
  Sense Strand Starting at position 1043 of SEQ ID NO: 316654
uccagacaguuuccugaaa

SEQ ID NO: 400626 - RNA, 19 nt, Artificial Sequence
  Description of Artificial Sequence: Synthetic oligonucleotide
  Antisense Strand to SEQ ID NO: 400625
uuucaggaaacugucugga

SEQ ID NO: 400627 - RNA, 19 nt, Artificial Sequence
  Description of Artificial Sequence: Synthetic oligonucleotide
  Sense Strand Starting at position 1043 of SEQ ID NO: 316666
ccugaaaccuucuuuguug

SEQ ID NO: 400628 - RNA, 19 nt, Artificial Sequence
  Description of Artificial Sequence: Synthetic oligonucleotide
  Antisense Strand to SEQ ID NO: 400627
caacaaagaagguuucagg

SEQ ID NO: 400629 - RNA, 19 nt, Artificial Sequence
  Description of Artificial Sequence: Synthetic oligonucleotide
  Sense Strand Starting at position 1043 of SEQ ID NO: 316763
aaauuugacuuugauggga

SEQ ID NO: 400630 - RNA, 19 nt, Artificial Sequence
  Description of Artificial Sequence: Synthetic oligonucleotide
  Antisense Strand to SEQ ID NO: 400629
ucccaucaaagucaaauuu

SEQ ID NO: 400631 - RNA, 19 nt, Artificial Sequence
  Description of Artificial Sequence: Synthetic oligonucleotide
  Sense Strand Starting at position 1043 of SEQ ID NO: 316765
auuugacuuugaugggaga

SEQ ID NO: 400632 - RNA, 19 nt, Artificial Sequence
  Description of Artificial Sequence: Synthetic oligonucleotide
  Antisense Strand to SEQ ID NO: 400631
ucucccaucaaagucaaau

SEQ ID NO: 400633 - RNA, 19 nt, Artificial Sequence
  Description of Artificial Sequence: Synthetic oligonucleotide
  Sense Strand Starting at position 1043 of SEQ ID NO: 316768
ugacuuugaugggagaaac

SEQ ID NO: 400634 - RNA, 19 nt, Artificial Sequence
  Description of Artificial Sequence: Synthetic oligonucleotide
  Antisense Strand to SEQ ID NO: 400633
guuucucccaucaaaguca

SEQ ID NO: 400635 - RNA, 19 nt, Artificial Sequence
  Description of Artificial Sequence: Synthetic oligonucleotide
  Sense Strand Starting at position 1043 of SEQ ID NO: 317562
gcucuuugacguuagugaa

SEQ ID NO: 400636 - RNA, 19 nt, Artificial Sequence
  Description of Artificial Sequence: Synthetic oligonucleotide
  Antisense Strand to SEQ ID NO: 400635
uucacuaacgucaaagagc

SEQ ID NO: 400637 - RNA, 19 nt, Artificial Sequence
  Description of Artificial Sequence: Synthetic oligonucleotide
  Sense Strand Starting at position 1043 of SEQ ID NO: 317705
cgcugucugagucauuaag

SEQ ID NO: 400638 - RNA, 19 nt, Artificial Sequence
  Description of Artificial Sequence: Synthetic oligonucleotide
  Antisense Strand to SEQ ID NO: 400637
cuuaaugacucagacagcg

SEQ ID NO: 400639 - RNA, 19 nt, Artificial Sequence
  Description of Artificial Sequence: Synthetic oligonucleotide
  Sense Strand Starting at position 1043 of SEQ ID NO: 317768
gaacgaaugggaugaguuu

SEQ ID NO: 400640 - RNA, 19 nt, Artificial Sequence
  Description of Artificial Sequence: Synthetic oligonucleotide
  Antisense Strand to SEQ ID NO: 400639
aaacucaucccauucguuc

SEQ ID NO: 400641 - RNA, 19 nt, Artificial Sequence
  Description of Artificial Sequence: Synthetic oligonucleotide
  Sense Strand Starting at position 1043 of SEQ ID NO: 317775
ugggaugaguuucuggaga

SEQ ID NO: 400642 - RNA, 19 nt, Artificial Sequence
  Description of Artificial Sequence: Synthetic oligonucleotide
  Antisense Strand to SEQ ID NO: 400641
ucuccagaaacucauccca

SEQ ID NO: 400643 - RNA, 19 nt, Artificial Sequence
  Description of Artificial Sequence: Synthetic oligonucleotide
  Sense Strand Starting at position 1043 of SEQ ID NO: 317790
gagagacuuggccggagaa

SEQ ID NO: 400644 - RNA, 19 nt, Artificial Sequence
  Description of Artificial Sequence: Synthetic oligonucleotide
  Antisense Strand to SEQ ID NO: 400643
uucuccggccaagucucuc

SEQ ID NO: 400645 - RNA, 19 nt, Artificial Sequence
  Description of Artificial Sequence: Synthetic oligonucleotide
  Sense Strand Starting at position 1043 of SEQ ID NO: 317826
gaaguagucugccucacag

SEQ ID NO: 400646 - RNA, 19 nt, Artificial Sequence
  Description of Artificial Sequence: Synthetic oligonucleotide
  Antisense Strand to SEQ ID NO: 400645
cugugaggcagacuacuuc

SEQ ID NO: 400647 - RNA, 19 nt, Artificial Sequence
  Description of Artificial Sequence: Synthetic oligonucleotide
  Sense Strand Starting at position 1043 of SEQ ID NO: 317828
aguagucugccucacagaa

SEQ ID NO: 400648 - RNA, 19 nt, Artificial Sequence
  Description of Artificial Sequence: Synthetic oligonucleotide
  Antisense Strand to SEQ ID NO: 400647
uucugugaggcagacuacu

SEQ ID NO: 400649 - RNA, 19 nt, Artificial Sequence
  Description of Artificial Sequence: Synthetic oligonucleotide
  Sense Strand Starting at position 1043 of SEQ ID NO: 317933
gacuguugugggcaaagca

SEQ ID NO: 400650 - RNA, 19 nt, Artificial Sequence
  Description of Artificial Sequence: Synthetic oligonucleotide
  Antisense Strand to SEQ ID NO: 400649
ugcuuugcccacaacaguc

SEQ ID NO: 400651 - RNA, 19 nt, Artificial Sequence
  Description of Artificial Sequence: Synthetic oligonucleotide
  Sense Strand Starting at position 1043 of SEQ ID NO: 317967
cuaagaucggugugggaaa

SEQ ID NO: 400652 - RNA, 19 nt, Artificial Sequence
  Description of Artificial Sequence: Synthetic oligonucleotide
  Antisense Strand to SEQ ID NO: 400651
uuucccacaccgaucuuag

SEQ ID NO: 400653 - RNA, 19 nt, Artificial Sequence
  Description of Artificial Sequence: Synthetic oligonucleotide
  Sense Strand Starting at position 1043 of SEQ ID NO: 318045
aucuguagucaguagguau

SEQ ID NO: 400654 - RNA, 19 nt, Artificial Sequence
  Description of Artificial Sequence: Synthetic oligonucleotide
  Antisense Strand to SEQ ID NO: 400653
auaccuacugacuacagau

SEQ ID NO: 400655 - RNA, 19 nt, Artificial Sequence
  Description of Artificial Sequence: Synthetic oligonucleotide
  Sense Strand Starting at position 1043 of SEQ ID NO: 318048
uguagucaguagguaugau

SEQ ID NO: 400656 - RNA, 19 nt, Artificial Sequence
  Description of Artificial Sequence: Synthetic oligonucleotide
  Antisense Strand to SEQ ID NO: 400655
aucauaccuacugacuaca

SEQ ID NO: 400657 - RNA, 19 nt, Artificial Sequence
  Description of Artificial Sequence: Synthetic oligonucleotide
  Sense Strand Starting at position 1043 of SEQ ID NO: 318176
guagaaguugaggguacau

SEQ ID NO: 400658 - RNA, 19 nt, Artificial Sequence
  Description of Artificial Sequence: Synthetic oligonucleotide
  Antisense Strand to SEQ ID NO: 400657
auguacccucaacuucuac

SEQ ID NO: 400659 - RNA, 19 nt, Artificial Sequence
  Description of Artificial Sequence: Synthetic oligonucleotide
  Sense Strand Starting at position 1043 of SEQ ID NO: 318285
guacauucuuggcucagaa

SEQ ID NO: 400660 - RNA, 19 nt, Artificial Sequence
  Description of Artificial Sequence: Synthetic oligonucleotide
  Antisense Strand to SEQ ID NO: 400659
uucugagccaagaauguac

SEQ ID NO: 400661 - RNA, 19 nt, Artificial Sequence
  Description of Artificial Sequence: Synthetic oligonucleotide
  Sense Strand Starting at position 1043 of SEQ ID NO: 318380
agguaacuucagugaagug

SEQ ID NO: 400662 - RNA, 19 nt, Artificial Sequence
  Description of Artificial Sequence: Synthetic oligonucleotide
  Antisense Strand to SEQ ID NO: 400661
cacuucacugaaguuaccu

SEQ ID NO: 400663 - RNA, 19 nt, Artificial Sequence
  Description of Artificial Sequence: Synthetic oligonucleotide
  Sense Strand Starting at position 1043 of SEQ ID NO: 318390
agugaaguggucuaggugu

SEQ ID NO: 400664 - RNA, 19 nt, Artificial Sequence
  Description of Artificial Sequence: Synthetic oligonucleotide
  Antisense Strand to SEQ ID NO: 400663
acaccuagaccacuucacu

SEQ ID NO: 400665 - RNA, 19 nt, Artificial Sequence
  Description of Artificial Sequence: Synthetic oligonucleotide
  Sense Strand Starting at position 1043 of SEQ ID NO: 318392
ugaaguggucuagguguga

SEQ ID NO: 400666 - RNA, 19 nt, Artificial Sequence
  Description of Artificial Sequence: Synthetic oligonucleotide
  Antisense Strand to SEQ ID NO: 400665
ucacaccuagaccacuuca

SEQ ID NO: 400667 - RNA, 19 nt, Artificial Sequence
  Description of Artificial Sequence: Synthetic oligonucleotide
  Sense Strand Starting at position 1043 of SEQ ID NO: 318577
uagacuagauccgauauuu

SEQ ID NO: 400668 - RNA, 19 nt, Artificial Sequence
  Description of Artificial Sequence: Synthetic oligonucleotide
  Antisense Strand to SEQ ID NO: 400667
aaauaucggaucuagucua

SEQ ID NO: 400669 - RNA, 19 nt, Artificial Sequence
  Description of Artificial Sequence: Synthetic oligonucleotide
  Sense Strand Starting at position 1043 of SEQ ID NO: 318635
uugaaauauuucgagggua

SEQ ID NO: 400670 - RNA, 19 nt, Artificial Sequence
  Description of Artificial Sequence: Synthetic oligonucleotide
  Antisense Strand to SEQ ID NO: 400669
uacccucgaaauauuucaa

SEQ ID NO: 400671 - RNA, 19 nt, Artificial Sequence
  Description of Artificial Sequence: Synthetic oligonucleotide
  Sense Strand Starting at position 1043 of SEQ ID NO: 318734
guaggaugucaguaccauu

SEQ ID NO: 400672 - RNA, 19 nt, Artificial Sequence
  Description of Artificial Sequence: Synthetic oligonucleotide
  Antisense Strand to SEQ ID NO: 400671
aaugguacugacauccuac

SEQ ID NO: 400673 - RNA, 19 nt, Artificial Sequence
  Description of Artificial Sequence: Synthetic oligonucleotide
  Sense Strand Starting at position 1043 of SEQ ID NO: 318769
uuguuuccacauuaugaca

SEQ ID NO: 400674 - RNA, 19 nt, Artificial Sequence
  Description of Artificial Sequence: Synthetic oligonucleotide
  Antisense Strand to SEQ ID NO: 400673
ugucauaauguggaaacaa

SEQ ID NO: 400675 - RNA, 19 nt, Artificial Sequence
  Description of Artificial Sequence: Synthetic oligonucleotide
  Sense Strand Starting at position 1043 of SEQ ID NO: 318830
uguguuaaaucacugauug

SEQ ID NO: 400676 - RNA, 19 nt, Artificial Sequence
  Description of Artificial Sequence: Synthetic oligonucleotide
  Antisense Strand to SEQ ID NO: 400675
caaucagugauuuaacaca

SEQ ID NO: 400677 - RNA, 19 nt, Artificial Sequence
  Description of Artificial Sequence: Synthetic oligonucleotide
  Sense Strand Starting at position 1043 of SEQ ID NO: 318838
aucacugauugcuuuagga

SEQ ID NO: 400678 - RNA, 19 nt, Artificial Sequence
  Description of Artificial Sequence: Synthetic oligonucleotide
  Antisense Strand to SEQ ID NO: 400677
uccuaaagcaaucagugau

SEQ ID NO: 400679 - RNA, 19 nt, Artificial Sequence
  Description of Artificial Sequence: Synthetic oligonucleotide
  Sense Strand Starting at position 1043 of SEQ ID NO: 318851
uuaggagaaucacuaguuu

SEQ ID NO: 400680 - RNA, 19 nt, Artificial Sequence
  Description of Artificial Sequence: Synthetic oligonucleotide
  Antisense Strand to SEQ ID NO: 400679
aaacuagugauucuccuaa

SEQ ID NO: 400681 - RNA, 19 nt, Artificial Sequence
  Description of Artificial Sequence: Synthetic oligonucleotide
  Sense Strand Starting at position 1043 of SEQ ID NO: 319207
auacauuaauucuucggaa

SEQ ID NO: 400682 - RNA, 19 nt, Artificial Sequence
  Description of Artificial Sequence: Synthetic oligonucleotide
  Antisense Strand to SEQ ID NO: 400681
uuccgaagaauuaauguau

SEQ ID NO: 400683 - RNA, 19 nt, Artificial Sequence
  Description of Artificial Sequence: Synthetic oligonucleotide
  Sense Strand Starting at position 1044 of SEQ ID NO: 315275
aauagaggguuguuaaucu

SEQ ID NO: 400684 - RNA, 19 nt, Artificial Sequence
  Description of Artificial Sequence: Synthetic oligonucleotide
  Antisense Strand to SEQ ID NO: 400683
agauuaacaacccucuauu

SEQ ID NO: 400685 - RNA, 19 nt, Artificial Sequence
  Description of Artificial Sequence: Synthetic oligonucleotide
  Sense Strand Starting at position 1044 of SEQ ID NO: 315279
gaggguuguuaaucuuucu

SEQ ID NO: 400686 - RNA, 19 nt, Artificial Sequence
  Description of Artificial Sequence: Synthetic oligonucleotide
  Antisense Strand to SEQ ID NO: 400685
agaaagauuaacaacccuc

SEQ ID NO: 400687 - RNA, 19 nt, Artificial Sequence
  Description of Artificial Sequence: Synthetic oligonucleotide
  Sense Strand Starting at position 1044 of SEQ ID NO: 315744
auguguauugaagggcaua

SEQ ID NO: 400688 - RNA, 19 nt, Artificial Sequence
  Description of Artificial Sequence: Synthetic oligonucleotide
  Antisense Strand to SEQ ID NO: 400687
uaugcccuucaauacacau

SEQ ID NO: 400689 - RNA, 19 nt, Artificial Sequence
  Description of Artificial Sequence: Synthetic oligonucleotide
  Sense Strand Starting at position 1044 of SEQ ID NO: 315745
uguguauugaagggcauaa

SEQ ID NO: 400690 - RNA, 19 nt, Artificial Sequence
  Description of Artificial Sequence: Synthetic oligonucleotide
  Antisense Strand to SEQ ID NO: 400689
uuaugcccuucaauacaca

SEQ ID NO: 400691 - RNA, 19 nt, Artificial Sequence
  Description of Artificial Sequence: Synthetic oligonucleotide
  Sense Strand Starting at position 1044 of SEQ ID NO: 315787
uaaggaguucuguaaguac

SEQ ID NO: 400692 - RNA, 19 nt, Artificial Sequence
  Description of Artificial Sequence: Synthetic oligonucleotide
  Antisense Strand to SEQ ID NO: 400691
guacuuacagaacuccuua

SEQ ID NO: 400693 - RNA, 19 nt, Artificial Sequence
  Description of Artificial Sequence: Synthetic oligonucleotide
  Sense Strand Starting at position 1044 of SEQ ID NO: 315790
ggaguucuguaaguacaaa

SEQ ID NO: 400694 - RNA, 19 nt, Artificial Sequence
  Description of Artificial Sequence: Synthetic oligonucleotide
  Antisense Strand to SEQ ID NO: 400693
uuuguacuuacagaacucc

SEQ ID NO: 400695 - RNA, 19 nt, Artificial Sequence
  Description of Artificial Sequence: Synthetic oligonucleotide
  Sense Strand Starting at position 1044 of SEQ ID NO: 315852
acccacgucagaggaauaa

SEQ ID NO: 400696 - RNA, 19 nt, Artificial Sequence
  Description of Artificial Sequence: Synthetic oligonucleotide
  Antisense Strand to SEQ ID NO: 400695
uuauuccucugacgugggu

SEQ ID NO: 400697 - RNA, 19 nt, Artificial Sequence
  Description of Artificial Sequence: Synthetic oligonucleotide
  Sense Strand Starting at position 1044 of SEQ ID NO: 315939
cugucugaacucgaaaucu

SEQ ID NO: 400698 - RNA, 19 nt, Artificial Sequence
  Description of Artificial Sequence: Synthetic oligonucleotide
  Antisense Strand to SEQ ID NO: 400697
agauuucgaguucagacag

SEQ ID NO: 400699 - RNA, 19 nt, Artificial Sequence
  Description of Artificial Sequence: Synthetic oligonucleotide
  Sense Strand Starting at position 1044 of SEQ ID NO: 316106
uguauuguacgccaauaaa

SEQ ID NO: 400700 - RNA, 19 nt, Artificial Sequence
  Description of Artificial Sequence: Synthetic oligonucleotide
  Antisense Strand to SEQ ID NO: 400699
uuuauuggcguacaauaca

SEQ ID NO: 400701 - RNA, 19 nt, Artificial Sequence
  Description of Artificial Sequence: Synthetic oligonucleotide
  Sense Strand Starting at position 1044 of SEQ ID NO: 316275
uuaugaagguuucucagca

SEQ ID NO: 400702 - RNA, 19 nt, Artificial Sequence
  Description of Artificial Sequence: Synthetic oligonucleotide
  Antisense Strand to SEQ ID NO: 400701
ugcugagaaaccuucauaa

SEQ ID NO: 400703 - RNA, 19 nt, Artificial Sequence
  Description of Artificial Sequence: Synthetic oligonucleotide
  Sense Strand Starting at position 1044 of SEQ ID NO: 316279
gaagguuucucagcacauc

SEQ ID NO: 400704 - RNA, 19 nt, Artificial Sequence
  Description of Artificial Sequence: Synthetic oligonucleotide
  Antisense Strand to SEQ ID NO: 400703
gaugugcugagaaaccuuc

SEQ ID NO: 400705 - RNA, 19 nt, Artificial Sequence
  Description of Artificial Sequence: Synthetic oligonucleotide
  Sense Strand Starting at position 1044 of SEQ ID NO: 316290
agcacaucagcugaugaga

SEQ ID NO: 400706 - RNA, 19 nt, Artificial Sequence
  Description of Artificial Sequence: Synthetic oligonucleotide
  Antisense Strand to SEQ ID NO: 400705
ucucaucagcugaugugcu

SEQ ID NO: 400707 - RNA, 19 nt, Artificial Sequence
  Description of Artificial Sequence: Synthetic oligonucleotide
  Sense Strand Starting at position 1044 of SEQ ID NO: 316322
uccugaguccaagauguuc

SEQ ID NO: 400708 - RNA, 19 nt, Artificial Sequence
  Description of Artificial Sequence: Synthetic oligonucleotide
  Antisense Strand to SEQ ID NO: 400707
gaacaucuuggacucagga

SEQ ID NO: 400709 - RNA, 19 nt, Artificial Sequence
  Description of Artificial Sequence: Synthetic oligonucleotide
  Sense Strand Starting at position 1044 of SEQ ID NO: 316327
aguccaagauguucuacau

SEQ ID NO: 400710 - RNA, 19 nt, Artificial Sequence
  Description of Artificial Sequence: Synthetic oligonucleotide
  Antisense Strand to SEQ ID NO: 400709
auguagaacaucuuggacu

SEQ ID NO: 400711 - RNA, 19 nt, Artificial Sequence
  Description of Artificial Sequence: Synthetic oligonucleotide
  Sense Strand Starting at position 1044 of SEQ ID NO: 316348
uuaauccucuuggcaaaga

SEQ ID NO: 400712 - RNA, 19 nt, Artificial Sequence
  Description of Artificial Sequence: Synthetic oligonucleotide
  Antisense Strand to SEQ ID NO: 400711
ucuuugccaagaggauuaa

SEQ ID NO: 400713 - RNA, 19 nt, Artificial Sequence
  Description of Artificial Sequence: Synthetic oligonucleotide
  Sense Strand Starting at position 1044 of SEQ ID NO: 316428
ggagauguuauguacguua

SEQ ID NO: 400714 - RNA, 19 nt, Artificial Sequence
  Description of Artificial Sequence: Synthetic oligonucleotide
  Antisense Strand to SEQ ID NO: 400713
uaacguacauaacaucucc

SEQ ID NO: 400715 - RNA, 19 nt, Artificial Sequence
  Description of Artificial Sequence: Synthetic oligonucleotide
  Sense Strand Starting at position 1044 of SEQ ID NO: 316457
gacacacuggcaugugaaa

SEQ ID NO: 400716 - RNA, 19 nt, Artificial Sequence
  Description of Artificial Sequence: Synthetic oligonucleotide
  Antisense Strand to SEQ ID NO: 400715
uuucacaugccaguguguc

SEQ ID NO: 400717 - RNA, 19 nt, Artificial Sequence
  Description of Artificial Sequence: Synthetic oligonucleotide
  Sense Strand Starting at position 1044 of SEQ ID NO: 316565
guggacuauuaaguuaaua

SEQ ID NO: 400718 - RNA, 19 nt, Artificial Sequence
  Description of Artificial Sequence: Synthetic oligonucleotide
  Antisense Strand to SEQ ID NO: 400717
uauuaacuuaauaguccac

SEQ ID NO: 400719 - RNA, 19 nt, Artificial Sequence
  Description of Artificial Sequence: Synthetic oligonucleotide
  Sense Strand Starting at position 1044 of SEQ ID NO: 316685
ggucuaugcgcacaaagaa

SEQ ID NO: 400720 - RNA, 19 nt, Artificial Sequence
  Description of Artificial Sequence: Synthetic oligonucleotide
  Antisense Strand to SEQ ID NO: 400719
uucuuugugcgcauagacc

SEQ ID NO: 400721 - RNA, 19 nt, Artificial Sequence
  Description of Artificial Sequence: Synthetic oligonucleotide
  Sense Strand Starting at position 1044 of SEQ ID NO: 317434
agaaguggaucagagaaca

SEQ ID NO: 400722 - RNA, 19 nt, Artificial Sequence
  Description of Artificial Sequence: Synthetic oligonucleotide
  Antisense Strand to SEQ ID NO: 400721
uguucucugauccacuucu

SEQ ID NO: 400723 - RNA, 19 nt, Artificial Sequence
  Description of Artificial Sequence: Synthetic oligonucleotide
  Sense Strand Starting at position 1044 of SEQ ID NO: 317477
ucucaauccugacugagca

SEQ ID NO: 400724 - RNA, 19 nt, Artificial Sequence
  Description of Artificial Sequence: Synthetic oligonucleotide
  Antisense Strand to SEQ ID NO: 400723
ugcucagucaggauugaga

SEQ ID NO: 400725 - RNA, 19 nt, Artificial Sequence
  Description of Artificial Sequence: Synthetic oligonucleotide
  Sense Strand Starting at position 1044 of SEQ ID NO: 317478
cucaauccugacugagcau

SEQ ID NO: 400726 - RNA, 19 nt, Artificial Sequence
  Description of Artificial Sequence: Synthetic oligonucleotide
  Antisense Strand to SEQ ID NO: 400725
augcucagucaggauugag

SEQ ID NO: 400727 - RNA, 19 nt, Artificial Sequence
  Description of Artificial Sequence: Synthetic oligonucleotide
  Sense Strand Starting at position 1044 of SEQ ID NO: 317493
gcaucugaaucaccugaga

SEQ ID NO: 400728 - RNA, 19 nt, Artificial Sequence
  Description of Artificial Sequence: Synthetic oligonucleotide
  Antisense Strand to SEQ ID NO: 400727
ucucaggugauucagaugc

SEQ ID NO: 400729 - RNA, 19 nt, Artificial Sequence
  Description of Artificial Sequence: Synthetic oligonucleotide
  Sense Strand Starting at position 1044 of SEQ ID NO: 317552
gucagagucugugcauuua

SEQ ID NO: 400730 - RNA, 19 nt, Artificial Sequence
  Description of Artificial Sequence: Synthetic oligonucleotide
  Antisense Strand to SEQ ID NO: 400729
uaaaugcacagacucugac

SEQ ID NO: 400731 - RNA, 19 nt, Artificial Sequence
  Description of Artificial Sequence: Synthetic oligonucleotide
  Sense Strand Starting at position 1044 of SEQ ID NO: 317614
ccuagaagucuuuaccuga

SEQ ID NO: 400732 - RNA, 19 nt, Artificial Sequence
  Description of Artificial Sequence: Synthetic oligonucleotide
  Antisense Strand to SEQ ID NO: 400731
ucagguaaagacuucuagg

SEQ ID NO: 400733 - RNA, 19 nt, Artificial Sequence
  Description of Artificial Sequence: Synthetic oligonucleotide
  Sense Strand Starting at position 1044 of SEQ ID NO: 317697
cguugagugacagagauaa

SEQ ID NO: 400734 - RNA, 19 nt, Artificial Sequence
  Description of Artificial Sequence: Synthetic oligonucleotide
  Antisense Strand to SEQ ID NO: 400733
uuaucucugucacucaacg

SEQ ID NO: 400735 - RNA, 19 nt, Artificial Sequence
  Description of Artificial Sequence: Synthetic oligonucleotide
  Sense Strand Starting at position 1044 of SEQ ID NO: 317759
cgagaccugagccaauuau

SEQ ID NO: 400736 - RNA, 19 nt, Artificial Sequence
  Description of Artificial Sequence: Synthetic oligonucleotide
  Antisense Strand to SEQ ID NO: 400735
auaauuggcucaggucucg

SEQ ID NO: 400737 - RNA, 19 nt, Artificial Sequence
  Description of Artificial Sequence: Synthetic oligonucleotide
  Sense Strand Starting at position 1044 of SEQ ID NO: 317919
ggacaaagauucuaagaag

SEQ ID NO: 400738 - RNA, 19 nt, Artificial Sequence
  Description of Artificial Sequence: Synthetic oligonucleotide
  Antisense Strand to SEQ ID NO: 400737
cuucuuagaaucuuugucc

SEQ ID NO: 400739 - RNA, 19 nt, Artificial Sequence
  Description of Artificial Sequence: Synthetic oligonucleotide
  Sense Strand Starting at position 1044 of SEQ ID NO: 317945
ggaagaaggcugcagucua

SEQ ID NO: 400740 - RNA, 19 nt, Artificial Sequence
  Description of Artificial Sequence: Synthetic oligonucleotide
  Antisense Strand to SEQ ID NO: 400739
uagacugcagccuucuucc

SEQ ID NO: 400741 - RNA, 19 nt, Artificial Sequence
  Description of Artificial Sequence: Synthetic oligonucleotide
  Sense Strand Starting at position 1044 of SEQ ID NO: 318048
cugguaagugcuuagauag

SEQ ID NO: 400742 - RNA, 19 nt, Artificial Sequence
  Description of Artificial Sequence: Synthetic oligonucleotide
  Antisense Strand to SEQ ID NO: 400741
cuaucuaagcacuuaccag

SEQ ID NO: 400743 - RNA, 19 nt, Artificial Sequence
  Description of Artificial Sequence: Synthetic oligonucleotide
  Sense Strand Starting at position 1044 of SEQ ID NO: 318455
uucuuauaguauucugacu

SEQ ID NO: 400744 - RNA, 19 nt, Artificial Sequence
  Description of Artificial Sequence: Synthetic oligonucleotide
  Antisense Strand to SEQ ID NO: 400743
agucagaauacuauaagaa

SEQ ID NO: 400745 - RNA, 19 nt, Artificial Sequence
  Description of Artificial Sequence: Synthetic oligonucleotide
  Sense Strand Starting at position 1044 of SEQ ID NO: 318460
auaguauucugacuuugug

SEQ ID NO: 400746 - RNA, 19 nt, Artificial Sequence
  Description of Artificial Sequence: Synthetic oligonucleotide
  Antisense Strand to SEQ ID NO: 400745
cacaaagucagaauacuau

SEQ ID NO: 400747 - RNA, 19 nt, Artificial Sequence
  Description of Artificial Sequence: Synthetic oligonucleotide
  Sense Strand Starting at position 1044 of SEQ ID NO: 318528
uugagaucauaugcaauaa

SEQ ID NO: 400748 - RNA, 19 nt, Artificial Sequence
  Description of Artificial Sequence: Synthetic oligonucleotide
  Antisense Strand to SEQ ID NO: 400747
uuauugcauaugaucucaa

SEQ ID NO: 400749 - RNA, 19 nt, Artificial Sequence
  Description of Artificial Sequence: Synthetic oligonucleotide
  Sense Strand Starting at position 1044 of SEQ ID NO: 318563
acuuaauguuagguuguaa

SEQ ID NO: 400750 - RNA, 19 nt, Artificial Sequence
  Description of Artificial Sequence: Synthetic oligonucleotide
  Antisense Strand to SEQ ID NO: 400749
uuacaaccuaacauuaagu

SEQ ID NO: 400751 - RNA, 19 nt, Artificial Sequence
  Description of Artificial Sequence: Synthetic oligonucleotide
  Sense Strand Starting at position 1044 of SEQ ID NO: 318607
uuuccagguuucccauauu

SEQ ID NO: 400752 - RNA, 19 nt, Artificial Sequence
  Description of Artificial Sequence: Synthetic oligonucleotide
  Antisense Strand to SEQ ID NO: 400751
aauaugggaaaccuggaaa

SEQ ID NO: 400753 - RNA, 19 nt, Artificial Sequence
  Description of Artificial Sequence: Synthetic oligonucleotide
  Sense Strand Starting at position 1044 of SEQ ID NO: 318610
ccagguuucccauauuaua

SEQ ID NO: 400754 - RNA, 19 nt, Artificial Sequence
  Description of Artificial Sequence: Synthetic oligonucleotide
  Antisense Strand to SEQ ID NO: 400753
uauaauaugggaaaccugg

SEQ ID NO: 400755 - RNA, 19 nt, Artificial Sequence
  Description of Artificial Sequence: Synthetic oligonucleotide
  Sense Strand Starting at position 1044 of SEQ ID NO: 318674
gcaucuugaugccuaauuu

SEQ ID NO: 400756 - RNA, 19 nt, Artificial Sequence
  Description of Artificial Sequence: Synthetic oligonucleotide
  Antisense Strand to SEQ ID NO: 400755
aaauuaggcaucaagaugc

SEQ ID NO: 400757 - RNA, 19 nt, Artificial Sequence
  Description of Artificial Sequence: Synthetic oligonucleotide
  Sense Strand Starting at position 1044 of SEQ ID NO: 319016
gagugccuacuagauagau

SEQ ID NO: 400758 - RNA, 19 nt, Artificial Sequence
  Description of Artificial Sequence: Synthetic oligonucleotide
  Antisense Strand to SEQ ID NO: 400757
aucuaucuaguaggcacuc

SEQ ID NO: 400759 - RNA, 19 nt, Artificial Sequence
  Description of Artificial Sequence: Synthetic oligonucleotide
  Sense Strand Starting at position 1044 of SEQ ID NO: 319018
gugccuacuagauagaugu

SEQ ID NO: 400760 - RNA, 19 nt, Artificial Sequence
  Description of Artificial Sequence: Synthetic oligonucleotide
  Antisense Strand to SEQ ID NO: 400759
acaucuaucuaguaggcac

SEQ ID NO: 400761 - RNA, 19 nt, Artificial Sequence
  Description of Artificial Sequence: Synthetic oligonucleotide
  Sense Strand Starting at position 1044 of SEQ ID NO: 319035
gucaaauguuagguuagga

SEQ ID NO: 400762 - RNA, 19 nt, Artificial Sequence
  Description of Artificial Sequence: Synthetic oligonucleotide
  Antisense Strand to SEQ ID NO: 400761
uccuaaccuaacauuugac

SEQ ID NO: 400763 - RNA, 19 nt, Artificial Sequence
  Description of Artificial Sequence: Synthetic oligonucleotide
  Sense Strand Starting at position 1045 of SEQ ID NO: 315532
agggcuagccaucacauaa

SEQ ID NO: 400764 - RNA, 19 nt, Artificial Sequence
  Description of Artificial Sequence: Synthetic oligonucleotide
  Antisense Strand to SEQ ID NO: 400763
uuaugugauggcuagcccu

SEQ ID NO: 400765 - RNA, 19 nt, Artificial Sequence
  Description of Artificial Sequence: Synthetic oligonucleotide
  Sense Strand Starting at position 1045 of SEQ ID NO: 315595
uugucaagugcugauaaua

SEQ ID NO: 400766 - RNA, 19 nt, Artificial Sequence
  Description of Artificial Sequence: Synthetic oligonucleotide
  Antisense Strand to SEQ ID NO: 400765
uauuaucagcacuugacaa

SEQ ID NO: 400767 - RNA, 19 nt, Artificial Sequence
  Description of Artificial Sequence: Synthetic oligonucleotide
  Sense Strand Starting at position 1045 of SEQ ID NO: 315729
agagaaguaagguguuuga

SEQ ID NO: 400768 - RNA, 19 nt, Artificial Sequence
  Description of Artificial Sequence: Synthetic oligonucleotide
  Antisense Strand to SEQ ID NO: 400767
ucaaacaccuuacuucucu

SEQ ID NO: 400769 - RNA, 19 nt, Artificial Sequence
  Description of Artificial Sequence: Synthetic oligonucleotide
  Sense Strand Starting at position 1045 of SEQ ID NO: 315787
guccuaaucggcuacuuau

SEQ ID NO: 400770 - RNA, 19 nt, Artificial Sequence
  Description of Artificial Sequence: Synthetic oligonucleotide
  Antisense Strand to SEQ ID NO: 400769
auaaguagccgauuaggac

SEQ ID NO: 400771 - RNA, 19 nt, Artificial Sequence
  Description of Artificial Sequence: Synthetic oligonucleotide
  Sense Strand Starting at position 1045 of SEQ ID NO: 315797
gcuacuuauguggaccaaa

SEQ ID NO: 400772 - RNA, 19 nt, Artificial Sequence
  Description of Artificial Sequence: Synthetic oligonucleotide
  Antisense Strand to SEQ ID NO: 400771
uuugguccacauaaguagc

SEQ ID NO: 400773 - RNA, 19 nt, Artificial Sequence
  Description of Artificial Sequence: Synthetic oligonucleotide
  Sense Strand Starting at position 1045 of SEQ ID NO: 315979
uucuguaguguccaucaau

SEQ ID NO: 400774 - RNA, 19 nt, Artificial Sequence
  Description of Artificial Sequence: Synthetic oligonucleotide
  Antisense Strand to SEQ ID NO: 400773
auugauggacacuacagaa

SEQ ID NO: 400775 - RNA, 19 nt, Artificial Sequence
  Description of Artificial Sequence: Synthetic oligonucleotide
  Sense Strand Starting at position 1045 of SEQ ID NO: 315982
uguaguguccaucaaucua

SEQ ID NO: 400776 - RNA, 19 nt, Artificial Sequence
  Description of Artificial Sequence: Synthetic oligonucleotide
  Antisense Strand to SEQ ID NO: 400775
uagauugauggacacuaca

SEQ ID NO: 400777 - RNA, 19 nt, Artificial Sequence
  Description of Artificial Sequence: Synthetic oligonucleotide
  Sense Strand Starting at position 1045 of SEQ ID NO: 316077
ccagaaggcuccucacuga

SEQ ID NO: 400778 - RNA, 19 nt, Artificial Sequence
  Description of Artificial Sequence: Synthetic oligonucleotide
  Antisense Strand to SEQ ID NO: 400777
ucagugaggagccuucugg

SEQ ID NO: 400779 - RNA, 19 nt, Artificial Sequence
  Description of Artificial Sequence: Synthetic oligonucleotide
  Sense Strand Starting at position 1045 of SEQ ID NO: 316099
ccuuacucgucucuggaga

SEQ ID NO: 400780 - RNA, 19 nt, Artificial Sequence
  Description of Artificial Sequence: Synthetic oligonucleotide
  Antisense Strand to SEQ ID NO: 400779
ucuccagagacgaguaagg

SEQ ID NO: 400781 - RNA, 19 nt, Artificial Sequence
  Description of Artificial Sequence: Synthetic oligonucleotide
  Sense Strand Starting at position 1045 of SEQ ID NO: 316100
cuuacucgucucuggagaa

SEQ ID NO: 400782 - RNA, 19 nt, Artificial Sequence
  Description of Artificial Sequence: Synthetic oligonucleotide
  Antisense Strand to SEQ ID NO: 400781
uucuccagagacgaguaag

SEQ ID NO: 400783 - RNA, 19 nt, Artificial Sequence
  Description of Artificial Sequence: Synthetic oligonucleotide
  Sense Strand Starting at position 1045 of SEQ ID NO: 316169
ccuuguuaagacuguacca

SEQ ID NO: 400784 - RNA, 19 nt, Artificial Sequence
  Description of Artificial Sequence: Synthetic oligonucleotide
  Antisense Strand to SEQ ID NO: 400783
ugguacagucuuaacaagg

SEQ ID NO: 400785 - RNA, 19 nt, Artificial Sequence
  Description of Artificial Sequence: Synthetic oligonucleotide
  Sense Strand Starting at position 1045 of SEQ ID NO: 316171
uuguuaagacuguaccaaa

SEQ ID NO: 400786 - RNA, 19 nt, Artificial Sequence
  Description of Artificial Sequence: Synthetic oligonucleotide
  Antisense Strand to SEQ ID NO: 400785
uuugguacagucuuaacaa

SEQ ID NO: 400787 - RNA, 19 nt, Artificial Sequence
  Description of Artificial Sequence: Synthetic oligonucleotide
  Sense Strand Starting at position 1045 of SEQ ID NO: 316286
agaauuaagucucucggau

SEQ ID NO: 400788 - RNA, 19 nt, Artificial Sequence
  Description of Artificial Sequence: Synthetic oligonucleotide
  Antisense Strand to SEQ ID NO: 400787
auccgagagacuuaauucu

SEQ ID NO: 400789 - RNA, 19 nt, Artificial Sequence
  Description of Artificial Sequence: Synthetic oligonucleotide
  Sense Strand Starting at position 1045 of SEQ ID NO: 316305
ucuccauuccgguaauaau

SEQ ID NO: 400790 - RNA, 19 nt, Artificial Sequence
  Description of Artificial Sequence: Synthetic oligonucleotide
  Antisense Strand to SEQ ID NO: 400789
auuauuaccggaauggaga

SEQ ID NO: 400791 - RNA, 19 nt, Artificial Sequence
  Description of Artificial Sequence: Synthetic oligonucleotide
  Sense Strand Starting at position 1045 of SEQ ID NO: 316544
cgacucagccauuaaguua

SEQ ID NO: 400792 - RNA, 19 nt, Artificial Sequence
  Description of Artificial Sequence: Synthetic oligonucleotide
  Antisense Strand to SEQ ID NO: 400791
uaacuuaauggcugagucg

SEQ ID NO: 400793 - RNA, 19 nt, Artificial Sequence
  Description of Artificial Sequence: Synthetic oligonucleotide
  Sense Strand Starting at position 1045 of SEQ ID NO: 316555
uuaaguuaccucugugacu

SEQ ID NO: 400794 - RNA, 19 nt, Artificial Sequence
  Description of Artificial Sequence: Synthetic oligonucleotide
  Antisense Strand to SEQ ID NO: 400793
agucacagagguaacuuaa

SEQ ID NO: 400795 - RNA, 19 nt, Artificial Sequence
  Description of Artificial Sequence: Synthetic oligonucleotide
  Sense Strand Starting at position 1045 of SEQ ID NO: 316600
cuaucugagccucagaguu

SEQ ID NO: 400796 - RNA, 19 nt, Artificial Sequence
  Description of Artificial Sequence: Synthetic oligonucleotide
  Antisense Strand to SEQ ID NO: 400795
aacucugaggcucagauag

SEQ ID NO: 400797 - RNA, 19 nt, Artificial Sequence
  Description of Artificial Sequence: Synthetic oligonucleotide
  Sense Strand Starting at position 1045 of SEQ ID NO: 316632
caggauugaaugugacgau

SEQ ID NO: 400798 - RNA, 19 nt, Artificial Sequence
  Description of Artificial Sequence: Synthetic oligonucleotide
  Antisense Strand to SEQ ID NO: 400797
aucgucacauucaauccug

SEQ ID NO: 400799 - RNA, 19 nt, Artificial Sequence
  Description of Artificial Sequence: Synthetic oligonucleotide
  Sense Strand Starting at position 1045 of SEQ ID NO: 317038
cuuaccguucgagauguaa

SEQ ID NO: 400800 - RNA, 19 nt, Artificial Sequence
  Description of Artificial Sequence: Synthetic oligonucleotide
  Antisense Strand to SEQ ID NO: 400799
uuacaucucgaacgguaag

SEQ ID NO: 400801 - RNA, 19 nt, Artificial Sequence
  Description of Artificial Sequence: Synthetic oligonucleotide
  Sense Strand Starting at position 1045 of SEQ ID NO: 317293
cggauaugacguuaaggac

SEQ ID NO: 400802 - RNA, 19 nt, Artificial Sequence
  Description of Artificial Sequence: Synthetic oligonucleotide
  Antisense Strand to SEQ ID NO: 400801
guccuuaacgucauauccg

SEQ ID NO: 400803 - RNA, 19 nt, Artificial Sequence
  Description of Artificial Sequence: Synthetic oligonucleotide
  Sense Strand Starting at position 1045 of SEQ ID NO: 317326
cgcgguugccaguccucua

SEQ ID NO: 400804 - RNA, 19 nt, Artificial Sequence
  Description of Artificial Sequence: Synthetic oligonucleotide
  Antisense Strand to SEQ ID NO: 400803
uagaggacuggcaaccgcg

SEQ ID NO: 400805 - RNA, 19 nt, Artificial Sequence
  Description of Artificial Sequence: Synthetic oligonucleotide
  Sense Strand Starting at position 1045 of SEQ ID NO: 317327
gcgguugccaguccucuau

SEQ ID NO: 400806 - RNA, 19 nt, Artificial Sequence
  Description of Artificial Sequence: Synthetic oligonucleotide
  Antisense Strand to SEQ ID NO: 400805
auagaggacuggcaaccgc

SEQ ID NO: 400807 - RNA, 19 nt, Artificial Sequence
  Description of Artificial Sequence: Synthetic oligonucleotide
  Sense Strand Starting at position 1045 of SEQ ID NO: 317572
aggcucuuccuagauauau

SEQ ID NO: 400808 - RNA, 19 nt, Artificial Sequence
  Description of Artificial Sequence: Synthetic oligonucleotide
  Antisense Strand to SEQ ID NO: 400807
auauaucuaggaagagccu

SEQ ID NO: 400809 - RNA, 19 nt, Artificial Sequence
  Description of Artificial Sequence: Synthetic oligonucleotide
  Sense Strand Starting at position 1045 of SEQ ID NO: 317735
uuuggugacagacgaauua

SEQ ID NO: 400810 - RNA, 19 nt, Artificial Sequence
  Description of Artificial Sequence: Synthetic oligonucleotide
  Antisense Strand to SEQ ID NO: 400809
uaauucgucugucaccaaa

SEQ ID NO: 400811 - RNA, 19 nt, Artificial Sequence
  Description of Artificial Sequence: Synthetic oligonucleotide
  Sense Strand Starting at position 1045 of SEQ ID NO: 317755
aagacaugucuuggacauu

SEQ ID NO: 400812 - RNA, 19 nt, Artificial Sequence
  Description of Artificial Sequence: Synthetic oligonucleotide
  Antisense Strand to SEQ ID NO: 400811
aauguccaagacaugucuu

SEQ ID NO: 400813 - RNA, 19 nt, Artificial Sequence
  Description of Artificial Sequence: Synthetic oligonucleotide
  Sense Strand Starting at position 1045 of SEQ ID NO: 317951
gugucaucucuuuggaaag

SEQ ID NO: 400814 - RNA, 19 nt, Artificial Sequence
  Description of Artificial Sequence: Synthetic oligonucleotide
  Antisense Strand to SEQ ID NO: 400813
cuuuccaaagagaugacac

SEQ ID NO: 400815 - RNA, 19 nt, Artificial Sequence
  Description of Artificial Sequence: Synthetic oligonucleotide
  Sense Strand Starting at position 1045 of SEQ ID NO: 318023
guuuaacaacuuugguuaa

SEQ ID NO: 400816 - RNA, 19 nt, Artificial Sequence
  Description of Artificial Sequence: Synthetic oligonucleotide
  Antisense Strand to SEQ ID NO: 400815
uuaaccaaaguuguuaaac

SEQ ID NO: 400817 - RNA, 19 nt, Artificial Sequence
  Description of Artificial Sequence: Synthetic oligonucleotide
  Sense Strand Starting at position 1045 of SEQ ID NO: 318025
uuaacaacuuugguuaaga

SEQ ID NO: 400818 - RNA, 19 nt, Artificial Sequence
  Description of Artificial Sequence: Synthetic oligonucleotide
  Antisense Strand to SEQ ID NO: 400817
ucuuaaccaaaguuguuaa

SEQ ID NO: 400819 - RNA, 19 nt, Artificial Sequence
  Description of Artificial Sequence: Synthetic oligonucleotide
  Sense Strand Starting at position 1045 of SEQ ID NO: 318231
ggccuuucuuaaucuagac

SEQ ID NO: 400820 - RNA, 19 nt, Artificial Sequence
  Description of Artificial Sequence: Synthetic oligonucleotide
  Antisense Strand to SEQ ID NO: 400819
gucuagauuaagaaaggcc

SEQ ID NO: 400821 - RNA, 19 nt, Artificial Sequence
  Description of Artificial Sequence: Synthetic oligonucleotide
  Sense Strand Starting at position 1045 of SEQ ID NO: 318345
uguagcaagaucgaucuua

SEQ ID NO: 400822 - RNA, 19 nt, Artificial Sequence
  Description of Artificial Sequence: Synthetic oligonucleotide
  Antisense Strand to SEQ ID NO: 400821
uaagaucgaucuugcuaca

SEQ ID NO: 400823 - RNA, 19 nt, Artificial Sequence
  Description of Artificial Sequence: Synthetic oligonucleotide
  Sense Strand Starting at position 1045 of SEQ ID NO: 318468
caaggugacuuguccucuu

SEQ ID NO: 400824 - RNA, 19 nt, Artificial Sequence
  Description of Artificial Sequence: Synthetic oligonucleotide
  Antisense Strand to SEQ ID NO: 400823
aagaggacaagucaccuug

SEQ ID NO: 400825 - RNA, 19 nt, Artificial Sequence
  Description of Artificial Sequence: Synthetic oligonucleotide
  Sense Strand Starting at position 1045 of SEQ ID NO: 318806
uugugaaacugucugauaa

SEQ ID NO: 400826 - RNA, 19 nt, Artificial Sequence
  Description of Artificial Sequence: Synthetic oligonucleotide
  Antisense Strand to SEQ ID NO: 400825
uuaucagacaguuucacaa

SEQ ID NO: 400827 - RNA, 19 nt, Artificial Sequence
  Description of Artificial Sequence: Synthetic oligonucleotide
  Sense Strand Starting at position 1045 of SEQ ID NO: 318807
ugugaaacugucugauaau

SEQ ID NO: 400828 - RNA, 19 nt, Artificial Sequence
  Description of Artificial Sequence: Synthetic oligonucleotide
  Antisense Strand to SEQ ID NO: 400827
auuaucagacaguuucaca

SEQ ID NO: 400829 - RNA, 19 nt, Artificial Sequence
  Description of Artificial Sequence: Synthetic oligonucleotide
  Sense Strand Starting at position 1045 of SEQ ID NO: 318824
auugauuugucucuugucu

SEQ ID NO: 400830 - RNA, 19 nt, Artificial Sequence
  Description of Artificial Sequence: Synthetic oligonucleotide
  Antisense Strand to SEQ ID NO: 400829
agacaagagacaaaucaau

SEQ ID NO: 400831 - RNA, 19 nt, Artificial Sequence
  Description of Artificial Sequence: Synthetic oligonucleotide
  Sense Strand Starting at position 1045 of SEQ ID NO: 318930
guaguaggugcucagauau

SEQ ID NO: 400832 - RNA, 19 nt, Artificial Sequence
  Description of Artificial Sequence: Synthetic oligonucleotide
  Antisense Strand to SEQ ID NO: 400831
auaucugagcaccuacuac

SEQ ID NO: 400833 - RNA, 19 nt, Artificial Sequence
  Description of Artificial Sequence: Synthetic oligonucleotide
  Sense Strand Starting at position 1045 of SEQ ID NO: 318942
cagauauuuguugguuggu

SEQ ID NO: 400834 - RNA, 19 nt, Artificial Sequence
  Description of Artificial Sequence: Synthetic oligonucleotide
  Antisense Strand to SEQ ID NO: 400833
accaaccaacaaauaucug

SEQ ID NO: 400835 - RNA, 19 nt, Artificial Sequence
  Description of Artificial Sequence: Synthetic oligonucleotide
  Sense Strand Starting at position 1045 of SEQ ID NO: 318947
auuuguugguugguugaau

SEQ ID NO: 400836 - RNA, 19 nt, Artificial Sequence
  Description of Artificial Sequence: Synthetic oligonucleotide
  Antisense Strand to SEQ ID NO: 400835
auucaaccaaccaacaaau

SEQ ID NO: 400837 - RNA, 19 nt, Artificial Sequence
  Description of Artificial Sequence: Synthetic oligonucleotide
  Sense Strand Starting at position 1045 of SEQ ID NO: 319039
uugggaucuccugaguauc

SEQ ID NO: 400838 - RNA, 19 nt, Artificial Sequence
  Description of Artificial Sequence: Synthetic oligonucleotide
  Antisense Strand to SEQ ID NO: 400837
gauacucaggagaucccaa

SEQ ID NO: 400839 - RNA, 19 nt, Artificial Sequence
  Description of Artificial Sequence: Synthetic oligonucleotide
  Sense Strand Starting at position 1045 of SEQ ID NO: 319042
ggaucuccugaguaucgga

SEQ ID NO: 400840 - RNA, 19 nt, Artificial Sequence
  Description of Artificial Sequence: Synthetic oligonucleotide
  Antisense Strand to SEQ ID NO: 400839
uccgauacucaggagaucc

SEQ ID NO: 400841 - RNA, 19 nt, Artificial Sequence
  Description of Artificial Sequence: Synthetic oligonucleotide
  Sense Strand Starting at position 1045 of SEQ ID NO: 319185
cuguuaguuuaauccaauc

SEQ ID NO: 400842 - RNA, 19 nt, Artificial Sequence
  Description of Artificial Sequence: Synthetic oligonucleotide
  Antisense Strand to SEQ ID NO: 400841
gauuggauuaaacuaacag

SEQ ID NO: 400843 - RNA, 19 nt, Artificial Sequence
  Description of Artificial Sequence: Synthetic oligonucleotide
  Sense Strand Starting at position 1046 of SEQ ID NO: 315289
acacuuaaauccguaagua

SEQ ID NO: 400844 - RNA, 19 nt, Artificial Sequence
  Description of Artificial Sequence: Synthetic oligonucleotide
  Antisense Strand to SEQ ID NO: 400843
uacuuacggauuuaagugu

SEQ ID NO: 400845 - RNA, 19 nt, Artificial Sequence
  Description of Artificial Sequence: Synthetic oligonucleotide
  Sense Strand Starting at position 1046 of SEQ ID NO: 315321
caaucuuuagguuaguaag

SEQ ID NO: 400846 - RNA, 19 nt, Artificial Sequence
  Description of Artificial Sequence: Synthetic oligonucleotide
  Antisense Strand to SEQ ID NO: 400845
cuuacuaaccuaaagauug

SEQ ID NO: 400847 - RNA, 19 nt, Artificial Sequence
  Description of Artificial Sequence: Synthetic oligonucleotide
  Sense Strand Starting at position 1046 of SEQ ID NO: 315323
aucuuuagguuaguaagau

SEQ ID NO: 400848 - RNA, 19 nt, Artificial Sequence
  Description of Artificial Sequence: Synthetic oligonucleotide
  Antisense Strand to SEQ ID NO: 400847
aucuuacuaaccuaaagau

SEQ ID NO: 400849 - RNA, 19 nt, Artificial Sequence
  Description of Artificial Sequence: Synthetic oligonucleotide
  Sense Strand Starting at position 1046 of SEQ ID NO: 315329
agguuaguaagaugauuac

SEQ ID NO: 400850 - RNA, 19 nt, Artificial Sequence
  Description of Artificial Sequence: Synthetic oligonucleotide
  Antisense Strand to SEQ ID NO: 400849
guaaucaucuuacuaaccu

SEQ ID NO: 400851 - RNA, 19 nt, Artificial Sequence
  Description of Artificial Sequence: Synthetic oligonucleotide
  Sense Strand Starting at position 1046 of SEQ ID NO: 315335
guaagaugauuaccaccuu

SEQ ID NO: 400852 - RNA, 19 nt, Artificial Sequence
  Description of Artificial Sequence: Synthetic oligonucleotide
  Antisense Strand to SEQ ID NO: 400851
aaggugguaaucaucuuac

SEQ ID NO: 400853 - RNA, 19 nt, Artificial Sequence
  Description of Artificial Sequence: Synthetic oligonucleotide
  Sense Strand Starting at position 1046 of SEQ ID NO: 315892
ggucuucagugaguaagua

SEQ ID NO: 400854 - RNA, 19 nt, Artificial Sequence
  Description of Artificial Sequence: Synthetic oligonucleotide
  Antisense Strand to SEQ ID NO: 400853
uacuuacucacugaagacc

SEQ ID NO: 400855 - RNA, 19 nt, Artificial Sequence
  Description of Artificial Sequence: Synthetic oligonucleotide
  Sense Strand Starting at position 1046 of SEQ ID NO: 315893
gucuucagugaguaaguaa

SEQ ID NO: 400856 - RNA, 19 nt, Artificial Sequence
  Description of Artificial Sequence: Synthetic oligonucleotide
  Antisense Strand to SEQ ID NO: 400855
uuacuuacucacugaagac

SEQ ID NO: 400857 - RNA, 19 nt, Artificial Sequence
  Description of Artificial Sequence: Synthetic oligonucleotide
  Sense Strand Starting at position 1046 of SEQ ID NO: 316015
guauccggacucugaugau

SEQ ID NO: 400858 - RNA, 19 nt, Artificial Sequence
  Description of Artificial Sequence: Synthetic oligonucleotide
  Antisense Strand to SEQ ID NO: 400857
aucaucagaguccggauac

SEQ ID NO: 400859 - RNA, 19 nt, Artificial Sequence
  Description of Artificial Sequence: Synthetic oligonucleotide
  Sense Strand Starting at position 1046 of SEQ ID NO: 316051
cugggauggucgguuuauc

SEQ ID NO: 400860 - RNA, 19 nt, Artificial Sequence
  Description of Artificial Sequence: Synthetic oligonucleotide
  Antisense Strand to SEQ ID NO: 400859
gauaaaccgaccaucccag

SEQ ID NO: 400861 - RNA, 19 nt, Artificial Sequence
  Description of Artificial Sequence: Synthetic oligonucleotide
  Sense Strand Starting at position 1046 of SEQ ID NO: 316076
aaaugucaucuuuggaggu

SEQ ID NO: 400862 - RNA, 19 nt, Artificial Sequence
  Description of Artificial Sequence: Synthetic oligonucleotide
  Antisense Strand to SEQ ID NO: 400861
accuccaaagaugacauuu

SEQ ID NO: 400863 - RNA, 19 nt, Artificial Sequence
  Description of Artificial Sequence: Synthetic oligonucleotide
  Sense Strand Starting at position 1046 of SEQ ID NO: 316080
gucaucuuuggagguguaa

SEQ ID NO: 400864 - RNA, 19 nt, Artificial Sequence
  Description of Artificial Sequence: Synthetic oligonucleotide
  Antisense Strand to SEQ ID NO: 400863
uuacaccuccaaagaugac

SEQ ID NO: 400865 - RNA, 19 nt, Artificial Sequence
  Description of Artificial Sequence: Synthetic oligonucleotide
  Sense Strand Starting at position 1046 of SEQ ID NO: 316082
caucuuuggagguguaaga

SEQ ID NO: 400866 - RNA, 19 nt, Artificial Sequence
  Description of Artificial Sequence: Synthetic oligonucleotide
  Antisense Strand to SEQ ID NO: 400865
ucuuacaccuccaaagaug

SEQ ID NO: 400867 - RNA, 19 nt, Artificial Sequence
  Description of Artificial Sequence: Synthetic oligonucleotide
  Sense Strand Starting at position 1046 of SEQ ID NO: 316093
guguaagauucucauuucu

SEQ ID NO: 400868 - RNA, 19 nt, Artificial Sequence
  Description of Artificial Sequence: Synthetic oligonucleotide
  Antisense Strand to SEQ ID NO: 400867
agaaaugagaaucuuacac

SEQ ID NO: 400869 - RNA, 19 nt, Artificial Sequence
  Description of Artificial Sequence: Synthetic oligonucleotide
  Sense Strand Starting at position 1046 of SEQ ID NO: 316207
gcuucuaacgauuagguua

SEQ ID NO: 400870 - RNA, 19 nt, Artificial Sequence
  Description of Artificial Sequence: Synthetic oligonucleotide
  Antisense Strand to SEQ ID NO: 400869
uaaccuaaucguuagaagc

SEQ ID NO: 400871 - RNA, 19 nt, Artificial Sequence
  Description of Artificial Sequence: Synthetic oligonucleotide
  Sense Strand Starting at position 1046 of SEQ ID NO: 316238
uuuaaagaacacugucgaa

SEQ ID NO: 400872 - RNA, 19 nt, Artificial Sequence
  Description of Artificial Sequence: Synthetic oligonucleotide
  Antisense Strand to SEQ ID NO: 400871
uucgacaguguucuuuaaa

SEQ ID NO: 400873 - RNA, 19 nt, Artificial Sequence
  Description of Artificial Sequence: Synthetic oligonucleotide
  Sense Strand Starting at position 1046 of SEQ ID NO: 316262
ccgagaucugcuggauaca

SEQ ID NO: 400874 - RNA, 19 nt, Artificial Sequence
  Description of Artificial Sequence: Synthetic oligonucleotide
  Antisense Strand to SEQ ID NO: 400873
uguauccagcagaucucgg

SEQ ID NO: 400875 - RNA, 19 nt, Artificial Sequence
  Description of Artificial Sequence: Synthetic oligonucleotide
  Sense Strand Starting at position 1046 of SEQ ID NO: 316263
cgagaucugcuggauacac

SEQ ID NO: 400876 - RNA, 19 nt, Artificial Sequence
  Description of Artificial Sequence: Synthetic oligonucleotide
  Antisense Strand to SEQ ID NO: 400875
guguauccagcagaucucg

SEQ ID NO: 400877 - RNA, 19 nt, Artificial Sequence
  Description of Artificial Sequence: Synthetic oligonucleotide
  Sense Strand Starting at position 1046 of SEQ ID NO: 316349
gcgagcgaacugucaaugu

SEQ ID NO: 400878 - RNA, 19 nt, Artificial Sequence
  Description of Artificial Sequence: Synthetic oligonucleotide
  Antisense Strand to SEQ ID NO: 400877
acauugacaguucgcucgc

SEQ ID NO: 400879 - RNA, 19 nt, Artificial Sequence
  Description of Artificial Sequence: Synthetic oligonucleotide
  Sense Strand Starting at position 1046 of SEQ ID NO: 316356
aacugucaauguuuagaag

SEQ ID NO: 400880 - RNA, 19 nt, Artificial Sequence
  Description of Artificial Sequence: Synthetic oligonucleotide
  Antisense Strand to SEQ ID NO: 400879
cuucuaaacauugacaguu

SEQ ID NO: 400881 - RNA, 19 nt, Artificial Sequence
  Description of Artificial Sequence: Synthetic oligonucleotide
  Sense Strand Starting at position 1046 of SEQ ID NO: 316525
cccggauccucuccaauga

SEQ ID NO: 400882 - RNA, 19 nt, Artificial Sequence
  Description of Artificial Sequence: Synthetic oligonucleotide
  Antisense Strand to SEQ ID NO: 400881
ucauuggagaggauccggg

SEQ ID NO: 400883 - RNA, 19 nt, Artificial Sequence
  Description of Artificial Sequence: Synthetic oligonucleotide
  Sense Strand Starting at position 1046 of SEQ ID NO: 317298
cgcacacuccuggagugaa

SEQ ID NO: 400884 - RNA, 19 nt, Artificial Sequence
  Description of Artificial Sequence: Synthetic oligonucleotide
  Antisense Strand to SEQ ID NO: 400883
uucacuccaggagugugcg

SEQ ID NO: 400885 - RNA, 19 nt, Artificial Sequence
  Description of Artificial Sequence: Synthetic oligonucleotide
  Sense Strand Starting at position 1046 of SEQ ID NO: 317353
cuugguagugugcaagacu

SEQ ID NO: 400886 - RNA, 19 nt, Artificial Sequence
  Description of Artificial Sequence: Synthetic oligonucleotide
  Antisense Strand to SEQ ID NO: 400885
agucuugcacacuaccaag

SEQ ID NO: 400887 - RNA, 19 nt, Artificial Sequence
  Description of Artificial Sequence: Synthetic oligonucleotide
  Sense Strand Starting at position 1046 of SEQ ID NO: 317431
cuauguaugaggcagaugu

SEQ ID NO: 400888 - RNA, 19 nt, Artificial Sequence
  Description of Artificial Sequence: Synthetic oligonucleotide
  Antisense Strand to SEQ ID NO: 400887
acaucugccucauacauag

SEQ ID NO: 400889 - RNA, 19 nt, Artificial Sequence
  Description of Artificial Sequence: Synthetic oligonucleotide
  Sense Strand Starting at position 1046 of SEQ ID NO: 317435
guaugaggcagaugugagu

SEQ ID NO: 400890 - RNA, 19 nt, Artificial Sequence
  Description of Artificial Sequence: Synthetic oligonucleotide
  Antisense Strand to SEQ ID NO: 400889
acucacaucugccucauac

SEQ ID NO: 400891 - RNA, 19 nt, Artificial Sequence
  Description of Artificial Sequence: Synthetic oligonucleotide
  Sense Strand Starting at position 1046 of SEQ ID NO: 317446
augugaguucugcauccag

SEQ ID NO: 400892 - RNA, 19 nt, Artificial Sequence
  Description of Artificial Sequence: Synthetic oligonucleotide
  Antisense Strand to SEQ ID NO: 400891
cuggaugcagaacucacau

SEQ ID NO: 400893 - RNA, 19 nt, Artificial Sequence
  Description of Artificial Sequence: Synthetic oligonucleotide
  Sense Strand Starting at position 1046 of SEQ ID NO: 317486
cugccugagacuuggaaac

SEQ ID NO: 400894 - RNA, 19 nt, Artificial Sequence
  Description of Artificial Sequence: Synthetic oligonucleotide
  Antisense Strand to SEQ ID NO: 400893
guuuccaagucucaggcag

SEQ ID NO: 400895 - RNA, 19 nt, Artificial Sequence
  Description of Artificial Sequence: Synthetic oligonucleotide
  Sense Strand Starting at position 1046 of SEQ ID NO: 317522
gauucaaguguuggcggau

SEQ ID NO: 400896 - RNA, 19 nt, Artificial Sequence
  Description of Artificial Sequence: Synthetic oligonucleotide
  Antisense Strand to SEQ ID NO: 400895
auccgccaacacuugaauc

SEQ ID NO: 400897 - RNA, 19 nt, Artificial Sequence
  Description of Artificial Sequence: Synthetic oligonucleotide
  Sense Strand Starting at position 1046 of SEQ ID NO: 317525
ucaaguguuggcggaugga

SEQ ID NO: 400898 - RNA, 19 nt, Artificial Sequence
  Description of Artificial Sequence: Synthetic oligonucleotide
  Antisense Strand to SEQ ID NO: 400897
uccauccgccaacacuuga

SEQ ID NO: 400899 - RNA, 19 nt, Artificial Sequence
  Description of Artificial Sequence: Synthetic oligonucleotide
  Sense Strand Starting at position 1046 of SEQ ID NO: 317558
ugacccucagaaugguaau

SEQ ID NO: 400900 - RNA, 19 nt, Artificial Sequence
  Description of Artificial Sequence: Synthetic oligonucleotide
  Antisense Strand to SEQ ID NO: 400899
auuaccauucugaggguca

SEQ ID NO: 400901 - RNA, 19 nt, Artificial Sequence
  Description of Artificial Sequence: Synthetic oligonucleotide
  Sense Strand Starting at position 1046 of SEQ ID NO: 317628
uugcuuucuccugaaagaa

SEQ ID NO: 400902 - RNA, 19 nt, Artificial Sequence
  Description of Artificial Sequence: Synthetic oligonucleotide
  Antisense Strand to SEQ ID NO: 400901
uucuuucaggagaaagcaa

SEQ ID NO: 400903 - RNA, 19 nt, Artificial Sequence
  Description of Artificial Sequence: Synthetic oligonucleotide
  Sense Strand Starting at position 1046 of SEQ ID NO: 317664
aggaaaccuuuggacaauu

SEQ ID NO: 400904 - RNA, 19 nt, Artificial Sequence
  Description of Artificial Sequence: Synthetic oligonucleotide
  Antisense Strand to SEQ ID NO: 400903
aauuguccaaagguuuccu

SEQ ID NO: 400905 - RNA, 19 nt, Artificial Sequence
  Description of Artificial Sequence: Synthetic oligonucleotide
  Sense Strand Starting at position 1046 of SEQ ID NO: 317712
cuuagcaagcuuuaacagu

SEQ ID NO: 400906 - RNA, 19 nt, Artificial Sequence
  Description of Artificial Sequence: Synthetic oligonucleotide
  Antisense Strand to SEQ ID NO: 400905
acuguuaaagcuugcuaag

SEQ ID NO: 400907 - RNA, 19 nt, Artificial Sequence
  Description of Artificial Sequence: Synthetic oligonucleotide
  Sense Strand Starting at position 1046 of SEQ ID NO: 317788
uaggcauauuuggaagcaa

SEQ ID NO: 400908 - RNA, 19 nt, Artificial Sequence
  Description of Artificial Sequence: Synthetic oligonucleotide
  Antisense Strand to SEQ ID NO: 400907
uugcuuccaaauaugccua

SEQ ID NO: 400909 - RNA, 19 nt, Artificial Sequence
  Description of Artificial Sequence: Synthetic oligonucleotide
  Sense Strand Starting at position 1046 of SEQ ID NO: 317945
uucccaagugguuaggaau

SEQ ID NO: 400910 - RNA, 19 nt, Artificial Sequence
  Description of Artificial Sequence: Synthetic oligonucleotide
  Antisense Strand to SEQ ID NO: 400909
auuccuaaccacuugggaa

SEQ ID NO: 400911 - RNA, 19 nt, Artificial Sequence
  Description of Artificial Sequence: Synthetic oligonucleotide
  Sense Strand Starting at position 1046 of SEQ ID NO: 317978
cuaugccuggcuuacaauu

SEQ ID NO: 400912 - RNA, 19 nt, Artificial Sequence
  Description of Artificial Sequence: Synthetic oligonucleotide
  Antisense Strand to SEQ ID NO: 400911
aauuguaagccaggcauag

SEQ ID NO: 400913 - RNA, 19 nt, Artificial Sequence
  Description of Artificial Sequence: Synthetic oligonucleotide
  Sense Strand Starting at position 1046 of SEQ ID NO: 318603
gggcugcuucgagcgagau

SEQ ID NO: 400914 - RNA, 19 nt, Artificial Sequence
  Description of Artificial Sequence: Synthetic oligonucleotide
  Antisense Strand to SEQ ID NO: 400913
aucucgcucgaagcagccc

SEQ ID NO: 400915 - RNA, 19 nt, Artificial Sequence
  Description of Artificial Sequence: Synthetic oligonucleotide
  Sense Strand Starting at position 1046 of SEQ ID NO: 318717
gucguauagaauuauugga

SEQ ID NO: 400916 - RNA, 19 nt, Artificial Sequence
  Description of Artificial Sequence: Synthetic oligonucleotide
  Antisense Strand to SEQ ID NO: 400915
uccaauaauucuauacgac

SEQ ID NO: 400917 - RNA, 19 nt, Artificial Sequence
  Description of Artificial Sequence: Synthetic oligonucleotide
  Sense Strand Starting at position 1046 of SEQ ID NO: 318719
cguauagaauuauuggaga

SEQ ID NO: 400918 - RNA, 19 nt, Artificial Sequence
  Description of Artificial Sequence: Synthetic oligonucleotide
  Antisense Strand to SEQ ID NO: 400917
ucuccaauaauucuauacg

SEQ ID NO: 400919 - RNA, 19 nt, Artificial Sequence
  Description of Artificial Sequence: Synthetic oligonucleotide
  Sense Strand Starting at position 1046 of SEQ ID NO: 318887
uugucugcuugguuggaga

SEQ ID NO: 400920 - RNA, 19 nt, Artificial Sequence
  Description of Artificial Sequence: Synthetic oligonucleotide
  Antisense Strand to SEQ ID NO: 400919
ucuccaaccaagcagacaa

SEQ ID NO: 400921 - RNA, 19 nt, Artificial Sequence
  Description of Artificial Sequence: Synthetic oligonucleotide
  Sense Strand Starting at position 1046 of SEQ ID NO: 319026
ugaguaagucgaggcuuca

SEQ ID NO: 400922 - RNA, 19 nt, Artificial Sequence
  Description of Artificial Sequence: Synthetic oligonucleotide
  Antisense Strand to SEQ ID NO: 400921
ugaagccucgacuuacuca

SEQ ID NO: 400923 - RNA, 19 nt, Artificial Sequence
  Description of Artificial Sequence: Synthetic oligonucleotide
  Sense Strand Starting at position 1047 of SEQ ID NO: 315302
gccugagagugcccacuaa

SEQ ID NO: 400924 - RNA, 19 nt, Artificial Sequence
  Description of Artificial Sequence: Synthetic oligonucleotide
  Antisense Strand to SEQ ID NO: 400923
uuagugggcacucucaggc

SEQ ID NO: 400925 - RNA, 19 nt, Artificial Sequence
  Description of Artificial Sequence: Synthetic oligonucleotide
  Sense Strand Starting at position 1047 of SEQ ID NO: 315306
gagagugcccacuaauccu

SEQ ID NO: 400926 - RNA, 19 nt, Artificial Sequence
  Description of Artificial Sequence: Synthetic oligonucleotide
  Antisense Strand to SEQ ID NO: 400925
aggauuagugggcacucuc

SEQ ID NO: 400927 - RNA, 19 nt, Artificial Sequence
  Description of Artificial Sequence: Synthetic oligonucleotide
  Sense Strand Starting at position 1047 of SEQ ID NO: 315864
guaaucuccucucuuguau

SEQ ID NO: 400928 - RNA, 19 nt, Artificial Sequence
  Description of Artificial Sequence: Synthetic oligonucleotide
  Antisense Strand to SEQ ID NO: 400927
auacaagagaggagauuac

SEQ ID NO: 400929 - RNA, 19 nt, Artificial Sequence
  Description of Artificial Sequence: Synthetic oligonucleotide
  Sense Strand Starting at position 1047 of SEQ ID NO: 315945
gagggauacugggagacau

SEQ ID NO: 400930 - RNA, 19 nt, Artificial Sequence
  Description of Artificial Sequence: Synthetic oligonucleotide
  Antisense Strand to SEQ ID NO: 400929
augucucccaguaucccuc

SEQ ID NO: 400931 - RNA, 19 nt, Artificial Sequence
  Description of Artificial Sequence: Synthetic oligonucleotide
  Sense Strand Starting at position 1047 of SEQ ID NO: 316169
cugugaauguguuuccgag

SEQ ID NO: 400932 - RNA, 19 nt, Artificial Sequence
  Description of Artificial Sequence: Synthetic oligonucleotide
  Antisense Strand to SEQ ID NO: 400931
cucggaaacacauucacag

SEQ ID NO: 400933 - RNA, 19 nt, Artificial Sequence
  Description of Artificial Sequence: Synthetic oligonucleotide
  Sense Strand Starting at position 1047 of SEQ ID NO: 316235
gugcacaucuaugugcaaa

SEQ ID NO: 400934 - RNA, 19 nt, Artificial Sequence
  Description of Artificial Sequence: Synthetic oligonucleotide
  Antisense Strand to SEQ ID NO: 400933
uuugcacauagaugugcac

SEQ ID NO: 400935 - RNA, 19 nt, Artificial Sequence
  Description of Artificial Sequence: Synthetic oligonucleotide
  Sense Strand Starting at position 1047 of SEQ ID NO: 316237
gcacaucuaugugcaaaua

SEQ ID NO: 400936 - RNA, 19 nt, Artificial Sequence
  Description of Artificial Sequence: Synthetic oligonucleotide
  Antisense Strand to SEQ ID NO: 400935
uauuugcacauagaugugc

SEQ ID NO: 400937 - RNA, 19 nt, Artificial Sequence
  Description of Artificial Sequence: Synthetic oligonucleotide
  Sense Strand Starting at position 1047 of SEQ ID NO: 316263
ugucauauugcacaugugu

SEQ ID NO: 400938 - RNA, 19 nt, Artificial Sequence
  Description of Artificial Sequence: Synthetic oligonucleotide
  Antisense Strand to SEQ ID NO: 400937
acacaugugcaauaugaca

SEQ ID NO: 400939 - RNA, 19 nt, Artificial Sequence
  Description of Artificial Sequence: Synthetic oligonucleotide
  Sense Strand Starting at position 1047 of SEQ ID NO: 316269
auugcacauguguggauau

SEQ ID NO: 400940 - RNA, 19 nt, Artificial Sequence
  Description of Artificial Sequence: Synthetic oligonucleotide
  Antisense Strand to SEQ ID NO: 400939
auauccacacaugugcaau

SEQ ID NO: 400941 - RNA, 19 nt, Artificial Sequence
  Description of Artificial Sequence: Synthetic oligonucleotide
  Sense Strand Starting at position 1047 of SEQ ID NO: 316327
gcaguacauaugugugaua

SEQ ID NO: 400942 - RNA, 19 nt, Artificial Sequence
  Description of Artificial Sequence: Synthetic oligonucleotide
  Antisense Strand to SEQ ID NO: 400941
uaucacacauauguacugc

SEQ ID NO: 400943 - RNA, 19 nt, Artificial Sequence
  Description of Artificial Sequence: Synthetic oligonucleotide
  Sense Strand Starting at position 1047 of SEQ ID NO: 316328
caguacauaugugugauau

SEQ ID NO: 400944 - RNA, 19 nt, Artificial Sequence
  Description of Artificial Sequence: Synthetic oligonucleotide
  Antisense Strand to SEQ ID NO: 400943
auaucacacauauguacug

SEQ ID NO: 400945 - RNA, 19 nt, Artificial Sequence
  Description of Artificial Sequence: Synthetic oligonucleotide
  Sense Strand Starting at position 1047 of SEQ ID NO: 316329
aguacauaugugugauaug

SEQ ID NO: 400946 - RNA, 19 nt, Artificial Sequence
  Description of Artificial Sequence: Synthetic oligonucleotide
  Antisense Strand to SEQ ID NO: 400945
cauaucacacauauguacu

SEQ ID NO: 400947 - RNA, 19 nt, Artificial Sequence
  Description of Artificial Sequence: Synthetic oligonucleotide
  Sense Strand Starting at position 1047 of SEQ ID NO: 316334
auaugugugauaugugcau

SEQ ID NO: 400948 - RNA, 19 nt, Artificial Sequence
  Description of Artificial Sequence: Synthetic oligonucleotide
  Antisense Strand to SEQ ID NO: 400947
augcacauaucacacauau

SEQ ID NO: 400949 - RNA, 19 nt, Artificial Sequence
  Description of Artificial Sequence: Synthetic oligonucleotide
  Sense Strand Starting at position 1047 of SEQ ID NO: 316338
gugugauaugugcauauuu

SEQ ID NO: 400950 - RNA, 19 nt, Artificial Sequence
  Description of Artificial Sequence: Synthetic oligonucleotide
  Antisense Strand to SEQ ID NO: 400949
aaauaugcacauaucacac

SEQ ID NO: 400951 - RNA, 19 nt, Artificial Sequence
  Description of Artificial Sequence: Synthetic oligonucleotide
  Sense Strand Starting at position 1047 of SEQ ID NO: 316364
agauguguugcacauuugu

SEQ ID NO: 400952 - RNA, 19 nt, Artificial Sequence
  Description of Artificial Sequence: Synthetic oligonucleotide
  Antisense Strand to SEQ ID NO: 400951
acaaaugugcaacacaucu

SEQ ID NO: 400953 - RNA, 19 nt, Artificial Sequence
  Description of Artificial Sequence: Synthetic oligonucleotide
  Sense Strand Starting at position 1047 of SEQ ID NO: 316374
cacauuugugcaugugcaa

SEQ ID NO: 400954 - RNA, 19 nt, Artificial Sequence
  Description of Artificial Sequence: Synthetic oligonucleotide
  Antisense Strand to SEQ ID NO: 400953
uugcacaugcacaaaugug

SEQ ID NO: 400955 - RNA, 19 nt, Artificial Sequence
  Description of Artificial Sequence: Synthetic oligonucleotide
  Sense Strand Starting at position 1047 of SEQ ID NO: 316412
uagacaugucucugggcau

SEQ ID NO: 400956 - RNA, 19 nt, Artificial Sequence
  Description of Artificial Sequence: Synthetic oligonucleotide
  Antisense Strand to SEQ ID NO: 400955
augcccagagacaugucua

SEQ ID NO: 400957 - RNA, 19 nt, Artificial Sequence
  Description of Artificial Sequence: Synthetic oligonucleotide
  Sense Strand Starting at position 1047 of SEQ ID NO: 316886
caagguuccaggugggauu

SEQ ID NO: 400958 - RNA, 19 nt, Artificial Sequence
  Description of Artificial Sequence: Synthetic oligonucleotide
  Antisense Strand to SEQ ID NO: 400957
aaucccaccuggaaccuug

SEQ ID NO: 400959 - RNA, 19 nt, Artificial Sequence
  Description of Artificial Sequence: Synthetic oligonucleotide
  Sense Strand Starting at position 1047 of SEQ ID NO: 317219
cgccgugccguaaaguuua

SEQ ID NO: 400960 - RNA, 19 nt, Artificial Sequence
  Description of Artificial Sequence: Synthetic oligonucleotide
  Antisense Strand to SEQ ID NO: 400959
uaaacuuuacggcacggcg

SEQ ID NO: 400961 - RNA, 19 nt, Artificial Sequence
  Description of Artificial Sequence: Synthetic oligonucleotide
  Sense Strand Starting at position 1047 of SEQ ID NO: 317479
cguggacuccaauaucuca

SEQ ID NO: 400962 - RNA, 19 nt, Artificial Sequence
  Description of Artificial Sequence: Synthetic oligonucleotide
  Antisense Strand to SEQ ID NO: 400961
ugagauauuggaguccacg

SEQ ID NO: 400963 - RNA, 19 nt, Artificial Sequence
  Description of Artificial Sequence: Synthetic oligonucleotide
  Sense Strand Starting at position 1047 of SEQ ID NO: 317838
cuuugcaucucugcugaga

SEQ ID NO: 400964 - RNA, 19 nt, Artificial Sequence
  Description of Artificial Sequence: Synthetic oligonucleotide
  Antisense Strand to SEQ ID NO: 400963
ucucagcagagaugcaaag

SEQ ID NO: 400965 - RNA, 19 nt, Artificial Sequence
  Description of Artificial Sequence: Synthetic oligonucleotide
  Sense Strand Starting at position 1047 of SEQ ID NO: 318089
guauguugacaguggcaga

SEQ ID NO: 400966 - RNA, 19 nt, Artificial Sequence
  Description of Artificial Sequence: Synthetic oligonucleotide
  Antisense Strand to SEQ ID NO: 400965
ucugccacugucaacauac

SEQ ID NO: 400967 - RNA, 19 nt, Artificial Sequence
  Description of Artificial Sequence: Synthetic oligonucleotide
  Sense Strand Starting at position 1047 of SEQ ID NO: 318119
aaguccaccugagugaaua

SEQ ID NO: 400968 - RNA, 19 nt, Artificial Sequence
  Description of Artificial Sequence: Synthetic oligonucleotide
  Antisense Strand to SEQ ID NO: 400967
uauucacucagguggacuu

SEQ ID NO: 400969 - RNA, 19 nt, Artificial Sequence
  Description of Artificial Sequence: Synthetic oligonucleotide
  Sense Strand Starting at position 1047 of SEQ ID NO: 318120
aguccaccugagugaauau

SEQ ID NO: 400970 - RNA, 19 nt, Artificial Sequence
  Description of Artificial Sequence: Synthetic oligonucleotide
  Antisense Strand to SEQ ID NO: 400969
auauucacucagguggacu

SEQ ID NO: 400971 - RNA, 19 nt, Artificial Sequence
  Description of Artificial Sequence: Synthetic oligonucleotide
  Sense Strand Starting at position 1047 of SEQ ID NO: 318132
ugaauauaccagggcuuga

SEQ ID NO: 400972 - RNA, 19 nt, Artificial Sequence
  Description of Artificial Sequence: Synthetic oligonucleotide
  Antisense Strand to SEQ ID NO: 400971
ucaagcccugguauauuca

SEQ ID NO: 400973 - RNA, 19 nt, Artificial Sequence
  Description of Artificial Sequence: Synthetic oligonucleotide
  Sense Strand Starting at position 1047 of SEQ ID NO: 318136
uauaccagggcuugagaau

SEQ ID NO: 400974 - RNA, 19 nt, Artificial Sequence
  Description of Artificial Sequence: Synthetic oligonucleotide
  Antisense Strand to SEQ ID NO: 400973
auucucaagcccugguaua

SEQ ID NO: 400975 - RNA, 19 nt, Artificial Sequence
  Description of Artificial Sequence: Synthetic oligonucleotide
  Sense Strand Starting at position 1047 of SEQ ID NO: 318145
gcuugagaaugggcuuuga

SEQ ID NO: 400976 - RNA, 19 nt, Artificial Sequence
  Description of Artificial Sequence: Synthetic oligonucleotide
  Antisense Strand to SEQ ID NO: 400975
ucaaagcccauucucaagc

SEQ ID NO: 400977 - RNA, 19 nt, Artificial Sequence
  Description of Artificial Sequence: Synthetic oligonucleotide
  Sense Strand Starting at position 1047 of SEQ ID NO: 318149
gagaaugggcuuugauccu

SEQ ID NO: 400978 - RNA, 19 nt, Artificial Sequence
  Description of Artificial Sequence: Synthetic oligonucleotide
  Antisense Strand to SEQ ID NO: 400977
aggaucaaagcccauucuc

SEQ ID NO: 400979 - RNA, 19 nt, Artificial Sequence
  Description of Artificial Sequence: Synthetic oligonucleotide
  Sense Strand Starting at position 1047 of SEQ ID NO: 318155
gggcuuugauccuuccauc

SEQ ID NO: 400980 - RNA, 19 nt, Artificial Sequence
  Description of Artificial Sequence: Synthetic oligonucleotide
  Antisense Strand to SEQ ID NO: 400979
gauggaaggaucaaagccc

SEQ ID NO: 400981 - RNA, 19 nt, Artificial Sequence
  Description of Artificial Sequence: Synthetic oligonucleotide
  Sense Strand Starting at position 1047 of SEQ ID NO: 318382
ccagcuggcagguaaauaa

SEQ ID NO: 400982 - RNA, 19 nt, Artificial Sequence
  Description of Artificial Sequence: Synthetic oligonucleotide
  Antisense Strand to SEQ ID NO: 400981
uuauuuaccugccagcugg

SEQ ID NO: 400983 - RNA, 19 nt, Artificial Sequence
  Description of Artificial Sequence: Synthetic oligonucleotide
  Sense Strand Starting at position 1047 of SEQ ID NO: 318511
ugccucuagccuuagagga

SEQ ID NO: 400984 - RNA, 19 nt, Artificial Sequence
  Description of Artificial Sequence: Synthetic oligonucleotide
  Antisense Strand to SEQ ID NO: 400983
uccucuaaggcuagaggca

SEQ ID NO: 400985 - RNA, 19 nt, Artificial Sequence
  Description of Artificial Sequence: Synthetic oligonucleotide
  Sense Strand Starting at position 1047 of SEQ ID NO: 318659
cccucacugccuuauguuu

SEQ ID NO: 400986 - RNA, 19 nt, Artificial Sequence
  Description of Artificial Sequence: Synthetic oligonucleotide
  Antisense Strand to SEQ ID NO: 400985
aaacauaaggcagugaggg

SEQ ID NO: 400987 - RNA, 19 nt, Artificial Sequence
  Description of Artificial Sequence: Synthetic oligonucleotide
  Sense Strand Starting at position 1047 of SEQ ID NO: 318783
uuuccaauagccugggagu

SEQ ID NO: 400988 - RNA, 19 nt, Artificial Sequence
  Description of Artificial Sequence: Synthetic oligonucleotide
  Antisense Strand to SEQ ID NO: 400987
acucccaggcuauuggaaa

SEQ ID NO: 400989 - RNA, 19 nt, Artificial Sequence
  Description of Artificial Sequence: Synthetic oligonucleotide
  Sense Strand Starting at position 1047 of SEQ ID NO: 318856
uguccucuguccucuagau

SEQ ID NO: 400990 - RNA, 19 nt, Artificial Sequence
  Description of Artificial Sequence: Synthetic oligonucleotide
  Antisense Strand to SEQ ID NO: 400989
aucuagaggacagaggaca

SEQ ID NO: 400991 - RNA, 19 nt, Artificial Sequence
  Description of Artificial Sequence: Synthetic oligonucleotide
  Sense Strand Starting at position 1047 of SEQ ID NO: 318858
uccucuguccucuagaugu

SEQ ID NO: 400992 - RNA, 19 nt, Artificial Sequence
  Description of Artificial Sequence: Synthetic oligonucleotide
  Antisense Strand to SEQ ID NO: 400991
acaucuagaggacagagga

SEQ ID NO: 400993 - RNA, 19 nt, Artificial Sequence
  Description of Artificial Sequence: Synthetic oligonucleotide
  Sense Strand Starting at position 1047 of SEQ ID NO: 318917
gaggucaaguugucccuga

SEQ ID NO: 400994 - RNA, 19 nt, Artificial Sequence
  Description of Artificial Sequence: Synthetic oligonucleotide
  Antisense Strand to SEQ ID NO: 400993
ucagggacaacuugaccuc

SEQ ID NO: 400995 - RNA, 19 nt, Artificial Sequence
  Description of Artificial Sequence: Synthetic oligonucleotide
  Sense Strand Starting at position 1047 of SEQ ID NO: 318924
aguugucccugauuccaca

SEQ ID NO: 400996 - RNA, 19 nt, Artificial Sequence
  Description of Artificial Sequence: Synthetic oligonucleotide
  Antisense Strand to SEQ ID NO: 400995
uguggaaucagggacaacu

SEQ ID NO: 400997 - RNA, 19 nt, Artificial Sequence
  Description of Artificial Sequence: Synthetic oligonucleotide
  Sense Strand Starting at position 1047 of SEQ ID NO: 319056
gcuggaacuccucgaggau

SEQ ID NO: 400998 - RNA, 19 nt, Artificial Sequence
  Description of Artificial Sequence: Synthetic oligonucleotide
  Antisense Strand to SEQ ID NO: 400997
auccucgaggaguuccagc

SEQ ID NO: 400999 - RNA, 19 nt, Artificial Sequence
  Description of Artificial Sequence: Synthetic oligonucleotide
  Sense Strand Starting at position 1047 of SEQ ID NO: 319059
ggaacuccucgaggauucu

SEQ ID NO: 401000 - RNA, 19 nt, Artificial Sequence
  Description of Artificial Sequence: Synthetic oligonucleotide
  Antisense Strand to SEQ ID NO: 400999
agaauccucgaggaguucc

SEQ ID NO: 401001 - RNA, 19 nt, Artificial Sequence
  Description of Artificial Sequence: Synthetic oligonucleotide
  Sense Strand Starting at position 1047 of SEQ ID NO: 319186
gggagcuuccaugggcaga

SEQ ID NO: 401002 - RNA, 19 nt, Artificial Sequence
  Description of Artificial Sequence: Synthetic oligonucleotide
  Antisense Strand to SEQ ID NO: 401001
ucugcccauggaagcuccc

SEQ ID NO: 401003 - RNA, 19 nt, Artificial Sequence
  Description of Artificial Sequence: Synthetic oligonucleotide
  Sense Strand Starting at position 1048 of SEQ ID NO: 315334
cacucagucuaguaggguu

SEQ ID NO: 401004 - RNA, 19 nt, Artificial Sequence
  Description of Artificial Sequence: Synthetic oligonucleotide
  Antisense Strand to SEQ ID NO: 401003
aacccuacuagacugagug

SEQ ID NO: 401005 - RNA, 19 nt, Artificial Sequence
  Description of Artificial Sequence: Synthetic oligonucleotide
  Sense Strand Starting at position 1048 of SEQ ID NO: 315839
uugggauauucucuaccuc

SEQ ID NO: 401006 - RNA, 19 nt, Artificial Sequence
  Description of Artificial Sequence: Synthetic oligonucleotide
  Antisense Strand to SEQ ID NO: 401005
gagguagagaauaucccaa

SEQ ID NO: 401007 - RNA, 19 nt, Artificial Sequence
  Description of Artificial Sequence: Synthetic oligonucleotide
  Sense Strand Starting at position 1048 of SEQ ID NO: 315861
gagccauuccucugggucu

SEQ ID NO: 401008 - RNA, 19 nt, Artificial Sequence
  Description of Artificial Sequence: Synthetic oligonucleotide
  Antisense Strand to SEQ ID NO: 401007
agacccagaggaauggcuc

SEQ ID NO: 401009 - RNA, 19 nt, Artificial Sequence
  Description of Artificial Sequence: Synthetic oligonucleotide
  Sense Strand Starting at position 1048 of SEQ ID NO: 316175
gacucuaucggccaagguu

SEQ ID NO: 401010 - RNA, 19 nt, Artificial Sequence
  Description of Artificial Sequence: Synthetic oligonucleotide
  Antisense Strand to SEQ ID NO: 401009
aaccuuggccgauagaguc

SEQ ID NO: 401011 - RNA, 19 nt, Artificial Sequence
  Description of Artificial Sequence: Synthetic oligonucleotide
  Sense Strand Starting at position 1048 of SEQ ID NO: 316209
ccuguacacaugugaguuu

SEQ ID NO: 401012 - RNA, 19 nt, Artificial Sequence
  Description of Artificial Sequence: Synthetic oligonucleotide
  Antisense Strand to SEQ ID NO: 401011
aaacucacauguguacagg

SEQ ID NO: 401013 - RNA, 19 nt, Artificial Sequence
  Description of Artificial Sequence: Synthetic oligonucleotide
  Sense Strand Starting at position 1048 of SEQ ID NO: 316212
guacacaugugaguuuaca

SEQ ID NO: 401014 - RNA, 19 nt, Artificial Sequence
  Description of Artificial Sequence: Synthetic oligonucleotide
  Antisense Strand to SEQ ID NO: 401013
uguaaacucacauguguac

SEQ ID NO: 401015 - RNA, 19 nt, Artificial Sequence
  Description of Artificial Sequence: Synthetic oligonucleotide
  Sense Strand Starting at position 1048 of SEQ ID NO: 316457
ggcugagaguuccuuuccu

SEQ ID NO: 401016 - RNA, 19 nt, Artificial Sequence
  Description of Artificial Sequence: Synthetic oligonucleotide
  Antisense Strand to SEQ ID NO: 401015
aggaaaggaacucucagcc

SEQ ID NO: 401017 - RNA, 19 nt, Artificial Sequence
  Description of Artificial Sequence: Synthetic oligonucleotide
  Sense Strand Starting at position 1048 of SEQ ID NO: 316461
gagaguuccuuuccugcca

SEQ ID NO: 401018 - RNA, 19 nt, Artificial Sequence
  Description of Artificial Sequence: Synthetic oligonucleotide
  Antisense Strand to SEQ ID NO: 401017
uggcaggaaaggaacucuc

SEQ ID NO: 401019 - RNA, 19 nt, Artificial Sequence
  Description of Artificial Sequence: Synthetic oligonucleotide
  Sense Strand Starting at position 1048 of SEQ ID NO: 316491
gccugagcucagcagaacu

SEQ ID NO: 401020 - RNA, 19 nt, Artificial Sequence
  Description of Artificial Sequence: Synthetic oligonucleotide
  Antisense Strand to SEQ ID NO: 401019
aguucugcugagcucaggc

SEQ ID NO: 401021 - RNA, 19 nt, Artificial Sequence
  Description of Artificial Sequence: Synthetic oligonucleotide
  Sense Strand Starting at position 1048 of SEQ ID NO: 316593
gaaggaguaucgccuuguu

SEQ ID NO: 401022 - RNA, 19 nt, Artificial Sequence
  Description of Artificial Sequence: Synthetic oligonucleotide
  Antisense Strand to SEQ ID NO: 401021
aacaaggcgauacuccuuc

SEQ ID NO: 401023 - RNA, 19 nt, Artificial Sequence
  Description of Artificial Sequence: Synthetic oligonucleotide
  Sense Strand Starting at position 1048 of SEQ ID NO: 316662
gggucuuccugagaaagca

SEQ ID NO: 401024 - RNA, 19 nt, Artificial Sequence
  Description of Artificial Sequence: Synthetic oligonucleotide
  Antisense Strand to SEQ ID NO: 401023
ugcuuucucaggaagaccc

SEQ ID NO: 401025 - RNA, 19 nt, Artificial Sequence
  Description of Artificial Sequence: Synthetic oligonucleotide
  Sense Strand Starting at position 1048 of SEQ ID NO: 316739
gccugagagugcccacuaa

SEQ ID NO: 401026 - RNA, 19 nt, Artificial Sequence
  Description of Artificial Sequence: Synthetic oligonucleotide
  Antisense Strand to SEQ ID NO: 401025
uuagugggcacucucaggc

SEQ ID NO: 401027 - RNA, 19 nt, Artificial Sequence
  Description of Artificial Sequence: Synthetic oligonucleotide
  Sense Strand Starting at position 1048 of SEQ ID NO: 316743
gagagugcccacuaauccu

SEQ ID NO: 401028 - RNA, 19 nt, Artificial Sequence
  Description of Artificial Sequence: Synthetic oligonucleotide
  Antisense Strand to SEQ ID NO: 401027
aggauuagugggcacucuc

SEQ ID NO: 401029 - RNA, 19 nt, Artificial Sequence
  Description of Artificial Sequence: Synthetic oligonucleotide
  Sense Strand Starting at position 1048 of SEQ ID NO: 317287
cgucacccuucccaguaau

SEQ ID NO: 401030 - RNA, 19 nt, Artificial Sequence
  Description of Artificial Sequence: Synthetic oligonucleotide
  Antisense Strand to SEQ ID NO: 401029
auuacugggaagggugacg

SEQ ID NO: 401031 - RNA, 19 nt, Artificial Sequence
  Description of Artificial Sequence: Synthetic oligonucleotide
  Sense Strand Starting at position 1048 of SEQ ID NO: 317301
guaaucuccucucuuguau

SEQ ID NO: 401032 - RNA, 19 nt, Artificial Sequence
  Description of Artificial Sequence: Synthetic oligonucleotide
  Antisense Strand to SEQ ID NO: 401031
auacaagagaggagauuac

SEQ ID NO: 401033 - RNA, 19 nt, Artificial Sequence
  Description of Artificial Sequence: Synthetic oligonucleotide
  Sense Strand Starting at position 1048 of SEQ ID NO: 317382
gagggauacugggagacau

SEQ ID NO: 401034 - RNA, 19 nt, Artificial Sequence
  Description of Artificial Sequence: Synthetic oligonucleotide
  Antisense Strand to SEQ ID NO: 401033
augucucccaguaucccuc

SEQ ID NO: 401035 - RNA, 19 nt, Artificial Sequence
  Description of Artificial Sequence: Synthetic oligonucleotide
  Sense Strand Starting at position 1048 of SEQ ID NO: 317595
ggugugggugccugugaau

SEQ ID NO: 401036 - RNA, 19 nt, Artificial Sequence
  Description of Artificial Sequence: Synthetic oligonucleotide
  Antisense Strand to SEQ ID NO: 401035
auucacaggcacccacacc

SEQ ID NO: 401037 - RNA, 19 nt, Artificial Sequence
  Description of Artificial Sequence: Synthetic oligonucleotide
  Sense Strand Starting at position 1048 of SEQ ID NO: 317606
cugugaauguguuuccgag

SEQ ID NO: 401038 - RNA, 19 nt, Artificial Sequence
  Description of Artificial Sequence: Synthetic oligonucleotide
  Antisense Strand to SEQ ID NO: 401037
cucggaaacacauucacag

SEQ ID NO: 401039 - RNA, 19 nt, Artificial Sequence
  Description of Artificial Sequence: Synthetic oligonucleotide
  Sense Strand Starting at position 1048 of SEQ ID NO: 317608
gugaauguguuuccgagug

SEQ ID NO: 401040 - RNA, 19 nt, Artificial Sequence
  Description of Artificial Sequence: Synthetic oligonucleotide
  Antisense Strand to SEQ ID NO: 401039
cacucggaaacacauucac

SEQ ID NO: 401041 - RNA, 19 nt, Artificial Sequence
  Description of Artificial Sequence: Synthetic oligonucleotide
  Sense Strand Starting at position 1048 of SEQ ID NO: 317671
ugugcacaucuaugugcaa

SEQ ID NO: 401042 - RNA, 19 nt, Artificial Sequence
  Description of Artificial Sequence: Synthetic oligonucleotide
  Antisense Strand to SEQ ID NO: 401041
uugcacauagaugugcaca

SEQ ID NO: 401043 - RNA, 19 nt, Artificial Sequence
  Description of Artificial Sequence: Synthetic oligonucleotide
  Sense Strand Starting at position 1048 of SEQ ID NO: 317672
gugcacaucuaugugcaaa

SEQ ID NO: 401044 - RNA, 19 nt, Artificial Sequence
  Description of Artificial Sequence: Synthetic oligonucleotide
  Antisense Strand to SEQ ID NO: 401043
uuugcacauagaugugcac

SEQ ID NO: 401045 - RNA, 19 nt, Artificial Sequence
  Description of Artificial Sequence: Synthetic oligonucleotide
  Sense Strand Starting at position 1048 of SEQ ID NO: 317674
gcacaucuaugugcaaaua

SEQ ID NO: 401046 - RNA, 19 nt, Artificial Sequence
  Description of Artificial Sequence: Synthetic oligonucleotide
  Antisense Strand to SEQ ID NO: 401045
uauuugcacauagaugugc

SEQ ID NO: 401047 - RNA, 19 nt, Artificial Sequence
  Description of Artificial Sequence: Synthetic oligonucleotide
  Sense Strand Starting at position 1048 of SEQ ID NO: 317686
gcaaauauauaguguguca

SEQ ID NO: 401048 - RNA, 19 nt, Artificial Sequence
  Description of Artificial Sequence: Synthetic oligonucleotide
  Antisense Strand to SEQ ID NO: 401047
ugacacacuauauauuugc

SEQ ID NO: 401049 - RNA, 19 nt, Artificial Sequence
  Description of Artificial Sequence: Synthetic oligonucleotide
  Sense Strand Starting at position 1048 of SEQ ID NO: 317691
uauauagugugucauauug

SEQ ID NO: 401050 - RNA, 19 nt, Artificial Sequence
  Description of Artificial Sequence: Synthetic oligonucleotide
  Antisense Strand to SEQ ID NO: 401049
caauaugacacacuauaua

SEQ ID NO: 401051 - RNA, 19 nt, Artificial Sequence
  Description of Artificial Sequence: Synthetic oligonucleotide
  Sense Strand Starting at position 1048 of SEQ ID NO: 317693
uauagugugucauauugca

SEQ ID NO: 401052 - RNA, 19 nt, Artificial Sequence
  Description of Artificial Sequence: Synthetic oligonucleotide
  Antisense Strand to SEQ ID NO: 401051
ugcaauaugacacacuaua

SEQ ID NO: 401053 - RNA, 19 nt, Artificial Sequence
  Description of Artificial Sequence: Synthetic oligonucleotide
  Sense Strand Starting at position 1048 of SEQ ID NO: 317700
ugucauauugcacaugugu

SEQ ID NO: 401054 - RNA, 19 nt, Artificial Sequence
  Description of Artificial Sequence: Synthetic oligonucleotide
  Antisense Strand to SEQ ID NO: 401053
acacaugugcaauaugaca

SEQ ID NO: 401055 - RNA, 19 nt, Artificial Sequence
  Description of Artificial Sequence: Synthetic oligonucleotide
  Sense Strand Starting at position 1048 of SEQ ID NO: 317706
auugcacauguguggauau

SEQ ID NO: 401056 - RNA, 19 nt, Artificial Sequence
  Description of Artificial Sequence: Synthetic oligonucleotide
  Antisense Strand to SEQ ID NO: 401055
auauccacacaugugcaau

SEQ ID NO: 401057 - RNA, 19 nt, Artificial Sequence
  Description of Artificial Sequence: Synthetic oligonucleotide
  Sense Strand Starting at position 1048 of SEQ ID NO: 317764
gcaguacauaugugugaua

SEQ ID NO: 401058 - RNA, 19 nt, Artificial Sequence
  Description of Artificial Sequence: Synthetic oligonucleotide
  Antisense Strand to SEQ ID NO: 401057
uaucacacauauguacugc

SEQ ID NO: 401059 - RNA, 19 nt, Artificial Sequence
  Description of Artificial Sequence: Synthetic oligonucleotide
  Sense Strand Starting at position 1048 of SEQ ID NO: 317765
caguacauaugugugauau

SEQ ID NO: 401060 - RNA, 19 nt, Artificial Sequence
  Description of Artificial Sequence: Synthetic oligonucleotide
  Antisense Strand to SEQ ID NO: 401059
auaucacacauauguacug

SEQ ID NO: 401061 - RNA, 19 nt, Artificial Sequence
  Description of Artificial Sequence: Synthetic oligonucleotide
  Sense Strand Starting at position 1048 of SEQ ID NO: 317766
aguacauaugugugauaug

SEQ ID NO: 401062 - RNA, 19 nt, Artificial Sequence
  Description of Artificial Sequence: Synthetic oligonucleotide
  Antisense Strand to SEQ ID NO: 401061
cauaucacacauauguacu

SEQ ID NO: 401063 - RNA, 19 nt, Artificial Sequence
  Description of Artificial Sequence: Synthetic oligonucleotide
  Sense Strand Starting at position 1048 of SEQ ID NO: 317771
auaugugugauaugugcau

SEQ ID NO: 401064 - RNA, 19 nt, Artificial Sequence
  Description of Artificial Sequence: Synthetic oligonucleotide
  Antisense Strand to SEQ ID NO: 401063
augcacauaucacacauau

SEQ ID NO: 401065 - RNA, 19 nt, Artificial Sequence
  Description of Artificial Sequence: Synthetic oligonucleotide
  Sense Strand Starting at position 1048 of SEQ ID NO: 317775
gugugauaugugcauauuu

SEQ ID NO: 401066 - RNA, 19 nt, Artificial Sequence
  Description of Artificial Sequence: Synthetic oligonucleotide
  Antisense Strand to SEQ ID NO: 401065
aaauaugcacauaucacac

SEQ ID NO: 401067 - RNA, 19 nt, Artificial Sequence
  Description of Artificial Sequence: Synthetic oligonucleotide
  Sense Strand Starting at position 1048 of SEQ ID NO: 317799
acagauguguugcacauuu

SEQ ID NO: 401068 - RNA, 19 nt, Artificial Sequence
  Description of Artificial Sequence: Synthetic oligonucleotide
  Antisense Strand to SEQ ID NO: 401067
aaaugugcaacacaucugu

SEQ ID NO: 401069 - RNA, 19 nt, Artificial Sequence
  Description of Artificial Sequence: Synthetic oligonucleotide
  Sense Strand Starting at position 1048 of SEQ ID NO: 317801
agauguguugcacauuugu

SEQ ID NO: 401070 - RNA, 19 nt, Artificial Sequence
  Description of Artificial Sequence: Synthetic oligonucleotide
  Antisense Strand to SEQ ID NO: 401069
acaaaugugcaacacaucu

SEQ ID NO: 401071 - RNA, 19 nt, Artificial Sequence
  Description of Artificial Sequence: Synthetic oligonucleotide
  Sense Strand Starting at position 1048 of SEQ ID NO: 317811
cacauuugugcaugugcaa

SEQ ID NO: 401072 - RNA, 19 nt, Artificial Sequence
  Description of Artificial Sequence: Synthetic oligonucleotide
  Antisense Strand to SEQ ID NO: 401071
uugcacaugcacaaaugug

SEQ ID NO: 401073 - RNA, 19 nt, Artificial Sequence
  Description of Artificial Sequence: Synthetic oligonucleotide
  Sense Strand Starting at position 1048 of SEQ ID NO: 317849
uagacaugucucugggcau

SEQ ID NO: 401074 - RNA, 19 nt, Artificial Sequence
  Description of Artificial Sequence: Synthetic oligonucleotide
  Antisense Strand to SEQ ID NO: 401073
augcccagagacaugucua

SEQ ID NO: 401075 - RNA, 19 nt, Artificial Sequence
  Description of Artificial Sequence: Synthetic oligonucleotide
  Sense Strand Starting at position 1048 of SEQ ID NO: 318323
caagguuccaggugggauu

SEQ ID NO: 401076 - RNA, 19 nt, Artificial Sequence
  Description of Artificial Sequence: Synthetic oligonucleotide
  Antisense Strand to SEQ ID NO: 401075
aaucccaccuggaaccuug

SEQ ID NO: 401077 - RNA, 19 nt, Artificial Sequence
  Description of Artificial Sequence: Synthetic oligonucleotide
  Sense Strand Starting at position 1048 of SEQ ID NO: 318656
cgccgugccguaaaguuua

SEQ ID NO: 401078 - RNA, 19 nt, Artificial Sequence
  Description of Artificial Sequence: Synthetic oligonucleotide
  Antisense Strand to SEQ ID NO: 401077
uaaacuuuacggcacggcg

SEQ ID NO: 401079 - RNA, 19 nt, Artificial Sequence
  Description of Artificial Sequence: Synthetic oligonucleotide
  Sense Strand Starting at position 1048 of SEQ ID NO: 318916
cguggacuccaauaucuca

SEQ ID NO: 401080 - RNA, 19 nt, Artificial Sequence
  Description of Artificial Sequence: Synthetic oligonucleotide
  Antisense Strand to SEQ ID NO: 401079
ugagauauuggaguccacg

SEQ ID NO: 401081 - RNA, 19 nt, Artificial Sequence
  Description of Artificial Sequence: Synthetic oligonucleotide
  Sense Strand Starting at position 1048 of SEQ ID NO: 319140
aguggcuucuaccaugaca

SEQ ID NO: 401082 - RNA, 19 nt, Artificial Sequence
  Description of Artificial Sequence: Synthetic oligonucleotide
  Antisense Strand to SEQ ID NO: 401081
ugucaugguagaagccacu

SEQ ID NO: 401083 - RNA, 19 nt, Artificial Sequence
  Description of Artificial Sequence: Synthetic oligonucleotide
  Sense Strand Starting at position 1049 of SEQ ID NO: 315500
cacucagucuaguaggguu

SEQ ID NO: 401084 - RNA, 19 nt, Artificial Sequence
  Description of Artificial Sequence: Synthetic oligonucleotide
  Antisense Strand to SEQ ID NO: 401083
aacccuacuagacugagug

SEQ ID NO: 401085 - RNA, 19 nt, Artificial Sequence
  Description of Artificial Sequence: Synthetic oligonucleotide
  Sense Strand Starting at position 1049 of SEQ ID NO: 316005
uugggauauucucuaccuc

SEQ ID NO: 401086 - RNA, 19 nt, Artificial Sequence
  Description of Artificial Sequence: Synthetic oligonucleotide
  Antisense Strand to SEQ ID NO: 401085
gagguagagaauaucccaa

SEQ ID NO: 401087 - RNA, 19 nt, Artificial Sequence
  Description of Artificial Sequence: Synthetic oligonucleotide
  Sense Strand Starting at position 1049 of SEQ ID NO: 316027
gagccauuccucugggucu

SEQ ID NO: 401088 - RNA, 19 nt, Artificial Sequence
  Description of Artificial Sequence: Synthetic oligonucleotide
  Antisense Strand to SEQ ID NO: 401087
agacccagaggaauggcuc

SEQ ID NO: 401089 - RNA, 19 nt, Artificial Sequence
  Description of Artificial Sequence: Synthetic oligonucleotide
  Sense Strand Starting at position 1049 of SEQ ID NO: 316341
gacucuaucggccaagguu

SEQ ID NO: 401090 - RNA, 19 nt, Artificial Sequence
  Description of Artificial Sequence: Synthetic oligonucleotide
  Antisense Strand to SEQ ID NO: 401089
aaccuuggccgauagaguc

SEQ ID NO: 401091 - RNA, 19 nt, Artificial Sequence
  Description of Artificial Sequence: Synthetic oligonucleotide
  Sense Strand Starting at position 1049 of SEQ ID NO: 316375
ccuguacacaugugaguuu

SEQ ID NO: 401092 - RNA, 19 nt, Artificial Sequence
  Description of Artificial Sequence: Synthetic oligonucleotide
  Antisense Strand to SEQ ID NO: 401091
aaacucacauguguacagg

SEQ ID NO: 401093 - RNA, 19 nt, Artificial Sequence
  Description of Artificial Sequence: Synthetic oligonucleotide
  Sense Strand Starting at position 1049 of SEQ ID NO: 316378
guacacaugugaguuuaca

SEQ ID NO: 401094 - RNA, 19 nt, Artificial Sequence
  Description of Artificial Sequence: Synthetic oligonucleotide
  Antisense Strand to SEQ ID NO: 401093
uguaaacucacauguguac

SEQ ID NO: 401095 - RNA, 19 nt, Artificial Sequence
  Description of Artificial Sequence: Synthetic oligonucleotide
  Sense Strand Starting at position 1049 of SEQ ID NO: 316623
ggcugagaguuccuuuccu

SEQ ID NO: 401096 - RNA, 19 nt, Artificial Sequence
  Description of Artificial Sequence: Synthetic oligonucleotide
  Antisense Strand to SEQ ID NO: 401095
aggaaaggaacucucagcc

SEQ ID NO: 401097 - RNA, 19 nt, Artificial Sequence
  Description of Artificial Sequence: Synthetic oligonucleotide
  Sense Strand Starting at position 1049 of SEQ ID NO: 316627
gagaguuccuuuccugcca

SEQ ID NO: 401098 - RNA, 19 nt, Artificial Sequence
  Description of Artificial Sequence: Synthetic oligonucleotide
  Antisense Strand to SEQ ID NO: 401097
uggcaggaaaggaacucuc

SEQ ID NO: 401099 - RNA, 19 nt, Artificial Sequence
  Description of Artificial Sequence: Synthetic oligonucleotide
  Sense Strand Starting at position 1049 of SEQ ID NO: 316657
gccugagcucagcagaacu

SEQ ID NO: 401100 - RNA, 19 nt, Artificial Sequence
  Description of Artificial Sequence: Synthetic oligonucleotide
  Antisense Strand to SEQ ID NO: 401099
aguucugcugagcucaggc

SEQ ID NO: 401101 - RNA, 19 nt, Artificial Sequence
  Description of Artificial Sequence: Synthetic oligonucleotide
  Sense Strand Starting at position 1049 of SEQ ID NO: 316759
gaaggaguaucgccuuguu

SEQ ID NO: 401102 - RNA, 19 nt, Artificial Sequence
  Description of Artificial Sequence: Synthetic oligonucleotide
  Antisense Strand to SEQ ID NO: 401101
aacaaggcgauacuccuuc

SEQ ID NO: 401103 - RNA, 19 nt, Artificial Sequence
  Description of Artificial Sequence: Synthetic oligonucleotide
  Sense Strand Starting at position 1049 of SEQ ID NO: 316828
gggucuuccugagaaagca

SEQ ID NO: 401104 - RNA, 19 nt, Artificial Sequence
  Description of Artificial Sequence: Synthetic oligonucleotide
  Antisense Strand to SEQ ID NO: 401103
ugcuuucucaggaagaccc

SEQ ID NO: 401105 - RNA, 19 nt, Artificial Sequence
  Description of Artificial Sequence: Synthetic oligonucleotide
  Sense Strand Starting at position 1049 of SEQ ID NO: 316905
gccugagagugcccacuaa

SEQ ID NO: 401106 - RNA, 19 nt, Artificial Sequence
  Description of Artificial Sequence: Synthetic oligonucleotide
  Antisense Strand to SEQ ID NO: 401105
uuagugggcacucucaggc

SEQ ID NO: 401107 - RNA, 19 nt, Artificial Sequence
  Description of Artificial Sequence: Synthetic oligonucleotide
  Sense Strand Starting at position 1049 of SEQ ID NO: 316909
gagagugcccacuaauccu

SEQ ID NO: 401108 - RNA, 19 nt, Artificial Sequence
  Description of Artificial Sequence: Synthetic oligonucleotide
  Antisense Strand to SEQ ID NO: 401107
aggauuagugggcacucuc

SEQ ID NO: 401109 - RNA, 19 nt, Artificial Sequence
  Description of Artificial Sequence: Synthetic oligonucleotide
  Sense Strand Starting at position 1049 of SEQ ID NO: 317453
cgucacccuucccaguaau

SEQ ID NO: 401110 - RNA, 19 nt, Artificial Sequence
  Description of Artificial Sequence: Synthetic oligonucleotide
  Antisense Strand to SEQ ID NO: 401109
auuacugggaagggugacg

SEQ ID NO: 401111 - RNA, 19 nt, Artificial Sequence
  Description of Artificial Sequence: Synthetic oligonucleotide
  Sense Strand Starting at position 1049 of SEQ ID NO: 317467
guaaucuccucucuuguau

SEQ ID NO: 401112 - RNA, 19 nt, Artificial Sequence
  Description of Artificial Sequence: Synthetic oligonucleotide
  Antisense Strand to SEQ ID NO: 401111
auacaagagaggagauuac

SEQ ID NO: 401113 - RNA, 19 nt, Artificial Sequence
  Description of Artificial Sequence: Synthetic oligonucleotide
  Sense Strand Starting at position 1049 of SEQ ID NO: 317548
gagggauacugggagacau

SEQ ID NO: 401114 - RNA, 19 nt, Artificial Sequence
  Description of Artificial Sequence: Synthetic oligonucleotide
  Antisense Strand to SEQ ID NO: 401113
augucucccaguaucccuc

SEQ ID NO: 401115 - RNA, 19 nt, Artificial Sequence
  Description of Artificial Sequence: Synthetic oligonucleotide
  Sense Strand Starting at position 1049 of SEQ ID NO: 317761
ggugugggugccugugaau

SEQ ID NO: 401116 - RNA, 19 nt, Artificial Sequence
  Description of Artificial Sequence: Synthetic oligonucleotide
  Antisense Strand to SEQ ID NO: 401115
auucacaggcacccacacc

SEQ ID NO: 401117 - RNA, 19 nt, Artificial Sequence
  Description of Artificial Sequence: Synthetic oligonucleotide
  Sense Strand Starting at position 1049 of SEQ ID NO: 317772
cugugaauguguuuccgag

SEQ ID NO: 401118 - RNA, 19 nt, Artificial Sequence
  Description of Artificial Sequence: Synthetic oligonucleotide
  Antisense Strand to SEQ ID NO: 401117
cucggaaacacauucacag

SEQ ID NO: 401119 - RNA, 19 nt, Artificial Sequence
  Description of Artificial Sequence: Synthetic oligonucleotide
  Sense Strand Starting at position 1049 of SEQ ID NO: 317774
gugaauguguuuccgagug

SEQ ID NO: 401120 - RNA, 19 nt, Artificial Sequence
  Description of Artificial Sequence: Synthetic oligonucleotide
  Antisense Strand to SEQ ID NO: 401119
cacucggaaacacauucac

SEQ ID NO: 401121 - RNA, 19 nt, Artificial Sequence
  Description of Artificial Sequence: Synthetic oligonucleotide
  Sense Strand Starting at position 1049 of SEQ ID NO: 317776
gaauguguuuccgaguguc

SEQ ID NO: 401122 - RNA, 19 nt, Artificial Sequence
  Description of Artificial Sequence: Synthetic oligonucleotide
  Antisense Strand to SEQ ID NO: 401121
gacacucggaaacacauuc

SEQ ID NO: 401123 - RNA, 19 nt, Artificial Sequence
  Description of Artificial Sequence: Synthetic oligonucleotide
  Sense Strand Starting at position 1049 of SEQ ID NO: 317837
ugugcacaucuaugugcaa

SEQ ID NO: 401124 - RNA, 19 nt, Artificial Sequence
  Description of Artificial Sequence: Synthetic oligonucleotide
  Antisense Strand to SEQ ID NO: 401123
uugcacauagaugugcaca

SEQ ID NO: 401125 - RNA, 19 nt, Artificial Sequence
  Description of Artificial Sequence: Synthetic oligonucleotide
  Sense Strand Starting at position 1049 of SEQ ID NO: 317838
gugcacaucuaugugcaaa

SEQ ID NO: 401126 - RNA, 19 nt, Artificial Sequence
  Description of Artificial Sequence: Synthetic oligonucleotide
  Antisense Strand to SEQ ID NO: 401125
uuugcacauagaugugcac

SEQ ID NO: 401127 - RNA, 19 nt, Artificial Sequence
  Description of Artificial Sequence: Synthetic oligonucleotide
  Sense Strand Starting at position 1049 of SEQ ID NO: 317840
gcacaucuaugugcaaaua

SEQ ID NO: 401128 - RNA, 19 nt, Artificial Sequence
  Description of Artificial Sequence: Synthetic oligonucleotide
  Antisense Strand to SEQ ID NO: 401127
uauuugcacauagaugugc

SEQ ID NO: 401129 - RNA, 19 nt, Artificial Sequence
  Description of Artificial Sequence: Synthetic oligonucleotide
  Sense Strand Starting at position 1049 of SEQ ID NO: 317852
gcaaauauauaguguguca

SEQ ID NO: 401130 - RNA, 19 nt, Artificial Sequence
  Description of Artificial Sequence: Synthetic oligonucleotide
  Antisense Strand to SEQ ID NO: 401129
ugacacacuauauauuugc

SEQ ID NO: 401131 - RNA, 19 nt, Artificial Sequence
  Description of Artificial Sequence: Synthetic oligonucleotide
  Sense Strand Starting at position 1049 of SEQ ID NO: 317857
uauauagugugucauauug

SEQ ID NO: 401132 - RNA, 19 nt, Artificial Sequence
  Description of Artificial Sequence: Synthetic oligonucleotide
  Antisense Strand to SEQ ID NO: 401131
caauaugacacacuauaua

SEQ ID NO: 401133 - RNA, 19 nt, Artificial Sequence
  Description of Artificial Sequence: Synthetic oligonucleotide
  Sense Strand Starting at position 1049 of SEQ ID NO: 317859
uauagugugucauauugca

SEQ ID NO: 401134 - RNA, 19 nt, Artificial Sequence
  Description of Artificial Sequence: Synthetic oligonucleotide
  Antisense Strand to SEQ ID NO: 401133
ugcaauaugacacacuaua

SEQ ID NO: 401135 - RNA, 19 nt, Artificial Sequence
  Description of Artificial Sequence: Synthetic oligonucleotide
  Sense Strand Starting at position 1049 of SEQ ID NO: 317866
ugucauauugcacaugugu

SEQ ID NO: 401136 - RNA, 19 nt, Artificial Sequence
  Description of Artificial Sequence: Synthetic oligonucleotide
  Antisense Strand to SEQ ID NO: 401135
acacaugugcaauaugaca

SEQ ID NO: 401137 - RNA, 19 nt, Artificial Sequence
  Description of Artificial Sequence: Synthetic oligonucleotide
  Sense Strand Starting at position 1049 of SEQ ID NO: 317872
auugcacauguguggauau

SEQ ID NO: 401138 - RNA, 19 nt, Artificial Sequence
  Description of Artificial Sequence: Synthetic oligonucleotide
  Antisense Strand to SEQ ID NO: 401137
auauccacacaugugcaau

SEQ ID NO: 401139 - RNA, 19 nt, Artificial Sequence
  Description of Artificial Sequence: Synthetic oligonucleotide
  Sense Strand Starting at position 1049 of SEQ ID NO: 317930
gcaguacauaugugugaua

SEQ ID NO: 401140 - RNA, 19 nt, Artificial Sequence
  Description of Artificial Sequence: Synthetic oligonucleotide
  Antisense Strand to SEQ ID NO: 401139
uaucacacauauguacugc

SEQ ID NO: 401141 - RNA, 19 nt, Artificial Sequence
  Description of Artificial Sequence: Synthetic oligonucleotide
  Sense Strand Starting at position 1049 of SEQ ID NO: 317931
caguacauaugugugauau

SEQ ID NO: 401142 - RNA, 19 nt, Artificial Sequence
  Description of Artificial Sequence: Synthetic oligonucleotide
  Antisense Strand to SEQ ID NO: 401141
auaucacacauauguacug

SEQ ID NO: 401143 - RNA, 19 nt, Artificial Sequence
  Description of Artificial Sequence: Synthetic oligonucleotide
  Sense Strand Starting at position 1049 of SEQ ID NO: 317932
aguacauaugugugauaug

SEQ ID NO: 401144 - RNA, 19 nt, Artificial Sequence
  Description of Artificial Sequence: Synthetic oligonucleotide
  Antisense Strand to SEQ ID NO: 401143
cauaucacacauauguacu

SEQ ID NO: 401145 - RNA, 19 nt, Artificial Sequence
  Description of Artificial Sequence: Synthetic oligonucleotide
  Sense Strand Starting at position 1049 of SEQ ID NO: 317937
auaugugugauaugugcau

SEQ ID NO: 401146 - RNA, 19 nt, Artificial Sequence
  Description of Artificial Sequence: Synthetic oligonucleotide
  Antisense Strand to SEQ ID NO: 401145
augcacauaucacacauau

SEQ ID NO: 401147 - RNA, 19 nt, Artificial Sequence
  Description of Artificial Sequence: Synthetic oligonucleotide
  Sense Strand Starting at position 1049 of SEQ ID NO: 317941
gugugauaugugcauauuu

SEQ ID NO: 401148 - RNA, 19 nt, Artificial Sequence
  Description of Artificial Sequence: Synthetic oligonucleotide
  Antisense Strand to SEQ ID NO: 401147
aaauaugcacauaucacac

SEQ ID NO: 401149 - RNA, 19 nt, Artificial Sequence
  Description of Artificial Sequence: Synthetic oligonucleotide
  Sense Strand Starting at position 1049 of SEQ ID NO: 317965
acagauguguugcacauuu

SEQ ID NO: 401150 - RNA, 19 nt, Artificial Sequence
  Description of Artificial Sequence: Synthetic oligonucleotide
  Antisense Strand to SEQ ID NO: 401149
aaaugugcaacacaucugu

SEQ ID NO: 401151 - RNA, 19 nt, Artificial Sequence
  Description of Artificial Sequence: Synthetic oligonucleotide
  Sense Strand Starting at position 1049 of SEQ ID NO: 317967
agauguguugcacauuugu

SEQ ID NO: 401152 - RNA, 19 nt, Artificial Sequence
  Description of Artificial Sequence: Synthetic oligonucleotide
  Antisense Strand to SEQ ID NO: 401151
acaaaugugcaacacaucu

SEQ ID NO: 401153 - RNA, 19 nt, Artificial Sequence
  Description of Artificial Sequence: Synthetic oligonucleotide
  Sense Strand Starting at position 1049 of SEQ ID NO: 317977
cacauuugugcaugugcaa

SEQ ID NO: 401154 - RNA, 19 nt, Artificial Sequence
  Description of Artificial Sequence: Synthetic oligonucleotide
  Antisense Strand to SEQ ID NO: 401153
uugcacaugcacaaaugug

SEQ ID NO: 401155 - RNA, 19 nt, Artificial Sequence
  Description of Artificial Sequence: Synthetic oligonucleotide
  Sense Strand Starting at position 1049 of SEQ ID NO: 318015
uagacaugucucugggcau

SEQ ID NO: 401156 - RNA, 19 nt, Artificial Sequence
  Description of Artificial Sequence: Synthetic oligonucleotide
  Antisense Strand to SEQ ID NO: 401155
augcccagagacaugucua

SEQ ID NO: 401157 - RNA, 19 nt, Artificial Sequence
  Description of Artificial Sequence: Synthetic oligonucleotide
  Sense Strand Starting at position 1049 of SEQ ID NO: 318489
caagguuccaggugggauu

SEQ ID NO: 401158 - RNA, 19 nt, Artificial Sequence
  Description of Artificial Sequence: Synthetic oligonucleotide
  Antisense Strand to SEQ ID NO: 401157
aaucccaccuggaaccuug

SEQ ID NO: 401159 - RNA, 19 nt, Artificial Sequence
  Description of Artificial Sequence: Synthetic oligonucleotide
  Sense Strand Starting at position 1049 of SEQ ID NO: 318822
cgccgugccguaaaguuua

SEQ ID NO: 401160 - RNA, 19 nt, Artificial Sequence
  Description of Artificial Sequence: Synthetic oligonucleotide
  Antisense Strand to SEQ ID NO: 401159
uaaacuuuacggcacggcg

SEQ ID NO: 401161 - RNA, 19 nt, Artificial Sequence
  Description of Artificial Sequence: Synthetic oligonucleotide
  Sense Strand Starting at position 1049 of SEQ ID NO: 319082
cguggacuccaauaucuca

SEQ ID NO: 401162 - RNA, 19 nt, Artificial Sequence
  Description of Artificial Sequence: Synthetic oligonucleotide
  Antisense Strand to SEQ ID NO: 401161
ugagauauuggaguccacg

SEQ ID NO: 401163 - RNA, 19 nt, Artificial Sequence
  Description of Artificial Sequence: Synthetic oligonucleotide
  Sense Strand Starting at position 1050 of SEQ ID NO: 315597
cagcauguuuggguuguga

SEQ ID NO: 401164 - RNA, 19 nt, Artificial Sequence
  Description of Artificial Sequence: Synthetic oligonucleotide
  Antisense Strand to SEQ ID NO: 401163
ucacaacccaaacaugcug

SEQ ID NO: 401165 - RNA, 19 nt, Artificial Sequence
  Description of Artificial Sequence: Synthetic oligonucleotide
  Sense Strand Starting at position 1050 of SEQ ID NO: 315599
gcauguuuggguugugaag

SEQ ID NO: 401166 - RNA, 19 nt, Artificial Sequence
  Description of Artificial Sequence: Synthetic oligonucleotide
  Antisense Strand to SEQ ID NO: 401165
cuucacaacccaaacaugc

SEQ ID NO: 401167 - RNA, 19 nt, Artificial Sequence
  Description of Artificial Sequence: Synthetic oligonucleotide
  Sense Strand Starting at position 1050 of SEQ ID NO: 315601
auguuuggguugugaagag

SEQ ID NO: 401168 - RNA, 19 nt, Artificial Sequence
  Description of Artificial Sequence: Synthetic oligonucleotide
  Antisense Strand to SEQ ID NO: 401167
cucuucacaacccaaacau

SEQ ID NO: 401169 - RNA, 19 nt, Artificial Sequence
  Description of Artificial Sequence: Synthetic oligonucleotide
  Sense Strand Starting at position 1050 of SEQ ID NO: 315764
gacccugaccugugccaau

SEQ ID NO: 401170 - RNA, 19 nt, Artificial Sequence
  Description of Artificial Sequence: Synthetic oligonucleotide
  Antisense Strand to SEQ ID NO: 401169
auuggcacaggucaggguc

SEQ ID NO: 401171 - RNA, 19 nt, Artificial Sequence
  Description of Artificial Sequence: Synthetic oligonucleotide
  Sense Strand Starting at position 1050 of SEQ ID NO: 316095
agaacccugcccugagaau

SEQ ID NO: 401172 - RNA, 19 nt, Artificial Sequence
  Description of Artificial Sequence: Synthetic oligonucleotide
  Antisense Strand to SEQ ID NO: 401171
auucucagggcaggguucu

SEQ ID NO: 401173 - RNA, 19 nt, Artificial Sequence
  Description of Artificial Sequence: Synthetic oligonucleotide
  Sense Strand Starting at position 1050 of SEQ ID NO: 316120
ggagaucagccuugcccua

SEQ ID NO: 401174 - RNA, 19 nt, Artificial Sequence
  Description of Artificial Sequence: Synthetic oligonucleotide
  Antisense Strand to SEQ ID NO: 401173
uagggcaaggcugaucucc

SEQ ID NO: 401175 - RNA, 19 nt, Artificial Sequence
  Description of Artificial Sequence: Synthetic oligonucleotide
  Sense Strand Starting at position 1050 of SEQ ID NO: 316153
ggaaacaagccuugucuua

SEQ ID NO: 401176 - RNA, 19 nt, Artificial Sequence
  Description of Artificial Sequence: Synthetic oligonucleotide
  Antisense Strand to SEQ ID NO: 401175
uaagacaaggcuuguuucc

SEQ ID NO: 401177 - RNA, 19 nt, Artificial Sequence
  Description of Artificial Sequence: Synthetic oligonucleotide
  Sense Strand Starting at position 1050 of SEQ ID NO: 316158
caagccuugucuuaugaug

SEQ ID NO: 401178 - RNA, 19 nt, Artificial Sequence
  Description of Artificial Sequence: Synthetic oligonucleotide
  Antisense Strand to SEQ ID NO: 401177
caucauaagacaaggcuug

SEQ ID NO: 401179 - RNA, 19 nt, Artificial Sequence
  Description of Artificial Sequence: Synthetic oligonucleotide
  Sense Strand Starting at position 1050 of SEQ ID NO: 316160
agccuugucuuaugaugga

SEQ ID NO: 401180 - RNA, 19 nt, Artificial Sequence
  Description of Artificial Sequence: Synthetic oligonucleotide
  Antisense Strand to SEQ ID NO: 401179
uccaucauaagacaaggcu

SEQ ID NO: 401181 - RNA, 19 nt, Artificial Sequence
  Description of Artificial Sequence: Synthetic oligonucleotide
  Sense Strand Starting at position 1050 of SEQ ID NO: 316163
cuugucuuaugauggaaac

SEQ ID NO: 401182 - RNA, 19 nt, Artificial Sequence
  Description of Artificial Sequence: Synthetic oligonucleotide
  Antisense Strand to SEQ ID NO: 401181
guuuccaucauaagacaag

SEQ ID NO: 401183 - RNA, 19 nt, Artificial Sequence
  Description of Artificial Sequence: Synthetic oligonucleotide
  Sense Strand Starting at position 1050 of SEQ ID NO: 316165
ugucuuaugauggaaacgu

SEQ ID NO: 401184 - RNA, 19 nt, Artificial Sequence
  Description of Artificial Sequence: Synthetic oligonucleotide
  Antisense Strand to SEQ ID NO: 401183
acguuuccaucauaagaca

SEQ ID NO: 401185 - RNA, 19 nt, Artificial Sequence
  Description of Artificial Sequence: Synthetic oligonucleotide
  Sense Strand Starting at position 1050 of SEQ ID NO: 316274
agcagaagucccugggcua

SEQ ID NO: 401186 - RNA, 19 nt, Artificial Sequence
  Description of Artificial Sequence: Synthetic oligonucleotide
  Antisense Strand to SEQ ID NO: 401185
uagcccagggacuucugcu

SEQ ID NO: 401187 - RNA, 19 nt, Artificial Sequence
  Description of Artificial Sequence: Synthetic oligonucleotide
  Sense Strand Starting at position 1050 of SEQ ID NO: 316815
gucguucugccgggacgau

SEQ ID NO: 401188 - RNA, 19 nt, Artificial Sequence
  Description of Artificial Sequence: Synthetic oligonucleotide
  Antisense Strand to SEQ ID NO: 401187
aucgucccggcagaacgac

SEQ ID NO: 401189 - RNA, 19 nt, Artificial Sequence
  Description of Artificial Sequence: Synthetic oligonucleotide
  Sense Strand Starting at position 1050 of SEQ ID NO: 317596
agauuacagucagagccua

SEQ ID NO: 401190 - RNA, 19 nt, Artificial Sequence
  Description of Artificial Sequence: Synthetic oligonucleotide
  Antisense Strand to SEQ ID NO: 401189
uaggcucugacuguaaucu

SEQ ID NO: 401191 - RNA, 19 nt, Artificial Sequence
  Description of Artificial Sequence: Synthetic oligonucleotide
  Sense Strand Starting at position 1050 of SEQ ID NO: 317776
accaucaugccggacuaau

SEQ ID NO: 401192 - RNA, 19 nt, Artificial Sequence
  Description of Artificial Sequence: Synthetic oligonucleotide
  Antisense Strand to SEQ ID NO: 401191
auuaguccggcaugauggu

SEQ ID NO: 401193 - RNA, 19 nt, Artificial Sequence
  Description of Artificial Sequence: Synthetic oligonucleotide
  Sense Strand Starting at position 1050 of SEQ ID NO: 318265
agcccaggcugguaugaaa

SEQ ID NO: 401194 - RNA, 19 nt, Artificial Sequence
  Description of Artificial Sequence: Synthetic oligonucleotide
  Antisense Strand to SEQ ID NO: 401193
uuucauaccagccugggcu

SEQ ID NO: 401195 - RNA, 19 nt, Artificial Sequence
  Description of Artificial Sequence: Synthetic oligonucleotide
  Sense Strand Starting at position 1050 of SEQ ID NO: 318276
guaugaaacuccugucuuc

SEQ ID NO: 401196 - RNA, 19 nt, Artificial Sequence
  Description of Artificial Sequence: Synthetic oligonucleotide
  Antisense Strand to SEQ ID NO: 401195
gaagacaggaguuucauac

SEQ ID NO: 401197 - RNA, 19 nt, Artificial Sequence
  Description of Artificial Sequence: Synthetic oligonucleotide
  Sense Strand Starting at position 1050 of SEQ ID NO: 318415
cauugcuagcucugcaagu

SEQ ID NO: 401198 - RNA, 19 nt, Artificial Sequence
  Description of Artificial Sequence: Synthetic oligonucleotide
  Antisense Strand to SEQ ID NO: 401197
acuugcagagcuagcaaug

SEQ ID NO: 401199 - RNA, 19 nt, Artificial Sequence
  Description of Artificial Sequence: Synthetic oligonucleotide
  Sense Strand Starting at position 1050 of SEQ ID NO: 318431
agucuauuccuuugcuugu

SEQ ID NO: 401200 - RNA, 19 nt, Artificial Sequence
  Description of Artificial Sequence: Synthetic oligonucleotide
  Antisense Strand to SEQ ID NO: 401199
acaagcaaaggaauagacu

SEQ ID NO: 401201 - RNA, 19 nt, Artificial Sequence
  Description of Artificial Sequence: Synthetic oligonucleotide
  Sense Strand Starting at position 1050 of SEQ ID NO: 318506
cuggaaugcucaucccuaa

SEQ ID NO: 401202 - RNA, 19 nt, Artificial Sequence
  Description of Artificial Sequence: Synthetic oligonucleotide
  Antisense Strand to SEQ ID NO: 401201
uuagggaugagcauuccag

SEQ ID NO: 401203 - RNA, 19 nt, Artificial Sequence
  Description of Artificial Sequence: Synthetic oligonucleotide
  Sense Strand Starting at position 1050 of SEQ ID NO: 318538
gcugucuugugcuugggaa

SEQ ID NO: 401204 - RNA, 19 nt, Artificial Sequence
  Description of Artificial Sequence: Synthetic oligonucleotide
  Antisense Strand to SEQ ID NO: 401203
uucccaagcacaagacagc

SEQ ID NO: 401205 - RNA, 19 nt, Artificial Sequence
  Description of Artificial Sequence: Synthetic oligonucleotide
  Sense Strand Starting at position 1050 of SEQ ID NO: 318540
ugucuugugcuugggaauu

SEQ ID NO: 401206 - RNA, 19 nt, Artificial Sequence
  Description of Artificial Sequence: Synthetic oligonucleotide
  Antisense Strand to SEQ ID NO: 401205
aauucccaagcacaagaca

SEQ ID NO: 401207 - RNA, 19 nt, Artificial Sequence
  Description of Artificial Sequence: Synthetic oligonucleotide
  Sense Strand Starting at position 1050 of SEQ ID NO: 318551
ugggaauuagcucauacuc

SEQ ID NO: 401208 - RNA, 19 nt, Artificial Sequence
  Description of Artificial Sequence: Synthetic oligonucleotide
  Antisense Strand to SEQ ID NO: 401207
gaguaugagcuaauuccca

SEQ ID NO: 401209 - RNA, 19 nt, Artificial Sequence
  Description of Artificial Sequence: Synthetic oligonucleotide
  Sense Strand Starting at position 1050 of SEQ ID NO: 318657
ggccauuggacuugaucuu

SEQ ID NO: 401210 - RNA, 19 nt, Artificial Sequence
  Description of Artificial Sequence: Synthetic oligonucleotide
  Antisense Strand to SEQ ID NO: 401209
aagaucaaguccaauggcc

SEQ ID NO: 401211 - RNA, 19 nt, Artificial Sequence
  Description of Artificial Sequence: Synthetic oligonucleotide
  Sense Strand Starting at position 1050 of SEQ ID NO: 318658
gccauuggacuugaucuua

SEQ ID NO: 401212 - RNA, 19 nt, Artificial Sequence
  Description of Artificial Sequence: Synthetic oligonucleotide
  Antisense Strand to SEQ ID NO: 401211
uaagaucaaguccaauggc

SEQ ID NO: 401213 - RNA, 19 nt, Artificial Sequence
  Description of Artificial Sequence: Synthetic oligonucleotide
  Sense Strand Starting at position 1050 of SEQ ID NO: 318663
uggacuugaucuuaucaug

SEQ ID NO: 401214 - RNA, 19 nt, Artificial Sequence
  Description of Artificial Sequence: Synthetic oligonucleotide
  Antisense Strand to SEQ ID NO: 401213
caugauaagaucaagucca

SEQ ID NO: 401215 - RNA, 19 nt, Artificial Sequence
  Description of Artificial Sequence: Synthetic oligonucleotide
  Sense Strand Starting at position 1050 of SEQ ID NO: 318666
acuugaucuuaucauguau

SEQ ID NO: 401216 - RNA, 19 nt, Artificial Sequence
  Description of Artificial Sequence: Synthetic oligonucleotide
  Antisense Strand to SEQ ID NO: 401215
auacaugauaagaucaagu

SEQ ID NO: 401217 - RNA, 19 nt, Artificial Sequence
  Description of Artificial Sequence: Synthetic oligonucleotide
  Sense Strand Starting at position 1050 of SEQ ID NO: 318668
uugaucuuaucauguaugu

SEQ ID NO: 401218 - RNA, 19 nt, Artificial Sequence
  Description of Artificial Sequence: Synthetic oligonucleotide
  Antisense Strand to SEQ ID NO: 401217
acauacaugauaagaucaa

SEQ ID NO: 401219 - RNA, 19 nt, Artificial Sequence
  Description of Artificial Sequence: Synthetic oligonucleotide
  Sense Strand Starting at position 1050 of SEQ ID NO: 318672
ucuuaucauguaugugauc

SEQ ID NO: 401220 - RNA, 19 nt, Artificial Sequence
  Description of Artificial Sequence: Synthetic oligonucleotide
  Antisense Strand to SEQ ID NO: 401219
gaucacauacaugauaaga

SEQ ID NO: 401221 - RNA, 19 nt, Artificial Sequence
  Description of Artificial Sequence: Synthetic oligonucleotide
  Sense Strand Starting at position 1050 of SEQ ID NO: 318677
ucauguaugugaucuguga

SEQ ID NO: 401222 - RNA, 19 nt, Artificial Sequence
  Description of Artificial Sequence: Synthetic oligonucleotide
  Antisense Strand to SEQ ID NO: 401221
ucacagaucacauacauga

SEQ ID NO: 401223 - RNA, 19 nt, Artificial Sequence
  Description of Artificial Sequence: Synthetic oligonucleotide
  Sense Strand Starting at position 1050 of SEQ ID NO: 318679
auguaugugaucugugaac

SEQ ID NO: 401224 - RNA, 19 nt, Artificial Sequence
  Description of Artificial Sequence: Synthetic oligonucleotide
  Antisense Strand to SEQ ID NO: 401223
guucacagaucacauacau

SEQ ID NO: 401225 - RNA, 19 nt, Artificial Sequence
  Description of Artificial Sequence: Synthetic oligonucleotide
  Sense Strand Starting at position 1050 of SEQ ID NO: 318681
guaugugaucugugaacuc

SEQ ID NO: 401226 - RNA, 19 nt, Artificial Sequence
  Description of Artificial Sequence: Synthetic oligonucleotide
  Antisense Strand to SEQ ID NO: 401225
gaguucacagaucacauac

SEQ ID NO: 401227 - RNA, 19 nt, Artificial Sequence
  Description of Artificial Sequence: Synthetic oligonucleotide
  Sense Strand Starting at position 1050 of SEQ ID NO: 318699
caaagaggucacggucaua

SEQ ID NO: 401228 - RNA, 19 nt, Artificial Sequence
  Description of Artificial Sequence: Synthetic oligonucleotide
  Antisense Strand to SEQ ID NO: 401227
uaugaccgugaccucuuug

SEQ ID NO: 401229 - RNA, 19 nt, Artificial Sequence
  Description of Artificial Sequence: Synthetic oligonucleotide
  Sense Strand Starting at position 1050 of SEQ ID NO: 318738
gacgccagugccugauuaa

SEQ ID NO: 401230 - RNA, 19 nt, Artificial Sequence
  Description of Artificial Sequence: Synthetic oligonucleotide
  Antisense Strand to SEQ ID NO: 401229
uuaaucaggcacuggcguc

SEQ ID NO: 401231 - RNA, 19 nt, Artificial Sequence
  Description of Artificial Sequence: Synthetic oligonucleotide
  Sense Strand Starting at position 1050 of SEQ ID NO: 318739
acgccagugccugauuaag

SEQ ID NO: 401232 - RNA, 19 nt, Artificial Sequence
  Description of Artificial Sequence: Synthetic oligonucleotide
  Antisense Strand to SEQ ID NO: 401231
cuuaaucaggcacuggcgu

SEQ ID NO: 401233 - RNA, 19 nt, Artificial Sequence
  Description of Artificial Sequence: Synthetic oligonucleotide
  Sense Strand Starting at position 1050 of SEQ ID NO: 318741
gccagugccugauuaagga

SEQ ID NO: 401234 - RNA, 19 nt, Artificial Sequence
  Description of Artificial Sequence: Synthetic oligonucleotide
  Antisense Strand to SEQ ID NO: 401233
uccuuaaucaggcacuggc

SEQ ID NO: 401235 - RNA, 19 nt, Artificial Sequence
  Description of Artificial Sequence: Synthetic oligonucleotide
  Sense Strand Starting at position 1050 of SEQ ID NO: 318748
ccugauuaaggaggguauu

SEQ ID NO: 401236 - RNA, 19 nt, Artificial Sequence
  Description of Artificial Sequence: Synthetic oligonucleotide
  Antisense Strand to SEQ ID NO: 401235
aauacccuccuuaaucagg

SEQ ID NO: 401237 - RNA, 19 nt, Artificial Sequence
  Description of Artificial Sequence: Synthetic oligonucleotide
  Sense Strand Starting at position 1050 of SEQ ID NO: 319111
gggacuuugugagguucua

SEQ ID NO: 401238 - RNA, 19 nt, Artificial Sequence
  Description of Artificial Sequence: Synthetic oligonucleotide
  Antisense Strand to SEQ ID NO: 401237
uagaaccucacaaaguccc

SEQ ID NO: 401239 - RNA, 19 nt, Artificial Sequence
  Description of Artificial Sequence: Synthetic oligonucleotide
  Sense Strand Starting at position 1051 of SEQ ID NO: 315326
aggagagacgcuugaacaa

SEQ ID NO: 401240 - RNA, 19 nt, Artificial Sequence
  Description of Artificial Sequence: Synthetic oligonucleotide
  Antisense Strand to SEQ ID NO: 401239
uuguucaagcgucucuccu

SEQ ID NO: 401241 - RNA, 19 nt, Artificial Sequence
  Description of Artificial Sequence: Synthetic oligonucleotide
  Sense Strand Starting at position 1051 of SEQ ID NO: 316099
uaggauaacuacugggaga

SEQ ID NO: 401242 - RNA, 19 nt, Artificial Sequence
  Description of Artificial Sequence: Synthetic oligonucleotide
  Antisense Strand to SEQ ID NO: 401241
ucucccaguaguuauccua

SEQ ID NO: 401243 - RNA, 19 nt, Artificial Sequence
  Description of Artificial Sequence: Synthetic oligonucleotide
  Sense Strand Starting at position 1051 of SEQ ID NO: 316102
gauaacuacugggagacua

SEQ ID NO: 401244 - RNA, 19 nt, Artificial Sequence
  Description of Artificial Sequence: Synthetic oligonucleotide
  Antisense Strand to SEQ ID NO: 401243
uagucucccaguaguuauc

SEQ ID NO: 401245 - RNA, 19 nt, Artificial Sequence
  Description of Artificial Sequence: Synthetic oligonucleotide
  Sense Strand Starting at position 1051 of SEQ ID NO: 316112
gggagacuaucugggugaa

SEQ ID NO: 401246 - RNA, 19 nt, Artificial Sequence
  Description of Artificial Sequence: Synthetic oligonucleotide
  Antisense Strand to SEQ ID NO: 401245
uucacccagauagucuccc

SEQ ID NO: 401247 - RNA, 19 nt, Artificial Sequence
  Description of Artificial Sequence: Synthetic oligonucleotide
  Sense Strand Starting at position 1051 of SEQ ID NO: 316113
ggagacuaucugggugaau

SEQ ID NO: 401248 - RNA, 19 nt, Artificial Sequence
  Description of Artificial Sequence: Synthetic oligonucleotide
  Antisense Strand to SEQ ID NO: 401247
auucacccagauagucucc

SEQ ID NO: 401249 - RNA, 19 nt, Artificial Sequence
  Description of Artificial Sequence: Synthetic oligonucleotide
  Sense Strand Starting at position 1051 of SEQ ID NO: 316114
gagacuaucugggugaauu

SEQ ID NO: 401250 - RNA, 19 nt, Artificial Sequence
  Description of Artificial Sequence: Synthetic oligonucleotide
  Antisense Strand to SEQ ID NO: 401249
aauucacccagauagucuc

SEQ ID NO: 401251 - RNA, 19 nt, Artificial Sequence
  Description of Artificial Sequence: Synthetic oligonucleotide
  Sense Strand Starting at position 1051 of SEQ ID NO: 316115
agacuaucugggugaauuc

SEQ ID NO: 401252 - RNA, 19 nt, Artificial Sequence
  Description of Artificial Sequence: Synthetic oligonucleotide
  Antisense Strand to SEQ ID NO: 401251
gaauucacccagauagucu

SEQ ID NO: 401253 - RNA, 19 nt, Artificial Sequence
  Description of Artificial Sequence: Synthetic oligonucleotide
  Sense Strand Starting at position 1051 of SEQ ID NO: 316219
caguaauguucugguggca

SEQ ID NO: 401254 - RNA, 19 nt, Artificial Sequence
  Description of Artificial Sequence: Synthetic oligonucleotide
  Antisense Strand to SEQ ID NO: 401253
ugccaccagaacauuacug

SEQ ID NO: 401255 - RNA, 19 nt, Artificial Sequence
  Description of Artificial Sequence: Synthetic oligonucleotide
  Sense Strand Starting at position 1051 of SEQ ID NO: 316421
gguucaaacuagggauuga

SEQ ID NO: 401256 - RNA, 19 nt, Artificial Sequence
  Description of Artificial Sequence: Synthetic oligonucleotide
  Antisense Strand to SEQ ID NO: 401255
ucaaucccuaguuugaacc

SEQ ID NO: 401257 - RNA, 19 nt, Artificial Sequence
  Description of Artificial Sequence: Synthetic oligonucleotide
  Sense Strand Starting at position 1051 of SEQ ID NO: 316549
ggcacaaugcugggagaaa

SEQ ID NO: 401258 - RNA, 19 nt, Artificial Sequence
  Description of Artificial Sequence: Synthetic oligonucleotide
  Antisense Strand to SEQ ID NO: 401257
uuucucccagcauugugcc

SEQ ID NO: 401259 - RNA, 19 nt, Artificial Sequence
  Description of Artificial Sequence: Synthetic oligonucleotide
  Sense Strand Starting at position 1051 of SEQ ID NO: 316550
gcacaaugcugggagaaau

SEQ ID NO: 401260 - RNA, 19 nt, Artificial Sequence
  Description of Artificial Sequence: Synthetic oligonucleotide
  Antisense Strand to SEQ ID NO: 401259
auuucucccagcauugugc

SEQ ID NO: 401261 - RNA, 19 nt, Artificial Sequence
  Description of Artificial Sequence: Synthetic oligonucleotide
  Sense Strand Starting at position 1051 of SEQ ID NO: 316651
gcuggccaguccucaagua

SEQ ID NO: 401262 - RNA, 19 nt, Artificial Sequence
  Description of Artificial Sequence: Synthetic oligonucleotide
  Antisense Strand to SEQ ID NO: 401261
uacuugaggacuggccagc

SEQ ID NO: 401263 - RNA, 19 nt, Artificial Sequence
  Description of Artificial Sequence: Synthetic oligonucleotide
  Sense Strand Starting at position 1051 of SEQ ID NO: 316807
cccagaaccuugcaggaaa

SEQ ID NO: 401264 - RNA, 19 nt, Artificial Sequence
  Description of Artificial Sequence: Synthetic oligonucleotide
  Antisense Strand to SEQ ID NO: 401263
uuuccugcaagguucuggg

SEQ ID NO: 401265 - RNA, 19 nt, Artificial Sequence
  Description of Artificial Sequence: Synthetic oligonucleotide
  Sense Strand Starting at position 1051 of SEQ ID NO: 316829
uugcuuugcacauggguga

SEQ ID NO: 401266 - RNA, 19 nt, Artificial Sequence
  Description of Artificial Sequence: Synthetic oligonucleotide
  Antisense Strand to SEQ ID NO: 401265
ucacccaugugcaaagcaa

SEQ ID NO: 401267 - RNA, 19 nt, Artificial Sequence
  Description of Artificial Sequence: Synthetic oligonucleotide
  Sense Strand Starting at position 1051 of SEQ ID NO: 316990
cggacacuucugcggaguu

SEQ ID NO: 401268 - RNA, 19 nt, Artificial Sequence
  Description of Artificial Sequence: Synthetic oligonucleotide
  Antisense Strand to SEQ ID NO: 401267
aacuccgcagaaguguccg

SEQ ID NO: 401269 - RNA, 19 nt, Artificial Sequence
  Description of Artificial Sequence: Synthetic oligonucleotide
  Sense Strand Starting at position 1051 of SEQ ID NO: 317633
gcgacauuugcauagcgca

SEQ ID NO: 401270 - RNA, 19 nt, Artificial Sequence
  Description of Artificial Sequence: Synthetic oligonucleotide
  Antisense Strand to SEQ ID NO: 401269
ugcgcuaugcaaaugucgc

SEQ ID NO: 401271 - RNA, 19 nt, Artificial Sequence
  Description of Artificial Sequence: Synthetic oligonucleotide
  Sense Strand Starting at position 1051 of SEQ ID NO: 317843
ggcuuugucucucugugaa

SEQ ID NO: 401272 - RNA, 19 nt, Artificial Sequence
  Description of Artificial Sequence: Synthetic oligonucleotide
  Antisense Strand to SEQ ID NO: 401271
uucacagagagacaaagcc

SEQ ID NO: 401273 - RNA, 19 nt, Artificial Sequence
  Description of Artificial Sequence: Synthetic oligonucleotide
  Sense Strand Starting at position 1051 of SEQ ID NO: 317845
cuuugucucucugugaaua

SEQ ID NO: 401274 - RNA, 19 nt, Artificial Sequence
  Description of Artificial Sequence: Synthetic oligonucleotide
  Antisense Strand to SEQ ID NO: 401273
uauucacagagagacaaag

SEQ ID NO: 401275 - RNA, 19 nt, Artificial Sequence
  Description of Artificial Sequence: Synthetic oligonucleotide
  Sense Strand Starting at position 1051 of SEQ ID NO: 317847
uugucucucugugaauaca

SEQ ID NO: 401276 - RNA, 19 nt, Artificial Sequence
  Description of Artificial Sequence: Synthetic oligonucleotide
  Antisense Strand to SEQ ID NO: 401275
uguauucacagagagacaa

SEQ ID NO: 401277 - RNA, 19 nt, Artificial Sequence
  Description of Artificial Sequence: Synthetic oligonucleotide
  Sense Strand Starting at position 1051 of SEQ ID NO: 317857
gugaauacaccgcacacau

SEQ ID NO: 401278 - RNA, 19 nt, Artificial Sequence
  Description of Artificial Sequence: Synthetic oligonucleotide
  Antisense Strand to SEQ ID NO: 401277
augugugcgguguauucac

SEQ ID NO: 401279 - RNA, 19 nt, Artificial Sequence
  Description of Artificial Sequence: Synthetic oligonucleotide
  Sense Strand Starting at position 1051 of SEQ ID NO: 317882
ugguguuuacccgggcauu

SEQ ID NO: 401280 - RNA, 19 nt, Artificial Sequence
  Description of Artificial Sequence: Synthetic oligonucleotide
  Antisense Strand to SEQ ID NO: 401279
aaugcccggguaaacacca

SEQ ID NO: 401281 - RNA, 19 nt, Artificial Sequence
  Description of Artificial Sequence: Synthetic oligonucleotide
  Sense Strand Starting at position 1051 of SEQ ID NO: 318233
acagacucuccuuauaguu

SEQ ID NO: 401282 - RNA, 19 nt, Artificial Sequence
  Description of Artificial Sequence: Synthetic oligonucleotide
  Antisense Strand to SEQ ID NO: 401281
aacuauaaggagagucugu

SEQ ID NO: 401283 - RNA, 19 nt, Artificial Sequence
  Description of Artificial Sequence: Synthetic oligonucleotide
  Sense Strand Starting at position 1051 of SEQ ID NO: 318927
ucuccugacucaggacuua

SEQ ID NO: 401284 - RNA, 19 nt, Artificial Sequence
  Description of Artificial Sequence: Synthetic oligonucleotide
  Antisense Strand to SEQ ID NO: 401283
uaaguccugagucaggaga

SEQ ID NO: 401285 - RNA, 19 nt, Artificial Sequence
  Description of Artificial Sequence: Synthetic oligonucleotide
  Sense Strand Starting at position 1051 of SEQ ID NO: 318940
gacuuagagugcugccuca

SEQ ID NO: 401286 - RNA, 19 nt, Artificial Sequence
  Description of Artificial Sequence: Synthetic oligonucleotide
  Antisense Strand to SEQ ID NO: 401285
ugaggcagcacucuaaguc

SEQ ID NO: 401287 - RNA, 19 nt, Artificial Sequence
  Description of Artificial Sequence: Synthetic oligonucleotide
  Sense Strand Starting at position 1051 of SEQ ID NO: 319046
uuugucacgccucauugaa

SEQ ID NO: 401288 - RNA, 19 nt, Artificial Sequence
  Description of Artificial Sequence: Synthetic oligonucleotide
  Antisense Strand to SEQ ID NO: 401287
uucaaugaggcgugacaaa

SEQ ID NO: 401289 - RNA, 19 nt, Artificial Sequence
  Description of Artificial Sequence: Synthetic oligonucleotide
  Sense Strand Starting at position 1051 of SEQ ID NO: 319096
cacucaucuguaugagggu

SEQ ID NO: 401290 - RNA, 19 nt, Artificial Sequence
  Description of Artificial Sequence: Synthetic oligonucleotide
  Antisense Strand to SEQ ID NO: 401289
acccucauacagaugagug

SEQ ID NO: 401291 - RNA, 19 nt, Artificial Sequence
  Description of Artificial Sequence: Synthetic oligonucleotide
  Sense Strand Starting at position 1051 of SEQ ID NO: 319211
ccuccauggucuccuuaua

SEQ ID NO: 401292 - RNA, 19 nt, Artificial Sequence
  Description of Artificial Sequence: Synthetic oligonucleotide
  Antisense Strand to SEQ ID NO: 401291
uauaaggagaccauggagg

SEQ ID NO: 401293 - RNA, 19 nt, Artificial Sequence
  Description of Artificial Sequence: Synthetic oligonucleotide
  Sense Strand Starting at position 1052 of SEQ ID NO: 315451
agagcaaagugcuggaaga

SEQ ID NO: 401294 - RNA, 19 nt, Artificial Sequence
  Description of Artificial Sequence: Synthetic oligonucleotide
  Antisense Strand to SEQ ID NO: 401293
ucuuccagcacuuugcucu

SEQ ID NO: 401295 - RNA, 19 nt, Artificial Sequence
  Description of Artificial Sequence: Synthetic oligonucleotide
  Sense Strand Starting at position 1052 of SEQ ID NO: 315452
gagcaaagugcuggaagau

SEQ ID NO: 401296 - RNA, 19 nt, Artificial Sequence
  Description of Artificial Sequence: Synthetic oligonucleotide
  Antisense Strand to SEQ ID NO: 401295
aucuuccagcacuuugcuc

SEQ ID NO: 401297 - RNA, 19 nt, Artificial Sequence
  Description of Artificial Sequence: Synthetic oligonucleotide
  Sense Strand Starting at position 1052 of SEQ ID NO: 315461
gcuggaagauccuggagga

SEQ ID NO: 401298 - RNA, 19 nt, Artificial Sequence
  Description of Artificial Sequence: Synthetic oligonucleotide
  Antisense Strand to SEQ ID NO: 401297
uccuccaggaucuuccagc

SEQ ID NO: 401299 - RNA, 19 nt, Artificial Sequence
  Description of Artificial Sequence: Synthetic oligonucleotide
  Sense Strand Starting at position 1052 of SEQ ID NO: 315533
cgaaacuguucccagcaga

SEQ ID NO: 401300 - RNA, 19 nt, Artificial Sequence
  Description of Artificial Sequence: Synthetic oligonucleotide
  Antisense Strand to SEQ ID NO: 401299
ucugcugggaacaguuucg

SEQ ID NO: 401301 - RNA, 19 nt, Artificial Sequence
  Description of Artificial Sequence: Synthetic oligonucleotide
  Sense Strand Starting at position 1052 of SEQ ID NO: 315702
ggacaucggucccaggagu

SEQ ID NO: 401302 - RNA, 19 nt, Artificial Sequence
  Description of Artificial Sequence: Synthetic oligonucleotide
  Antisense Strand to SEQ ID NO: 401301
acuccugggaccgaugucc

SEQ ID NO: 401303 - RNA, 19 nt, Artificial Sequence
  Description of Artificial Sequence: Synthetic oligonucleotide
  Sense Strand Starting at position 1052 of SEQ ID NO: 315718
aguugaggauccugaggua

SEQ ID NO: 401304 - RNA, 19 nt, Artificial Sequence
  Description of Artificial Sequence: Synthetic oligonucleotide
  Antisense Strand to SEQ ID NO: 401303
uaccucaggauccucaacu

SEQ ID NO: 401305 - RNA, 19 nt, Artificial Sequence
  Description of Artificial Sequence: Synthetic oligonucleotide
  Sense Strand Starting at position 1052 of SEQ ID NO: 315904
cgggaagcccuccauggau

SEQ ID NO: 401306 - RNA, 19 nt, Artificial Sequence
  Description of Artificial Sequence: Synthetic oligonucleotide
  Antisense Strand to SEQ ID NO: 401305
auccauggagggcuucccg

SEQ ID NO: 401307 - RNA, 19 nt, Artificial Sequence
  Description of Artificial Sequence: Synthetic oligonucleotide
  Sense Strand Starting at position 1052 of SEQ ID NO: 316162
ggcucacaugucuagggua

SEQ ID NO: 401308 - RNA, 19 nt, Artificial Sequence
  Description of Artificial Sequence: Synthetic oligonucleotide
  Antisense Strand to SEQ ID NO: 401307
uacccuagacaugugagcc

SEQ ID NO: 401309 - RNA, 19 nt, Artificial Sequence
  Description of Artificial Sequence: Synthetic oligonucleotide
  Sense Strand Starting at position 1052 of SEQ ID NO: 316164
cucacaugucuaggguaga

SEQ ID NO: 401310 - RNA, 19 nt, Artificial Sequence
  Description of Artificial Sequence: Synthetic oligonucleotide
  Antisense Strand to SEQ ID NO: 401309
ucuacccuagacaugugag

SEQ ID NO: 401311 - RNA, 19 nt, Artificial Sequence
  Description of Artificial Sequence: Synthetic oligonucleotide
  Sense Strand Starting at position 1052 of SEQ ID NO: 316165
ucacaugucuaggguagaa

SEQ ID NO: 401312 - RNA, 19 nt, Artificial Sequence
  Description of Artificial Sequence: Synthetic oligonucleotide
  Antisense Strand to SEQ ID NO: 401311
uucuacccuagacauguga

SEQ ID NO: 401313 - RNA, 19 nt, Artificial Sequence
  Description of Artificial Sequence: Synthetic oligonucleotide
  Sense Strand Starting at position 1052 of SEQ ID NO: 317508
aggccauguguacagagau

SEQ ID NO: 401314 - RNA, 19 nt, Artificial Sequence
  Description of Artificial Sequence: Synthetic oligonucleotide
  Antisense Strand to SEQ ID NO: 401313
aucucuguacacauggccu

SEQ ID NO: 401315 - RNA, 19 nt, Artificial Sequence
  Description of Artificial Sequence: Synthetic oligonucleotide
  Sense Strand Starting at position 1052 of SEQ ID NO: 317520
cagagauguccacaaaugc

SEQ ID NO: 401316 - RNA, 19 nt, Artificial Sequence
  Description of Artificial Sequence: Synthetic oligonucleotide
  Antisense Strand to SEQ ID NO: 401315
gcauuuguggacaucucug

SEQ ID NO: 401317 - RNA, 19 nt, Artificial Sequence
  Description of Artificial Sequence: Synthetic oligonucleotide
  Sense Strand Starting at position 1052 of SEQ ID NO: 317724
cccugaagcuuuggccaga

SEQ ID NO: 401318 - RNA, 19 nt, Artificial Sequence
  Description of Artificial Sequence: Synthetic oligonucleotide
  Antisense Strand to SEQ ID NO: 401317
ucuggccaaagcuucaggg

SEQ ID NO: 401319 - RNA, 19 nt, Artificial Sequence
  Description of Artificial Sequence: Synthetic oligonucleotide
  Sense Strand Starting at position 1052 of SEQ ID NO: 317799
guccuagacagguguuuga

SEQ ID NO: 401320 - RNA, 19 nt, Artificial Sequence
  Description of Artificial Sequence: Synthetic oligonucleotide
  Antisense Strand to SEQ ID NO: 401319
ucaaacaccugucuaggac

SEQ ID NO: 401321 - RNA, 19 nt, Artificial Sequence
  Description of Artificial Sequence: Synthetic oligonucleotide
  Sense Strand Starting at position 1052 of SEQ ID NO: 318120
uaugaucucuuagagguca

SEQ ID NO: 401322 - RNA, 19 nt, Artificial Sequence
  Description of Artificial Sequence: Synthetic oligonucleotide
  Antisense Strand to SEQ ID NO: 401321
ugaccucuaagagaucaua

SEQ ID NO: 401323 - RNA, 19 nt, Artificial Sequence
  Description of Artificial Sequence: Synthetic oligonucleotide
  Sense Strand Starting at position 1052 of SEQ ID NO: 318354
gaguuugaguucccaggau

SEQ ID NO: 401324 - RNA, 19 nt, Artificial Sequence
  Description of Artificial Sequence: Synthetic oligonucleotide
  Antisense Strand to SEQ ID NO: 401323
auccugggaacucaaacuc

SEQ ID NO: 401325 - RNA, 19 nt, Artificial Sequence
  Description of Artificial Sequence: Synthetic oligonucleotide
  Sense Strand Starting at position 1052 of SEQ ID NO: 318358
uugaguucccaggauucua

SEQ ID NO: 401326 - RNA, 19 nt, Artificial Sequence
  Description of Artificial Sequence: Synthetic oligonucleotide
  Antisense Strand to SEQ ID NO: 401325
uagaauccugggaacucaa

SEQ ID NO: 401327 - RNA, 19 nt, Artificial Sequence
  Description of Artificial Sequence: Synthetic oligonucleotide
  Sense Strand Starting at position 1052 of SEQ ID NO: 318425
gaugguggucagggaacuu

SEQ ID NO: 401328 - RNA, 19 nt, Artificial Sequence
  Description of Artificial Sequence: Synthetic oligonucleotide
  Antisense Strand to SEQ ID NO: 401327
aaguucccugaccaccauc

SEQ ID NO: 401329 - RNA, 19 nt, Artificial Sequence
  Description of Artificial Sequence: Synthetic oligonucleotide
  Sense Strand Starting at position 1052 of SEQ ID NO: 318916
gaccauauccugggaccuu

SEQ ID NO: 401330 - RNA, 19 nt, Artificial Sequence
  Description of Artificial Sequence: Synthetic oligonucleotide
  Antisense Strand to SEQ ID NO: 401329
aaggucccaggauaugguc

SEQ ID NO: 401331 - RNA, 19 nt, Artificial Sequence
  Description of Artificial Sequence: Synthetic oligonucleotide
  Sense Strand Starting at position 1052 of SEQ ID NO: 318999
gccaacuucuaacuggaga

SEQ ID NO: 401332 - RNA, 19 nt, Artificial Sequence
  Description of Artificial Sequence: Synthetic oligonucleotide
  Antisense Strand to SEQ ID NO: 401331
ucuccaguuagaaguuggc

SEQ ID NO: 401333 - RNA, 19 nt, Artificial Sequence
  Description of Artificial Sequence: Synthetic oligonucleotide
  Sense Strand Starting at position 1053 of SEQ ID NO: 315246
cuuuccuccuccguugaaa

SEQ ID NO: 401334 - RNA, 19 nt, Artificial Sequence
  Description of Artificial Sequence: Synthetic oligonucleotide
  Antisense Strand to SEQ ID NO: 401333
uuucaacggaggaggaaag

SEQ ID NO: 401335 - RNA, 19 nt, Artificial Sequence
  Description of Artificial Sequence: Synthetic oligonucleotide
  Sense Strand Starting at position 1053 of SEQ ID NO: 315264
aaucuagacuucgggaaag

SEQ ID NO: 401336 - RNA, 19 nt, Artificial Sequence
  Description of Artificial Sequence: Synthetic oligonucleotide
  Antisense Strand to SEQ ID NO: 401335
cuuucccgaagucuagauu

SEQ ID NO: 401337 - RNA, 19 nt, Artificial Sequence
  Description of Artificial Sequence: Synthetic oligonucleotide
  Sense Strand Starting at position 1053 of SEQ ID NO: 315266
ucuagacuucgggaaaggu

SEQ ID NO: 401338 - RNA, 19 nt, Artificial Sequence
  Description of Artificial Sequence: Synthetic oligonucleotide
  Antisense Strand to SEQ ID NO: 401337
accuuucccgaagucuaga

SEQ ID NO: 401339 - RNA, 19 nt, Artificial Sequence
  Description of Artificial Sequence: Synthetic oligonucleotide
  Sense Strand Starting at position 1053 of SEQ ID NO: 315288
ggcuguuucuuuccaagcu

SEQ ID NO: 401340 - RNA, 19 nt, Artificial Sequence
  Description of Artificial Sequence: Synthetic oligonucleotide
  Antisense Strand to SEQ ID NO: 401339
agcuuggaaagaaacagcc

SEQ ID NO: 401341 - RNA, 19 nt, Artificial Sequence
  Description of Artificial Sequence: Synthetic oligonucleotide
  Sense Strand Starting at position 1053 of SEQ ID NO: 315417
ggccacugcugauugucaa

SEQ ID NO: 401342 - RNA, 19 nt, Artificial Sequence
  Description of Artificial Sequence: Synthetic oligonucleotide
  Antisense Strand to SEQ ID NO: 401341
uugacaaucagcaguggcc

SEQ ID NO: 401343 - RNA, 19 nt, Artificial Sequence
  Description of Artificial Sequence: Synthetic oligonucleotide
  Sense Strand Starting at position 1053 of SEQ ID NO: 315420
cacugcugauugucaagaa

SEQ ID NO: 401344 - RNA, 19 nt, Artificial Sequence
  Description of Artificial Sequence: Synthetic oligonucleotide
  Antisense Strand to SEQ ID NO: 401343
uucuugacaaucagcagug

SEQ ID NO: 401345 - RNA, 19 nt, Artificial Sequence
  Description of Artificial Sequence: Synthetic oligonucleotide
  Sense Strand Starting at position 1053 of SEQ ID NO: 315918
ccuccuccuuguuuaaagu

SEQ ID NO: 401346 - RNA, 19 nt, Artificial Sequence
  Description of Artificial Sequence: Synthetic oligonucleotide
  Antisense Strand to SEQ ID NO: 401345
acuuuaaacaaggaggagg

SEQ ID NO: 401347 - RNA, 19 nt, Artificial Sequence
  Description of Artificial Sequence: Synthetic oligonucleotide
  Sense Strand Starting at position 1053 of SEQ ID NO: 315931
uaaaguuugcggugggcaa

SEQ ID NO: 401348 - RNA, 19 nt, Artificial Sequence
  Description of Artificial Sequence: Synthetic oligonucleotide
  Antisense Strand to SEQ ID NO: 401347
uugcccaccgcaaacuuua

SEQ ID NO: 401349 - RNA, 19 nt, Artificial Sequence
  Description of Artificial Sequence: Synthetic oligonucleotide
  Sense Strand Starting at position 1053 of SEQ ID NO: 315932
aaaguuugcggugggcaaa

SEQ ID NO: 401350 - RNA, 19 nt, Artificial Sequence
  Description of Artificial Sequence: Synthetic oligonucleotide
  Antisense Strand to SEQ ID NO: 401349
uuugcccaccgcaaacuuu

SEQ ID NO: 401351 - RNA, 19 nt, Artificial Sequence
  Description of Artificial Sequence: Synthetic oligonucleotide
  Sense Strand Starting at position 1053 of SEQ ID NO: 316813
acccgaguugcugaaguuu

SEQ ID NO: 401352 - RNA, 19 nt, Artificial Sequence
  Description of Artificial Sequence: Synthetic oligonucleotide
  Antisense Strand to SEQ ID NO: 401351
aaacuucagcaacucgggu

SEQ ID NO: 401353 - RNA, 19 nt, Artificial Sequence
  Description of Artificial Sequence: Synthetic oligonucleotide
  Sense Strand Starting at position 1053 of SEQ ID NO: 317639
gucaguucggaacgaucuu

SEQ ID NO: 401354 - RNA, 19 nt, Artificial Sequence
  Description of Artificial Sequence: Synthetic oligonucleotide
  Antisense Strand to SEQ ID NO: 401353
aagaucguuccgaacugac

SEQ ID NO: 401355 - RNA, 19 nt, Artificial Sequence
  Description of Artificial Sequence: Synthetic oligonucleotide
  Sense Strand Starting at position 1053 of SEQ ID NO: 317764
gccagaacuggccggauua

SEQ ID NO: 401356 - RNA, 19 nt, Artificial Sequence
  Description of Artificial Sequence: Synthetic oligonucleotide
  Antisense Strand to SEQ ID NO: 401355
uaauccggccaguucuggc

SEQ ID NO: 401357 - RNA, 19 nt, Artificial Sequence
  Description of Artificial Sequence: Synthetic oligonucleotide
  Sense Strand Starting at position 1053 of SEQ ID NO: 317775
ccggauuaggguuaaccuu

SEQ ID NO: 401358 - RNA, 19 nt, Artificial Sequence
  Description of Artificial Sequence: Synthetic oligonucleotide
  Antisense Strand to SEQ ID NO: 401357
aagguuaacccuaauccgg

SEQ ID NO: 401359 - RNA, 19 nt, Artificial Sequence
  Description of Artificial Sequence: Synthetic oligonucleotide
  Sense Strand Starting at position 1053 of SEQ ID NO: 317781
uaggguuaaccuugcaaac

SEQ ID NO: 401360 - RNA, 19 nt, Artificial Sequence
  Description of Artificial Sequence: Synthetic oligonucleotide
  Antisense Strand to SEQ ID NO: 401359
guuugcaagguuaacccua

SEQ ID NO: 401361 - RNA, 19 nt, Artificial Sequence
  Description of Artificial Sequence: Synthetic oligonucleotide
  Sense Strand Starting at position 1053 of SEQ ID NO: 317790
ccuugcaaacuguacgaua

SEQ ID NO: 401362 - RNA, 19 nt, Artificial Sequence
  Description of Artificial Sequence: Synthetic oligonucleotide
  Antisense Strand to SEQ ID NO: 401361
uaucguacaguuugcaagg

SEQ ID NO: 401363 - RNA, 19 nt, Artificial Sequence
  Description of Artificial Sequence: Synthetic oligonucleotide
  Sense Strand Starting at position 1053 of SEQ ID NO: 317870
ccuacagaauugugaagaa

SEQ ID NO: 401364 - RNA, 19 nt, Artificial Sequence
  Description of Artificial Sequence: Synthetic oligonucleotide
  Antisense Strand to SEQ ID NO: 401363
uucuucacaauucuguagg

SEQ ID NO: 401365 - RNA, 19 nt, Artificial Sequence
  Description of Artificial Sequence: Synthetic oligonucleotide
  Sense Strand Starting at position 1053 of SEQ ID NO: 317991
gaagguuuagcgcaaucac

SEQ ID NO: 401366 - RNA, 19 nt, Artificial Sequence
  Description of Artificial Sequence: Synthetic oligonucleotide
  Antisense Strand to SEQ ID NO: 401365
gugauugcgcuaaaccuuc

SEQ ID NO: 401367 - RNA, 19 nt, Artificial Sequence
  Description of Artificial Sequence: Synthetic oligonucleotide
  Sense Strand Starting at position 1053 of SEQ ID NO: 318017
gaggccgaauuguuuacaa

SEQ ID NO: 401368 - RNA, 19 nt, Artificial Sequence
  Description of Artificial Sequence: Synthetic oligonucleotide
  Antisense Strand to SEQ ID NO: 401367
uuguaaacaauucggccuc

SEQ ID NO: 401369 - RNA, 19 nt, Artificial Sequence
  Description of Artificial Sequence: Synthetic oligonucleotide
  Sense Strand Starting at position 1053 of SEQ ID NO: 318019
ggccgaauuguuuacaagu

SEQ ID NO: 401370 - RNA, 19 nt, Artificial Sequence
  Description of Artificial Sequence: Synthetic oligonucleotide
  Antisense Strand to SEQ ID NO: 401369
acuuguaaacaauucggcc

SEQ ID NO: 401371 - RNA, 19 nt, Artificial Sequence
  Description of Artificial Sequence: Synthetic oligonucleotide
  Sense Strand Starting at position 1053 of SEQ ID NO: 318027
uguuuacaaguuuaaguga

SEQ ID NO: 401372 - RNA, 19 nt, Artificial Sequence
  Description of Artificial Sequence: Synthetic oligonucleotide
  Antisense Strand to SEQ ID NO: 401371
ucacuuaaacuuguaaaca

SEQ ID NO: 401373 - RNA, 19 nt, Artificial Sequence
  Description of Artificial Sequence: Synthetic oligonucleotide
  Sense Strand Starting at position 1053 of SEQ ID NO: 318034
aaguuuaagugaucuagug

SEQ ID NO: 401374 - RNA, 19 nt, Artificial Sequence
  Description of Artificial Sequence: Synthetic oligonucleotide
  Antisense Strand to SEQ ID NO: 401373
cacuagaucacuuaaacuu

SEQ ID NO: 401375 - RNA, 19 nt, Artificial Sequence
  Description of Artificial Sequence: Synthetic oligonucleotide
  Sense Strand Starting at position 1053 of SEQ ID NO: 318036
guuuaagugaucuaguguu

SEQ ID NO: 401376 - RNA, 19 nt, Artificial Sequence
  Description of Artificial Sequence: Synthetic oligonucleotide
  Antisense Strand to SEQ ID NO: 401375
aacacuagaucacuuaaac

SEQ ID NO: 401377 - RNA, 19 nt, Artificial Sequence
  Description of Artificial Sequence: Synthetic oligonucleotide
  Sense Strand Starting at position 1053 of SEQ ID NO: 318042
gugaucuaguguuucugau

SEQ ID NO: 401378 - RNA, 19 nt, Artificial Sequence
  Description of Artificial Sequence: Synthetic oligonucleotide
  Antisense Strand to SEQ ID NO: 401377
aucagaaacacuagaucac

SEQ ID NO: 401379 - RNA, 19 nt, Artificial Sequence
  Description of Artificial Sequence: Synthetic oligonucleotide
  Sense Strand Starting at position 1053 of SEQ ID NO: 318049
aguguuucugauggcuaga

SEQ ID NO: 401380 - RNA, 19 nt, Artificial Sequence
  Description of Artificial Sequence: Synthetic oligonucleotide
  Antisense Strand to SEQ ID NO: 401379
ucuagccaucagaaacacu

SEQ ID NO: 401381 - RNA, 19 nt, Artificial Sequence
  Description of Artificial Sequence: Synthetic oligonucleotide
  Sense Strand Starting at position 1053 of SEQ ID NO: 318135
aagggagcccucugcugaa

SEQ ID NO: 401382 - RNA, 19 nt, Artificial Sequence
  Description of Artificial Sequence: Synthetic oligonucleotide
  Antisense Strand to SEQ ID NO: 401381
uucagcagagggcucccuu

SEQ ID NO: 401383 - RNA, 19 nt, Artificial Sequence
  Description of Artificial Sequence: Synthetic oligonucleotide
  Sense Strand Starting at position 1053 of SEQ ID NO: 318239
gugugauucuaagagauaa

SEQ ID NO: 401384 - RNA, 19 nt, Artificial Sequence
  Description of Artificial Sequence: Synthetic oligonucleotide
  Antisense Strand to SEQ ID NO: 401383
uuaucucuuagaaucacac

SEQ ID NO: 401385 - RNA, 19 nt, Artificial Sequence
  Description of Artificial Sequence: Synthetic oligonucleotide
  Sense Strand Starting at position 1053 of SEQ ID NO: 318313
gacuuucuagaguaugcca

SEQ ID NO: 401386 - RNA, 19 nt, Artificial Sequence
  Description of Artificial Sequence: Synthetic oligonucleotide
  Antisense Strand to SEQ ID NO: 401385
uggcauacucuagaaaguc

SEQ ID NO: 401387 - RNA, 19 nt, Artificial Sequence
  Description of Artificial Sequence: Synthetic oligonucleotide
  Sense Strand Starting at position 1053 of SEQ ID NO: 318346
agaacaaagucugagugaa

SEQ ID NO: 401388 - RNA, 19 nt, Artificial Sequence
  Description of Artificial Sequence: Synthetic oligonucleotide
  Antisense Strand to SEQ ID NO: 401387
uucacucagacuuuguucu

SEQ ID NO: 401389 - RNA, 19 nt, Artificial Sequence
  Description of Artificial Sequence: Synthetic oligonucleotide
  Sense Strand Starting at position 1053 of SEQ ID NO: 318486
gaagcaguuugacaggaua

SEQ ID NO: 401390 - RNA, 19 nt, Artificial Sequence
  Description of Artificial Sequence: Synthetic oligonucleotide
  Antisense Strand to SEQ ID NO: 401389
uauccugucaaacugcuuc

SEQ ID NO: 401391 - RNA, 19 nt, Artificial Sequence
  Description of Artificial Sequence: Synthetic oligonucleotide
  Sense Strand Starting at position 1053 of SEQ ID NO: 318488
agcaguuugacaggauaau

SEQ ID NO: 401392 - RNA, 19 nt, Artificial Sequence
  Description of Artificial Sequence: Synthetic oligonucleotide
  Antisense Strand to SEQ ID NO: 401391
auuauccugucaaacugcu

SEQ ID NO: 401393 - RNA, 19 nt, Artificial Sequence
  Description of Artificial Sequence: Synthetic oligonucleotide
  Sense Strand Starting at position 1053 of SEQ ID NO: 318497
acaggauaaugggaaagaa

SEQ ID NO: 401394 - RNA, 19 nt, Artificial Sequence
  Description of Artificial Sequence: Synthetic oligonucleotide
  Antisense Strand to SEQ ID NO: 401393
uucuuucccauuauccugu

SEQ ID NO: 401395 - RNA, 19 nt, Artificial Sequence
  Description of Artificial Sequence: Synthetic oligonucleotide
  Sense Strand Starting at position 1053 of SEQ ID NO: 318570
agugcaagaucucaaagau

SEQ ID NO: 401396 - RNA, 19 nt, Artificial Sequence
  Description of Artificial Sequence: Synthetic oligonucleotide
  Antisense Strand to SEQ ID NO: 401395
aucuuugagaucuugcacu

SEQ ID NO: 401397 - RNA, 19 nt, Artificial Sequence
  Description of Artificial Sequence: Synthetic oligonucleotide
  Sense Strand Starting at position 1053 of SEQ ID NO: 318814
gacaaugagcucuggacca

SEQ ID NO: 401398 - RNA, 19 nt, Artificial Sequence
  Description of Artificial Sequence: Synthetic oligonucleotide
  Antisense Strand to SEQ ID NO: 401397
ugguccagagcucauuguc

SEQ ID NO: 401399 - RNA, 19 nt, Artificial Sequence
  Description of Artificial Sequence: Synthetic oligonucleotide
  Sense Strand Starting at position 1053 of SEQ ID NO: 318858
agggauaggucuccugauc

SEQ ID NO: 401400 - RNA, 19 nt, Artificial Sequence
  Description of Artificial Sequence: Synthetic oligonucleotide
  Antisense Strand to SEQ ID NO: 401399
gaucaggagaccuaucccu

SEQ ID NO: 401401 - RNA, 19 nt, Artificial Sequence
  Description of Artificial Sequence: Synthetic oligonucleotide
  Sense Strand Starting at position 1053 of SEQ ID NO: 318870
ccugaucuccaccguggaa

SEQ ID NO: 401402 - RNA, 19 nt, Artificial Sequence
  Description of Artificial Sequence: Synthetic oligonucleotide
  Antisense Strand to SEQ ID NO: 401401
uuccacgguggagaucagg

SEQ ID NO: 401403 - RNA, 19 nt, Artificial Sequence
  Description of Artificial Sequence: Synthetic oligonucleotide
  Sense Strand Starting at position 1053 of SEQ ID NO: 318971
auagaaguaugugcaauau

SEQ ID NO: 401404 - RNA, 19 nt, Artificial Sequence
  Description of Artificial Sequence: Synthetic oligonucleotide
  Antisense Strand to SEQ ID NO: 401403
auauugcacauacuucuau

SEQ ID NO: 401405 - RNA, 19 nt, Artificial Sequence
  Description of Artificial Sequence: Synthetic oligonucleotide
  Sense Strand Starting at position 1053 of SEQ ID NO: 318975
aaguaugugcaauauagag

SEQ ID NO: 401406 - RNA, 19 nt, Artificial Sequence
  Description of Artificial Sequence: Synthetic oligonucleotide
  Antisense Strand to SEQ ID NO: 401405
cucuauauugcacauacuu

SEQ ID NO: 401407 - RNA, 19 nt, Artificial Sequence
  Description of Artificial Sequence: Synthetic oligonucleotide
  Sense Strand Starting at position 1053 of SEQ ID NO: 318977
guaugugcaauauagagau

SEQ ID NO: 401408 - RNA, 19 nt, Artificial Sequence
  Description of Artificial Sequence: Synthetic oligonucleotide
  Antisense Strand to SEQ ID NO: 401407
aucucuauauugcacauac

SEQ ID NO: 401409 - RNA, 19 nt, Artificial Sequence
  Description of Artificial Sequence: Synthetic oligonucleotide
  Sense Strand Starting at position 1053 of SEQ ID NO: 319063
gcuuccaauuugucugguu

SEQ ID NO: 401410 - RNA, 19 nt, Artificial Sequence
  Description of Artificial Sequence: Synthetic oligonucleotide
  Antisense Strand to SEQ ID NO: 401409
aaccagacaaauuggaagc

SEQ ID NO: 401411 - RNA, 19 nt, Artificial Sequence
  Description of Artificial Sequence: Synthetic oligonucleotide
  Sense Strand Starting at position 1053 of SEQ ID NO: 319123
acagcucucccuugaaaga

SEQ ID NO: 401412 - RNA, 19 nt, Artificial Sequence
  Description of Artificial Sequence: Synthetic oligonucleotide
  Antisense Strand to SEQ ID NO: 401411
ucuuucaagggagagcugu

SEQ ID NO: 401413 - RNA, 19 nt, Artificial Sequence
  Description of Artificial Sequence: Synthetic oligonucleotide
  Sense Strand Starting at position 1054 of SEQ ID NO: 315236
uccagacaugguuacacuu

SEQ ID NO: 401414 - RNA, 19 nt, Artificial Sequence
  Description of Artificial Sequence: Synthetic oligonucleotide
  Antisense Strand to SEQ ID NO: 401413
aaguguaaccaugucugga

SEQ ID NO: 401415 - RNA, 19 nt, Artificial Sequence
  Description of Artificial Sequence: Synthetic oligonucleotide
  Sense Strand Starting at position 1054 of SEQ ID NO: 315348
guaguucucagccaggagu

SEQ ID NO: 401416 - RNA, 19 nt, Artificial Sequence
  Description of Artificial Sequence: Synthetic oligonucleotide
  Antisense Strand to SEQ ID NO: 401415
acuccuggcugagaacuac

SEQ ID NO: 401417 - RNA, 19 nt, Artificial Sequence
  Description of Artificial Sequence: Synthetic oligonucleotide
  Sense Strand Starting at position 1054 of SEQ ID NO: 315350
aguucucagccaggaguaa

SEQ ID NO: 401418 - RNA, 19 nt, Artificial Sequence
  Description of Artificial Sequence: Synthetic oligonucleotide
  Antisense Strand to SEQ ID NO: 401417
uuacuccuggcugagaacu

SEQ ID NO: 401419 - RNA, 19 nt, Artificial Sequence
  Description of Artificial Sequence: Synthetic oligonucleotide
  Sense Strand Starting at position 1054 of SEQ ID NO: 315351
guucucagccaggaguaau

SEQ ID NO: 401420 - RNA, 19 nt, Artificial Sequence
  Description of Artificial Sequence: Synthetic oligonucleotide
  Antisense Strand to SEQ ID NO: 401419
auuacuccuggcugagaac

SEQ ID NO: 401421 - RNA, 19 nt, Artificial Sequence
  Description of Artificial Sequence: Synthetic oligonucleotide
  Sense Strand Starting at position 1054 of SEQ ID NO: 315412
ggcugucacaaaugaaggu

SEQ ID NO: 401422 - RNA, 19 nt, Artificial Sequence
  Description of Artificial Sequence: Synthetic oligonucleotide
  Antisense Strand to SEQ ID NO: 401421
accuucauuugugacagcc

SEQ ID NO: 401423 - RNA, 19 nt, Artificial Sequence
  Description of Artificial Sequence: Synthetic oligonucleotide
  Sense Strand Starting at position 1054 of SEQ ID NO: 315502
ccgccacaucaagaauuau

SEQ ID NO: 401424 - RNA, 19 nt, Artificial Sequence
  Description of Artificial Sequence: Synthetic oligonucleotide
  Antisense Strand to SEQ ID NO: 401423
auaauucuugauguggcgg

SEQ ID NO: 401425 - RNA, 19 nt, Artificial Sequence
  Description of Artificial Sequence: Synthetic oligonucleotide
  Sense Strand Starting at position 1054 of SEQ ID NO: 315588
caugauuacugaguuguaa

SEQ ID NO: 401426 - RNA, 19 nt, Artificial Sequence
  Description of Artificial Sequence: Synthetic oligonucleotide
  Antisense Strand to SEQ ID NO: 401425
uuacaacucaguaaucaug

SEQ ID NO: 401427 - RNA, 19 nt, Artificial Sequence
  Description of Artificial Sequence: Synthetic oligonucleotide
  Sense Strand Starting at position 1054 of SEQ ID NO: 315590
ugauuacugaguuguaaga

SEQ ID NO: 401428 - RNA, 19 nt, Artificial Sequence
  Description of Artificial Sequence: Synthetic oligonucleotide
  Antisense Strand to SEQ ID NO: 401427
ucuuacaacucaguaauca

SEQ ID NO: 401429 - RNA, 19 nt, Artificial Sequence
  Description of Artificial Sequence: Synthetic oligonucleotide
  Sense Strand Starting at position 1054 of SEQ ID NO: 315770
gagguuaucuugucgaaac

SEQ ID NO: 401430 - RNA, 19 nt, Artificial Sequence
  Description of Artificial Sequence: Synthetic oligonucleotide
  Antisense Strand to SEQ ID NO: 401429
guuucgacaagauaaccuc

SEQ ID NO: 401431 - RNA, 19 nt, Artificial Sequence
  Description of Artificial Sequence: Synthetic oligonucleotide
  Sense Strand Starting at position 1054 of SEQ ID NO: 315772
gguuaucuugucgaaacau

SEQ ID NO: 401432 - RNA, 19 nt, Artificial Sequence
  Description of Artificial Sequence: Synthetic oligonucleotide
  Antisense Strand to SEQ ID NO: 401431
auguuucgacaagauaacc

SEQ ID NO: 401433 - RNA, 19 nt, Artificial Sequence
  Description of Artificial Sequence: Synthetic oligonucleotide
  Sense Strand Starting at position 1054 of SEQ ID NO: 315789
auacucaugguaugagacu

SEQ ID NO: 401434 - RNA, 19 nt, Artificial Sequence
  Description of Artificial Sequence: Synthetic oligonucleotide
  Antisense Strand to SEQ ID NO: 401433
agucucauaccaugaguau

SEQ ID NO: 401435 - RNA, 19 nt, Artificial Sequence
  Description of Artificial Sequence: Synthetic oligonucleotide
  Sense Strand Starting at position 1054 of SEQ ID NO: 315870
uaggaauucuaggaagaug

SEQ ID NO: 401436 - RNA, 19 nt, Artificial Sequence
  Description of Artificial Sequence: Synthetic oligonucleotide
  Antisense Strand to SEQ ID NO: 401435
caucuuccuagaauuccua

SEQ ID NO: 401437 - RNA, 19 nt, Artificial Sequence
  Description of Artificial Sequence: Synthetic oligonucleotide
  Sense Strand Starting at position 1054 of SEQ ID NO: 315917
cugagaacccguuacggau

SEQ ID NO: 401438 - RNA, 19 nt, Artificial Sequence
  Description of Artificial Sequence: Synthetic oligonucleotide
  Antisense Strand to SEQ ID NO: 401437
auccguaacggguucucag

SEQ ID NO: 401439 - RNA, 19 nt, Artificial Sequence
  Description of Artificial Sequence: Synthetic oligonucleotide
  Sense Strand Starting at position 1054 of SEQ ID NO: 315964
cuccuuauucccggaggca

SEQ ID NO: 401440 - RNA, 19 nt, Artificial Sequence
  Description of Artificial Sequence: Synthetic oligonucleotide
  Antisense Strand to SEQ ID NO: 401439
ugccuccgggaauaaggag

SEQ ID NO: 401441 - RNA, 19 nt, Artificial Sequence
  Description of Artificial Sequence: Synthetic oligonucleotide
  Sense Strand Starting at position 1054 of SEQ ID NO: 316499
ggagaaacuucuccuucca

SEQ ID NO: 401442 - RNA, 19 nt, Artificial Sequence
  Description of Artificial Sequence: Synthetic oligonucleotide
  Antisense Strand to SEQ ID NO: 401441
uggaaggagaaguuucucc

SEQ ID NO: 401443 - RNA, 19 nt, Artificial Sequence
  Description of Artificial Sequence: Synthetic oligonucleotide
  Sense Strand Starting at position 1054 of SEQ ID NO: 316723
agggacauguguccaagua

SEQ ID NO: 401444 - RNA, 19 nt, Artificial Sequence
  Description of Artificial Sequence: Synthetic oligonucleotide
  Antisense Strand to SEQ ID NO: 401443
uacuuggacacaugucccu

SEQ ID NO: 401445 - RNA, 19 nt, Artificial Sequence
  Description of Artificial Sequence: Synthetic oligonucleotide
  Sense Strand Starting at position 1054 of SEQ ID NO: 316724
gggacauguguccaaguac

SEQ ID NO: 401446 - RNA, 19 nt, Artificial Sequence
  Description of Artificial Sequence: Synthetic oligonucleotide
  Antisense Strand to SEQ ID NO: 401445
guacuuggacacauguccc

SEQ ID NO: 401447 - RNA, 19 nt, Artificial Sequence
  Description of Artificial Sequence: Synthetic oligonucleotide
  Sense Strand Starting at position 1054 of SEQ ID NO: 317026
uacugcucccagggagaaa

SEQ ID NO: 401448 - RNA, 19 nt, Artificial Sequence
  Description of Artificial Sequence: Synthetic oligonucleotide
  Antisense Strand to SEQ ID NO: 401447
uuucucccugggagcagua

SEQ ID NO: 401449 - RNA, 19 nt, Artificial Sequence
  Description of Artificial Sequence: Synthetic oligonucleotide
  Sense Strand Starting at position 1054 of SEQ ID NO: 317347
cucaaagcugccugaggau

SEQ ID NO: 401450 - RNA, 19 nt, Artificial Sequence
  Description of Artificial Sequence: Synthetic oligonucleotide
  Antisense Strand to SEQ ID NO: 401449
auccucaggcagcuuugag

SEQ ID NO: 401451 - RNA, 19 nt, Artificial Sequence
  Description of Artificial Sequence: Synthetic oligonucleotide
  Sense Strand Starting at position 1054 of SEQ ID NO: 317356
gccugaggaugguuuagga

SEQ ID NO: 401452 - RNA, 19 nt, Artificial Sequence
  Description of Artificial Sequence: Synthetic oligonucleotide
  Antisense Strand to SEQ ID NO: 401451
uccuaaaccauccucaggc

SEQ ID NO: 401453 - RNA, 19 nt, Artificial Sequence
  Description of Artificial Sequence: Synthetic oligonucleotide
  Sense Strand Starting at position 1054 of SEQ ID NO: 317359
ugaggaugguuuaggauga

SEQ ID NO: 401454 - RNA, 19 nt, Artificial Sequence
  Description of Artificial Sequence: Synthetic oligonucleotide
  Antisense Strand to SEQ ID NO: 401453
ucauccuaaaccauccuca

SEQ ID NO: 401455 - RNA, 19 nt, Artificial Sequence
  Description of Artificial Sequence: Synthetic oligonucleotide
  Sense Strand Starting at position 1054 of SEQ ID NO: 317395
gauuauuugucccaggaau

SEQ ID NO: 401456 - RNA, 19 nt, Artificial Sequence
  Description of Artificial Sequence: Synthetic oligonucleotide
  Antisense Strand to SEQ ID NO: 401455
auuccugggacaaauaauc

SEQ ID NO: 401457 - RNA, 19 nt, Artificial Sequence
  Description of Artificial Sequence: Synthetic oligonucleotide
  Sense Strand Starting at position 1054 of SEQ ID NO: 317456
uggcuuagagagugagaca

SEQ ID NO: 401458 - RNA, 19 nt, Artificial Sequence
  Description of Artificial Sequence: Synthetic oligonucleotide
  Antisense Strand to SEQ ID NO: 401457
ugucucacucucuaagcca

SEQ ID NO: 401459 - RNA, 19 nt, Artificial Sequence
  Description of Artificial Sequence: Synthetic oligonucleotide
  Sense Strand Starting at position 1054 of SEQ ID NO: 317522
ugugcaugugagcaagaga

SEQ ID NO: 401460 - RNA, 19 nt, Artificial Sequence
  Description of Artificial Sequence: Synthetic oligonucleotide
  Antisense Strand to SEQ ID NO: 401459
ucucuugcucacaugcaca

SEQ ID NO: 401461 - RNA, 19 nt, Artificial Sequence
  Description of Artificial Sequence: Synthetic oligonucleotide
  Sense Strand Starting at position 1054 of SEQ ID NO: 317561
ugcaucuucccagaguauc

SEQ ID NO: 401462 - RNA, 19 nt, Artificial Sequence
  Description of Artificial Sequence: Synthetic oligonucleotide
  Antisense Strand to SEQ ID NO: 401461
gauacucugggaagaugca

SEQ ID NO: 401463 - RNA, 19 nt, Artificial Sequence
  Description of Artificial Sequence: Synthetic oligonucleotide
  Sense Strand Starting at position 1054 of SEQ ID NO: 317581
aucggucccucucuaauuu

SEQ ID NO: 401464 - RNA, 19 nt, Artificial Sequence
  Description of Artificial Sequence: Synthetic oligonucleotide
  Antisense Strand to SEQ ID NO: 401463
aaauuagagagggaccgau

SEQ ID NO: 401465 - RNA, 19 nt, Artificial Sequence
  Description of Artificial Sequence: Synthetic oligonucleotide
  Sense Strand Starting at position 1054 of SEQ ID NO: 318076
gcccgacuuccucaaccuu

SEQ ID NO: 401466 - RNA, 19 nt, Artificial Sequence
  Description of Artificial Sequence: Synthetic oligonucleotide
  Antisense Strand to SEQ ID NO: 401465
aagguugaggaagucgggc

SEQ ID NO: 401467 - RNA, 19 nt, Artificial Sequence
  Description of Artificial Sequence: Synthetic oligonucleotide
  Sense Strand Starting at position 1054 of SEQ ID NO: 318370
gugguucucaacgaguaca

SEQ ID NO: 401468 - RNA, 19 nt, Artificial Sequence
  Description of Artificial Sequence: Synthetic oligonucleotide
  Antisense Strand to SEQ ID NO: 401467
uguacucguugagaaccac

SEQ ID NO: 401469 - RNA, 19 nt, Artificial Sequence
  Description of Artificial Sequence: Synthetic oligonucleotide
  Sense Strand Starting at position 1054 of SEQ ID NO: 318400
ucuuucuuggccugugaaa

SEQ ID NO: 401470 - RNA, 19 nt, Artificial Sequence
  Description of Artificial Sequence: Synthetic oligonucleotide
  Antisense Strand to SEQ ID NO: 401469
uuucacaggccaagaaaga

SEQ ID NO: 401471 - RNA, 19 nt, Artificial Sequence
  Description of Artificial Sequence: Synthetic oligonucleotide
  Sense Strand Starting at position 1054 of SEQ ID NO: 318505
gguaaacagugagggauuu

SEQ ID NO: 401472 - RNA, 19 nt, Artificial Sequence
  Description of Artificial Sequence: Synthetic oligonucleotide
  Antisense Strand to SEQ ID NO: 401471
aaaucccucacuguuuacc

SEQ ID NO: 401473 - RNA, 19 nt, Artificial Sequence
  Description of Artificial Sequence: Synthetic oligonucleotide
  Sense Strand Starting at position 1054 of SEQ ID NO: 318531
ggaggagcucuuuggagac

SEQ ID NO: 401474 - RNA, 19 nt, Artificial Sequence
  Description of Artificial Sequence: Synthetic oligonucleotide
  Antisense Strand to SEQ ID NO: 401473
gucuccaaagagcuccucc

SEQ ID NO: 401475 - RNA, 19 nt, Artificial Sequence
  Description of Artificial Sequence: Synthetic oligonucleotide
  Sense Strand Starting at position 1054 of SEQ ID NO: 318583
ggguuauuggcuugaccau

SEQ ID NO: 401476 - RNA, 19 nt, Artificial Sequence
  Description of Artificial Sequence: Synthetic oligonucleotide
  Antisense Strand to SEQ ID NO: 401475
auggucaagccaauaaccc

SEQ ID NO: 401477 - RNA, 19 nt, Artificial Sequence
  Description of Artificial Sequence: Synthetic oligonucleotide
  Sense Strand Starting at position 1054 of SEQ ID NO: 318664
ggaccaggaguguaaaugu

SEQ ID NO: 401478 - RNA, 19 nt, Artificial Sequence
  Description of Artificial Sequence: Synthetic oligonucleotide
  Antisense Strand to SEQ ID NO: 401477
acauuuacacuccuggucc

SEQ ID NO: 401479 - RNA, 19 nt, Artificial Sequence
  Description of Artificial Sequence: Synthetic oligonucleotide
  Sense Strand Starting at position 1054 of SEQ ID NO: 318706
gcugcuaaaucucugagac

SEQ ID NO: 401480 - RNA, 19 nt, Artificial Sequence
  Description of Artificial Sequence: Synthetic oligonucleotide
  Antisense Strand to SEQ ID NO: 401479
gucucagagauuuagcagc

SEQ ID NO: 401481 - RNA, 19 nt, Artificial Sequence
  Description of Artificial Sequence: Synthetic oligonucleotide
  Sense Strand Starting at position 1054 of SEQ ID NO: 318707
cugcuaaaucucugagacu

SEQ ID NO: 401482 - RNA, 19 nt, Artificial Sequence
  Description of Artificial Sequence: Synthetic oligonucleotide
  Antisense Strand to SEQ ID NO: 401481
agucucagagauuuagcag

SEQ ID NO: 401483 - RNA, 19 nt, Artificial Sequence
  Description of Artificial Sequence: Synthetic oligonucleotide
  Sense Strand Starting at position 1054 of SEQ ID NO: 318734
cugugugacaagugggaau

SEQ ID NO: 401484 - RNA, 19 nt, Artificial Sequence
  Description of Artificial Sequence: Synthetic oligonucleotide
  Antisense Strand to SEQ ID NO: 401483
auucccacuugucacacag

SEQ ID NO: 401485 - RNA, 19 nt, Artificial Sequence
  Description of Artificial Sequence: Synthetic oligonucleotide
  Sense Strand Starting at position 1054 of SEQ ID NO: 318736
gugugacaagugggaauau

SEQ ID NO: 401486 - RNA, 19 nt, Artificial Sequence
  Description of Artificial Sequence: Synthetic oligonucleotide
  Antisense Strand to SEQ ID NO: 401485
auauucccacuugucacac

SEQ ID NO: 401487 - RNA, 19 nt, Artificial Sequence
  Description of Artificial Sequence: Synthetic oligonucleotide
  Sense Strand Starting at position 1054 of SEQ ID NO: 318822
augccuggcccucagagau

SEQ ID NO: 401488 - RNA, 19 nt, Artificial Sequence
  Description of Artificial Sequence: Synthetic oligonucleotide
  Antisense Strand to SEQ ID NO: 401487
aucucugagggccaggcau

SEQ ID NO: 401489 - RNA, 19 nt, Artificial Sequence
  Description of Artificial Sequence: Synthetic oligonucleotide
  Sense Strand Starting at position 1054 of SEQ ID NO: 318965
ggguguuuagcaggaggga

SEQ ID NO: 401490 - RNA, 19 nt, Artificial Sequence
  Description of Artificial Sequence: Synthetic oligonucleotide
  Antisense Strand to SEQ ID NO: 401489
ucccuccugcuaaacaccc

SEQ ID NO: 401491 - RNA, 19 nt, Artificial Sequence
  Description of Artificial Sequence: Synthetic oligonucleotide
  Sense Strand Starting at position 1054 of SEQ ID NO: 318966
gguguuuagcaggagggaa

SEQ ID NO: 401492 - RNA, 19 nt, Artificial Sequence
  Description of Artificial Sequence: Synthetic oligonucleotide
  Antisense Strand to SEQ ID NO: 401491
uucccuccugcuaaacacc

SEQ ID NO: 401493 - RNA, 19 nt, Artificial Sequence
  Description of Artificial Sequence: Synthetic oligonucleotide
  Sense Strand Starting at position 1055 of SEQ ID NO: 315335
agaagcauuucugggaacu

SEQ ID NO: 401494 - RNA, 19 nt, Artificial Sequence
  Description of Artificial Sequence: Synthetic oligonucleotide
  Antisense Strand to SEQ ID NO: 401493
aguucccagaaaugcuucu

SEQ ID NO: 401495 - RNA, 19 nt, Artificial Sequence
  Description of Artificial Sequence: Synthetic oligonucleotide
  Sense Strand Starting at position 1055 of SEQ ID NO: 315408
aggugaaagacaggucuga

SEQ ID NO: 401496 - RNA, 19 nt, Artificial Sequence
  Description of Artificial Sequence: Synthetic oligonucleotide
  Antisense Strand to SEQ ID NO: 401495
ucagaccugucuuucaccu

SEQ ID NO: 401497 - RNA, 19 nt, Artificial Sequence
  Description of Artificial Sequence: Synthetic oligonucleotide
  Sense Strand Starting at position 1055 of SEQ ID NO: 315412
gaaagacaggucugaguga

SEQ ID NO: 401498 - RNA, 19 nt, Artificial Sequence
  Description of Artificial Sequence: Synthetic oligonucleotide
  Antisense Strand to SEQ ID NO: 401497
ucacucagaccugucuuuc

SEQ ID NO: 401499 - RNA, 19 nt, Artificial Sequence
  Description of Artificial Sequence: Synthetic oligonucleotide
  Sense Strand Starting at position 1055 of SEQ ID NO: 315511
gccugagauccagaucauu

SEQ ID NO: 401500 - RNA, 19 nt, Artificial Sequence
  Description of Artificial Sequence: Synthetic oligonucleotide
  Antisense Strand to SEQ ID NO: 401499
aaugaucuggaucucaggc

SEQ ID NO: 401501 - RNA, 19 nt, Artificial Sequence
  Description of Artificial Sequence: Synthetic oligonucleotide
  Sense Strand Starting at position 1055 of SEQ ID NO: 315538
gcuucuuugcaggugcaau

SEQ ID NO: 401502 - RNA, 19 nt, Artificial Sequence
  Description of Artificial Sequence: Synthetic oligonucleotide
  Antisense Strand to SEQ ID NO: 401501
auugcaccugcaaagaagc

SEQ ID NO: 401503 - RNA, 19 nt, Artificial Sequence
  Description of Artificial Sequence: Synthetic oligonucleotide
  Sense Strand Starting at position 1055 of SEQ ID NO: 315712
cuugguugugggcagaaua

SEQ ID NO: 401504 - RNA, 19 nt, Artificial Sequence
  Description of Artificial Sequence: Synthetic oligonucleotide
  Antisense Strand to SEQ ID NO: 401503
uauucugcccacaaccaag

SEQ ID NO: 401505 - RNA, 19 nt, Artificial Sequence
  Description of Artificial Sequence: Synthetic oligonucleotide
  Sense Strand Starting at position 1055 of SEQ ID NO: 315799
agcucuuucugaucuggua

SEQ ID NO: 401506 - RNA, 19 nt, Artificial Sequence
  Description of Artificial Sequence: Synthetic oligonucleotide
  Antisense Strand to SEQ ID NO: 401505
uaccagaucagaaagagcu

SEQ ID NO: 401507 - RNA, 19 nt, Artificial Sequence
  Description of Artificial Sequence: Synthetic oligonucleotide
  Sense Strand Starting at position 1055 of SEQ ID NO: 315806
ucugaucugguauaaacga

SEQ ID NO: 401508 - RNA, 19 nt, Artificial Sequence
  Description of Artificial Sequence: Synthetic oligonucleotide
  Antisense Strand to SEQ ID NO: 401507
ucguuuauaccagaucaga

SEQ ID NO: 401509 - RNA, 19 nt, Artificial Sequence
  Description of Artificial Sequence: Synthetic oligonucleotide
  Sense Strand Starting at position 1055 of SEQ ID NO: 315867
cccuuccagugcuuaauga

SEQ ID NO: 401510 - RNA, 19 nt, Artificial Sequence
  Description of Artificial Sequence: Synthetic oligonucleotide
  Antisense Strand to SEQ ID NO: 401509
ucauuaagcacuggaaggg

SEQ ID NO: 401511 - RNA, 19 nt, Artificial Sequence
  Description of Artificial Sequence: Synthetic oligonucleotide
  Sense Strand Starting at position 1055 of SEQ ID NO: 315868
ccuuccagugcuuaaugaa

SEQ ID NO: 401512 - RNA, 19 nt, Artificial Sequence
  Description of Artificial Sequence: Synthetic oligonucleotide
  Antisense Strand to SEQ ID NO: 401511
uucauuaagcacuggaagg

SEQ ID NO: 401513 - RNA, 19 nt, Artificial Sequence
  Description of Artificial Sequence: Synthetic oligonucleotide
  Sense Strand Starting at position 1055 of SEQ ID NO: 315966
agcuaacaggcuuacuauu

SEQ ID NO: 401514 - RNA, 19 nt, Artificial Sequence
  Description of Artificial Sequence: Synthetic oligonucleotide
  Antisense Strand to SEQ ID NO: 401513
aauaguaagccuguuagcu

SEQ ID NO: 401515 - RNA, 19 nt, Artificial Sequence
  Description of Artificial Sequence: Synthetic oligonucleotide
  Sense Strand Starting at position 1055 of SEQ ID NO: 315983
uuugcaggacuuuaucuau

SEQ ID NO: 401516 - RNA, 19 nt, Artificial Sequence
  Description of Artificial Sequence: Synthetic oligonucleotide
  Antisense Strand to SEQ ID NO: 401515
auagauaaaguccugcaaa

SEQ ID NO: 401517 - RNA, 19 nt, Artificial Sequence
  Description of Artificial Sequence: Synthetic oligonucleotide
  Sense Strand Starting at position 1055 of SEQ ID NO: 315986
gcaggacuuuaucuaugac

SEQ ID NO: 401518 - RNA, 19 nt, Artificial Sequence
  Description of Artificial Sequence: Synthetic oligonucleotide
  Antisense Strand to SEQ ID NO: 401517
gucauagauaaaguccugc

SEQ ID NO: 401519 - RNA, 19 nt, Artificial Sequence
  Description of Artificial Sequence: Synthetic oligonucleotide
  Sense Strand Starting at position 1055 of SEQ ID NO: 315989
ggacuuuaucuaugacuca

SEQ ID NO: 401520 - RNA, 19 nt, Artificial Sequence
  Description of Artificial Sequence: Synthetic oligonucleotide
  Antisense Strand to SEQ ID NO: 401519
ugagucauagauaaagucc

SEQ ID NO: 401521 - RNA, 19 nt, Artificial Sequence
  Description of Artificial Sequence: Synthetic oligonucleotide
  Sense Strand Starting at position 1055 of SEQ ID NO: 316129
ggaaguguccucugcucag

SEQ ID NO: 401522 - RNA, 19 nt, Artificial Sequence
  Description of Artificial Sequence: Synthetic oligonucleotide
  Antisense Strand to SEQ ID NO: 401521
cugagcagaggacacuucc

SEQ ID NO: 401523 - RNA, 19 nt, Artificial Sequence
  Description of Artificial Sequence: Synthetic oligonucleotide
  Sense Strand Starting at position 1055 of SEQ ID NO: 316203
ccagaagacuuagucaagu

SEQ ID NO: 401524 - RNA, 19 nt, Artificial Sequence
  Description of Artificial Sequence: Synthetic oligonucleotide
  Antisense Strand to SEQ ID NO: 401523
acuugacuaagucuucugg

SEQ ID NO: 401525 - RNA, 19 nt, Artificial Sequence
  Description of Artificial Sequence: Synthetic oligonucleotide
  Sense Strand Starting at position 1055 of SEQ ID NO: 316462
acggaugucugccugagga

SEQ ID NO: 401526 - RNA, 19 nt, Artificial Sequence
  Description of Artificial Sequence: Synthetic oligonucleotide
  Antisense Strand to SEQ ID NO: 401525
uccucaggcagacauccgu

SEQ ID NO: 401527 - RNA, 19 nt, Artificial Sequence
  Description of Artificial Sequence: Synthetic oligonucleotide
  Sense Strand Starting at position 1055 of SEQ ID NO: 316627
cugagucaguucucucaac

SEQ ID NO: 401528 - RNA, 19 nt, Artificial Sequence
  Description of Artificial Sequence: Synthetic oligonucleotide
  Antisense Strand to SEQ ID NO: 401527
guugagagaacugacucag

SEQ ID NO: 401529 - RNA, 19 nt, Artificial Sequence
  Description of Artificial Sequence: Synthetic oligonucleotide
  Sense Strand Starting at position 1055 of SEQ ID NO: 316678
aaagauaauguuugcggaa

SEQ ID NO: 401530 - RNA, 19 nt, Artificial Sequence
  Description of Artificial Sequence: Synthetic oligonucleotide
  Antisense Strand to SEQ ID NO: 401529
uuccgcaaacauuaucuuu

SEQ ID NO: 401531 - RNA, 19 nt, Artificial Sequence
  Description of Artificial Sequence: Synthetic oligonucleotide
  Sense Strand Starting at position 1055 of SEQ ID NO: 316897
augauuuggucacauuacu

SEQ ID NO: 401532 - RNA, 19 nt, Artificial Sequence
  Description of Artificial Sequence: Synthetic oligonucleotide
  Antisense Strand to SEQ ID NO: 401531
aguaaugugaccaaaucau

SEQ ID NO: 401533 - RNA, 19 nt, Artificial Sequence
  Description of Artificial Sequence: Synthetic oligonucleotide
  Sense Strand Starting at position 1055 of SEQ ID NO: 317256
cuguguugggcugugcaga

SEQ ID NO: 401534 - RNA, 19 nt, Artificial Sequence
  Description of Artificial Sequence: Synthetic oligonucleotide
  Antisense Strand to SEQ ID NO: 401533
ucugcacagcccaacacag

SEQ ID NO: 401535 - RNA, 19 nt, Artificial Sequence
  Description of Artificial Sequence: Synthetic oligonucleotide
  Sense Strand Starting at position 1055 of SEQ ID NO: 317486
acaggugaugcuugguaca

SEQ ID NO: 401536 - RNA, 19 nt, Artificial Sequence
  Description of Artificial Sequence: Synthetic oligonucleotide
  Antisense Strand to SEQ ID NO: 401535
uguaccaagcaucaccugu

SEQ ID NO: 401537 - RNA, 19 nt, Artificial Sequence
  Description of Artificial Sequence: Synthetic oligonucleotide
  Sense Strand Starting at position 1055 of SEQ ID NO: 317488
aggugaugcuugguacaca

SEQ ID NO: 401538 - RNA, 19 nt, Artificial Sequence
  Description of Artificial Sequence: Synthetic oligonucleotide
  Antisense Strand to SEQ ID NO: 401537
uguguaccaagcaucaccu

SEQ ID NO: 401539 - RNA, 19 nt, Artificial Sequence
  Description of Artificial Sequence: Synthetic oligonucleotide
  Sense Strand Starting at position 1055 of SEQ ID NO: 317513
aaugauggguuagaucaga

SEQ ID NO: 401540 - RNA, 19 nt, Artificial Sequence
  Description of Artificial Sequence: Synthetic oligonucleotide
  Antisense Strand to SEQ ID NO: 401539
ucugaucuaacccaucauu

SEQ ID NO: 401541 - RNA, 19 nt, Artificial Sequence
  Description of Artificial Sequence: Synthetic oligonucleotide
  Sense Strand Starting at position 1055 of SEQ ID NO: 317566
gggccucaccugcagagau

SEQ ID NO: 401542 - RNA, 19 nt, Artificial Sequence
  Description of Artificial Sequence: Synthetic oligonucleotide
  Antisense Strand to SEQ ID NO: 401541
aucucugcaggugaggccc

SEQ ID NO: 401543 - RNA, 19 nt, Artificial Sequence
  Description of Artificial Sequence: Synthetic oligonucleotide
  Sense Strand Starting at position 1055 of SEQ ID NO: 318201
ucugaucccaggugggaaa

SEQ ID NO: 401544 - RNA, 19 nt, Artificial Sequence
  Description of Artificial Sequence: Synthetic oligonucleotide
  Antisense Strand to SEQ ID NO: 401543
uuucccaccugggaucaga

SEQ ID NO: 401545 - RNA, 19 nt, Artificial Sequence
  Description of Artificial Sequence: Synthetic oligonucleotide
  Sense Strand Starting at position 1055 of SEQ ID NO: 318264
ggaggaggaugccuacuau

SEQ ID NO: 401546 - RNA, 19 nt, Artificial Sequence
  Description of Artificial Sequence: Synthetic oligonucleotide
  Antisense Strand to SEQ ID NO: 401545
auaguaggcauccuccucc

SEQ ID NO: 401547 - RNA, 19 nt, Artificial Sequence
  Description of Artificial Sequence: Synthetic oligonucleotide
  Sense Strand Starting at position 1055 of SEQ ID NO: 318294
ccacucuuacaaggauuga

SEQ ID NO: 401548 - RNA, 19 nt, Artificial Sequence
  Description of Artificial Sequence: Synthetic oligonucleotide
  Antisense Strand to SEQ ID NO: 401547
ucaauccuuguaagagugg

SEQ ID NO: 401549 - RNA, 19 nt, Artificial Sequence
  Description of Artificial Sequence: Synthetic oligonucleotide
  Sense Strand Starting at position 1055 of SEQ ID NO: 318305
aggauugaaugagaucaca

SEQ ID NO: 401550 - RNA, 19 nt, Artificial Sequence
  Description of Artificial Sequence: Synthetic oligonucleotide
  Antisense Strand to SEQ ID NO: 401549
ugugaucucauucaauccu

SEQ ID NO: 401551 - RNA, 19 nt, Artificial Sequence
  Description of Artificial Sequence: Synthetic oligonucleotide
  Sense Strand Starting at position 1055 of SEQ ID NO: 318327
gagaaagcccuuuguaaag

SEQ ID NO: 401552 - RNA, 19 nt, Artificial Sequence
  Description of Artificial Sequence: Synthetic oligonucleotide
  Antisense Strand to SEQ ID NO: 401551
cuuuacaaagggcuuucuc

SEQ ID NO: 401553 - RNA, 19 nt, Artificial Sequence
  Description of Artificial Sequence: Synthetic oligonucleotide
  Sense Strand Starting at position 1055 of SEQ ID NO: 318339
uguaaagggccauaugguu

SEQ ID NO: 401554 - RNA, 19 nt, Artificial Sequence
  Description of Artificial Sequence: Synthetic oligonucleotide
  Antisense Strand to SEQ ID NO: 401553
aaccauauggcccuuuaca

SEQ ID NO: 401555 - RNA, 19 nt, Artificial Sequence
  Description of Artificial Sequence: Synthetic oligonucleotide
  Sense Strand Starting at position 1055 of SEQ ID NO: 318515
cuuuguugcuuaccugaaa

SEQ ID NO: 401556 - RNA, 19 nt, Artificial Sequence
  Description of Artificial Sequence: Synthetic oligonucleotide
  Antisense Strand to SEQ ID NO: 401555
uuucagguaagcaacaaag

SEQ ID NO: 401557 - RNA, 19 nt, Artificial Sequence
  Description of Artificial Sequence: Synthetic oligonucleotide
  Sense Strand Starting at position 1055 of SEQ ID NO: 318595
uccugucuuauggagagca

SEQ ID NO: 401558 - RNA, 19 nt, Artificial Sequence
  Description of Artificial Sequence: Synthetic oligonucleotide
  Antisense Strand to SEQ ID NO: 401557
ugcucuccauaagacagga

SEQ ID NO: 401559 - RNA, 19 nt, Artificial Sequence
  Description of Artificial Sequence: Synthetic oligonucleotide
  Sense Strand Starting at position 1055 of SEQ ID NO: 318688
ucaugcuccuaggauuuaa

SEQ ID NO: 401560 - RNA, 19 nt, Artificial Sequence
  Description of Artificial Sequence: Synthetic oligonucleotide
  Antisense Strand to SEQ ID NO: 401559
uuaaauccuaggagcauga

SEQ ID NO: 401561 - RNA, 19 nt, Artificial Sequence
  Description of Artificial Sequence: Synthetic oligonucleotide
  Sense Strand Starting at position 1055 of SEQ ID NO: 318699
ggauuuaaauguuaauguc

SEQ ID NO: 401562 - RNA, 19 nt, Artificial Sequence
  Description of Artificial Sequence: Synthetic oligonucleotide
  Antisense Strand to SEQ ID NO: 401561
gacauuaacauuuaaaucc

SEQ ID NO: 401563 - RNA, 19 nt, Artificial Sequence
  Description of Artificial Sequence: Synthetic oligonucleotide
  Sense Strand Starting at position 1055 of SEQ ID NO: 318760
ccaaauaucugggcacagu

SEQ ID NO: 401564 - RNA, 19 nt, Artificial Sequence
  Description of Artificial Sequence: Synthetic oligonucleotide
  Antisense Strand to SEQ ID NO: 401563
acugugcccagauauuugg

SEQ ID NO: 401565 - RNA, 19 nt, Artificial Sequence
  Description of Artificial Sequence: Synthetic oligonucleotide
  Sense Strand Starting at position 1055 of SEQ ID NO: 318908
gcacuaggcuuggcacaau

SEQ ID NO: 401566 - RNA, 19 nt, Artificial Sequence
  Description of Artificial Sequence: Synthetic oligonucleotide
  Antisense Strand to SEQ ID NO: 401565
auugugccaagccuagugc

SEQ ID NO: 401567 - RNA, 19 nt, Artificial Sequence
  Description of Artificial Sequence: Synthetic oligonucleotide
  Sense Strand Starting at position 1055 of SEQ ID NO: 319008
guugucacucaauaaauau

SEQ ID NO: 401568 - RNA, 19 nt, Artificial Sequence
  Description of Artificial Sequence: Synthetic oligonucleotide
  Antisense Strand to SEQ ID NO: 401567
auauuuauugagugacaac

SEQ ID NO: 401569 - RNA, 19 nt, Artificial Sequence
  Description of Artificial Sequence: Synthetic oligonucleotide
  Sense Strand Starting at position 1055 of SEQ ID NO: 319031
cgacuaaagggauguugga

SEQ ID NO: 401570 - RNA, 19 nt, Artificial Sequence
  Description of Artificial Sequence: Synthetic oligonucleotide
  Antisense Strand to SEQ ID NO: 401569
uccaacaucccuuuagucg

SEQ ID NO: 401571 - RNA, 19 nt, Artificial Sequence
  Description of Artificial Sequence: Synthetic oligonucleotide
  Sense Strand Starting at position 1055 of SEQ ID NO: 319040
ggauguuggagguaggagu

SEQ ID NO: 401572 - RNA, 19 nt, Artificial Sequence
  Description of Artificial Sequence: Synthetic oligonucleotide
  Antisense Strand to SEQ ID NO: 401571
acuccuaccuccaacaucc

SEQ ID NO: 401573 - RNA, 19 nt, Artificial Sequence
  Description of Artificial Sequence: Synthetic oligonucleotide
  Sense Strand Starting at position 1056 of SEQ ID NO: 316025
gcuaaauaagaauagcuuu

SEQ ID NO: 401574 - RNA, 19 nt, Artificial Sequence
  Description of Artificial Sequence: Synthetic oligonucleotide
  Antisense Strand to SEQ ID NO: 401573
aaagcuauucuuauuuagc

SEQ ID NO: 401575 - RNA, 19 nt, Artificial Sequence
  Description of Artificial Sequence: Synthetic oligonucleotide
  Sense Strand Starting at position 1056 of SEQ ID NO: 316397
aguacagacuagugauugu

SEQ ID NO: 401576 - RNA, 19 nt, Artificial Sequence
  Description of Artificial Sequence: Synthetic oligonucleotide
  Antisense Strand to SEQ ID NO: 401575
acaaucacuagucuguacu

SEQ ID NO: 401577 - RNA, 19 nt, Artificial Sequence
  Description of Artificial Sequence: Synthetic oligonucleotide
  Sense Strand Starting at position 1056 of SEQ ID NO: 316601
ugcacuuaaugucugcaga

SEQ ID NO: 401578 - RNA, 19 nt, Artificial Sequence
  Description of Artificial Sequence: Synthetic oligonucleotide
  Antisense Strand to SEQ ID NO: 401577
ucugcagacauuaagugca

SEQ ID NO: 401579 - RNA, 19 nt, Artificial Sequence
  Description of Artificial Sequence: Synthetic oligonucleotide
  Sense Strand Starting at position 1056 of SEQ ID NO: 316602
gcacuuaaugucugcagau

SEQ ID NO: 401580 - RNA, 19 nt, Artificial Sequence
  Description of Artificial Sequence: Synthetic oligonucleotide
  Antisense Strand to SEQ ID NO: 401579
aucugcagacauuaagugc

SEQ ID NO: 401581 - RNA, 19 nt, Artificial Sequence
  Description of Artificial Sequence: Synthetic oligonucleotide
  Sense Strand Starting at position 1056 of SEQ ID NO: 316603
cacuuaaugucugcagaug

SEQ ID NO: 401582 - RNA, 19 nt, Artificial Sequence
  Description of Artificial Sequence: Synthetic oligonucleotide
  Antisense Strand to SEQ ID NO: 401581
caucugcagacauuaagug

SEQ ID NO: 401583 - RNA, 19 nt, Artificial Sequence
  Description of Artificial Sequence: Synthetic oligonucleotide
  Sense Strand Starting at position 1056 of SEQ ID NO: 316626
uugcgagggugcuuuguaa

SEQ ID NO: 401584 - RNA, 19 nt, Artificial Sequence
  Description of Artificial Sequence: Synthetic oligonucleotide
  Antisense Strand to SEQ ID NO: 401583
uuacaaagcacccucgcaa

SEQ ID NO: 401585 - RNA, 19 nt, Artificial Sequence
  Description of Artificial Sequence: Synthetic oligonucleotide
  Sense Strand Starting at position 1056 of SEQ ID NO: 316731
cuuggccucugacaagaau

SEQ ID NO: 401586 - RNA, 19 nt, Artificial Sequence
  Description of Artificial Sequence: Synthetic oligonucleotide
  Antisense Strand to SEQ ID NO: 401585
auucuugucagaggccaag

SEQ ID NO: 401587 - RNA, 19 nt, Artificial Sequence
  Description of Artificial Sequence: Synthetic oligonucleotide
  Sense Strand Starting at position 1056 of SEQ ID NO: 316834
gcgacuacgucacuaggau

SEQ ID NO: 401588 - RNA, 19 nt, Artificial Sequence
  Description of Artificial Sequence: Synthetic oligonucleotide
  Antisense Strand to SEQ ID NO: 401587
auccuagugacguagucgc

SEQ ID NO: 401589 - RNA, 19 nt, Artificial Sequence
  Description of Artificial Sequence: Synthetic oligonucleotide
  Sense Strand Starting at position 1056 of SEQ ID NO: 317347
agaguaauugugggacggu

SEQ ID NO: 401590 - RNA, 19 nt, Artificial Sequence
  Description of Artificial Sequence: Synthetic oligonucleotide
  Antisense Strand to SEQ ID NO: 401589
accgucccacaauuacucu

SEQ ID NO: 401591 - RNA, 19 nt, Artificial Sequence
  Description of Artificial Sequence: Synthetic oligonucleotide
  Sense Strand Starting at position 1056 of SEQ ID NO: 317348
gaguaauugugggacgguc

SEQ ID NO: 401592 - RNA, 19 nt, Artificial Sequence
  Description of Artificial Sequence: Synthetic oligonucleotide
  Antisense Strand to SEQ ID NO: 401591
gaccgucccacaauuacuc

SEQ ID NO: 401593 - RNA, 19 nt, Artificial Sequence
  Description of Artificial Sequence: Synthetic oligonucleotide
  Sense Strand Starting at position 1056 of SEQ ID NO: 317369
ggcccaaucgcugacgaga

SEQ ID NO: 401594 - RNA, 19 nt, Artificial Sequence
  Description of Artificial Sequence: Synthetic oligonucleotide
  Antisense Strand to SEQ ID NO: 401593
ucucgucagcgauugggcc

SEQ ID NO: 401595 - RNA, 19 nt, Artificial Sequence
  Description of Artificial Sequence: Synthetic oligonucleotide
  Sense Strand Starting at position 1056 of SEQ ID NO: 317513
gacauuaggugcucagugu

SEQ ID NO: 401596 - RNA, 19 nt, Artificial Sequence
  Description of Artificial Sequence: Synthetic oligonucleotide
  Antisense Strand to SEQ ID NO: 401595
acacugagcaccuaauguc

SEQ ID NO: 401597 - RNA, 19 nt, Artificial Sequence
  Description of Artificial Sequence: Synthetic oligonucleotide
  Sense Strand Starting at position 1056 of SEQ ID NO: 317514
acauuaggugcucaguguu

SEQ ID NO: 401598 - RNA, 19 nt, Artificial Sequence
  Description of Artificial Sequence: Synthetic oligonucleotide
  Antisense Strand to SEQ ID NO: 401597
aacacugagcaccuaaugu

SEQ ID NO: 401599 - RNA, 19 nt, Artificial Sequence
  Description of Artificial Sequence: Synthetic oligonucleotide
  Sense Strand Starting at position 1056 of SEQ ID NO: 317528
guguuugcugaaugcacau

SEQ ID NO: 401600 - RNA, 19 nt, Artificial Sequence
  Description of Artificial Sequence: Synthetic oligonucleotide
  Antisense Strand to SEQ ID NO: 401599
augugcauucagcaaacac

SEQ ID NO: 401601 - RNA, 19 nt, Artificial Sequence
  Description of Artificial Sequence: Synthetic oligonucleotide
  Sense Strand Starting at position 1056 of SEQ ID NO: 317534
gcugaaugcacauguaaag

SEQ ID NO: 401602 - RNA, 19 nt, Artificial Sequence
  Description of Artificial Sequence: Synthetic oligonucleotide
  Antisense Strand to SEQ ID NO: 401601
cuuuacaugugcauucagc

SEQ ID NO: 401603 - RNA, 19 nt, Artificial Sequence
  Description of Artificial Sequence: Synthetic oligonucleotide
  Sense Strand Starting at position 1056 of SEQ ID NO: 317549
aaagguagaucagguuaau

SEQ ID NO: 401604 - RNA, 19 nt, Artificial Sequence
  Description of Artificial Sequence: Synthetic oligonucleotide
  Antisense Strand to SEQ ID NO: 401603
auuaaccugaucuaccuuu

SEQ ID NO: 401605 - RNA, 19 nt, Artificial Sequence
  Description of Artificial Sequence: Synthetic oligonucleotide
  Sense Strand Starting at position 1056 of SEQ ID NO: 317655
agcaauggcgugugacaga

SEQ ID NO: 401606 - RNA, 19 nt, Artificial Sequence
  Description of Artificial Sequence: Synthetic oligonucleotide
  Antisense Strand to SEQ ID NO: 401605
ucugucacacgccauugcu

SEQ ID NO: 401607 - RNA, 19 nt, Artificial Sequence
  Description of Artificial Sequence: Synthetic oligonucleotide
  Sense Strand Starting at position 1056 of SEQ ID NO: 317662
gcgugugacagagagucuu

SEQ ID NO: 401608 - RNA, 19 nt, Artificial Sequence
  Description of Artificial Sequence: Synthetic oligonucleotide
  Antisense Strand to SEQ ID NO: 401607
aagacucucugucacacgc

SEQ ID NO: 401609 - RNA, 19 nt, Artificial Sequence
  Description of Artificial Sequence: Synthetic oligonucleotide
  Sense Strand Starting at position 1056 of SEQ ID NO: 317668
gacagagagucuuaagcca

SEQ ID NO: 401610 - RNA, 19 nt, Artificial Sequence
  Description of Artificial Sequence: Synthetic oligonucleotide
  Antisense Strand to SEQ ID NO: 401609
uggcuuaagacucucuguc

SEQ ID NO: 401611 - RNA, 19 nt, Artificial Sequence
  Description of Artificial Sequence: Synthetic oligonucleotide
  Sense Strand Starting at position 1056 of SEQ ID NO: 317718
gcgauuaaguuauuugucu

SEQ ID NO: 401612 - RNA, 19 nt, Artificial Sequence
  Description of Artificial Sequence: Synthetic oligonucleotide
  Antisense Strand to SEQ ID NO: 401611
agacaaauaacuuaaucgc

SEQ ID NO: 401613 - RNA, 19 nt, Artificial Sequence
  Description of Artificial Sequence: Synthetic oligonucleotide
  Sense Strand Starting at position 1056 of SEQ ID NO: 317719
cgauuaaguuauuugucua

SEQ ID NO: 401614 - RNA, 19 nt, Artificial Sequence
  Description of Artificial Sequence: Synthetic oligonucleotide
  Antisense Strand to SEQ ID NO: 401613
uagacaaauaacuuaaucg

SEQ ID NO: 401615 - RNA, 19 nt, Artificial Sequence
  Description of Artificial Sequence: Synthetic oligonucleotide
  Sense Strand Starting at position 1056 of SEQ ID NO: 317815
aggucagucuacuuggaga

SEQ ID NO: 401616 - RNA, 19 nt, Artificial Sequence
  Description of Artificial Sequence: Synthetic oligonucleotide
  Antisense Strand to SEQ ID NO: 401615
ucuccaaguagacugaccu

SEQ ID NO: 401617 - RNA, 19 nt, Artificial Sequence
  Description of Artificial Sequence: Synthetic oligonucleotide
  Sense Strand Starting at position 1056 of SEQ ID NO: 317817
gucagucuacuuggagaca

SEQ ID NO: 401618 - RNA, 19 nt, Artificial Sequence
  Description of Artificial Sequence: Synthetic oligonucleotide
  Antisense Strand to SEQ ID NO: 401617
ugucuccaaguagacugac

SEQ ID NO: 401619 - RNA, 19 nt, Artificial Sequence
  Description of Artificial Sequence: Synthetic oligonucleotide
  Sense Strand Starting at position 1056 of SEQ ID NO: 317818
ucagucuacuuggagacau

SEQ ID NO: 401620 - RNA, 19 nt, Artificial Sequence
  Description of Artificial Sequence: Synthetic oligonucleotide
  Antisense Strand to SEQ ID NO: 401619
augucuccaaguagacuga

SEQ ID NO: 401621 - RNA, 19 nt, Artificial Sequence
  Description of Artificial Sequence: Synthetic oligonucleotide
  Sense Strand Starting at position 1056 of SEQ ID NO: 317820
agucuacuuggagacaugu

SEQ ID NO: 401622 - RNA, 19 nt, Artificial Sequence
  Description of Artificial Sequence: Synthetic oligonucleotide
  Antisense Strand to SEQ ID NO: 401621
acaugucuccaaguagacu

SEQ ID NO: 401623 - RNA, 19 nt, Artificial Sequence
  Description of Artificial Sequence: Synthetic oligonucleotide
  Sense Strand Starting at position 1056 of SEQ ID NO: 317871
agugguugcugugauaaag

SEQ ID NO: 401624 - RNA, 19 nt, Artificial Sequence
  Description of Artificial Sequence: Synthetic oligonucleotide
  Antisense Strand to SEQ ID NO: 401623
cuuuaucacagcaaccacu

SEQ ID NO: 401625 - RNA, 19 nt, Artificial Sequence
  Description of Artificial Sequence: Synthetic oligonucleotide
  Sense Strand Starting at position 1056 of SEQ ID NO: 317979
acagaaauuuaaggaugaa

SEQ ID NO: 401626 - RNA, 19 nt, Artificial Sequence
  Description of Artificial Sequence: Synthetic oligonucleotide
  Antisense Strand to SEQ ID NO: 401625
uucauccuuaaauuucugu

SEQ ID NO: 401627 - RNA, 19 nt, Artificial Sequence
  Description of Artificial Sequence: Synthetic oligonucleotide
  Sense Strand Starting at position 1056 of SEQ ID NO: 318029
gcuaguaaguaaugagucu

SEQ ID NO: 401628 - RNA, 19 nt, Artificial Sequence
  Description of Artificial Sequence: Synthetic oligonucleotide
  Antisense Strand to SEQ ID NO: 401627
agacucauuacuuacuagc

SEQ ID NO: 401629 - RNA, 19 nt, Artificial Sequence
  Description of Artificial Sequence: Synthetic oligonucleotide
  Sense Strand Starting at position 1056 of SEQ ID NO: 318038
uaaugagucucguuacucu

SEQ ID NO: 401630 - RNA, 19 nt, Artificial Sequence
  Description of Artificial Sequence: Synthetic oligonucleotide
  Antisense Strand to SEQ ID NO: 401629
agaguaacgagacucauua

SEQ ID NO: 401631 - RNA, 19 nt, Artificial Sequence
  Description of Artificial Sequence: Synthetic oligonucleotide
  Sense Strand Starting at position 1056 of SEQ ID NO: 318047
ucguuacucucccucuaua

SEQ ID NO: 401632 - RNA, 19 nt, Artificial Sequence
  Description of Artificial Sequence: Synthetic oligonucleotide
  Antisense Strand to SEQ ID NO: 401631
uauagagggagaguaacga

SEQ ID NO: 401633 - RNA, 19 nt, Artificial Sequence
  Description of Artificial Sequence: Synthetic oligonucleotide
  Sense Strand Starting at position 1056 of SEQ ID NO: 318072
augucacacuucuaguuaa

SEQ ID NO: 401634 - RNA, 19 nt, Artificial Sequence
  Description of Artificial Sequence: Synthetic oligonucleotide
  Antisense Strand to SEQ ID NO: 401633
uuaacuagaagugugacau

SEQ ID NO: 401635 - RNA, 19 nt, Artificial Sequence
  Description of Artificial Sequence: Synthetic oligonucleotide
  Sense Strand Starting at position 1056 of SEQ ID NO: 318079
acuucuaguuaauugucaa

SEQ ID NO: 401636 - RNA, 19 nt, Artificial Sequence
  Description of Artificial Sequence: Synthetic oligonucleotide
  Antisense Strand to SEQ ID NO: 401635
uugacaauuaacuagaagu

SEQ ID NO: 401637 - RNA, 19 nt, Artificial Sequence
  Description of Artificial Sequence: Synthetic oligonucleotide
  Sense Strand Starting at position 1056 of SEQ ID NO: 318082
ucuaguuaauugucaacua

SEQ ID NO: 401638 - RNA, 19 nt, Artificial Sequence
  Description of Artificial Sequence: Synthetic oligonucleotide
  Antisense Strand to SEQ ID NO: 401637
uaguugacaauuaacuaga

SEQ ID NO: 401639 - RNA, 19 nt, Artificial Sequence
  Description of Artificial Sequence: Synthetic oligonucleotide
  Sense Strand Starting at position 1056 of SEQ ID NO: 318083
cuaguuaauugucaacuau

SEQ ID NO: 401640 - RNA, 19 nt, Artificial Sequence
  Description of Artificial Sequence: Synthetic oligonucleotide
  Antisense Strand to SEQ ID NO: 401639
auaguugacaauuaacuag

SEQ ID NO: 401641 - RNA, 19 nt, Artificial Sequence
  Description of Artificial Sequence: Synthetic oligonucleotide
  Sense Strand Starting at position 1056 of SEQ ID NO: 318516
cuuguuuccuacuugugau

SEQ ID NO: 401642 - RNA, 19 nt, Artificial Sequence
  Description of Artificial Sequence: Synthetic oligonucleotide
  Antisense Strand to SEQ ID NO: 401641
aucacaaguaggaaacaag

SEQ ID NO: 401643 - RNA, 19 nt, Artificial Sequence
  Description of Artificial Sequence: Synthetic oligonucleotide
  Sense Strand Starting at position 1056 of SEQ ID NO: 318781
guaguacacuccuguaauc

SEQ ID NO: 401644 - RNA, 19 nt, Artificial Sequence
  Description of Artificial Sequence: Synthetic oligonucleotide
  Antisense Strand to SEQ ID NO: 401643
gauuacaggaguguacuac

SEQ ID NO: 401645 - RNA, 19 nt, Artificial Sequence
  Description of Artificial Sequence: Synthetic oligonucleotide
  Sense Strand Starting at position 1056 of SEQ ID NO: 319026
uguagcauuccagaauugu

SEQ ID NO: 401646 - RNA, 19 nt, Artificial Sequence
  Description of Artificial Sequence: Synthetic oligonucleotide
  Antisense Strand to SEQ ID NO: 401645
acaauucuggaaugcuaca

SEQ ID NO: 401647 - RNA, 19 nt, Artificial Sequence
  Description of Artificial Sequence: Synthetic oligonucleotide
  Sense Strand Starting at position 1056 of SEQ ID NO: 319037
agaauugugcugcaagcca

SEQ ID NO: 401648 - RNA, 19 nt, Artificial Sequence
  Description of Artificial Sequence: Synthetic oligonucleotide
  Antisense Strand to SEQ ID NO: 401647
uggcuugcagcacaauucu

SEQ ID NO: 401649 - RNA, 19 nt, Artificial Sequence
  Description of Artificial Sequence: Synthetic oligonucleotide
  Sense Strand Starting at position 1056 of SEQ ID NO: 319141
ggaagcaaauccuaagugu

SEQ ID NO: 401650 - RNA, 19 nt, Artificial Sequence
  Description of Artificial Sequence: Synthetic oligonucleotide
  Antisense Strand to SEQ ID NO: 401649
acacuuaggauuugcuucc

SEQ ID NO: 401651 - RNA, 19 nt, Artificial Sequence
  Description of Artificial Sequence: Synthetic oligonucleotide
  Sense Strand Starting at position 1056 of SEQ ID NO: 319206
caggcuguugcugaaaguu

SEQ ID NO: 401652 - RNA, 19 nt, Artificial Sequence
  Description of Artificial Sequence: Synthetic oligonucleotide
  Antisense Strand to SEQ ID NO: 401651
aacuuucagcaacagccug

SEQ ID NO: 401653 - RNA, 19 nt, Artificial Sequence
  Description of Artificial Sequence: Synthetic oligonucleotide
  Sense Strand Starting at position 1057 of SEQ ID NO: 315246
aaggcugauuuagaaagua

SEQ ID NO: 401654 - RNA, 19 nt, Artificial Sequence
  Description of Artificial Sequence: Synthetic oligonucleotide
  Antisense Strand to SEQ ID NO: 401653
uacuuucuaaaucagccuu

SEQ ID NO: 401655 - RNA, 19 nt, Artificial Sequence
  Description of Artificial Sequence: Synthetic oligonucleotide
  Sense Strand Starting at position 1057 of SEQ ID NO: 315977
aagcuaucuugaguaaaga

SEQ ID NO: 401656 - RNA, 19 nt, Artificial Sequence
  Description of Artificial Sequence: Synthetic oligonucleotide
  Antisense Strand to SEQ ID NO: 401655
ucuuuacucaagauagcuu

SEQ ID NO: 401657 - RNA, 19 nt, Artificial Sequence
  Description of Artificial Sequence: Synthetic oligonucleotide
  Sense Strand Starting at position 1057 of SEQ ID NO: 315978
agcuaucuugaguaaagau

SEQ ID NO: 401658 - RNA, 19 nt, Artificial Sequence
  Description of Artificial Sequence: Synthetic oligonucleotide
  Antisense Strand to SEQ ID NO: 401657
aucuuuacucaagauagcu

SEQ ID NO: 401659 - RNA, 19 nt, Artificial Sequence
  Description of Artificial Sequence: Synthetic oligonucleotide
  Sense Strand Starting at position 1057 of SEQ ID NO: 316036
gccaucaauaagcgugaga

SEQ ID NO: 401660 - RNA, 19 nt, Artificial Sequence
  Description of Artificial Sequence: Synthetic oligonucleotide
  Antisense Strand to SEQ ID NO: 401659
ucucacgcuuauugauggc

SEQ ID NO: 401661 - RNA, 19 nt, Artificial Sequence
  Description of Artificial Sequence: Synthetic oligonucleotide
  Sense Strand Starting at position 1057 of SEQ ID NO: 316038
caucaauaagcgugagaca

SEQ ID NO: 401662 - RNA, 19 nt, Artificial Sequence
  Description of Artificial Sequence: Synthetic oligonucleotide
  Antisense Strand to SEQ ID NO: 401661
ugucucacgcuuauugaug

SEQ ID NO: 401663 - RNA, 19 nt, Artificial Sequence
  Description of Artificial Sequence: Synthetic oligonucleotide
  Sense Strand Starting at position 1057 of SEQ ID NO: 316039
aucaauaagcgugagacau

SEQ ID NO: 401664 - RNA, 19 nt, Artificial Sequence
  Description of Artificial Sequence: Synthetic oligonucleotide
  Antisense Strand to SEQ ID NO: 401663
augucucacgcuuauugau

SEQ ID NO: 401665 - RNA, 19 nt, Artificial Sequence
  Description of Artificial Sequence: Synthetic oligonucleotide
  Sense Strand Starting at position 1057 of SEQ ID NO: 316045
aagcgugagacauguggau

SEQ ID NO: 401666 - RNA, 19 nt, Artificial Sequence
  Description of Artificial Sequence: Synthetic oligonucleotide
  Antisense Strand to SEQ ID NO: 401665
auccacaugucucacgcuu

SEQ ID NO: 401667 - RNA, 19 nt, Artificial Sequence
  Description of Artificial Sequence: Synthetic oligonucleotide
  Sense Strand Starting at position 1057 of SEQ ID NO: 316074
gagucugguuucuuccuga

SEQ ID NO: 401668 - RNA, 19 nt, Artificial Sequence
  Description of Artificial Sequence: Synthetic oligonucleotide
  Antisense Strand to SEQ ID NO: 401667
ucaggaagaaaccagacuc

SEQ ID NO: 401669 - RNA, 19 nt, Artificial Sequence
  Description of Artificial Sequence: Synthetic oligonucleotide
  Sense Strand Starting at position 1057 of SEQ ID NO: 316215
guaggaaccuaucaugaag

SEQ ID NO: 401670 - RNA, 19 nt, Artificial Sequence
  Description of Artificial Sequence: Synthetic oligonucleotide
  Antisense Strand to SEQ ID NO: 401669
cuucaugauagguuccuac

SEQ ID NO: 401671 - RNA, 19 nt, Artificial Sequence
  Description of Artificial Sequence: Synthetic oligonucleotide
  Sense Strand Starting at position 1057 of SEQ ID NO: 316229
ugaaguguccuggauauuc

SEQ ID NO: 401672 - RNA, 19 nt, Artificial Sequence
  Description of Artificial Sequence: Synthetic oligonucleotide
  Antisense Strand to SEQ ID NO: 401671
gaauauccaggacacuuca

SEQ ID NO: 401673 - RNA, 19 nt, Artificial Sequence
  Description of Artificial Sequence: Synthetic oligonucleotide
  Sense Strand Starting at position 1057 of SEQ ID NO: 316234
uguccuggauauucuuaaa

SEQ ID NO: 401674 - RNA, 19 nt, Artificial Sequence
  Description of Artificial Sequence: Synthetic oligonucleotide
  Antisense Strand to SEQ ID NO: 401673
uuuaagaauauccaggaca

SEQ ID NO: 401675 - RNA, 19 nt, Artificial Sequence
  Description of Artificial Sequence: Synthetic oligonucleotide
  Sense Strand Starting at position 1057 of SEQ ID NO: 316326
aauuuacauugguagaaga

SEQ ID NO: 401676 - RNA, 19 nt, Artificial Sequence
  Description of Artificial Sequence: Synthetic oligonucleotide
  Antisense Strand to SEQ ID NO: 401675
ucuucuaccaauguaaauu

SEQ ID NO: 401677 - RNA, 19 nt, Artificial Sequence
  Description of Artificial Sequence: Synthetic oligonucleotide
  Sense Strand Starting at position 1057 of SEQ ID NO: 316350
ccacuuuaccugcggugaa

SEQ ID NO: 401678 - RNA, 19 nt, Artificial Sequence
  Description of Artificial Sequence: Synthetic oligonucleotide
  Antisense Strand to SEQ ID NO: 401677
uucaccgcagguaaagugg

SEQ ID NO: 401679 - RNA, 19 nt, Artificial Sequence
  Description of Artificial Sequence: Synthetic oligonucleotide
  Sense Strand Starting at position 1057 of SEQ ID NO: 316372
ggucgaaaugucuaucuag

SEQ ID NO: 401680 - RNA, 19 nt, Artificial Sequence
  Description of Artificial Sequence: Synthetic oligonucleotide
  Antisense Strand to SEQ ID NO: 401679
cuagauagacauuucgacc

SEQ ID NO: 401681 - RNA, 19 nt, Artificial Sequence
  Description of Artificial Sequence: Synthetic oligonucleotide
  Sense Strand Starting at position 1057 of SEQ ID NO: 316375
cgaaaugucuaucuagcau

SEQ ID NO: 401682 - RNA, 19 nt, Artificial Sequence
  Description of Artificial Sequence: Synthetic oligonucleotide
  Antisense Strand to SEQ ID NO: 401681
augcuagauagacauuucg

SEQ ID NO: 401683 - RNA, 19 nt, Artificial Sequence
  Description of Artificial Sequence: Synthetic oligonucleotide
  Sense Strand Starting at position 1057 of SEQ ID NO: 316381
gucuaucuagcaugagaug

SEQ ID NO: 401684 - RNA, 19 nt, Artificial Sequence
  Description of Artificial Sequence: Synthetic oligonucleotide
  Antisense Strand to SEQ ID NO: 401683
caucucaugcuagauagac

SEQ ID NO: 401685 - RNA, 19 nt, Artificial Sequence
  Description of Artificial Sequence: Synthetic oligonucleotide
  Sense Strand Starting at position 1057 of SEQ ID NO: 316435
ucggcuauucucgcucuaa

SEQ ID NO: 401686 - RNA, 19 nt, Artificial Sequence
  Description of Artificial Sequence: Synthetic oligonucleotide
  Antisense Strand to SEQ ID NO: 401685
uuagagcgagaauagccga

SEQ ID NO: 401687 - RNA, 19 nt, Artificial Sequence
  Description of Artificial Sequence: Synthetic oligonucleotide
  Sense Strand Starting at position 1057 of SEQ ID NO: 316437
ggcuauucucgcucuaagu

SEQ ID NO: 401688 - RNA, 19 nt, Artificial Sequence
  Description of Artificial Sequence: Synthetic oligonucleotide
  Antisense Strand to SEQ ID NO: 401687
acuuagagcgagaauagcc

SEQ ID NO: 401689 - RNA, 19 nt, Artificial Sequence
  Description of Artificial Sequence: Synthetic oligonucleotide
  Sense Strand Starting at position 1057 of SEQ ID NO: 316642
ggcagagcggucuaagcaa

SEQ ID NO: 401690 - RNA, 19 nt, Artificial Sequence
  Description of Artificial Sequence: Synthetic oligonucleotide
  Antisense Strand to SEQ ID NO: 401689
uugcuuagaccgcucugcc

SEQ ID NO: 401691 - RNA, 19 nt, Artificial Sequence
  Description of Artificial Sequence: Synthetic oligonucleotide
  Sense Strand Starting at position 1057 of SEQ ID NO: 317375
cugcuaagcgcguuugaga

SEQ ID NO: 401692 - RNA, 19 nt, Artificial Sequence
  Description of Artificial Sequence: Synthetic oligonucleotide
  Antisense Strand to SEQ ID NO: 401691
ucucaaacgcgcuuagcag

SEQ ID NO: 401693 - RNA, 19 nt, Artificial Sequence
  Description of Artificial Sequence: Synthetic oligonucleotide
  Sense Strand Starting at position 1057 of SEQ ID NO: 317687
ggcggaagaugaguucagu

SEQ ID NO: 401694 - RNA, 19 nt, Artificial Sequence
  Description of Artificial Sequence: Synthetic oligonucleotide
  Antisense Strand to SEQ ID NO: 401693
acugaacucaucuuccgcc

SEQ ID NO: 401695 - RNA, 19 nt, Artificial Sequence
  Description of Artificial Sequence: Synthetic oligonucleotide
  Sense Strand Starting at position 1057 of SEQ ID NO: 317711
acauacucgaucuggaaga

SEQ ID NO: 401696 - RNA, 19 nt, Artificial Sequence
  Description of Artificial Sequence: Synthetic oligonucleotide
  Antisense Strand to SEQ ID NO: 401695
ucuuccagaucgaguaugu

SEQ ID NO: 401697 - RNA, 19 nt, Artificial Sequence
  Description of Artificial Sequence: Synthetic oligonucleotide
  Sense Strand Starting at position 1057 of SEQ ID NO: 317780
cuguguaggcaguaaggau

SEQ ID NO: 401698 - RNA, 19 nt, Artificial Sequence
  Description of Artificial Sequence: Synthetic oligonucleotide
  Antisense Strand to SEQ ID NO: 401697
auccuuacugccuacacag

SEQ ID NO: 401699 - RNA, 19 nt, Artificial Sequence
  Description of Artificial Sequence: Synthetic oligonucleotide
  Sense Strand Starting at position 1057 of SEQ ID NO: 317793
aaggauaugcauugauggu

SEQ ID NO: 401700 - RNA, 19 nt, Artificial Sequence
  Description of Artificial Sequence: Synthetic oligonucleotide
  Antisense Strand to SEQ ID NO: 401699
accaucaaugcauauccuu

SEQ ID NO: 401701 - RNA, 19 nt, Artificial Sequence
  Description of Artificial Sequence: Synthetic oligonucleotide
  Sense Strand Starting at position 1057 of SEQ ID NO: 317863
uuaucaucaugugucagaa

SEQ ID NO: 401702 - RNA, 19 nt, Artificial Sequence
  Description of Artificial Sequence: Synthetic oligonucleotide
  Antisense Strand to SEQ ID NO: 401701
uucugacacaugaugauaa

SEQ ID NO: 401703 - RNA, 19 nt, Artificial Sequence
  Description of Artificial Sequence: Synthetic oligonucleotide
  Sense Strand Starting at position 1057 of SEQ ID NO: 317931
uguuuagucuuaguucuaa

SEQ ID NO: 401704 - RNA, 19 nt, Artificial Sequence
  Description of Artificial Sequence: Synthetic oligonucleotide
  Antisense Strand to SEQ ID NO: 401703
uuagaacuaagacuaaaca

SEQ ID NO: 401705 - RNA, 19 nt, Artificial Sequence
  Description of Artificial Sequence: Synthetic oligonucleotide
  Sense Strand Starting at position 1057 of SEQ ID NO: 318194
augacaucucccuauguug

SEQ ID NO: 401706 - RNA, 19 nt, Artificial Sequence
  Description of Artificial Sequence: Synthetic oligonucleotide
  Antisense Strand to SEQ ID NO: 401705
caacauagggagaugucau

SEQ ID NO: 401707 - RNA, 19 nt, Artificial Sequence
  Description of Artificial Sequence: Synthetic oligonucleotide
  Sense Strand Starting at position 1057 of SEQ ID NO: 318263
ucccacagugcucgaauua

SEQ ID NO: 401708 - RNA, 19 nt, Artificial Sequence
  Description of Artificial Sequence: Synthetic oligonucleotide
  Antisense Strand to SEQ ID NO: 401707
uaauucgagcacuguggga

SEQ ID NO: 401709 - RNA, 19 nt, Artificial Sequence
  Description of Artificial Sequence: Synthetic oligonucleotide
  Sense Strand Starting at position 1057 of SEQ ID NO: 318264
cccacagugcucgaauuac

SEQ ID NO: 401710 - RNA, 19 nt, Artificial Sequence
  Description of Artificial Sequence: Synthetic oligonucleotide
  Antisense Strand to SEQ ID NO: 401709
guaauucgagcacuguggg

SEQ ID NO: 401711 - RNA, 19 nt, Artificial Sequence
  Description of Artificial Sequence: Synthetic oligonucleotide
  Sense Strand Starting at position 1057 of SEQ ID NO: 318274
ucgaauuacaggcgugaac

SEQ ID NO: 401712 - RNA, 19 nt, Artificial Sequence
  Description of Artificial Sequence: Synthetic oligonucleotide
  Antisense Strand to SEQ ID NO: 401711
guucacgccuguaauucga

SEQ ID NO: 401713 - RNA, 19 nt, Artificial Sequence
  Description of Artificial Sequence: Synthetic oligonucleotide
  Sense Strand Starting at position 1057 of SEQ ID NO: 318325
aguuucucuuugucaguga

SEQ ID NO: 401714 - RNA, 19 nt, Artificial Sequence
  Description of Artificial Sequence: Synthetic oligonucleotide
  Antisense Strand to SEQ ID NO: 401713
ucacugacaaagagaaacu

SEQ ID NO: 401715 - RNA, 19 nt, Artificial Sequence
  Description of Artificial Sequence: Synthetic oligonucleotide
  Sense Strand Starting at position 1057 of SEQ ID NO: 318695
uuuaucugucuuggauauc

SEQ ID NO: 401716 - RNA, 19 nt, Artificial Sequence
  Description of Artificial Sequence: Synthetic oligonucleotide
  Antisense Strand to SEQ ID NO: 401715
gauauccaagacagauaaa

SEQ ID NO: 401717 - RNA, 19 nt, Artificial Sequence
  Description of Artificial Sequence: Synthetic oligonucleotide
  Sense Strand Starting at position 1057 of SEQ ID NO: 318698
aucugucuuggauaucauu

SEQ ID NO: 401718 - RNA, 19 nt, Artificial Sequence
  Description of Artificial Sequence: Synthetic oligonucleotide
  Antisense Strand to SEQ ID NO: 401717
aaugauauccaagacagau

SEQ ID NO: 401719 - RNA, 19 nt, Artificial Sequence
  Description of Artificial Sequence: Synthetic oligonucleotide
  Sense Strand Starting at position 1057 of SEQ ID NO: 318707
ggauaucauugaguuucuc

SEQ ID NO: 401720 - RNA, 19 nt, Artificial Sequence
  Description of Artificial Sequence: Synthetic oligonucleotide
  Antisense Strand to SEQ ID NO: 401719
gagaaacucaaugauaucc

SEQ ID NO: 401721 - RNA, 19 nt, Artificial Sequence
  Description of Artificial Sequence: Synthetic oligonucleotide
  Sense Strand Starting at position 1057 of SEQ ID NO: 318711
aucauugaguuucucugau

SEQ ID NO: 401722 - RNA, 19 nt, Artificial Sequence
  Description of Artificial Sequence: Synthetic oligonucleotide
  Antisense Strand to SEQ ID NO: 401721
aucagagaaacucaaugau

SEQ ID NO: 401723 - RNA, 19 nt, Artificial Sequence
  Description of Artificial Sequence: Synthetic oligonucleotide
  Sense Strand Starting at position 1057 of SEQ ID NO: 318809
augccuguucuccgagaca

SEQ ID NO: 401724 - RNA, 19 nt, Artificial Sequence
  Description of Artificial Sequence: Synthetic oligonucleotide
  Antisense Strand to SEQ ID NO: 401723
ugucucggagaacaggcau

SEQ ID NO: 401725 - RNA, 19 nt, Artificial Sequence
  Description of Artificial Sequence: Synthetic oligonucleotide
  Sense Strand Starting at position 1057 of SEQ ID NO: 318954
cgauaauccugccucagca

SEQ ID NO: 401726 - RNA, 19 nt, Artificial Sequence
  Description of Artificial Sequence: Synthetic oligonucleotide
  Antisense Strand to SEQ ID NO: 401725
ugcugaggcaggauuaucg

SEQ ID NO: 401727 - RNA, 19 nt, Artificial Sequence
  Description of Artificial Sequence: Synthetic oligonucleotide
  Sense Strand Starting at position 1057 of SEQ ID NO: 319011
auuauuaucgaguagccag

SEQ ID NO: 401728 - RNA, 19 nt, Artificial Sequence
  Description of Artificial Sequence: Synthetic oligonucleotide
  Antisense Strand to SEQ ID NO: 401727
cuggcuacucgauaauaau

SEQ ID NO: 401729 - RNA, 19 nt, Artificial Sequence
  Description of Artificial Sequence: Synthetic oligonucleotide
  Sense Strand Starting at position 1057 of SEQ ID NO: 319185
gcacccagcccauauguaa

SEQ ID NO: 401730 - RNA, 19 nt, Artificial Sequence
  Description of Artificial Sequence: Synthetic oligonucleotide
  Antisense Strand to SEQ ID NO: 401729
uuacauaugggcugggugc

SEQ ID NO: 401731 - RNA, 19 nt, Artificial Sequence
  Description of Artificial Sequence: Synthetic oligonucleotide
  Sense Strand Starting at position 1057 of SEQ ID NO: 319200
guaagauuauuugaucuug

SEQ ID NO: 401732 - RNA, 19 nt, Artificial Sequence
  Description of Artificial Sequence: Synthetic oligonucleotide
  Antisense Strand to SEQ ID NO: 401731
caagaucaaauaaucuuac

SEQ ID NO: 401733 - RNA, 19 nt, Artificial Sequence
  Description of Artificial Sequence: Synthetic oligonucleotide
  Sense Strand Starting at position 1058 of SEQ ID NO: 315272
aucuaaguguaaucaggua

SEQ ID NO: 401734 - RNA, 19 nt, Artificial Sequence
  Description of Artificial Sequence: Synthetic oligonucleotide
  Antisense Strand to SEQ ID NO: 401733
uaccugauuacacuuagau

SEQ ID NO: 401735 - RNA, 19 nt, Artificial Sequence
  Description of Artificial Sequence: Synthetic oligonucleotide
  Sense Strand Starting at position 1058 of SEQ ID NO: 315294
aggaacgugacuuguugaa

SEQ ID NO: 401736 - RNA, 19 nt, Artificial Sequence
  Description of Artificial Sequence: Synthetic oligonucleotide
  Antisense Strand to SEQ ID NO: 401735
uucaacaagucacguuccu

SEQ ID NO: 401737 - RNA, 19 nt, Artificial Sequence
  Description of Artificial Sequence: Synthetic oligonucleotide
  Sense Strand Starting at position 1058 of SEQ ID NO: 315296
gaacgugacuuguugaauu

SEQ ID NO: 401738 - RNA, 19 nt, Artificial Sequence
  Description of Artificial Sequence: Synthetic oligonucleotide
  Antisense Strand to SEQ ID NO: 401737
aauucaacaagucacguuc

SEQ ID NO: 401739 - RNA, 19 nt, Artificial Sequence
  Description of Artificial Sequence: Synthetic oligonucleotide
  Sense Strand Starting at position 1058 of SEQ ID NO: 315298
acgugacuuguugaauuac

SEQ ID NO: 401740 - RNA, 19 nt, Artificial Sequence
  Description of Artificial Sequence: Synthetic oligonucleotide
  Antisense Strand to SEQ ID NO: 401739
guaauucaacaagucacgu

SEQ ID NO: 401741 - RNA, 19 nt, Artificial Sequence
  Description of Artificial Sequence: Synthetic oligonucleotide
  Sense Strand Starting at position 1058 of SEQ ID NO: 315307
guugaauuacaaggcaaau

SEQ ID NO: 401742 - RNA, 19 nt, Artificial Sequence
  Description of Artificial Sequence: Synthetic oligonucleotide
  Antisense Strand to SEQ ID NO: 401741
auuugccuuguaauucaac

SEQ ID NO: 401743 - RNA, 19 nt, Artificial Sequence
  Description of Artificial Sequence: Synthetic oligonucleotide
  Sense Strand Starting at position 1058 of SEQ ID NO: 315390
gugcaucucaaaggaagau

SEQ ID NO: 401744 - RNA, 19 nt, Artificial Sequence
  Description of Artificial Sequence: Synthetic oligonucleotide
  Antisense Strand to SEQ ID NO: 401743
aucuuccuuugagaugcac

SEQ ID NO: 401745 - RNA, 19 nt, Artificial Sequence
  Description of Artificial Sequence: Synthetic oligonucleotide
  Sense Strand Starting at position 1058 of SEQ ID NO: 315531
ucaucaguuggaggcauau

SEQ ID NO: 401746 - RNA, 19 nt, Artificial Sequence
  Description of Artificial Sequence: Synthetic oligonucleotide
  Antisense Strand to SEQ ID NO: 401745
auaugccuccaacugauga

SEQ ID NO: 401747 - RNA, 19 nt, Artificial Sequence
  Description of Artificial Sequence: Synthetic oligonucleotide
  Sense Strand Starting at position 1058 of SEQ ID NO: 315543
ggcauauaccuacauguau

SEQ ID NO: 401748 - RNA, 19 nt, Artificial Sequence
  Description of Artificial Sequence: Synthetic oligonucleotide
  Antisense Strand to SEQ ID NO: 401747
auacauguagguauaugcc

SEQ ID NO: 401749 - RNA, 19 nt, Artificial Sequence
  Description of Artificial Sequence: Synthetic oligonucleotide
  Sense Strand Starting at position 1058 of SEQ ID NO: 315550
accuacauguauguauaaa

SEQ ID NO: 401750 - RNA, 19 nt, Artificial Sequence
  Description of Artificial Sequence: Synthetic oligonucleotide
  Antisense Strand to SEQ ID NO: 401749
uuuauacauacauguaggu

SEQ ID NO: 401751 - RNA, 19 nt, Artificial Sequence
  Description of Artificial Sequence: Synthetic oligonucleotide
  Sense Strand Starting at position 1058 of SEQ ID NO: 315643
cgauaacauugguugcaua

SEQ ID NO: 401752 - RNA, 19 nt, Artificial Sequence
  Description of Artificial Sequence: Synthetic oligonucleotide
  Antisense Strand to SEQ ID NO: 401751
uaugcaaccaauguuaucg

SEQ ID NO: 401753 - RNA, 19 nt, Artificial Sequence
  Description of Artificial Sequence: Synthetic oligonucleotide
  Sense Strand Starting at position 1058 of SEQ ID NO: 315644
gauaacauugguugcauau

SEQ ID NO: 401754 - RNA, 19 nt, Artificial Sequence
  Description of Artificial Sequence: Synthetic oligonucleotide
  Antisense Strand to SEQ ID NO: 401753
auaugcaaccaauguuauc

SEQ ID NO: 401755 - RNA, 19 nt, Artificial Sequence
  Description of Artificial Sequence: Synthetic oligonucleotide
  Sense Strand Starting at position 1058 of SEQ ID NO: 315740
cugaaagcaguuugagaug

SEQ ID NO: 401756 - RNA, 19 nt, Artificial Sequence
  Description of Artificial Sequence: Synthetic oligonucleotide
  Antisense Strand to SEQ ID NO: 401755
caucucaaacugcuuucag

SEQ ID NO: 401757 - RNA, 19 nt, Artificial Sequence
  Description of Artificial Sequence: Synthetic oligonucleotide
  Sense Strand Starting at position 1058 of SEQ ID NO: 316111
gccaauaaaucuguaauug

SEQ ID NO: 401758 - RNA, 19 nt, Artificial Sequence
  Description of Artificial Sequence: Synthetic oligonucleotide
  Antisense Strand to SEQ ID NO: 401757
caauuacagauuuauuggc

SEQ ID NO: 401759 - RNA, 19 nt, Artificial Sequence
  Description of Artificial Sequence: Synthetic oligonucleotide
  Sense Strand Starting at position 1058 of SEQ ID NO: 316130
uuaacugucucugcagaaa

SEQ ID NO: 401760 - RNA, 19 nt, Artificial Sequence
  Description of Artificial Sequence: Synthetic oligonucleotide
  Antisense Strand to SEQ ID NO: 401759
uuucugcagagacaguuaa

SEQ ID NO: 401761 - RNA, 19 nt, Artificial Sequence
  Description of Artificial Sequence: Synthetic oligonucleotide
  Sense Strand Starting at position 1058 of SEQ ID NO: 316191
gauucauugggcguucguu

SEQ ID NO: 401762 - RNA, 19 nt, Artificial Sequence
  Description of Artificial Sequence: Synthetic oligonucleotide
  Antisense Strand to SEQ ID NO: 401761
aacgaacgcccaaugaauc

SEQ ID NO: 401763 - RNA, 19 nt, Artificial Sequence
  Description of Artificial Sequence: Synthetic oligonucleotide
  Sense Strand Starting at position 1058 of SEQ ID NO: 316197
uugggcguucguuugugua

SEQ ID NO: 401764 - RNA, 19 nt, Artificial Sequence
  Description of Artificial Sequence: Synthetic oligonucleotide
  Antisense Strand to SEQ ID NO: 401763
uacacaaacgaacgcccaa

SEQ ID NO: 401765 - RNA, 19 nt, Artificial Sequence
  Description of Artificial Sequence: Synthetic oligonucleotide
  Sense Strand Starting at position 1058 of SEQ ID NO: 316676
acgcaaagucgagaaucaa

SEQ ID NO: 401766 - RNA, 19 nt, Artificial Sequence
  Description of Artificial Sequence: Synthetic oligonucleotide
  Antisense Strand to SEQ ID NO: 401765
uugauucucgacuuugcgu

SEQ ID NO: 401767 - RNA, 19 nt, Artificial Sequence
  Description of Artificial Sequence: Synthetic oligonucleotide
  Sense Strand Starting at position 1058 of SEQ ID NO: 316796
ggaagauccaugggccgau

SEQ ID NO: 401768 - RNA, 19 nt, Artificial Sequence
  Description of Artificial Sequence: Synthetic oligonucleotide
  Antisense Strand to SEQ ID NO: 401767
aucggcccauggaucuucc

SEQ ID NO: 401769 - RNA, 19 nt, Artificial Sequence
  Description of Artificial Sequence: Synthetic oligonucleotide
  Sense Strand Starting at position 1058 of SEQ ID NO: 316800
gauccaugggccgaugaga

SEQ ID NO: 401770 - RNA, 19 nt, Artificial Sequence
  Description of Artificial Sequence: Synthetic oligonucleotide
  Antisense Strand to SEQ ID NO: 401769
ucucaucggcccauggauc

SEQ ID NO: 401771 - RNA, 19 nt, Artificial Sequence
  Description of Artificial Sequence: Synthetic oligonucleotide
  Sense Strand Starting at position 1058 of SEQ ID NO: 317073
acccuuucucaccggauga

SEQ ID NO: 401772 - RNA, 19 nt, Artificial Sequence
  Description of Artificial Sequence: Synthetic oligonucleotide
  Antisense Strand to SEQ ID NO: 401771
ucauccggugagaaagggu

SEQ ID NO: 401773 - RNA, 19 nt, Artificial Sequence
  Description of Artificial Sequence: Synthetic oligonucleotide
  Sense Strand Starting at position 1058 of SEQ ID NO: 317077
uuucucaccggaugaagau

SEQ ID NO: 401774 - RNA, 19 nt, Artificial Sequence
  Description of Artificial Sequence: Synthetic oligonucleotide
  Antisense Strand to SEQ ID NO: 401773
aucuucauccggugagaaa

SEQ ID NO: 401775 - RNA, 19 nt, Artificial Sequence
  Description of Artificial Sequence: Synthetic oligonucleotide
  Sense Strand Starting at position 1058 of SEQ ID NO: 317282
gcccuucgaccggaaauca

SEQ ID NO: 401776 - RNA, 19 nt, Artificial Sequence
  Description of Artificial Sequence: Synthetic oligonucleotide
  Antisense Strand to SEQ ID NO: 401775
ugauuuccggucgaagggc

SEQ ID NO: 401777 - RNA, 19 nt, Artificial Sequence
  Description of Artificial Sequence: Synthetic oligonucleotide
  Sense Strand Starting at position 1058 of SEQ ID NO: 317310
cccaccuucgaccggaaau

SEQ ID NO: 401778 - RNA, 19 nt, Artificial Sequence
  Description of Artificial Sequence: Synthetic oligonucleotide
  Antisense Strand to SEQ ID NO: 401777
auuuccggucgaagguggg

SEQ ID NO: 401779 - RNA, 19 nt, Artificial Sequence
  Description of Artificial Sequence: Synthetic oligonucleotide
  Sense Strand Starting at position 1058 of SEQ ID NO: 317377
gguggcguuuauuucauga

SEQ ID NO: 401780 - RNA, 19 nt, Artificial Sequence
  Description of Artificial Sequence: Synthetic oligonucleotide
  Antisense Strand to SEQ ID NO: 401779
ucaugaaauaaacgccacc

SEQ ID NO: 401781 - RNA, 19 nt, Artificial Sequence
  Description of Artificial Sequence: Synthetic oligonucleotide
  Sense Strand Starting at position 1058 of SEQ ID NO: 317545
aaacguuagcguuugcagu

SEQ ID NO: 401782 - RNA, 19 nt, Artificial Sequence
  Description of Artificial Sequence: Synthetic oligonucleotide
  Antisense Strand to SEQ ID NO: 401781
acugcaaacgcuaacguuu

SEQ ID NO: 401783 - RNA, 19 nt, Artificial Sequence
  Description of Artificial Sequence: Synthetic oligonucleotide
  Sense Strand Starting at position 1058 of SEQ ID NO: 317692
gaaauaugucagcagacga

SEQ ID NO: 401784 - RNA, 19 nt, Artificial Sequence
  Description of Artificial Sequence: Synthetic oligonucleotide
  Antisense Strand to SEQ ID NO: 401783
ucgucugcugacauauuuc

SEQ ID NO: 401785 - RNA, 19 nt, Artificial Sequence
  Description of Artificial Sequence: Synthetic oligonucleotide
  Sense Strand Starting at position 1058 of SEQ ID NO: 317820
gaaaguggguggcuauaaa

SEQ ID NO: 401786 - RNA, 19 nt, Artificial Sequence
  Description of Artificial Sequence: Synthetic oligonucleotide
  Antisense Strand to SEQ ID NO: 401785
uuuauagccacccacuuuc

SEQ ID NO: 401787 - RNA, 19 nt, Artificial Sequence
  Description of Artificial Sequence: Synthetic oligonucleotide
  Sense Strand Starting at position 1058 of SEQ ID NO: 317831
gcuauaaacuuggaauuug

SEQ ID NO: 401788 - RNA, 19 nt, Artificial Sequence
  Description of Artificial Sequence: Synthetic oligonucleotide
  Antisense Strand to SEQ ID NO: 401787
caaauuccaaguuuauagc

SEQ ID NO: 401789 - RNA, 19 nt, Artificial Sequence
  Description of Artificial Sequence: Synthetic oligonucleotide
  Sense Strand Starting at position 1058 of SEQ ID NO: 317913
guacuauuagccugauuau

SEQ ID NO: 401790 - RNA, 19 nt, Artificial Sequence
  Description of Artificial Sequence: Synthetic oligonucleotide
  Antisense Strand to SEQ ID NO: 401789
auaaucaggcuaauaguac

SEQ ID NO: 401791 - RNA, 19 nt, Artificial Sequence
  Description of Artificial Sequence: Synthetic oligonucleotide
  Sense Strand Starting at position 1058 of SEQ ID NO: 317923
ccugauuaucccuaauggu

SEQ ID NO: 401792 - RNA, 19 nt, Artificial Sequence
  Description of Artificial Sequence: Synthetic oligonucleotide
  Antisense Strand to SEQ ID NO: 401791
accauuagggauaaucagg

SEQ ID NO: 401793 - RNA, 19 nt, Artificial Sequence
  Description of Artificial Sequence: Synthetic oligonucleotide
  Sense Strand Starting at position 1058 of SEQ ID NO: 317933
ccuaauggugcauaucuga

SEQ ID NO: 401794 - RNA, 19 nt, Artificial Sequence
  Description of Artificial Sequence: Synthetic oligonucleotide
  Antisense Strand to SEQ ID NO: 401793
ucagauaugcaccauuagg

SEQ ID NO: 401795 - RNA, 19 nt, Artificial Sequence
  Description of Artificial Sequence: Synthetic oligonucleotide
  Sense Strand Starting at position 1058 of SEQ ID NO: 317936
aauggugcauaucugaaua

SEQ ID NO: 401796 - RNA, 19 nt, Artificial Sequence
  Description of Artificial Sequence: Synthetic oligonucleotide
  Antisense Strand to SEQ ID NO: 401795
uauucagauaugcaccauu

SEQ ID NO: 401797 - RNA, 19 nt, Artificial Sequence
  Description of Artificial Sequence: Synthetic oligonucleotide
  Sense Strand Starting at position 1058 of SEQ ID NO: 318286
ggaaguguucuacauggca

SEQ ID NO: 401798 - RNA, 19 nt, Artificial Sequence
  Description of Artificial Sequence: Synthetic oligonucleotide
  Antisense Strand to SEQ ID NO: 401797
ugccauguagaacacuucc

SEQ ID NO: 401799 - RNA, 19 nt, Artificial Sequence
  Description of Artificial Sequence: Synthetic oligonucleotide
  Sense Strand Starting at position 1058 of SEQ ID NO: 318319
gcagaaauacuuuaagucu

SEQ ID NO: 401800 - RNA, 19 nt, Artificial Sequence
  Description of Artificial Sequence: Synthetic oligonucleotide
  Antisense Strand to SEQ ID NO: 401799
agacuuaaaguauuucugc

SEQ ID NO: 401801 - RNA, 19 nt, Artificial Sequence
  Description of Artificial Sequence: Synthetic oligonucleotide
  Sense Strand Starting at position 1058 of SEQ ID NO: 318331
uaagucuugcugggauuga

SEQ ID NO: 401802 - RNA, 19 nt, Artificial Sequence
  Description of Artificial Sequence: Synthetic oligonucleotide
  Antisense Strand to SEQ ID NO: 401801
ucaaucccagcaagacuua

SEQ ID NO: 401803 - RNA, 19 nt, Artificial Sequence
  Description of Artificial Sequence: Synthetic oligonucleotide
  Sense Strand Starting at position 1058 of SEQ ID NO: 318342
gggauugaaguuuacugua

SEQ ID NO: 401804 - RNA, 19 nt, Artificial Sequence
  Description of Artificial Sequence: Synthetic oligonucleotide
  Antisense Strand to SEQ ID NO: 401803
uacaguaaacuucaauccc

SEQ ID NO: 401805 - RNA, 19 nt, Artificial Sequence
  Description of Artificial Sequence: Synthetic oligonucleotide
  Sense Strand Starting at position 1058 of SEQ ID NO: 318344
gauugaaguuuacuguaag

SEQ ID NO: 401806 - RNA, 19 nt, Artificial Sequence
  Description of Artificial Sequence: Synthetic oligonucleotide
  Antisense Strand to SEQ ID NO: 401805
cuuacaguaaacuucaauc

SEQ ID NO: 401807 - RNA, 19 nt, Artificial Sequence
  Description of Artificial Sequence: Synthetic oligonucleotide
  Sense Strand Starting at position 1058 of SEQ ID NO: 318846
ggcagaauagauugagcca

SEQ ID NO: 401808 - RNA, 19 nt, Artificial Sequence
  Description of Artificial Sequence: Synthetic oligonucleotide
  Antisense Strand to SEQ ID NO: 401807
uggcucaaucuauucugcc

SEQ ID NO: 401809 - RNA, 19 nt, Artificial Sequence
  Description of Artificial Sequence: Synthetic oligonucleotide
  Sense Strand Starting at position 1058 of SEQ ID NO: 319075
cacuuaagcccauggaguu

SEQ ID NO: 401810 - RNA, 19 nt, Artificial Sequence
  Description of Artificial Sequence: Synthetic oligonucleotide
  Antisense Strand to SEQ ID NO: 401809
aacuccaugggcuuaagug

SEQ ID NO: 401811 - RNA, 19 nt, Artificial Sequence
  Description of Artificial Sequence: Synthetic oligonucleotide
  Sense Strand Starting at position 1058 of SEQ ID NO: 319076
acuuaagcccauggaguua

SEQ ID NO: 401812 - RNA, 19 nt, Artificial Sequence
  Description of Artificial Sequence: Synthetic oligonucleotide
  Antisense Strand to SEQ ID NO: 401811
uaacuccaugggcuuaagu

SEQ ID NO: 401813 - RNA, 19 nt, Artificial Sequence
  Description of Artificial Sequence: Synthetic oligonucleotide
  Sense Strand Starting at position 1059 of SEQ ID NO: 315265
augaaauaucccugaguua

SEQ ID NO: 401814 - RNA, 19 nt, Artificial Sequence
  Description of Artificial Sequence: Synthetic oligonucleotide
  Antisense Strand to SEQ ID NO: 401813
uaacucagggauauuucau

SEQ ID NO: 401815 - RNA, 19 nt, Artificial Sequence
  Description of Artificial Sequence: Synthetic oligonucleotide
  Sense Strand Starting at position 1059 of SEQ ID NO: 315304
ugaacuuuaugucuaagua

SEQ ID NO: 401816 - RNA, 19 nt, Artificial Sequence
  Description of Artificial Sequence: Synthetic oligonucleotide
  Antisense Strand to SEQ ID NO: 401815
uacuuagacauaaaguuca

SEQ ID NO: 401817 - RNA, 19 nt, Artificial Sequence
  Description of Artificial Sequence: Synthetic oligonucleotide
  Sense Strand Starting at position 1059 of SEQ ID NO: 315537
uccaauugguaagugaaga

SEQ ID NO: 401818 - RNA, 19 nt, Artificial Sequence
  Description of Artificial Sequence: Synthetic oligonucleotide
  Antisense Strand to SEQ ID NO: 401817
ucuucacuuaccaauugga

SEQ ID NO: 401819 - RNA, 19 nt, Artificial Sequence
  Description of Artificial Sequence: Synthetic oligonucleotide
  Sense Strand Starting at position 1059 of SEQ ID NO: 315538
ccaauugguaagugaagaa

SEQ ID NO: 401820 - RNA, 19 nt, Artificial Sequence
  Description of Artificial Sequence: Synthetic oligonucleotide
  Antisense Strand to SEQ ID NO: 401819
uucuucacuuaccaauugg

SEQ ID NO: 401821 - RNA, 19 nt, Artificial Sequence
  Description of Artificial Sequence: Synthetic oligonucleotide
  Sense Strand Starting at position 1059 of SEQ ID NO: 315561
ggcaaagugaaacguuaaa

SEQ ID NO: 401822 - RNA, 19 nt, Artificial Sequence
  Description of Artificial Sequence: Synthetic oligonucleotide
  Antisense Strand to SEQ ID NO: 401821
uuuaacguuucacuuugcc

SEQ ID NO: 401823 - RNA, 19 nt, Artificial Sequence
  Description of Artificial Sequence: Synthetic oligonucleotide
  Sense Strand Starting at position 1059 of SEQ ID NO: 315900
uagauucugguauauguua

SEQ ID NO: 401824 - RNA, 19 nt, Artificial Sequence
  Description of Artificial Sequence: Synthetic oligonucleotide
  Antisense Strand to SEQ ID NO: 401823
uaacauauaccagaaucua

SEQ ID NO: 401825 - RNA, 19 nt, Artificial Sequence
  Description of Artificial Sequence: Synthetic oligonucleotide
  Sense Strand Starting at position 1059 of SEQ ID NO: 315958
cuuugcaaagacugauaau

SEQ ID NO: 401826 - RNA, 19 nt, Artificial Sequence
  Description of Artificial Sequence: Synthetic oligonucleotide
  Antisense Strand to SEQ ID NO: 401825
auuaucagucuuugcaaag

SEQ ID NO: 401827 - RNA, 19 nt, Artificial Sequence
  Description of Artificial Sequence: Synthetic oligonucleotide
  Sense Strand Starting at position 1059 of SEQ ID NO: 315997
auucucauuucguuagguu

SEQ ID NO: 401828 - RNA, 19 nt, Artificial Sequence
  Description of Artificial Sequence: Synthetic oligonucleotide
  Antisense Strand to SEQ ID NO: 401827
aaccuaacgaaaugagaau

SEQ ID NO: 401829 - RNA, 19 nt, Artificial Sequence
  Description of Artificial Sequence: Synthetic oligonucleotide
  Sense Strand Starting at position 1059 of SEQ ID NO: 315998
uucucauuucguuagguuu

SEQ ID NO: 401830 - RNA, 19 nt, Artificial Sequence
  Description of Artificial Sequence: Synthetic oligonucleotide
  Antisense Strand to SEQ ID NO: 401829
aaaccuaacgaaaugagaa

SEQ ID NO: 401831 - RNA, 19 nt, Artificial Sequence
  Description of Artificial Sequence: Synthetic oligonucleotide
  Sense Strand Starting at position 1059 of SEQ ID NO: 316074
gaucuccugugaguacaaa

SEQ ID NO: 401832 - RNA, 19 nt, Artificial Sequence
  Description of Artificial Sequence: Synthetic oligonucleotide
  Antisense Strand to SEQ ID NO: 401831
uuuguacucacaggagauc

SEQ ID NO: 401833 - RNA, 19 nt, Artificial Sequence
  Description of Artificial Sequence: Synthetic oligonucleotide
  Sense Strand Starting at position 1059 of SEQ ID NO: 316075
aucuccugugaguacaaau

SEQ ID NO: 401834 - RNA, 19 nt, Artificial Sequence
  Description of Artificial Sequence: Synthetic oligonucleotide
  Antisense Strand to SEQ ID NO: 401833
auuuguacucacaggagau

SEQ ID NO: 401835 - RNA, 19 nt, Artificial Sequence
  Description of Artificial Sequence: Synthetic oligonucleotide
  Sense Strand Starting at position 1059 of SEQ ID NO: 316130
gcauauguggaacaaguaa

SEQ ID NO: 401836 - RNA, 19 nt, Artificial Sequence
  Description of Artificial Sequence: Synthetic oligonucleotide
  Antisense Strand to SEQ ID NO: 401835
uuacuuguuccacauaugc

SEQ ID NO: 401837 - RNA, 19 nt, Artificial Sequence
  Description of Artificial Sequence: Synthetic oligonucleotide
  Sense Strand Starting at position 1059 of SEQ ID NO: 317379
uucucuuuccgggacaaca

SEQ ID NO: 401838 - RNA, 19 nt, Artificial Sequence
  Description of Artificial Sequence: Synthetic oligonucleotide
  Antisense Strand to SEQ ID NO: 401837
uguugucccggaaagagaa

SEQ ID NO: 401839 - RNA, 19 nt, Artificial Sequence
  Description of Artificial Sequence: Synthetic oligonucleotide
  Sense Strand Starting at position 1059 of SEQ ID NO: 317425
gugaguucugaagaagcga

SEQ ID NO: 401840 - RNA, 19 nt, Artificial Sequence
  Description of Artificial Sequence: Synthetic oligonucleotide
  Antisense Strand to SEQ ID NO: 401839
ucgcuucuucagaacucac

SEQ ID NO: 401841 - RNA, 19 nt, Artificial Sequence
  Description of Artificial Sequence: Synthetic oligonucleotide
  Sense Strand Starting at position 1059 of SEQ ID NO: 317557
guuggcuuucuugauauag

SEQ ID NO: 401842 - RNA, 19 nt, Artificial Sequence
  Description of Artificial Sequence: Synthetic oligonucleotide
  Antisense Strand to SEQ ID NO: 401841
cuauaucaagaaagccaac

SEQ ID NO: 401843 - RNA, 19 nt, Artificial Sequence
  Description of Artificial Sequence: Synthetic oligonucleotide
  Sense Strand Starting at position 1059 of SEQ ID NO: 317601
gccucugggcuuucguauu

SEQ ID NO: 401844 - RNA, 19 nt, Artificial Sequence
  Description of Artificial Sequence: Synthetic oligonucleotide
  Antisense Strand to SEQ ID NO: 401843
aauacgaaagcccagaggc

SEQ ID NO: 401845 - RNA, 19 nt, Artificial Sequence
  Description of Artificial Sequence: Synthetic oligonucleotide
  Sense Strand Starting at position 1059 of SEQ ID NO: 317717
gacacaugggucugcaaua

SEQ ID NO: 401846 - RNA, 19 nt, Artificial Sequence
  Description of Artificial Sequence: Synthetic oligonucleotide
  Antisense Strand to SEQ ID NO: 401845
uauugcagacccauguguc

SEQ ID NO: 401847 - RNA, 19 nt, Artificial Sequence
  Description of Artificial Sequence: Synthetic oligonucleotide
  Sense Strand Starting at position 1059 of SEQ ID NO: 317795
augaguuaguccucuagaa

SEQ ID NO: 401848 - RNA, 19 nt, Artificial Sequence
  Description of Artificial Sequence: Synthetic oligonucleotide
  Antisense Strand to SEQ ID NO: 401847
uucuagaggacuaacucau

SEQ ID NO: 401849 - RNA, 19 nt, Artificial Sequence
  Description of Artificial Sequence: Synthetic oligonucleotide
  Sense Strand Starting at position 1059 of SEQ ID NO: 317797
gaguuaguccucuagaaug

SEQ ID NO: 401850 - RNA, 19 nt, Artificial Sequence
  Description of Artificial Sequence: Synthetic oligonucleotide
  Antisense Strand to SEQ ID NO: 401849
cauucuagaggacuaacuc

SEQ ID NO: 401851 - RNA, 19 nt, Artificial Sequence
  Description of Artificial Sequence: Synthetic oligonucleotide
  Sense Strand Starting at position 1059 of SEQ ID NO: 317799
guuaguccucuagaaugau

SEQ ID NO: 401852 - RNA, 19 nt, Artificial Sequence
  Description of Artificial Sequence: Synthetic oligonucleotide
  Antisense Strand to SEQ ID NO: 401851
aucauucuagaggacuaac

SEQ ID NO: 401853 - RNA, 19 nt, Artificial Sequence
  Description of Artificial Sequence: Synthetic oligonucleotide
  Sense Strand Starting at position 1059 of SEQ ID NO: 317838
ggacuuaaguaauuccaga

SEQ ID NO: 401854 - RNA, 19 nt, Artificial Sequence
  Description of Artificial Sequence: Synthetic oligonucleotide
  Antisense Strand to SEQ ID NO: 401853
ucuggaauuacuuaagucc

SEQ ID NO: 401855 - RNA, 19 nt, Artificial Sequence
  Description of Artificial Sequence: Synthetic oligonucleotide
  Sense Strand Starting at position 1059 of SEQ ID NO: 317872
cuuaaugagguuuguagga

SEQ ID NO: 401856 - RNA, 19 nt, Artificial Sequence
  Description of Artificial Sequence: Synthetic oligonucleotide
  Antisense Strand to SEQ ID NO: 401855
uccuacaaaccucauuaag

SEQ ID NO: 401857 - RNA, 19 nt, Artificial Sequence
  Description of Artificial Sequence: Synthetic oligonucleotide
  Sense Strand Starting at position 1059 of SEQ ID NO: 317926
aaaugaugaaggugugguu

SEQ ID NO: 401858 - RNA, 19 nt, Artificial Sequence
  Description of Artificial Sequence: Synthetic oligonucleotide
  Antisense Strand to SEQ ID NO: 401857
aaccacaccuucaucauuu

SEQ ID NO: 401859 - RNA, 19 nt, Artificial Sequence
  Description of Artificial Sequence: Synthetic oligonucleotide
  Sense Strand Starting at position 1059 of SEQ ID NO: 317932
ugaaggugugguugggaga

SEQ ID NO: 401860 - RNA, 19 nt, Artificial Sequence
  Description of Artificial Sequence: Synthetic oligonucleotide
  Antisense Strand to SEQ ID NO: 401859
ucucccaaccacaccuuca

SEQ ID NO: 401861 - RNA, 19 nt, Artificial Sequence
  Description of Artificial Sequence: Synthetic oligonucleotide
  Sense Strand Starting at position 1059 of SEQ ID NO: 318001
aaugguuaugagcauauua

SEQ ID NO: 401862 - RNA, 19 nt, Artificial Sequence
  Description of Artificial Sequence: Synthetic oligonucleotide
  Antisense Strand to SEQ ID NO: 401861
uaauaugcucauaaccauu

SEQ ID NO: 401863 - RNA, 19 nt, Artificial Sequence
  Description of Artificial Sequence: Synthetic oligonucleotide
  Sense Strand Starting at position 1059 of SEQ ID NO: 318003
ugguuaugagcauauuaga

SEQ ID NO: 401864 - RNA, 19 nt, Artificial Sequence
  Description of Artificial Sequence: Synthetic oligonucleotide
  Antisense Strand to SEQ ID NO: 401863
ucuaauaugcucauaacca

SEQ ID NO: 401865 - RNA, 19 nt, Artificial Sequence
  Description of Artificial Sequence: Synthetic oligonucleotide
  Sense Strand Starting at position 1059 of SEQ ID NO: 318064
uguaguguuggaggagaua

SEQ ID NO: 401866 - RNA, 19 nt, Artificial Sequence
  Description of Artificial Sequence: Synthetic oligonucleotide
  Antisense Strand to SEQ ID NO: 401865
uaucuccuccaacacuaca

SEQ ID NO: 401867 - RNA, 19 nt, Artificial Sequence
  Description of Artificial Sequence: Synthetic oligonucleotide
  Sense Strand Starting at position 1059 of SEQ ID NO: 318234
agagaaagguugucugcau

SEQ ID NO: 401868 - RNA, 19 nt, Artificial Sequence
  Description of Artificial Sequence: Synthetic oligonucleotide
  Antisense Strand to SEQ ID NO: 401867
augcagacaaccuuucucu

SEQ ID NO: 401869 - RNA, 19 nt, Artificial Sequence
  Description of Artificial Sequence: Synthetic oligonucleotide
  Sense Strand Starting at position 1059 of SEQ ID NO: 318391
cugucuucugcaguuuagu

SEQ ID NO: 401870 - RNA, 19 nt, Artificial Sequence
  Description of Artificial Sequence: Synthetic oligonucleotide
  Antisense Strand to SEQ ID NO: 401869
acuaaacugcagaagacag

SEQ ID NO: 401871 - RNA, 19 nt, Artificial Sequence
  Description of Artificial Sequence: Synthetic oligonucleotide
  Sense Strand Starting at position 1059 of SEQ ID NO: 318400
gcaguuuagucaucauuua

SEQ ID NO: 401872 - RNA, 19 nt, Artificial Sequence
  Description of Artificial Sequence: Synthetic oligonucleotide
  Antisense Strand to SEQ ID NO: 401871
uaaaugaugacuaaacugc

SEQ ID NO: 401873 - RNA, 19 nt, Artificial Sequence
  Description of Artificial Sequence: Synthetic oligonucleotide
  Sense Strand Starting at position 1059 of SEQ ID NO: 318427
cgaguauaaucuucuagau

SEQ ID NO: 401874 - RNA, 19 nt, Artificial Sequence
  Description of Artificial Sequence: Synthetic oligonucleotide
  Antisense Strand to SEQ ID NO: 401873
aucuagaagauuauacucg

SEQ ID NO: 401875 - RNA, 19 nt, Artificial Sequence
  Description of Artificial Sequence: Synthetic oligonucleotide
  Sense Strand Starting at position 1059 of SEQ ID NO: 318452
ccaggcaaagacuguuuaa

SEQ ID NO: 401876 - RNA, 19 nt, Artificial Sequence
  Description of Artificial Sequence: Synthetic oligonucleotide
  Antisense Strand to SEQ ID NO: 401875
uuaaacagucuuugccugg

SEQ ID NO: 401877 - RNA, 19 nt, Artificial Sequence
  Description of Artificial Sequence: Synthetic oligonucleotide
  Sense Strand Starting at position 1059 of SEQ ID NO: 318692
ugaauugcucuugagacuc

SEQ ID NO: 401878 - RNA, 19 nt, Artificial Sequence
  Description of Artificial Sequence: Synthetic oligonucleotide
  Antisense Strand to SEQ ID NO: 401877
gagucucaagagcaauuca

SEQ ID NO: 401879 - RNA, 19 nt, Artificial Sequence
  Description of Artificial Sequence: Synthetic oligonucleotide
  Sense Strand Starting at position 1059 of SEQ ID NO: 318733
cuuauuuggugcuccauca

SEQ ID NO: 401880 - RNA, 19 nt, Artificial Sequence
  Description of Artificial Sequence: Synthetic oligonucleotide
  Antisense Strand to SEQ ID NO: 401879
ugauggagcaccaaauaag

SEQ ID NO: 401881 - RNA, 19 nt, Artificial Sequence
  Description of Artificial Sequence: Synthetic oligonucleotide
  Sense Strand Starting at position 1059 of SEQ ID NO: 318741
gugcuccaucaauacugaa

SEQ ID NO: 401882 - RNA, 19 nt, Artificial Sequence
  Description of Artificial Sequence: Synthetic oligonucleotide
  Antisense Strand to SEQ ID NO: 401881
uucaguauugauggagcac

SEQ ID NO: 401883 - RNA, 19 nt, Artificial Sequence
  Description of Artificial Sequence: Synthetic oligonucleotide
  Sense Strand Starting at position 1059 of SEQ ID NO: 318809
cuaugccucuuguugauuu

SEQ ID NO: 401884 - RNA, 19 nt, Artificial Sequence
  Description of Artificial Sequence: Synthetic oligonucleotide
  Antisense Strand to SEQ ID NO: 401883
aaaucaacaagaggcauag

SEQ ID NO: 401885 - RNA, 19 nt, Artificial Sequence
  Description of Artificial Sequence: Synthetic oligonucleotide
  Sense Strand Starting at position 1059 of SEQ ID NO: 318813
gccucuuguugauuuggca

SEQ ID NO: 401886 - RNA, 19 nt, Artificial Sequence
  Description of Artificial Sequence: Synthetic oligonucleotide
  Antisense Strand to SEQ ID NO: 401885
ugccaaaucaacaagaggc

SEQ ID NO: 401887 - RNA, 19 nt, Artificial Sequence
  Description of Artificial Sequence: Synthetic oligonucleotide
  Sense Strand Starting at position 1059 of SEQ ID NO: 318906
cagauagagucagucacuu

SEQ ID NO: 401888 - RNA, 19 nt, Artificial Sequence
  Description of Artificial Sequence: Synthetic oligonucleotide
  Antisense Strand to SEQ ID NO: 401887
aagugacugacucuaucug

SEQ ID NO: 401889 - RNA, 19 nt, Artificial Sequence
  Description of Artificial Sequence: Synthetic oligonucleotide
  Sense Strand Starting at position 1059 of SEQ ID NO: 318918
gucacuuccugggcuauuu

SEQ ID NO: 401890 - RNA, 19 nt, Artificial Sequence
  Description of Artificial Sequence: Synthetic oligonucleotide
  Antisense Strand to SEQ ID NO: 401889
aaauagcccaggaagugac

SEQ ID NO: 401891 - RNA, 19 nt, Artificial Sequence
  Description of Artificial Sequence: Synthetic oligonucleotide
  Sense Strand Starting at position 1059 of SEQ ID NO: 319194
gcauuagagccucauaaga

SEQ ID NO: 401892 - RNA, 19 nt, Artificial Sequence
  Description of Artificial Sequence: Synthetic oligonucleotide
  Antisense Strand to SEQ ID NO: 401891
ucuuaugaggcucuaaugc

SEQ ID NO: 401893 - RNA, 19 nt, Artificial Sequence
  Description of Artificial Sequence: Synthetic oligonucleotide
  Sense Strand Starting at position 1060 of SEQ ID NO: 315283
aguaguagggucugagaaa

SEQ ID NO: 401894 - RNA, 19 nt, Artificial Sequence
  Description of Artificial Sequence: Synthetic oligonucleotide
  Antisense Strand to SEQ ID NO: 401893
uuucucagacccuacuacu

SEQ ID NO: 401895 - RNA, 19 nt, Artificial Sequence
  Description of Artificial Sequence: Synthetic oligonucleotide
  Sense Strand Starting at position 1060 of SEQ ID NO: 315364
uuccaugugucacccuaau

SEQ ID NO: 401896 - RNA, 19 nt, Artificial Sequence
  Description of Artificial Sequence: Synthetic oligonucleotide
  Antisense Strand to SEQ ID NO: 401895
auuagggugacacauggaa

SEQ ID NO: 401897 - RNA, 19 nt, Artificial Sequence
  Description of Artificial Sequence: Synthetic oligonucleotide
  Sense Strand Starting at position 1060 of SEQ ID NO: 315421
ggccauaucagcuauguga

SEQ ID NO: 401898 - RNA, 19 nt, Artificial Sequence
  Description of Artificial Sequence: Synthetic oligonucleotide
  Antisense Strand to SEQ ID NO: 401897
ucacauagcugauauggcc

SEQ ID NO: 401899 - RNA, 19 nt, Artificial Sequence
  Description of Artificial Sequence: Synthetic oligonucleotide
  Sense Strand Starting at position 1060 of SEQ ID NO: 315423
ccauaucagcuaugugaau

SEQ ID NO: 401900 - RNA, 19 nt, Artificial Sequence
  Description of Artificial Sequence: Synthetic oligonucleotide
  Antisense Strand to SEQ ID NO: 401899
auucacauagcugauaugg

SEQ ID NO: 401901 - RNA, 19 nt, Artificial Sequence
  Description of Artificial Sequence: Synthetic oligonucleotide
  Sense Strand Starting at position 1060 of SEQ ID NO: 315481
uccuuauagugguuaaguu

SEQ ID NO: 401902 - RNA, 19 nt, Artificial Sequence
  Description of Artificial Sequence: Synthetic oligonucleotide
  Antisense Strand to SEQ ID NO: 401901
aacuuaaccacuauaagga

SEQ ID NO: 401903 - RNA, 19 nt, Artificial Sequence
  Description of Artificial Sequence: Synthetic oligonucleotide
  Sense Strand Starting at position 1060 of SEQ ID NO: 315482
ccuuauagugguuaaguuu

SEQ ID NO: 401904 - RNA, 19 nt, Artificial Sequence
  Description of Artificial Sequence: Synthetic oligonucleotide
  Antisense Strand to SEQ ID NO: 401903
aaacuuaaccacuauaagg

SEQ ID NO: 401905 - RNA, 19 nt, Artificial Sequence
  Description of Artificial Sequence: Synthetic oligonucleotide
  Sense Strand Starting at position 1060 of SEQ ID NO: 315598
ugaucuaucugucuauaua

SEQ ID NO: 401906 - RNA, 19 nt, Artificial Sequence
  Description of Artificial Sequence: Synthetic oligonucleotide
  Antisense Strand to SEQ ID NO: 401905
uauauagacagauagauca

SEQ ID NO: 401907 - RNA, 19 nt, Artificial Sequence
  Description of Artificial Sequence: Synthetic oligonucleotide
  Sense Strand Starting at position 1060 of SEQ ID NO: 315614
auauuucuaugguauguga

SEQ ID NO: 401908 - RNA, 19 nt, Artificial Sequence
  Description of Artificial Sequence: Synthetic oligonucleotide
  Antisense Strand to SEQ ID NO: 401907
ucacauaccauagaaauau

SEQ ID NO: 401909 - RNA, 19 nt, Artificial Sequence
  Description of Artificial Sequence: Synthetic oligonucleotide
  Sense Strand Starting at position 1060 of SEQ ID NO: 315618
uucuaugguaugugagagu

SEQ ID NO: 401910 - RNA, 19 nt, Artificial Sequence
  Description of Artificial Sequence: Synthetic oligonucleotide
  Antisense Strand to SEQ ID NO: 401909
acucucacauaccauagaa

SEQ ID NO: 401911 - RNA, 19 nt, Artificial Sequence
  Description of Artificial Sequence: Synthetic oligonucleotide
  Sense Strand Starting at position 1060 of SEQ ID NO: 315706
acuuuaaucugggaagaga

SEQ ID NO: 401912 - RNA, 19 nt, Artificial Sequence
  Description of Artificial Sequence: Synthetic oligonucleotide
  Antisense Strand to SEQ ID NO: 401911
ucucuucccagauuaaagu

SEQ ID NO: 401913 - RNA, 19 nt, Artificial Sequence
  Description of Artificial Sequence: Synthetic oligonucleotide
  Sense Strand Starting at position 1060 of SEQ ID NO: 315750
aaagaaauuugggaugcau

SEQ ID NO: 401914 - RNA, 19 nt, Artificial Sequence
  Description of Artificial Sequence: Synthetic oligonucleotide
  Antisense Strand to SEQ ID NO: 401913
augcaucccaaauuucuuu

SEQ ID NO: 401915 - RNA, 19 nt, Artificial Sequence
  Description of Artificial Sequence: Synthetic oligonucleotide
  Sense Strand Starting at position 1060 of SEQ ID NO: 315843
uuuauugacccugguuauu

SEQ ID NO: 401916 - RNA, 19 nt, Artificial Sequence
  Description of Artificial Sequence: Synthetic oligonucleotide
  Antisense Strand to SEQ ID NO: 401915
aauaaccagggucaauaaa

SEQ ID NO: 401917 - RNA, 19 nt, Artificial Sequence
  Description of Artificial Sequence: Synthetic oligonucleotide
  Sense Strand Starting at position 1060 of SEQ ID NO: 315963
agccauguaaucugggaac

SEQ ID NO: 401918 - RNA, 19 nt, Artificial Sequence
  Description of Artificial Sequence: Synthetic oligonucleotide
  Antisense Strand to SEQ ID NO: 401917
guucccagauuacauggcu

SEQ ID NO: 401919 - RNA, 19 nt, Artificial Sequence
  Description of Artificial Sequence: Synthetic oligonucleotide
  Sense Strand Starting at position 1060 of SEQ ID NO: 315965
ccauguaaucugggaaccu

SEQ ID NO: 401920 - RNA, 19 nt, Artificial Sequence
  Description of Artificial Sequence: Synthetic oligonucleotide
  Antisense Strand to SEQ ID NO: 401919
agguucccagauuacaugg

SEQ ID NO: 401921 - RNA, 19 nt, Artificial Sequence
  Description of Artificial Sequence: Synthetic oligonucleotide
  Sense Strand Starting at position 1060 of SEQ ID NO: 315974
cugggaaccucuguaacaa

SEQ ID NO: 401922 - RNA, 19 nt, Artificial Sequence
  Description of Artificial Sequence: Synthetic oligonucleotide
  Antisense Strand to SEQ ID NO: 401921
uuguuacagagguucccag

SEQ ID NO: 401923 - RNA, 19 nt, Artificial Sequence
  Description of Artificial Sequence: Synthetic oligonucleotide
  Sense Strand Starting at position 1060 of SEQ ID NO: 316329
ggacacaaaugagaaacua

SEQ ID NO: 401924 - RNA, 19 nt, Artificial Sequence
  Description of Artificial Sequence: Synthetic oligonucleotide
  Antisense Strand to SEQ ID NO: 401923
uaguuucucauuugugucc

SEQ ID NO: 401925 - RNA, 19 nt, Artificial Sequence
  Description of Artificial Sequence: Synthetic oligonucleotide
  Sense Strand Starting at position 1060 of SEQ ID NO: 316359
ugagguacaccauauguuu

SEQ ID NO: 401926 - RNA, 19 nt, Artificial Sequence
  Description of Artificial Sequence: Synthetic oligonucleotide
  Antisense Strand to SEQ ID NO: 401925
aaacauaugguguaccuca

SEQ ID NO: 401927 - RNA, 19 nt, Artificial Sequence
  Description of Artificial Sequence: Synthetic oligonucleotide
  Sense Strand Starting at position 1060 of SEQ ID NO: 316375
uuuccauuguaggcugaau

SEQ ID NO: 401928 - RNA, 19 nt, Artificial Sequence
  Description of Artificial Sequence: Synthetic oligonucleotide
  Antisense Strand to SEQ ID NO: 401927
auucagccuacaauggaaa

SEQ ID NO: 401929 - RNA, 19 nt, Artificial Sequence
  Description of Artificial Sequence: Synthetic oligonucleotide
  Sense Strand Starting at position 1060 of SEQ ID NO: 316394
ccaggucuuuguuccaaua

SEQ ID NO: 401930 - RNA, 19 nt, Artificial Sequence
  Description of Artificial Sequence: Synthetic oligonucleotide
  Antisense Strand to SEQ ID NO: 401929
uauuggaacaaagaccugg

SEQ ID NO: 401931 - RNA, 19 nt, Artificial Sequence
  Description of Artificial Sequence: Synthetic oligonucleotide
  Sense Strand Starting at position 1060 of SEQ ID NO: 316564
cuugcaauucuaggaaacu

SEQ ID NO: 401932 - RNA, 19 nt, Artificial Sequence
  Description of Artificial Sequence: Synthetic oligonucleotide
  Antisense Strand to SEQ ID NO: 401931
aguuuccuagaauugcaag

SEQ ID NO: 401933 - RNA, 19 nt, Artificial Sequence
  Description of Artificial Sequence: Synthetic oligonucleotide
  Sense Strand Starting at position 1060 of SEQ ID NO: 316617
aggacaaucugauaaacca

SEQ ID NO: 401934 - RNA, 19 nt, Artificial Sequence
  Description of Artificial Sequence: Synthetic oligonucleotide
  Antisense Strand to SEQ ID NO: 401933
ugguuuaucagauuguccu

SEQ ID NO: 401935 - RNA, 19 nt, Artificial Sequence
  Description of Artificial Sequence: Synthetic oligonucleotide
  Sense Strand Starting at position 1060 of SEQ ID NO: 317805
cuccuacuauuggcuagaa

SEQ ID NO: 401936 - RNA, 19 nt, Artificial Sequence
  Description of Artificial Sequence: Synthetic oligonucleotide
  Antisense Strand to SEQ ID NO: 401935
uucuagccaauaguaggag

SEQ ID NO: 401937 - RNA, 19 nt, Artificial Sequence
  Description of Artificial Sequence: Synthetic oligonucleotide
  Sense Strand Starting at position 1060 of SEQ ID NO: 317807
ccuacuauuggcuagaagu

SEQ ID NO: 401938 - RNA, 19 nt, Artificial Sequence
  Description of Artificial Sequence: Synthetic oligonucleotide
  Antisense Strand to SEQ ID NO: 401937
acuucuagccaauaguagg

SEQ ID NO: 401939 - RNA, 19 nt, Artificial Sequence
  Description of Artificial Sequence: Synthetic oligonucleotide
  Sense Strand Starting at position 1060 of SEQ ID NO: 317809
uacuauuggcuagaagugu

SEQ ID NO: 401940 - RNA, 19 nt, Artificial Sequence
  Description of Artificial Sequence: Synthetic oligonucleotide
  Antisense Strand to SEQ ID NO: 401939
acacuucuagccaauagua

SEQ ID NO: 401941 - RNA, 19 nt, Artificial Sequence
  Description of Artificial Sequence: Synthetic oligonucleotide
  Sense Strand Starting at position 1060 of SEQ ID NO: 318009
agugaauugauccgggagu

SEQ ID NO: 401942 - RNA, 19 nt, Artificial Sequence
  Description of Artificial Sequence: Synthetic oligonucleotide
  Antisense Strand to SEQ ID NO: 401941
acucccggaucaauucacu

SEQ ID NO: 401943 - RNA, 19 nt, Artificial Sequence
  Description of Artificial Sequence: Synthetic oligonucleotide
  Sense Strand Starting at position 1060 of SEQ ID NO: 318011
ugaauugauccgggaguug

SEQ ID NO: 401944 - RNA, 19 nt, Artificial Sequence
  Description of Artificial Sequence: Synthetic oligonucleotide
  Antisense Strand to SEQ ID NO: 401943
caacucccggaucaauuca

SEQ ID NO: 401945 - RNA, 19 nt, Artificial Sequence
  Description of Artificial Sequence: Synthetic oligonucleotide
  Sense Strand Starting at position 1060 of SEQ ID NO: 318082
guagcuguucugucccagu

SEQ ID NO: 401946 - RNA, 19 nt, Artificial Sequence
  Description of Artificial Sequence: Synthetic oligonucleotide
  Antisense Strand to SEQ ID NO: 401945
acugggacagaacagcuac

SEQ ID NO: 401947 - RNA, 19 nt, Artificial Sequence
  Description of Artificial Sequence: Synthetic oligonucleotide
  Sense Strand Starting at position 1060 of SEQ ID NO: 318244
ggcguaaagcggguuugua

SEQ ID NO: 401948 - RNA, 19 nt, Artificial Sequence
  Description of Artificial Sequence: Synthetic oligonucleotide
  Antisense Strand to SEQ ID NO: 401947
uacaaacccgcuuuacgcc

SEQ ID NO: 401949 - RNA, 19 nt, Artificial Sequence
  Description of Artificial Sequence: Synthetic oligonucleotide
  Sense Strand Starting at position 1060 of SEQ ID NO: 318245
gcguaaagcggguuuguaa

SEQ ID NO: 401950 - RNA, 19 nt, Artificial Sequence
  Description of Artificial Sequence: Synthetic oligonucleotide
  Antisense Strand to SEQ ID NO: 401949
uuacaaacccgcuuuacgc

SEQ ID NO: 401951 - RNA, 19 nt, Artificial Sequence
  Description of Artificial Sequence: Synthetic oligonucleotide
  Sense Strand Starting at position 1060 of SEQ ID NO: 318296
caggaagucuccucuaggu

SEQ ID NO: 401952 - RNA, 19 nt, Artificial Sequence
  Description of Artificial Sequence: Synthetic oligonucleotide
  Antisense Strand to SEQ ID NO: 401951
accuagaggagacuuccug

SEQ ID NO: 401953 - RNA, 19 nt, Artificial Sequence
  Description of Artificial Sequence: Synthetic oligonucleotide
  Sense Strand Starting at position 1060 of SEQ ID NO: 318442
cugcuuuguaaguaagaga

SEQ ID NO: 401954 - RNA, 19 nt, Artificial Sequence
  Description of Artificial Sequence: Synthetic oligonucleotide
  Antisense Strand to SEQ ID NO: 401953
ucucuuacuuacaaagcag

SEQ ID NO: 401955 - RNA, 19 nt, Artificial Sequence
  Description of Artificial Sequence: Synthetic oligonucleotide
  Sense Strand Starting at position 1060 of SEQ ID NO: 318514
gguuaugcccuuugaggga

SEQ ID NO: 401956 - RNA, 19 nt, Artificial Sequence
  Description of Artificial Sequence: Synthetic oligonucleotide
  Antisense Strand to SEQ ID NO: 401955
ucccucaaagggcauaacc

SEQ ID NO: 401957 - RNA, 19 nt, Artificial Sequence
  Description of Artificial Sequence: Synthetic oligonucleotide
  Sense Strand Starting at position 1060 of SEQ ID NO: 318580
ucaguuccaguuuaaugau

SEQ ID NO: 401958 - RNA, 19 nt, Artificial Sequence
  Description of Artificial Sequence: Synthetic oligonucleotide
  Antisense Strand to SEQ ID NO: 401957
aucauuaaacuggaacuga

SEQ ID NO: 401959 - RNA, 19 nt, Artificial Sequence
  Description of Artificial Sequence: Synthetic oligonucleotide
  Sense Strand Starting at position 1060 of SEQ ID NO: 318651
aggugucauaccuaaggua

SEQ ID NO: 401960 - RNA, 19 nt, Artificial Sequence
  Description of Artificial Sequence: Synthetic oligonucleotide
  Antisense Strand to SEQ ID NO: 401959
uaccuuagguaugacaccu

SEQ ID NO: 401961 - RNA, 19 nt, Artificial Sequence
  Description of Artificial Sequence: Synthetic oligonucleotide
  Sense Strand Starting at position 1060 of SEQ ID NO: 318795
cgaguccagcuuuagagua

SEQ ID NO: 401962 - RNA, 19 nt, Artificial Sequence
  Description of Artificial Sequence: Synthetic oligonucleotide
  Antisense Strand to SEQ ID NO: 401961
uacucuaaagcuggacucg

SEQ ID NO: 401963 - RNA, 19 nt, Artificial Sequence
  Description of Artificial Sequence: Synthetic oligonucleotide
  Sense Strand Starting at position 1060 of SEQ ID NO: 318883
cuaagaagccauugugaga

SEQ ID NO: 401964 - RNA, 19 nt, Artificial Sequence
  Description of Artificial Sequence: Synthetic oligonucleotide
  Antisense Strand to SEQ ID NO: 401963
ucucacaauggcuucuuag

SEQ ID NO: 401965 - RNA, 19 nt, Artificial Sequence
  Description of Artificial Sequence: Synthetic oligonucleotide
  Sense Strand Starting at position 1060 of SEQ ID NO: 318911
guuucuugaaccggaguga

SEQ ID NO: 401966 - RNA, 19 nt, Artificial Sequence
  Description of Artificial Sequence: Synthetic oligonucleotide
  Antisense Strand to SEQ ID NO: 401965
ucacuccgguucaagaaac

SEQ ID NO: 401967 - RNA, 19 nt, Artificial Sequence
  Description of Artificial Sequence: Synthetic oligonucleotide
  Sense Strand Starting at position 1060 of SEQ ID NO: 318912
uuucuugaaccggagugaa

SEQ ID NO: 401968 - RNA, 19 nt, Artificial Sequence
  Description of Artificial Sequence: Synthetic oligonucleotide
  Antisense Strand to SEQ ID NO: 401967
uucacuccgguucaagaaa

SEQ ID NO: 401969 - RNA, 19 nt, Artificial Sequence
  Description of Artificial Sequence: Synthetic oligonucleotide
  Sense Strand Starting at position 1060 of SEQ ID NO: 318915
cuugaaccggagugaaauu

SEQ ID NO: 401970 - RNA, 19 nt, Artificial Sequence
  Description of Artificial Sequence: Synthetic oligonucleotide
  Antisense Strand to SEQ ID NO: 401969
aauuucacuccgguucaag

SEQ ID NO: 401971 - RNA, 19 nt, Artificial Sequence
  Description of Artificial Sequence: Synthetic oligonucleotide
  Sense Strand Starting at position 1060 of SEQ ID NO: 319013
ggguguauuaaaugauaga

SEQ ID NO: 401972 - RNA, 19 nt, Artificial Sequence
  Description of Artificial Sequence: Synthetic oligonucleotide
  Antisense Strand to SEQ ID NO: 401971
ucuaucauuuaauacaccc

SEQ ID NO: 401973 - RNA, 19 nt, Artificial Sequence
  Description of Artificial Sequence: Synthetic oligonucleotide
  Sense Strand Starting at position 1061 of SEQ ID NO: 315264
uaauaaaggcucggaaaga

SEQ ID NO: 401974 - RNA, 19 nt, Artificial Sequence
  Description of Artificial Sequence: Synthetic oligonucleotide
  Antisense Strand to SEQ ID NO: 401973
ucuuuccgagccuuuauua

SEQ ID NO: 401975 - RNA, 19 nt, Artificial Sequence
  Description of Artificial Sequence: Synthetic oligonucleotide
  Sense Strand Starting at position 1061 of SEQ ID NO: 315362
aguaguagggucugagaaa

SEQ ID NO: 401976 - RNA, 19 nt, Artificial Sequence
  Description of Artificial Sequence: Synthetic oligonucleotide
  Antisense Strand to SEQ ID NO: 401975
uuucucagacccuacuacu

SEQ ID NO: 401977 - RNA, 19 nt, Artificial Sequence
  Description of Artificial Sequence: Synthetic oligonucleotide
  Sense Strand Starting at position 1061 of SEQ ID NO: 315443
uuccaugugucacccuaau

SEQ ID NO: 401978 - RNA, 19 nt, Artificial Sequence
  Description of Artificial Sequence: Synthetic oligonucleotide
  Antisense Strand to SEQ ID NO: 401977
auuagggugacacauggaa

SEQ ID NO: 401979 - RNA, 19 nt, Artificial Sequence
  Description of Artificial Sequence: Synthetic oligonucleotide
  Sense Strand Starting at position 1061 of SEQ ID NO: 315500
ggccauaucagcuauguga

SEQ ID NO: 401980 - RNA, 19 nt, Artificial Sequence
  Description of Artificial Sequence: Synthetic oligonucleotide
  Antisense Strand to SEQ ID NO: 401979
ucacauagcugauauggcc

SEQ ID NO: 401981 - RNA, 19 nt, Artificial Sequence
  Description of Artificial Sequence: Synthetic oligonucleotide
  Sense Strand Starting at position 1061 of SEQ ID NO: 315502
ccauaucagcuaugugaau

SEQ ID NO: 401982 - RNA, 19 nt, Artificial Sequence
  Description of Artificial Sequence: Synthetic oligonucleotide
  Antisense Strand to SEQ ID NO: 401981
auucacauagcugauaugg

SEQ ID NO: 401983 - RNA, 19 nt, Artificial Sequence
  Description of Artificial Sequence: Synthetic oligonucleotide
  Sense Strand Starting at position 1061 of SEQ ID NO: 315561
ccuuauagugguuaaguuu

SEQ ID NO: 401984 - RNA, 19 nt, Artificial Sequence
  Description of Artificial Sequence: Synthetic oligonucleotide
  Antisense Strand to SEQ ID NO: 401983
aaacuuaaccacuauaagg

SEQ ID NO: 401985 - RNA, 19 nt, Artificial Sequence
  Description of Artificial Sequence: Synthetic oligonucleotide
  Sense Strand Starting at position 1061 of SEQ ID NO: 315677
ugaucuaucugucuauaua

SEQ ID NO: 401986 - RNA, 19 nt, Artificial Sequence
  Description of Artificial Sequence: Synthetic oligonucleotide
  Antisense Strand to SEQ ID NO: 401985
uauauagacagauagauca

SEQ ID NO: 401987 - RNA, 19 nt, Artificial Sequence
  Description of Artificial Sequence: Synthetic oligonucleotide
  Sense Strand Starting at position 1061 of SEQ ID NO: 315693
auauuucuaugguauguga

SEQ ID NO: 401988 - RNA, 19 nt, Artificial Sequence
  Description of Artificial Sequence: Synthetic oligonucleotide
  Antisense Strand to SEQ ID NO: 401987
ucacauaccauagaaauau

SEQ ID NO: 401989 - RNA, 19 nt, Artificial Sequence
  Description of Artificial Sequence: Synthetic oligonucleotide
  Sense Strand Starting at position 1061 of SEQ ID NO: 315697
uucuaugguaugugagagu

SEQ ID NO: 401990 - RNA, 19 nt, Artificial Sequence
  Description of Artificial Sequence: Synthetic oligonucleotide
  Antisense Strand to SEQ ID NO: 401989
acucucacauaccauagaa

SEQ ID NO: 401991 - RNA, 19 nt, Artificial Sequence
  Description of Artificial Sequence: Synthetic oligonucleotide
  Sense Strand Starting at position 1061 of SEQ ID NO: 315785
acuuuaaucugggaagaga

SEQ ID NO: 401992 - RNA, 19 nt, Artificial Sequence
  Description of Artificial Sequence: Synthetic oligonucleotide
  Antisense Strand to SEQ ID NO: 401991
ucucuucccagauuaaagu

SEQ ID NO: 401993 - RNA, 19 nt, Artificial Sequence
  Description of Artificial Sequence: Synthetic oligonucleotide
  Sense Strand Starting at position 1061 of SEQ ID NO: 315829
aaagaaauuugggaugcau

SEQ ID NO: 401994 - RNA, 19 nt, Artificial Sequence
  Description of Artificial Sequence: Synthetic oligonucleotide
  Antisense Strand to SEQ ID NO: 401993
augcaucccaaauuucuuu

SEQ ID NO: 401995 - RNA, 19 nt, Artificial Sequence
  Description of Artificial Sequence: Synthetic oligonucleotide
  Sense Strand Starting at position 1061 of SEQ ID NO: 315922
uuuauugacccugguuauu

SEQ ID NO: 401996 - RNA, 19 nt, Artificial Sequence
  Description of Artificial Sequence: Synthetic oligonucleotide
  Antisense Strand to SEQ ID NO: 401995
aauaaccagggucaauaaa

SEQ ID NO: 401997 - RNA, 19 nt, Artificial Sequence
  Description of Artificial Sequence: Synthetic oligonucleotide
  Sense Strand Starting at position 1061 of SEQ ID NO: 316042
agccauguaaucugggaac

SEQ ID NO: 401998 - RNA, 19 nt, Artificial Sequence
  Description of Artificial Sequence: Synthetic oligonucleotide
  Antisense Strand to SEQ ID NO: 401997
guucccagauuacauggcu

SEQ ID NO: 401999 - RNA, 19 nt, Artificial Sequence
  Description of Artificial Sequence: Synthetic oligonucleotide
  Sense Strand Starting at position 1061 of SEQ ID NO: 316044
ccauguaaucugggaaccu

SEQ ID NO: 402000 - RNA, 19 nt, Artificial Sequence
  Description of Artificial Sequence: Synthetic oligonucleotide
  Antisense Strand to SEQ ID NO: 401999
agguucccagauuacaugg

SEQ ID NO: 402001 - RNA, 19 nt, Artificial Sequence
  Description of Artificial Sequence: Synthetic oligonucleotide
  Sense Strand Starting at position 1061 of SEQ ID NO: 316053
cugggaaccucuguaacaa

SEQ ID NO: 402002 - RNA, 19 nt, Artificial Sequence
  Description of Artificial Sequence: Synthetic oligonucleotide
  Antisense Strand to SEQ ID NO: 402001
uuguuacagagguucccag

SEQ ID NO: 402003 - RNA, 19 nt, Artificial Sequence
  Description of Artificial Sequence: Synthetic oligonucleotide
  Sense Strand Starting at position 1061 of SEQ ID NO: 316408
ggacacaaaugagaaacua

SEQ ID NO: 402004 - RNA, 19 nt, Artificial Sequence
  Description of Artificial Sequence: Synthetic oligonucleotide
  Antisense Strand to SEQ ID NO: 402003
uaguuucucauuugugucc

SEQ ID NO: 402005 - RNA, 19 nt, Artificial Sequence
  Description of Artificial Sequence: Synthetic oligonucleotide
  Sense Strand Starting at position 1061 of SEQ ID NO: 316438
ugagguacaccauauguuu

SEQ ID NO: 402006 - RNA, 19 nt, Artificial Sequence
  Description of Artificial Sequence: Synthetic oligonucleotide
  Antisense Strand to SEQ ID NO: 402005
aaacauaugguguaccuca

SEQ ID NO: 402007 - RNA, 19 nt, Artificial Sequence
  Description of Artificial Sequence: Synthetic oligonucleotide
  Sense Strand Starting at position 1061 of SEQ ID NO: 316454
uuuccauuguaggcugaau

SEQ ID NO: 402008 - RNA, 19 nt, Artificial Sequence
  Description of Artificial Sequence: Synthetic oligonucleotide
  Antisense Strand to SEQ ID NO: 402007
auucagccuacaauggaaa

SEQ ID NO: 402009 - RNA, 19 nt, Artificial Sequence
  Description of Artificial Sequence: Synthetic oligonucleotide
  Sense Strand Starting at position 1061 of SEQ ID NO: 316473
ccaggucuuuguuccaaua

SEQ ID NO: 402010 - RNA, 19 nt, Artificial Sequence
  Description of Artificial Sequence: Synthetic oligonucleotide
  Antisense Strand to SEQ ID NO: 402009
uauuggaacaaagaccugg

SEQ ID NO: 402011 - RNA, 19 nt, Artificial Sequence
  Description of Artificial Sequence: Synthetic oligonucleotide
  Sense Strand Starting at position 1061 of SEQ ID NO: 316643
cuugcaauucuaggaaacu

SEQ ID NO: 402012 - RNA, 19 nt, Artificial Sequence
  Description of Artificial Sequence: Synthetic oligonucleotide
  Antisense Strand to SEQ ID NO: 402011
aguuuccuagaauugcaag

SEQ ID NO: 402013 - RNA, 19 nt, Artificial Sequence
  Description of Artificial Sequence: Synthetic oligonucleotide
  Sense Strand Starting at position 1061 of SEQ ID NO: 316696
aggacaaucugauaaacca

SEQ ID NO: 402014 - RNA, 19 nt, Artificial Sequence
  Description of Artificial Sequence: Synthetic oligonucleotide
  Antisense Strand to SEQ ID NO: 402013
ugguuuaucagauuguccu

SEQ ID NO: 402015 - RNA, 19 nt, Artificial Sequence
  Description of Artificial Sequence: Synthetic oligonucleotide
  Sense Strand Starting at position 1061 of SEQ ID NO: 317884
cuccuacuauuggcuagaa

SEQ ID NO: 402016 - RNA, 19 nt, Artificial Sequence
  Description of Artificial Sequence: Synthetic oligonucleotide
  Antisense Strand to SEQ ID NO: 402015
uucuagccaauaguaggag

SEQ ID NO: 402017 - RNA, 19 nt, Artificial Sequence
  Description of Artificial Sequence: Synthetic oligonucleotide
  Sense Strand Starting at position 1061 of SEQ ID NO: 317886
ccuacuauuggcuagaagu

SEQ ID NO: 402018 - RNA, 19 nt, Artificial Sequence
  Description of Artificial Sequence: Synthetic oligonucleotide
  Antisense Strand to SEQ ID NO: 402017
acuucuagccaauaguagg

SEQ ID NO: 402019 - RNA, 19 nt, Artificial Sequence
  Description of Artificial Sequence: Synthetic oligonucleotide
  Sense Strand Starting at position 1061 of SEQ ID NO: 317888
uacuauuggcuagaagugu

SEQ ID NO: 402020 - RNA, 19 nt, Artificial Sequence
  Description of Artificial Sequence: Synthetic oligonucleotide
  Antisense Strand to SEQ ID NO: 402019
acacuucuagccaauagua

SEQ ID NO: 402021 - RNA, 19 nt, Artificial Sequence
  Description of Artificial Sequence: Synthetic oligonucleotide
  Sense Strand Starting at position 1061 of SEQ ID NO: 318088
agugaauugauccgggagu

SEQ ID NO: 402022 - RNA, 19 nt, Artificial Sequence
  Description of Artificial Sequence: Synthetic oligonucleotide
  Antisense Strand to SEQ ID NO: 402021
acucccggaucaauucacu

SEQ ID NO: 402023 - RNA, 19 nt, Artificial Sequence
  Description of Artificial Sequence: Synthetic oligonucleotide
  Sense Strand Starting at position 1061 of SEQ ID NO: 318090
ugaauugauccgggaguug

SEQ ID NO: 402024 - RNA, 19 nt, Artificial Sequence
  Description of Artificial Sequence: Synthetic oligonucleotide
  Antisense Strand to SEQ ID NO: 402023
caacucccggaucaauuca

SEQ ID NO: 402025 - RNA, 19 nt, Artificial Sequence
  Description of Artificial Sequence: Synthetic oligonucleotide
  Sense Strand Starting at position 1061 of SEQ ID NO: 318161
guagcuguucugucccagu

SEQ ID NO: 402026 - RNA, 19 nt, Artificial Sequence
  Description of Artificial Sequence: Synthetic oligonucleotide
  Antisense Strand to SEQ ID NO: 402025
acugggacagaacagcuac

SEQ ID NO: 402027 - RNA, 19 nt, Artificial Sequence
  Description of Artificial Sequence: Synthetic oligonucleotide
  Sense Strand Starting at position 1061 of SEQ ID NO: 318323
ggcguaaagcggguuugua

SEQ ID NO: 402028 - RNA, 19 nt, Artificial Sequence
  Description of Artificial Sequence: Synthetic oligonucleotide
  Antisense Strand to SEQ ID NO: 402027
uacaaacccgcuuuacgcc

SEQ ID NO: 402029 - RNA, 19 nt, Artificial Sequence
  Description of Artificial Sequence: Synthetic oligonucleotide
  Sense Strand Starting at position 1061 of SEQ ID NO: 318324
gcguaaagcggguuuguaa

SEQ ID NO: 402030 - RNA, 19 nt, Artificial Sequence
  Description of Artificial Sequence: Synthetic oligonucleotide
  Antisense Strand to SEQ ID NO: 402029
uuacaaacccgcuuuacgc

SEQ ID NO: 402031 - RNA, 19 nt, Artificial Sequence
  Description of Artificial Sequence: Synthetic oligonucleotide
  Sense Strand Starting at position 1061 of SEQ ID NO: 318375
caggaagucuccucuaggu

SEQ ID NO: 402032 - RNA, 19 nt, Artificial Sequence
  Description of Artificial Sequence: Synthetic oligonucleotide
  Antisense Strand to SEQ ID NO: 402031
accuagaggagacuuccug

SEQ ID NO: 402033 - RNA, 19 nt, Artificial Sequence
  Description of Artificial Sequence: Synthetic oligonucleotide
  Sense Strand Starting at position 1061 of SEQ ID NO: 318521
cugcuuuguaaguaagaga

SEQ ID NO: 402034 - RNA, 19 nt, Artificial Sequence
  Description of Artificial Sequence: Synthetic oligonucleotide
  Antisense Strand to SEQ ID NO: 402033
ucucuuacuuacaaagcag

SEQ ID NO: 402035 - RNA, 19 nt, Artificial Sequence
  Description of Artificial Sequence: Synthetic oligonucleotide
  Sense Strand Starting at position 1061 of SEQ ID NO: 318593
gguuaugcccuuugaggga

SEQ ID NO: 402036 - RNA, 19 nt, Artificial Sequence
  Description of Artificial Sequence: Synthetic oligonucleotide
  Antisense Strand to SEQ ID NO: 402035
ucccucaaagggcauaacc

SEQ ID NO: 402037 - RNA, 19 nt, Artificial Sequence
  Description of Artificial Sequence: Synthetic oligonucleotide
  Sense Strand Starting at position 1061 of SEQ ID NO: 318659
ucaguuccaguuuaaugau

SEQ ID NO: 402038 - RNA, 19 nt, Artificial Sequence
  Description of Artificial Sequence: Synthetic oligonucleotide
  Antisense Strand to SEQ ID NO: 402037
aucauuaaacuggaacuga

SEQ ID NO: 402039 - RNA, 19 nt, Artificial Sequence
  Description of Artificial Sequence: Synthetic oligonucleotide
  Sense Strand Starting at position 1061 of SEQ ID NO: 318730
aggugucauaccuaaggua

SEQ ID NO: 402040 - RNA, 19 nt, Artificial Sequence
  Description of Artificial Sequence: Synthetic oligonucleotide
  Antisense Strand to SEQ ID NO: 402039
uaccuuagguaugacaccu

SEQ ID NO: 402041 - RNA, 19 nt, Artificial Sequence
  Description of Artificial Sequence: Synthetic oligonucleotide
  Sense Strand Starting at position 1061 of SEQ ID NO: 318874
cgaguccagcuuuagagua

SEQ ID NO: 402042 - RNA, 19 nt, Artificial Sequence
  Description of Artificial Sequence: Synthetic oligonucleotide
  Antisense Strand to SEQ ID NO: 402041
uacucuaaagcuggacucg

SEQ ID NO: 402043 - RNA, 19 nt, Artificial Sequence
  Description of Artificial Sequence: Synthetic oligonucleotide
  Sense Strand Starting at position 1061 of SEQ ID NO: 318962
cuaagaagccauugugaga

SEQ ID NO: 402044 - RNA, 19 nt, Artificial Sequence
  Description of Artificial Sequence: Synthetic oligonucleotide
  Antisense Strand to SEQ ID NO: 402043
ucucacaauggcuucuuag

SEQ ID NO: 402045 - RNA, 19 nt, Artificial Sequence
  Description of Artificial Sequence: Synthetic oligonucleotide
  Sense Strand Starting at position 1061 of SEQ ID NO: 318990
guuucuugaaccggaguga

SEQ ID NO: 402046 - RNA, 19 nt, Artificial Sequence
  Description of Artificial Sequence: Synthetic oligonucleotide
  Antisense Strand to SEQ ID NO: 402045
ucacuccgguucaagaaac

SEQ ID NO: 402047 - RNA, 19 nt, Artificial Sequence
  Description of Artificial Sequence: Synthetic oligonucleotide
  Sense Strand Starting at position 1061 of SEQ ID NO: 318991
uuucuugaaccggagugaa

SEQ ID NO: 402048 - RNA, 19 nt, Artificial Sequence
  Description of Artificial Sequence: Synthetic oligonucleotide
  Antisense Strand to SEQ ID NO: 402047
uucacuccgguucaagaaa

SEQ ID NO: 402049 - RNA, 19 nt, Artificial Sequence
  Description of Artificial Sequence: Synthetic oligonucleotide
  Sense Strand Starting at position 1061 of SEQ ID NO: 318994
cuugaaccggagugaaauu

SEQ ID NO: 402050 - RNA, 19 nt, Artificial Sequence
  Description of Artificial Sequence: Synthetic oligonucleotide
  Antisense Strand to SEQ ID NO: 402049
aauuucacuccgguucaag

SEQ ID NO: 402051 - RNA, 19 nt, Artificial Sequence
  Description of Artificial Sequence: Synthetic oligonucleotide
  Sense Strand Starting at position 1061 of SEQ ID NO: 319092
ggguguauuaaaugauaga

SEQ ID NO: 402052 - RNA, 19 nt, Artificial Sequence
  Description of Artificial Sequence: Synthetic oligonucleotide
  Antisense Strand to SEQ ID NO: 402051
ucuaucauuuaauacaccc

SEQ ID NO: 402053 - RNA, 19 nt, Artificial Sequence
  Description of Artificial Sequence: Synthetic oligonucleotide
  Sense Strand Starting at position 1062 of SEQ ID NO: 315277
gguuaagugggauaacugu

SEQ ID NO: 402054 - RNA, 19 nt, Artificial Sequence
  Description of Artificial Sequence: Synthetic oligonucleotide
  Antisense Strand to SEQ ID NO: 402053
acaguuaucccacuuaacc

SEQ ID NO: 402055 - RNA, 19 nt, Artificial Sequence
  Description of Artificial Sequence: Synthetic oligonucleotide
  Sense Strand Starting at position 1062 of SEQ ID NO: 315283
gugggauaacuguaacucu

SEQ ID NO: 402056 - RNA, 19 nt, Artificial Sequence
  Description of Artificial Sequence: Synthetic oligonucleotide
  Antisense Strand to SEQ ID NO: 402055
agaguuacaguuaucccac

SEQ ID NO: 402057 - RNA, 19 nt, Artificial Sequence
  Description of Artificial Sequence: Synthetic oligonucleotide
  Sense Strand Starting at position 1062 of SEQ ID NO: 315439
gaguaaucuggcuaacuuu

SEQ ID NO: 402058 - RNA, 19 nt, Artificial Sequence
  Description of Artificial Sequence: Synthetic oligonucleotide
  Antisense Strand to SEQ ID NO: 402057
aaaguuagccagauuacuc

SEQ ID NO: 402059 - RNA, 19 nt, Artificial Sequence
  Description of Artificial Sequence: Synthetic oligonucleotide
  Sense Strand Starting at position 1062 of SEQ ID NO: 315471
cacgcuuuauuucuuagga

SEQ ID NO: 402060 - RNA, 19 nt, Artificial Sequence
  Description of Artificial Sequence: Synthetic oligonucleotide
  Antisense Strand to SEQ ID NO: 402059
uccuaagaaauaaagcgug

SEQ ID NO: 402061 - RNA, 19 nt, Artificial Sequence
  Description of Artificial Sequence: Synthetic oligonucleotide
  Sense Strand Starting at position 1062 of SEQ ID NO: 315549
accugcaaaguuugaaaca

SEQ ID NO: 402062 - RNA, 19 nt, Artificial Sequence
  Description of Artificial Sequence: Synthetic oligonucleotide
  Antisense Strand to SEQ ID NO: 402061
uguuucaaacuuugcaggu

SEQ ID NO: 402063 - RNA, 19 nt, Artificial Sequence
  Description of Artificial Sequence: Synthetic oligonucleotide
  Sense Strand Starting at position 1062 of SEQ ID NO: 315927
guagaauguugacuccaag

SEQ ID NO: 402064 - RNA, 19 nt, Artificial Sequence
  Description of Artificial Sequence: Synthetic oligonucleotide
  Antisense Strand to SEQ ID NO: 402063
cuuggagucaacauucuac

SEQ ID NO: 402065 - RNA, 19 nt, Artificial Sequence
  Description of Artificial Sequence: Synthetic oligonucleotide
  Sense Strand Starting at position 1062 of SEQ ID NO: 316011
cuuauccaucaguaaguua

SEQ ID NO: 402066 - RNA, 19 nt, Artificial Sequence
  Description of Artificial Sequence: Synthetic oligonucleotide
  Antisense Strand to SEQ ID NO: 402065
uaacuuacugauggauaag

SEQ ID NO: 402067 - RNA, 19 nt, Artificial Sequence
  Description of Artificial Sequence: Synthetic oligonucleotide
  Sense Strand Starting at position 1062 of SEQ ID NO: 316018
aucaguaaguuacuaggaa

SEQ ID NO: 402068 - RNA, 19 nt, Artificial Sequence
  Description of Artificial Sequence: Synthetic oligonucleotide
  Antisense Strand to SEQ ID NO: 402067
uuccuaguaacuuacugau

SEQ ID NO: 402069 - RNA, 19 nt, Artificial Sequence
  Description of Artificial Sequence: Synthetic oligonucleotide
  Sense Strand Starting at position 1062 of SEQ ID NO: 316197
agucaaauauuguuccaaa

SEQ ID NO: 402070 - RNA, 19 nt, Artificial Sequence
  Description of Artificial Sequence: Synthetic oligonucleotide
  Antisense Strand to SEQ ID NO: 402069
uuuggaacaauauuugacu

SEQ ID NO: 402071 - RNA, 19 nt, Artificial Sequence
  Description of Artificial Sequence: Synthetic oligonucleotide
  Sense Strand Starting at position 1062 of SEQ ID NO: 316336
guugguaaacuuuagauau

SEQ ID NO: 402072 - RNA, 19 nt, Artificial Sequence
  Description of Artificial Sequence: Synthetic oligonucleotide
  Antisense Strand to SEQ ID NO: 402071
auaucuaaaguuuaccaac

SEQ ID NO: 402073 - RNA, 19 nt, Artificial Sequence
  Description of Artificial Sequence: Synthetic oligonucleotide
  Sense Strand Starting at position 1062 of SEQ ID NO: 316405
agcauaugagcuuauaaau

SEQ ID NO: 402074 - RNA, 19 nt, Artificial Sequence
  Description of Artificial Sequence: Synthetic oligonucleotide
  Antisense Strand to SEQ ID NO: 402073
auuuauaagcucauaugcu

SEQ ID NO: 402075 - RNA, 19 nt, Artificial Sequence
  Description of Artificial Sequence: Synthetic oligonucleotide
  Sense Strand Starting at position 1062 of SEQ ID NO: 316411
ugagcuuauaaaugagagu

SEQ ID NO: 402076 - RNA, 19 nt, Artificial Sequence
  Description of Artificial Sequence: Synthetic oligonucleotide
  Antisense Strand to SEQ ID NO: 402075
acucucauuuauaagcuca

SEQ ID NO: 402077 - RNA, 19 nt, Artificial Sequence
  Description of Artificial Sequence: Synthetic oligonucleotide
  Sense Strand Starting at position 1062 of SEQ ID NO: 316417
uauaaaugagagugcaaca

SEQ ID NO: 402078 - RNA, 19 nt, Artificial Sequence
  Description of Artificial Sequence: Synthetic oligonucleotide
  Antisense Strand to SEQ ID NO: 402077
uguugcacucucauuuaua

SEQ ID NO: 402079 - RNA, 19 nt, Artificial Sequence
  Description of Artificial Sequence: Synthetic oligonucleotide
  Sense Strand Starting at position 1062 of SEQ ID NO: 316422
augagagugcaacaauagu

SEQ ID NO: 402080 - RNA, 19 nt, Artificial Sequence
  Description of Artificial Sequence: Synthetic oligonucleotide
  Antisense Strand to SEQ ID NO: 402079
acuauuguugcacucucau

SEQ ID NO: 402081 - RNA, 19 nt, Artificial Sequence
  Description of Artificial Sequence: Synthetic oligonucleotide
  Sense Strand Starting at position 1062 of SEQ ID NO: 316448
cagugaguaagagaaguuu

SEQ ID NO: 402082 - RNA, 19 nt, Artificial Sequence
  Description of Artificial Sequence: Synthetic oligonucleotide
  Antisense Strand to SEQ ID NO: 402081
aaacuucucuuacucacug

SEQ ID NO: 402083 - RNA, 19 nt, Artificial Sequence
  Description of Artificial Sequence: Synthetic oligonucleotide
  Sense Strand Starting at position 1062 of SEQ ID NO: 316680
gguagaaucucaguauuag

SEQ ID NO: 402084 - RNA, 19 nt, Artificial Sequence
  Description of Artificial Sequence: Synthetic oligonucleotide
  Antisense Strand to SEQ ID NO: 402083
cuaauacugagauucuacc

SEQ ID NO: 402085 - RNA, 19 nt, Artificial Sequence
  Description of Artificial Sequence: Synthetic oligonucleotide
  Sense Strand Starting at position 1062 of SEQ ID NO: 316899
ccugaugaauaguccuaua

SEQ ID NO: 402086 - RNA, 19 nt, Artificial Sequence
  Description of Artificial Sequence: Synthetic oligonucleotide
  Antisense Strand to SEQ ID NO: 402085
uauaggacuauucaucagg

SEQ ID NO: 402087 - RNA, 19 nt, Artificial Sequence
  Description of Artificial Sequence: Synthetic oligonucleotide
  Sense Strand Starting at position 1062 of SEQ ID NO: 316918
agaacuggaucuucugauu

SEQ ID NO: 402088 - RNA, 19 nt, Artificial Sequence
  Description of Artificial Sequence: Synthetic oligonucleotide
  Antisense Strand to SEQ ID NO: 402087
aaucagaagauccaguucu

SEQ ID NO: 402089 - RNA, 19 nt, Artificial Sequence
  Description of Artificial Sequence: Synthetic oligonucleotide
  Sense Strand Starting at position 1062 of SEQ ID NO: 317082
gcuauuuauuucuaaggua

SEQ ID NO: 402090 - RNA, 19 nt, Artificial Sequence
  Description of Artificial Sequence: Synthetic oligonucleotide
  Antisense Strand to SEQ ID NO: 402089
uaccuuagaaauaaauagc

SEQ ID NO: 402091 - RNA, 19 nt, Artificial Sequence
  Description of Artificial Sequence: Synthetic oligonucleotide
  Sense Strand Starting at position 1062 of SEQ ID NO: 317213
ugaccauugcuugauuaau

SEQ ID NO: 402092 - RNA, 19 nt, Artificial Sequence
  Description of Artificial Sequence: Synthetic oligonucleotide
  Antisense Strand to SEQ ID NO: 402091
auuaaucaagcaaugguca

SEQ ID NO: 402093 - RNA, 19 nt, Artificial Sequence
  Description of Artificial Sequence: Synthetic oligonucleotide
  Sense Strand Starting at position 1062 of SEQ ID NO: 317300
acugaugaaaugugcaaga

SEQ ID NO: 402094 - RNA, 19 nt, Artificial Sequence
  Description of Artificial Sequence: Synthetic oligonucleotide
  Antisense Strand to SEQ ID NO: 402093
ucuugcacauuucaucagu

SEQ ID NO: 402095 - RNA, 19 nt, Artificial Sequence
  Description of Artificial Sequence: Synthetic oligonucleotide
  Sense Strand Starting at position 1062 of SEQ ID NO: 317309
augugcaagaauugagaaa

SEQ ID NO: 402096 - RNA, 19 nt, Artificial Sequence
  Description of Artificial Sequence: Synthetic oligonucleotide
  Antisense Strand to SEQ ID NO: 402095
uuucucaauucuugcacau

SEQ ID NO: 402097 - RNA, 19 nt, Artificial Sequence
  Description of Artificial Sequence: Synthetic oligonucleotide
  Sense Strand Starting at position 1062 of SEQ ID NO: 317424
gcgcuacugguuguaaauu

SEQ ID NO: 402098 - RNA, 19 nt, Artificial Sequence
  Description of Artificial Sequence: Synthetic oligonucleotide
  Antisense Strand to SEQ ID NO: 402097
aauuuacaaccaguagcgc

SEQ ID NO: 402099 - RNA, 19 nt, Artificial Sequence
  Description of Artificial Sequence: Synthetic oligonucleotide
  Sense Strand Starting at position 1062 of SEQ ID NO: 317432
gguuguaaauuugcuagua

SEQ ID NO: 402100 - RNA, 19 nt, Artificial Sequence
  Description of Artificial Sequence: Synthetic oligonucleotide
  Antisense Strand to SEQ ID NO: 402099
uacuagcaaauuuacaacc

SEQ ID NO: 402101 - RNA, 19 nt, Artificial Sequence
  Description of Artificial Sequence: Synthetic oligonucleotide
  Sense Strand Starting at position 1062 of SEQ ID NO: 317433
guuguaaauuugcuaguaa

SEQ ID NO: 402102 - RNA, 19 nt, Artificial Sequence
  Description of Artificial Sequence: Synthetic oligonucleotide
  Antisense Strand to SEQ ID NO: 402101
uuacuagcaaauuuacaac

SEQ ID NO: 402103 - RNA, 19 nt, Artificial Sequence
  Description of Artificial Sequence: Synthetic oligonucleotide
  Sense Strand Starting at position 1062 of SEQ ID NO: 317517
ucagaaugccuaugagaaa

SEQ ID NO: 402104 - RNA, 19 nt, Artificial Sequence
  Description of Artificial Sequence: Synthetic oligonucleotide
  Antisense Strand to SEQ ID NO: 402103
uuucucauaggcauucuga

SEQ ID NO: 402105 - RNA, 19 nt, Artificial Sequence
  Description of Artificial Sequence: Synthetic oligonucleotide
  Sense Strand Starting at position 1062 of SEQ ID NO: 317586
uugacagaguucucaacau

SEQ ID NO: 402106 - RNA, 19 nt, Artificial Sequence
  Description of Artificial Sequence: Synthetic oligonucleotide
  Antisense Strand to SEQ ID NO: 402105
auguugagaacucugucaa

SEQ ID NO: 402107 - RNA, 19 nt, Artificial Sequence
  Description of Artificial Sequence: Synthetic oligonucleotide
  Sense Strand Starting at position 1062 of SEQ ID NO: 317617
acaauagucagaggaguuu

SEQ ID NO: 402108 - RNA, 19 nt, Artificial Sequence
  Description of Artificial Sequence: Synthetic oligonucleotide
  Antisense Strand to SEQ ID NO: 402107
aaacuccucugacuauugu

SEQ ID NO: 402109 - RNA, 19 nt, Artificial Sequence
  Description of Artificial Sequence: Synthetic oligonucleotide
  Sense Strand Starting at position 1062 of SEQ ID NO: 317630
gaguuuccuguggauauaa

SEQ ID NO: 402110 - RNA, 19 nt, Artificial Sequence
  Description of Artificial Sequence: Synthetic oligonucleotide
  Antisense Strand to SEQ ID NO: 402109
uuauauccacaggaaacuc

SEQ ID NO: 402111 - RNA, 19 nt, Artificial Sequence
  Description of Artificial Sequence: Synthetic oligonucleotide
  Sense Strand Starting at position 1062 of SEQ ID NO: 317697
ucuuuauucugagcagaaa

SEQ ID NO: 402112 - RNA, 19 nt, Artificial Sequence
  Description of Artificial Sequence: Synthetic oligonucleotide
  Antisense Strand to SEQ ID NO: 402111
uuucugcucagaauaaaga

SEQ ID NO: 402113 - RNA, 19 nt, Artificial Sequence
  Description of Artificial Sequence: Synthetic oligonucleotide
  Sense Strand Starting at position 1062 of SEQ ID NO: 317769
gccauagguaauuggauga

SEQ ID NO: 402114 - RNA, 19 nt, Artificial Sequence
  Description of Artificial Sequence: Synthetic oligonucleotide
  Antisense Strand to SEQ ID NO: 402113
ucauccaauuaccuauggc

SEQ ID NO: 402115 - RNA, 19 nt, Artificial Sequence
  Description of Artificial Sequence: Synthetic oligonucleotide
  Sense Strand Starting at position 1062 of SEQ ID NO: 317926
agauauuaagcacauugua

SEQ ID NO: 402116 - RNA, 19 nt, Artificial Sequence
  Description of Artificial Sequence: Synthetic oligonucleotide
  Antisense Strand to SEQ ID NO: 402115
uacaaugugcuuaauaucu

SEQ ID NO: 402117 - RNA, 19 nt, Artificial Sequence
  Description of Artificial Sequence: Synthetic oligonucleotide
  Sense Strand Starting at position 1062 of SEQ ID NO: 317951
aucuauagccuuugagaag

SEQ ID NO: 402118 - RNA, 19 nt, Artificial Sequence
  Description of Artificial Sequence: Synthetic oligonucleotide
  Antisense Strand to SEQ ID NO: 402117
cuucucaaaggcuauagau

SEQ ID NO: 402119 - RNA, 19 nt, Artificial Sequence
  Description of Artificial Sequence: Synthetic oligonucleotide
  Sense Strand Starting at position 1062 of SEQ ID NO: 318170
agaucauuauaggccauaa

SEQ ID NO: 402120 - RNA, 19 nt, Artificial Sequence
  Description of Artificial Sequence: Synthetic oligonucleotide
  Antisense Strand to SEQ ID NO: 402119
uuauggccuauaaugaucu

SEQ ID NO: 402121 - RNA, 19 nt, Artificial Sequence
  Description of Artificial Sequence: Synthetic oligonucleotide
  Sense Strand Starting at position 1062 of SEQ ID NO: 318335
agaguugugcaauacaaga

SEQ ID NO: 402122 - RNA, 19 nt, Artificial Sequence
  Description of Artificial Sequence: Synthetic oligonucleotide
  Antisense Strand to SEQ ID NO: 402121
ucuuguauugcacaacucu

SEQ ID NO: 402123 - RNA, 19 nt, Artificial Sequence
  Description of Artificial Sequence: Synthetic oligonucleotide
  Sense Strand Starting at position 1062 of SEQ ID NO: 318510
cucagaucacaaugugauu

SEQ ID NO: 402124 - RNA, 19 nt, Artificial Sequence
  Description of Artificial Sequence: Synthetic oligonucleotide
  Antisense Strand to SEQ ID NO: 402123
aaucacauugugaucugag

SEQ ID NO: 402125 - RNA, 19 nt, Artificial Sequence
  Description of Artificial Sequence: Synthetic oligonucleotide
  Sense Strand Starting at position 1062 of SEQ ID NO: 318658
cugucucuugaggaguaaa

SEQ ID NO: 402126 - RNA, 19 nt, Artificial Sequence
  Description of Artificial Sequence: Synthetic oligonucleotide
  Antisense Strand to SEQ ID NO: 402125
uuuacuccucaagagacag

SEQ ID NO: 402127 - RNA, 19 nt, Artificial Sequence
  Description of Artificial Sequence: Synthetic oligonucleotide
  Sense Strand Starting at position 1062 of SEQ ID NO: 318862
acgugucuugguagaaggu

SEQ ID NO: 402128 - RNA, 19 nt, Artificial Sequence
  Description of Artificial Sequence: Synthetic oligonucleotide
  Antisense Strand to SEQ ID NO: 402127
accuucuaccaagacacgu

SEQ ID NO: 402129 - RNA, 19 nt, Artificial Sequence
  Description of Artificial Sequence: Synthetic oligonucleotide
  Sense Strand Starting at position 1062 of SEQ ID NO: 318907
aguauaagccuaggaauau

SEQ ID NO: 402130 - RNA, 19 nt, Artificial Sequence
  Description of Artificial Sequence: Synthetic oligonucleotide
  Antisense Strand to SEQ ID NO: 402129
auauuccuaggcuuauacu

SEQ ID NO: 402131 - RNA, 19 nt, Artificial Sequence
  Description of Artificial Sequence: Synthetic oligonucleotide
  Sense Strand Starting at position 1062 of SEQ ID NO: 319041
ugcccucaucaguaaagaa

SEQ ID NO: 402132 - RNA, 19 nt, Artificial Sequence
  Description of Artificial Sequence: Synthetic oligonucleotide
  Antisense Strand to SEQ ID NO: 402131
uucuuuacugaugagggca

SEQ ID NO: 402133 - RNA, 19 nt, Artificial Sequence
  Description of Artificial Sequence: Synthetic oligonucleotide
  Sense Strand Starting at position 1063 of SEQ ID NO: 315239
guggauuucuacuacauua

SEQ ID NO: 402134 - RNA, 19 nt, Artificial Sequence
  Description of Artificial Sequence: Synthetic oligonucleotide
  Antisense Strand to SEQ ID NO: 402133
uaauguaguagaaauccac

SEQ ID NO: 402135 - RNA, 19 nt, Artificial Sequence
  Description of Artificial Sequence: Synthetic oligonucleotide
  Sense Strand Starting at position 1063 of SEQ ID NO: 315392
aguguaaggaugugauccu

SEQ ID NO: 402136 - RNA, 19 nt, Artificial Sequence
  Description of Artificial Sequence: Synthetic oligonucleotide
  Antisense Strand to SEQ ID NO: 402135
aggaucacauccuuacacu

SEQ ID NO: 402137 - RNA, 19 nt, Artificial Sequence
  Description of Artificial Sequence: Synthetic oligonucleotide
  Sense Strand Starting at position 1063 of SEQ ID NO: 315399
ggaugugauccuuaaagcu

SEQ ID NO: 402138 - RNA, 19 nt, Artificial Sequence
  Description of Artificial Sequence: Synthetic oligonucleotide
  Antisense Strand to SEQ ID NO: 402137
agcuuuaaggaucacaucc

SEQ ID NO: 402139 - RNA, 19 nt, Artificial Sequence
  Description of Artificial Sequence: Synthetic oligonucleotide
  Sense Strand Starting at position 1063 of SEQ ID NO: 315501
gagcaagugcuauauaagc

SEQ ID NO: 402140 - RNA, 19 nt, Artificial Sequence
  Description of Artificial Sequence: Synthetic oligonucleotide
  Antisense Strand to SEQ ID NO: 402139
gcuuauauagcacuugcuc

SEQ ID NO: 402141 - RNA, 19 nt, Artificial Sequence
  Description of Artificial Sequence: Synthetic oligonucleotide
  Sense Strand Starting at position 1063 of SEQ ID NO: 315580
ugagcuuuguaauuggacu

SEQ ID NO: 402142 - RNA, 19 nt, Artificial Sequence
  Description of Artificial Sequence: Synthetic oligonucleotide
  Antisense Strand to SEQ ID NO: 402141
aguccaauuacaaagcuca

SEQ ID NO: 402143 - RNA, 19 nt, Artificial Sequence
  Description of Artificial Sequence: Synthetic oligonucleotide
  Sense Strand Starting at position 1063 of SEQ ID NO: 315586
uuguaauuggacugauggu

SEQ ID NO: 402144 - RNA, 19 nt, Artificial Sequence
  Description of Artificial Sequence: Synthetic oligonucleotide
  Antisense Strand to SEQ ID NO: 402143
accaucaguccaauuacaa

SEQ ID NO: 402145 - RNA, 19 nt, Artificial Sequence
  Description of Artificial Sequence: Synthetic oligonucleotide
  Sense Strand Starting at position 1063 of SEQ ID NO: 315770
ugauuuaucuuguugugca

SEQ ID NO: 402146 - RNA, 19 nt, Artificial Sequence
  Description of Artificial Sequence: Synthetic oligonucleotide
  Antisense Strand to SEQ ID NO: 402145
ugcacaacaagauaaauca

SEQ ID NO: 402147 - RNA, 19 nt, Artificial Sequence
  Description of Artificial Sequence: Synthetic oligonucleotide
  Sense Strand Starting at position 1063 of SEQ ID NO: 315775
uaucuuguugugcagaaau

SEQ ID NO: 402148 - RNA, 19 nt, Artificial Sequence
  Description of Artificial Sequence: Synthetic oligonucleotide
  Antisense Strand to SEQ ID NO: 402147
auuucugcacaacaagaua

SEQ ID NO: 402149 - RNA, 19 nt, Artificial Sequence
  Description of Artificial Sequence: Synthetic oligonucleotide
  Sense Strand Starting at position 1063 of SEQ ID NO: 315777
ucuuguugugcagaaauga

SEQ ID NO: 402150 - RNA, 19 nt, Artificial Sequence
  Description of Artificial Sequence: Synthetic oligonucleotide
  Antisense Strand to SEQ ID NO: 402149
ucauuucugcacaacaaga

SEQ ID NO: 402151 - RNA, 19 nt, Artificial Sequence
  Description of Artificial Sequence: Synthetic oligonucleotide
  Sense Strand Starting at position 1063 of SEQ ID NO: 315813
uccguuuguguugcaauca

SEQ ID NO: 402152 - RNA, 19 nt, Artificial Sequence
  Description of Artificial Sequence: Synthetic oligonucleotide
  Antisense Strand to SEQ ID NO: 402151
ugauugcaacacaaacgga

SEQ ID NO: 402153 - RNA, 19 nt, Artificial Sequence
  Description of Artificial Sequence: Synthetic oligonucleotide
  Sense Strand Starting at position 1063 of SEQ ID NO: 315849
ccagacauuucuggaccaa

SEQ ID NO: 402154 - RNA, 19 nt, Artificial Sequence
  Description of Artificial Sequence: Synthetic oligonucleotide
  Antisense Strand to SEQ ID NO: 402153
uugguccagaaaugucugg

SEQ ID NO: 402155 - RNA, 19 nt, Artificial Sequence
  Description of Artificial Sequence: Synthetic oligonucleotide
  Sense Strand Starting at position 1063 of SEQ ID NO: 315935
agcaaagcucuuggaauca

SEQ ID NO: 402156 - RNA, 19 nt, Artificial Sequence
  Description of Artificial Sequence: Synthetic oligonucleotide
  Antisense Strand to SEQ ID NO: 402155
ugauuccaagagcuuugcu

SEQ ID NO: 402157 - RNA, 19 nt, Artificial Sequence
  Description of Artificial Sequence: Synthetic oligonucleotide
  Sense Strand Starting at position 1063 of SEQ ID NO: 315946
uggaaucauccuggucaua

SEQ ID NO: 402158 - RNA, 19 nt, Artificial Sequence
  Description of Artificial Sequence: Synthetic oligonucleotide
  Antisense Strand to SEQ ID NO: 402157
uaugaccaggaugauucca

SEQ ID NO: 402159 - RNA, 19 nt, Artificial Sequence
  Description of Artificial Sequence: Synthetic oligonucleotide
  Sense Strand Starting at position 1063 of SEQ ID NO: 315991
ccuaucaaccgauaaguuu

SEQ ID NO: 402160 - RNA, 19 nt, Artificial Sequence
  Description of Artificial Sequence: Synthetic oligonucleotide
  Antisense Strand to SEQ ID NO: 402159
aaacuuaucgguugauagg

SEQ ID NO: 402161 - RNA, 19 nt, Artificial Sequence
  Description of Artificial Sequence: Synthetic oligonucleotide
  Sense Strand Starting at position 1063 of SEQ ID NO: 316019
aguauauuccuaggucuaa

SEQ ID NO: 402162 - RNA, 19 nt, Artificial Sequence
  Description of Artificial Sequence: Synthetic oligonucleotide
  Antisense Strand to SEQ ID NO: 402161
uuagaccuaggaauauacu

SEQ ID NO: 402163 - RNA, 19 nt, Artificial Sequence
  Description of Artificial Sequence: Synthetic oligonucleotide
  Sense Strand Starting at position 1063 of SEQ ID NO: 316020
guauauuccuaggucuaac

SEQ ID NO: 402164 - RNA, 19 nt, Artificial Sequence
  Description of Artificial Sequence: Synthetic oligonucleotide
  Antisense Strand to SEQ ID NO: 402163
guuagaccuaggaauauac

SEQ ID NO: 402165 - RNA, 19 nt, Artificial Sequence
  Description of Artificial Sequence: Synthetic oligonucleotide
  Sense Strand Starting at position 1063 of SEQ ID NO: 316042
agcaaacgguguuuaagaa

SEQ ID NO: 402166 - RNA, 19 nt, Artificial Sequence
  Description of Artificial Sequence: Synthetic oligonucleotide
  Antisense Strand to SEQ ID NO: 402165
uucuuaaacaccguuugcu

SEQ ID NO: 402167 - RNA, 19 nt, Artificial Sequence
  Description of Artificial Sequence: Synthetic oligonucleotide
  Sense Strand Starting at position 1063 of SEQ ID NO: 316107
acuccaggcuuucugagau

SEQ ID NO: 402168 - RNA, 19 nt, Artificial Sequence
  Description of Artificial Sequence: Synthetic oligonucleotide
  Antisense Strand to SEQ ID NO: 402167
aucucagaaagccuggagu

SEQ ID NO: 402169 - RNA, 19 nt, Artificial Sequence
  Description of Artificial Sequence: Synthetic oligonucleotide
  Sense Strand Starting at position 1063 of SEQ ID NO: 316113
ggcuuucugagauagcaga

SEQ ID NO: 402170 - RNA, 19 nt, Artificial Sequence
  Description of Artificial Sequence: Synthetic oligonucleotide
  Antisense Strand to SEQ ID NO: 402169
ucugcuaucucagaaagcc

SEQ ID NO: 402171 - RNA, 19 nt, Artificial Sequence
  Description of Artificial Sequence: Synthetic oligonucleotide
  Sense Strand Starting at position 1063 of SEQ ID NO: 316161
auguaaagguguccuagac

SEQ ID NO: 402172 - RNA, 19 nt, Artificial Sequence
  Description of Artificial Sequence: Synthetic oligonucleotide
  Antisense Strand to SEQ ID NO: 402171
gucuaggacaccuuuacau

SEQ ID NO: 402173 - RNA, 19 nt, Artificial Sequence
  Description of Artificial Sequence: Synthetic oligonucleotide
  Sense Strand Starting at position 1063 of SEQ ID NO: 316284
aauagaaagucauccguuu

SEQ ID NO: 402174 - RNA, 19 nt, Artificial Sequence
  Description of Artificial Sequence: Synthetic oligonucleotide
  Antisense Strand to SEQ ID NO: 402173
aaacggaugacuuucuauu

SEQ ID NO: 402175 - RNA, 19 nt, Artificial Sequence
  Description of Artificial Sequence: Synthetic oligonucleotide
  Sense Strand Starting at position 1063 of SEQ ID NO: 316290
aagucauccguuuagggua

SEQ ID NO: 402176 - RNA, 19 nt, Artificial Sequence
  Description of Artificial Sequence: Synthetic oligonucleotide
  Antisense Strand to SEQ ID NO: 402175
uacccuaaacggaugacuu

SEQ ID NO: 402177 - RNA, 19 nt, Artificial Sequence
  Description of Artificial Sequence: Synthetic oligonucleotide
  Sense Strand Starting at position 1063 of SEQ ID NO: 316295
auccguuuaggguaagaga

SEQ ID NO: 402178 - RNA, 19 nt, Artificial Sequence
  Description of Artificial Sequence: Synthetic oligonucleotide
  Antisense Strand to SEQ ID NO: 402177
ucucuuacccuaaacggau

SEQ ID NO: 402179 - RNA, 19 nt, Artificial Sequence
  Description of Artificial Sequence: Synthetic oligonucleotide
  Sense Strand Starting at position 1063 of SEQ ID NO: 316311
agauuccuguuaccaagaa

SEQ ID NO: 402180 - RNA, 19 nt, Artificial Sequence
  Description of Artificial Sequence: Synthetic oligonucleotide
  Antisense Strand to SEQ ID NO: 402179
uucuugguaacaggaaucu

SEQ ID NO: 402181 - RNA, 19 nt, Artificial Sequence
  Description of Artificial Sequence: Synthetic oligonucleotide
  Sense Strand Starting at position 1063 of SEQ ID NO: 316370
aaauguaugucccucagga

SEQ ID NO: 402182 - RNA, 19 nt, Artificial Sequence
  Description of Artificial Sequence: Synthetic oligonucleotide
  Antisense Strand to SEQ ID NO: 402181
uccugagggacauacauuu

SEQ ID NO: 402183 - RNA, 19 nt, Artificial Sequence
  Description of Artificial Sequence: Synthetic oligonucleotide
  Sense Strand Starting at position 1063 of SEQ ID NO: 316476
aaaggugcacaaugugaau

SEQ ID NO: 402184 - RNA, 19 nt, Artificial Sequence
  Description of Artificial Sequence: Synthetic oligonucleotide
  Antisense Strand to SEQ ID NO: 402183
auucacauugugcaccuuu

SEQ ID NO: 402185 - RNA, 19 nt, Artificial Sequence
  Description of Artificial Sequence: Synthetic oligonucleotide
  Sense Strand Starting at position 1063 of SEQ ID NO: 317562
uguggcucuccggaacaau

SEQ ID NO: 402186 - RNA, 19 nt, Artificial Sequence
  Description of Artificial Sequence: Synthetic oligonucleotide
  Antisense Strand to SEQ ID NO: 402185
auuguuccggagagccaca

SEQ ID NO: 402187 - RNA, 19 nt, Artificial Sequence
  Description of Artificial Sequence: Synthetic oligonucleotide
  Sense Strand Starting at position 1063 of SEQ ID NO: 317565
ggcucuccggaacaauaaa

SEQ ID NO: 402188 - RNA, 19 nt, Artificial Sequence
  Description of Artificial Sequence: Synthetic oligonucleotide
  Antisense Strand to SEQ ID NO: 402187
uuuauuguuccggagagcc

SEQ ID NO: 402189 - RNA, 19 nt, Artificial Sequence
  Description of Artificial Sequence: Synthetic oligonucleotide
  Sense Strand Starting at position 1063 of SEQ ID NO: 318162
ggguauuaaucacuuuccu

SEQ ID NO: 402190 - RNA, 19 nt, Artificial Sequence
  Description of Artificial Sequence: Synthetic oligonucleotide
  Antisense Strand to SEQ ID NO: 402189
aggaaagugauuaauaccc

SEQ ID NO: 402191 - RNA, 19 nt, Artificial Sequence
  Description of Artificial Sequence: Synthetic oligonucleotide
  Sense Strand Starting at position 1063 of SEQ ID NO: 318182
cagaaaugauaagaugaga

SEQ ID NO: 402192 - RNA, 19 nt, Artificial Sequence
  Description of Artificial Sequence: Synthetic oligonucleotide
  Antisense Strand to SEQ ID NO: 402191
ucucaucuuaucauuucug

SEQ ID NO: 402193 - RNA, 19 nt, Artificial Sequence
  Description of Artificial Sequence: Synthetic oligonucleotide
  Sense Strand Starting at position 1063 of SEQ ID NO: 318213
acuugaaagagcuacgagu

SEQ ID NO: 402194 - RNA, 19 nt, Artificial Sequence
  Description of Artificial Sequence: Synthetic oligonucleotide
  Antisense Strand to SEQ ID NO: 402193
acucguagcucuuucaagu

SEQ ID NO: 402195 - RNA, 19 nt, Artificial Sequence
  Description of Artificial Sequence: Synthetic oligonucleotide
  Sense Strand Starting at position 1063 of SEQ ID NO: 318247
gagagauaggaacgcguaa

SEQ ID NO: 402196 - RNA, 19 nt, Artificial Sequence
  Description of Artificial Sequence: Synthetic oligonucleotide
  Antisense Strand to SEQ ID NO: 402195
uuacgcguuccuaucucuc

SEQ ID NO: 402197 - RNA, 19 nt, Artificial Sequence
  Description of Artificial Sequence: Synthetic oligonucleotide
  Sense Strand Starting at position 1063 of SEQ ID NO: 318249
gagauaggaacgcguaaau

SEQ ID NO: 402198 - RNA, 19 nt, Artificial Sequence
  Description of Artificial Sequence: Synthetic oligonucleotide
  Antisense Strand to SEQ ID NO: 402197
auuuacgcguuccuaucuc

SEQ ID NO: 402199 - RNA, 19 nt, Artificial Sequence
  Description of Artificial Sequence: Synthetic oligonucleotide
  Sense Strand Starting at position 1063 of SEQ ID NO: 318260
gcguaaauccaauagcuaa

SEQ ID NO: 402200 - RNA, 19 nt, Artificial Sequence
  Description of Artificial Sequence: Synthetic oligonucleotide
  Antisense Strand to SEQ ID NO: 402199
uuagcuauuggauuuacgc

SEQ ID NO: 402201 - RNA, 19 nt, Artificial Sequence
  Description of Artificial Sequence: Synthetic oligonucleotide
  Sense Strand Starting at position 1063 of SEQ ID NO: 318281
uuucuagacgcugaagagu

SEQ ID NO: 402202 - RNA, 19 nt, Artificial Sequence
  Description of Artificial Sequence: Synthetic oligonucleotide
  Antisense Strand to SEQ ID NO: 402201
acucuucagcgucuagaaa

SEQ ID NO: 402203 - RNA, 19 nt, Artificial Sequence
  Description of Artificial Sequence: Synthetic oligonucleotide
  Sense Strand Starting at position 1063 of SEQ ID NO: 318424
aaggaugugucuuccaauu

SEQ ID NO: 402204 - RNA, 19 nt, Artificial Sequence
  Description of Artificial Sequence: Synthetic oligonucleotide
  Antisense Strand to SEQ ID NO: 402203
aauuggaagacacauccuu

SEQ ID NO: 402205 - RNA, 19 nt, Artificial Sequence
  Description of Artificial Sequence: Synthetic oligonucleotide
  Sense Strand Starting at position 1063 of SEQ ID NO: 318441
uugagaaacagugguuaaa

SEQ ID NO: 402206 - RNA, 19 nt, Artificial Sequence
  Description of Artificial Sequence: Synthetic oligonucleotide
  Antisense Strand to SEQ ID NO: 402205
uuuaaccacuguuucucaa

SEQ ID NO: 402207 - RNA, 19 nt, Artificial Sequence
  Description of Artificial Sequence: Synthetic oligonucleotide
  Sense Strand Starting at position 1063 of SEQ ID NO: 318968
gaaauaugauacgaaagaa

SEQ ID NO: 402208 - RNA, 19 nt, Artificial Sequence
  Description of Artificial Sequence: Synthetic oligonucleotide
  Antisense Strand to SEQ ID NO: 402207
uucuuucguaucauauuuc

SEQ ID NO: 402209 - RNA, 19 nt, Artificial Sequence
  Description of Artificial Sequence: Synthetic oligonucleotide
  Sense Strand Starting at position 1063 of SEQ ID NO: 319188
uuuacacaccgugauuauu

SEQ ID NO: 402210 - RNA, 19 nt, Artificial Sequence
  Description of Artificial Sequence: Synthetic oligonucleotide
  Antisense Strand to SEQ ID NO: 402209
aauaaucacgguguguaaa

SEQ ID NO: 402211 - RNA, 19 nt, Artificial Sequence
  Description of Artificial Sequence: Synthetic oligonucleotide
  Sense Strand Starting at position 1063 of SEQ ID NO: 319205
uuacuaauuucccuguggu

SEQ ID NO: 402212 - RNA, 19 nt, Artificial Sequence
  Description of Artificial Sequence: Synthetic oligonucleotide
  Antisense Strand to SEQ ID NO: 402211
accacagggaaauuaguaa

SEQ ID NO: 402213 - RNA, 19 nt, Artificial Sequence
  Description of Artificial Sequence: Synthetic oligonucleotide
  Sense Strand Starting at position 1064 of SEQ ID NO: 315248
gcaguuuaggagugaagau

SEQ ID NO: 402214 - RNA, 19 nt, Artificial Sequence
  Description of Artificial Sequence: Synthetic oligonucleotide
  Antisense Strand to SEQ ID NO: 402213
aucuucacuccuaaacugc

SEQ ID NO: 402215 - RNA, 19 nt, Artificial Sequence
  Description of Artificial Sequence: Synthetic oligonucleotide
  Sense Strand Starting at position 1064 of SEQ ID NO: 315262
aagauuaagcuuuggucuu

SEQ ID NO: 402216 - RNA, 19 nt, Artificial Sequence
  Description of Artificial Sequence: Synthetic oligonucleotide
  Antisense Strand to SEQ ID NO: 402215
aagaccaaagcuuaaucuu

SEQ ID NO: 402217 - RNA, 19 nt, Artificial Sequence
  Description of Artificial Sequence: Synthetic oligonucleotide
  Sense Strand Starting at position 1064 of SEQ ID NO: 315332
gaaacagagccuuguguca

SEQ ID NO: 402218 - RNA, 19 nt, Artificial Sequence
  Description of Artificial Sequence: Synthetic oligonucleotide
  Antisense Strand to SEQ ID NO: 402217
ugacacaaggcucuguuuc

SEQ ID NO: 402219 - RNA, 19 nt, Artificial Sequence
  Description of Artificial Sequence: Synthetic oligonucleotide
  Sense Strand Starting at position 1064 of SEQ ID NO: 315534
cucugauuacguggguauu

SEQ ID NO: 402220 - RNA, 19 nt, Artificial Sequence
  Description of Artificial Sequence: Synthetic oligonucleotide
  Antisense Strand to SEQ ID NO: 402219
aauacccacguaaucagag

SEQ ID NO: 402221 - RNA, 19 nt, Artificial Sequence
  Description of Artificial Sequence: Synthetic oligonucleotide
  Sense Strand Starting at position 1064 of SEQ ID NO: 315545
uggguauucucugcuuuag

SEQ ID NO: 402222 - RNA, 19 nt, Artificial Sequence
  Description of Artificial Sequence: Synthetic oligonucleotide
  Antisense Strand to SEQ ID NO: 402221
cuaaagcagagaauaccca

SEQ ID NO: 402223 - RNA, 19 nt, Artificial Sequence
  Description of Artificial Sequence: Synthetic oligonucleotide
  Sense Strand Starting at position 1064 of SEQ ID NO: 315724
ucacaaguauagcuaugua

SEQ ID NO: 402224 - RNA, 19 nt, Artificial Sequence
  Description of Artificial Sequence: Synthetic oligonucleotide
  Antisense Strand to SEQ ID NO: 402223
uacauagcuauacuuguga

SEQ ID NO: 402225 - RNA, 19 nt, Artificial Sequence
  Description of Artificial Sequence: Synthetic oligonucleotide
  Sense Strand Starting at position 1064 of SEQ ID NO: 315768
auaugaccuuggucacaaa

SEQ ID NO: 402226 - RNA, 19 nt, Artificial Sequence
  Description of Artificial Sequence: Synthetic oligonucleotide
  Antisense Strand to SEQ ID NO: 402225
uuugugaccaaggucauau

SEQ ID NO: 402227 - RNA, 19 nt, Artificial Sequence
  Description of Artificial Sequence: Synthetic oligonucleotide
  Sense Strand Starting at position 1064 of SEQ ID NO: 315811
ucaacugaugaagguaauu

SEQ ID NO: 402228 - RNA, 19 nt, Artificial Sequence
  Description of Artificial Sequence: Synthetic oligonucleotide
  Antisense Strand to SEQ ID NO: 402227
aauuaccuucaucaguuga

SEQ ID NO: 402229 - RNA, 19 nt, Artificial Sequence
  Description of Artificial Sequence: Synthetic oligonucleotide
  Sense Strand Starting at position 1064 of SEQ ID NO: 315843
gggauucguucaguaccua

SEQ ID NO: 402230 - RNA, 19 nt, Artificial Sequence
  Description of Artificial Sequence: Synthetic oligonucleotide
  Antisense Strand to SEQ ID NO: 402229
uagguacugaacgaauccc

SEQ ID NO: 402231 - RNA, 19 nt, Artificial Sequence
  Description of Artificial Sequence: Synthetic oligonucleotide
  Sense Strand Starting at position 1064 of SEQ ID NO: 315937
augaguuaccggugaauac

SEQ ID NO: 402232 - RNA, 19 nt, Artificial Sequence
  Description of Artificial Sequence: Synthetic oligonucleotide
  Antisense Strand to SEQ ID NO: 402231
guauucaccgguaacucau

SEQ ID NO: 402233 - RNA, 19 nt, Artificial Sequence
  Description of Artificial Sequence: Synthetic oligonucleotide
  Sense Strand Starting at position 1064 of SEQ ID NO: 315938
ugaguuaccggugaauaca

SEQ ID NO: 402234 - RNA, 19 nt, Artificial Sequence
  Description of Artificial Sequence: Synthetic oligonucleotide
  Antisense Strand to SEQ ID NO: 402233
uguauucaccgguaacuca

SEQ ID NO: 402235 - RNA, 19 nt, Artificial Sequence
  Description of Artificial Sequence: Synthetic oligonucleotide
  Sense Strand Starting at position 1064 of SEQ ID NO: 315946
cggugaauacauugcacaa

SEQ ID NO: 402236 - RNA, 19 nt, Artificial Sequence
  Description of Artificial Sequence: Synthetic oligonucleotide
  Antisense Strand to SEQ ID NO: 402235
uugugcaauguauucaccg

SEQ ID NO: 402237 - RNA, 19 nt, Artificial Sequence
  Description of Artificial Sequence: Synthetic oligonucleotide
  Sense Strand Starting at position 1064 of SEQ ID NO: 316095
agaaucaauuagcauagaa

SEQ ID NO: 402238 - RNA, 19 nt, Artificial Sequence
  Description of Artificial Sequence: Synthetic oligonucleotide
  Antisense Strand to SEQ ID NO: 402237
uucuaugcuaauugauucu

SEQ ID NO: 402239 - RNA, 19 nt, Artificial Sequence
  Description of Artificial Sequence: Synthetic oligonucleotide
  Sense Strand Starting at position 1064 of SEQ ID NO: 316253
ugaagauauucucacaaga

SEQ ID NO: 402240 - RNA, 19 nt, Artificial Sequence
  Description of Artificial Sequence: Synthetic oligonucleotide
  Antisense Strand to SEQ ID NO: 402239
ucuugugagaauaucuuca

SEQ ID NO: 402241 - RNA, 19 nt, Artificial Sequence
  Description of Artificial Sequence: Synthetic oligonucleotide
  Sense Strand Starting at position 1064 of SEQ ID NO: 316258
auauucucacaagaucguu

SEQ ID NO: 402242 - RNA, 19 nt, Artificial Sequence
  Description of Artificial Sequence: Synthetic oligonucleotide
  Antisense Strand to SEQ ID NO: 402241
aacgaucuugugagaauau

SEQ ID NO: 402243 - RNA, 19 nt, Artificial Sequence
  Description of Artificial Sequence: Synthetic oligonucleotide
  Sense Strand Starting at position 1064 of SEQ ID NO: 316413
agguaaugccuuugggaag

SEQ ID NO: 402244 - RNA, 19 nt, Artificial Sequence
  Description of Artificial Sequence: Synthetic oligonucleotide
  Antisense Strand to SEQ ID NO: 402243
cuucccaaaggcauuaccu

SEQ ID NO: 402245 - RNA, 19 nt, Artificial Sequence
  Description of Artificial Sequence: Synthetic oligonucleotide
  Sense Strand Starting at position 1064 of SEQ ID NO: 316467
gaaggcguccaggaagauu

SEQ ID NO: 402246 - RNA, 19 nt, Artificial Sequence
  Description of Artificial Sequence: Synthetic oligonucleotide
  Antisense Strand to SEQ ID NO: 402245
aaucuuccuggacgccuuc

SEQ ID NO: 402247 - RNA, 19 nt, Artificial Sequence
  Description of Artificial Sequence: Synthetic oligonucleotide
  Sense Strand Starting at position 1064 of SEQ ID NO: 316515
aucagaguugucugucaca

SEQ ID NO: 402248 - RNA, 19 nt, Artificial Sequence
  Description of Artificial Sequence: Synthetic oligonucleotide
  Antisense Strand to SEQ ID NO: 402247
ugugacagacaacucugau

SEQ ID NO: 402249 - RNA, 19 nt, Artificial Sequence
  Description of Artificial Sequence: Synthetic oligonucleotide
  Sense Strand Starting at position 1064 of SEQ ID NO: 316589
cuguguauuucgagcggag

SEQ ID NO: 402250 - RNA, 19 nt, Artificial Sequence
  Description of Artificial Sequence: Synthetic oligonucleotide
  Antisense Strand to SEQ ID NO: 402249
cuccgcucgaaauacacag

SEQ ID NO: 402251 - RNA, 19 nt, Artificial Sequence
  Description of Artificial Sequence: Synthetic oligonucleotide
  Sense Strand Starting at position 1064 of SEQ ID NO: 316731
uugggucgccuagauuaga

SEQ ID NO: 402252 - RNA, 19 nt, Artificial Sequence
  Description of Artificial Sequence: Synthetic oligonucleotide
  Antisense Strand to SEQ ID NO: 402251
ucuaaucuaggcgacccaa

SEQ ID NO: 402253 - RNA, 19 nt, Artificial Sequence
  Description of Artificial Sequence: Synthetic oligonucleotide
  Sense Strand Starting at position 1064 of SEQ ID NO: 317622
ggaacauaauguuuguuac

SEQ ID NO: 402254 - RNA, 19 nt, Artificial Sequence
  Description of Artificial Sequence: Synthetic oligonucleotide
  Antisense Strand to SEQ ID NO: 402253
guaacaaacauuauguucc

SEQ ID NO: 402255 - RNA, 19 nt, Artificial Sequence
  Description of Artificial Sequence: Synthetic oligonucleotide
  Sense Strand Starting at position 1064 of SEQ ID NO: 317839
cguauucugguuggaguaa

SEQ ID NO: 402256 - RNA, 19 nt, Artificial Sequence
  Description of Artificial Sequence: Synthetic oligonucleotide
  Antisense Strand to SEQ ID NO: 402255
uuacuccaaccagaauacg

SEQ ID NO: 402257 - RNA, 19 nt, Artificial Sequence
  Description of Artificial Sequence: Synthetic oligonucleotide
  Sense Strand Starting at position 1064 of SEQ ID NO: 318075
gcuugucuucgacaccuga

SEQ ID NO: 402258 - RNA, 19 nt, Artificial Sequence
  Description of Artificial Sequence: Synthetic oligonucleotide
  Antisense Strand to SEQ ID NO: 402257
ucaggugucgaagacaagc

SEQ ID NO: 402259 - RNA, 19 nt, Artificial Sequence
  Description of Artificial Sequence: Synthetic oligonucleotide
  Sense Strand Starting at position 1064 of SEQ ID NO: 318536
ccgcaauaccuuuauggga

SEQ ID NO: 402260 - RNA, 19 nt, Artificial Sequence
  Description of Artificial Sequence: Synthetic oligonucleotide
  Antisense Strand to SEQ ID NO: 402259
ucccauaaagguauugcgg

SEQ ID NO: 402261 - RNA, 19 nt, Artificial Sequence
  Description of Artificial Sequence: Synthetic oligonucleotide
  Sense Strand Starting at position 1064 of SEQ ID NO: 318562
gcugccucccgucuuguaa

SEQ ID NO: 402262 - RNA, 19 nt, Artificial Sequence
  Description of Artificial Sequence: Synthetic oligonucleotide
  Antisense Strand to SEQ ID NO: 402261
uuacaagacgggaggcagc

SEQ ID NO: 402263 - RNA, 19 nt, Artificial Sequence
  Description of Artificial Sequence: Synthetic oligonucleotide
  Sense Strand Starting at position 1064 of SEQ ID NO: 318648
ugucgagucgcuucucgau

SEQ ID NO: 402264 - RNA, 19 nt, Artificial Sequence
  Description of Artificial Sequence: Synthetic oligonucleotide
  Antisense Strand to SEQ ID NO: 402263
aucgagaagcgacucgaca

SEQ ID NO: 402265 - RNA, 19 nt, Artificial Sequence
  Description of Artificial Sequence: Synthetic oligonucleotide
  Sense Strand Starting at position 1064 of SEQ ID NO: 318660
ucucgauuaugggcgggau

SEQ ID NO: 402266 - RNA, 19 nt, Artificial Sequence
  Description of Artificial Sequence: Synthetic oligonucleotide
  Antisense Strand to SEQ ID NO: 402265
aucccgcccauaaucgaga

SEQ ID NO: 402267 - RNA, 19 nt, Artificial Sequence
  Description of Artificial Sequence: Synthetic oligonucleotide
  Sense Strand Starting at position 1064 of SEQ ID NO: 318661
cucgauuaugggcgggauu

SEQ ID NO: 402268 - RNA, 19 nt, Artificial Sequence
  Description of Artificial Sequence: Synthetic oligonucleotide
  Antisense Strand to SEQ ID NO: 402267
aaucccgcccauaaucgag

SEQ ID NO: 402269 - RNA, 19 nt, Artificial Sequence
  Description of Artificial Sequence: Synthetic oligonucleotide
  Sense Strand Starting at position 1064 of SEQ ID NO: 318663
cgauuaugggcgggauucu

SEQ ID NO: 402270 - RNA, 19 nt, Artificial Sequence
  Description of Artificial Sequence: Synthetic oligonucleotide
  Antisense Strand to SEQ ID NO: 402269
agaaucccgcccauaaucg

SEQ ID NO: 402271 - RNA, 19 nt, Artificial Sequence
  Description of Artificial Sequence: Synthetic oligonucleotide
  Sense Strand Starting at position 1064 of SEQ ID NO: 318664
gauuaugggcgggauucuu

SEQ ID NO: 402272 - RNA, 19 nt, Artificial Sequence
  Description of Artificial Sequence: Synthetic oligonucleotide
  Antisense Strand to SEQ ID NO: 402271
aagaaucccgcccauaauc

SEQ ID NO: 402273 - RNA, 19 nt, Artificial Sequence
  Description of Artificial Sequence: Synthetic oligonucleotide
  Sense Strand Starting at position 1064 of SEQ ID NO: 318758
ggcgacuccgauuaguuua

SEQ ID NO: 402274 - RNA, 19 nt, Artificial Sequence
  Description of Artificial Sequence: Synthetic oligonucleotide
  Antisense Strand to SEQ ID NO: 402273
uaaacuaaucggagucgcc

SEQ ID NO: 402275 - RNA, 19 nt, Artificial Sequence
  Description of Artificial Sequence: Synthetic oligonucleotide
  Sense Strand Starting at position 1064 of SEQ ID NO: 318766
cgauuaguuuaucuuccca

SEQ ID NO: 402276 - RNA, 19 nt, Artificial Sequence
  Description of Artificial Sequence: Synthetic oligonucleotide
  Antisense Strand to SEQ ID NO: 402275
ugggaagauaaacuaaucg

SEQ ID NO: 402277 - RNA, 19 nt, Artificial Sequence
  Description of Artificial Sequence: Synthetic oligonucleotide
  Sense Strand Starting at position 1064 of SEQ ID NO: 318770
uaguuuaucuucccacgga

SEQ ID NO: 402278 - RNA, 19 nt, Artificial Sequence
  Description of Artificial Sequence: Synthetic oligonucleotide
  Antisense Strand to SEQ ID NO: 402277
uccgugggaagauaaacua

SEQ ID NO: 402279 - RNA, 19 nt, Artificial Sequence
  Description of Artificial Sequence: Synthetic oligonucleotide
  Sense Strand Starting at position 1064 of SEQ ID NO: 318773
uuuaucuucccacggacua

SEQ ID NO: 402280 - RNA, 19 nt, Artificial Sequence
  Description of Artificial Sequence: Synthetic oligonucleotide
  Antisense Strand to SEQ ID NO: 402279
uaguccgugggaagauaaa

SEQ ID NO: 402281 - RNA, 19 nt, Artificial Sequence
  Description of Artificial Sequence: Synthetic oligonucleotide
  Sense Strand Starting at position 1064 of SEQ ID NO: 318791
agaguuggugucgagguua

SEQ ID NO: 402282 - RNA, 19 nt, Artificial Sequence
  Description of Artificial Sequence: Synthetic oligonucleotide
  Antisense Strand to SEQ ID NO: 402281
uaaccucgacaccaacucu

SEQ ID NO: 402283 - RNA, 19 nt, Artificial Sequence
  Description of Artificial Sequence: Synthetic oligonucleotide
  Sense Strand Starting at position 1064 of SEQ ID NO: 318796
uggugucgagguuauugua

SEQ ID NO: 402284 - RNA, 19 nt, Artificial Sequence
  Description of Artificial Sequence: Synthetic oligonucleotide
  Antisense Strand to SEQ ID NO: 402283
uacaauaaccucgacacca

SEQ ID NO: 402285 - RNA, 19 nt, Artificial Sequence
  Description of Artificial Sequence: Synthetic oligonucleotide
  Sense Strand Starting at position 1064 of SEQ ID NO: 318879
ugcggauuaucacuacuua

SEQ ID NO: 402286 - RNA, 19 nt, Artificial Sequence
  Description of Artificial Sequence: Synthetic oligonucleotide
  Antisense Strand to SEQ ID NO: 402285
uaaguagugauaauccgca

SEQ ID NO: 402287 - RNA, 19 nt, Artificial Sequence
  Description of Artificial Sequence: Synthetic oligonucleotide
  Sense Strand Starting at position 1064 of SEQ ID NO: 318880
gcggauuaucacuacuuau

SEQ ID NO: 402288 - RNA, 19 nt, Artificial Sequence
  Description of Artificial Sequence: Synthetic oligonucleotide
  Antisense Strand to SEQ ID NO: 402287
auaaguagugauaauccgc

SEQ ID NO: 402289 - RNA, 19 nt, Artificial Sequence
  Description of Artificial Sequence: Synthetic oligonucleotide
  Sense Strand Starting at position 1064 of SEQ ID NO: 318931
aaagcaugaucaccugagu

SEQ ID NO: 402290 - RNA, 19 nt, Artificial Sequence
  Description of Artificial Sequence: Synthetic oligonucleotide
  Antisense Strand to SEQ ID NO: 402289
acucaggugaucaugcuuu

SEQ ID NO: 402291 - RNA, 19 nt, Artificial Sequence
  Description of Artificial Sequence: Synthetic oligonucleotide
  Sense Strand Starting at position 1064 of SEQ ID NO: 318987
guagcaucagguuaaaucu

SEQ ID NO: 402292 - RNA, 19 nt, Artificial Sequence
  Description of Artificial Sequence: Synthetic oligonucleotide
  Antisense Strand to SEQ ID NO: 402291
agauuuaaccugaugcuac

SEQ ID NO: 402293 - RNA, 19 nt, Artificial Sequence
  Description of Artificial Sequence: Synthetic oligonucleotide
  Sense Strand Starting at position 1065 of SEQ ID NO: 315683
ggacacauguucucagcau

SEQ ID NO: 402294 - RNA, 19 nt, Artificial Sequence
  Description of Artificial Sequence: Synthetic oligonucleotide
  Antisense Strand to SEQ ID NO: 402293
augcugagaacaugugucc

SEQ ID NO: 402295 - RNA, 19 nt, Artificial Sequence
  Description of Artificial Sequence: Synthetic oligonucleotide
  Sense Strand Starting at position 1065 of SEQ ID NO: 315787
ccuugacaucuuugaaagc

SEQ ID NO: 402296 - RNA, 19 nt, Artificial Sequence
  Description of Artificial Sequence: Synthetic oligonucleotide
  Antisense Strand to SEQ ID NO: 402295
gcuuucaaagaugucaagg

SEQ ID NO: 402297 - RNA, 19 nt, Artificial Sequence
  Description of Artificial Sequence: Synthetic oligonucleotide
  Sense Strand Starting at position 1065 of SEQ ID NO: 315864
gcagauaggguucauuguu

SEQ ID NO: 402298 - RNA, 19 nt, Artificial Sequence
  Description of Artificial Sequence: Synthetic oligonucleotide
  Antisense Strand to SEQ ID NO: 402297
aacaaugaacccuaucugc

SEQ ID NO: 402299 - RNA, 19 nt, Artificial Sequence
  Description of Artificial Sequence: Synthetic oligonucleotide
  Sense Strand Starting at position 1065 of SEQ ID NO: 315871
ggguucauuguugauaaug

SEQ ID NO: 402300 - RNA, 19 nt, Artificial Sequence
  Description of Artificial Sequence: Synthetic oligonucleotide
  Antisense Strand to SEQ ID NO: 402299
cauuaucaacaaugaaccc

SEQ ID NO: 402301 - RNA, 19 nt, Artificial Sequence
  Description of Artificial Sequence: Synthetic oligonucleotide
  Sense Strand Starting at position 1065 of SEQ ID NO: 315880
guugauaauggauguuaaa

SEQ ID NO: 402302 - RNA, 19 nt, Artificial Sequence
  Description of Artificial Sequence: Synthetic oligonucleotide
  Antisense Strand to SEQ ID NO: 402301
uuuaacauccauuaucaac

SEQ ID NO: 402303 - RNA, 19 nt, Artificial Sequence
  Description of Artificial Sequence: Synthetic oligonucleotide
  Sense Strand Starting at position 1065 of SEQ ID NO: 316041
auuccuuauuccuugggua

SEQ ID NO: 402304 - RNA, 19 nt, Artificial Sequence
  Description of Artificial Sequence: Synthetic oligonucleotide
  Antisense Strand to SEQ ID NO: 402303
uacccaaggaauaaggaau

SEQ ID NO: 402305 - RNA, 19 nt, Artificial Sequence
  Description of Artificial Sequence: Synthetic oligonucleotide
  Sense Strand Starting at position 1065 of SEQ ID NO: 316042
uuccuuauuccuuggguaa

SEQ ID NO: 402306 - RNA, 19 nt, Artificial Sequence
  Description of Artificial Sequence: Synthetic oligonucleotide
  Antisense Strand to SEQ ID NO: 402305
uuacccaaggaauaaggaa

SEQ ID NO: 402307 - RNA, 19 nt, Artificial Sequence
  Description of Artificial Sequence: Synthetic oligonucleotide
  Sense Strand Starting at position 1065 of SEQ ID NO: 316043
uccuuauuccuuggguaac

SEQ ID NO: 402308 - RNA, 19 nt, Artificial Sequence
  Description of Artificial Sequence: Synthetic oligonucleotide
  Antisense Strand to SEQ ID NO: 402307
guuacccaaggaauaagga

SEQ ID NO: 402309 - RNA, 19 nt, Artificial Sequence
  Description of Artificial Sequence: Synthetic oligonucleotide
  Sense Strand Starting at position 1065 of SEQ ID NO: 316398
uagaaagggcuuugaggua

SEQ ID NO: 402310 - RNA, 19 nt, Artificial Sequence
  Description of Artificial Sequence: Synthetic oligonucleotide
  Antisense Strand to SEQ ID NO: 402309
uaccucaaagcccuuucua

SEQ ID NO: 402311 - RNA, 19 nt, Artificial Sequence
  Description of Artificial Sequence: Synthetic oligonucleotide
  Sense Strand Starting at position 1065 of SEQ ID NO: 316403
agggcuuugagguaguuaa

SEQ ID NO: 402312 - RNA, 19 nt, Artificial Sequence
  Description of Artificial Sequence: Synthetic oligonucleotide
  Antisense Strand to SEQ ID NO: 402311
uuaacuaccucaaagcccu

SEQ ID NO: 402313 - RNA, 19 nt, Artificial Sequence
  Description of Artificial Sequence: Synthetic oligonucleotide
  Sense Strand Starting at position 1065 of SEQ ID NO: 316521
gcuggaagacucuaaggcu

SEQ ID NO: 402314 - RNA, 19 nt, Artificial Sequence
  Description of Artificial Sequence: Synthetic oligonucleotide
  Antisense Strand to SEQ ID NO: 402313
agccuuagagucuuccagc

SEQ ID NO: 402315 - RNA, 19 nt, Artificial Sequence
  Description of Artificial Sequence: Synthetic oligonucleotide
  Sense Strand Starting at position 1065 of SEQ ID NO: 316663
uuauccuaccugugagaga

SEQ ID NO: 402316 - RNA, 19 nt, Artificial Sequence
  Description of Artificial Sequence: Synthetic oligonucleotide
  Antisense Strand to SEQ ID NO: 402315
ucucucacagguaggauaa

SEQ ID NO: 402317 - RNA, 19 nt, Artificial Sequence
  Description of Artificial Sequence: Synthetic oligonucleotide
  Sense Strand Starting at position 1065 of SEQ ID NO: 317453
gaggucauuuguccagguu

SEQ ID NO: 402318 - RNA, 19 nt, Artificial Sequence
  Description of Artificial Sequence: Synthetic oligonucleotide
  Antisense Strand to SEQ ID NO: 402317
aaccuggacaaaugaccuc

SEQ ID NO: 402319 - RNA, 19 nt, Artificial Sequence
  Description of Artificial Sequence: Synthetic oligonucleotide
  Sense Strand Starting at position 1065 of SEQ ID NO: 317569
ccgggaaguugacugacau

SEQ ID NO: 402320 - RNA, 19 nt, Artificial Sequence
  Description of Artificial Sequence: Synthetic oligonucleotide
  Antisense Strand to SEQ ID NO: 402319
augucagucaacuucccgg

SEQ ID NO: 402321 - RNA, 19 nt, Artificial Sequence
  Description of Artificial Sequence: Synthetic oligonucleotide
  Sense Strand Starting at position 1065 of SEQ ID NO: 317570
cgggaaguugacugacaug

SEQ ID NO: 402322 - RNA, 19 nt, Artificial Sequence
  Description of Artificial Sequence: Synthetic oligonucleotide
  Antisense Strand to SEQ ID NO: 402321
caugucagucaacuucccg

SEQ ID NO: 402323 - RNA, 19 nt, Artificial Sequence
  Description of Artificial Sequence: Synthetic oligonucleotide
  Sense Strand Starting at position 1065 of SEQ ID NO: 317575
aguugacugacaugugaua

SEQ ID NO: 402324 - RNA, 19 nt, Artificial Sequence
  Description of Artificial Sequence: Synthetic oligonucleotide
  Antisense Strand to SEQ ID NO: 402323
uaucacaugucagucaacu

SEQ ID NO: 402325 - RNA, 19 nt, Artificial Sequence
  Description of Artificial Sequence: Synthetic oligonucleotide
  Sense Strand Starting at position 1065 of SEQ ID NO: 317594
ggguuugugccaaggcgau

SEQ ID NO: 402326 - RNA, 19 nt, Artificial Sequence
  Description of Artificial Sequence: Synthetic oligonucleotide
  Antisense Strand to SEQ ID NO: 402325
aucgccuuggcacaaaccc

SEQ ID NO: 402327 - RNA, 19 nt, Artificial Sequence
  Description of Artificial Sequence: Synthetic oligonucleotide
  Sense Strand Starting at position 1065 of SEQ ID NO: 317753
uucugauagccucaagacu

SEQ ID NO: 402328 - RNA, 19 nt, Artificial Sequence
  Description of Artificial Sequence: Synthetic oligonucleotide
  Antisense Strand to SEQ ID NO: 402327
agucuugaggcuaucagaa

SEQ ID NO: 402329 - RNA, 19 nt, Artificial Sequence
  Description of Artificial Sequence: Synthetic oligonucleotide
  Sense Strand Starting at position 1065 of SEQ ID NO: 317801
acugaagcucucugacaug

SEQ ID NO: 402330 - RNA, 19 nt, Artificial Sequence
  Description of Artificial Sequence: Synthetic oligonucleotide
  Antisense Strand to SEQ ID NO: 402329
caugucagagagcuucagu

SEQ ID NO: 402331 - RNA, 19 nt, Artificial Sequence
  Description of Artificial Sequence: Synthetic oligonucleotide
  Sense Strand Starting at position 1065 of SEQ ID NO: 318129
agacauucguuucuauuga

SEQ ID NO: 402332 - RNA, 19 nt, Artificial Sequence
  Description of Artificial Sequence: Synthetic oligonucleotide
  Antisense Strand to SEQ ID NO: 402331
ucaauagaaacgaaugucu

SEQ ID NO: 402333 - RNA, 19 nt, Artificial Sequence
  Description of Artificial Sequence: Synthetic oligonucleotide
  Sense Strand Starting at position 1065 of SEQ ID NO: 318234
cguugucugccuuuccaga

SEQ ID NO: 402334 - RNA, 19 nt, Artificial Sequence
  Description of Artificial Sequence: Synthetic oligonucleotide
  Antisense Strand to SEQ ID NO: 402333
ucuggaaaggcagacaacg

SEQ ID NO: 402335 - RNA, 19 nt, Artificial Sequence
  Description of Artificial Sequence: Synthetic oligonucleotide
  Sense Strand Starting at position 1065 of SEQ ID NO: 318306
gagaguaagcuguauccca

SEQ ID NO: 402336 - RNA, 19 nt, Artificial Sequence
  Description of Artificial Sequence: Synthetic oligonucleotide
  Antisense Strand to SEQ ID NO: 402335
ugggauacagcuuacucuc

SEQ ID NO: 402337 - RNA, 19 nt, Artificial Sequence
  Description of Artificial Sequence: Synthetic oligonucleotide
  Sense Strand Starting at position 1065 of SEQ ID NO: 318468
gucccauuggccuaaaugu

SEQ ID NO: 402338 - RNA, 19 nt, Artificial Sequence
  Description of Artificial Sequence: Synthetic oligonucleotide
  Antisense Strand to SEQ ID NO: 402337
acauuuaggccaaugggac

SEQ ID NO: 402339 - RNA, 19 nt, Artificial Sequence
  Description of Artificial Sequence: Synthetic oligonucleotide
  Sense Strand Starting at position 1065 of SEQ ID NO: 318479
cuaaauguguuuccaucuu

SEQ ID NO: 402340 - RNA, 19 nt, Artificial Sequence
  Description of Artificial Sequence: Synthetic oligonucleotide
  Antisense Strand to SEQ ID NO: 402339
aagauggaaacacauuuag

SEQ ID NO: 402341 - RNA, 19 nt, Artificial Sequence
  Description of Artificial Sequence: Synthetic oligonucleotide
  Sense Strand Starting at position 1065 of SEQ ID NO: 318556
gugggugugauucaggguu

SEQ ID NO: 402342 - RNA, 19 nt, Artificial Sequence
  Description of Artificial Sequence: Synthetic oligonucleotide
  Antisense Strand to SEQ ID NO: 402341
aacccugaaucacacccac

SEQ ID NO: 402343 - RNA, 19 nt, Artificial Sequence
  Description of Artificial Sequence: Synthetic oligonucleotide
  Sense Strand Starting at position 1065 of SEQ ID NO: 318654
aggauuaggucaccagucu

SEQ ID NO: 402344 - RNA, 19 nt, Artificial Sequence
  Description of Artificial Sequence: Synthetic oligonucleotide
  Antisense Strand to SEQ ID NO: 402343
agacuggugaccuaauccu

SEQ ID NO: 402345 - RNA, 19 nt, Artificial Sequence
  Description of Artificial Sequence: Synthetic oligonucleotide
  Sense Strand Starting at position 1065 of SEQ ID NO: 318682
aucagacguuucuccucaa

SEQ ID NO: 402346 - RNA, 19 nt, Artificial Sequence
  Description of Artificial Sequence: Synthetic oligonucleotide
  Antisense Strand to SEQ ID NO: 402345
uugaggagaaacgucugau

SEQ ID NO: 402347 - RNA, 19 nt, Artificial Sequence
  Description of Artificial Sequence: Synthetic oligonucleotide
  Sense Strand Starting at position 1065 of SEQ ID NO: 318683
ucagacguuucuccucaaa

SEQ ID NO: 402348 - RNA, 19 nt, Artificial Sequence
  Description of Artificial Sequence: Synthetic oligonucleotide
  Antisense Strand to SEQ ID NO: 402347
uuugaggagaaacgucuga

SEQ ID NO: 402349 - RNA, 19 nt, Artificial Sequence
  Description of Artificial Sequence: Synthetic oligonucleotide
  Sense Strand Starting at position 1065 of SEQ ID NO: 318685
agacguuucuccucaaauc

SEQ ID NO: 402350 - RNA, 19 nt, Artificial Sequence
  Description of Artificial Sequence: Synthetic oligonucleotide
  Antisense Strand to SEQ ID NO: 402349
gauuugaggagaaacgucu

SEQ ID NO: 402351 - RNA, 19 nt, Artificial Sequence
  Description of Artificial Sequence: Synthetic oligonucleotide
  Sense Strand Starting at position 1065 of SEQ ID NO: 318717
ucagcuaaugauugagcau

SEQ ID NO: 402352 - RNA, 19 nt, Artificial Sequence
  Description of Artificial Sequence: Synthetic oligonucleotide
  Antisense Strand to SEQ ID NO: 402351
augcucaaucauuagcuga

SEQ ID NO: 402353 - RNA, 19 nt, Artificial Sequence
  Description of Artificial Sequence: Synthetic oligonucleotide
  Sense Strand Starting at position 1065 of SEQ ID NO: 318813
cuuuaaaguuaacugggaa

SEQ ID NO: 402354 - RNA, 19 nt, Artificial Sequence
  Description of Artificial Sequence: Synthetic oligonucleotide
  Antisense Strand to SEQ ID NO: 402353
uucccaguuaacuuuaaag

SEQ ID NO: 402355 - RNA, 19 nt, Artificial Sequence
  Description of Artificial Sequence: Synthetic oligonucleotide
  Sense Strand Starting at position 1065 of SEQ ID NO: 318869
ccaguuacucuguauuccu

SEQ ID NO: 402356 - RNA, 19 nt, Artificial Sequence
  Description of Artificial Sequence: Synthetic oligonucleotide
  Antisense Strand to SEQ ID NO: 402355
aggaauacagaguaacugg

SEQ ID NO: 402357 - RNA, 19 nt, Artificial Sequence
  Description of Artificial Sequence: Synthetic oligonucleotide
  Sense Strand Starting at position 1065 of SEQ ID NO: 318978
guccuaggcucucucauuu

SEQ ID NO: 402358 - RNA, 19 nt, Artificial Sequence
  Description of Artificial Sequence: Synthetic oligonucleotide
  Antisense Strand to SEQ ID NO: 402357
aaaugagagagccuaggac

SEQ ID NO: 402359 - RNA, 19 nt, Artificial Sequence
  Description of Artificial Sequence: Synthetic oligonucleotide
  Sense Strand Starting at position 1065 of SEQ ID NO: 318991
ucauuucuugcuuggacuu

SEQ ID NO: 402360 - RNA, 19 nt, Artificial Sequence
  Description of Artificial Sequence: Synthetic oligonucleotide
  Antisense Strand to SEQ ID NO: 402359
aaguccaagcaagaaauga

SEQ ID NO: 402361 - RNA, 19 nt, Artificial Sequence
  Description of Artificial Sequence: Synthetic oligonucleotide
  Sense Strand Starting at position 1065 of SEQ ID NO: 319011
ggaaguucuuugcuuuaag

SEQ ID NO: 402362 - RNA, 19 nt, Artificial Sequence
  Description of Artificial Sequence: Synthetic oligonucleotide
  Antisense Strand to SEQ ID NO: 402361
cuuaaagcaaagaacuucc

SEQ ID NO: 402363 - RNA, 19 nt, Artificial Sequence
  Description of Artificial Sequence: Synthetic oligonucleotide
  Sense Strand Starting at position 1065 of SEQ ID NO: 319082
cuuugaagauccuugucca

SEQ ID NO: 402364 - RNA, 19 nt, Artificial Sequence
  Description of Artificial Sequence: Synthetic oligonucleotide
  Antisense Strand to SEQ ID NO: 402363
uggacaaggaucuucaaag

SEQ ID NO: 402365 - RNA, 19 nt, Artificial Sequence
  Description of Artificial Sequence: Synthetic oligonucleotide
  Sense Strand Starting at position 1065 of SEQ ID NO: 319085
ugaagauccuuguccaguu

SEQ ID NO: 402366 - RNA, 19 nt, Artificial Sequence
  Description of Artificial Sequence: Synthetic oligonucleotide
  Antisense Strand to SEQ ID NO: 402365
aacuggacaaggaucuuca

SEQ ID NO: 402367 - RNA, 19 nt, Artificial Sequence
  Description of Artificial Sequence: Synthetic oligonucleotide
  Sense Strand Starting at position 1065 of SEQ ID NO: 319086
gaagauccuuguccaguua

SEQ ID NO: 402368 - RNA, 19 nt, Artificial Sequence
  Description of Artificial Sequence: Synthetic oligonucleotide
  Antisense Strand to SEQ ID NO: 402367
uaacuggacaaggaucuuc

SEQ ID NO: 402369 - RNA, 19 nt, Artificial Sequence
  Description of Artificial Sequence: Synthetic oligonucleotide
  Sense Strand Starting at position 1065 of SEQ ID NO: 319093
cuuguccaguuauuauauu

SEQ ID NO: 402370 - RNA, 19 nt, Artificial Sequence
  Description of Artificial Sequence: Synthetic oligonucleotide
  Antisense Strand to SEQ ID NO: 402369
aauauaauaacuggacaag

SEQ ID NO: 402371 - RNA, 19 nt, Artificial Sequence
  Description of Artificial Sequence: Synthetic oligonucleotide
  Sense Strand Starting at position 1065 of SEQ ID NO: 319159
ucuauauucugucuuauga

SEQ ID NO: 402372 - RNA, 19 nt, Artificial Sequence
  Description of Artificial Sequence: Synthetic oligonucleotide
  Antisense Strand to SEQ ID NO: 402371
ucauaagacagaauauaga

SEQ ID NO: 402373 - RNA, 19 nt, Artificial Sequence
  Description of Artificial Sequence: Synthetic oligonucleotide
  Sense Strand Starting at position 1066 of SEQ ID NO: 315242
gguuauacauaccuccaua

SEQ ID NO: 402374 - RNA, 19 nt, Artificial Sequence
  Description of Artificial Sequence: Synthetic oligonucleotide
  Antisense Strand to SEQ ID NO: 402373
uauggagguauguauaacc

SEQ ID NO: 402375 - RNA, 19 nt, Artificial Sequence
  Description of Artificial Sequence: Synthetic oligonucleotide
  Sense Strand Starting at position 1066 of SEQ ID NO: 315312
ucuagcuaccaagauguuu

SEQ ID NO: 402376 - RNA, 19 nt, Artificial Sequence
  Description of Artificial Sequence: Synthetic oligonucleotide
  Antisense Strand to SEQ ID NO: 402375
aaacaucuugguagcuaga

SEQ ID NO: 402377 - RNA, 19 nt, Artificial Sequence
  Description of Artificial Sequence: Synthetic oligonucleotide
  Sense Strand Starting at position 1066 of SEQ ID NO: 315515
ggguaagaaaugugcccaa

SEQ ID NO: 402378 - RNA, 19 nt, Artificial Sequence
  Description of Artificial Sequence: Synthetic oligonucleotide
  Antisense Strand to SEQ ID NO: 402377
uugggcacauuucuuaccc

SEQ ID NO: 402379 - RNA, 19 nt, Artificial Sequence
  Description of Artificial Sequence: Synthetic oligonucleotide
  Sense Strand Starting at position 1066 of SEQ ID NO: 315533
agauaaggcaguuagucaa

SEQ ID NO: 402380 - RNA, 19 nt, Artificial Sequence
  Description of Artificial Sequence: Synthetic oligonucleotide
  Antisense Strand to SEQ ID NO: 402379
uugacuaacugccuuaucu

SEQ ID NO: 402381 - RNA, 19 nt, Artificial Sequence
  Description of Artificial Sequence: Synthetic oligonucleotide
  Sense Strand Starting at position 1066 of SEQ ID NO: 315540
gcaguuagucaaugacaac

SEQ ID NO: 402382 - RNA, 19 nt, Artificial Sequence
  Description of Artificial Sequence: Synthetic oligonucleotide
  Antisense Strand to SEQ ID NO: 402381
guugucauugacuaacugc

SEQ ID NO: 402383 - RNA, 19 nt, Artificial Sequence
  Description of Artificial Sequence: Synthetic oligonucleotide
  Sense Strand Starting at position 1066 of SEQ ID NO: 315546
agucaaugacaacgguaau

SEQ ID NO: 402384 - RNA, 19 nt, Artificial Sequence
  Description of Artificial Sequence: Synthetic oligonucleotide
  Antisense Strand to SEQ ID NO: 402383
auuaccguugucauugacu

SEQ ID NO: 402385 - RNA, 19 nt, Artificial Sequence
  Description of Artificial Sequence: Synthetic oligonucleotide
  Sense Strand Starting at position 1066 of SEQ ID NO: 315547
gucaaugacaacgguaaua

SEQ ID NO: 402386 - RNA, 19 nt, Artificial Sequence
  Description of Artificial Sequence: Synthetic oligonucleotide
  Antisense Strand to SEQ ID NO: 402385
uauuaccguugucauugac

SEQ ID NO: 402387 - RNA, 19 nt, Artificial Sequence
  Description of Artificial Sequence: Synthetic oligonucleotide
  Sense Strand Starting at position 1066 of SEQ ID NO: 315557
acgguaauaacagaacugu

SEQ ID NO: 402388 - RNA, 19 nt, Artificial Sequence
  Description of Artificial Sequence: Synthetic oligonucleotide
  Antisense Strand to SEQ ID NO: 402387
acaguucuguuauuaccgu

SEQ ID NO: 402389 - RNA, 19 nt, Artificial Sequence
  Description of Artificial Sequence: Synthetic oligonucleotide
  Sense Strand Starting at position 1066 of SEQ ID NO: 315566
acagaacuguuuccugauc

SEQ ID NO: 402390 - RNA, 19 nt, Artificial Sequence
  Description of Artificial Sequence: Synthetic oligonucleotide
  Antisense Strand to SEQ ID NO: 402389
gaucaggaaacaguucugu

SEQ ID NO: 402391 - RNA, 19 nt, Artificial Sequence
  Description of Artificial Sequence: Synthetic oligonucleotide
  Sense Strand Starting at position 1066 of SEQ ID NO: 315829
agacauacgcagggauuga

SEQ ID NO: 402392 - RNA, 19 nt, Artificial Sequence
  Description of Artificial Sequence: Synthetic oligonucleotide
  Antisense Strand to SEQ ID NO: 402391
ucaaucccugcguaugucu

SEQ ID NO: 402393 - RNA, 19 nt, Artificial Sequence
  Description of Artificial Sequence: Synthetic oligonucleotide
  Sense Strand Starting at position 1066 of SEQ ID NO: 315833
auacgcagggauugacaaa

SEQ ID NO: 402394 - RNA, 19 nt, Artificial Sequence
  Description of Artificial Sequence: Synthetic oligonucleotide
  Antisense Strand to SEQ ID NO: 402393
uuugucaaucccugcguau

SEQ ID NO: 402395 - RNA, 19 nt, Artificial Sequence
  Description of Artificial Sequence: Synthetic oligonucleotide
  Sense Strand Starting at position 1066 of SEQ ID NO: 315865
ccuuucgaaucucuuugau

SEQ ID NO: 402396 - RNA, 19 nt, Artificial Sequence
  Description of Artificial Sequence: Synthetic oligonucleotide
  Antisense Strand to SEQ ID NO: 402395
aucaaagagauucgaaagg

SEQ ID NO: 402397 - RNA, 19 nt, Artificial Sequence
  Description of Artificial Sequence: Synthetic oligonucleotide
  Sense Strand Starting at position 1066 of SEQ ID NO: 315868
uucgaaucucuuugauggu

SEQ ID NO: 402398 - RNA, 19 nt, Artificial Sequence
  Description of Artificial Sequence: Synthetic oligonucleotide
  Antisense Strand to SEQ ID NO: 402397
accaucaaagagauucgaa

SEQ ID NO: 402399 - RNA, 19 nt, Artificial Sequence
  Description of Artificial Sequence: Synthetic oligonucleotide
  Sense Strand Starting at position 1066 of SEQ ID NO: 315881
gaugguuacuugguucuca

SEQ ID NO: 402400 - RNA, 19 nt, Artificial Sequence
  Description of Artificial Sequence: Synthetic oligonucleotide
  Antisense Strand to SEQ ID NO: 402399
ugagaaccaaguaaccauc

SEQ ID NO: 402401 - RNA, 19 nt, Artificial Sequence
  Description of Artificial Sequence: Synthetic oligonucleotide
  Sense Strand Starting at position 1066 of SEQ ID NO: 315882
augguuacuugguucucaa

SEQ ID NO: 402402 - RNA, 19 nt, Artificial Sequence
  Description of Artificial Sequence: Synthetic oligonucleotide
  Antisense Strand to SEQ ID NO: 402401
uugagaaccaaguaaccau

SEQ ID NO: 402403 - RNA, 19 nt, Artificial Sequence
  Description of Artificial Sequence: Synthetic oligonucleotide
  Sense Strand Starting at position 1066 of SEQ ID NO: 315885
guuacuugguucucaaaca

SEQ ID NO: 402404 - RNA, 19 nt, Artificial Sequence
  Description of Artificial Sequence: Synthetic oligonucleotide
  Antisense Strand to SEQ ID NO: 402403
uguuugagaaccaaguaac

SEQ ID NO: 402405 - RNA, 19 nt, Artificial Sequence
  Description of Artificial Sequence: Synthetic oligonucleotide
  Sense Strand Starting at position 1066 of SEQ ID NO: 316106
acauccuuuccgcgggaau

SEQ ID NO: 402406 - RNA, 19 nt, Artificial Sequence
  Description of Artificial Sequence: Synthetic oligonucleotide
  Antisense Strand to SEQ ID NO: 402405
auucccgcggaaaggaugu

SEQ ID NO: 402407 - RNA, 19 nt, Artificial Sequence
  Description of Artificial Sequence: Synthetic oligonucleotide
  Sense Strand Starting at position 1066 of SEQ ID NO: 316107
cauccuuuccgcgggaauu

SEQ ID NO: 402408 - RNA, 19 nt, Artificial Sequence
  Description of Artificial Sequence: Synthetic oligonucleotide
  Antisense Strand to SEQ ID NO: 402407
aauucccgcggaaaggaug

SEQ ID NO: 402409 - RNA, 19 nt, Artificial Sequence
  Description of Artificial Sequence: Synthetic oligonucleotide
  Sense Strand Starting at position 1066 of SEQ ID NO: 316108
auccuuuccgcgggaauuu

SEQ ID NO: 402410 - RNA, 19 nt, Artificial Sequence
  Description of Artificial Sequence: Synthetic oligonucleotide
  Antisense Strand to SEQ ID NO: 402409
aaauucccgcggaaaggau

SEQ ID NO: 402411 - RNA, 19 nt, Artificial Sequence
  Description of Artificial Sequence: Synthetic oligonucleotide
  Sense Strand Starting at position 1066 of SEQ ID NO: 316124
uuuauuucuguucgcacaa

SEQ ID NO: 402412 - RNA, 19 nt, Artificial Sequence
  Description of Artificial Sequence: Synthetic oligonucleotide
  Antisense Strand to SEQ ID NO: 402411
uugugcgaacagaaauaaa

SEQ ID NO: 402413 - RNA, 19 nt, Artificial Sequence
  Description of Artificial Sequence: Synthetic oligonucleotide
  Sense Strand Starting at position 1066 of SEQ ID NO: 316848
ggcgguuucccguuggcaa

SEQ ID NO: 402414 - RNA, 19 nt, Artificial Sequence
  Description of Artificial Sequence: Synthetic oligonucleotide
  Antisense Strand to SEQ ID NO: 402413
uugccaacgggaaaccgcc

SEQ ID NO: 402415 - RNA, 19 nt, Artificial Sequence
  Description of Artificial Sequence: Synthetic oligonucleotide
  Sense Strand Starting at position 1066 of SEQ ID NO: 317215
cgcuccgacucauuccaau

SEQ ID NO: 402416 - RNA, 19 nt, Artificial Sequence
  Description of Artificial Sequence: Synthetic oligonucleotide
  Antisense Strand to SEQ ID NO: 402415
auuggaaugagucggagcg

SEQ ID NO: 402417 - RNA, 19 nt, Artificial Sequence
  Description of Artificial Sequence: Synthetic oligonucleotide
  Sense Strand Starting at position 1066 of SEQ ID NO: 317716
gugacuggcucggacaaga

SEQ ID NO: 402418 - RNA, 19 nt, Artificial Sequence
  Description of Artificial Sequence: Synthetic oligonucleotide
  Antisense Strand to SEQ ID NO: 402417
ucuuguccgagccagucac

SEQ ID NO: 402419 - RNA, 19 nt, Artificial Sequence
  Description of Artificial Sequence: Synthetic oligonucleotide
  Sense Strand Starting at position 1066 of SEQ ID NO: 317932
ccuguaaaucuugagucuu

SEQ ID NO: 402420 - RNA, 19 nt, Artificial Sequence
  Description of Artificial Sequence: Synthetic oligonucleotide
  Antisense Strand to SEQ ID NO: 402419
aagacucaagauuuacagg

SEQ ID NO: 402421 - RNA, 19 nt, Artificial Sequence
  Description of Artificial Sequence: Synthetic oligonucleotide
  Sense Strand Starting at position 1066 of SEQ ID NO: 318134
ccaccugcuccggaaaguu

SEQ ID NO: 402422 - RNA, 19 nt, Artificial Sequence
  Description of Artificial Sequence: Synthetic oligonucleotide
  Antisense Strand to SEQ ID NO: 402421
aacuuuccggagcaggugg

SEQ ID NO: 402423 - RNA, 19 nt, Artificial Sequence
  Description of Artificial Sequence: Synthetic oligonucleotide
  Sense Strand Starting at position 1066 of SEQ ID NO: 318143
ccggaaaguucccuccaga

SEQ ID NO: 402424 - RNA, 19 nt, Artificial Sequence
  Description of Artificial Sequence: Synthetic oligonucleotide
  Antisense Strand to SEQ ID NO: 402423
ucuggagggaacuuuccgg

SEQ ID NO: 402425 - RNA, 19 nt, Artificial Sequence
  Description of Artificial Sequence: Synthetic oligonucleotide
  Sense Strand Starting at position 1066 of SEQ ID NO: 318186
ccgggagcucccgaucaga

SEQ ID NO: 402426 - RNA, 19 nt, Artificial Sequence
  Description of Artificial Sequence: Synthetic oligonucleotide
  Antisense Strand to SEQ ID NO: 402425
ucugaucgggagcucccgg

SEQ ID NO: 402427 - RNA, 19 nt, Artificial Sequence
  Description of Artificial Sequence: Synthetic oligonucleotide
  Sense Strand Starting at position 1066 of SEQ ID NO: 318214
cgugaaaggcguuaucgga

SEQ ID NO: 402428 - RNA, 19 nt, Artificial Sequence
  Description of Artificial Sequence: Synthetic oligonucleotide
  Antisense Strand to SEQ ID NO: 402427
uccgauaacgccuuucacg

SEQ ID NO: 402429 - RNA, 19 nt, Artificial Sequence
  Description of Artificial Sequence: Synthetic oligonucleotide
  Sense Strand Starting at position 1066 of SEQ ID NO: 318312
ccucaaccgcucugagaaa

SEQ ID NO: 402430 - RNA, 19 nt, Artificial Sequence
  Description of Artificial Sequence: Synthetic oligonucleotide
  Antisense Strand to SEQ ID NO: 402429
uuucucagagcgguugagg

SEQ ID NO: 402431 - RNA, 19 nt, Artificial Sequence
  Description of Artificial Sequence: Synthetic oligonucleotide
  Sense Strand Starting at position 1066 of SEQ ID NO: 318313
cucaaccgcucugagaaau

SEQ ID NO: 402432 - RNA, 19 nt, Artificial Sequence
  Description of Artificial Sequence: Synthetic oligonucleotide
  Antisense Strand to SEQ ID NO: 402431
auuucucagagcgguugag

SEQ ID NO: 402433 - RNA, 19 nt, Artificial Sequence
  Description of Artificial Sequence: Synthetic oligonucleotide
  Sense Strand Starting at position 1066 of SEQ ID NO: 318646
uugcuaacguauccuugaa

SEQ ID NO: 402434 - RNA, 19 nt, Artificial Sequence
  Description of Artificial Sequence: Synthetic oligonucleotide
  Antisense Strand to SEQ ID NO: 402433
uucaaggauacguuagcaa

SEQ ID NO: 402435 - RNA, 19 nt, Artificial Sequence
  Description of Artificial Sequence: Synthetic oligonucleotide
  Sense Strand Starting at position 1066 of SEQ ID NO: 318648
gcuaacguauccuugaauu

SEQ ID NO: 402436 - RNA, 19 nt, Artificial Sequence
  Description of Artificial Sequence: Synthetic oligonucleotide
  Antisense Strand to SEQ ID NO: 402435
aauucaaggauacguuagc

SEQ ID NO: 402437 - RNA, 19 nt, Artificial Sequence
  Description of Artificial Sequence: Synthetic oligonucleotide
  Sense Strand Starting at position 1066 of SEQ ID NO: 318735
cuuggcuuacagcgucaua

SEQ ID NO: 402438 - RNA, 19 nt, Artificial Sequence
  Description of Artificial Sequence: Synthetic oligonucleotide
  Antisense Strand to SEQ ID NO: 402437
uaugacgcuguaagccaag

SEQ ID NO: 402439 - RNA, 19 nt, Artificial Sequence
  Description of Artificial Sequence: Synthetic oligonucleotide
  Sense Strand Starting at position 1066 of SEQ ID NO: 318738
ggcuuacagcgucauauuu

SEQ ID NO: 402440 - RNA, 19 nt, Artificial Sequence
  Description of Artificial Sequence: Synthetic oligonucleotide
  Antisense Strand to SEQ ID NO: 402439
aaauaugacgcuguaagcc

SEQ ID NO: 402441 - RNA, 19 nt, Artificial Sequence
  Description of Artificial Sequence: Synthetic oligonucleotide
  Sense Strand Starting at position 1066 of SEQ ID NO: 318801
guguaaggaguuuaacaca

SEQ ID NO: 402442 - RNA, 19 nt, Artificial Sequence
  Description of Artificial Sequence: Synthetic oligonucleotide
  Antisense Strand to SEQ ID NO: 402441
uguguuaaacuccuuacac

SEQ ID NO: 402443 - RNA, 19 nt, Artificial Sequence
  Description of Artificial Sequence: Synthetic oligonucleotide
  Sense Strand Starting at position 1066 of SEQ ID NO: 318881
cuuagcauuucuuagguga

SEQ ID NO: 402444 - RNA, 19 nt, Artificial Sequence
  Description of Artificial Sequence: Synthetic oligonucleotide
  Antisense Strand to SEQ ID NO: 402443
ucaccuaagaaaugcuaag

SEQ ID NO: 402445 - RNA, 19 nt, Artificial Sequence
  Description of Artificial Sequence: Synthetic oligonucleotide
  Sense Strand Starting at position 1066 of SEQ ID NO: 318883
uagcauuucuuaggugaca

SEQ ID NO: 402446 - RNA, 19 nt, Artificial Sequence
  Description of Artificial Sequence: Synthetic oligonucleotide
  Antisense Strand to SEQ ID NO: 402445
ugucaccuaagaaaugcua

SEQ ID NO: 402447 - RNA, 19 nt, Artificial Sequence
  Description of Artificial Sequence: Synthetic oligonucleotide
  Sense Strand Starting at position 1066 of SEQ ID NO: 319034
gauauuacuucuuugucgu

SEQ ID NO: 402448 - RNA, 19 nt, Artificial Sequence
  Description of Artificial Sequence: Synthetic oligonucleotide
  Antisense Strand to SEQ ID NO: 402447
acgacaaagaaguaauauc

SEQ ID NO: 402449 - RNA, 19 nt, Artificial Sequence
  Description of Artificial Sequence: Synthetic oligonucleotide
  Sense Strand Starting at position 1066 of SEQ ID NO: 319040
acuucuuugucgucauuga

SEQ ID NO: 402450 - RNA, 19 nt, Artificial Sequence
  Description of Artificial Sequence: Synthetic oligonucleotide
  Antisense Strand to SEQ ID NO: 402449
ucaaugacgacaaagaagu

SEQ ID NO: 402451 - RNA, 19 nt, Artificial Sequence
  Description of Artificial Sequence: Synthetic oligonucleotide
  Sense Strand Starting at position 1066 of SEQ ID NO: 319041
cuucuuugucgucauugau

SEQ ID NO: 402452 - RNA, 19 nt, Artificial Sequence
  Description of Artificial Sequence: Synthetic oligonucleotide
  Antisense Strand to SEQ ID NO: 402451
aucaaugacgacaaagaag

SEQ ID NO: 402453 - RNA, 19 nt, Artificial Sequence
  Description of Artificial Sequence: Synthetic oligonucleotide
  Sense Strand Starting at position 1067 of SEQ ID NO: 315357
ggguauaugccagacacua

SEQ ID NO: 402454 - RNA, 19 nt, Artificial Sequence
  Description of Artificial Sequence: Synthetic oligonucleotide
  Antisense Strand to SEQ ID NO: 402453
uagugucuggcauauaccc

SEQ ID NO: 402455 - RNA, 19 nt, Artificial Sequence
  Description of Artificial Sequence: Synthetic oligonucleotide
  Sense Strand Starting at position 1067 of SEQ ID NO: 315569
acgcaauuaucacuuauga

SEQ ID NO: 402456 - RNA, 19 nt, Artificial Sequence
  Description of Artificial Sequence: Synthetic oligonucleotide
  Antisense Strand to SEQ ID NO: 402455
ucauaagugauaauugcgu

SEQ ID NO: 402457 - RNA, 19 nt, Artificial Sequence
  Description of Artificial Sequence: Synthetic oligonucleotide
  Sense Strand Starting at position 1067 of SEQ ID NO: 315611
caagguacuccuuagaggu

SEQ ID NO: 402458 - RNA, 19 nt, Artificial Sequence
  Description of Artificial Sequence: Synthetic oligonucleotide
  Antisense Strand to SEQ ID NO: 402457
accucuaaggaguaccuug

SEQ ID NO: 402459 - RNA, 19 nt, Artificial Sequence
  Description of Artificial Sequence: Synthetic oligonucleotide
  Sense Strand Starting at position 1067 of SEQ ID NO: 315626
agguuuaaacuauguagca

SEQ ID NO: 402460 - RNA, 19 nt, Artificial Sequence
  Description of Artificial Sequence: Synthetic oligonucleotide
  Antisense Strand to SEQ ID NO: 402459
ugcuacauaguuuaaaccu

SEQ ID NO: 402461 - RNA, 19 nt, Artificial Sequence
  Description of Artificial Sequence: Synthetic oligonucleotide
  Sense Strand Starting at position 1067 of SEQ ID NO: 315750
guuaacucccaguaaauua

SEQ ID NO: 402462 - RNA, 19 nt, Artificial Sequence
  Description of Artificial Sequence: Synthetic oligonucleotide
  Antisense Strand to SEQ ID NO: 402461
uaauuuacugggaguuaac

SEQ ID NO: 402463 - RNA, 19 nt, Artificial Sequence
  Description of Artificial Sequence: Synthetic oligonucleotide
  Sense Strand Starting at position 1067 of SEQ ID NO: 315808
caguuaaacguugaguauu

SEQ ID NO: 402464 - RNA, 19 nt, Artificial Sequence
  Description of Artificial Sequence: Synthetic oligonucleotide
  Antisense Strand to SEQ ID NO: 402463
aauacucaacguuuaacug

SEQ ID NO: 402465 - RNA, 19 nt, Artificial Sequence
  Description of Artificial Sequence: Synthetic oligonucleotide
  Sense Strand Starting at position 1067 of SEQ ID NO: 315810
guuaaacguugaguauuaa

SEQ ID NO: 402466 - RNA, 19 nt, Artificial Sequence
  Description of Artificial Sequence: Synthetic oligonucleotide
  Antisense Strand to SEQ ID NO: 402465
uuaauacucaacguuuaac

SEQ ID NO: 402467 - RNA, 19 nt, Artificial Sequence
  Description of Artificial Sequence: Synthetic oligonucleotide
  Sense Strand Starting at position 1067 of SEQ ID NO: 315930
uugcacuuugcagaucuua

SEQ ID NO: 402468 - RNA, 19 nt, Artificial Sequence
  Description of Artificial Sequence: Synthetic oligonucleotide
  Antisense Strand to SEQ ID NO: 402467
uaagaucugcaaagugcaa

SEQ ID NO: 402469 - RNA, 19 nt, Artificial Sequence
  Description of Artificial Sequence: Synthetic oligonucleotide
  Sense Strand Starting at position 1067 of SEQ ID NO: 316022
ucuccucuacgauagucaa

SEQ ID NO: 402470 - RNA, 19 nt, Artificial Sequence
  Description of Artificial Sequence: Synthetic oligonucleotide
  Antisense Strand to SEQ ID NO: 402469
uugacuaucguagaggaga

SEQ ID NO: 402471 - RNA, 19 nt, Artificial Sequence
  Description of Artificial Sequence: Synthetic oligonucleotide
  Sense Strand Starting at position 1067 of SEQ ID NO: 316025
ccucuacgauagucaaaua

SEQ ID NO: 402472 - RNA, 19 nt, Artificial Sequence
  Description of Artificial Sequence: Synthetic oligonucleotide
  Antisense Strand to SEQ ID NO: 402471
uauuugacuaucguagagg

SEQ ID NO: 402473 - RNA, 19 nt, Artificial Sequence
  Description of Artificial Sequence: Synthetic oligonucleotide
  Sense Strand Starting at position 1067 of SEQ ID NO: 316072
guauuuccuccaggccuua

SEQ ID NO: 402474 - RNA, 19 nt, Artificial Sequence
  Description of Artificial Sequence: Synthetic oligonucleotide
  Antisense Strand to SEQ ID NO: 402473
uaaggccuggaggaaauac

SEQ ID NO: 402475 - RNA, 19 nt, Artificial Sequence
  Description of Artificial Sequence: Synthetic oligonucleotide
  Sense Strand Starting at position 1067 of SEQ ID NO: 316173
caauauguacugggagguu

SEQ ID NO: 402476 - RNA, 19 nt, Artificial Sequence
  Description of Artificial Sequence: Synthetic oligonucleotide
  Antisense Strand to SEQ ID NO: 402475
aaccucccaguacauauug

SEQ ID NO: 402477 - RNA, 19 nt, Artificial Sequence
  Description of Artificial Sequence: Synthetic oligonucleotide
  Sense Strand Starting at position 1067 of SEQ ID NO: 316258
guuagaauuggagauguuu

SEQ ID NO: 402478 - RNA, 19 nt, Artificial Sequence
  Description of Artificial Sequence: Synthetic oligonucleotide
  Antisense Strand to SEQ ID NO: 402477
aaacaucuccaauucuaac

SEQ ID NO: 402479 - RNA, 19 nt, Artificial Sequence
  Description of Artificial Sequence: Synthetic oligonucleotide
  Sense Strand Starting at position 1067 of SEQ ID NO: 316264
auuggagauguuugagagu

SEQ ID NO: 402480 - RNA, 19 nt, Artificial Sequence
  Description of Artificial Sequence: Synthetic oligonucleotide
  Antisense Strand to SEQ ID NO: 402479
acucucaaacaucuccaau

SEQ ID NO: 402481 - RNA, 19 nt, Artificial Sequence
  Description of Artificial Sequence: Synthetic oligonucleotide
  Sense Strand Starting at position 1067 of SEQ ID NO: 316288
agauuaaguaacggaucua

SEQ ID NO: 402482 - RNA, 19 nt, Artificial Sequence
  Description of Artificial Sequence: Synthetic oligonucleotide
  Antisense Strand to SEQ ID NO: 402481
uagauccguuacuuaaucu

SEQ ID NO: 402483 - RNA, 19 nt, Artificial Sequence
  Description of Artificial Sequence: Synthetic oligonucleotide
  Sense Strand Starting at position 1067 of SEQ ID NO: 316298
acggaucuaguuuaguuaa

SEQ ID NO: 402484 - RNA, 19 nt, Artificial Sequence
  Description of Artificial Sequence: Synthetic oligonucleotide
  Antisense Strand to SEQ ID NO: 402483
uuaacuaaacuagauccgu

SEQ ID NO: 402485 - RNA, 19 nt, Artificial Sequence
  Description of Artificial Sequence: Synthetic oligonucleotide
  Sense Strand Starting at position 1067 of SEQ ID NO: 316301
gaucuaguuuaguuaaggu

SEQ ID NO: 402486 - RNA, 19 nt, Artificial Sequence
  Description of Artificial Sequence: Synthetic oligonucleotide
  Antisense Strand to SEQ ID NO: 402485
accuuaacuaaacuagauc

SEQ ID NO: 402487 - RNA, 19 nt, Artificial Sequence
  Description of Artificial Sequence: Synthetic oligonucleotide
  Sense Strand Starting at position 1067 of SEQ ID NO: 316422
uaaauaaggcgaugguuau

SEQ ID NO: 402488 - RNA, 19 nt, Artificial Sequence
  Description of Artificial Sequence: Synthetic oligonucleotide
  Antisense Strand to SEQ ID NO: 402487
auaaccaucgccuuauuua

SEQ ID NO: 402489 - RNA, 19 nt, Artificial Sequence
  Description of Artificial Sequence: Synthetic oligonucleotide
  Sense Strand Starting at position 1067 of SEQ ID NO: 316423
aaauaaggcgaugguuauu

SEQ ID NO: 402490 - RNA, 19 nt, Artificial Sequence
  Description of Artificial Sequence: Synthetic oligonucleotide
  Antisense Strand to SEQ ID NO: 402489
aauaaccaucgccuuauuu

SEQ ID NO: 402491 - RNA, 19 nt, Artificial Sequence
  Description of Artificial Sequence: Synthetic oligonucleotide
  Sense Strand Starting at position 1067 of SEQ ID NO: 316502
ggucucaaucuguacagua

SEQ ID NO: 402492 - RNA, 19 nt, Artificial Sequence
  Description of Artificial Sequence: Synthetic oligonucleotide
  Antisense Strand to SEQ ID NO: 402491
uacuguacagauugagacc

SEQ ID NO: 402493 - RNA, 19 nt, Artificial Sequence
  Description of Artificial Sequence: Synthetic oligonucleotide
  Sense Strand Starting at position 1067 of SEQ ID NO: 316522
ucguguaagcgcucuggau

SEQ ID NO: 402494 - RNA, 19 nt, Artificial Sequence
  Description of Artificial Sequence: Synthetic oligonucleotide
  Antisense Strand to SEQ ID NO: 402493
auccagagcgcuuacacga

SEQ ID NO: 402495 - RNA, 19 nt, Artificial Sequence
  Description of Artificial Sequence: Synthetic oligonucleotide
  Sense Strand Starting at position 1067 of SEQ ID NO: 316523
cguguaagcgcucuggauu

SEQ ID NO: 402496 - RNA, 19 nt, Artificial Sequence
  Description of Artificial Sequence: Synthetic oligonucleotide
  Antisense Strand to SEQ ID NO: 402495
aauccagagcgcuuacacg

SEQ ID NO: 402497 - RNA, 19 nt, Artificial Sequence
  Description of Artificial Sequence: Synthetic oligonucleotide
  Sense Strand Starting at position 1067 of SEQ ID NO: 316524
guguaagcgcucuggauuu

SEQ ID NO: 402498 - RNA, 19 nt, Artificial Sequence
  Description of Artificial Sequence: Synthetic oligonucleotide
  Antisense Strand to SEQ ID NO: 402497
aaauccagagcgcuuacac

SEQ ID NO: 402499 - RNA, 19 nt, Artificial Sequence
  Description of Artificial Sequence: Synthetic oligonucleotide
  Sense Strand Starting at position 1067 of SEQ ID NO: 316555
auauuugaucuccguccau

SEQ ID NO: 402500 - RNA, 19 nt, Artificial Sequence
  Description of Artificial Sequence: Synthetic oligonucleotide
  Antisense Strand to SEQ ID NO: 402499
auggacggagaucaaauau

SEQ ID NO: 402501 - RNA, 19 nt, Artificial Sequence
  Description of Artificial Sequence: Synthetic oligonucleotide
  Sense Strand Starting at position 1067 of SEQ ID NO: 316559
uugaucuccguccauaauu

SEQ ID NO: 402502 - RNA, 19 nt, Artificial Sequence
  Description of Artificial Sequence: Synthetic oligonucleotide
  Antisense Strand to SEQ ID NO: 402501
aauuauggacggagaucaa

SEQ ID NO: 402503 - RNA, 19 nt, Artificial Sequence
  Description of Artificial Sequence: Synthetic oligonucleotide
  Sense Strand Starting at position 1067 of SEQ ID NO: 317496
ugugauagguaguucaaag

SEQ ID NO: 402504 - RNA, 19 nt, Artificial Sequence
  Description of Artificial Sequence: Synthetic oligonucleotide
  Antisense Strand to SEQ ID NO: 402503
cuuugaacuaccuaucaca

SEQ ID NO: 402505 - RNA, 19 nt, Artificial Sequence
  Description of Artificial Sequence: Synthetic oligonucleotide
  Sense Strand Starting at position 1067 of SEQ ID NO: 317578
ugagaagaaucucuuuggu

SEQ ID NO: 402506 - RNA, 19 nt, Artificial Sequence
  Description of Artificial Sequence: Synthetic oligonucleotide
  Antisense Strand to SEQ ID NO: 402505
accaaagagauucuucuca

SEQ ID NO: 402507 - RNA, 19 nt, Artificial Sequence
  Description of Artificial Sequence: Synthetic oligonucleotide
  Sense Strand Starting at position 1067 of SEQ ID NO: 317756
cuuuaacucuucucgagaa

SEQ ID NO: 402508 - RNA, 19 nt, Artificial Sequence
  Description of Artificial Sequence: Synthetic oligonucleotide
  Antisense Strand to SEQ ID NO: 402507
uucucgagaagaguuaaag

SEQ ID NO: 402509 - RNA, 19 nt, Artificial Sequence
  Description of Artificial Sequence: Synthetic oligonucleotide
  Sense Strand Starting at position 1067 of SEQ ID NO: 317800
cgacuagaagccugagaaa

SEQ ID NO: 402510 - RNA, 19 nt, Artificial Sequence
  Description of Artificial Sequence: Synthetic oligonucleotide
  Antisense Strand to SEQ ID NO: 402509
uuucucaggcuucuagucg

SEQ ID NO: 402511 - RNA, 19 nt, Artificial Sequence
  Description of Artificial Sequence: Synthetic oligonucleotide
  Sense Strand Starting at position 1067 of SEQ ID NO: 317813
gagaaaucguccuuaauga

SEQ ID NO: 402512 - RNA, 19 nt, Artificial Sequence
  Description of Artificial Sequence: Synthetic oligonucleotide
  Antisense Strand to SEQ ID NO: 402511
ucauuaaggacgauuucuc

SEQ ID NO: 402513 - RNA, 19 nt, Artificial Sequence
  Description of Artificial Sequence: Synthetic oligonucleotide
  Sense Strand Starting at position 1067 of SEQ ID NO: 317814
agaaaucguccuuaaugau

SEQ ID NO: 402514 - RNA, 19 nt, Artificial Sequence
  Description of Artificial Sequence: Synthetic oligonucleotide
  Antisense Strand to SEQ ID NO: 402513
aucauuaaggacgauuucu

SEQ ID NO: 402515 - RNA, 19 nt, Artificial Sequence
  Description of Artificial Sequence: Synthetic oligonucleotide
  Sense Strand Starting at position 1067 of SEQ ID NO: 318192
cuguucugucaagaacacu

SEQ ID NO: 402516 - RNA, 19 nt, Artificial Sequence
  Description of Artificial Sequence: Synthetic oligonucleotide
  Antisense Strand to SEQ ID NO: 402515
aguguucuugacagaacag

SEQ ID NO: 402517 - RNA, 19 nt, Artificial Sequence
  Description of Artificial Sequence: Synthetic oligonucleotide
  Sense Strand Starting at position 1067 of SEQ ID NO: 318448
cucguugcaauuugaagua

SEQ ID NO: 402518 - RNA, 19 nt, Artificial Sequence
  Description of Artificial Sequence: Synthetic oligonucleotide
  Antisense Strand to SEQ ID NO: 402517
uacuucaaauugcaacgag

SEQ ID NO: 402519 - RNA, 19 nt, Artificial Sequence
  Description of Artificial Sequence: Synthetic oligonucleotide
  Sense Strand Starting at position 1067 of SEQ ID NO: 318532
cuaggcauucuuuaugaag

SEQ ID NO: 402520 - RNA, 19 nt, Artificial Sequence
  Description of Artificial Sequence: Synthetic oligonucleotide
  Antisense Strand to SEQ ID NO: 402519
cuucauaaagaaugccuag

SEQ ID NO: 402521 - RNA, 19 nt, Artificial Sequence
  Description of Artificial Sequence: Synthetic oligonucleotide
  Sense Strand Starting at position 1067 of SEQ ID NO: 318721
uggcuuauauguguagaag

SEQ ID NO: 402522 - RNA, 19 nt, Artificial Sequence
  Description of Artificial Sequence: Synthetic oligonucleotide
  Antisense Strand to SEQ ID NO: 402521
cuucuacacauauaagcca

SEQ ID NO: 402523 - RNA, 19 nt, Artificial Sequence
  Description of Artificial Sequence: Synthetic oligonucleotide
  Sense Strand Starting at position 1067 of SEQ ID NO: 318722
ggcuuauauguguagaagc

SEQ ID NO: 402524 - RNA, 19 nt, Artificial Sequence
  Description of Artificial Sequence: Synthetic oligonucleotide
  Antisense Strand to SEQ ID NO: 402523
gcuucuacacauauaagcc

SEQ ID NO: 402525 - RNA, 19 nt, Artificial Sequence
  Description of Artificial Sequence: Synthetic oligonucleotide
  Sense Strand Starting at position 1067 of SEQ ID NO: 318724
cuuauauguguagaagcau

SEQ ID NO: 402526 - RNA, 19 nt, Artificial Sequence
  Description of Artificial Sequence: Synthetic oligonucleotide
  Antisense Strand to SEQ ID NO: 402525
augcuucuacacauauaag

SEQ ID NO: 402527 - RNA, 19 nt, Artificial Sequence
  Description of Artificial Sequence: Synthetic oligonucleotide
  Sense Strand Starting at position 1067 of SEQ ID NO: 318858
gcuguacauuugguuuaau

SEQ ID NO: 402528 - RNA, 19 nt, Artificial Sequence
  Description of Artificial Sequence: Synthetic oligonucleotide
  Antisense Strand to SEQ ID NO: 402527
auuaaaccaaauguacagc

SEQ ID NO: 402529 - RNA, 19 nt, Artificial Sequence
  Description of Artificial Sequence: Synthetic oligonucleotide
  Sense Strand Starting at position 1067 of SEQ ID NO: 318892
ucuugaaaugcuuaggagu

SEQ ID NO: 402530 - RNA, 19 nt, Artificial Sequence
  Description of Artificial Sequence: Synthetic oligonucleotide
  Antisense Strand to SEQ ID NO: 402529
acuccuaagcauuucaaga

SEQ ID NO: 402531 - RNA, 19 nt, Artificial Sequence
  Description of Artificial Sequence: Synthetic oligonucleotide
  Sense Strand Starting at position 1067 of SEQ ID NO: 319071
uuuguaguuagggaccuaa

SEQ ID NO: 402532 - RNA, 19 nt, Artificial Sequence
  Description of Artificial Sequence: Synthetic oligonucleotide
  Antisense Strand to SEQ ID NO: 402531
uuaggucccuaacuacaaa

SEQ ID NO: 402533 - RNA, 19 nt, Artificial Sequence
  Description of Artificial Sequence: Synthetic oligonucleotide
  Sense Strand Starting at position 1068 of SEQ ID NO: 315331
ggguauaugccagacacua

SEQ ID NO: 402534 - RNA, 19 nt, Artificial Sequence
  Description of Artificial Sequence: Synthetic oligonucleotide
  Antisense Strand to SEQ ID NO: 402533
uagugucuggcauauaccc

SEQ ID NO: 402535 - RNA, 19 nt, Artificial Sequence
  Description of Artificial Sequence: Synthetic oligonucleotide
  Sense Strand Starting at position 1068 of SEQ ID NO: 315543
acgcaauuaucacuuauga

SEQ ID NO: 402536 - RNA, 19 nt, Artificial Sequence
  Description of Artificial Sequence: Synthetic oligonucleotide
  Antisense Strand to SEQ ID NO: 402535
ucauaagugauaauugcgu

SEQ ID NO: 402537 - RNA, 19 nt, Artificial Sequence
  Description of Artificial Sequence: Synthetic oligonucleotide
  Sense Strand Starting at position 1068 of SEQ ID NO: 315585
caagguacuccuuagaggu

SEQ ID NO: 402538 - RNA, 19 nt, Artificial Sequence
  Description of Artificial Sequence: Synthetic oligonucleotide
  Antisense Strand to SEQ ID NO: 402537
accucuaaggaguaccuug

SEQ ID NO: 402539 - RNA, 19 nt, Artificial Sequence
  Description of Artificial Sequence: Synthetic oligonucleotide
  Sense Strand Starting at position 1068 of SEQ ID NO: 315600
agguuuaaacuauguagca

SEQ ID NO: 402540 - RNA, 19 nt, Artificial Sequence
  Description of Artificial Sequence: Synthetic oligonucleotide
  Antisense Strand to SEQ ID NO: 402539
ugcuacauaguuuaaaccu

SEQ ID NO: 402541 - RNA, 19 nt, Artificial Sequence
  Description of Artificial Sequence: Synthetic oligonucleotide
  Sense Strand Starting at position 1068 of SEQ ID NO: 315724
guuaacucccaguaaauua

SEQ ID NO: 402542 - RNA, 19 nt, Artificial Sequence
  Description of Artificial Sequence: Synthetic oligonucleotide
  Antisense Strand to SEQ ID NO: 402541
uaauuuacugggaguuaac

SEQ ID NO: 402543 - RNA, 19 nt, Artificial Sequence
  Description of Artificial Sequence: Synthetic oligonucleotide
  Sense Strand Starting at position 1068 of SEQ ID NO: 315782
caguuaaacguugaguauu

SEQ ID NO: 402544 - RNA, 19 nt, Artificial Sequence
  Description of Artificial Sequence: Synthetic oligonucleotide
  Antisense Strand to SEQ ID NO: 402543
aauacucaacguuuaacug

SEQ ID NO: 402545 - RNA, 19 nt, Artificial Sequence
  Description of Artificial Sequence: Synthetic oligonucleotide
  Sense Strand Starting at position 1068 of SEQ ID NO: 315784
guuaaacguugaguauuaa

SEQ ID NO: 402546 - RNA, 19 nt, Artificial Sequence
  Description of Artificial Sequence: Synthetic oligonucleotide
  Antisense Strand to SEQ ID NO: 402545
uuaauacucaacguuuaac

SEQ ID NO: 402547 - RNA, 19 nt, Artificial Sequence
  Description of Artificial Sequence: Synthetic oligonucleotide
  Sense Strand Starting at position 1068 of SEQ ID NO: 315904
uugcacuuugcagaucuua

SEQ ID NO: 402548 - RNA, 19 nt, Artificial Sequence
  Description of Artificial Sequence: Synthetic oligonucleotide
  Antisense Strand to SEQ ID NO: 402547
uaagaucugcaaagugcaa

SEQ ID NO: 402549 - RNA, 19 nt, Artificial Sequence
  Description of Artificial Sequence: Synthetic oligonucleotide
  Sense Strand Starting at position 1068 of SEQ ID NO: 315996
ucuccucuacgauagucaa

SEQ ID NO: 402550 - RNA, 19 nt, Artificial Sequence
  Description of Artificial Sequence: Synthetic oligonucleotide
  Antisense Strand to SEQ ID NO: 402549
uugacuaucguagaggaga

SEQ ID NO: 402551 - RNA, 19 nt, Artificial Sequence
  Description of Artificial Sequence: Synthetic oligonucleotide
  Sense Strand Starting at position 1068 of SEQ ID NO: 315999
ccucuacgauagucaaaua

SEQ ID NO: 402552 - RNA, 19 nt, Artificial Sequence
  Description of Artificial Sequence: Synthetic oligonucleotide
  Antisense Strand to SEQ ID NO: 402551
uauuugacuaucguagagg

SEQ ID NO: 402553 - RNA, 19 nt, Artificial Sequence
  Description of Artificial Sequence: Synthetic oligonucleotide
  Sense Strand Starting at position 1068 of SEQ ID NO: 316046
guauuuccuccaggccuua

SEQ ID NO: 402554 - RNA, 19 nt, Artificial Sequence
  Description of Artificial Sequence: Synthetic oligonucleotide
  Antisense Strand to SEQ ID NO: 402553
uaaggccuggaggaaauac

SEQ ID NO: 402555 - RNA, 19 nt, Artificial Sequence
  Description of Artificial Sequence: Synthetic oligonucleotide
  Sense Strand Starting at position 1068 of SEQ ID NO: 316147
caauauguacugggagguu

SEQ ID NO: 402556 - RNA, 19 nt, Artificial Sequence
  Description of Artificial Sequence: Synthetic oligonucleotide
  Antisense Strand to SEQ ID NO: 402555
aaccucccaguacauauug

SEQ ID NO: 402557 - RNA, 19 nt, Artificial Sequence
  Description of Artificial Sequence: Synthetic oligonucleotide
  Sense Strand Starting at position 1068 of SEQ ID NO: 316232
guuagaauuggagauguuu

SEQ ID NO: 402558 - RNA, 19 nt, Artificial Sequence
  Description of Artificial Sequence: Synthetic oligonucleotide
  Antisense Strand to SEQ ID NO: 402557
aaacaucuccaauucuaac

SEQ ID NO: 402559 - RNA, 19 nt, Artificial Sequence
  Description of Artificial Sequence: Synthetic oligonucleotide
  Sense Strand Starting at position 1068 of SEQ ID NO: 316238
auuggagauguuugagagu

SEQ ID NO: 402560 - RNA, 19 nt, Artificial Sequence
  Description of Artificial Sequence: Synthetic oligonucleotide
  Antisense Strand to SEQ ID NO: 402559
acucucaaacaucuccaau

SEQ ID NO: 402561 - RNA, 19 nt, Artificial Sequence
  Description of Artificial Sequence: Synthetic oligonucleotide
  Sense Strand Starting at position 1068 of SEQ ID NO: 316262
agauuaaguaacggaucua

SEQ ID NO: 402562 - RNA, 19 nt, Artificial Sequence
  Description of Artificial Sequence: Synthetic oligonucleotide
  Antisense Strand to SEQ ID NO: 402561
uagauccguuacuuaaucu

SEQ ID NO: 402563 - RNA, 19 nt, Artificial Sequence
  Description of Artificial Sequence: Synthetic oligonucleotide
  Sense Strand Starting at position 1068 of SEQ ID NO: 316272
acggaucuaguuuaguuaa

SEQ ID NO: 402564 - RNA, 19 nt, Artificial Sequence
  Description of Artificial Sequence: Synthetic oligonucleotide
  Antisense Strand to SEQ ID NO: 402563
uuaacuaaacuagauccgu

SEQ ID NO: 402565 - RNA, 19 nt, Artificial Sequence
  Description of Artificial Sequence: Synthetic oligonucleotide
  Sense Strand Starting at position 1068 of SEQ ID NO: 316275
gaucuaguuuaguuaaggu

SEQ ID NO: 402566 - RNA, 19 nt, Artificial Sequence
  Description of Artificial Sequence: Synthetic oligonucleotide
  Antisense Strand to SEQ ID NO: 402565
accuuaacuaaacuagauc

SEQ ID NO: 402567 - RNA, 19 nt, Artificial Sequence
  Description of Artificial Sequence: Synthetic oligonucleotide
  Sense Strand Starting at position 1068 of SEQ ID NO: 316396
uaaauaaggcgaugguuau

SEQ ID NO: 402568 - RNA, 19 nt, Artificial Sequence
  Description of Artificial Sequence: Synthetic oligonucleotide
  Antisense Strand to SEQ ID NO: 402567
auaaccaucgccuuauuua

SEQ ID NO: 402569 - RNA, 19 nt, Artificial Sequence
  Description of Artificial Sequence: Synthetic oligonucleotide
  Sense Strand Starting at position 1068 of SEQ ID NO: 316397
aaauaaggcgaugguuauu

SEQ ID NO: 402570 - RNA, 19 nt, Artificial Sequence
  Description of Artificial Sequence: Synthetic oligonucleotide
  Antisense Strand to SEQ ID NO: 402569
aauaaccaucgccuuauuu

SEQ ID NO: 402571 - RNA, 19 nt, Artificial Sequence
  Description of Artificial Sequence: Synthetic oligonucleotide
  Sense Strand Starting at position 1068 of SEQ ID NO: 316476
ggucucaaucuguacagua

SEQ ID NO: 402572 - RNA, 19 nt, Artificial Sequence
  Description of Artificial Sequence: Synthetic oligonucleotide
  Antisense Strand to SEQ ID NO: 402571
uacuguacagauugagacc

SEQ ID NO: 402573 - RNA, 19 nt, Artificial Sequence
  Description of Artificial Sequence: Synthetic oligonucleotide
  Sense Strand Starting at position 1068 of SEQ ID NO: 316496
ucguguaagcgcucuggau

SEQ ID NO: 402574 - RNA, 19 nt, Artificial Sequence
  Description of Artificial Sequence: Synthetic oligonucleotide
  Antisense Strand to SEQ ID NO: 402573
auccagagcgcuuacacga

SEQ ID NO: 402575 - RNA, 19 nt, Artificial Sequence
  Description of Artificial Sequence: Synthetic oligonucleotide
  Sense Strand Starting at position 1068 of SEQ ID NO: 316497
cguguaagcgcucuggauu

SEQ ID NO: 402576 - RNA, 19 nt, Artificial Sequence
  Description of Artificial Sequence: Synthetic oligonucleotide
  Antisense Strand to SEQ ID NO: 402575
aauccagagcgcuuacacg

SEQ ID NO: 402577 - RNA, 19 nt, Artificial Sequence
  Description of Artificial Sequence: Synthetic oligonucleotide
  Sense Strand Starting at position 1068 of SEQ ID NO: 316498
guguaagcgcucuggauuu

SEQ ID NO: 402578 - RNA, 19 nt, Artificial Sequence
  Description of Artificial Sequence: Synthetic oligonucleotide
  Antisense Strand to SEQ ID NO: 402577
aaauccagagcgcuuacac

SEQ ID NO: 402579 - RNA, 19 nt, Artificial Sequence
  Description of Artificial Sequence: Synthetic oligonucleotide
  Sense Strand Starting at position 1068 of SEQ ID NO: 316529
auauuugaucuccguccau

SEQ ID NO: 402580 - RNA, 19 nt, Artificial Sequence
  Description of Artificial Sequence: Synthetic oligonucleotide
  Antisense Strand to SEQ ID NO: 402579
auggacggagaucaaauau

SEQ ID NO: 402581 - RNA, 19 nt, Artificial Sequence
  Description of Artificial Sequence: Synthetic oligonucleotide
  Sense Strand Starting at position 1068 of SEQ ID NO: 316533
uugaucuccguccauaauu

SEQ ID NO: 402582 - RNA, 19 nt, Artificial Sequence
  Description of Artificial Sequence: Synthetic oligonucleotide
  Antisense Strand to SEQ ID NO: 402581
aauuauggacggagaucaa

SEQ ID NO: 402583 - RNA, 19 nt, Artificial Sequence
  Description of Artificial Sequence: Synthetic oligonucleotide
  Sense Strand Starting at position 1068 of SEQ ID NO: 317470
ugugauagguaguucaaag

SEQ ID NO: 402584 - RNA, 19 nt, Artificial Sequence
  Description of Artificial Sequence: Synthetic oligonucleotide
  Antisense Strand to SEQ ID NO: 402583
cuuugaacuaccuaucaca

SEQ ID NO: 402585 - RNA, 19 nt, Artificial Sequence
  Description of Artificial Sequence: Synthetic oligonucleotide
  Sense Strand Starting at position 1068 of SEQ ID NO: 317552
ugagaagaaucucuuuggu

SEQ ID NO: 402586 - RNA, 19 nt, Artificial Sequence
  Description of Artificial Sequence: Synthetic oligonucleotide
  Antisense Strand to SEQ ID NO: 402585
accaaagagauucuucuca

SEQ ID NO: 402587 - RNA, 19 nt, Artificial Sequence
  Description of Artificial Sequence: Synthetic oligonucleotide
  Sense Strand Starting at position 1068 of SEQ ID NO: 317730
cuuuaacucuucucgagaa

SEQ ID NO: 402588 - RNA, 19 nt, Artificial Sequence
  Description of Artificial Sequence: Synthetic oligonucleotide
  Antisense Strand to SEQ ID NO: 402587
uucucgagaagaguuaaag

SEQ ID NO: 402589 - RNA, 19 nt, Artificial Sequence
  Description of Artificial Sequence: Synthetic oligonucleotide
  Sense Strand Starting at position 1068 of SEQ ID NO: 317774
cgacuagaagccugagaaa

SEQ ID NO: 402590 - RNA, 19 nt, Artificial Sequence
  Description of Artificial Sequence: Synthetic oligonucleotide
  Antisense Strand to SEQ ID NO: 402589
uuucucaggcuucuagucg

SEQ ID NO: 402591 - RNA, 19 nt, Artificial Sequence
  Description of Artificial Sequence: Synthetic oligonucleotide
  Sense Strand Starting at position 1068 of SEQ ID NO: 317787
gagaaaucguccuuaauga

SEQ ID NO: 402592 - RNA, 19 nt, Artificial Sequence
  Description of Artificial Sequence: Synthetic oligonucleotide
  Antisense Strand to SEQ ID NO: 402591
ucauuaaggacgauuucuc

SEQ ID NO: 402593 - RNA, 19 nt, Artificial Sequence
  Description of Artificial Sequence: Synthetic oligonucleotide
  Sense Strand Starting at position 1068 of SEQ ID NO: 317788
agaaaucguccuuaaugau

SEQ ID NO: 402594 - RNA, 19 nt, Artificial Sequence
  Description of Artificial Sequence: Synthetic oligonucleotide
  Antisense Strand to SEQ ID NO: 402593
aucauuaaggacgauuucu

SEQ ID NO: 402595 - RNA, 19 nt, Artificial Sequence
  Description of Artificial Sequence: Synthetic oligonucleotide
  Sense Strand Starting at position 1068 of SEQ ID NO: 318166
cuguucugucaagaacacu

SEQ ID NO: 402596 - RNA, 19 nt, Artificial Sequence
  Description of Artificial Sequence: Synthetic oligonucleotide
  Antisense Strand to SEQ ID NO: 402595
aguguucuugacagaacag

SEQ ID NO: 402597 - RNA, 19 nt, Artificial Sequence
  Description of Artificial Sequence: Synthetic oligonucleotide
  Sense Strand Starting at position 1068 of SEQ ID NO: 318422
cucguugcaauuugaagua

SEQ ID NO: 402598 - RNA, 19 nt, Artificial Sequence
  Description of Artificial Sequence: Synthetic oligonucleotide
  Antisense Strand to SEQ ID NO: 402597
uacuucaaauugcaacgag

SEQ ID NO: 402599 - RNA, 19 nt, Artificial Sequence
  Description of Artificial Sequence: Synthetic oligonucleotide
  Sense Strand Starting at position 1068 of SEQ ID NO: 318506
cuaggcauucuuuaugaag

SEQ ID NO: 402600 - RNA, 19 nt, Artificial Sequence
  Description of Artificial Sequence: Synthetic oligonucleotide
  Antisense Strand to SEQ ID NO: 402599
cuucauaaagaaugccuag

SEQ ID NO: 402601 - RNA, 19 nt, Artificial Sequence
  Description of Artificial Sequence: Synthetic oligonucleotide
  Sense Strand Starting at position 1068 of SEQ ID NO: 318695
uggcuuauauguguagaag

SEQ ID NO: 402602 - RNA, 19 nt, Artificial Sequence
  Description of Artificial Sequence: Synthetic oligonucleotide
  Antisense Strand to SEQ ID NO: 402601
cuucuacacauauaagcca

SEQ ID NO: 402603 - RNA, 19 nt, Artificial Sequence
  Description of Artificial Sequence: Synthetic oligonucleotide
  Sense Strand Starting at position 1068 of SEQ ID NO: 318696
ggcuuauauguguagaagc

SEQ ID NO: 402604 - RNA, 19 nt, Artificial Sequence
  Description of Artificial Sequence: Synthetic oligonucleotide
  Antisense Strand to SEQ ID NO: 402603
gcuucuacacauauaagcc

SEQ ID NO: 402605 - RNA, 19 nt, Artificial Sequence
  Description of Artificial Sequence: Synthetic oligonucleotide
  Sense Strand Starting at position 1068 of SEQ ID NO: 318698
cuuauauguguagaagcau

SEQ ID NO: 402606 - RNA, 19 nt, Artificial Sequence
  Description of Artificial Sequence: Synthetic oligonucleotide
  Antisense Strand to SEQ ID NO: 402605
augcuucuacacauauaag

SEQ ID NO: 402607 - RNA, 19 nt, Artificial Sequence
  Description of Artificial Sequence: Synthetic oligonucleotide
  Sense Strand Starting at position 1068 of SEQ ID NO: 318832
gcuguacauuugguuuaau

SEQ ID NO: 402608 - RNA, 19 nt, Artificial Sequence
  Description of Artificial Sequence: Synthetic oligonucleotide
  Antisense Strand to SEQ ID NO: 402607
auuaaaccaaauguacagc

SEQ ID NO: 402609 - RNA, 19 nt, Artificial Sequence
  Description of Artificial Sequence: Synthetic oligonucleotide
  Sense Strand Starting at position 1068 of SEQ ID NO: 318866
ucuugaaaugcuuaggagu

SEQ ID NO: 402610 - RNA, 19 nt, Artificial Sequence
  Description of Artificial Sequence: Synthetic oligonucleotide
  Antisense Strand to SEQ ID NO: 402609
acuccuaagcauuucaaga

SEQ ID NO: 402611 - RNA, 19 nt, Artificial Sequence
  Description of Artificial Sequence: Synthetic oligonucleotide
  Sense Strand Starting at position 1068 of SEQ ID NO: 319045
uuuguaguuagggaccuaa

SEQ ID NO: 402612 - RNA, 19 nt, Artificial Sequence
  Description of Artificial Sequence: Synthetic oligonucleotide
  Antisense Strand to SEQ ID NO: 402611
uuaggucccuaacuacaaa

SEQ ID NO: 402613 - RNA, 19 nt, Artificial Sequence
  Description of Artificial Sequence: Synthetic oligonucleotide
  Sense Strand Starting at position 1069 of SEQ ID NO: 315785
ccugcaaaucaaugagcau

SEQ ID NO: 402614 - RNA, 19 nt, Artificial Sequence
  Description of Artificial Sequence: Synthetic oligonucleotide
  Antisense Strand to SEQ ID NO: 402613
augcucauugauuugcagg

SEQ ID NO: 402615 - RNA, 19 nt, Artificial Sequence
  Description of Artificial Sequence: Synthetic oligonucleotide
  Sense Strand Starting at position 1069 of SEQ ID NO: 315811
ugcagacacuauucuagaa

SEQ ID NO: 402616 - RNA, 19 nt, Artificial Sequence
  Description of Artificial Sequence: Synthetic oligonucleotide
  Antisense Strand to SEQ ID NO: 402615
uucuagaauagugucugca

SEQ ID NO: 402617 - RNA, 19 nt, Artificial Sequence
  Description of Artificial Sequence: Synthetic oligonucleotide
  Sense Strand Starting at position 1069 of SEQ ID NO: 315849
gaauacuucugugucccga

SEQ ID NO: 402618 - RNA, 19 nt, Artificial Sequence
  Description of Artificial Sequence: Synthetic oligonucleotide
  Antisense Strand to SEQ ID NO: 402617
ucgggacacagaaguauuc

SEQ ID NO: 402619 - RNA, 19 nt, Artificial Sequence
  Description of Artificial Sequence: Synthetic oligonucleotide
  Sense Strand Starting at position 1069 of SEQ ID NO: 315851
auacuucugugucccgaga

SEQ ID NO: 402620 - RNA, 19 nt, Artificial Sequence
  Description of Artificial Sequence: Synthetic oligonucleotide
  Antisense Strand to SEQ ID NO: 402619
ucucgggacacagaaguau

SEQ ID NO: 402621 - RNA, 19 nt, Artificial Sequence
  Description of Artificial Sequence: Synthetic oligonucleotide
  Sense Strand Starting at position 1069 of SEQ ID NO: 315944
uuauccauggcuuauuagu

SEQ ID NO: 402622 - RNA, 19 nt, Artificial Sequence
  Description of Artificial Sequence: Synthetic oligonucleotide
  Antisense Strand to SEQ ID NO: 402621
acuaauaagccauggauaa

SEQ ID NO: 402623 - RNA, 19 nt, Artificial Sequence
  Description of Artificial Sequence: Synthetic oligonucleotide
  Sense Strand Starting at position 1069 of SEQ ID NO: 315950
auggcuuauuagucuagga

SEQ ID NO: 402624 - RNA, 19 nt, Artificial Sequence
  Description of Artificial Sequence: Synthetic oligonucleotide
  Antisense Strand to SEQ ID NO: 402623
uccuagacuaauaagccau

SEQ ID NO: 402625 - RNA, 19 nt, Artificial Sequence
  Description of Artificial Sequence: Synthetic oligonucleotide
  Sense Strand Starting at position 1069 of SEQ ID NO: 315952
ggcuuauuagucuaggaaa

SEQ ID NO: 402626 - RNA, 19 nt, Artificial Sequence
  Description of Artificial Sequence: Synthetic oligonucleotide
  Antisense Strand to SEQ ID NO: 402625
uuuccuagacuaauaagcc

SEQ ID NO: 402627 - RNA, 19 nt, Artificial Sequence
  Description of Artificial Sequence: Synthetic oligonucleotide
  Sense Strand Starting at position 1069 of SEQ ID NO: 315954
cuuauuagucuaggaaauc

SEQ ID NO: 402628 - RNA, 19 nt, Artificial Sequence
  Description of Artificial Sequence: Synthetic oligonucleotide
  Antisense Strand to SEQ ID NO: 402627
gauuuccuagacuaauaag

SEQ ID NO: 402629 - RNA, 19 nt, Artificial Sequence
  Description of Artificial Sequence: Synthetic oligonucleotide
  Sense Strand Starting at position 1069 of SEQ ID NO: 315964
uaggaaaucuaaggaagga

SEQ ID NO: 402630 - RNA, 19 nt, Artificial Sequence
  Description of Artificial Sequence: Synthetic oligonucleotide
  Antisense Strand to SEQ ID NO: 402629
uccuuccuuagauuuccua

SEQ ID NO: 402631 - RNA, 19 nt, Artificial Sequence
  Description of Artificial Sequence: Synthetic oligonucleotide
  Sense Strand Starting at position 1069 of SEQ ID NO: 316080
aaagguauuuauuaggacu

SEQ ID NO: 402632 - RNA, 19 nt, Artificial Sequence
  Description of Artificial Sequence: Synthetic oligonucleotide
  Antisense Strand to SEQ ID NO: 402631
aguccuaauaaauaccuuu

SEQ ID NO: 402633 - RNA, 19 nt, Artificial Sequence
  Description of Artificial Sequence: Synthetic oligonucleotide
  Sense Strand Starting at position 1069 of SEQ ID NO: 316083
gguauuuauuaggacuuua

SEQ ID NO: 402634 - RNA, 19 nt, Artificial Sequence
  Description of Artificial Sequence: Synthetic oligonucleotide
  Antisense Strand to SEQ ID NO: 402633
uaaaguccuaauaaauacc

SEQ ID NO: 402635 - RNA, 19 nt, Artificial Sequence
  Description of Artificial Sequence: Synthetic oligonucleotide
  Sense Strand Starting at position 1069 of SEQ ID NO: 316091
uuaggacuuuacucuggaa

SEQ ID NO: 402636 - RNA, 19 nt, Artificial Sequence
  Description of Artificial Sequence: Synthetic oligonucleotide
  Antisense Strand to SEQ ID NO: 402635
uuccagaguaaaguccuaa

SEQ ID NO: 402637 - RNA, 19 nt, Artificial Sequence
  Description of Artificial Sequence: Synthetic oligonucleotide
  Sense Strand Starting at position 1069 of SEQ ID NO: 317287
aauugugucaugggaggga

SEQ ID NO: 402638 - RNA, 19 nt, Artificial Sequence
  Description of Artificial Sequence: Synthetic oligonucleotide
  Antisense Strand to SEQ ID NO: 402637
ucccucccaugacacaauu

SEQ ID NO: 402639 - RNA, 19 nt, Artificial Sequence
  Description of Artificial Sequence: Synthetic oligonucleotide
  Sense Strand Starting at position 1069 of SEQ ID NO: 317347
uccuguucucgugauaaug

SEQ ID NO: 402640 - RNA, 19 nt, Artificial Sequence
  Description of Artificial Sequence: Synthetic oligonucleotide
  Antisense Strand to SEQ ID NO: 402639
cauuaucacgagaacagga

SEQ ID NO: 402641 - RNA, 19 nt, Artificial Sequence
  Description of Artificial Sequence: Synthetic oligonucleotide
  Sense Strand Starting at position 1069 of SEQ ID NO: 317899
augacacagucaguauauu

SEQ ID NO: 402642 - RNA, 19 nt, Artificial Sequence
  Description of Artificial Sequence: Synthetic oligonucleotide
  Antisense Strand to SEQ ID NO: 402641
aauauacugacugugucau

SEQ ID NO: 402643 - RNA, 19 nt, Artificial Sequence
  Description of Artificial Sequence: Synthetic oligonucleotide
  Sense Strand Starting at position 1069 of SEQ ID NO: 318331
aggauagacgucugaagcu

SEQ ID NO: 402644 - RNA, 19 nt, Artificial Sequence
  Description of Artificial Sequence: Synthetic oligonucleotide
  Antisense Strand to SEQ ID NO: 402643
agcuucagacgucuauccu

SEQ ID NO: 402645 - RNA, 19 nt, Artificial Sequence
  Description of Artificial Sequence: Synthetic oligonucleotide
  Sense Strand Starting at position 1069 of SEQ ID NO: 318358
aggccaagacugcagauau

SEQ ID NO: 402646 - RNA, 19 nt, Artificial Sequence
  Description of Artificial Sequence: Synthetic oligonucleotide
  Antisense Strand to SEQ ID NO: 402645
auaucugcagucuuggccu

SEQ ID NO: 402647 - RNA, 19 nt, Artificial Sequence
  Description of Artificial Sequence: Synthetic oligonucleotide
  Sense Strand Starting at position 1069 of SEQ ID NO: 318554
ccagccagcugauucuuaa

SEQ ID NO: 402648 - RNA, 19 nt, Artificial Sequence
  Description of Artificial Sequence: Synthetic oligonucleotide
  Antisense Strand to SEQ ID NO: 402647
uuaagaaucagcuggcugg

SEQ ID NO: 402649 - RNA, 19 nt, Artificial Sequence
  Description of Artificial Sequence: Synthetic oligonucleotide
  Sense Strand Starting at position 1069 of SEQ ID NO: 318600
aucaacuguugaggaauuu

SEQ ID NO: 402650 - RNA, 19 nt, Artificial Sequence
  Description of Artificial Sequence: Synthetic oligonucleotide
  Antisense Strand to SEQ ID NO: 402649
aaauuccucaacaguugau

SEQ ID NO: 402651 - RNA, 19 nt, Artificial Sequence
  Description of Artificial Sequence: Synthetic oligonucleotide
  Sense Strand Starting at position 1069 of SEQ ID NO: 318666
uuggucgauucagauuuga

SEQ ID NO: 402652 - RNA, 19 nt, Artificial Sequence
  Description of Artificial Sequence: Synthetic oligonucleotide
  Antisense Strand to SEQ ID NO: 402651
ucaaaucugaaucgaccaa

SEQ ID NO: 402653 - RNA, 19 nt, Artificial Sequence
  Description of Artificial Sequence: Synthetic oligonucleotide
  Sense Strand Starting at position 1069 of SEQ ID NO: 318807
ugguccuuauccucauaga

SEQ ID NO: 402654 - RNA, 19 nt, Artificial Sequence
  Description of Artificial Sequence: Synthetic oligonucleotide
  Antisense Strand to SEQ ID NO: 402653
ucuaugaggauaaggacca

SEQ ID NO: 402655 - RNA, 19 nt, Artificial Sequence
  Description of Artificial Sequence: Synthetic oligonucleotide
  Sense Strand Starting at position 1069 of SEQ ID NO: 318808
gguccuuauccucauagau

SEQ ID NO: 402656 - RNA, 19 nt, Artificial Sequence
  Description of Artificial Sequence: Synthetic oligonucleotide
  Antisense Strand to SEQ ID NO: 402655
aucuaugaggauaaggacc

SEQ ID NO: 402657 - RNA, 19 nt, Artificial Sequence
  Description of Artificial Sequence: Synthetic oligonucleotide
  Sense Strand Starting at position 1069 of SEQ ID NO: 318854
cucauaugucaauggcuua

SEQ ID NO: 402658 - RNA, 19 nt, Artificial Sequence
  Description of Artificial Sequence: Synthetic oligonucleotide
  Antisense Strand to SEQ ID NO: 402657
uaagccauugacauaugag

SEQ ID NO: 402659 - RNA, 19 nt, Artificial Sequence
  Description of Artificial Sequence: Synthetic oligonucleotide
  Sense Strand Starting at position 1069 of SEQ ID NO: 318859
augucaauggcuuagcaaa

SEQ ID NO: 402660 - RNA, 19 nt, Artificial Sequence
  Description of Artificial Sequence: Synthetic oligonucleotide
  Antisense Strand to SEQ ID NO: 402659
uuugcuaagccauugacau

SEQ ID NO: 402661 - RNA, 19 nt, Artificial Sequence
  Description of Artificial Sequence: Synthetic oligonucleotide
  Sense Strand Starting at position 1069 of SEQ ID NO: 318866
uggcuuagcaaaugauuag

SEQ ID NO: 402662 - RNA, 19 nt, Artificial Sequence
  Description of Artificial Sequence: Synthetic oligonucleotide
  Antisense Strand to SEQ ID NO: 402661
cuaaucauuugcuaagcca

SEQ ID NO: 402663 - RNA, 19 nt, Artificial Sequence
  Description of Artificial Sequence: Synthetic oligonucleotide
  Sense Strand Starting at position 1069 of SEQ ID NO: 318966
uauguaauuuauguuggca

SEQ ID NO: 402664 - RNA, 19 nt, Artificial Sequence
  Description of Artificial Sequence: Synthetic oligonucleotide
  Antisense Strand to SEQ ID NO: 402663
ugccaacauaaauuacaua

SEQ ID NO: 402665 - RNA, 19 nt, Artificial Sequence
  Description of Artificial Sequence: Synthetic oligonucleotide
  Sense Strand Starting at position 1069 of SEQ ID NO: 318969
guaauuuauguuggcauug

SEQ ID NO: 402666 - RNA, 19 nt, Artificial Sequence
  Description of Artificial Sequence: Synthetic oligonucleotide
  Antisense Strand to SEQ ID NO: 402665
caaugccaacauaaauuac

SEQ ID NO: 402667 - RNA, 19 nt, Artificial Sequence
  Description of Artificial Sequence: Synthetic oligonucleotide
  Sense Strand Starting at position 1069 of SEQ ID NO: 318970
uaauuuauguuggcauugu

SEQ ID NO: 402668 - RNA, 19 nt, Artificial Sequence
  Description of Artificial Sequence: Synthetic oligonucleotide
  Antisense Strand to SEQ ID NO: 402667
acaaugccaacauaaauua

SEQ ID NO: 402669 - RNA, 19 nt, Artificial Sequence
  Description of Artificial Sequence: Synthetic oligonucleotide
  Sense Strand Starting at position 1069 of SEQ ID NO: 318980
uggcauugugcuguuguaa

SEQ ID NO: 402670 - RNA, 19 nt, Artificial Sequence
  Description of Artificial Sequence: Synthetic oligonucleotide
  Antisense Strand to SEQ ID NO: 402669
uuacaacagcacaaugcca

SEQ ID NO: 402671 - RNA, 19 nt, Artificial Sequence
  Description of Artificial Sequence: Synthetic oligonucleotide
  Sense Strand Starting at position 1069 of SEQ ID NO: 318981
ggcauugugcuguuguaac

SEQ ID NO: 402672 - RNA, 19 nt, Artificial Sequence
  Description of Artificial Sequence: Synthetic oligonucleotide
  Antisense Strand to SEQ ID NO: 402671
guuacaacagcacaaugcc

SEQ ID NO: 402673 - RNA, 19 nt, Artificial Sequence
  Description of Artificial Sequence: Synthetic oligonucleotide
  Sense Strand Starting at position 1069 of SEQ ID NO: 319024
gacaaagacugugacacaa

SEQ ID NO: 402674 - RNA, 19 nt, Artificial Sequence
  Description of Artificial Sequence: Synthetic oligonucleotide
  Antisense Strand to SEQ ID NO: 402673
uugugucacagucuuuguc

SEQ ID NO: 402675 - RNA, 19 nt, Artificial Sequence
  Description of Artificial Sequence: Synthetic oligonucleotide
  Sense Strand Starting at position 1069 of SEQ ID NO: 319075
auggauauguagucaguuu

SEQ ID NO: 402676 - RNA, 19 nt, Artificial Sequence
  Description of Artificial Sequence: Synthetic oligonucleotide
  Antisense Strand to SEQ ID NO: 402675
aaacugacuacauauccau

SEQ ID NO: 402677 - RNA, 19 nt, Artificial Sequence
  Description of Artificial Sequence: Synthetic oligonucleotide
  Sense Strand Starting at position 1069 of SEQ ID NO: 319076
uggauauguagucaguuua

SEQ ID NO: 402678 - RNA, 19 nt, Artificial Sequence
  Description of Artificial Sequence: Synthetic oligonucleotide
  Antisense Strand to SEQ ID NO: 402677
uaaacugacuacauaucca

SEQ ID NO: 402679 - RNA, 19 nt, Artificial Sequence
  Description of Artificial Sequence: Synthetic oligonucleotide
  Sense Strand Starting at position 1069 of SEQ ID NO: 319086
gucaguuuaugagugauua

SEQ ID NO: 402680 - RNA, 19 nt, Artificial Sequence
  Description of Artificial Sequence: Synthetic oligonucleotide
  Antisense Strand to SEQ ID NO: 402679
uaaucacucauaaacugac

SEQ ID NO: 402681 - RNA, 19 nt, Artificial Sequence
  Description of Artificial Sequence: Synthetic oligonucleotide
  Sense Strand Starting at position 1069 of SEQ ID NO: 319087
ucaguuuaugagugauuaa

SEQ ID NO: 402682 - RNA, 19 nt, Artificial Sequence
  Description of Artificial Sequence: Synthetic oligonucleotide
  Antisense Strand to SEQ ID NO: 402681
uuaaucacucauaaacuga

SEQ ID NO: 402683 - RNA, 19 nt, Artificial Sequence
  Description of Artificial Sequence: Synthetic oligonucleotide
  Sense Strand Starting at position 1069 of SEQ ID NO: 319108
uugugucacaaugauguua

SEQ ID NO: 402684 - RNA, 19 nt, Artificial Sequence
  Description of Artificial Sequence: Synthetic oligonucleotide
  Antisense Strand to SEQ ID NO: 402683
uaacaucauugugacacaa

SEQ ID NO: 402685 - RNA, 19 nt, Artificial Sequence
  Description of Artificial Sequence: Synthetic oligonucleotide
  Sense Strand Starting at position 1069 of SEQ ID NO: 319116
caaugauguuagcugucua

SEQ ID NO: 402686 - RNA, 19 nt, Artificial Sequence
  Description of Artificial Sequence: Synthetic oligonucleotide
  Antisense Strand to SEQ ID NO: 402685
uagacagcuaacaucauug

SEQ ID NO: 402687 - RNA, 19 nt, Artificial Sequence
  Description of Artificial Sequence: Synthetic oligonucleotide
  Sense Strand Starting at position 1069 of SEQ ID NO: 319123
guuagcugucuauagugga

SEQ ID NO: 402688 - RNA, 19 nt, Artificial Sequence
  Description of Artificial Sequence: Synthetic oligonucleotide
  Antisense Strand to SEQ ID NO: 402687
uccacuauagacagcuaac

SEQ ID NO: 402689 - RNA, 19 nt, Artificial Sequence
  Description of Artificial Sequence: Synthetic oligonucleotide
  Sense Strand Starting at position 1069 of SEQ ID NO: 319127
gcugucuauaguggagaua

SEQ ID NO: 402690 - RNA, 19 nt, Artificial Sequence
  Description of Artificial Sequence: Synthetic oligonucleotide
  Antisense Strand to SEQ ID NO: 402689
uaucuccacuauagacagc

SEQ ID NO: 402691 - RNA, 19 nt, Artificial Sequence
  Description of Artificial Sequence: Synthetic oligonucleotide
  Sense Strand Starting at position 1069 of SEQ ID NO: 319139
ggagauaacuagcugucca

SEQ ID NO: 402692 - RNA, 19 nt, Artificial Sequence
  Description of Artificial Sequence: Synthetic oligonucleotide
  Antisense Strand to SEQ ID NO: 402691
uggacagcuaguuaucucc

SEQ ID NO: 402693 - RNA, 19 nt, Artificial Sequence
  Description of Artificial Sequence: Synthetic oligonucleotide
  Sense Strand Starting at position 1070 of SEQ ID NO: 315280
agggaagaaucagaauuaa

SEQ ID NO: 402694 - RNA, 19 nt, Artificial Sequence
  Description of Artificial Sequence: Synthetic oligonucleotide
  Antisense Strand to SEQ ID NO: 402693
uuaauucugauucuucccu

SEQ ID NO: 402695 - RNA, 19 nt, Artificial Sequence
  Description of Artificial Sequence: Synthetic oligonucleotide
  Sense Strand Starting at position 1070 of SEQ ID NO: 315404
uuuggaauuugucagaggu

SEQ ID NO: 402696 - RNA, 19 nt, Artificial Sequence
  Description of Artificial Sequence: Synthetic oligonucleotide
  Antisense Strand to SEQ ID NO: 402695
accucugacaaauuccaaa

SEQ ID NO: 402697 - RNA, 19 nt, Artificial Sequence
  Description of Artificial Sequence: Synthetic oligonucleotide
  Sense Strand Starting at position 1070 of SEQ ID NO: 315406
uggaauuugucagagguca

SEQ ID NO: 402698 - RNA, 19 nt, Artificial Sequence
  Description of Artificial Sequence: Synthetic oligonucleotide
  Antisense Strand to SEQ ID NO: 402697
ugaccucugacaaauucca

SEQ ID NO: 402699 - RNA, 19 nt, Artificial Sequence
  Description of Artificial Sequence: Synthetic oligonucleotide
  Sense Strand Starting at position 1070 of SEQ ID NO: 315411
uuugucagaggucaacuau

SEQ ID NO: 402700 - RNA, 19 nt, Artificial Sequence
  Description of Artificial Sequence: Synthetic oligonucleotide
  Antisense Strand to SEQ ID NO: 402699
auaguugaccucugacaaa

SEQ ID NO: 402701 - RNA, 19 nt, Artificial Sequence
  Description of Artificial Sequence: Synthetic oligonucleotide
  Sense Strand Starting at position 1070 of SEQ ID NO: 315471
gguuuaauggccuaaucaa

SEQ ID NO: 402702 - RNA, 19 nt, Artificial Sequence
  Description of Artificial Sequence: Synthetic oligonucleotide
  Antisense Strand to SEQ ID NO: 402701
uugauuaggccauuaaacc

SEQ ID NO: 402703 - RNA, 19 nt, Artificial Sequence
  Description of Artificial Sequence: Synthetic oligonucleotide
  Sense Strand Starting at position 1070 of SEQ ID NO: 315502
ugccuugagcaagaacuuu

SEQ ID NO: 402704 - RNA, 19 nt, Artificial Sequence
  Description of Artificial Sequence: Synthetic oligonucleotide
  Antisense Strand to SEQ ID NO: 402703
aaaguucuugcucaaggca

SEQ ID NO: 402705 - RNA, 19 nt, Artificial Sequence
  Description of Artificial Sequence: Synthetic oligonucleotide
  Sense Strand Starting at position 1070 of SEQ ID NO: 315508
gagcaagaacuuugcuuag

SEQ ID NO: 402706 - RNA, 19 nt, Artificial Sequence
  Description of Artificial Sequence: Synthetic oligonucleotide
  Antisense Strand to SEQ ID NO: 402705
cuaagcaaaguucuugcuc

SEQ ID NO: 402707 - RNA, 19 nt, Artificial Sequence
  Description of Artificial Sequence: Synthetic oligonucleotide
  Sense Strand Starting at position 1070 of SEQ ID NO: 315510
gcaagaacuuugcuuagaa

SEQ ID NO: 402708 - RNA, 19 nt, Artificial Sequence
  Description of Artificial Sequence: Synthetic oligonucleotide
  Antisense Strand to SEQ ID NO: 402707
uucuaagcaaaguucuugc

SEQ ID NO: 402709 - RNA, 19 nt, Artificial Sequence
  Description of Artificial Sequence: Synthetic oligonucleotide
  Sense Strand Starting at position 1070 of SEQ ID NO: 315600
gguauuaacucaccagaau

SEQ ID NO: 402710 - RNA, 19 nt, Artificial Sequence
  Description of Artificial Sequence: Synthetic oligonucleotide
  Antisense Strand to SEQ ID NO: 402709
auucuggugaguuaauacc

SEQ ID NO: 402711 - RNA, 19 nt, Artificial Sequence
  Description of Artificial Sequence: Synthetic oligonucleotide
  Sense Strand Starting at position 1070 of SEQ ID NO: 315956
uuaaauugaucugugcacu

SEQ ID NO: 402712 - RNA, 19 nt, Artificial Sequence
  Description of Artificial Sequence: Synthetic oligonucleotide
  Antisense Strand to SEQ ID NO: 402711
agugcacagaucaauuuaa

SEQ ID NO: 402713 - RNA, 19 nt, Artificial Sequence
  Description of Artificial Sequence: Synthetic oligonucleotide
  Sense Strand Starting at position 1070 of SEQ ID NO: 316128
uagaucucggcuuggaaau

SEQ ID NO: 402714 - RNA, 19 nt, Artificial Sequence
  Description of Artificial Sequence: Synthetic oligonucleotide
  Antisense Strand to SEQ ID NO: 402713
auuuccaagccgagaucua

SEQ ID NO: 402715 - RNA, 19 nt, Artificial Sequence
  Description of Artificial Sequence: Synthetic oligonucleotide
  Sense Strand Starting at position 1070 of SEQ ID NO: 316129
agaucucggcuuggaaauu

SEQ ID NO: 402716 - RNA, 19 nt, Artificial Sequence
  Description of Artificial Sequence: Synthetic oligonucleotide
  Antisense Strand to SEQ ID NO: 402715
aauuuccaagccgagaucu

SEQ ID NO: 402717 - RNA, 19 nt, Artificial Sequence
  Description of Artificial Sequence: Synthetic oligonucleotide
  Sense Strand Starting at position 1070 of SEQ ID NO: 316156
aucaucucucuuggaaaug

SEQ ID NO: 402718 - RNA, 19 nt, Artificial Sequence
  Description of Artificial Sequence: Synthetic oligonucleotide
  Antisense Strand to SEQ ID NO: 402717
cauuuccaagagagaugau

SEQ ID NO: 402719 - RNA, 19 nt, Artificial Sequence
  Description of Artificial Sequence: Synthetic oligonucleotide
  Sense Strand Starting at position 1070 of SEQ ID NO: 316312
cguugagccagugaugaca

SEQ ID NO: 402720 - RNA, 19 nt, Artificial Sequence
  Description of Artificial Sequence: Synthetic oligonucleotide
  Antisense Strand to SEQ ID NO: 402719
ugucaucacuggcucaacg

SEQ ID NO: 402721 - RNA, 19 nt, Artificial Sequence
  Description of Artificial Sequence: Synthetic oligonucleotide
  Sense Strand Starting at position 1070 of SEQ ID NO: 317575
acucauccucuugagcgaa

SEQ ID NO: 402722 - RNA, 19 nt, Artificial Sequence
  Description of Artificial Sequence: Synthetic oligonucleotide
  Antisense Strand to SEQ ID NO: 402721
uucgcucaagaggaugagu

SEQ ID NO: 402723 - RNA, 19 nt, Artificial Sequence
  Description of Artificial Sequence: Synthetic oligonucleotide
  Sense Strand Starting at position 1070 of SEQ ID NO: 317607
ggagguuccgugcacugau

SEQ ID NO: 402724 - RNA, 19 nt, Artificial Sequence
  Description of Artificial Sequence: Synthetic oligonucleotide
  Antisense Strand to SEQ ID NO: 402723
aucagugcacggaaccucc

SEQ ID NO: 402725 - RNA, 19 nt, Artificial Sequence
  Description of Artificial Sequence: Synthetic oligonucleotide
  Sense Strand Starting at position 1070 of SEQ ID NO: 317693
ccugaauagccaggagcau

SEQ ID NO: 402726 - RNA, 19 nt, Artificial Sequence
  Description of Artificial Sequence: Synthetic oligonucleotide
  Antisense Strand to SEQ ID NO: 402725
augcuccuggcuauucagg

SEQ ID NO: 402727 - RNA, 19 nt, Artificial Sequence
  Description of Artificial Sequence: Synthetic oligonucleotide
  Sense Strand Starting at position 1070 of SEQ ID NO: 317768
gcacacucuggccaagaau

SEQ ID NO: 402728 - RNA, 19 nt, Artificial Sequence
  Description of Artificial Sequence: Synthetic oligonucleotide
  Antisense Strand to SEQ ID NO: 402727
auucuuggccagagugugc

SEQ ID NO: 402729 - RNA, 19 nt, Artificial Sequence
  Description of Artificial Sequence: Synthetic oligonucleotide
  Sense Strand Starting at position 1070 of SEQ ID NO: 317779
ccaagaauuuaugaauuag

SEQ ID NO: 402730 - RNA, 19 nt, Artificial Sequence
  Description of Artificial Sequence: Synthetic oligonucleotide
  Antisense Strand to SEQ ID NO: 402729
cuaauucauaaauucuugg

SEQ ID NO: 402731 - RNA, 19 nt, Artificial Sequence
  Description of Artificial Sequence: Synthetic oligonucleotide
  Sense Strand Starting at position 1070 of SEQ ID NO: 317899
augaaaugucagggccacu

SEQ ID NO: 402732 - RNA, 19 nt, Artificial Sequence
  Description of Artificial Sequence: Synthetic oligonucleotide
  Antisense Strand to SEQ ID NO: 402731
aguggcccugacauuucau

SEQ ID NO: 402733 - RNA, 19 nt, Artificial Sequence
  Description of Artificial Sequence: Synthetic oligonucleotide
  Sense Strand Starting at position 1070 of SEQ ID NO: 317979
gucuccuugccuugagaaa

SEQ ID NO: 402734 - RNA, 19 nt, Artificial Sequence
  Description of Artificial Sequence: Synthetic oligonucleotide
  Antisense Strand to SEQ ID NO: 402733
uuucucaaggcaaggagac

SEQ ID NO: 402735 - RNA, 19 nt, Artificial Sequence
  Description of Artificial Sequence: Synthetic oligonucleotide
  Sense Strand Starting at position 1070 of SEQ ID NO: 317980
ucuccuugccuugagaaau

SEQ ID NO: 402736 - RNA, 19 nt, Artificial Sequence
  Description of Artificial Sequence: Synthetic oligonucleotide
  Antisense Strand to SEQ ID NO: 402735
auuucucaaggcaaggaga

SEQ ID NO: 402737 - RNA, 19 nt, Artificial Sequence
  Description of Artificial Sequence: Synthetic oligonucleotide
  Sense Strand Starting at position 1070 of SEQ ID NO: 318060
aaauuugcuugagaaagga

SEQ ID NO: 402738 - RNA, 19 nt, Artificial Sequence
  Description of Artificial Sequence: Synthetic oligonucleotide
  Antisense Strand to SEQ ID NO: 402737
uccuuucucaagcaaauuu

SEQ ID NO: 402739 - RNA, 19 nt, Artificial Sequence
  Description of Artificial Sequence: Synthetic oligonucleotide
  Sense Strand Starting at position 1070 of SEQ ID NO: 318075
aggagcuucuuucugagaa

SEQ ID NO: 402740 - RNA, 19 nt, Artificial Sequence
  Description of Artificial Sequence: Synthetic oligonucleotide
  Antisense Strand to SEQ ID NO: 402739
uucucagaaagaagcuccu

SEQ ID NO: 402741 - RNA, 19 nt, Artificial Sequence
  Description of Artificial Sequence: Synthetic oligonucleotide
  Sense Strand Starting at position 1070 of SEQ ID NO: 318294
gaggguuacuccuugggca

SEQ ID NO: 402742 - RNA, 19 nt, Artificial Sequence
  Description of Artificial Sequence: Synthetic oligonucleotide
  Antisense Strand to SEQ ID NO: 402741
ugcccaaggaguaacccuc

SEQ ID NO: 402743 - RNA, 19 nt, Artificial Sequence
  Description of Artificial Sequence: Synthetic oligonucleotide
  Sense Strand Starting at position 1070 of SEQ ID NO: 318295
aggguuacuccuugggcaa

SEQ ID NO: 402744 - RNA, 19 nt, Artificial Sequence
  Description of Artificial Sequence: Synthetic oligonucleotide
  Antisense Strand to SEQ ID NO: 402743
uugcccaaggaguaacccu

SEQ ID NO: 402745 - RNA, 19 nt, Artificial Sequence
  Description of Artificial Sequence: Synthetic oligonucleotide
  Sense Strand Starting at position 1070 of SEQ ID NO: 318296
ggguuacuccuugggcaag

SEQ ID NO: 402746 - RNA, 19 nt, Artificial Sequence
  Description of Artificial Sequence: Synthetic oligonucleotide
  Antisense Strand to SEQ ID NO: 402745
cuugcccaaggaguaaccc

SEQ ID NO: 402747 - RNA, 19 nt, Artificial Sequence
  Description of Artificial Sequence: Synthetic oligonucleotide
  Sense Strand Starting at position 1070 of SEQ ID NO: 318337
acuguaguccacugucaaa

SEQ ID NO: 402748 - RNA, 19 nt, Artificial Sequence
  Description of Artificial Sequence: Synthetic oligonucleotide
  Antisense Strand to SEQ ID NO: 402747
uuugacaguggacuacagu

SEQ ID NO: 402749 - RNA, 19 nt, Artificial Sequence
  Description of Artificial Sequence: Synthetic oligonucleotide
  Sense Strand Starting at position 1070 of SEQ ID NO: 318435
aaggaugagucagcaauuc

SEQ ID NO: 402750 - RNA, 19 nt, Artificial Sequence
  Description of Artificial Sequence: Synthetic oligonucleotide
  Antisense Strand to SEQ ID NO: 402749
gaauugcugacucauccuu

SEQ ID NO: 402751 - RNA, 19 nt, Artificial Sequence
  Description of Artificial Sequence: Synthetic oligonucleotide
  Sense Strand Starting at position 1070 of SEQ ID NO: 318444
ucagcaauucugugagagg

SEQ ID NO: 402752 - RNA, 19 nt, Artificial Sequence
  Description of Artificial Sequence: Synthetic oligonucleotide
  Antisense Strand to SEQ ID NO: 402751
ccucucacagaauugcuga

SEQ ID NO: 402753 - RNA, 19 nt, Artificial Sequence
  Description of Artificial Sequence: Synthetic oligonucleotide
  Sense Strand Starting at position 1070 of SEQ ID NO: 318611
gguacauccuagcucugaa

SEQ ID NO: 402754 - RNA, 19 nt, Artificial Sequence
  Description of Artificial Sequence: Synthetic oligonucleotide
  Antisense Strand to SEQ ID NO: 402753
uucagagcuaggauguacc

SEQ ID NO: 402755 - RNA, 19 nt, Artificial Sequence
  Description of Artificial Sequence: Synthetic oligonucleotide
  Sense Strand Starting at position 1070 of SEQ ID NO: 318638
gagacagaguuugaaauaa

SEQ ID NO: 402756 - RNA, 19 nt, Artificial Sequence
  Description of Artificial Sequence: Synthetic oligonucleotide
  Antisense Strand to SEQ ID NO: 402755
uuauuucaaacucugucuc

SEQ ID NO: 402757 - RNA, 19 nt, Artificial Sequence
  Description of Artificial Sequence: Synthetic oligonucleotide
  Sense Strand Starting at position 1070 of SEQ ID NO: 318670
gucagcccugacuaugaua

SEQ ID NO: 402758 - RNA, 19 nt, Artificial Sequence
  Description of Artificial Sequence: Synthetic oligonucleotide
  Antisense Strand to SEQ ID NO: 402757
uaucauagucagggcugac

SEQ ID NO: 402759 - RNA, 19 nt, Artificial Sequence
  Description of Artificial Sequence: Synthetic oligonucleotide
  Sense Strand Starting at position 1070 of SEQ ID NO: 318755
gcuuaagcuuaggucaaga

SEQ ID NO: 402760 - RNA, 19 nt, Artificial Sequence
  Description of Artificial Sequence: Synthetic oligonucleotide
  Antisense Strand to SEQ ID NO: 402759
ucuugaccuaagcuuaagc

SEQ ID NO: 402761 - RNA, 19 nt, Artificial Sequence
  Description of Artificial Sequence: Synthetic oligonucleotide
  Sense Strand Starting at position 1070 of SEQ ID NO: 318760
agcuuaggucaagagcaaa

SEQ ID NO: 402762 - RNA, 19 nt, Artificial Sequence
  Description of Artificial Sequence: Synthetic oligonucleotide
  Antisense Strand to SEQ ID NO: 402761
uuugcucuugaccuaagcu

SEQ ID NO: 402763 - RNA, 19 nt, Artificial Sequence
  Description of Artificial Sequence: Synthetic oligonucleotide
  Sense Strand Starting at position 1070 of SEQ ID NO: 318846
ggagaucugggccagcuau

SEQ ID NO: 402764 - RNA, 19 nt, Artificial Sequence
  Description of Artificial Sequence: Synthetic oligonucleotide
  Antisense Strand to SEQ ID NO: 402763
auagcuggcccagaucucc

SEQ ID NO: 402765 - RNA, 19 nt, Artificial Sequence
  Description of Artificial Sequence: Synthetic oligonucleotide
  Sense Strand Starting at position 1070 of SEQ ID NO: 318956
ucagguuccacauguguaa

SEQ ID NO: 402766 - RNA, 19 nt, Artificial Sequence
  Description of Artificial Sequence: Synthetic oligonucleotide
  Antisense Strand to SEQ ID NO: 402765
uuacacauguggaaccuga

SEQ ID NO: 402767 - RNA, 19 nt, Artificial Sequence
  Description of Artificial Sequence: Synthetic oligonucleotide
  Sense Strand Starting at position 1070 of SEQ ID NO: 318958
agguuccacauguguaaau

SEQ ID NO: 402768 - RNA, 19 nt, Artificial Sequence
  Description of Artificial Sequence: Synthetic oligonucleotide
  Antisense Strand to SEQ ID NO: 402767
auuuacacauguggaaccu

SEQ ID NO: 402769 - RNA, 19 nt, Artificial Sequence
  Description of Artificial Sequence: Synthetic oligonucleotide
  Sense Strand Starting at position 1070 of SEQ ID NO: 318959
gguuccacauguguaaauu

SEQ ID NO: 402770 - RNA, 19 nt, Artificial Sequence
  Description of Artificial Sequence: Synthetic oligonucleotide
  Antisense Strand to SEQ ID NO: 402769
aauuuacacauguggaacc

SEQ ID NO: 402771 - RNA, 19 nt, Artificial Sequence
  Description of Artificial Sequence: Synthetic oligonucleotide
  Sense Strand Starting at position 1070 of SEQ ID NO: 318960
guuccacauguguaaauuc

SEQ ID NO: 402772 - RNA, 19 nt, Artificial Sequence
  Description of Artificial Sequence: Synthetic oligonucleotide
  Antisense Strand to SEQ ID NO: 402771
gaauuuacacauguggaac

SEQ ID NO: 402773 - RNA, 19 nt, Artificial Sequence
  Description of Artificial Sequence: Synthetic oligonucleotide
  Sense Strand Starting at position 1071 of SEQ ID NO: 315273
aggcuagauccuggucaga

SEQ ID NO: 402774 - RNA, 19 nt, Artificial Sequence
  Description of Artificial Sequence: Synthetic oligonucleotide
  Antisense Strand to SEQ ID NO: 402773
ucugaccaggaucuagccu

SEQ ID NO: 402775 - RNA, 19 nt, Artificial Sequence
  Description of Artificial Sequence: Synthetic oligonucleotide
  Sense Strand Starting at position 1071 of SEQ ID NO: 315275
gcuagauccuggucagaaa

SEQ ID NO: 402776 - RNA, 19 nt, Artificial Sequence
  Description of Artificial Sequence: Synthetic oligonucleotide
  Antisense Strand to SEQ ID NO: 402775
uuucugaccaggaucuagc

SEQ ID NO: 402777 - RNA, 19 nt, Artificial Sequence
  Description of Artificial Sequence: Synthetic oligonucleotide
  Sense Strand Starting at position 1071 of SEQ ID NO: 315351
gcagguguccaggaaaugu

SEQ ID NO: 402778 - RNA, 19 nt, Artificial Sequence
  Description of Artificial Sequence: Synthetic oligonucleotide
  Antisense Strand to SEQ ID NO: 402777
acauuuccuggacaccugc

SEQ ID NO: 402779 - RNA, 19 nt, Artificial Sequence
  Description of Artificial Sequence: Synthetic oligonucleotide
  Sense Strand Starting at position 1071 of SEQ ID NO: 315359
ccaggaaaugucugugccu

SEQ ID NO: 402780 - RNA, 19 nt, Artificial Sequence
  Description of Artificial Sequence: Synthetic oligonucleotide
  Antisense Strand to SEQ ID NO: 402779
aggcacagacauuuccugg

SEQ ID NO: 402781 - RNA, 19 nt, Artificial Sequence
  Description of Artificial Sequence: Synthetic oligonucleotide
  Sense Strand Starting at position 1071 of SEQ ID NO: 315360
caggaaaugucugugccuu

SEQ ID NO: 402782 - RNA, 19 nt, Artificial Sequence
  Description of Artificial Sequence: Synthetic oligonucleotide
  Antisense Strand to SEQ ID NO: 402781
aaggcacagacauuuccug

SEQ ID NO: 402783 - RNA, 19 nt, Artificial Sequence
  Description of Artificial Sequence: Synthetic oligonucleotide
  Sense Strand Starting at position 1071 of SEQ ID NO: 315361
aggaaaugucugugccuuc

SEQ ID NO: 402784 - RNA, 19 nt, Artificial Sequence
  Description of Artificial Sequence: Synthetic oligonucleotide
  Antisense Strand to SEQ ID NO: 402783
gaaggcacagacauuuccu

SEQ ID NO: 402785 - RNA, 19 nt, Artificial Sequence
  Description of Artificial Sequence: Synthetic oligonucleotide
  Sense Strand Starting at position 1071 of SEQ ID NO: 315472
gggaucuacugacauccuu

SEQ ID NO: 402786 - RNA, 19 nt, Artificial Sequence
  Description of Artificial Sequence: Synthetic oligonucleotide
  Antisense Strand to SEQ ID NO: 402785
aaggaugucaguagauccc

SEQ ID NO: 402787 - RNA, 19 nt, Artificial Sequence
  Description of Artificial Sequence: Synthetic oligonucleotide
  Sense Strand Starting at position 1071 of SEQ ID NO: 315522
ggaucuggcugacaacaaa

SEQ ID NO: 402788 - RNA, 19 nt, Artificial Sequence
  Description of Artificial Sequence: Synthetic oligonucleotide
  Antisense Strand to SEQ ID NO: 402787
uuuguugucagccagaucc

SEQ ID NO: 402789 - RNA, 19 nt, Artificial Sequence
  Description of Artificial Sequence: Synthetic oligonucleotide
  Sense Strand Starting at position 1071 of SEQ ID NO: 315604
agucaaauguucccaugua

SEQ ID NO: 402790 - RNA, 19 nt, Artificial Sequence
  Description of Artificial Sequence: Synthetic oligonucleotide
  Antisense Strand to SEQ ID NO: 402789
uacaugggaacauuugacu

SEQ ID NO: 402791 - RNA, 19 nt, Artificial Sequence
  Description of Artificial Sequence: Synthetic oligonucleotide
  Sense Strand Starting at position 1071 of SEQ ID NO: 315620
guauccucaggcuacauua

SEQ ID NO: 402792 - RNA, 19 nt, Artificial Sequence
  Description of Artificial Sequence: Synthetic oligonucleotide
  Antisense Strand to SEQ ID NO: 402791
uaauguagccugaggauac

SEQ ID NO: 402793 - RNA, 19 nt, Artificial Sequence
  Description of Artificial Sequence: Synthetic oligonucleotide
  Sense Strand Starting at position 1071 of SEQ ID NO: 315676
cggauucugccagggcaga

SEQ ID NO: 402794 - RNA, 19 nt, Artificial Sequence
  Description of Artificial Sequence: Synthetic oligonucleotide
  Antisense Strand to SEQ ID NO: 402793
ucugcccuggcagaauccg

SEQ ID NO: 402795 - RNA, 19 nt, Artificial Sequence
  Description of Artificial Sequence: Synthetic oligonucleotide
  Sense Strand Starting at position 1071 of SEQ ID NO: 315702
gagaauaccuaguccagca

SEQ ID NO: 402796 - RNA, 19 nt, Artificial Sequence
  Description of Artificial Sequence: Synthetic oligonucleotide
  Antisense Strand to SEQ ID NO: 402795
ugcuggacuagguauucuc

SEQ ID NO: 402797 - RNA, 19 nt, Artificial Sequence
  Description of Artificial Sequence: Synthetic oligonucleotide
  Sense Strand Starting at position 1071 of SEQ ID NO: 315756
ugaugauagcccugaggca

SEQ ID NO: 402798 - RNA, 19 nt, Artificial Sequence
  Description of Artificial Sequence: Synthetic oligonucleotide
  Antisense Strand to SEQ ID NO: 402797
ugccucagggcuaucauca

SEQ ID NO: 402799 - RNA, 19 nt, Artificial Sequence
  Description of Artificial Sequence: Synthetic oligonucleotide
  Sense Strand Starting at position 1071 of SEQ ID NO: 315757
gaugauagcccugaggcau

SEQ ID NO: 402800 - RNA, 19 nt, Artificial Sequence
  Description of Artificial Sequence: Synthetic oligonucleotide
  Antisense Strand to SEQ ID NO: 402799
augccucagggcuaucauc

SEQ ID NO: 402801 - RNA, 19 nt, Artificial Sequence
  Description of Artificial Sequence: Synthetic oligonucleotide
  Sense Strand Starting at position 1071 of SEQ ID NO: 315791
gaaacagucugccauagca

SEQ ID NO: 402802 - RNA, 19 nt, Artificial Sequence
  Description of Artificial Sequence: Synthetic oligonucleotide
  Antisense Strand to SEQ ID NO: 402801
ugcuauggcagacuguuuc

SEQ ID NO: 402803 - RNA, 19 nt, Artificial Sequence
  Description of Artificial Sequence: Synthetic oligonucleotide
  Sense Strand Starting at position 1071 of SEQ ID NO: 315935
aagugaccuccuugggaag

SEQ ID NO: 402804 - RNA, 19 nt, Artificial Sequence
  Description of Artificial Sequence: Synthetic oligonucleotide
  Antisense Strand to SEQ ID NO: 402803
cuucccaaggaggucacuu

SEQ ID NO: 402805 - RNA, 19 nt, Artificial Sequence
  Description of Artificial Sequence: Synthetic oligonucleotide
  Sense Strand Starting at position 1071 of SEQ ID NO: 316080
ccugaaagcugguaucauc

SEQ ID NO: 402806 - RNA, 19 nt, Artificial Sequence
  Description of Artificial Sequence: Synthetic oligonucleotide
  Antisense Strand to SEQ ID NO: 402805
gaugauaccagcuuucagg

SEQ ID NO: 402807 - RNA, 19 nt, Artificial Sequence
  Description of Artificial Sequence: Synthetic oligonucleotide
  Sense Strand Starting at position 1071 of SEQ ID NO: 316207
ggcugaguccauggcacaa

SEQ ID NO: 402808 - RNA, 19 nt, Artificial Sequence
  Description of Artificial Sequence: Synthetic oligonucleotide
  Antisense Strand to SEQ ID NO: 402807
uugugccauggacucagcc

SEQ ID NO: 402809 - RNA, 19 nt, Artificial Sequence
  Description of Artificial Sequence: Synthetic oligonucleotide
  Sense Strand Starting at position 1071 of SEQ ID NO: 316209
cugaguccauggcacaaau

SEQ ID NO: 402810 - RNA, 19 nt, Artificial Sequence
  Description of Artificial Sequence: Synthetic oligonucleotide
  Antisense Strand to SEQ ID NO: 402809
auuugugccauggacucag

SEQ ID NO: 402811 - RNA, 19 nt, Artificial Sequence
  Description of Artificial Sequence: Synthetic oligonucleotide
  Sense Strand Starting at position 1071 of SEQ ID NO: 316294
gcggauucugggcacaagu

SEQ ID NO: 402812 - RNA, 19 nt, Artificial Sequence
  Description of Artificial Sequence: Synthetic oligonucleotide
  Antisense Strand to SEQ ID NO: 402811
acuugugcccagaauccgc

SEQ ID NO: 402813 - RNA, 19 nt, Artificial Sequence
  Description of Artificial Sequence: Synthetic oligonucleotide
  Sense Strand Starting at position 1071 of SEQ ID NO: 316483
ccuuccagacucugugaau

SEQ ID NO: 402814 - RNA, 19 nt, Artificial Sequence
  Description of Artificial Sequence: Synthetic oligonucleotide
  Antisense Strand to SEQ ID NO: 402813
auucacagagucuggaagg

SEQ ID NO: 402815 - RNA, 19 nt, Artificial Sequence
  Description of Artificial Sequence: Synthetic oligonucleotide
  Sense Strand Starting at position 1071 of SEQ ID NO: 316484
cuuccagacucugugaauc

SEQ ID NO: 402816 - RNA, 19 nt, Artificial Sequence
  Description of Artificial Sequence: Synthetic oligonucleotide
  Antisense Strand to SEQ ID NO: 402815
gauucacagagucuggaag

SEQ ID NO: 402817 - RNA, 19 nt, Artificial Sequence
  Description of Artificial Sequence: Synthetic oligonucleotide
  Sense Strand Starting at position 1071 of SEQ ID NO: 317714
ccaucaucccaaggugauc

SEQ ID NO: 402818 - RNA, 19 nt, Artificial Sequence
  Description of Artificial Sequence: Synthetic oligonucleotide
  Antisense Strand to SEQ ID NO: 402817
gaucaccuugggaugaugg

SEQ ID NO: 402819 - RNA, 19 nt, Artificial Sequence
  Description of Artificial Sequence: Synthetic oligonucleotide
  Sense Strand Starting at position 1071 of SEQ ID NO: 318086
gggacaaucugggauguuc

SEQ ID NO: 402820 - RNA, 19 nt, Artificial Sequence
  Description of Artificial Sequence: Synthetic oligonucleotide
  Antisense Strand to SEQ ID NO: 402819
gaacaucccagauuguccc

SEQ ID NO: 402821 - RNA, 19 nt, Artificial Sequence
  Description of Artificial Sequence: Synthetic oligonucleotide
  Sense Strand Starting at position 1071 of SEQ ID NO: 318094
cugggauguucccaguagu

SEQ ID NO: 402822 - RNA, 19 nt, Artificial Sequence
  Description of Artificial Sequence: Synthetic oligonucleotide
  Antisense Strand to SEQ ID NO: 402821
acuacugggaacaucccag

SEQ ID NO: 402823 - RNA, 19 nt, Artificial Sequence
  Description of Artificial Sequence: Synthetic oligonucleotide
  Sense Strand Starting at position 1071 of SEQ ID NO: 318097
ggauguucccaguaguuuc

SEQ ID NO: 402824 - RNA, 19 nt, Artificial Sequence
  Description of Artificial Sequence: Synthetic oligonucleotide
  Antisense Strand to SEQ ID NO: 402823
gaaacuacugggaacaucc

SEQ ID NO: 402825 - RNA, 19 nt, Artificial Sequence
  Description of Artificial Sequence: Synthetic oligonucleotide
  Sense Strand Starting at position 1071 of SEQ ID NO: 318118
aggcuaggguguuagaaca

SEQ ID NO: 402826 - RNA, 19 nt, Artificial Sequence
  Description of Artificial Sequence: Synthetic oligonucleotide
  Antisense Strand to SEQ ID NO: 402825
uguucuaacacccuagccu

SEQ ID NO: 402827 - RNA, 19 nt, Artificial Sequence
  Description of Artificial Sequence: Synthetic oligonucleotide
  Sense Strand Starting at position 1071 of SEQ ID NO: 318146
aggccugggucuccaauaa

SEQ ID NO: 402828 - RNA, 19 nt, Artificial Sequence
  Description of Artificial Sequence: Synthetic oligonucleotide
  Antisense Strand to SEQ ID NO: 402827
uuauuggagacccaggccu

SEQ ID NO: 402829 - RNA, 19 nt, Artificial Sequence
  Description of Artificial Sequence: Synthetic oligonucleotide
  Sense Strand Starting at position 1071 of SEQ ID NO: 318195
uaagacucaccgugcucaa

SEQ ID NO: 402830 - RNA, 19 nt, Artificial Sequence
  Description of Artificial Sequence: Synthetic oligonucleotide
  Antisense Strand to SEQ ID NO: 402829
uugagcacggugagucuua

SEQ ID NO: 402831 - RNA, 19 nt, Artificial Sequence
  Description of Artificial Sequence: Synthetic oligonucleotide
  Sense Strand Starting at position 1071 of SEQ ID NO: 318265
ggagggucuuagugaggga

SEQ ID NO: 402832 - RNA, 19 nt, Artificial Sequence
  Description of Artificial Sequence: Synthetic oligonucleotide
  Antisense Strand to SEQ ID NO: 402831
ucccucacuaagacccucc

SEQ ID NO: 402833 - RNA, 19 nt, Artificial Sequence
  Description of Artificial Sequence: Synthetic oligonucleotide
  Sense Strand Starting at position 1071 of SEQ ID NO: 318390
gccaguguaugcuccucau

SEQ ID NO: 402834 - RNA, 19 nt, Artificial Sequence
  Description of Artificial Sequence: Synthetic oligonucleotide
  Antisense Strand to SEQ ID NO: 402833
augaggagcauacacuggc

SEQ ID NO: 402835 - RNA, 19 nt, Artificial Sequence
  Description of Artificial Sequence: Synthetic oligonucleotide
  Sense Strand Starting at position 1071 of SEQ ID NO: 318393
aguguaugcuccucauguc

SEQ ID NO: 402836 - RNA, 19 nt, Artificial Sequence
  Description of Artificial Sequence: Synthetic oligonucleotide
  Antisense Strand to SEQ ID NO: 402835
gacaugaggagcauacacu

SEQ ID NO: 402837 - RNA, 19 nt, Artificial Sequence
  Description of Artificial Sequence: Synthetic oligonucleotide
  Sense Strand Starting at position 1071 of SEQ ID NO: 318419
agagccauccuguguucca

SEQ ID NO: 402838 - RNA, 19 nt, Artificial Sequence
  Description of Artificial Sequence: Synthetic oligonucleotide
  Antisense Strand to SEQ ID NO: 402837
uggaacacaggauggcucu

SEQ ID NO: 402839 - RNA, 19 nt, Artificial Sequence
  Description of Artificial Sequence: Synthetic oligonucleotide
  Sense Strand Starting at position 1071 of SEQ ID NO: 318542
cagccaagcuccuaagagu

SEQ ID NO: 402840 - RNA, 19 nt, Artificial Sequence
  Description of Artificial Sequence: Synthetic oligonucleotide
  Antisense Strand to SEQ ID NO: 402839
acucuuaggagcuuggcug

SEQ ID NO: 402841 - RNA, 19 nt, Artificial Sequence
  Description of Artificial Sequence: Synthetic oligonucleotide
  Sense Strand Starting at position 1071 of SEQ ID NO: 318551
uccuaagaguuguucuaag

SEQ ID NO: 402842 - RNA, 19 nt, Artificial Sequence
  Description of Artificial Sequence: Synthetic oligonucleotide
  Antisense Strand to SEQ ID NO: 402841
cuuagaacaacucuuagga

SEQ ID NO: 402843 - RNA, 19 nt, Artificial Sequence
  Description of Artificial Sequence: Synthetic oligonucleotide
  Sense Strand Starting at position 1071 of SEQ ID NO: 318692
agaugaagguugcaguuau

SEQ ID NO: 402844 - RNA, 19 nt, Artificial Sequence
  Description of Artificial Sequence: Synthetic oligonucleotide
  Antisense Strand to SEQ ID NO: 402843
auaacugcaaccuucaucu

SEQ ID NO: 402845 - RNA, 19 nt, Artificial Sequence
  Description of Artificial Sequence: Synthetic oligonucleotide
  Sense Strand Starting at position 1071 of SEQ ID NO: 318696
gaagguugcaguuaugauu

SEQ ID NO: 402846 - RNA, 19 nt, Artificial Sequence
  Description of Artificial Sequence: Synthetic oligonucleotide
  Antisense Strand to SEQ ID NO: 402845
aaucauaacugcaaccuuc

SEQ ID NO: 402847 - RNA, 19 nt, Artificial Sequence
  Description of Artificial Sequence: Synthetic oligonucleotide
  Sense Strand Starting at position 1071 of SEQ ID NO: 318702
ugcaguuaugauugugcca

SEQ ID NO: 402848 - RNA, 19 nt, Artificial Sequence
  Description of Artificial Sequence: Synthetic oligonucleotide
  Antisense Strand to SEQ ID NO: 402847
uggcacaaucauaacugca

SEQ ID NO: 402849 - RNA, 19 nt, Artificial Sequence
  Description of Artificial Sequence: Synthetic oligonucleotide
  Sense Strand Starting at position 1071 of SEQ ID NO: 318869
ccaacaucuccauguugga

SEQ ID NO: 402850 - RNA, 19 nt, Artificial Sequence
  Description of Artificial Sequence: Synthetic oligonucleotide
  Antisense Strand to SEQ ID NO: 402849
uccaacauggagauguugg

SEQ ID NO: 402851 - RNA, 19 nt, Artificial Sequence
  Description of Artificial Sequence: Synthetic oligonucleotide
  Sense Strand Starting at position 1071 of SEQ ID NO: 318895
ggaccaacaucuccauguu

SEQ ID NO: 402852 - RNA, 19 nt, Artificial Sequence
  Description of Artificial Sequence: Synthetic oligonucleotide
  Antisense Strand to SEQ ID NO: 402851
aacauggagauguuggucc

SEQ ID NO: 402853 - RNA, 19 nt, Artificial Sequence
  Description of Artificial Sequence: Synthetic oligonucleotide
  Sense Strand Starting at position 1072 of SEQ ID NO: 315358
aagugaccuccuugggaag

SEQ ID NO: 402854 - RNA, 19 nt, Artificial Sequence
  Description of Artificial Sequence: Synthetic oligonucleotide
  Antisense Strand to SEQ ID NO: 402853
cuucccaaggaggucacuu

SEQ ID NO: 402855 - RNA, 19 nt, Artificial Sequence
  Description of Artificial Sequence: Synthetic oligonucleotide
  Sense Strand Starting at position 1072 of SEQ ID NO: 315503
ccugaaagcugguaucauc

SEQ ID NO: 402856 - RNA, 19 nt, Artificial Sequence
  Description of Artificial Sequence: Synthetic oligonucleotide
  Antisense Strand to SEQ ID NO: 402855
gaugauaccagcuuucagg

SEQ ID NO: 402857 - RNA, 19 nt, Artificial Sequence
  Description of Artificial Sequence: Synthetic oligonucleotide
  Sense Strand Starting at position 1072 of SEQ ID NO: 315630
ggcugaguccauggcacaa

SEQ ID NO: 402858 - RNA, 19 nt, Artificial Sequence
  Description of Artificial Sequence: Synthetic oligonucleotide
  Antisense Strand to SEQ ID NO: 402857
uugugccauggacucagcc

SEQ ID NO: 402859 - RNA, 19 nt, Artificial Sequence
  Description of Artificial Sequence: Synthetic oligonucleotide
  Sense Strand Starting at position 1072 of SEQ ID NO: 315632
cugaguccauggcacaaau

SEQ ID NO: 402860 - RNA, 19 nt, Artificial Sequence
  Description of Artificial Sequence: Synthetic oligonucleotide
  Antisense Strand to SEQ ID NO: 402859
auuugugccauggacucag

SEQ ID NO: 402861 - RNA, 19 nt, Artificial Sequence
  Description of Artificial Sequence: Synthetic oligonucleotide
  Sense Strand Starting at position 1072 of SEQ ID NO: 315717
gcggauucugggcacaagu

SEQ ID NO: 402862 - RNA, 19 nt, Artificial Sequence
  Description of Artificial Sequence: Synthetic oligonucleotide
  Antisense Strand to SEQ ID NO: 402861
acuugugcccagaauccgc

SEQ ID NO: 402863 - RNA, 19 nt, Artificial Sequence
  Description of Artificial Sequence: Synthetic oligonucleotide
  Sense Strand Starting at position 1072 of SEQ ID NO: 315906
ccuuccagacucugugaau

SEQ ID NO: 402864 - RNA, 19 nt, Artificial Sequence
  Description of Artificial Sequence: Synthetic oligonucleotide
  Antisense Strand to SEQ ID NO: 402863
auucacagagucuggaagg

SEQ ID NO: 402865 - RNA, 19 nt, Artificial Sequence
  Description of Artificial Sequence: Synthetic oligonucleotide
  Sense Strand Starting at position 1072 of SEQ ID NO: 315907
cuuccagacucugugaauc

SEQ ID NO: 402866 - RNA, 19 nt, Artificial Sequence
  Description of Artificial Sequence: Synthetic oligonucleotide
  Antisense Strand to SEQ ID NO: 402865
gauucacagagucuggaag

SEQ ID NO: 402867 - RNA, 19 nt, Artificial Sequence
  Description of Artificial Sequence: Synthetic oligonucleotide
  Sense Strand Starting at position 1072 of SEQ ID NO: 317137
ccaucaucccaaggugauc

SEQ ID NO: 402868 - RNA, 19 nt, Artificial Sequence
  Description of Artificial Sequence: Synthetic oligonucleotide
  Antisense Strand to SEQ ID NO: 402867
gaucaccuugggaugaugg

SEQ ID NO: 402869 - RNA, 19 nt, Artificial Sequence
  Description of Artificial Sequence: Synthetic oligonucleotide
  Sense Strand Starting at position 1072 of SEQ ID NO: 317398
cgugaaaugucacacuagu

SEQ ID NO: 402870 - RNA, 19 nt, Artificial Sequence
  Description of Artificial Sequence: Synthetic oligonucleotide
  Antisense Strand to SEQ ID NO: 402869
acuagugugacauuucacg

SEQ ID NO: 402871 - RNA, 19 nt, Artificial Sequence
  Description of Artificial Sequence: Synthetic oligonucleotide
  Sense Strand Starting at position 1072 of SEQ ID NO: 317478
gggcaucgcuguggacaaa

SEQ ID NO: 402872 - RNA, 19 nt, Artificial Sequence
  Description of Artificial Sequence: Synthetic oligonucleotide
  Antisense Strand to SEQ ID NO: 402871
uuuguccacagcgaugccc

SEQ ID NO: 402873 - RNA, 19 nt, Artificial Sequence
  Description of Artificial Sequence: Synthetic oligonucleotide
  Sense Strand Starting at position 1072 of SEQ ID NO: 317509
gggacaaucugggauguuc

SEQ ID NO: 402874 - RNA, 19 nt, Artificial Sequence
  Description of Artificial Sequence: Synthetic oligonucleotide
  Antisense Strand to SEQ ID NO: 402873
gaacaucccagauuguccc

SEQ ID NO: 402875 - RNA, 19 nt, Artificial Sequence
  Description of Artificial Sequence: Synthetic oligonucleotide
  Sense Strand Starting at position 1072 of SEQ ID NO: 317517
cugggauguucccaguagu

SEQ ID NO: 402876 - RNA, 19 nt, Artificial Sequence
  Description of Artificial Sequence: Synthetic oligonucleotide
  Antisense Strand to SEQ ID NO: 402875
acuacugggaacaucccag

SEQ ID NO: 402877 - RNA, 19 nt, Artificial Sequence
  Description of Artificial Sequence: Synthetic oligonucleotide
  Sense Strand Starting at position 1072 of SEQ ID NO: 317520
ggauguucccaguaguuuc

SEQ ID NO: 402878 - RNA, 19 nt, Artificial Sequence
  Description of Artificial Sequence: Synthetic oligonucleotide
  Antisense Strand to SEQ ID NO: 402877
gaaacuacugggaacaucc

SEQ ID NO: 402879 - RNA, 19 nt, Artificial Sequence
  Description of Artificial Sequence: Synthetic oligonucleotide
  Sense Strand Starting at position 1072 of SEQ ID NO: 317528
ccaguaguuucccaggcua

SEQ ID NO: 402880 - RNA, 19 nt, Artificial Sequence
  Description of Artificial Sequence: Synthetic oligonucleotide
  Antisense Strand to SEQ ID NO: 402879
uagccugggaaacuacugg

SEQ ID NO: 402881 - RNA, 19 nt, Artificial Sequence
  Description of Artificial Sequence: Synthetic oligonucleotide
  Sense Strand Starting at position 1072 of SEQ ID NO: 317541
aggcuaggguguuagaaca

SEQ ID NO: 402882 - RNA, 19 nt, Artificial Sequence
  Description of Artificial Sequence: Synthetic oligonucleotide
  Antisense Strand to SEQ ID NO: 402881
uguucuaacacccuagccu

SEQ ID NO: 402883 - RNA, 19 nt, Artificial Sequence
  Description of Artificial Sequence: Synthetic oligonucleotide
  Sense Strand Starting at position 1072 of SEQ ID NO: 317569
aggccugggucuccaauaa

SEQ ID NO: 402884 - RNA, 19 nt, Artificial Sequence
  Description of Artificial Sequence: Synthetic oligonucleotide
  Antisense Strand to SEQ ID NO: 402883
uuauuggagacccaggccu

SEQ ID NO: 402885 - RNA, 19 nt, Artificial Sequence
  Description of Artificial Sequence: Synthetic oligonucleotide
  Sense Strand Starting at position 1072 of SEQ ID NO: 317618
uaagacucaccgugcucaa

SEQ ID NO: 402886 - RNA, 19 nt, Artificial Sequence
  Description of Artificial Sequence: Synthetic oligonucleotide
  Antisense Strand to SEQ ID NO: 402885
uugagcacggugagucuua

SEQ ID NO: 402887 - RNA, 19 nt, Artificial Sequence
  Description of Artificial Sequence: Synthetic oligonucleotide
  Sense Strand Starting at position 1072 of SEQ ID NO: 317688
ggagggucuuagugaggga

SEQ ID NO: 402888 - RNA, 19 nt, Artificial Sequence
  Description of Artificial Sequence: Synthetic oligonucleotide
  Antisense Strand to SEQ ID NO: 402887
ucccucacuaagacccucc

SEQ ID NO: 402889 - RNA, 19 nt, Artificial Sequence
  Description of Artificial Sequence: Synthetic oligonucleotide
  Sense Strand Starting at position 1072 of SEQ ID NO: 317813
gccaguguaugcuccucau

SEQ ID NO: 402890 - RNA, 19 nt, Artificial Sequence
  Description of Artificial Sequence: Synthetic oligonucleotide
  Antisense Strand to SEQ ID NO: 402889
augaggagcauacacuggc

SEQ ID NO: 402891 - RNA, 19 nt, Artificial Sequence
  Description of Artificial Sequence: Synthetic oligonucleotide
  Sense Strand Starting at position 1072 of SEQ ID NO: 317816
aguguaugcuccucauguc

SEQ ID NO: 402892 - RNA, 19 nt, Artificial Sequence
  Description of Artificial Sequence: Synthetic oligonucleotide
  Antisense Strand to SEQ ID NO: 402891
gacaugaggagcauacacu

SEQ ID NO: 402893 - RNA, 19 nt, Artificial Sequence
  Description of Artificial Sequence: Synthetic oligonucleotide
  Sense Strand Starting at position 1072 of SEQ ID NO: 317842
agagccauccuguguucca

SEQ ID NO: 402894 - RNA, 19 nt, Artificial Sequence
  Description of Artificial Sequence: Synthetic oligonucleotide
  Antisense Strand to SEQ ID NO: 402893
uggaacacaggauggcucu

SEQ ID NO: 402895 - RNA, 19 nt, Artificial Sequence
  Description of Artificial Sequence: Synthetic oligonucleotide
  Sense Strand Starting at position 1072 of SEQ ID NO: 317965
cagccaagcuccuaagagu

SEQ ID NO: 402896 - RNA, 19 nt, Artificial Sequence
  Description of Artificial Sequence: Synthetic oligonucleotide
  Antisense Strand to SEQ ID NO: 402895
acucuuaggagcuuggcug

SEQ ID NO: 402897 - RNA, 19 nt, Artificial Sequence
  Description of Artificial Sequence: Synthetic oligonucleotide
  Sense Strand Starting at position 1072 of SEQ ID NO: 317974
uccuaagaguuguucuaag

SEQ ID NO: 402898 - RNA, 19 nt, Artificial Sequence
  Description of Artificial Sequence: Synthetic oligonucleotide
  Antisense Strand to SEQ ID NO: 402897
cuuagaacaacucuuagga

SEQ ID NO: 402899 - RNA, 19 nt, Artificial Sequence
  Description of Artificial Sequence: Synthetic oligonucleotide
  Sense Strand Starting at position 1072 of SEQ ID NO: 318115
agaugaagguugcaguuau

SEQ ID NO: 402900 - RNA, 19 nt, Artificial Sequence
  Description of Artificial Sequence: Synthetic oligonucleotide
  Antisense Strand to SEQ ID NO: 402899
auaacugcaaccuucaucu

SEQ ID NO: 402901 - RNA, 19 nt, Artificial Sequence
  Description of Artificial Sequence: Synthetic oligonucleotide
  Sense Strand Starting at position 1072 of SEQ ID NO: 318119
gaagguugcaguuaugauu

SEQ ID NO: 402902 - RNA, 19 nt, Artificial Sequence
  Description of Artificial Sequence: Synthetic oligonucleotide
  Antisense Strand to SEQ ID NO: 402901
aaucauaacugcaaccuuc

SEQ ID NO: 402903 - RNA, 19 nt, Artificial Sequence
  Description of Artificial Sequence: Synthetic oligonucleotide
  Sense Strand Starting at position 1072 of SEQ ID NO: 318125
ugcaguuaugauugugcca

SEQ ID NO: 402904 - RNA, 19 nt, Artificial Sequence
  Description of Artificial Sequence: Synthetic oligonucleotide
  Antisense Strand to SEQ ID NO: 402903
uggcacaaucauaacugca

SEQ ID NO: 402905 - RNA, 19 nt, Artificial Sequence
  Description of Artificial Sequence: Synthetic oligonucleotide
  Sense Strand Starting at position 1072 of SEQ ID NO: 318292
ccaacaucuccauguugga

SEQ ID NO: 402906 - RNA, 19 nt, Artificial Sequence
  Description of Artificial Sequence: Synthetic oligonucleotide
  Antisense Strand to SEQ ID NO: 402905
uccaacauggagauguugg

SEQ ID NO: 402907 - RNA, 19 nt, Artificial Sequence
  Description of Artificial Sequence: Synthetic oligonucleotide
  Sense Strand Starting at position 1072 of SEQ ID NO: 318318
ggaccaacaucuccauguu

SEQ ID NO: 402908 - RNA, 19 nt, Artificial Sequence
  Description of Artificial Sequence: Synthetic oligonucleotide
  Antisense Strand to SEQ ID NO: 402907
aacauggagauguuggucc

SEQ ID NO: 402909 - RNA, 19 nt, Artificial Sequence
  Description of Artificial Sequence: Synthetic oligonucleotide
  Sense Strand Starting at position 1072 of SEQ ID NO: 319181
ggacucugcucuugagaca

SEQ ID NO: 402910 - RNA, 19 nt, Artificial Sequence
  Description of Artificial Sequence: Synthetic oligonucleotide
  Antisense Strand to SEQ ID NO: 402909
ugucucaagagcagagucc

SEQ ID NO: 402911 - RNA, 19 nt, Artificial Sequence
  Description of Artificial Sequence: Synthetic oligonucleotide
  Sense Strand Starting at position 1073 of SEQ ID NO: 315370
aagugaccuccuugggaag

SEQ ID NO: 402912 - RNA, 19 nt, Artificial Sequence
  Description of Artificial Sequence: Synthetic oligonucleotide
  Antisense Strand to SEQ ID NO: 402911
cuucccaaggaggucacuu

SEQ ID NO: 402913 - RNA, 19 nt, Artificial Sequence
  Description of Artificial Sequence: Synthetic oligonucleotide
  Sense Strand Starting at position 1073 of SEQ ID NO: 315515
ccugaaagcugguaucauc

SEQ ID NO: 402914 - RNA, 19 nt, Artificial Sequence
  Description of Artificial Sequence: Synthetic oligonucleotide
  Antisense Strand to SEQ ID NO: 402913
gaugauaccagcuuucagg

SEQ ID NO: 402915 - RNA, 19 nt, Artificial Sequence
  Description of Artificial Sequence: Synthetic oligonucleotide
  Sense Strand Starting at position 1073 of SEQ ID NO: 315642
ggcugaguccauggcacaa

SEQ ID NO: 402916 - RNA, 19 nt, Artificial Sequence
  Description of Artificial Sequence: Synthetic oligonucleotide
  Antisense Strand to SEQ ID NO: 402915
uugugccauggacucagcc

SEQ ID NO: 402917 - RNA, 19 nt, Artificial Sequence
  Description of Artificial Sequence: Synthetic oligonucleotide
  Sense Strand Starting at position 1073 of SEQ ID NO: 315644
cugaguccauggcacaaau

SEQ ID NO: 402918 - RNA, 19 nt, Artificial Sequence
  Description of Artificial Sequence: Synthetic oligonucleotide
  Antisense Strand to SEQ ID NO: 402917
auuugugccauggacucag

SEQ ID NO: 402919 - RNA, 19 nt, Artificial Sequence
  Description of Artificial Sequence: Synthetic oligonucleotide
  Sense Strand Starting at position 1073 of SEQ ID NO: 315729
gcggauucugggcacaagu

SEQ ID NO: 402920 - RNA, 19 nt, Artificial Sequence
  Description of Artificial Sequence: Synthetic oligonucleotide
  Antisense Strand to SEQ ID NO: 402919
acuugugcccagaauccgc

SEQ ID NO: 402921 - RNA, 19 nt, Artificial Sequence
  Description of Artificial Sequence: Synthetic oligonucleotide
  Sense Strand Starting at position 1073 of SEQ ID NO: 315918
ccuuccagacucugugaau

SEQ ID NO: 402922 - RNA, 19 nt, Artificial Sequence
  Description of Artificial Sequence: Synthetic oligonucleotide
  Antisense Strand to SEQ ID NO: 402921
auucacagagucuggaagg

SEQ ID NO: 402923 - RNA, 19 nt, Artificial Sequence
  Description of Artificial Sequence: Synthetic oligonucleotide
  Sense Strand Starting at position 1073 of SEQ ID NO: 315919
cuuccagacucugugaauc

SEQ ID NO: 402924 - RNA, 19 nt, Artificial Sequence
  Description of Artificial Sequence: Synthetic oligonucleotide
  Antisense Strand to SEQ ID NO: 402923
gauucacagagucuggaag

SEQ ID NO: 402925 - RNA, 19 nt, Artificial Sequence
  Description of Artificial Sequence: Synthetic oligonucleotide
  Sense Strand Starting at position 1073 of SEQ ID NO: 317149
ccaucaucccaaggugauc

SEQ ID NO: 402926 - RNA, 19 nt, Artificial Sequence
  Description of Artificial Sequence: Synthetic oligonucleotide
  Antisense Strand to SEQ ID NO: 402925
gaucaccuugggaugaugg

SEQ ID NO: 402927 - RNA, 19 nt, Artificial Sequence
  Description of Artificial Sequence: Synthetic oligonucleotide
  Sense Strand Starting at position 1073 of SEQ ID NO: 317410
cgugaaaugucacacuagu

SEQ ID NO: 402928 - RNA, 19 nt, Artificial Sequence
  Description of Artificial Sequence: Synthetic oligonucleotide
  Antisense Strand to SEQ ID NO: 402927
acuagugugacauuucacg

SEQ ID NO: 402929 - RNA, 19 nt, Artificial Sequence
  Description of Artificial Sequence: Synthetic oligonucleotide
  Sense Strand Starting at position 1073 of SEQ ID NO: 317490
gggcaucgcuguggacaaa

SEQ ID NO: 402930 - RNA, 19 nt, Artificial Sequence
  Description of Artificial Sequence: Synthetic oligonucleotide
  Antisense Strand to SEQ ID NO: 402929
uuuguccacagcgaugccc

SEQ ID NO: 402931 - RNA, 19 nt, Artificial Sequence
  Description of Artificial Sequence: Synthetic oligonucleotide
  Sense Strand Starting at position 1073 of SEQ ID NO: 317521
gggacaaucugggauguuc

SEQ ID NO: 402932 - RNA, 19 nt, Artificial Sequence
  Description of Artificial Sequence: Synthetic oligonucleotide
  Antisense Strand to SEQ ID NO: 402931
gaacaucccagauuguccc

SEQ ID NO: 402933 - RNA, 19 nt, Artificial Sequence
  Description of Artificial Sequence: Synthetic oligonucleotide
  Sense Strand Starting at position 1073 of SEQ ID NO: 317529
cugggauguucccaguagu

SEQ ID NO: 402934 - RNA, 19 nt, Artificial Sequence
  Description of Artificial Sequence: Synthetic oligonucleotide
  Antisense Strand to SEQ ID NO: 402933
acuacugggaacaucccag

SEQ ID NO: 402935 - RNA, 19 nt, Artificial Sequence
  Description of Artificial Sequence: Synthetic oligonucleotide
  Sense Strand Starting at position 1073 of SEQ ID NO: 317532
ggauguucccaguaguuuc

SEQ ID NO: 402936 - RNA, 19 nt, Artificial Sequence
  Description of Artificial Sequence: Synthetic oligonucleotide
  Antisense Strand to SEQ ID NO: 402935
gaaacuacugggaacaucc

SEQ ID NO: 402937 - RNA, 19 nt, Artificial Sequence
  Description of Artificial Sequence: Synthetic oligonucleotide
  Sense Strand Starting at position 1073 of SEQ ID NO: 317540
ccaguaguuucccaggcua

SEQ ID NO: 402938 - RNA, 19 nt, Artificial Sequence
  Description of Artificial Sequence: Synthetic oligonucleotide
  Antisense Strand to SEQ ID NO: 402937
uagccugggaaacuacugg

SEQ ID NO: 402939 - RNA, 19 nt, Artificial Sequence
  Description of Artificial Sequence: Synthetic oligonucleotide
  Sense Strand Starting at position 1073 of SEQ ID NO: 317553
aggcuaggguguuagaaca

SEQ ID NO: 402940 - RNA, 19 nt, Artificial Sequence
  Description of Artificial Sequence: Synthetic oligonucleotide
  Antisense Strand to SEQ ID NO: 402939
uguucuaacacccuagccu

SEQ ID NO: 402941 - RNA, 19 nt, Artificial Sequence
  Description of Artificial Sequence: Synthetic oligonucleotide
  Sense Strand Starting at position 1073 of SEQ ID NO: 317581
aggccugggucuccaauaa

SEQ ID NO: 402942 - RNA, 19 nt, Artificial Sequence
  Description of Artificial Sequence: Synthetic oligonucleotide
  Antisense Strand to SEQ ID NO: 402941
uuauuggagacccaggccu

SEQ ID NO: 402943 - RNA, 19 nt, Artificial Sequence
  Description of Artificial Sequence: Synthetic oligonucleotide
  Sense Strand Starting at position 1073 of SEQ ID NO: 317630
uaagacucaccgugcucaa

SEQ ID NO: 402944 - RNA, 19 nt, Artificial Sequence
  Description of Artificial Sequence: Synthetic oligonucleotide
  Antisense Strand to SEQ ID NO: 402943
uugagcacggugagucuua

SEQ ID NO: 402945 - RNA, 19 nt, Artificial Sequence
  Description of Artificial Sequence: Synthetic oligonucleotide
  Sense Strand Starting at position 1073 of SEQ ID NO: 317700
ggagggucuuagugaggga

SEQ ID NO: 402946 - RNA, 19 nt, Artificial Sequence
  Description of Artificial Sequence: Synthetic oligonucleotide
  Antisense Strand to SEQ ID NO: 402945
ucccucacuaagacccucc

SEQ ID NO: 402947 - RNA, 19 nt, Artificial Sequence
  Description of Artificial Sequence: Synthetic oligonucleotide
  Sense Strand Starting at position 1073 of SEQ ID NO: 317825
gccaguguaugcuccucau

SEQ ID NO: 402948 - RNA, 19 nt, Artificial Sequence
  Description of Artificial Sequence: Synthetic oligonucleotide
  Antisense Strand to SEQ ID NO: 402947
augaggagcauacacuggc

SEQ ID NO: 402949 - RNA, 19 nt, Artificial Sequence
  Description of Artificial Sequence: Synthetic oligonucleotide
  Sense Strand Starting at position 1073 of SEQ ID NO: 317828
aguguaugcuccucauguc

SEQ ID NO: 402950 - RNA, 19 nt, Artificial Sequence
  Description of Artificial Sequence: Synthetic oligonucleotide
  Antisense Strand to SEQ ID NO: 402949
gacaugaggagcauacacu

SEQ ID NO: 402951 - RNA, 19 nt, Artificial Sequence
  Description of Artificial Sequence: Synthetic oligonucleotide
  Sense Strand Starting at position 1073 of SEQ ID NO: 317854
agagccauccuguguucca

SEQ ID NO: 402952 - RNA, 19 nt, Artificial Sequence
  Description of Artificial Sequence: Synthetic oligonucleotide
  Antisense Strand to SEQ ID NO: 402951
uggaacacaggauggcucu

SEQ ID NO: 402953 - RNA, 19 nt, Artificial Sequence
  Description of Artificial Sequence: Synthetic oligonucleotide
  Sense Strand Starting at position 1073 of SEQ ID NO: 317977
cagccaagcuccuaagagu

SEQ ID NO: 402954 - RNA, 19 nt, Artificial Sequence
  Description of Artificial Sequence: Synthetic oligonucleotide
  Antisense Strand to SEQ ID NO: 402953
acucuuaggagcuuggcug

SEQ ID NO: 402955 - RNA, 19 nt, Artificial Sequence
  Description of Artificial Sequence: Synthetic oligonucleotide
  Sense Strand Starting at position 1073 of SEQ ID NO: 317986
uccuaagaguuguucuaag

SEQ ID NO: 402956 - RNA, 19 nt, Artificial Sequence
  Description of Artificial Sequence: Synthetic oligonucleotide
  Antisense Strand to SEQ ID NO: 402955
cuuagaacaacucuuagga

SEQ ID NO: 402957 - RNA, 19 nt, Artificial Sequence
  Description of Artificial Sequence: Synthetic oligonucleotide
  Sense Strand Starting at position 1073 of SEQ ID NO: 318127
agaugaagguugcaguuau

SEQ ID NO: 402958 - RNA, 19 nt, Artificial Sequence
  Description of Artificial Sequence: Synthetic oligonucleotide
  Antisense Strand to SEQ ID NO: 402957
auaacugcaaccuucaucu

SEQ ID NO: 402959 - RNA, 19 nt, Artificial Sequence
  Description of Artificial Sequence: Synthetic oligonucleotide
  Sense Strand Starting at position 1073 of SEQ ID NO: 318131
gaagguugcaguuaugauu

SEQ ID NO: 402960 - RNA, 19 nt, Artificial Sequence
  Description of Artificial Sequence: Synthetic oligonucleotide
  Antisense Strand to SEQ ID NO: 402959
aaucauaacugcaaccuuc

SEQ ID NO: 402961 - RNA, 19 nt, Artificial Sequence
  Description of Artificial Sequence: Synthetic oligonucleotide
  Sense Strand Starting at position 1073 of SEQ ID NO: 318137
ugcaguuaugauugugcca

SEQ ID NO: 402962 - RNA, 19 nt, Artificial Sequence
  Description of Artificial Sequence: Synthetic oligonucleotide
  Antisense Strand to SEQ ID NO: 402961
uggcacaaucauaacugca

SEQ ID NO: 402963 - RNA, 19 nt, Artificial Sequence
  Description of Artificial Sequence: Synthetic oligonucleotide
  Sense Strand Starting at position 1073 of SEQ ID NO: 318304
ccaacaucuccauguugga

SEQ ID NO: 402964 - RNA, 19 nt, Artificial Sequence
  Description of Artificial Sequence: Synthetic oligonucleotide
  Antisense Strand to SEQ ID NO: 402963
uccaacauggagauguugg

SEQ ID NO: 402965 - RNA, 19 nt, Artificial Sequence
  Description of Artificial Sequence: Synthetic oligonucleotide
  Sense Strand Starting at position 1073 of SEQ ID NO: 318330
ggaccaacaucuccauguu

SEQ ID NO: 402966 - RNA, 19 nt, Artificial Sequence
  Description of Artificial Sequence: Synthetic oligonucleotide
  Antisense Strand to SEQ ID NO: 402965
aacauggagauguuggucc

SEQ ID NO: 402967 - RNA, 19 nt, Artificial Sequence
  Description of Artificial Sequence: Synthetic oligonucleotide
  Sense Strand Starting at position 1073 of SEQ ID NO: 319193
ggacucugcucuugagaca

SEQ ID NO: 402968 - RNA, 19 nt, Artificial Sequence
  Description of Artificial Sequence: Synthetic oligonucleotide
  Antisense Strand to SEQ ID NO: 402967
ugucucaagagcagagucc

SEQ ID NO: 402969 - RNA, 19 nt, Artificial Sequence
  Description of Artificial Sequence: Synthetic oligonucleotide
  Sense Strand Starting at position 1074 of SEQ ID NO: 315472
aggcuagauccuggucaga

SEQ ID NO: 402970 - RNA, 19 nt, Artificial Sequence
  Description of Artificial Sequence: Synthetic oligonucleotide
  Antisense Strand to SEQ ID NO: 402969
ucugaccaggaucuagccu

SEQ ID NO: 402971 - RNA, 19 nt, Artificial Sequence
  Description of Artificial Sequence: Synthetic oligonucleotide
  Sense Strand Starting at position 1074 of SEQ ID NO: 315474
gcuagauccuggucagaaa

SEQ ID NO: 402972 - RNA, 19 nt, Artificial Sequence
  Description of Artificial Sequence: Synthetic oligonucleotide
  Antisense Strand to SEQ ID NO: 402971
uuucugaccaggaucuagc

SEQ ID NO: 402973 - RNA, 19 nt, Artificial Sequence
  Description of Artificial Sequence: Synthetic oligonucleotide
  Sense Strand Starting at position 1074 of SEQ ID NO: 315550
gcagguguccaggaaaugu

SEQ ID NO: 402974 - RNA, 19 nt, Artificial Sequence
  Description of Artificial Sequence: Synthetic oligonucleotide
  Antisense Strand to SEQ ID NO: 402973
acauuuccuggacaccugc

SEQ ID NO: 402975 - RNA, 19 nt, Artificial Sequence
  Description of Artificial Sequence: Synthetic oligonucleotide
  Sense Strand Starting at position 1074 of SEQ ID NO: 315558
ccaggaaaugucugugccu

SEQ ID NO: 402976 - RNA, 19 nt, Artificial Sequence
  Description of Artificial Sequence: Synthetic oligonucleotide
  Antisense Strand to SEQ ID NO: 402975
aggcacagacauuuccugg

SEQ ID NO: 402977 - RNA, 19 nt, Artificial Sequence
  Description of Artificial Sequence: Synthetic oligonucleotide
  Sense Strand Starting at position 1074 of SEQ ID NO: 315559
caggaaaugucugugccuu

SEQ ID NO: 402978 - RNA, 19 nt, Artificial Sequence
  Description of Artificial Sequence: Synthetic oligonucleotide
  Antisense Strand to SEQ ID NO: 402977
aaggcacagacauuuccug

SEQ ID NO: 402979 - RNA, 19 nt, Artificial Sequence
  Description of Artificial Sequence: Synthetic oligonucleotide
  Sense Strand Starting at position 1074 of SEQ ID NO: 315560
aggaaaugucugugccuuc

SEQ ID NO: 402980 - RNA, 19 nt, Artificial Sequence
  Description of Artificial Sequence: Synthetic oligonucleotide
  Antisense Strand to SEQ ID NO: 402979
gaaggcacagacauuuccu

SEQ ID NO: 402981 - RNA, 19 nt, Artificial Sequence
  Description of Artificial Sequence: Synthetic oligonucleotide
  Sense Strand Starting at position 1074 of SEQ ID NO: 315671
gggaucuacugacauccuu

SEQ ID NO: 402982 - RNA, 19 nt, Artificial Sequence
  Description of Artificial Sequence: Synthetic oligonucleotide
  Antisense Strand to SEQ ID NO: 402981
aaggaugucaguagauccc

SEQ ID NO: 402983 - RNA, 19 nt, Artificial Sequence
  Description of Artificial Sequence: Synthetic oligonucleotide
  Sense Strand Starting at position 1074 of SEQ ID NO: 315721
ggaucuggcugacaacaaa

SEQ ID NO: 402984 - RNA, 19 nt, Artificial Sequence
  Description of Artificial Sequence: Synthetic oligonucleotide
  Antisense Strand to SEQ ID NO: 402983
uuuguugucagccagaucc

SEQ ID NO: 402985 - RNA, 19 nt, Artificial Sequence
  Description of Artificial Sequence: Synthetic oligonucleotide
  Sense Strand Starting at position 1074 of SEQ ID NO: 315803
agucaaauguucccaugua

SEQ ID NO: 402986 - RNA, 19 nt, Artificial Sequence
  Description of Artificial Sequence: Synthetic oligonucleotide
  Antisense Strand to SEQ ID NO: 402985
uacaugggaacauuugacu

SEQ ID NO: 402987 - RNA, 19 nt, Artificial Sequence
  Description of Artificial Sequence: Synthetic oligonucleotide
  Sense Strand Starting at position 1074 of SEQ ID NO: 315819
guauccucaggcuacauua

SEQ ID NO: 402988 - RNA, 19 nt, Artificial Sequence
  Description of Artificial Sequence: Synthetic oligonucleotide
  Antisense Strand to SEQ ID NO: 402987
uaauguagccugaggauac

SEQ ID NO: 402989 - RNA, 19 nt, Artificial Sequence
  Description of Artificial Sequence: Synthetic oligonucleotide
  Sense Strand Starting at position 1074 of SEQ ID NO: 315875
cggauucugccagggcaga

SEQ ID NO: 402990 - RNA, 19 nt, Artificial Sequence
  Description of Artificial Sequence: Synthetic oligonucleotide
  Antisense Strand to SEQ ID NO: 402989
ucugcccuggcagaauccg

SEQ ID NO: 402991 - RNA, 19 nt, Artificial Sequence
  Description of Artificial Sequence: Synthetic oligonucleotide
  Sense Strand Starting at position 1074 of SEQ ID NO: 315901
gagaauaccuaguccagca

SEQ ID NO: 402992 - RNA, 19 nt, Artificial Sequence
  Description of Artificial Sequence: Synthetic oligonucleotide
  Antisense Strand to SEQ ID NO: 402991
ugcuggacuagguauucuc

SEQ ID NO: 402993 - RNA, 19 nt, Artificial Sequence
  Description of Artificial Sequence: Synthetic oligonucleotide
  Sense Strand Starting at position 1074 of SEQ ID NO: 315955
ugaugauagcccugaggca

SEQ ID NO: 402994 - RNA, 19 nt, Artificial Sequence
  Description of Artificial Sequence: Synthetic oligonucleotide
  Antisense Strand to SEQ ID NO: 402993
ugccucagggcuaucauca

SEQ ID NO: 402995 - RNA, 19 nt, Artificial Sequence
  Description of Artificial Sequence: Synthetic oligonucleotide
  Sense Strand Starting at position 1074 of SEQ ID NO: 315956
gaugauagcccugaggcau

SEQ ID NO: 402996 - RNA, 19 nt, Artificial Sequence
  Description of Artificial Sequence: Synthetic oligonucleotide
  Antisense Strand to SEQ ID NO: 402995
augccucagggcuaucauc

SEQ ID NO: 402997 - RNA, 19 nt, Artificial Sequence
  Description of Artificial Sequence: Synthetic oligonucleotide
  Sense Strand Starting at position 1074 of SEQ ID NO: 315990
gaaacagucugccauagca

SEQ ID NO: 402998 - RNA, 19 nt, Artificial Sequence
  Description of Artificial Sequence: Synthetic oligonucleotide
  Antisense Strand to SEQ ID NO: 402997
ugcuauggcagacuguuuc

SEQ ID NO: 402999 - RNA, 19 nt, Artificial Sequence
  Description of Artificial Sequence: Synthetic oligonucleotide
  Sense Strand Starting at position 1074 of SEQ ID NO: 316134
aagugaccuccuugggaag

SEQ ID NO: 403000 - RNA, 19 nt, Artificial Sequence
  Description of Artificial Sequence: Synthetic oligonucleotide
  Antisense Strand to SEQ ID NO: 402999
cuucccaaggaggucacuu

SEQ ID NO: 403001 - RNA, 19 nt, Artificial Sequence
  Description of Artificial Sequence: Synthetic oligonucleotide
  Sense Strand Starting at position 1074 of SEQ ID NO: 316279
ccugaaagcugguaucauc

SEQ ID NO: 403002 - RNA, 19 nt, Artificial Sequence
  Description of Artificial Sequence: Synthetic oligonucleotide
  Antisense Strand to SEQ ID NO: 403001
gaugauaccagcuuucagg

SEQ ID NO: 403003 - RNA, 19 nt, Artificial Sequence
  Description of Artificial Sequence: Synthetic oligonucleotide
  Sense Strand Starting at position 1074 of SEQ ID NO: 316406
ggcugaguccauggcacaa

SEQ ID NO: 403004 - RNA, 19 nt, Artificial Sequence
  Description of Artificial Sequence: Synthetic oligonucleotide
  Antisense Strand to SEQ ID NO: 403003
uugugccauggacucagcc

SEQ ID NO: 403005 - RNA, 19 nt, Artificial Sequence
  Description of Artificial Sequence: Synthetic oligonucleotide
  Sense Strand Starting at position 1074 of SEQ ID NO: 316408
cugaguccauggcacaaau

SEQ ID NO: 403006 - RNA, 19 nt, Artificial Sequence
  Description of Artificial Sequence: Synthetic oligonucleotide
  Antisense Strand to SEQ ID NO: 403005
auuugugccauggacucag

SEQ ID NO: 403007 - RNA, 19 nt, Artificial Sequence
  Description of Artificial Sequence: Synthetic oligonucleotide
  Sense Strand Starting at position 1074 of SEQ ID NO: 316493
gcggauucugggcacaagu

SEQ ID NO: 403008 - RNA, 19 nt, Artificial Sequence
  Description of Artificial Sequence: Synthetic oligonucleotide
  Antisense Strand to SEQ ID NO: 403007
acuugugcccagaauccgc

SEQ ID NO: 403009 - RNA, 19 nt, Artificial Sequence
  Description of Artificial Sequence: Synthetic oligonucleotide
  Sense Strand Starting at position 1074 of SEQ ID NO: 316682
ccuuccagacucugugaau

SEQ ID NO: 403010 - RNA, 19 nt, Artificial Sequence
  Description of Artificial Sequence: Synthetic oligonucleotide
  Antisense Strand to SEQ ID NO: 403009
auucacagagucuggaagg

SEQ ID NO: 403011 - RNA, 19 nt, Artificial Sequence
  Description of Artificial Sequence: Synthetic oligonucleotide
  Sense Strand Starting at position 1074 of SEQ ID NO: 316683
cuuccagacucugugaauc

SEQ ID NO: 403012 - RNA, 19 nt, Artificial Sequence
  Description of Artificial Sequence: Synthetic oligonucleotide
  Antisense Strand to SEQ ID NO: 403011
gauucacagagucuggaag

SEQ ID NO: 403013 - RNA, 19 nt, Artificial Sequence
  Description of Artificial Sequence: Synthetic oligonucleotide
  Sense Strand Starting at position 1074 of SEQ ID NO: 317913
ccaucaucccaaggugauc

SEQ ID NO: 403014 - RNA, 19 nt, Artificial Sequence
  Description of Artificial Sequence: Synthetic oligonucleotide
  Antisense Strand to SEQ ID NO: 403013
gaucaccuugggaugaugg

SEQ ID NO: 403015 - RNA, 19 nt, Artificial Sequence
  Description of Artificial Sequence: Synthetic oligonucleotide
  Sense Strand Starting at position 1074 of SEQ ID NO: 318285
gggacaaucugggauguuc

SEQ ID NO: 403016 - RNA, 19 nt, Artificial Sequence
  Description of Artificial Sequence: Synthetic oligonucleotide
  Antisense Strand to SEQ ID NO: 403015
gaacaucccagauuguccc

SEQ ID NO: 403017 - RNA, 19 nt, Artificial Sequence
  Description of Artificial Sequence: Synthetic oligonucleotide
  Sense Strand Starting at position 1074 of SEQ ID NO: 318293
cugggauguucccaguagu

SEQ ID NO: 403018 - RNA, 19 nt, Artificial Sequence
  Description of Artificial Sequence: Synthetic oligonucleotide
  Antisense Strand to SEQ ID NO: 403017
acuacugggaacaucccag

SEQ ID NO: 403019 - RNA, 19 nt, Artificial Sequence
  Description of Artificial Sequence: Synthetic oligonucleotide
  Sense Strand Starting at position 1074 of SEQ ID NO: 318296
ggauguucccaguaguuuc

SEQ ID NO: 403020 - RNA, 19 nt, Artificial Sequence
  Description of Artificial Sequence: Synthetic oligonucleotide
  Antisense Strand to SEQ ID NO: 403019
gaaacuacugggaacaucc

SEQ ID NO: 403021 - RNA, 19 nt, Artificial Sequence
  Description of Artificial Sequence: Synthetic oligonucleotide
  Sense Strand Starting at position 1074 of SEQ ID NO: 318317
aggcuaggguguuagaaca

SEQ ID NO: 403022 - RNA, 19 nt, Artificial Sequence
  Description of Artificial Sequence: Synthetic oligonucleotide
  Antisense Strand to SEQ ID NO: 403021
uguucuaacacccuagccu

SEQ ID NO: 403023 - RNA, 19 nt, Artificial Sequence
  Description of Artificial Sequence: Synthetic oligonucleotide
  Sense Strand Starting at position 1074 of SEQ ID NO: 318345
aggccugggucuccaauaa

SEQ ID NO: 403024 - RNA, 19 nt, Artificial Sequence
  Description of Artificial Sequence: Synthetic oligonucleotide
  Antisense Strand to SEQ ID NO: 403023
uuauuggagacccaggccu

SEQ ID NO: 403025 - RNA, 19 nt, Artificial Sequence
  Description of Artificial Sequence: Synthetic oligonucleotide
  Sense Strand Starting at position 1074 of SEQ ID NO: 318394
uaagacucaccgugcucaa

SEQ ID NO: 403026 - RNA, 19 nt, Artificial Sequence
  Description of Artificial Sequence: Synthetic oligonucleotide
  Antisense Strand to SEQ ID NO: 403025
uugagcacggugagucuua

SEQ ID NO: 403027 - RNA, 19 nt, Artificial Sequence
  Description of Artificial Sequence: Synthetic oligonucleotide
  Sense Strand Starting at position 1074 of SEQ ID NO: 318464
ggagggucuuagugaggga

SEQ ID NO: 403028 - RNA, 19 nt, Artificial Sequence
  Description of Artificial Sequence: Synthetic oligonucleotide
  Antisense Strand to SEQ ID NO: 403027
ucccucacuaagacccucc

SEQ ID NO: 403029 - RNA, 19 nt, Artificial Sequence
  Description of Artificial Sequence: Synthetic oligonucleotide
  Sense Strand Starting at position 1074 of SEQ ID NO: 318589
gccaguguaugcuccucau

SEQ ID NO: 403030 - RNA, 19 nt, Artificial Sequence
  Description of Artificial Sequence: Synthetic oligonucleotide
  Antisense Strand to SEQ ID NO: 403029
augaggagcauacacuggc

SEQ ID NO: 403031 - RNA, 19 nt, Artificial Sequence
  Description of Artificial Sequence: Synthetic oligonucleotide
  Sense Strand Starting at position 1074 of SEQ ID NO: 318592
aguguaugcuccucauguc

SEQ ID NO: 403032 - RNA, 19 nt, Artificial Sequence
  Description of Artificial Sequence: Synthetic oligonucleotide
  Antisense Strand to SEQ ID NO: 403031
gacaugaggagcauacacu

SEQ ID NO: 403033 - RNA, 19 nt, Artificial Sequence
  Description of Artificial Sequence: Synthetic oligonucleotide
  Sense Strand Starting at position 1074 of SEQ ID NO: 318618
agagccauccuguguucca

SEQ ID NO: 403034 - RNA, 19 nt, Artificial Sequence
  Description of Artificial Sequence: Synthetic oligonucleotide
  Antisense Strand to SEQ ID NO: 403033
uggaacacaggauggcucu

SEQ ID NO: 403035 - RNA, 19 nt, Artificial Sequence
  Description of Artificial Sequence: Synthetic oligonucleotide
  Sense Strand Starting at position 1074 of SEQ ID NO: 318741
cagccaagcuccuaagagu

SEQ ID NO: 403036 - RNA, 19 nt, Artificial Sequence
  Description of Artificial Sequence: Synthetic oligonucleotide
  Antisense Strand to SEQ ID NO: 403035
acucuuaggagcuuggcug

SEQ ID NO: 403037 - RNA, 19 nt, Artificial Sequence
  Description of Artificial Sequence: Synthetic oligonucleotide
  Sense Strand Starting at position 1074 of SEQ ID NO: 318750
uccuaagaguuguucuaag

SEQ ID NO: 403038 - RNA, 19 nt, Artificial Sequence
  Description of Artificial Sequence: Synthetic oligonucleotide
  Antisense Strand to SEQ ID NO: 403037
cuuagaacaacucuuagga

SEQ ID NO: 403039 - RNA, 19 nt, Artificial Sequence
  Description of Artificial Sequence: Synthetic oligonucleotide
  Sense Strand Starting at position 1074 of SEQ ID NO: 318891
agaugaagguugcaguuau

SEQ ID NO: 403040 - RNA, 19 nt, Artificial Sequence
  Description of Artificial Sequence: Synthetic oligonucleotide
  Antisense Strand to SEQ ID NO: 403039
auaacugcaaccuucaucu

SEQ ID NO: 403041 - RNA, 19 nt, Artificial Sequence
  Description of Artificial Sequence: Synthetic oligonucleotide
  Sense Strand Starting at position 1074 of SEQ ID NO: 318895
gaagguugcaguuaugauu

SEQ ID NO: 403042 - RNA, 19 nt, Artificial Sequence
  Description of Artificial Sequence: Synthetic oligonucleotide
  Antisense Strand to SEQ ID NO: 403041
aaucauaacugcaaccuuc

SEQ ID NO: 403043 - RNA, 19 nt, Artificial Sequence
  Description of Artificial Sequence: Synthetic oligonucleotide
  Sense Strand Starting at position 1074 of SEQ ID NO: 318901
ugcaguuaugauugugcca

SEQ ID NO: 403044 - RNA, 19 nt, Artificial Sequence
  Description of Artificial Sequence: Synthetic oligonucleotide
  Antisense Strand to SEQ ID NO: 403043
uggcacaaucauaacugca

SEQ ID NO: 403045 - RNA, 19 nt, Artificial Sequence
  Description of Artificial Sequence: Synthetic oligonucleotide
  Sense Strand Starting at position 1074 of SEQ ID NO: 319068
ccaacaucuccauguugga

SEQ ID NO: 403046 - RNA, 19 nt, Artificial Sequence
  Description of Artificial Sequence: Synthetic oligonucleotide
  Antisense Strand to SEQ ID NO: 403045
uccaacauggagauguugg

SEQ ID NO: 403047 - RNA, 19 nt, Artificial Sequence
  Description of Artificial Sequence: Synthetic oligonucleotide
  Sense Strand Starting at position 1074 of SEQ ID NO: 319094
ggaccaacaucuccauguu

SEQ ID NO: 403048 - RNA, 19 nt, Artificial Sequence
  Description of Artificial Sequence: Synthetic oligonucleotide
  Antisense Strand to SEQ ID NO: 403047
aacauggagauguuggucc

SEQ ID NO: 403049 - RNA, 19 nt, Artificial Sequence
  Description of Artificial Sequence: Synthetic oligonucleotide
  Sense Strand Starting at position 1075 of SEQ ID NO: 315600
aggucuggaauucgagaaa

SEQ ID NO: 403050 - RNA, 19 nt, Artificial Sequence
  Description of Artificial Sequence: Synthetic oligonucleotide
  Antisense Strand to SEQ ID NO: 403049
uuucucgaauuccagaccu

SEQ ID NO: 403051 - RNA, 19 nt, Artificial Sequence
  Description of Artificial Sequence: Synthetic oligonucleotide
  Sense Strand Starting at position 1075 of SEQ ID NO: 315643
gauggugggugcuugcaau

SEQ ID NO: 403052 - RNA, 19 nt, Artificial Sequence
  Description of Artificial Sequence: Synthetic oligonucleotide
  Antisense Strand to SEQ ID NO: 403051
auugcaagcacccaccauc

SEQ ID NO: 403053 - RNA, 19 nt, Artificial Sequence
  Description of Artificial Sequence: Synthetic oligonucleotide
  Sense Strand Starting at position 1075 of SEQ ID NO: 316472
aaaggcaaaugcuugguaa

SEQ ID NO: 403054 - RNA, 19 nt, Artificial Sequence
  Description of Artificial Sequence: Synthetic oligonucleotide
  Antisense Strand to SEQ ID NO: 403053
uuaccaagcauuugccuuu

SEQ ID NO: 403055 - RNA, 19 nt, Artificial Sequence
  Description of Artificial Sequence: Synthetic oligonucleotide
  Sense Strand Starting at position 1075 of SEQ ID NO: 316473
aaggcaaaugcuugguaac

SEQ ID NO: 403056 - RNA, 19 nt, Artificial Sequence
  Description of Artificial Sequence: Synthetic oligonucleotide
  Antisense Strand to SEQ ID NO: 403055
guuaccaagcauuugccuu

SEQ ID NO: 403057 - RNA, 19 nt, Artificial Sequence
  Description of Artificial Sequence: Synthetic oligonucleotide
  Sense Strand Starting at position 1075 of SEQ ID NO: 316474
aggcaaaugcuugguaacu

SEQ ID NO: 403058 - RNA, 19 nt, Artificial Sequence
  Description of Artificial Sequence: Synthetic oligonucleotide
  Antisense Strand to SEQ ID NO: 403057
aguuaccaagcauuugccu

SEQ ID NO: 403059 - RNA, 19 nt, Artificial Sequence
  Description of Artificial Sequence: Synthetic oligonucleotide
  Sense Strand Starting at position 1075 of SEQ ID NO: 316475
ggcaaaugcuugguaacug

SEQ ID NO: 403060 - RNA, 19 nt, Artificial Sequence
  Description of Artificial Sequence: Synthetic oligonucleotide
  Antisense Strand to SEQ ID NO: 403059
caguuaccaagcauuugcc

SEQ ID NO: 403061 - RNA, 19 nt, Artificial Sequence
  Description of Artificial Sequence: Synthetic oligonucleotide
  Sense Strand Starting at position 1075 of SEQ ID NO: 316830
accgcaaggccguuaucau

SEQ ID NO: 403062 - RNA, 19 nt, Artificial Sequence
  Description of Artificial Sequence: Synthetic oligonucleotide
  Antisense Strand to SEQ ID NO: 403061
augauaacggccuugcggu

SEQ ID NO: 403063 - RNA, 19 nt, Artificial Sequence
  Description of Artificial Sequence: Synthetic oligonucleotide
  Sense Strand Starting at position 1075 of SEQ ID NO: 316831
ccgcaaggccguuaucauc

SEQ ID NO: 403064 - RNA, 19 nt, Artificial Sequence
  Description of Artificial Sequence: Synthetic oligonucleotide
  Antisense Strand to SEQ ID NO: 403063
gaugauaacggccuugcgg

SEQ ID NO: 403065 - RNA, 19 nt, Artificial Sequence
  Description of Artificial Sequence: Synthetic oligonucleotide
  Sense Strand Starting at position 1075 of SEQ ID NO: 316839
ccguuaucaucccuccaga

SEQ ID NO: 403066 - RNA, 19 nt, Artificial Sequence
  Description of Artificial Sequence: Synthetic oligonucleotide
  Antisense Strand to SEQ ID NO: 403065
ucuggagggaugauaacgg

SEQ ID NO: 403067 - RNA, 19 nt, Artificial Sequence
  Description of Artificial Sequence: Synthetic oligonucleotide
  Sense Strand Starting at position 1075 of SEQ ID NO: 316855
agagaucucucaguguuug

SEQ ID NO: 403068 - RNA, 19 nt, Artificial Sequence
  Description of Artificial Sequence: Synthetic oligonucleotide
  Antisense Strand to SEQ ID NO: 403067
caaacacugagagaucucu

SEQ ID NO: 403069 - RNA, 19 nt, Artificial Sequence
  Description of Artificial Sequence: Synthetic oligonucleotide
  Sense Strand Starting at position 1075 of SEQ ID NO: 316856
gagaucucucaguguuugu

SEQ ID NO: 403070 - RNA, 19 nt, Artificial Sequence
  Description of Artificial Sequence: Synthetic oligonucleotide
  Antisense Strand to SEQ ID NO: 403069
acaaacacugagagaucuc

SEQ ID NO: 403071 - RNA, 19 nt, Artificial Sequence
  Description of Artificial Sequence: Synthetic oligonucleotide
  Sense Strand Starting at position 1075 of SEQ ID NO: 316863
cucaguguuugucucucaa

SEQ ID NO: 403072 - RNA, 19 nt, Artificial Sequence
  Description of Artificial Sequence: Synthetic oligonucleotide
  Antisense Strand to SEQ ID NO: 403071
uugagagacaaacacugag

SEQ ID NO: 403073 - RNA, 19 nt, Artificial Sequence
  Description of Artificial Sequence: Synthetic oligonucleotide
  Sense Strand Starting at position 1075 of SEQ ID NO: 316867
guguuugucucucaaacac

SEQ ID NO: 403074 - RNA, 19 nt, Artificial Sequence
  Description of Artificial Sequence: Synthetic oligonucleotide
  Antisense Strand to SEQ ID NO: 403073
guguuugagagacaaacac

SEQ ID NO: 403075 - RNA, 19 nt, Artificial Sequence
  Description of Artificial Sequence: Synthetic oligonucleotide
  Sense Strand Starting at position 1075 of SEQ ID NO: 317023
gcaaaucuccuccagauga

SEQ ID NO: 403076 - RNA, 19 nt, Artificial Sequence
  Description of Artificial Sequence: Synthetic oligonucleotide
  Antisense Strand to SEQ ID NO: 403075
ucaucuggaggagauuugc

SEQ ID NO: 403077 - RNA, 19 nt, Artificial Sequence
  Description of Artificial Sequence: Synthetic oligonucleotide
  Sense Strand Starting at position 1075 of SEQ ID NO: 317570
uccuguagcucuugcgauu

SEQ ID NO: 403078 - RNA, 19 nt, Artificial Sequence
  Description of Artificial Sequence: Synthetic oligonucleotide
  Antisense Strand to SEQ ID NO: 403077
aaucgcaagagcuacagga

SEQ ID NO: 403079 - RNA, 19 nt, Artificial Sequence
  Description of Artificial Sequence: Synthetic oligonucleotide
  Sense Strand Starting at position 1075 of SEQ ID NO: 317571
ccuguagcucuugcgauua

SEQ ID NO: 403080 - RNA, 19 nt, Artificial Sequence
  Description of Artificial Sequence: Synthetic oligonucleotide
  Antisense Strand to SEQ ID NO: 403079
uaaucgcaagagcuacagg

SEQ ID NO: 403081 - RNA, 19 nt, Artificial Sequence
  Description of Artificial Sequence: Synthetic oligonucleotide
  Sense Strand Starting at position 1075 of SEQ ID NO: 317573
uguagcucuugcgauuaca

SEQ ID NO: 403082 - RNA, 19 nt, Artificial Sequence
  Description of Artificial Sequence: Synthetic oligonucleotide
  Antisense Strand to SEQ ID NO: 403081
uguaaucgcaagagcuaca

SEQ ID NO: 403083 - RNA, 19 nt, Artificial Sequence
  Description of Artificial Sequence: Synthetic oligonucleotide
  Sense Strand Starting at position 1075 of SEQ ID NO: 317576
agcucuugcgauuacaaag

SEQ ID NO: 403084 - RNA, 19 nt, Artificial Sequence
  Description of Artificial Sequence: Synthetic oligonucleotide
  Antisense Strand to SEQ ID NO: 403083
cuuuguaaucgcaagagcu

SEQ ID NO: 403085 - RNA, 19 nt, Artificial Sequence
  Description of Artificial Sequence: Synthetic oligonucleotide
  Sense Strand Starting at position 1075 of SEQ ID NO: 317622
cugagugugucugugcuuu

SEQ ID NO: 403086 - RNA, 19 nt, Artificial Sequence
  Description of Artificial Sequence: Synthetic oligonucleotide
  Antisense Strand to SEQ ID NO: 403085
aaagcacagacacacucag

SEQ ID NO: 403087 - RNA, 19 nt, Artificial Sequence
  Description of Artificial Sequence: Synthetic oligonucleotide
  Sense Strand Starting at position 1075 of SEQ ID NO: 317630
gucugugcuuuccugugua

SEQ ID NO: 403088 - RNA, 19 nt, Artificial Sequence
  Description of Artificial Sequence: Synthetic oligonucleotide
  Antisense Strand to SEQ ID NO: 403087
uacacaggaaagcacagac

SEQ ID NO: 403089 - RNA, 19 nt, Artificial Sequence
  Description of Artificial Sequence: Synthetic oligonucleotide
  Sense Strand Starting at position 1075 of SEQ ID NO: 317633
ugugcuuuccuguguaugu

SEQ ID NO: 403090 - RNA, 19 nt, Artificial Sequence
  Description of Artificial Sequence: Synthetic oligonucleotide
  Antisense Strand to SEQ ID NO: 403089
acauacacaggaaagcaca

SEQ ID NO: 403091 - RNA, 19 nt, Artificial Sequence
  Description of Artificial Sequence: Synthetic oligonucleotide
  Sense Strand Starting at position 1075 of SEQ ID NO: 317634
gugcuuuccuguguaugua

SEQ ID NO: 403092 - RNA, 19 nt, Artificial Sequence
  Description of Artificial Sequence: Synthetic oligonucleotide
  Antisense Strand to SEQ ID NO: 403091
uacauacacaggaaagcac

SEQ ID NO: 403093 - RNA, 19 nt, Artificial Sequence
  Description of Artificial Sequence: Synthetic oligonucleotide
  Sense Strand Starting at position 1075 of SEQ ID NO: 317635
ugcuuuccuguguauguau

SEQ ID NO: 403094 - RNA, 19 nt, Artificial Sequence
  Description of Artificial Sequence: Synthetic oligonucleotide
  Antisense Strand to SEQ ID NO: 403093
auacauacacaggaaagca

SEQ ID NO: 403095 - RNA, 19 nt, Artificial Sequence
  Description of Artificial Sequence: Synthetic oligonucleotide
  Sense Strand Starting at position 1075 of SEQ ID NO: 317637
cuuuccuguguauguauua

SEQ ID NO: 403096 - RNA, 19 nt, Artificial Sequence
  Description of Artificial Sequence: Synthetic oligonucleotide
  Antisense Strand to SEQ ID NO: 403095
uaauacauacacaggaaag

SEQ ID NO: 403097 - RNA, 19 nt, Artificial Sequence
  Description of Artificial Sequence: Synthetic oligonucleotide
  Sense Strand Starting at position 1075 of SEQ ID NO: 317638
uuuccuguguauguauuau

SEQ ID NO: 403098 - RNA, 19 nt, Artificial Sequence
  Description of Artificial Sequence: Synthetic oligonucleotide
  Antisense Strand to SEQ ID NO: 403097
auaauacauacacaggaaa

SEQ ID NO: 403099 - RNA, 19 nt, Artificial Sequence
  Description of Artificial Sequence: Synthetic oligonucleotide
  Sense Strand Starting at position 1075 of SEQ ID NO: 317642
cuguguauguauuauaguu

SEQ ID NO: 403100 - RNA, 19 nt, Artificial Sequence
  Description of Artificial Sequence: Synthetic oligonucleotide
  Antisense Strand to SEQ ID NO: 403099
aacuauaauacauacacag

SEQ ID NO: 403101 - RNA, 19 nt, Artificial Sequence
  Description of Artificial Sequence: Synthetic oligonucleotide
  Sense Strand Starting at position 1075 of SEQ ID NO: 317644
guguauguauuauaguuga

SEQ ID NO: 403102 - RNA, 19 nt, Artificial Sequence
  Description of Artificial Sequence: Synthetic oligonucleotide
  Antisense Strand to SEQ ID NO: 403101
ucaacuauaauacauacac

SEQ ID NO: 403103 - RNA, 19 nt, Artificial Sequence
  Description of Artificial Sequence: Synthetic oligonucleotide
  Sense Strand Starting at position 1075 of SEQ ID NO: 317944
ugggauuugucucaccaga

SEQ ID NO: 403104 - RNA, 19 nt, Artificial Sequence
  Description of Artificial Sequence: Synthetic oligonucleotide
  Antisense Strand to SEQ ID NO: 403103
ucuggugagacaaauccca

SEQ ID NO: 403105 - RNA, 19 nt, Artificial Sequence
  Description of Artificial Sequence: Synthetic oligonucleotide
  Sense Strand Starting at position 1075 of SEQ ID NO: 317954
cucaccagacagugaaauu

SEQ ID NO: 403106 - RNA, 19 nt, Artificial Sequence
  Description of Artificial Sequence: Synthetic oligonucleotide
  Antisense Strand to SEQ ID NO: 403105
aauuucacugucuggugag

SEQ ID NO: 403107 - RNA, 19 nt, Artificial Sequence
  Description of Artificial Sequence: Synthetic oligonucleotide
  Sense Strand Starting at position 1075 of SEQ ID NO: 318528
cgugccuggccuuuaauua

SEQ ID NO: 403108 - RNA, 19 nt, Artificial Sequence
  Description of Artificial Sequence: Synthetic oligonucleotide
  Antisense Strand to SEQ ID NO: 403107
uaauuaaaggccaggcacg

SEQ ID NO: 403109 - RNA, 19 nt, Artificial Sequence
  Description of Artificial Sequence: Synthetic oligonucleotide
  Sense Strand Starting at position 1075 of SEQ ID NO: 318586
agccauguguggucuggaa

SEQ ID NO: 403110 - RNA, 19 nt, Artificial Sequence
  Description of Artificial Sequence: Synthetic oligonucleotide
  Antisense Strand to SEQ ID NO: 403109
uuccagaccacacauggcu

SEQ ID NO: 403111 - RNA, 19 nt, Artificial Sequence
  Description of Artificial Sequence: Synthetic oligonucleotide
  Sense Strand Starting at position 1075 of SEQ ID NO: 318588
ccauguguggucuggaacu

SEQ ID NO: 403112 - RNA, 19 nt, Artificial Sequence
  Description of Artificial Sequence: Synthetic oligonucleotide
  Antisense Strand to SEQ ID NO: 403111
aguuccagaccacacaugg

SEQ ID NO: 403113 - RNA, 19 nt, Artificial Sequence
  Description of Artificial Sequence: Synthetic oligonucleotide
  Sense Strand Starting at position 1075 of SEQ ID NO: 318668
caugcuguguccugcucaa

SEQ ID NO: 403114 - RNA, 19 nt, Artificial Sequence
  Description of Artificial Sequence: Synthetic oligonucleotide
  Antisense Strand to SEQ ID NO: 403113
uugagcaggacacagcaug

SEQ ID NO: 403115 - RNA, 19 nt, Artificial Sequence
  Description of Artificial Sequence: Synthetic oligonucleotide
  Sense Strand Starting at position 1075 of SEQ ID NO: 318898
gugugagcauuugaucaac

SEQ ID NO: 403116 - RNA, 19 nt, Artificial Sequence
  Description of Artificial Sequence: Synthetic oligonucleotide
  Antisense Strand to SEQ ID NO: 403115
guugaucaaaugcucacac

SEQ ID NO: 403117 - RNA, 19 nt, Artificial Sequence
  Description of Artificial Sequence: Synthetic oligonucleotide
  Sense Strand Starting at position 1075 of SEQ ID NO: 319021
uuugcauaauguugugaau

SEQ ID NO: 403118 - RNA, 19 nt, Artificial Sequence
  Description of Artificial Sequence: Synthetic oligonucleotide
  Antisense Strand to SEQ ID NO: 403117
auucacaacauuaugcaaa

SEQ ID NO: 403119 - RNA, 19 nt, Artificial Sequence
  Description of Artificial Sequence: Synthetic oligonucleotide
  Sense Strand Starting at position 1075 of SEQ ID NO: 319023
ugcauaauguugugaauua

SEQ ID NO: 403120 - RNA, 19 nt, Artificial Sequence
  Description of Artificial Sequence: Synthetic oligonucleotide
  Antisense Strand to SEQ ID NO: 403119
uaauucacaacauuaugca

SEQ ID NO: 403121 - RNA, 19 nt, Artificial Sequence
  Description of Artificial Sequence: Synthetic oligonucleotide
  Sense Strand Starting at position 1075 of SEQ ID NO: 319024
gcauaauguugugaauuaa

SEQ ID NO: 403122 - RNA, 19 nt, Artificial Sequence
  Description of Artificial Sequence: Synthetic oligonucleotide
  Antisense Strand to SEQ ID NO: 403121
uuaauucacaacauuaugc

SEQ ID NO: 403123 - RNA, 19 nt, Artificial Sequence
  Description of Artificial Sequence: Synthetic oligonucleotide
  Sense Strand Starting at position 1076 of SEQ ID NO: 315333
ccuguaguuguggacucau

SEQ ID NO: 403124 - RNA, 19 nt, Artificial Sequence
  Description of Artificial Sequence: Synthetic oligonucleotide
  Antisense Strand to SEQ ID NO: 403123
augaguccacaacuacagg

SEQ ID NO: 403125 - RNA, 19 nt, Artificial Sequence
  Description of Artificial Sequence: Synthetic oligonucleotide
  Sense Strand Starting at position 1076 of SEQ ID NO: 315380
cgguaacuccaccacuuua

SEQ ID NO: 403126 - RNA, 19 nt, Artificial Sequence
  Description of Artificial Sequence: Synthetic oligonucleotide
  Antisense Strand to SEQ ID NO: 403125
uaaagugguggaguuaccg

SEQ ID NO: 403127 - RNA, 19 nt, Artificial Sequence
  Description of Artificial Sequence: Synthetic oligonucleotide
  Sense Strand Starting at position 1076 of SEQ ID NO: 315431
gaagaagagucgcuagauc

SEQ ID NO: 403128 - RNA, 19 nt, Artificial Sequence
  Description of Artificial Sequence: Synthetic oligonucleotide
  Antisense Strand to SEQ ID NO: 403127
gaucuagcgacucuucuuc

SEQ ID NO: 403129 - RNA, 19 nt, Artificial Sequence
  Description of Artificial Sequence: Synthetic oligonucleotide
  Sense Strand Starting at position 1076 of SEQ ID NO: 315467
ucuagcuacggugaucuua

SEQ ID NO: 403130 - RNA, 19 nt, Artificial Sequence
  Description of Artificial Sequence: Synthetic oligonucleotide
  Antisense Strand to SEQ ID NO: 403129
uaagaucaccguagcuaga

SEQ ID NO: 403131 - RNA, 19 nt, Artificial Sequence
  Description of Artificial Sequence: Synthetic oligonucleotide
  Sense Strand Starting at position 1076 of SEQ ID NO: 315530
uuuguccuuucuuuaggaa

SEQ ID NO: 403132 - RNA, 19 nt, Artificial Sequence
  Description of Artificial Sequence: Synthetic oligonucleotide
  Antisense Strand to SEQ ID NO: 403131
uuccuaaagaaaggacaaa

SEQ ID NO: 403133 - RNA, 19 nt, Artificial Sequence
  Description of Artificial Sequence: Synthetic oligonucleotide
  Sense Strand Starting at position 1076 of SEQ ID NO: 315571
gggccaauuuaauagcaaa

SEQ ID NO: 403134 - RNA, 19 nt, Artificial Sequence
  Description of Artificial Sequence: Synthetic oligonucleotide
  Antisense Strand to SEQ ID NO: 403133
uuugcuauuaaauuggccc

SEQ ID NO: 403135 - RNA, 19 nt, Artificial Sequence
  Description of Artificial Sequence: Synthetic oligonucleotide
  Sense Strand Starting at position 1076 of SEQ ID NO: 315660
gaaggcuuugucuauuaca

SEQ ID NO: 403136 - RNA, 19 nt, Artificial Sequence
  Description of Artificial Sequence: Synthetic oligonucleotide
  Antisense Strand to SEQ ID NO: 403135
uguaauagacaaagccuuc

SEQ ID NO: 403137 - RNA, 19 nt, Artificial Sequence
  Description of Artificial Sequence: Synthetic oligonucleotide
  Sense Strand Starting at position 1076 of SEQ ID NO: 315692
guggaugccacucaaaguu

SEQ ID NO: 403138 - RNA, 19 nt, Artificial Sequence
  Description of Artificial Sequence: Synthetic oligonucleotide
  Antisense Strand to SEQ ID NO: 403137
aacuuugaguggcauccac

SEQ ID NO: 403139 - RNA, 19 nt, Artificial Sequence
  Description of Artificial Sequence: Synthetic oligonucleotide
  Sense Strand Starting at position 1076 of SEQ ID NO: 315806
aggaacagaccgugucaua

SEQ ID NO: 403140 - RNA, 19 nt, Artificial Sequence
  Description of Artificial Sequence: Synthetic oligonucleotide
  Antisense Strand to SEQ ID NO: 403139
uaugacacggucuguuccu

SEQ ID NO: 403141 - RNA, 19 nt, Artificial Sequence
  Description of Artificial Sequence: Synthetic oligonucleotide
  Sense Strand Starting at position 1076 of SEQ ID NO: 315857
ccacgcaugccacauauuu

SEQ ID NO: 403142 - RNA, 19 nt, Artificial Sequence
  Description of Artificial Sequence: Synthetic oligonucleotide
  Antisense Strand to SEQ ID NO: 403141
aaauauguggcaugcgugg

SEQ ID NO: 403143 - RNA, 19 nt, Artificial Sequence
  Description of Artificial Sequence: Synthetic oligonucleotide
  Sense Strand Starting at position 1076 of SEQ ID NO: 315942
guugaacuccuuugaauug

SEQ ID NO: 403144 - RNA, 19 nt, Artificial Sequence
  Description of Artificial Sequence: Synthetic oligonucleotide
  Antisense Strand to SEQ ID NO: 403143
caauucaaaggaguucaac

SEQ ID NO: 403145 - RNA, 19 nt, Artificial Sequence
  Description of Artificial Sequence: Synthetic oligonucleotide
  Sense Strand Starting at position 1076 of SEQ ID NO: 315949
uccuuugaauugguauaga

SEQ ID NO: 403146 - RNA, 19 nt, Artificial Sequence
  Description of Artificial Sequence: Synthetic oligonucleotide
  Antisense Strand to SEQ ID NO: 403145
ucuauaccaauucaaagga

SEQ ID NO: 403147 - RNA, 19 nt, Artificial Sequence
  Description of Artificial Sequence: Synthetic oligonucleotide
  Sense Strand Starting at position 1076 of SEQ ID NO: 315969
cgcucugccauugagauaa

SEQ ID NO: 403148 - RNA, 19 nt, Artificial Sequence
  Description of Artificial Sequence: Synthetic oligonucleotide
  Antisense Strand to SEQ ID NO: 403147
uuaucucaauggcagagcg

SEQ ID NO: 403149 - RNA, 19 nt, Artificial Sequence
  Description of Artificial Sequence: Synthetic oligonucleotide
  Sense Strand Starting at position 1076 of SEQ ID NO: 316037
aaccgaguacugggugauu

SEQ ID NO: 403150 - RNA, 19 nt, Artificial Sequence
  Description of Artificial Sequence: Synthetic oligonucleotide
  Antisense Strand to SEQ ID NO: 403149
aaucacccaguacucgguu

SEQ ID NO: 403151 - RNA, 19 nt, Artificial Sequence
  Description of Artificial Sequence: Synthetic oligonucleotide
  Sense Strand Starting at position 1076 of SEQ ID NO: 316039
ccgaguacugggugauuga

SEQ ID NO: 403152 - RNA, 19 nt, Artificial Sequence
  Description of Artificial Sequence: Synthetic oligonucleotide
  Antisense Strand to SEQ ID NO: 403151
ucaaucacccaguacucgg

SEQ ID NO: 403153 - RNA, 19 nt, Artificial Sequence
  Description of Artificial Sequence: Synthetic oligonucleotide
  Sense Strand Starting at position 1076 of SEQ ID NO: 316040
cgaguacugggugauugaa

SEQ ID NO: 403154 - RNA, 19 nt, Artificial Sequence
  Description of Artificial Sequence: Synthetic oligonucleotide
  Antisense Strand to SEQ ID NO: 403153
uucaaucacccaguacucg

SEQ ID NO: 403155 - RNA, 19 nt, Artificial Sequence
  Description of Artificial Sequence: Synthetic oligonucleotide
  Sense Strand Starting at position 1076 of SEQ ID NO: 317024
acgugaucgccuccuucuu

SEQ ID NO: 403156 - RNA, 19 nt, Artificial Sequence
  Description of Artificial Sequence: Synthetic oligonucleotide
  Antisense Strand to SEQ ID NO: 403155
aagaaggaggcgaucacgu

SEQ ID NO: 403157 - RNA, 19 nt, Artificial Sequence
  Description of Artificial Sequence: Synthetic oligonucleotide
  Sense Strand Starting at position 1076 of SEQ ID NO: 317426
cggagcgcgcuuguucaau

SEQ ID NO: 403158 - RNA, 19 nt, Artificial Sequence
  Description of Artificial Sequence: Synthetic oligonucleotide
  Antisense Strand to SEQ ID NO: 403157
auugaacaagcgcgcuccg

SEQ ID NO: 403159 - RNA, 19 nt, Artificial Sequence
  Description of Artificial Sequence: Synthetic oligonucleotide
  Sense Strand Starting at position 1076 of SEQ ID NO: 317443
auguuaagaucuuugacaa

SEQ ID NO: 403160 - RNA, 19 nt, Artificial Sequence
  Description of Artificial Sequence: Synthetic oligonucleotide
  Antisense Strand to SEQ ID NO: 403159
uugucaaagaucuuaacau

SEQ ID NO: 403161 - RNA, 19 nt, Artificial Sequence
  Description of Artificial Sequence: Synthetic oligonucleotide
  Sense Strand Starting at position 1076 of SEQ ID NO: 317444
uguuaagaucuuugacaau

SEQ ID NO: 403162 - RNA, 19 nt, Artificial Sequence
  Description of Artificial Sequence: Synthetic oligonucleotide
  Antisense Strand to SEQ ID NO: 403161
auugucaaagaucuuaaca

SEQ ID NO: 403163 - RNA, 19 nt, Artificial Sequence
  Description of Artificial Sequence: Synthetic oligonucleotide
  Sense Strand Starting at position 1076 of SEQ ID NO: 317826
gcucuuggccauuaaucca

SEQ ID NO: 403164 - RNA, 19 nt, Artificial Sequence
  Description of Artificial Sequence: Synthetic oligonucleotide
  Antisense Strand to SEQ ID NO: 403163
uggauuaauggccaagagc

SEQ ID NO: 403165 - RNA, 19 nt, Artificial Sequence
  Description of Artificial Sequence: Synthetic oligonucleotide
  Sense Strand Starting at position 1076 of SEQ ID NO: 317833
gccauuaauccaggauuga

SEQ ID NO: 403166 - RNA, 19 nt, Artificial Sequence
  Description of Artificial Sequence: Synthetic oligonucleotide
  Antisense Strand to SEQ ID NO: 403165
ucaauccuggauuaauggc

SEQ ID NO: 403167 - RNA, 19 nt, Artificial Sequence
  Description of Artificial Sequence: Synthetic oligonucleotide
  Sense Strand Starting at position 1076 of SEQ ID NO: 317869
uuuaauuaggcguggauuu

SEQ ID NO: 403168 - RNA, 19 nt, Artificial Sequence
  Description of Artificial Sequence: Synthetic oligonucleotide
  Antisense Strand to SEQ ID NO: 403167
aaauccacgccuaauuaaa

SEQ ID NO: 403169 - RNA, 19 nt, Artificial Sequence
  Description of Artificial Sequence: Synthetic oligonucleotide
  Sense Strand Starting at position 1076 of SEQ ID NO: 317894
ggugucacgacuuaguuaa

SEQ ID NO: 403170 - RNA, 19 nt, Artificial Sequence
  Description of Artificial Sequence: Synthetic oligonucleotide
  Antisense Strand to SEQ ID NO: 403169
uuaacuaagucgugacacc

SEQ ID NO: 403171 - RNA, 19 nt, Artificial Sequence
  Description of Artificial Sequence: Synthetic oligonucleotide
  Sense Strand Starting at position 1076 of SEQ ID NO: 317976
cuuagagucagucagguau

SEQ ID NO: 403172 - RNA, 19 nt, Artificial Sequence
  Description of Artificial Sequence: Synthetic oligonucleotide
  Antisense Strand to SEQ ID NO: 403171
auaccugacugacucuaag

SEQ ID NO: 403173 - RNA, 19 nt, Artificial Sequence
  Description of Artificial Sequence: Synthetic oligonucleotide
  Sense Strand Starting at position 1076 of SEQ ID NO: 318334
cguguuauucgcucuauua

SEQ ID NO: 403174 - RNA, 19 nt, Artificial Sequence
  Description of Artificial Sequence: Synthetic oligonucleotide
  Antisense Strand to SEQ ID NO: 403173
uaauagagcgaauaacacg

SEQ ID NO: 403175 - RNA, 19 nt, Artificial Sequence
  Description of Artificial Sequence: Synthetic oligonucleotide
  Sense Strand Starting at position 1076 of SEQ ID NO: 318581
aggacuucuucuuuagcau

SEQ ID NO: 403176 - RNA, 19 nt, Artificial Sequence
  Description of Artificial Sequence: Synthetic oligonucleotide
  Antisense Strand to SEQ ID NO: 403175
augcuaaagaagaaguccu

SEQ ID NO: 403177 - RNA, 19 nt, Artificial Sequence
  Description of Artificial Sequence: Synthetic oligonucleotide
  Sense Strand Starting at position 1076 of SEQ ID NO: 318582
ggacuucuucuuuagcauc

SEQ ID NO: 403178 - RNA, 19 nt, Artificial Sequence
  Description of Artificial Sequence: Synthetic oligonucleotide
  Antisense Strand to SEQ ID NO: 403177
gaugcuaaagaagaagucc

SEQ ID NO: 403179 - RNA, 19 nt, Artificial Sequence
  Description of Artificial Sequence: Synthetic oligonucleotide
  Sense Strand Starting at position 1076 of SEQ ID NO: 318601
uugggaaacauccgaguuu

SEQ ID NO: 403180 - RNA, 19 nt, Artificial Sequence
  Description of Artificial Sequence: Synthetic oligonucleotide
  Antisense Strand to SEQ ID NO: 403179
aaacucggauguuucccaa

SEQ ID NO: 403181 - RNA, 19 nt, Artificial Sequence
  Description of Artificial Sequence: Synthetic oligonucleotide
  Sense Strand Starting at position 1076 of SEQ ID NO: 318843
aucuauauuccugagucau

SEQ ID NO: 403182 - RNA, 19 nt, Artificial Sequence
  Description of Artificial Sequence: Synthetic oligonucleotide
  Antisense Strand to SEQ ID NO: 403181
augacucaggaauauagau

SEQ ID NO: 403183 - RNA, 19 nt, Artificial Sequence
  Description of Artificial Sequence: Synthetic oligonucleotide
  Sense Strand Starting at position 1076 of SEQ ID NO: 318851
uccugagucauuugucugu

SEQ ID NO: 403184 - RNA, 19 nt, Artificial Sequence
  Description of Artificial Sequence: Synthetic oligonucleotide
  Antisense Strand to SEQ ID NO: 403183
acagacaaaugacucagga

SEQ ID NO: 403185 - RNA, 19 nt, Artificial Sequence
  Description of Artificial Sequence: Synthetic oligonucleotide
  Sense Strand Starting at position 1076 of SEQ ID NO: 318853
cugagucauuugucuguau

SEQ ID NO: 403186 - RNA, 19 nt, Artificial Sequence
  Description of Artificial Sequence: Synthetic oligonucleotide
  Antisense Strand to SEQ ID NO: 403185
auacagacaaaugacucag

SEQ ID NO: 403187 - RNA, 19 nt, Artificial Sequence
  Description of Artificial Sequence: Synthetic oligonucleotide
  Sense Strand Starting at position 1076 of SEQ ID NO: 318854
ugagucauuugucuguauu

SEQ ID NO: 403188 - RNA, 19 nt, Artificial Sequence
  Description of Artificial Sequence: Synthetic oligonucleotide
  Antisense Strand to SEQ ID NO: 403187
aauacagacaaaugacuca

SEQ ID NO: 403189 - RNA, 19 nt, Artificial Sequence
  Description of Artificial Sequence: Synthetic oligonucleotide
  Sense Strand Starting at position 1076 of SEQ ID NO: 318855
gagucauuugucuguauug

SEQ ID NO: 403190 - RNA, 19 nt, Artificial Sequence
  Description of Artificial Sequence: Synthetic oligonucleotide
  Antisense Strand to SEQ ID NO: 403189
caauacagacaaaugacuc

SEQ ID NO: 403191 - RNA, 19 nt, Artificial Sequence
  Description of Artificial Sequence: Synthetic oligonucleotide
  Sense Strand Starting at position 1076 of SEQ ID NO: 318856
agucauuugucuguauugu

SEQ ID NO: 403192 - RNA, 19 nt, Artificial Sequence
  Description of Artificial Sequence: Synthetic oligonucleotide
  Antisense Strand to SEQ ID NO: 403191
acaauacagacaaaugacu

SEQ ID NO: 403193 - RNA, 19 nt, Artificial Sequence
  Description of Artificial Sequence: Synthetic oligonucleotide
  Sense Strand Starting at position 1076 of SEQ ID NO: 318857
gucauuugucuguauugug

SEQ ID NO: 403194 - RNA, 19 nt, Artificial Sequence
  Description of Artificial Sequence: Synthetic oligonucleotide
  Antisense Strand to SEQ ID NO: 403193
cacaauacagacaaaugac

SEQ ID NO: 403195 - RNA, 19 nt, Artificial Sequence
  Description of Artificial Sequence: Synthetic oligonucleotide
  Sense Strand Starting at position 1076 of SEQ ID NO: 318883
gggcuugcugugagaagug

SEQ ID NO: 403196 - RNA, 19 nt, Artificial Sequence
  Description of Artificial Sequence: Synthetic oligonucleotide
  Antisense Strand to SEQ ID NO: 403195
cacuucucacagcaagccc

SEQ ID NO: 403197 - RNA, 19 nt, Artificial Sequence
  Description of Artificial Sequence: Synthetic oligonucleotide
  Sense Strand Starting at position 1076 of SEQ ID NO: 319022
gcagacuuucuggaaguua

SEQ ID NO: 403198 - RNA, 19 nt, Artificial Sequence
  Description of Artificial Sequence: Synthetic oligonucleotide
  Antisense Strand to SEQ ID NO: 403197
uaacuuccagaaagucugc

SEQ ID NO: 403199 - RNA, 19 nt, Artificial Sequence
  Description of Artificial Sequence: Synthetic oligonucleotide
  Sense Strand Starting at position 1076 of SEQ ID NO: 319062
uggaucuaauacucuuagu

SEQ ID NO: 403200 - RNA, 19 nt, Artificial Sequence
  Description of Artificial Sequence: Synthetic oligonucleotide
  Antisense Strand to SEQ ID NO: 403199
acuaagaguauuagaucca

SEQ ID NO: 403201 - RNA, 19 nt, Artificial Sequence
  Description of Artificial Sequence: Synthetic oligonucleotide
  Sense Strand Starting at position 1076 of SEQ ID NO: 319112
guauaucuuccguauauug

SEQ ID NO: 403202 - RNA, 19 nt, Artificial Sequence
  Description of Artificial Sequence: Synthetic oligonucleotide
  Antisense Strand to SEQ ID NO: 403201
caauauacggaagauauac

SEQ ID NO: 403203 - RNA, 19 nt, Artificial Sequence
  Description of Artificial Sequence: Synthetic oligonucleotide
  Sense Strand Starting at position 1077 of SEQ ID NO: 315612
uuguaacacuguccuaaua

SEQ ID NO: 403204 - RNA, 19 nt, Artificial Sequence
  Description of Artificial Sequence: Synthetic oligonucleotide
  Antisense Strand to SEQ ID NO: 403203
uauuaggacaguguuacaa

SEQ ID NO: 403205 - RNA, 19 nt, Artificial Sequence
  Description of Artificial Sequence: Synthetic oligonucleotide
  Sense Strand Starting at position 1077 of SEQ ID NO: 315635
augagauaauccguauaaa

SEQ ID NO: 403206 - RNA, 19 nt, Artificial Sequence
  Description of Artificial Sequence: Synthetic oligonucleotide
  Antisense Strand to SEQ ID NO: 403205
uuuauacggauuaucucau

SEQ ID NO: 403207 - RNA, 19 nt, Artificial Sequence
  Description of Artificial Sequence: Synthetic oligonucleotide
  Sense Strand Starting at position 1077 of SEQ ID NO: 315638
agauaauccguauaaagca

SEQ ID NO: 403208 - RNA, 19 nt, Artificial Sequence
  Description of Artificial Sequence: Synthetic oligonucleotide
  Antisense Strand to SEQ ID NO: 403207
ugcuuuauacggauuaucu

SEQ ID NO: 403209 - RNA, 19 nt, Artificial Sequence
  Description of Artificial Sequence: Synthetic oligonucleotide
  Sense Strand Starting at position 1077 of SEQ ID NO: 315994
cguuauauggucuaaggga

SEQ ID NO: 403210 - RNA, 19 nt, Artificial Sequence
  Description of Artificial Sequence: Synthetic oligonucleotide
  Antisense Strand to SEQ ID NO: 403209
ucccuuagaccauauaacg

SEQ ID NO: 403211 - RNA, 19 nt, Artificial Sequence
  Description of Artificial Sequence: Synthetic oligonucleotide
  Sense Strand Starting at position 1077 of SEQ ID NO: 316082
aaaguacuugggugggaaa

SEQ ID NO: 403212 - RNA, 19 nt, Artificial Sequence
  Description of Artificial Sequence: Synthetic oligonucleotide
  Antisense Strand to SEQ ID NO: 403211
uuucccacccaaguacuuu

SEQ ID NO: 403213 - RNA, 19 nt, Artificial Sequence
  Description of Artificial Sequence: Synthetic oligonucleotide
  Sense Strand Starting at position 1077 of SEQ ID NO: 316218
cagugcuuaucccuaagga

SEQ ID NO: 403214 - RNA, 19 nt, Artificial Sequence
  Description of Artificial Sequence: Synthetic oligonucleotide
  Antisense Strand to SEQ ID NO: 403213
uccuuagggauaagcacug

SEQ ID NO: 403215 - RNA, 19 nt, Artificial Sequence
  Description of Artificial Sequence: Synthetic oligonucleotide
  Sense Strand Starting at position 1077 of SEQ ID NO: 316219
agugcuuaucccuaaggau

SEQ ID NO: 403216 - RNA, 19 nt, Artificial Sequence
  Description of Artificial Sequence: Synthetic oligonucleotide
  Antisense Strand to SEQ ID NO: 403215
auccuuagggauaagcacu

SEQ ID NO: 403217 - RNA, 19 nt, Artificial Sequence
  Description of Artificial Sequence: Synthetic oligonucleotide
  Sense Strand Starting at position 1077 of SEQ ID NO: 316232
aaggaucaccgucaaaguu

SEQ ID NO: 403218 - RNA, 19 nt, Artificial Sequence
  Description of Artificial Sequence: Synthetic oligonucleotide
  Antisense Strand to SEQ ID NO: 403217
aacuuugacggugauccuu

SEQ ID NO: 403219 - RNA, 19 nt, Artificial Sequence
  Description of Artificial Sequence: Synthetic oligonucleotide
  Sense Strand Starting at position 1077 of SEQ ID NO: 316332
gguuacgauucugcaagga

SEQ ID NO: 403220 - RNA, 19 nt, Artificial Sequence
  Description of Artificial Sequence: Synthetic oligonucleotide
  Antisense Strand to SEQ ID NO: 403219
uccuugcagaaucguaacc

SEQ ID NO: 403221 - RNA, 19 nt, Artificial Sequence
  Description of Artificial Sequence: Synthetic oligonucleotide
  Sense Strand Starting at position 1077 of SEQ ID NO: 316336
acgauucugcaaggagaau

SEQ ID NO: 403222 - RNA, 19 nt, Artificial Sequence
  Description of Artificial Sequence: Synthetic oligonucleotide
  Antisense Strand to SEQ ID NO: 403221
auucuccuugcagaaucgu

SEQ ID NO: 403223 - RNA, 19 nt, Artificial Sequence
  Description of Artificial Sequence: Synthetic oligonucleotide
  Sense Strand Starting at position 1077 of SEQ ID NO: 316586
ugggaagucacggagaugu

SEQ ID NO: 403224 - RNA, 19 nt, Artificial Sequence
  Description of Artificial Sequence: Synthetic oligonucleotide
  Antisense Strand to SEQ ID NO: 403223
acaucuccgugacuuccca

SEQ ID NO: 403225 - RNA, 19 nt, Artificial Sequence
  Description of Artificial Sequence: Synthetic oligonucleotide
  Sense Strand Starting at position 1077 of SEQ ID NO: 316588
ggaagucacggagauguca

SEQ ID NO: 403226 - RNA, 19 nt, Artificial Sequence
  Description of Artificial Sequence: Synthetic oligonucleotide
  Antisense Strand to SEQ ID NO: 403225
ugacaucuccgugacuucc

SEQ ID NO: 403227 - RNA, 19 nt, Artificial Sequence
  Description of Artificial Sequence: Synthetic oligonucleotide
  Sense Strand Starting at position 1077 of SEQ ID NO: 317515
gcuguaagaccuugggaaa

SEQ ID NO: 403228 - RNA, 19 nt, Artificial Sequence
  Description of Artificial Sequence: Synthetic oligonucleotide
  Antisense Strand to SEQ ID NO: 403227
uuucccaaggucuuacagc

SEQ ID NO: 403229 - RNA, 19 nt, Artificial Sequence
  Description of Artificial Sequence: Synthetic oligonucleotide
  Sense Strand Starting at position 1077 of SEQ ID NO: 317567
cggauaaugcgagaaccua

SEQ ID NO: 403230 - RNA, 19 nt, Artificial Sequence
  Description of Artificial Sequence: Synthetic oligonucleotide
  Antisense Strand to SEQ ID NO: 403229
uagguucucgcauuauccg

SEQ ID NO: 403231 - RNA, 19 nt, Artificial Sequence
  Description of Artificial Sequence: Synthetic oligonucleotide
  Sense Strand Starting at position 1077 of SEQ ID NO: 317591
auagaaaugcugugagggu

SEQ ID NO: 403232 - RNA, 19 nt, Artificial Sequence
  Description of Artificial Sequence: Synthetic oligonucleotide
  Antisense Strand to SEQ ID NO: 403231
acccucacagcauuucuau

SEQ ID NO: 403233 - RNA, 19 nt, Artificial Sequence
  Description of Artificial Sequence: Synthetic oligonucleotide
  Sense Strand Starting at position 1077 of SEQ ID NO: 317612
caugaaauugugcauguag

SEQ ID NO: 403234 - RNA, 19 nt, Artificial Sequence
  Description of Artificial Sequence: Synthetic oligonucleotide
  Antisense Strand to SEQ ID NO: 403233
cuacaugcacaauuucaug

SEQ ID NO: 403235 - RNA, 19 nt, Artificial Sequence
  Description of Artificial Sequence: Synthetic oligonucleotide
  Sense Strand Starting at position 1077 of SEQ ID NO: 317614
ugaaauugugcauguagaa

SEQ ID NO: 403236 - RNA, 19 nt, Artificial Sequence
  Description of Artificial Sequence: Synthetic oligonucleotide
  Antisense Strand to SEQ ID NO: 403235
uucuacaugcacaauuuca

SEQ ID NO: 403237 - RNA, 19 nt, Artificial Sequence
  Description of Artificial Sequence: Synthetic oligonucleotide
  Sense Strand Starting at position 1077 of SEQ ID NO: 317663
gcuugaugugcugaaguag

SEQ ID NO: 403238 - RNA, 19 nt, Artificial Sequence
  Description of Artificial Sequence: Synthetic oligonucleotide
  Antisense Strand to SEQ ID NO: 403237
cuacuucagcacaucaagc

SEQ ID NO: 403239 - RNA, 19 nt, Artificial Sequence
  Description of Artificial Sequence: Synthetic oligonucleotide
  Sense Strand Starting at position 1077 of SEQ ID NO: 317886
cgcugcaaacucuaaagaa

SEQ ID NO: 403240 - RNA, 19 nt, Artificial Sequence
  Description of Artificial Sequence: Synthetic oligonucleotide
  Antisense Strand to SEQ ID NO: 403239
uucuuuagaguuugcagcg

SEQ ID NO: 403241 - RNA, 19 nt, Artificial Sequence
  Description of Artificial Sequence: Synthetic oligonucleotide
  Sense Strand Starting at position 1077 of SEQ ID NO: 317906
acggcucagagagguuaau

SEQ ID NO: 403242 - RNA, 19 nt, Artificial Sequence
  Description of Artificial Sequence: Synthetic oligonucleotide
  Antisense Strand to SEQ ID NO: 403241
auuaaccucucugagccgu

SEQ ID NO: 403243 - RNA, 19 nt, Artificial Sequence
  Description of Artificial Sequence: Synthetic oligonucleotide
  Sense Strand Starting at position 1077 of SEQ ID NO: 317912
cagagagguuaaucaguac

SEQ ID NO: 403244 - RNA, 19 nt, Artificial Sequence
  Description of Artificial Sequence: Synthetic oligonucleotide
  Antisense Strand to SEQ ID NO: 403243
guacugauuaaccucucug

SEQ ID NO: 403245 - RNA, 19 nt, Artificial Sequence
  Description of Artificial Sequence: Synthetic oligonucleotide
  Sense Strand Starting at position 1077 of SEQ ID NO: 317916
gagguuaaucaguacguuu

SEQ ID NO: 403246 - RNA, 19 nt, Artificial Sequence
  Description of Artificial Sequence: Synthetic oligonucleotide
  Antisense Strand to SEQ ID NO: 403245
aaacguacugauuaaccuc

SEQ ID NO: 403247 - RNA, 19 nt, Artificial Sequence
  Description of Artificial Sequence: Synthetic oligonucleotide
  Sense Strand Starting at position 1077 of SEQ ID NO: 317966
cagaacguuugacucuuaa

SEQ ID NO: 403248 - RNA, 19 nt, Artificial Sequence
  Description of Artificial Sequence: Synthetic oligonucleotide
  Antisense Strand to SEQ ID NO: 403247
uuaagagucaaacguucug

SEQ ID NO: 403249 - RNA, 19 nt, Artificial Sequence
  Description of Artificial Sequence: Synthetic oligonucleotide
  Sense Strand Starting at position 1077 of SEQ ID NO: 318098
acuugucuuccuuguauuu

SEQ ID NO: 403250 - RNA, 19 nt, Artificial Sequence
  Description of Artificial Sequence: Synthetic oligonucleotide
  Antisense Strand to SEQ ID NO: 403249
aaauacaaggaagacaagu

SEQ ID NO: 403251 - RNA, 19 nt, Artificial Sequence
  Description of Artificial Sequence: Synthetic oligonucleotide
  Sense Strand Starting at position 1077 of SEQ ID NO: 318253
gguauuuauuccgugguuu

SEQ ID NO: 403252 - RNA, 19 nt, Artificial Sequence
  Description of Artificial Sequence: Synthetic oligonucleotide
  Antisense Strand to SEQ ID NO: 403251
aaaccacggaauaaauacc

SEQ ID NO: 403253 - RNA, 19 nt, Artificial Sequence
  Description of Artificial Sequence: Synthetic oligonucleotide
  Sense Strand Starting at position 1077 of SEQ ID NO: 318298
aguacucuccuaggacagu

SEQ ID NO: 403254 - RNA, 19 nt, Artificial Sequence
  Description of Artificial Sequence: Synthetic oligonucleotide
  Antisense Strand to SEQ ID NO: 403253
acuguccuaggagaguacu

SEQ ID NO: 403255 - RNA, 19 nt, Artificial Sequence
  Description of Artificial Sequence: Synthetic oligonucleotide
  Sense Strand Starting at position 1077 of SEQ ID NO: 318429
ggcuaacauuaacugaaua

SEQ ID NO: 403256 - RNA, 19 nt, Artificial Sequence
  Description of Artificial Sequence: Synthetic oligonucleotide
  Antisense Strand to SEQ ID NO: 403255
uauucaguuaauguuagcc

SEQ ID NO: 403257 - RNA, 19 nt, Artificial Sequence
  Description of Artificial Sequence: Synthetic oligonucleotide
  Sense Strand Starting at position 1077 of SEQ ID NO: 318469
agcaaacccuuuguaauga

SEQ ID NO: 403258 - RNA, 19 nt, Artificial Sequence
  Description of Artificial Sequence: Synthetic oligonucleotide
  Antisense Strand to SEQ ID NO: 403257
ucauuacaaaggguuugcu

SEQ ID NO: 403259 - RNA, 19 nt, Artificial Sequence
  Description of Artificial Sequence: Synthetic oligonucleotide
  Sense Strand Starting at position 1077 of SEQ ID NO: 318500
uccugaccgcucuaugaag

SEQ ID NO: 403260 - RNA, 19 nt, Artificial Sequence
  Description of Artificial Sequence: Synthetic oligonucleotide
  Antisense Strand to SEQ ID NO: 403259
cuucauagagcggucagga

SEQ ID NO: 403261 - RNA, 19 nt, Artificial Sequence
  Description of Artificial Sequence: Synthetic oligonucleotide
  Sense Strand Starting at position 1077 of SEQ ID NO: 318514
ugaaguaggcauuauauau

SEQ ID NO: 403262 - RNA, 19 nt, Artificial Sequence
  Description of Artificial Sequence: Synthetic oligonucleotide
  Antisense Strand to SEQ ID NO: 403261
auauauaaugccuacuuca

SEQ ID NO: 403263 - RNA, 19 nt, Artificial Sequence
  Description of Artificial Sequence: Synthetic oligonucleotide
  Sense Strand Starting at position 1077 of SEQ ID NO: 318549
ggaucucacagcuaguaag

SEQ ID NO: 403264 - RNA, 19 nt, Artificial Sequence
  Description of Artificial Sequence: Synthetic oligonucleotide
  Antisense Strand to SEQ ID NO: 403263
cuuacuagcugugagaucc

SEQ ID NO: 403265 - RNA, 19 nt, Artificial Sequence
  Description of Artificial Sequence: Synthetic oligonucleotide
  Sense Strand Starting at position 1077 of SEQ ID NO: 318580
aauugaaacccaggugagu

SEQ ID NO: 403266 - RNA, 19 nt, Artificial Sequence
  Description of Artificial Sequence: Synthetic oligonucleotide
  Antisense Strand to SEQ ID NO: 403265
acucaccuggguuucaauu

SEQ ID NO: 403267 - RNA, 19 nt, Artificial Sequence
  Description of Artificial Sequence: Synthetic oligonucleotide
  Sense Strand Starting at position 1077 of SEQ ID NO: 318591
aggugagucugauuccuag

SEQ ID NO: 403268 - RNA, 19 nt, Artificial Sequence
  Description of Artificial Sequence: Synthetic oligonucleotide
  Antisense Strand to SEQ ID NO: 403267
cuaggaaucagacucaccu

SEQ ID NO: 403269 - RNA, 19 nt, Artificial Sequence
  Description of Artificial Sequence: Synthetic oligonucleotide
  Sense Strand Starting at position 1077 of SEQ ID NO: 318635
uugacucccucuguuauua

SEQ ID NO: 403270 - RNA, 19 nt, Artificial Sequence
  Description of Artificial Sequence: Synthetic oligonucleotide
  Antisense Strand to SEQ ID NO: 403269
uaauaacagagggagucaa

SEQ ID NO: 403271 - RNA, 19 nt, Artificial Sequence
  Description of Artificial Sequence: Synthetic oligonucleotide
  Sense Strand Starting at position 1077 of SEQ ID NO: 318788
uugagauaggccugugacu

SEQ ID NO: 403272 - RNA, 19 nt, Artificial Sequence
  Description of Artificial Sequence: Synthetic oligonucleotide
  Antisense Strand to SEQ ID NO: 403271
agucacaggccuaucucaa

SEQ ID NO: 403273 - RNA, 19 nt, Artificial Sequence
  Description of Artificial Sequence: Synthetic oligonucleotide
  Sense Strand Starting at position 1077 of SEQ ID NO: 318790
gagauaggccugugacuaa

SEQ ID NO: 403274 - RNA, 19 nt, Artificial Sequence
  Description of Artificial Sequence: Synthetic oligonucleotide
  Antisense Strand to SEQ ID NO: 403273
uuagucacaggccuaucuc

SEQ ID NO: 403275 - RNA, 19 nt, Artificial Sequence
  Description of Artificial Sequence: Synthetic oligonucleotide
  Sense Strand Starting at position 1077 of SEQ ID NO: 318794
uaggccugugacuaaacua

SEQ ID NO: 403276 - RNA, 19 nt, Artificial Sequence
  Description of Artificial Sequence: Synthetic oligonucleotide
  Antisense Strand to SEQ ID NO: 403275
uaguuuagucacaggccua

SEQ ID NO: 403277 - RNA, 19 nt, Artificial Sequence
  Description of Artificial Sequence: Synthetic oligonucleotide
  Sense Strand Starting at position 1077 of SEQ ID NO: 318832
caaagaaucuuggccggga

SEQ ID NO: 403278 - RNA, 19 nt, Artificial Sequence
  Description of Artificial Sequence: Synthetic oligonucleotide
  Antisense Strand to SEQ ID NO: 403277
ucccggccaagauucuuug

SEQ ID NO: 403279 - RNA, 19 nt, Artificial Sequence
  Description of Artificial Sequence: Synthetic oligonucleotide
  Sense Strand Starting at position 1077 of SEQ ID NO: 319165
accucauuccuguagguca

SEQ ID NO: 403280 - RNA, 19 nt, Artificial Sequence
  Description of Artificial Sequence: Synthetic oligonucleotide
  Antisense Strand to SEQ ID NO: 403279
ugaccuacaggaaugaggu

SEQ ID NO: 403281 - RNA, 19 nt, Artificial Sequence
  Description of Artificial Sequence: Synthetic oligonucleotide
  Sense Strand Starting at position 1077 of SEQ ID NO: 319179
ggucacaagcauuaauauu

SEQ ID NO: 403282 - RNA, 19 nt, Artificial Sequence
  Description of Artificial Sequence: Synthetic oligonucleotide
  Antisense Strand to SEQ ID NO: 403281
aauauuaaugcuugugacc

SEQ ID NO: 403283 - RNA, 19 nt, Artificial Sequence
  Description of Artificial Sequence: Synthetic oligonucleotide
  Sense Strand Starting at position 1078 of SEQ ID NO: 315468
ugagguagcauauggaaga

SEQ ID NO: 403284 - RNA, 19 nt, Artificial Sequence
  Description of Artificial Sequence: Synthetic oligonucleotide
  Antisense Strand to SEQ ID NO: 403283
ucuuccauaugcuaccuca

SEQ ID NO: 403285 - RNA, 19 nt, Artificial Sequence
  Description of Artificial Sequence: Synthetic oligonucleotide
  Sense Strand Starting at position 1078 of SEQ ID NO: 315587
ucaaguuuccauggauuau

SEQ ID NO: 403286 - RNA, 19 nt, Artificial Sequence
  Description of Artificial Sequence: Synthetic oligonucleotide
  Antisense Strand to SEQ ID NO: 403285
auaauccauggaaacuuga

SEQ ID NO: 403287 - RNA, 19 nt, Artificial Sequence
  Description of Artificial Sequence: Synthetic oligonucleotide
  Sense Strand Starting at position 1078 of SEQ ID NO: 315593
uuccauggauuaucuguau

SEQ ID NO: 403288 - RNA, 19 nt, Artificial Sequence
  Description of Artificial Sequence: Synthetic oligonucleotide
  Antisense Strand to SEQ ID NO: 403287
auacagauaauccauggaa

SEQ ID NO: 403289 - RNA, 19 nt, Artificial Sequence
  Description of Artificial Sequence: Synthetic oligonucleotide
  Sense Strand Starting at position 1078 of SEQ ID NO: 315597
auggauuaucuguauucua

SEQ ID NO: 403290 - RNA, 19 nt, Artificial Sequence
  Description of Artificial Sequence: Synthetic oligonucleotide
  Antisense Strand to SEQ ID NO: 403289
uagaauacagauaauccau

SEQ ID NO: 403291 - RNA, 19 nt, Artificial Sequence
  Description of Artificial Sequence: Synthetic oligonucleotide
  Sense Strand Starting at position 1078 of SEQ ID NO: 315976
uccacucuucuaggugaau

SEQ ID NO: 403292 - RNA, 19 nt, Artificial Sequence
  Description of Artificial Sequence: Synthetic oligonucleotide
  Antisense Strand to SEQ ID NO: 403291
auucaccuagaagagugga

SEQ ID NO: 403293 - RNA, 19 nt, Artificial Sequence
  Description of Artificial Sequence: Synthetic oligonucleotide
  Sense Strand Starting at position 1078 of SEQ ID NO: 315977
ccacucuucuaggugaauu

SEQ ID NO: 403294 - RNA, 19 nt, Artificial Sequence
  Description of Artificial Sequence: Synthetic oligonucleotide
  Antisense Strand to SEQ ID NO: 403293
aauucaccuagaagagugg

SEQ ID NO: 403295 - RNA, 19 nt, Artificial Sequence
  Description of Artificial Sequence: Synthetic oligonucleotide
  Sense Strand Starting at position 1078 of SEQ ID NO: 315985
cuaggugaauucuaaauuu

SEQ ID NO: 403296 - RNA, 19 nt, Artificial Sequence
  Description of Artificial Sequence: Synthetic oligonucleotide
  Antisense Strand to SEQ ID NO: 403295
aaauuuagaauucaccuag

SEQ ID NO: 403297 - RNA, 19 nt, Artificial Sequence
  Description of Artificial Sequence: Synthetic oligonucleotide
  Sense Strand Starting at position 1078 of SEQ ID NO: 316022
uggugaguuccuuaccacu

SEQ ID NO: 403298 - RNA, 19 nt, Artificial Sequence
  Description of Artificial Sequence: Synthetic oligonucleotide
  Antisense Strand to SEQ ID NO: 403297
agugguaaggaacucacca

SEQ ID NO: 403299 - RNA, 19 nt, Artificial Sequence
  Description of Artificial Sequence: Synthetic oligonucleotide
  Sense Strand Starting at position 1078 of SEQ ID NO: 316124
ccucaauuagaucguuaca

SEQ ID NO: 403300 - RNA, 19 nt, Artificial Sequence
  Description of Artificial Sequence: Synthetic oligonucleotide
  Antisense Strand to SEQ ID NO: 403299
uguaacgaucuaauugagg

SEQ ID NO: 403301 - RNA, 19 nt, Artificial Sequence
  Description of Artificial Sequence: Synthetic oligonucleotide
  Sense Strand Starting at position 1078 of SEQ ID NO: 316126
ucaauuagaucguuacauu

SEQ ID NO: 403302 - RNA, 19 nt, Artificial Sequence
  Description of Artificial Sequence: Synthetic oligonucleotide
  Antisense Strand to SEQ ID NO: 403301
aauguaacgaucuaauuga

SEQ ID NO: 403303 - RNA, 19 nt, Artificial Sequence
  Description of Artificial Sequence: Synthetic oligonucleotide
  Sense Strand Starting at position 1078 of SEQ ID NO: 316376
aguugcgugauguuauguu

SEQ ID NO: 403304 - RNA, 19 nt, Artificial Sequence
  Description of Artificial Sequence: Synthetic oligonucleotide
  Antisense Strand to SEQ ID NO: 403303
aacauaacaucacgcaacu

SEQ ID NO: 403305 - RNA, 19 nt, Artificial Sequence
  Description of Artificial Sequence: Synthetic oligonucleotide
  Sense Strand Starting at position 1078 of SEQ ID NO: 316465
cuuugcuaccaagaaguca

SEQ ID NO: 403306 - RNA, 19 nt, Artificial Sequence
  Description of Artificial Sequence: Synthetic oligonucleotide
  Antisense Strand to SEQ ID NO: 403305
ugacuucuugguagcaaag

SEQ ID NO: 403307 - RNA, 19 nt, Artificial Sequence
  Description of Artificial Sequence: Synthetic oligonucleotide
  Sense Strand Starting at position 1078 of SEQ ID NO: 317008
uguuuaauacaagguacua

SEQ ID NO: 403308 - RNA, 19 nt, Artificial Sequence
  Description of Artificial Sequence: Synthetic oligonucleotide
  Antisense Strand to SEQ ID NO: 403307
uaguaccuuguauuaaaca

SEQ ID NO: 403309 - RNA, 19 nt, Artificial Sequence
  Description of Artificial Sequence: Synthetic oligonucleotide
  Sense Strand Starting at position 1078 of SEQ ID NO: 317069
uagccuagugcagauagau

SEQ ID NO: 403310 - RNA, 19 nt, Artificial Sequence
  Description of Artificial Sequence: Synthetic oligonucleotide
  Antisense Strand to SEQ ID NO: 403309
aucuaucugcacuaggcua

SEQ ID NO: 403311 - RNA, 19 nt, Artificial Sequence
  Description of Artificial Sequence: Synthetic oligonucleotide
  Sense Strand Starting at position 1078 of SEQ ID NO: 317075
agugcagauagaugggaau

SEQ ID NO: 403312 - RNA, 19 nt, Artificial Sequence
  Description of Artificial Sequence: Synthetic oligonucleotide
  Antisense Strand to SEQ ID NO: 403311
auucccaucuaucugcacu

SEQ ID NO: 403313 - RNA, 19 nt, Artificial Sequence
  Description of Artificial Sequence: Synthetic oligonucleotide
  Sense Strand Starting at position 1078 of SEQ ID NO: 317213
cuuggauaaggcugccaaa

SEQ ID NO: 403314 - RNA, 19 nt, Artificial Sequence
  Description of Artificial Sequence: Synthetic oligonucleotide
  Antisense Strand to SEQ ID NO: 403313
uuuggcagccuuauccaag

SEQ ID NO: 403315 - RNA, 19 nt, Artificial Sequence
  Description of Artificial Sequence: Synthetic oligonucleotide
  Sense Strand Starting at position 1078 of SEQ ID NO: 317241
aaggaaagcugcuuaggua

SEQ ID NO: 403316 - RNA, 19 nt, Artificial Sequence
  Description of Artificial Sequence: Synthetic oligonucleotide
  Antisense Strand to SEQ ID NO: 403315
uaccuaagcagcuuuccuu

SEQ ID NO: 403317 - RNA, 19 nt, Artificial Sequence
  Description of Artificial Sequence: Synthetic oligonucleotide
  Sense Strand Starting at position 1078 of SEQ ID NO: 317242
aggaaagcugcuuagguau

SEQ ID NO: 403318 - RNA, 19 nt, Artificial Sequence
  Description of Artificial Sequence: Synthetic oligonucleotide
  Antisense Strand to SEQ ID NO: 403317
auaccuaagcagcuuuccu

SEQ ID NO: 403319 - RNA, 19 nt, Artificial Sequence
  Description of Artificial Sequence: Synthetic oligonucleotide
  Sense Strand Starting at position 1078 of SEQ ID NO: 317301
ccuaucaguguuuaauaau

SEQ ID NO: 403320 - RNA, 19 nt, Artificial Sequence
  Description of Artificial Sequence: Synthetic oligonucleotide
  Antisense Strand to SEQ ID NO: 403319
auuauuaaacacugauagg

SEQ ID NO: 403321 - RNA, 19 nt, Artificial Sequence
  Description of Artificial Sequence: Synthetic oligonucleotide
  Sense Strand Starting at position 1078 of SEQ ID NO: 317346
agccuuaacccugaaagua

SEQ ID NO: 403322 - RNA, 19 nt, Artificial Sequence
  Description of Artificial Sequence: Synthetic oligonucleotide
  Antisense Strand to SEQ ID NO: 403321
uacuuucaggguuaaggcu

SEQ ID NO: 403323 - RNA, 19 nt, Artificial Sequence
  Description of Artificial Sequence: Synthetic oligonucleotide
  Sense Strand Starting at position 1078 of SEQ ID NO: 317354
cccugaaaguaguuuacau

SEQ ID NO: 403324 - RNA, 19 nt, Artificial Sequence
  Description of Artificial Sequence: Synthetic oligonucleotide
  Antisense Strand to SEQ ID NO: 403323
auguaaacuacuuucaggg

SEQ ID NO: 403325 - RNA, 19 nt, Artificial Sequence
  Description of Artificial Sequence: Synthetic oligonucleotide
  Sense Strand Starting at position 1078 of SEQ ID NO: 317373
aaauguuucucucugggaa

SEQ ID NO: 403326 - RNA, 19 nt, Artificial Sequence
  Description of Artificial Sequence: Synthetic oligonucleotide
  Antisense Strand to SEQ ID NO: 403325
uucccagagagaaacauuu

SEQ ID NO: 403327 - RNA, 19 nt, Artificial Sequence
  Description of Artificial Sequence: Synthetic oligonucleotide
  Sense Strand Starting at position 1078 of SEQ ID NO: 317374
aauguuucucucugggaau

SEQ ID NO: 403328 - RNA, 19 nt, Artificial Sequence
  Description of Artificial Sequence: Synthetic oligonucleotide
  Antisense Strand to SEQ ID NO: 403327
auucccagagagaaacauu

SEQ ID NO: 403329 - RNA, 19 nt, Artificial Sequence
  Description of Artificial Sequence: Synthetic oligonucleotide
  Sense Strand Starting at position 1078 of SEQ ID NO: 317385
cugggaaucuaaguuaauu

SEQ ID NO: 403330 - RNA, 19 nt, Artificial Sequence
  Description of Artificial Sequence: Synthetic oligonucleotide
  Antisense Strand to SEQ ID NO: 403329
aauuaacuuagauucccag

SEQ ID NO: 403331 - RNA, 19 nt, Artificial Sequence
  Description of Artificial Sequence: Synthetic oligonucleotide
  Sense Strand Starting at position 1078 of SEQ ID NO: 317413
acugucagauacucuuuga

SEQ ID NO: 403332 - RNA, 19 nt, Artificial Sequence
  Description of Artificial Sequence: Synthetic oligonucleotide
  Antisense Strand to SEQ ID NO: 403331
ucaaagaguaucugacagu

SEQ ID NO: 403333 - RNA, 19 nt, Artificial Sequence
  Description of Artificial Sequence: Synthetic oligonucleotide
  Sense Strand Starting at position 1078 of SEQ ID NO: 317547
uguccauugugugcaauuu

SEQ ID NO: 403334 - RNA, 19 nt, Artificial Sequence
  Description of Artificial Sequence: Synthetic oligonucleotide
  Antisense Strand to SEQ ID NO: 403333
aaauugcacacaauggaca

SEQ ID NO: 403335 - RNA, 19 nt, Artificial Sequence
  Description of Artificial Sequence: Synthetic oligonucleotide
  Sense Strand Starting at position 1078 of SEQ ID NO: 317548
guccauugugugcaauuua

SEQ ID NO: 403336 - RNA, 19 nt, Artificial Sequence
  Description of Artificial Sequence: Synthetic oligonucleotide
  Antisense Strand to SEQ ID NO: 403335
uaaauugcacacaauggac

SEQ ID NO: 403337 - RNA, 19 nt, Artificial Sequence
  Description of Artificial Sequence: Synthetic oligonucleotide
  Sense Strand Starting at position 1078 of SEQ ID NO: 317563
uuuagauccucacuggaga

SEQ ID NO: 403338 - RNA, 19 nt, Artificial Sequence
  Description of Artificial Sequence: Synthetic oligonucleotide
  Antisense Strand to SEQ ID NO: 403337
ucuccagugaggaucuaaa

SEQ ID NO: 403339 - RNA, 19 nt, Artificial Sequence
  Description of Artificial Sequence: Synthetic oligonucleotide
  Sense Strand Starting at position 1078 of SEQ ID NO: 317717
gugaccaaauccuuaagua

SEQ ID NO: 403340 - RNA, 19 nt, Artificial Sequence
  Description of Artificial Sequence: Synthetic oligonucleotide
  Antisense Strand to SEQ ID NO: 403339
uacuuaaggauuuggucac

SEQ ID NO: 403341 - RNA, 19 nt, Artificial Sequence
  Description of Artificial Sequence: Synthetic oligonucleotide
  Sense Strand Starting at position 1078 of SEQ ID NO: 317753
gugcccagaucaguaauuu

SEQ ID NO: 403342 - RNA, 19 nt, Artificial Sequence
  Description of Artificial Sequence: Synthetic oligonucleotide
  Antisense Strand to SEQ ID NO: 403341
aaauuacugaucugggcac

SEQ ID NO: 403343 - RNA, 19 nt, Artificial Sequence
  Description of Artificial Sequence: Synthetic oligonucleotide
  Sense Strand Starting at position 1078 of SEQ ID NO: 317887
acacuacugguuuaagcua

SEQ ID NO: 403344 - RNA, 19 nt, Artificial Sequence
  Description of Artificial Sequence: Synthetic oligonucleotide
  Antisense Strand to SEQ ID NO: 403343
uagcuuaaaccaguagugu

SEQ ID NO: 403345 - RNA, 19 nt, Artificial Sequence
  Description of Artificial Sequence: Synthetic oligonucleotide
  Sense Strand Starting at position 1078 of SEQ ID NO: 317920
agcaauggauuugauauaa

SEQ ID NO: 403346 - RNA, 19 nt, Artificial Sequence
  Description of Artificial Sequence: Synthetic oligonucleotide
  Antisense Strand to SEQ ID NO: 403345
uuauaucaaauccauugcu

SEQ ID NO: 403347 - RNA, 19 nt, Artificial Sequence
  Description of Artificial Sequence: Synthetic oligonucleotide
  Sense Strand Starting at position 1078 of SEQ ID NO: 317961
cuguacuaugcuuaccuga

SEQ ID NO: 403348 - RNA, 19 nt, Artificial Sequence
  Description of Artificial Sequence: Synthetic oligonucleotide
  Antisense Strand to SEQ ID NO: 403347
ucagguaagcauaguacag

SEQ ID NO: 403349 - RNA, 19 nt, Artificial Sequence
  Description of Artificial Sequence: Synthetic oligonucleotide
  Sense Strand Starting at position 1078 of SEQ ID NO: 317966
cuaugcuuaccugagaaau

SEQ ID NO: 403350 - RNA, 19 nt, Artificial Sequence
  Description of Artificial Sequence: Synthetic oligonucleotide
  Antisense Strand to SEQ ID NO: 403349
auuucucagguaagcauag

SEQ ID NO: 403351 - RNA, 19 nt, Artificial Sequence
  Description of Artificial Sequence: Synthetic oligonucleotide
  Sense Strand Starting at position 1078 of SEQ ID NO: 318093
gcauaccaucuggauacua

SEQ ID NO: 403352 - RNA, 19 nt, Artificial Sequence
  Description of Artificial Sequence: Synthetic oligonucleotide
  Antisense Strand to SEQ ID NO: 403351
uaguauccagaugguaugc

SEQ ID NO: 403353 - RNA, 19 nt, Artificial Sequence
  Description of Artificial Sequence: Synthetic oligonucleotide
  Sense Strand Starting at position 1078 of SEQ ID NO: 318301
aucaguccagaaugaucua

SEQ ID NO: 403354 - RNA, 19 nt, Artificial Sequence
  Description of Artificial Sequence: Synthetic oligonucleotide
  Antisense Strand to SEQ ID NO: 403353
uagaucauucuggacugau

SEQ ID NO: 403355 - RNA, 19 nt, Artificial Sequence
  Description of Artificial Sequence: Synthetic oligonucleotide
  Sense Strand Starting at position 1078 of SEQ ID NO: 318551
guugauagauagcuagauu

SEQ ID NO: 403356 - RNA, 19 nt, Artificial Sequence
  Description of Artificial Sequence: Synthetic oligonucleotide
  Antisense Strand to SEQ ID NO: 403355
aaucuagcuaucuaucaac

SEQ ID NO: 403357 - RNA, 19 nt, Artificial Sequence
  Description of Artificial Sequence: Synthetic oligonucleotide
  Sense Strand Starting at position 1078 of SEQ ID NO: 318738
agacaagcugauuguaaau

SEQ ID NO: 403358 - RNA, 19 nt, Artificial Sequence
  Description of Artificial Sequence: Synthetic oligonucleotide
  Antisense Strand to SEQ ID NO: 403357
auuuacaaucagcuugucu

SEQ ID NO: 403359 - RNA, 19 nt, Artificial Sequence
  Description of Artificial Sequence: Synthetic oligonucleotide
  Sense Strand Starting at position 1078 of SEQ ID NO: 318772
guauaacagcuuuauugau

SEQ ID NO: 403360 - RNA, 19 nt, Artificial Sequence
  Description of Artificial Sequence: Synthetic oligonucleotide
  Antisense Strand to SEQ ID NO: 403359
aucaauaaagcuguuauac

SEQ ID NO: 403361 - RNA, 19 nt, Artificial Sequence
  Description of Artificial Sequence: Synthetic oligonucleotide
  Sense Strand Starting at position 1078 of SEQ ID NO: 318850
gcaaacuacucagcaauga

SEQ ID NO: 403362 - RNA, 19 nt, Artificial Sequence
  Description of Artificial Sequence: Synthetic oligonucleotide
  Antisense Strand to SEQ ID NO: 403361
ucauugcugaguaguuugc

SEQ ID NO: 403363 - RNA, 19 nt, Artificial Sequence
  Description of Artificial Sequence: Synthetic oligonucleotide
  Sense Strand Starting at position 1079 of SEQ ID NO: 315330
cugcgaggguguauguaua

SEQ ID NO: 403364 - RNA, 19 nt, Artificial Sequence
  Description of Artificial Sequence: Synthetic oligonucleotide
  Antisense Strand to SEQ ID NO: 403363
uauacauacacccucgcag

SEQ ID NO: 403365 - RNA, 19 nt, Artificial Sequence
  Description of Artificial Sequence: Synthetic oligonucleotide
  Sense Strand Starting at position 1079 of SEQ ID NO: 315397
gggagagaucuuggucuuu

SEQ ID NO: 403366 - RNA, 19 nt, Artificial Sequence
  Description of Artificial Sequence: Synthetic oligonucleotide
  Antisense Strand to SEQ ID NO: 403365
aaagaccaagaucucuccc

SEQ ID NO: 403367 - RNA, 19 nt, Artificial Sequence
  Description of Artificial Sequence: Synthetic oligonucleotide
  Sense Strand Starting at position 1079 of SEQ ID NO: 315750
ggugcaggacuccaauuau

SEQ ID NO: 403368 - RNA, 19 nt, Artificial Sequence
  Description of Artificial Sequence: Synthetic oligonucleotide
  Antisense Strand to SEQ ID NO: 403367
auaauuggaguccugcacc

SEQ ID NO: 403369 - RNA, 19 nt, Artificial Sequence
  Description of Artificial Sequence: Synthetic oligonucleotide
  Sense Strand Starting at position 1079 of SEQ ID NO: 315884
uaccgagaguacccgaaua

SEQ ID NO: 403370 - RNA, 19 nt, Artificial Sequence
  Description of Artificial Sequence: Synthetic oligonucleotide
  Antisense Strand to SEQ ID NO: 403369
uauucggguacucucggua

SEQ ID NO: 403371 - RNA, 19 nt, Artificial Sequence
  Description of Artificial Sequence: Synthetic oligonucleotide
  Sense Strand Starting at position 1079 of SEQ ID NO: 315886
ccgagaguacccgaauaca

SEQ ID NO: 403372 - RNA, 19 nt, Artificial Sequence
  Description of Artificial Sequence: Synthetic oligonucleotide
  Antisense Strand to SEQ ID NO: 403371
uguauucggguacucucgg

SEQ ID NO: 403373 - RNA, 19 nt, Artificial Sequence
  Description of Artificial Sequence: Synthetic oligonucleotide
  Sense Strand Starting at position 1079 of SEQ ID NO: 315946
uguucuaacgaucagcaaa

SEQ ID NO: 403374 - RNA, 19 nt, Artificial Sequence
  Description of Artificial Sequence: Synthetic oligonucleotide
  Antisense Strand to SEQ ID NO: 403373
uuugcugaucguuagaaca

SEQ ID NO: 403375 - RNA, 19 nt, Artificial Sequence
  Description of Artificial Sequence: Synthetic oligonucleotide
  Sense Strand Starting at position 1079 of SEQ ID NO: 315976
cuguuaauugucuauuaac

SEQ ID NO: 403376 - RNA, 19 nt, Artificial Sequence
  Description of Artificial Sequence: Synthetic oligonucleotide
  Antisense Strand to SEQ ID NO: 403375
guuaauagacaauuaacag

SEQ ID NO: 403377 - RNA, 19 nt, Artificial Sequence
  Description of Artificial Sequence: Synthetic oligonucleotide
  Sense Strand Starting at position 1079 of SEQ ID NO: 315995
aauuauuacucgguaaaug

SEQ ID NO: 403378 - RNA, 19 nt, Artificial Sequence
  Description of Artificial Sequence: Synthetic oligonucleotide
  Antisense Strand to SEQ ID NO: 403377
cauuuaccgaguaauaauu

SEQ ID NO: 403379 - RNA, 19 nt, Artificial Sequence
  Description of Artificial Sequence: Synthetic oligonucleotide
  Sense Strand Starting at position 1079 of SEQ ID NO: 315996
auuauuacucgguaaaugu

SEQ ID NO: 403380 - RNA, 19 nt, Artificial Sequence
  Description of Artificial Sequence: Synthetic oligonucleotide
  Antisense Strand to SEQ ID NO: 403379
acauuuaccgaguaauaau

SEQ ID NO: 403381 - RNA, 19 nt, Artificial Sequence
  Description of Artificial Sequence: Synthetic oligonucleotide
  Sense Strand Starting at position 1079 of SEQ ID NO: 317584
ggaggaagcuucguugaau

SEQ ID NO: 403382 - RNA, 19 nt, Artificial Sequence
  Description of Artificial Sequence: Synthetic oligonucleotide
  Antisense Strand to SEQ ID NO: 403381
auucaacgaagcuuccucc

SEQ ID NO: 403383 - RNA, 19 nt, Artificial Sequence
  Description of Artificial Sequence: Synthetic oligonucleotide
  Sense Strand Starting at position 1079 of SEQ ID NO: 317587
ggaagcuucguugaauuga

SEQ ID NO: 403384 - RNA, 19 nt, Artificial Sequence
  Description of Artificial Sequence: Synthetic oligonucleotide
  Antisense Strand to SEQ ID NO: 403383
ucaauucaacgaagcuucc

SEQ ID NO: 403385 - RNA, 19 nt, Artificial Sequence
  Description of Artificial Sequence: Synthetic oligonucleotide
  Sense Strand Starting at position 1079 of SEQ ID NO: 317658
cuaagaguucgagaucauc

SEQ ID NO: 403386 - RNA, 19 nt, Artificial Sequence
  Description of Artificial Sequence: Synthetic oligonucleotide
  Antisense Strand to SEQ ID NO: 403385
gaugaucucgaacucuuag

SEQ ID NO: 403387 - RNA, 19 nt, Artificial Sequence
  Description of Artificial Sequence: Synthetic oligonucleotide
  Sense Strand Starting at position 1079 of SEQ ID NO: 317771
ggccgaaguccgagucuuu

SEQ ID NO: 403388 - RNA, 19 nt, Artificial Sequence
  Description of Artificial Sequence: Synthetic oligonucleotide
  Antisense Strand to SEQ ID NO: 403387
aaagacucggacuucggcc

SEQ ID NO: 403389 - RNA, 19 nt, Artificial Sequence
  Description of Artificial Sequence: Synthetic oligonucleotide
  Sense Strand Starting at position 1079 of SEQ ID NO: 317946
ggguuaccuuagguagaaa

SEQ ID NO: 403390 - RNA, 19 nt, Artificial Sequence
  Description of Artificial Sequence: Synthetic oligonucleotide
  Antisense Strand to SEQ ID NO: 403389
uuucuaccuaagguaaccc

SEQ ID NO: 403391 - RNA, 19 nt, Artificial Sequence
  Description of Artificial Sequence: Synthetic oligonucleotide
  Sense Strand Starting at position 1079 of SEQ ID NO: 317954
uuagguagaaaucggaaau

SEQ ID NO: 403392 - RNA, 19 nt, Artificial Sequence
  Description of Artificial Sequence: Synthetic oligonucleotide
  Antisense Strand to SEQ ID NO: 403391
auuuccgauuucuaccuaa

SEQ ID NO: 403393 - RNA, 19 nt, Artificial Sequence
  Description of Artificial Sequence: Synthetic oligonucleotide
  Sense Strand Starting at position 1079 of SEQ ID NO: 317964
aucggaaauuuauaggaga

SEQ ID NO: 403394 - RNA, 19 nt, Artificial Sequence
  Description of Artificial Sequence: Synthetic oligonucleotide
  Antisense Strand to SEQ ID NO: 403393
ucuccuauaaauuuccgau

SEQ ID NO: 403395 - RNA, 19 nt, Artificial Sequence
  Description of Artificial Sequence: Synthetic oligonucleotide
  Sense Strand Starting at position 1079 of SEQ ID NO: 317999
aacuguuaggacugaguga

SEQ ID NO: 403396 - RNA, 19 nt, Artificial Sequence
  Description of Artificial Sequence: Synthetic oligonucleotide
  Antisense Strand to SEQ ID NO: 403395
ucacucaguccuaacaguu

SEQ ID NO: 403397 - RNA, 19 nt, Artificial Sequence
  Description of Artificial Sequence: Synthetic oligonucleotide
  Sense Strand Starting at position 1079 of SEQ ID NO: 318081
aggaguaaaugaguuuaau

SEQ ID NO: 403398 - RNA, 19 nt, Artificial Sequence
  Description of Artificial Sequence: Synthetic oligonucleotide
  Antisense Strand to SEQ ID NO: 403397
auuaaacucauuuacuccu

SEQ ID NO: 403399 - RNA, 19 nt, Artificial Sequence
  Description of Artificial Sequence: Synthetic oligonucleotide
  Sense Strand Starting at position 1079 of SEQ ID NO: 318293
gauggaauuugguauaaau

SEQ ID NO: 403400 - RNA, 19 nt, Artificial Sequence
  Description of Artificial Sequence: Synthetic oligonucleotide
  Antisense Strand to SEQ ID NO: 403399
auuuauaccaaauuccauc

SEQ ID NO: 403401 - RNA, 19 nt, Artificial Sequence
  Description of Artificial Sequence: Synthetic oligonucleotide
  Sense Strand Starting at position 1079 of SEQ ID NO: 318392
cucugagaaugguucucau

SEQ ID NO: 403402 - RNA, 19 nt, Artificial Sequence
  Description of Artificial Sequence: Synthetic oligonucleotide
  Antisense Strand to SEQ ID NO: 403401
augagaaccauucucagag

SEQ ID NO: 403403 - RNA, 19 nt, Artificial Sequence
  Description of Artificial Sequence: Synthetic oligonucleotide
  Sense Strand Starting at position 1079 of SEQ ID NO: 318395
ugagaaugguucucaugca

SEQ ID NO: 403404 - RNA, 19 nt, Artificial Sequence
  Description of Artificial Sequence: Synthetic oligonucleotide
  Antisense Strand to SEQ ID NO: 403403
ugcaugagaaccauucuca

SEQ ID NO: 403405 - RNA, 19 nt, Artificial Sequence
  Description of Artificial Sequence: Synthetic oligonucleotide
  Sense Strand Starting at position 1079 of SEQ ID NO: 318448
ccaagcacucgugggagaa

SEQ ID NO: 403406 - RNA, 19 nt, Artificial Sequence
  Description of Artificial Sequence: Synthetic oligonucleotide
  Antisense Strand to SEQ ID NO: 403405
uucucccacgagugcuugg

SEQ ID NO: 403407 - RNA, 19 nt, Artificial Sequence
  Description of Artificial Sequence: Synthetic oligonucleotide
  Sense Strand Starting at position 1079 of SEQ ID NO: 318497
gcauuauagcaggagcuaa

SEQ ID NO: 403408 - RNA, 19 nt, Artificial Sequence
  Description of Artificial Sequence: Synthetic oligonucleotide
  Antisense Strand to SEQ ID NO: 403407
uuagcuccugcuauaaugc

SEQ ID NO: 403409 - RNA, 19 nt, Artificial Sequence
  Description of Artificial Sequence: Synthetic oligonucleotide
  Sense Strand Starting at position 1079 of SEQ ID NO: 318541
cugggauugcauugggacu

SEQ ID NO: 403410 - RNA, 19 nt, Artificial Sequence
  Description of Artificial Sequence: Synthetic oligonucleotide
  Antisense Strand to SEQ ID NO: 403409
agucccaaugcaaucccag

SEQ ID NO: 403411 - RNA, 19 nt, Artificial Sequence
  Description of Artificial Sequence: Synthetic oligonucleotide
  Sense Strand Starting at position 1079 of SEQ ID NO: 318610
ccucaacuggcuuaauaag

SEQ ID NO: 403412 - RNA, 19 nt, Artificial Sequence
  Description of Artificial Sequence: Synthetic oligonucleotide
  Antisense Strand to SEQ ID NO: 403411
cuuauuaagccaguugagg

SEQ ID NO: 403413 - RNA, 19 nt, Artificial Sequence
  Description of Artificial Sequence: Synthetic oligonucleotide
  Sense Strand Starting at position 1079 of SEQ ID NO: 318616
cuggcuuaauaagacauuu

SEQ ID NO: 403414 - RNA, 19 nt, Artificial Sequence
  Description of Artificial Sequence: Synthetic oligonucleotide
  Antisense Strand to SEQ ID NO: 403413
aaaugucuuauuaagccag

SEQ ID NO: 403415 - RNA, 19 nt, Artificial Sequence
  Description of Artificial Sequence: Synthetic oligonucleotide
  Sense Strand Starting at position 1079 of SEQ ID NO: 318715
uuuggaagcucuuuaguaa

SEQ ID NO: 403416 - RNA, 19 nt, Artificial Sequence
  Description of Artificial Sequence: Synthetic oligonucleotide
  Antisense Strand to SEQ ID NO: 403415
uuacuaaagagcuuccaaa

SEQ ID NO: 403417 - RNA, 19 nt, Artificial Sequence
  Description of Artificial Sequence: Synthetic oligonucleotide
  Sense Strand Starting at position 1079 of SEQ ID NO: 318716
uuggaagcucuuuaguaac

SEQ ID NO: 403418 - RNA, 19 nt, Artificial Sequence
  Description of Artificial Sequence: Synthetic oligonucleotide
  Antisense Strand to SEQ ID NO: 403417
guuacuaaagagcuuccaa

SEQ ID NO: 403419 - RNA, 19 nt, Artificial Sequence
  Description of Artificial Sequence: Synthetic oligonucleotide
  Sense Strand Starting at position 1079 of SEQ ID NO: 318718
ggaagcucuuuaguaacau

SEQ ID NO: 403420 - RNA, 19 nt, Artificial Sequence
  Description of Artificial Sequence: Synthetic oligonucleotide
  Antisense Strand to SEQ ID NO: 403419
auguuacuaaagagcuucc

SEQ ID NO: 403421 - RNA, 19 nt, Artificial Sequence
  Description of Artificial Sequence: Synthetic oligonucleotide
  Sense Strand Starting at position 1079 of SEQ ID NO: 318803
cuguauguugggcauggau

SEQ ID NO: 403422 - RNA, 19 nt, Artificial Sequence
  Description of Artificial Sequence: Synthetic oligonucleotide
  Antisense Strand to SEQ ID NO: 403421
auccaugcccaacauacag

SEQ ID NO: 403423 - RNA, 19 nt, Artificial Sequence
  Description of Artificial Sequence: Synthetic oligonucleotide
  Sense Strand Starting at position 1079 of SEQ ID NO: 318836
aucauaacucucugugaug

SEQ ID NO: 403424 - RNA, 19 nt, Artificial Sequence
  Description of Artificial Sequence: Synthetic oligonucleotide
  Antisense Strand to SEQ ID NO: 403423
caucacagagaguuaugau

SEQ ID NO: 403425 - RNA, 19 nt, Artificial Sequence
  Description of Artificial Sequence: Synthetic oligonucleotide
  Sense Strand Starting at position 1079 of SEQ ID NO: 318837
ucauaacucucugugauga

SEQ ID NO: 403426 - RNA, 19 nt, Artificial Sequence
  Description of Artificial Sequence: Synthetic oligonucleotide
  Antisense Strand to SEQ ID NO: 403425
ucaucacagagaguuauga

SEQ ID NO: 403427 - RNA, 19 nt, Artificial Sequence
  Description of Artificial Sequence: Synthetic oligonucleotide
  Sense Strand Starting at position 1079 of SEQ ID NO: 318842
acucucugugaugaauacu

SEQ ID NO: 403428 - RNA, 19 nt, Artificial Sequence
  Description of Artificial Sequence: Synthetic oligonucleotide
  Antisense Strand to SEQ ID NO: 403427
aguauucaucacagagagu

SEQ ID NO: 403429 - RNA, 19 nt, Artificial Sequence
  Description of Artificial Sequence: Synthetic oligonucleotide
  Sense Strand Starting at position 1079 of SEQ ID NO: 318845
cucugugaugaauacuacu

SEQ ID NO: 403430 - RNA, 19 nt, Artificial Sequence
  Description of Artificial Sequence: Synthetic oligonucleotide
  Antisense Strand to SEQ ID NO: 403429
aguaguauucaucacagag

SEQ ID NO: 403431 - RNA, 19 nt, Artificial Sequence
  Description of Artificial Sequence: Synthetic oligonucleotide
  Sense Strand Starting at position 1079 of SEQ ID NO: 318899
uagguuacuuugcucaaga

SEQ ID NO: 403432 - RNA, 19 nt, Artificial Sequence
  Description of Artificial Sequence: Synthetic oligonucleotide
  Antisense Strand to SEQ ID NO: 403431
ucuugagcaaaguaaccua

SEQ ID NO: 403433 - RNA, 19 nt, Artificial Sequence
  Description of Artificial Sequence: Synthetic oligonucleotide
  Sense Strand Starting at position 1079 of SEQ ID NO: 318900
agguuacuuugcucaagau

SEQ ID NO: 403434 - RNA, 19 nt, Artificial Sequence
  Description of Artificial Sequence: Synthetic oligonucleotide
  Antisense Strand to SEQ ID NO: 403433
aucuugagcaaaguaaccu

SEQ ID NO: 403435 - RNA, 19 nt, Artificial Sequence
  Description of Artificial Sequence: Synthetic oligonucleotide
  Sense Strand Starting at position 1079 of SEQ ID NO: 318901
gguuacuuugcucaagauc

SEQ ID NO: 403436 - RNA, 19 nt, Artificial Sequence
  Description of Artificial Sequence: Synthetic oligonucleotide
  Antisense Strand to SEQ ID NO: 403435
gaucuugagcaaaguaacc

SEQ ID NO: 403437 - RNA, 19 nt, Artificial Sequence
  Description of Artificial Sequence: Synthetic oligonucleotide
  Sense Strand Starting at position 1079 of SEQ ID NO: 318990
ccugauuccuacuuacagu

SEQ ID NO: 403438 - RNA, 19 nt, Artificial Sequence
  Description of Artificial Sequence: Synthetic oligonucleotide
  Antisense Strand to SEQ ID NO: 403437
acuguaaguaggaaucagg

SEQ ID NO: 403439 - RNA, 19 nt, Artificial Sequence
  Description of Artificial Sequence: Synthetic oligonucleotide
  Sense Strand Starting at position 1079 of SEQ ID NO: 319087
gugggcaaacuuuacauaa

SEQ ID NO: 403440 - RNA, 19 nt, Artificial Sequence
  Description of Artificial Sequence: Synthetic oligonucleotide
  Antisense Strand to SEQ ID NO: 403439
uuauguaaaguuugcccac

SEQ ID NO: 403441 - RNA, 19 nt, Artificial Sequence
  Description of Artificial Sequence: Synthetic oligonucleotide
  Sense Strand Starting at position 1079 of SEQ ID NO: 319216
uuuacuguuauuggaggaa

SEQ ID NO: 403442 - RNA, 19 nt, Artificial Sequence
  Description of Artificial Sequence: Synthetic oligonucleotide
  Antisense Strand to SEQ ID NO: 403441
uuccuccaauaacaguaaa

SEQ ID NO: 403443 - RNA, 19 nt, Artificial Sequence
  Description of Artificial Sequence: Synthetic oligonucleotide
  Sense Strand Starting at position 1080 of SEQ ID NO: 315245
ggaagaugucuaggagcag

SEQ ID NO: 403444 - RNA, 19 nt, Artificial Sequence
  Description of Artificial Sequence: Synthetic oligonucleotide
  Antisense Strand to SEQ ID NO: 403443
cugcuccuagacaucuucc

SEQ ID NO: 403445 - RNA, 19 nt, Artificial Sequence
  Description of Artificial Sequence: Synthetic oligonucleotide
  Sense Strand Starting at position 1080 of SEQ ID NO: 315335
uccgaucuggagugagaau

SEQ ID NO: 403446 - RNA, 19 nt, Artificial Sequence
  Description of Artificial Sequence: Synthetic oligonucleotide
  Antisense Strand to SEQ ID NO: 403445
auucucacuccagaucgga

SEQ ID NO: 403447 - RNA, 19 nt, Artificial Sequence
  Description of Artificial Sequence: Synthetic oligonucleotide
  Sense Strand Starting at position 1080 of SEQ ID NO: 315350
gaaucagacggaggcauau

SEQ ID NO: 403448 - RNA, 19 nt, Artificial Sequence
  Description of Artificial Sequence: Synthetic oligonucleotide
  Antisense Strand to SEQ ID NO: 403447
auaugccuccgucugauuc

SEQ ID NO: 403449 - RNA, 19 nt, Artificial Sequence
  Description of Artificial Sequence: Synthetic oligonucleotide
  Sense Strand Starting at position 1080 of SEQ ID NO: 315373
guaucccaaucaucuaguu

SEQ ID NO: 403450 - RNA, 19 nt, Artificial Sequence
  Description of Artificial Sequence: Synthetic oligonucleotide
  Antisense Strand to SEQ ID NO: 403449
aacuagaugauugggauac

SEQ ID NO: 403451 - RNA, 19 nt, Artificial Sequence
  Description of Artificial Sequence: Synthetic oligonucleotide
  Sense Strand Starting at position 1080 of SEQ ID NO: 315378
ccaaucaucuaguucugga

SEQ ID NO: 403452 - RNA, 19 nt, Artificial Sequence
  Description of Artificial Sequence: Synthetic oligonucleotide
  Antisense Strand to SEQ ID NO: 403451
uccagaacuagaugauugg

SEQ ID NO: 403453 - RNA, 19 nt, Artificial Sequence
  Description of Artificial Sequence: Synthetic oligonucleotide
  Sense Strand Starting at position 1080 of SEQ ID NO: 315421
ugguauaguaagggauaca

SEQ ID NO: 403454 - RNA, 19 nt, Artificial Sequence
  Description of Artificial Sequence: Synthetic oligonucleotide
  Antisense Strand to SEQ ID NO: 403453
uguaucccuuacuauacca

SEQ ID NO: 403455 - RNA, 19 nt, Artificial Sequence
  Description of Artificial Sequence: Synthetic oligonucleotide
  Sense Strand Starting at position 1080 of SEQ ID NO: 315443
acacauuuauaugggaaga

SEQ ID NO: 403456 - RNA, 19 nt, Artificial Sequence
  Description of Artificial Sequence: Synthetic oligonucleotide
  Antisense Strand to SEQ ID NO: 403455
ucuucccauauaaaugugu

SEQ ID NO: 403457 - RNA, 19 nt, Artificial Sequence
  Description of Artificial Sequence: Synthetic oligonucleotide
  Sense Strand Starting at position 1080 of SEQ ID NO: 315620
cggaguauauaugucaaag

SEQ ID NO: 403458 - RNA, 19 nt, Artificial Sequence
  Description of Artificial Sequence: Synthetic oligonucleotide
  Antisense Strand to SEQ ID NO: 403457
cuuugacauauauacuccg

SEQ ID NO: 403459 - RNA, 19 nt, Artificial Sequence
  Description of Artificial Sequence: Synthetic oligonucleotide
  Sense Strand Starting at position 1080 of SEQ ID NO: 315743
cuggauugaucagcugaug

SEQ ID NO: 403460 - RNA, 19 nt, Artificial Sequence
  Description of Artificial Sequence: Synthetic oligonucleotide
  Antisense Strand to SEQ ID NO: 403459
caucagcugaucaauccag

SEQ ID NO: 403461 - RNA, 19 nt, Artificial Sequence
  Description of Artificial Sequence: Synthetic oligonucleotide
  Sense Strand Starting at position 1080 of SEQ ID NO: 315835
gcaggaagugacuguugaa

SEQ ID NO: 403462 - RNA, 19 nt, Artificial Sequence
  Description of Artificial Sequence: Synthetic oligonucleotide
  Antisense Strand to SEQ ID NO: 403461
uucaacagucacuuccugc

SEQ ID NO: 403463 - RNA, 19 nt, Artificial Sequence
  Description of Artificial Sequence: Synthetic oligonucleotide
  Sense Strand Starting at position 1080 of SEQ ID NO: 315900
uuuagauucugagcaguuc

SEQ ID NO: 403464 - RNA, 19 nt, Artificial Sequence
  Description of Artificial Sequence: Synthetic oligonucleotide
  Antisense Strand to SEQ ID NO: 403463
gaacugcucagaaucuaaa

SEQ ID NO: 403465 - RNA, 19 nt, Artificial Sequence
  Description of Artificial Sequence: Synthetic oligonucleotide
  Sense Strand Starting at position 1080 of SEQ ID NO: 315952
ggcugaaucagccacuuga

SEQ ID NO: 403466 - RNA, 19 nt, Artificial Sequence
  Description of Artificial Sequence: Synthetic oligonucleotide
  Antisense Strand to SEQ ID NO: 403465
ucaaguggcugauucagcc

SEQ ID NO: 403467 - RNA, 19 nt, Artificial Sequence
  Description of Artificial Sequence: Synthetic oligonucleotide
  Sense Strand Starting at position 1080 of SEQ ID NO: 315965
acuugaaauuagguuucuu

SEQ ID NO: 403468 - RNA, 19 nt, Artificial Sequence
  Description of Artificial Sequence: Synthetic oligonucleotide
  Antisense Strand to SEQ ID NO: 403467
aagaaaccuaauuucaagu

SEQ ID NO: 403469 - RNA, 19 nt, Artificial Sequence
  Description of Artificial Sequence: Synthetic oligonucleotide
  Sense Strand Starting at position 1080 of SEQ ID NO: 316221
gauugcuucggaggagaaa

SEQ ID NO: 403470 - RNA, 19 nt, Artificial Sequence
  Description of Artificial Sequence: Synthetic oligonucleotide
  Antisense Strand to SEQ ID NO: 403469
uuucuccuccgaagcaauc

SEQ ID NO: 403471 - RNA, 19 nt, Artificial Sequence
  Description of Artificial Sequence: Synthetic oligonucleotide
  Sense Strand Starting at position 1080 of SEQ ID NO: 316264
gaagucucccaaggucaau

SEQ ID NO: 403472 - RNA, 19 nt, Artificial Sequence
  Description of Artificial Sequence: Synthetic oligonucleotide
  Antisense Strand to SEQ ID NO: 403471
auugaccuugggagacuuc

SEQ ID NO: 403473 - RNA, 19 nt, Artificial Sequence
  Description of Artificial Sequence: Synthetic oligonucleotide
  Sense Strand Starting at position 1080 of SEQ ID NO: 317241
ccuacucuccauggagagu

SEQ ID NO: 403474 - RNA, 19 nt, Artificial Sequence
  Description of Artificial Sequence: Synthetic oligonucleotide
  Antisense Strand to SEQ ID NO: 403473
acucuccauggagaguagg

SEQ ID NO: 403475 - RNA, 19 nt, Artificial Sequence
  Description of Artificial Sequence: Synthetic oligonucleotide
  Sense Strand Starting at position 1080 of SEQ ID NO: 317272
cguucucucccucaccaua

SEQ ID NO: 403476 - RNA, 19 nt, Artificial Sequence
  Description of Artificial Sequence: Synthetic oligonucleotide
  Antisense Strand to SEQ ID NO: 403475
uauggugagggagagaacg

SEQ ID NO: 403477 - RNA, 19 nt, Artificial Sequence
  Description of Artificial Sequence: Synthetic oligonucleotide
  Sense Strand Starting at position 1080 of SEQ ID NO: 317283
ucaccauauguguauguau

SEQ ID NO: 403478 - RNA, 19 nt, Artificial Sequence
  Description of Artificial Sequence: Synthetic oligonucleotide
  Antisense Strand to SEQ ID NO: 403477
auacauacacauaugguga

SEQ ID NO: 403479 - RNA, 19 nt, Artificial Sequence
  Description of Artificial Sequence: Synthetic oligonucleotide
  Sense Strand Starting at position 1080 of SEQ ID NO: 317298
guauguaaauauguacagu

SEQ ID NO: 403480 - RNA, 19 nt, Artificial Sequence
  Description of Artificial Sequence: Synthetic oligonucleotide
  Antisense Strand to SEQ ID NO: 403479
acuguacauauuuacauac

SEQ ID NO: 403481 - RNA, 19 nt, Artificial Sequence
  Description of Artificial Sequence: Synthetic oligonucleotide
  Sense Strand Starting at position 1080 of SEQ ID NO: 317461
ugcaaugacuucuuccaga

SEQ ID NO: 403482 - RNA, 19 nt, Artificial Sequence
  Description of Artificial Sequence: Synthetic oligonucleotide
  Antisense Strand to SEQ ID NO: 403481
ucuggaagaagucauugca

SEQ ID NO: 403483 - RNA, 19 nt, Artificial Sequence
  Description of Artificial Sequence: Synthetic oligonucleotide
  Sense Strand Starting at position 1080 of SEQ ID NO: 317466
ugacuucuuccagauucug

SEQ ID NO: 403484 - RNA, 19 nt, Artificial Sequence
  Description of Artificial Sequence: Synthetic oligonucleotide
  Antisense Strand to SEQ ID NO: 403483
cagaaucuggaagaaguca

SEQ ID NO: 403485 - RNA, 19 nt, Artificial Sequence
  Description of Artificial Sequence: Synthetic oligonucleotide
  Sense Strand Starting at position 1080 of SEQ ID NO: 317622
aucagaagaccuugcagaa

SEQ ID NO: 403486 - RNA, 19 nt, Artificial Sequence
  Description of Artificial Sequence: Synthetic oligonucleotide
  Antisense Strand to SEQ ID NO: 403485
uucugcaaggucuucugau

SEQ ID NO: 403487 - RNA, 19 nt, Artificial Sequence
  Description of Artificial Sequence: Synthetic oligonucleotide
  Sense Strand Starting at position 1080 of SEQ ID NO: 317632
cuugcagaacauugaacaa

SEQ ID NO: 403488 - RNA, 19 nt, Artificial Sequence
  Description of Artificial Sequence: Synthetic oligonucleotide
  Antisense Strand to SEQ ID NO: 403487
uuguucaauguucugcaag

SEQ ID NO: 403489 - RNA, 19 nt, Artificial Sequence
  Description of Artificial Sequence: Synthetic oligonucleotide
  Sense Strand Starting at position 1080 of SEQ ID NO: 317753
agaagucauuaagaaggaa

SEQ ID NO: 403490 - RNA, 19 nt, Artificial Sequence
  Description of Artificial Sequence: Synthetic oligonucleotide
  Antisense Strand to SEQ ID NO: 403489
uuccuucuuaaugacuucu

SEQ ID NO: 403491 - RNA, 19 nt, Artificial Sequence
  Description of Artificial Sequence: Synthetic oligonucleotide
  Sense Strand Starting at position 1080 of SEQ ID NO: 317947
auggaagauuaaguuagua

SEQ ID NO: 403492 - RNA, 19 nt, Artificial Sequence
  Description of Artificial Sequence: Synthetic oligonucleotide
  Antisense Strand to SEQ ID NO: 403491
uacuaacuuaaucuuccau

SEQ ID NO: 403493 - RNA, 19 nt, Artificial Sequence
  Description of Artificial Sequence: Synthetic oligonucleotide
  Sense Strand Starting at position 1080 of SEQ ID NO: 317951
aagauuaaguuaguagacu

SEQ ID NO: 403494 - RNA, 19 nt, Artificial Sequence
  Description of Artificial Sequence: Synthetic oligonucleotide
  Antisense Strand to SEQ ID NO: 403493
agucuacuaacuuaaucuu

SEQ ID NO: 403495 - RNA, 19 nt, Artificial Sequence
  Description of Artificial Sequence: Synthetic oligonucleotide
  Sense Strand Starting at position 1080 of SEQ ID NO: 317960
uuaguagacuccuuauuag

SEQ ID NO: 403496 - RNA, 19 nt, Artificial Sequence
  Description of Artificial Sequence: Synthetic oligonucleotide
  Antisense Strand to SEQ ID NO: 403495
cuaauaaggagucuacuaa

SEQ ID NO: 403497 - RNA, 19 nt, Artificial Sequence
  Description of Artificial Sequence: Synthetic oligonucleotide
  Sense Strand Starting at position 1080 of SEQ ID NO: 318095
ucaugacaagucugggcaa

SEQ ID NO: 403498 - RNA, 19 nt, Artificial Sequence
  Description of Artificial Sequence: Synthetic oligonucleotide
  Antisense Strand to SEQ ID NO: 403497
uugcccagacuugucauga

SEQ ID NO: 403499 - RNA, 19 nt, Artificial Sequence
  Description of Artificial Sequence: Synthetic oligonucleotide
  Sense Strand Starting at position 1080 of SEQ ID NO: 318097
augacaagucugggcaaca

SEQ ID NO: 403500 - RNA, 19 nt, Artificial Sequence
  Description of Artificial Sequence: Synthetic oligonucleotide
  Antisense Strand to SEQ ID NO: 403499
uguugcccagacuugucau

SEQ ID NO: 403501 - RNA, 19 nt, Artificial Sequence
  Description of Artificial Sequence: Synthetic oligonucleotide
  Sense Strand Starting at position 1080 of SEQ ID NO: 318098
ugacaagucugggcaacau

SEQ ID NO: 403502 - RNA, 19 nt, Artificial Sequence
  Description of Artificial Sequence: Synthetic oligonucleotide
  Antisense Strand to SEQ ID NO: 403501
auguugcccagacuuguca

SEQ ID NO: 403503 - RNA, 19 nt, Artificial Sequence
  Description of Artificial Sequence: Synthetic oligonucleotide
  Sense Strand Starting at position 1080 of SEQ ID NO: 318558
acuugaaaucuacgaaggu

SEQ ID NO: 403504 - RNA, 19 nt, Artificial Sequence
  Description of Artificial Sequence: Synthetic oligonucleotide
  Antisense Strand to SEQ ID NO: 403503
accuucguagauuucaagu

SEQ ID NO: 403505 - RNA, 19 nt, Artificial Sequence
  Description of Artificial Sequence: Synthetic oligonucleotide
  Sense Strand Starting at position 1080 of SEQ ID NO: 318709
agugucucauuauuagaaa

SEQ ID NO: 403506 - RNA, 19 nt, Artificial Sequence
  Description of Artificial Sequence: Synthetic oligonucleotide
  Antisense Strand to SEQ ID NO: 403505
uuucuaauaaugagacacu

SEQ ID NO: 403507 - RNA, 19 nt, Artificial Sequence
  Description of Artificial Sequence: Synthetic oligonucleotide
  Sense Strand Starting at position 1080 of SEQ ID NO: 318785
gcccucuggagucauagga

SEQ ID NO: 403508 - RNA, 19 nt, Artificial Sequence
  Description of Artificial Sequence: Synthetic oligonucleotide
  Antisense Strand to SEQ ID NO: 403507
uccuaugacuccagagggc

SEQ ID NO: 403509 - RNA, 19 nt, Artificial Sequence
  Description of Artificial Sequence: Synthetic oligonucleotide
  Sense Strand Starting at position 1080 of SEQ ID NO: 318826
augacagaccuguggguau

SEQ ID NO: 403510 - RNA, 19 nt, Artificial Sequence
  Description of Artificial Sequence: Synthetic oligonucleotide
  Antisense Strand to SEQ ID NO: 403509
auacccacaggucugucau

SEQ ID NO: 403511 - RNA, 19 nt, Artificial Sequence
  Description of Artificial Sequence: Synthetic oligonucleotide
  Sense Strand Starting at position 1080 of SEQ ID NO: 318966
uuguauggauuaucuauac

SEQ ID NO: 403512 - RNA, 19 nt, Artificial Sequence
  Description of Artificial Sequence: Synthetic oligonucleotide
  Antisense Strand to SEQ ID NO: 403511
guauagauaauccauacaa

SEQ ID NO: 403513 - RNA, 19 nt, Artificial Sequence
  Description of Artificial Sequence: Synthetic oligonucleotide
  Sense Strand Starting at position 1080 of SEQ ID NO: 319007
acaagucacucuguaauau

SEQ ID NO: 403514 - RNA, 19 nt, Artificial Sequence
  Description of Artificial Sequence: Synthetic oligonucleotide
  Antisense Strand to SEQ ID NO: 403513
auauuacagagugacuugu

SEQ ID NO: 403515 - RNA, 19 nt, Artificial Sequence
  Description of Artificial Sequence: Synthetic oligonucleotide
  Sense Strand Starting at position 1080 of SEQ ID NO: 319084
ggaucacaagguuguugua

SEQ ID NO: 403516 - RNA, 19 nt, Artificial Sequence
  Description of Artificial Sequence: Synthetic oligonucleotide
  Antisense Strand to SEQ ID NO: 403515
uacaacaaccuugugaucc

SEQ ID NO: 403517 - RNA, 19 nt, Artificial Sequence
  Description of Artificial Sequence: Synthetic oligonucleotide
  Sense Strand Starting at position 1080 of SEQ ID NO: 319110
aagggagaaugauguauuu

SEQ ID NO: 403518 - RNA, 19 nt, Artificial Sequence
  Description of Artificial Sequence: Synthetic oligonucleotide
  Antisense Strand to SEQ ID NO: 403517
aaauacaucauucucccuu

SEQ ID NO: 403519 - RNA, 19 nt, Artificial Sequence
  Description of Artificial Sequence: Synthetic oligonucleotide
  Sense Strand Starting at position 1080 of SEQ ID NO: 319145
guuuaaaguguugaaugaa

SEQ ID NO: 403520 - RNA, 19 nt, Artificial Sequence
  Description of Artificial Sequence: Synthetic oligonucleotide
  Antisense Strand to SEQ ID NO: 403519
uucauucaacacuuuaaac

SEQ ID NO: 403521 - RNA, 19 nt, Artificial Sequence
  Description of Artificial Sequence: Synthetic oligonucleotide
  Sense Strand Starting at position 1080 of SEQ ID NO: 319148
uaaaguguugaaugaacaa

SEQ ID NO: 403522 - RNA, 19 nt, Artificial Sequence
  Description of Artificial Sequence: Synthetic oligonucleotide
  Antisense Strand to SEQ ID NO: 403521
uuguucauucaacacuuua

SEQ ID NO: 403523 - RNA, 19 nt, Artificial Sequence
  Description of Artificial Sequence: Synthetic oligonucleotide
  Sense Strand Starting at position 1081 of SEQ ID NO: 315317
guuguuguugcaugagcaa

SEQ ID NO: 403524 - RNA, 19 nt, Artificial Sequence
  Description of Artificial Sequence: Synthetic oligonucleotide
  Antisense Strand to SEQ ID NO: 403523
uugcucaugcaacaacaac

SEQ ID NO: 403525 - RNA, 19 nt, Artificial Sequence
  Description of Artificial Sequence: Synthetic oligonucleotide
  Sense Strand Starting at position 1081 of SEQ ID NO: 317545
cgaaaucaguuucuuaauc

SEQ ID NO: 403526 - RNA, 19 nt, Artificial Sequence
  Description of Artificial Sequence: Synthetic oligonucleotide
  Antisense Strand to SEQ ID NO: 403525
gauuaagaaacugauuucg

SEQ ID NO: 403527 - RNA, 19 nt, Artificial Sequence
  Description of Artificial Sequence: Synthetic oligonucleotide
  Sense Strand Starting at position 1081 of SEQ ID NO: 317575
ucaguuuaccaaggugaag

SEQ ID NO: 403528 - RNA, 19 nt, Artificial Sequence
  Description of Artificial Sequence: Synthetic oligonucleotide
  Antisense Strand to SEQ ID NO: 403527
cuucaccuugguaaacuga

SEQ ID NO: 403529 - RNA, 19 nt, Artificial Sequence
  Description of Artificial Sequence: Synthetic oligonucleotide
  Sense Strand Starting at position 1081 of SEQ ID NO: 317617
acaccaguuuacuagaaga

SEQ ID NO: 403530 - RNA, 19 nt, Artificial Sequence
  Description of Artificial Sequence: Synthetic oligonucleotide
  Antisense Strand to SEQ ID NO: 403529
ucuucuaguaaacuggugu

SEQ ID NO: 403531 - RNA, 19 nt, Artificial Sequence
  Description of Artificial Sequence: Synthetic oligonucleotide
  Sense Strand Starting at position 1081 of SEQ ID NO: 317656
gcaauuuggaguugcguaa

SEQ ID NO: 403532 - RNA, 19 nt, Artificial Sequence
  Description of Artificial Sequence: Synthetic oligonucleotide
  Antisense Strand to SEQ ID NO: 403531
uuacgcaacuccaaauugc

SEQ ID NO: 403533 - RNA, 19 nt, Artificial Sequence
  Description of Artificial Sequence: Synthetic oligonucleotide
  Sense Strand Starting at position 1081 of SEQ ID NO: 317669
gcguaaagcgagcaauaau

SEQ ID NO: 403534 - RNA, 19 nt, Artificial Sequence
  Description of Artificial Sequence: Synthetic oligonucleotide
  Antisense Strand to SEQ ID NO: 403533
auuauugcucgcuuuacgc

SEQ ID NO: 403535 - RNA, 19 nt, Artificial Sequence
  Description of Artificial Sequence: Synthetic oligonucleotide
  Sense Strand Starting at position 1081 of SEQ ID NO: 317731
agcagaucaucucaauuag

SEQ ID NO: 403536 - RNA, 19 nt, Artificial Sequence
  Description of Artificial Sequence: Synthetic oligonucleotide
  Antisense Strand to SEQ ID NO: 403535
cuaauugagaugaucugcu

SEQ ID NO: 403537 - RNA, 19 nt, Artificial Sequence
  Description of Artificial Sequence: Synthetic oligonucleotide
  Sense Strand Starting at position 1081 of SEQ ID NO: 317912
cagcuaguccguguacacu

SEQ ID NO: 403538 - RNA, 19 nt, Artificial Sequence
  Description of Artificial Sequence: Synthetic oligonucleotide
  Antisense Strand to SEQ ID NO: 403537
aguguacacggacuagcug

SEQ ID NO: 403539 - RNA, 19 nt, Artificial Sequence
  Description of Artificial Sequence: Synthetic oligonucleotide
  Sense Strand Starting at position 1081 of SEQ ID NO: 318047
caagacuaauccgggacaa

SEQ ID NO: 403540 - RNA, 19 nt, Artificial Sequence
  Description of Artificial Sequence: Synthetic oligonucleotide
  Antisense Strand to SEQ ID NO: 403539
uugucccggauuagucuug

SEQ ID NO: 403541 - RNA, 19 nt, Artificial Sequence
  Description of Artificial Sequence: Synthetic oligonucleotide
  Sense Strand Starting at position 1081 of SEQ ID NO: 318136
ccacuuccuucuugagaga

SEQ ID NO: 403542 - RNA, 19 nt, Artificial Sequence
  Description of Artificial Sequence: Synthetic oligonucleotide
  Antisense Strand to SEQ ID NO: 403541
ucucucaagaaggaagugg

SEQ ID NO: 403543 - RNA, 19 nt, Artificial Sequence
  Description of Artificial Sequence: Synthetic oligonucleotide
  Sense Strand Starting at position 1081 of SEQ ID NO: 318315
gagcaagaggcaugaccua

SEQ ID NO: 403544 - RNA, 19 nt, Artificial Sequence
  Description of Artificial Sequence: Synthetic oligonucleotide
  Antisense Strand to SEQ ID NO: 403543
uaggucaugccucuugcuc

SEQ ID NO: 403545 - RNA, 19 nt, Artificial Sequence
  Description of Artificial Sequence: Synthetic oligonucleotide
  Sense Strand Starting at position 1081 of SEQ ID NO: 318389
uaucucuaacccggagaga

SEQ ID NO: 403546 - RNA, 19 nt, Artificial Sequence
  Description of Artificial Sequence: Synthetic oligonucleotide
  Antisense Strand to SEQ ID NO: 403545
ucucuccggguuagagaua

SEQ ID NO: 403547 - RNA, 19 nt, Artificial Sequence
  Description of Artificial Sequence: Synthetic oligonucleotide
  Sense Strand Starting at position 1081 of SEQ ID NO: 318549
cgggaaggacuguggaaau

SEQ ID NO: 403548 - RNA, 19 nt, Artificial Sequence
  Description of Artificial Sequence: Synthetic oligonucleotide
  Antisense Strand to SEQ ID NO: 403547
auuuccacaguccuucccg

SEQ ID NO: 403549 - RNA, 19 nt, Artificial Sequence
  Description of Artificial Sequence: Synthetic oligonucleotide
  Sense Strand Starting at position 1081 of SEQ ID NO: 318591
cugggaaguucucgggugu

SEQ ID NO: 403550 - RNA, 19 nt, Artificial Sequence
  Description of Artificial Sequence: Synthetic oligonucleotide
  Antisense Strand to SEQ ID NO: 403549
acacccgagaacuucccag

SEQ ID NO: 403551 - RNA, 19 nt, Artificial Sequence
  Description of Artificial Sequence: Synthetic oligonucleotide
  Sense Strand Starting at position 1081 of SEQ ID NO: 318593
gggaaguucucggguguca

SEQ ID NO: 403552 - RNA, 19 nt, Artificial Sequence
  Description of Artificial Sequence: Synthetic oligonucleotide
  Antisense Strand to SEQ ID NO: 403551
ugacacccgagaacuuccc

SEQ ID NO: 403553 - RNA, 19 nt, Artificial Sequence
  Description of Artificial Sequence: Synthetic oligonucleotide
  Sense Strand Starting at position 1081 of SEQ ID NO: 318872
gcgugaucagccguggaac

SEQ ID NO: 403554 - RNA, 19 nt, Artificial Sequence
  Description of Artificial Sequence: Synthetic oligonucleotide
  Antisense Strand to SEQ ID NO: 403553
guuccacggcugaucacgc

SEQ ID NO: 403555 - RNA, 19 nt, Artificial Sequence
  Description of Artificial Sequence: Synthetic oligonucleotide
  Sense Strand Starting at position 1081 of SEQ ID NO: 318873
cgugaucagccguggaaca

SEQ ID NO: 403556 - RNA, 19 nt, Artificial Sequence
  Description of Artificial Sequence: Synthetic oligonucleotide
  Antisense Strand to SEQ ID NO: 403555
uguuccacggcugaucacg

SEQ ID NO: 403557 - RNA, 19 nt, Artificial Sequence
  Description of Artificial Sequence: Synthetic oligonucleotide
  Sense Strand Starting at position 1081 of SEQ ID NO: 318970
ggguaagcucgacgagcuu

SEQ ID NO: 403558 - RNA, 19 nt, Artificial Sequence
  Description of Artificial Sequence: Synthetic oligonucleotide
  Antisense Strand to SEQ ID NO: 403557
aagcucgucgagcuuaccc

SEQ ID NO: 403559 - RNA, 19 nt, Artificial Sequence
  Description of Artificial Sequence: Synthetic oligonucleotide
  Sense Strand Starting at position 1081 of SEQ ID NO: 318977
cucgacgagcuuugugaau

SEQ ID NO: 403560 - RNA, 19 nt, Artificial Sequence
  Description of Artificial Sequence: Synthetic oligonucleotide
  Antisense Strand to SEQ ID NO: 403559
auucacaaagcucgucgag

SEQ ID NO: 403561 - RNA, 19 nt, Artificial Sequence
  Description of Artificial Sequence: Synthetic oligonucleotide
  Sense Strand Starting at position 1081 of SEQ ID NO: 318979
cgacgagcuuugugaauuc

SEQ ID NO: 403562 - RNA, 19 nt, Artificial Sequence
  Description of Artificial Sequence: Synthetic oligonucleotide
  Antisense Strand to SEQ ID NO: 403561
gaauucacaaagcucgucg

SEQ ID NO: 403563 - RNA, 19 nt, Artificial Sequence
  Description of Artificial Sequence: Synthetic oligonucleotide
  Sense Strand Starting at position 1082 of SEQ ID NO: 315607
cgaaaucaguuucuuaauc

SEQ ID NO: 403564 - RNA, 19 nt, Artificial Sequence
  Description of Artificial Sequence: Synthetic oligonucleotide
  Antisense Strand to SEQ ID NO: 403563
gauuaagaaacugauuucg

SEQ ID NO: 403565 - RNA, 19 nt, Artificial Sequence
  Description of Artificial Sequence: Synthetic oligonucleotide
  Sense Strand Starting at position 1082 of SEQ ID NO: 315637
ucaguuuaccaaggugaag

SEQ ID NO: 403566 - RNA, 19 nt, Artificial Sequence
  Description of Artificial Sequence: Synthetic oligonucleotide
  Antisense Strand to SEQ ID NO: 403565
cuucaccuugguaaacuga

SEQ ID NO: 403567 - RNA, 19 nt, Artificial Sequence
  Description of Artificial Sequence: Synthetic oligonucleotide
  Sense Strand Starting at position 1082 of SEQ ID NO: 315679
acaccaguuuacuagaaga

SEQ ID NO: 403568 - RNA, 19 nt, Artificial Sequence
  Description of Artificial Sequence: Synthetic oligonucleotide
  Antisense Strand to SEQ ID NO: 403567
ucuucuaguaaacuggugu

SEQ ID NO: 403569 - RNA, 19 nt, Artificial Sequence
  Description of Artificial Sequence: Synthetic oligonucleotide
  Sense Strand Starting at position 1082 of SEQ ID NO: 315718
gcaauuuggaguugcguaa

SEQ ID NO: 403570 - RNA, 19 nt, Artificial Sequence
  Description of Artificial Sequence: Synthetic oligonucleotide
  Antisense Strand to SEQ ID NO: 403569
uuacgcaacuccaaauugc

SEQ ID NO: 403571 - RNA, 19 nt, Artificial Sequence
  Description of Artificial Sequence: Synthetic oligonucleotide
  Sense Strand Starting at position 1082 of SEQ ID NO: 315731
gcguaaagcgagcaauaau

SEQ ID NO: 403572 - RNA, 19 nt, Artificial Sequence
  Description of Artificial Sequence: Synthetic oligonucleotide
  Antisense Strand to SEQ ID NO: 403571
auuauugcucgcuuuacgc

SEQ ID NO: 403573 - RNA, 19 nt, Artificial Sequence
  Description of Artificial Sequence: Synthetic oligonucleotide
  Sense Strand Starting at position 1082 of SEQ ID NO: 315793
agcagaucaucucaauuag

SEQ ID NO: 403574 - RNA, 19 nt, Artificial Sequence
  Description of Artificial Sequence: Synthetic oligonucleotide
  Antisense Strand to SEQ ID NO: 403573
cuaauugagaugaucugcu

SEQ ID NO: 403575 - RNA, 19 nt, Artificial Sequence
  Description of Artificial Sequence: Synthetic oligonucleotide
  Sense Strand Starting at position 1082 of SEQ ID NO: 315974
cagcuaguccguguacacu

SEQ ID NO: 403576 - RNA, 19 nt, Artificial Sequence
  Description of Artificial Sequence: Synthetic oligonucleotide
  Antisense Strand to SEQ ID NO: 403575
aguguacacggacuagcug

SEQ ID NO: 403577 - RNA, 19 nt, Artificial Sequence
  Description of Artificial Sequence: Synthetic oligonucleotide
  Sense Strand Starting at position 1082 of SEQ ID NO: 316109
caagacuaauccgggacaa

SEQ ID NO: 403578 - RNA, 19 nt, Artificial Sequence
  Description of Artificial Sequence: Synthetic oligonucleotide
  Antisense Strand to SEQ ID NO: 403577
uugucccggauuagucuug

SEQ ID NO: 403579 - RNA, 19 nt, Artificial Sequence
  Description of Artificial Sequence: Synthetic oligonucleotide
  Sense Strand Starting at position 1082 of SEQ ID NO: 316198
ccacuuccuucuugagaga

SEQ ID NO: 403580 - RNA, 19 nt, Artificial Sequence
  Description of Artificial Sequence: Synthetic oligonucleotide
  Antisense Strand to SEQ ID NO: 403579
ucucucaagaaggaagugg

SEQ ID NO: 403581 - RNA, 19 nt, Artificial Sequence
  Description of Artificial Sequence: Synthetic oligonucleotide
  Sense Strand Starting at position 1082 of SEQ ID NO: 316377
gagcaagaggcaugaccua

SEQ ID NO: 403582 - RNA, 19 nt, Artificial Sequence
  Description of Artificial Sequence: Synthetic oligonucleotide
  Antisense Strand to SEQ ID NO: 403581
uaggucaugccucuugcuc

SEQ ID NO: 403583 - RNA, 19 nt, Artificial Sequence
  Description of Artificial Sequence: Synthetic oligonucleotide
  Sense Strand Starting at position 1082 of SEQ ID NO: 316451
uaucucuaacccggagaga

SEQ ID NO: 403584 - RNA, 19 nt, Artificial Sequence
  Description of Artificial Sequence: Synthetic oligonucleotide
  Antisense Strand to SEQ ID NO: 403583
ucucuccggguuagagaua

SEQ ID NO: 403585 - RNA, 19 nt, Artificial Sequence
  Description of Artificial Sequence: Synthetic oligonucleotide
  Sense Strand Starting at position 1082 of SEQ ID NO: 316611
cgggaaggacuguggaaau

SEQ ID NO: 403586 - RNA, 19 nt, Artificial Sequence
  Description of Artificial Sequence: Synthetic oligonucleotide
  Antisense Strand to SEQ ID NO: 403585
auuuccacaguccuucccg

SEQ ID NO: 403587 - RNA, 19 nt, Artificial Sequence
  Description of Artificial Sequence: Synthetic oligonucleotide
  Sense Strand Starting at position 1082 of SEQ ID NO: 316655
gggaaguucucggguguca

SEQ ID NO: 403588 - RNA, 19 nt, Artificial Sequence
  Description of Artificial Sequence: Synthetic oligonucleotide
  Antisense Strand to SEQ ID NO: 403587
ugacacccgagaacuuccc

SEQ ID NO: 403589 - RNA, 19 nt, Artificial Sequence
  Description of Artificial Sequence: Synthetic oligonucleotide
  Sense Strand Starting at position 1082 of SEQ ID NO: 316934
gcgugaucagccguggaac

SEQ ID NO: 403590 - RNA, 19 nt, Artificial Sequence
  Description of Artificial Sequence: Synthetic oligonucleotide
  Antisense Strand to SEQ ID NO: 403589
guuccacggcugaucacgc

SEQ ID NO: 403591 - RNA, 19 nt, Artificial Sequence
  Description of Artificial Sequence: Synthetic oligonucleotide
  Sense Strand Starting at position 1082 of SEQ ID NO: 316935
cgugaucagccguggaaca

SEQ ID NO: 403592 - RNA, 19 nt, Artificial Sequence
  Description of Artificial Sequence: Synthetic oligonucleotide
  Antisense Strand to SEQ ID NO: 403591
uguuccacggcugaucacg

SEQ ID NO: 403593 - RNA, 19 nt, Artificial Sequence
  Description of Artificial Sequence: Synthetic oligonucleotide
  Sense Strand Starting at position 1082 of SEQ ID NO: 317032
ggguaagcucgacgagcuu

SEQ ID NO: 403594 - RNA, 19 nt, Artificial Sequence
  Description of Artificial Sequence: Synthetic oligonucleotide
  Antisense Strand to SEQ ID NO: 403593
aagcucgucgagcuuaccc

SEQ ID NO: 403595 - RNA, 19 nt, Artificial Sequence
  Description of Artificial Sequence: Synthetic oligonucleotide
  Sense Strand Starting at position 1082 of SEQ ID NO: 317039
cucgacgagcuuugugaau

SEQ ID NO: 403596 - RNA, 19 nt, Artificial Sequence
  Description of Artificial Sequence: Synthetic oligonucleotide
  Antisense Strand to SEQ ID NO: 403595
auucacaaagcucgucgag

SEQ ID NO: 403597 - RNA, 19 nt, Artificial Sequence
  Description of Artificial Sequence: Synthetic oligonucleotide
  Sense Strand Starting at position 1082 of SEQ ID NO: 318303
aguguuuacugaggguguu

SEQ ID NO: 403598 - RNA, 19 nt, Artificial Sequence
  Description of Artificial Sequence: Synthetic oligonucleotide
  Antisense Strand to SEQ ID NO: 403597
aacacccucaguaaacacu

SEQ ID NO: 403599 - RNA, 19 nt, Artificial Sequence
  Description of Artificial Sequence: Synthetic oligonucleotide
  Sense Strand Starting at position 1082 of SEQ ID NO: 318304
guguuuacugaggguguuu

SEQ ID NO: 403600 - RNA, 19 nt, Artificial Sequence
  Description of Artificial Sequence: Synthetic oligonucleotide
  Antisense Strand to SEQ ID NO: 403599
aaacacccucaguaaacac

SEQ ID NO: 403601 - RNA, 19 nt, Artificial Sequence
  Description of Artificial Sequence: Synthetic oligonucleotide
  Sense Strand Starting at position 1082 of SEQ ID NO: 318434
aggguagccgauuagcaua

SEQ ID NO: 403602 - RNA, 19 nt, Artificial Sequence
  Description of Artificial Sequence: Synthetic oligonucleotide
  Antisense Strand to SEQ ID NO: 403601
uaugcuaaucggcuacccu

SEQ ID NO: 403603 - RNA, 19 nt, Artificial Sequence
  Description of Artificial Sequence: Synthetic oligonucleotide
  Sense Strand Starting at position 1082 of SEQ ID NO: 318439
agccgauuagcauauugaa

SEQ ID NO: 403604 - RNA, 19 nt, Artificial Sequence
  Description of Artificial Sequence: Synthetic oligonucleotide
  Antisense Strand to SEQ ID NO: 403603
uucaauaugcuaaucggcu

SEQ ID NO: 403605 - RNA, 19 nt, Artificial Sequence
  Description of Artificial Sequence: Synthetic oligonucleotide
  Sense Strand Starting at position 1082 of SEQ ID NO: 318463
cagagcugcuccgucacau

SEQ ID NO: 403606 - RNA, 19 nt, Artificial Sequence
  Description of Artificial Sequence: Synthetic oligonucleotide
  Antisense Strand to SEQ ID NO: 403605
augugacggagcagcucug

SEQ ID NO: 403607 - RNA, 19 nt, Artificial Sequence
  Description of Artificial Sequence: Synthetic oligonucleotide
  Sense Strand Starting at position 1082 of SEQ ID NO: 318472
uccgucacauuucgaaaca

SEQ ID NO: 403608 - RNA, 19 nt, Artificial Sequence
  Description of Artificial Sequence: Synthetic oligonucleotide
  Antisense Strand to SEQ ID NO: 403607
uguuucgaaaugugacgga

SEQ ID NO: 403609 - RNA, 19 nt, Artificial Sequence
  Description of Artificial Sequence: Synthetic oligonucleotide
  Sense Strand Starting at position 1082 of SEQ ID NO: 318535
gaaauaguccaccgaguag

SEQ ID NO: 403610 - RNA, 19 nt, Artificial Sequence
  Description of Artificial Sequence: Synthetic oligonucleotide
  Antisense Strand to SEQ ID NO: 403609
cuacucgguggacuauuuc

SEQ ID NO: 403611 - RNA, 19 nt, Artificial Sequence
  Description of Artificial Sequence: Synthetic oligonucleotide
  Sense Strand Starting at position 1082 of SEQ ID NO: 318608
cguccaauuucuucuaguu

SEQ ID NO: 403612 - RNA, 19 nt, Artificial Sequence
  Description of Artificial Sequence: Synthetic oligonucleotide
  Antisense Strand to SEQ ID NO: 403611
aacuagaagaaauuggacg

SEQ ID NO: 403613 - RNA, 19 nt, Artificial Sequence
  Description of Artificial Sequence: Synthetic oligonucleotide
  Sense Strand Starting at position 1082 of SEQ ID NO: 318677
uggaaauacucuugugcuc

SEQ ID NO: 403614 - RNA, 19 nt, Artificial Sequence
  Description of Artificial Sequence: Synthetic oligonucleotide
  Antisense Strand to SEQ ID NO: 403613
gagcacaagaguauuucca

SEQ ID NO: 403615 - RNA, 19 nt, Artificial Sequence
  Description of Artificial Sequence: Synthetic oligonucleotide
  Sense Strand Starting at position 1082 of SEQ ID NO: 318684
acucuugugcucguacuuu

SEQ ID NO: 403616 - RNA, 19 nt, Artificial Sequence
  Description of Artificial Sequence: Synthetic oligonucleotide
  Antisense Strand to SEQ ID NO: 403615
aaaguacgagcacaagagu

SEQ ID NO: 403617 - RNA, 19 nt, Artificial Sequence
  Description of Artificial Sequence: Synthetic oligonucleotide
  Sense Strand Starting at position 1082 of SEQ ID NO: 318907
uccaucuguuauugccaua

SEQ ID NO: 403618 - RNA, 19 nt, Artificial Sequence
  Description of Artificial Sequence: Synthetic oligonucleotide
  Antisense Strand to SEQ ID NO: 403617
uauggcaauaacagaugga

SEQ ID NO: 403619 - RNA, 19 nt, Artificial Sequence
  Description of Artificial Sequence: Synthetic oligonucleotide
  Sense Strand Starting at position 1082 of SEQ ID NO: 318910
aucuguuauugccauagag

SEQ ID NO: 403620 - RNA, 19 nt, Artificial Sequence
  Description of Artificial Sequence: Synthetic oligonucleotide
  Antisense Strand to SEQ ID NO: 403619
cucuauggcaauaacagau

SEQ ID NO: 403621 - RNA, 19 nt, Artificial Sequence
  Description of Artificial Sequence: Synthetic oligonucleotide
  Sense Strand Starting at position 1082 of SEQ ID NO: 318912
cuguuauugccauagagac

SEQ ID NO: 403622 - RNA, 19 nt, Artificial Sequence
  Description of Artificial Sequence: Synthetic oligonucleotide
  Antisense Strand to SEQ ID NO: 403621
gucucuauggcaauaacag

SEQ ID NO: 403623 - RNA, 19 nt, Artificial Sequence
  Description of Artificial Sequence: Synthetic oligonucleotide
  Sense Strand Starting at position 1082 of SEQ ID NO: 318929
acagaagcguggcaaagau

SEQ ID NO: 403624 - RNA, 19 nt, Artificial Sequence
  Description of Artificial Sequence: Synthetic oligonucleotide
  Antisense Strand to SEQ ID NO: 403623
aucuuugccacgcuucugu

SEQ ID NO: 403625 - RNA, 19 nt, Artificial Sequence
  Description of Artificial Sequence: Synthetic oligonucleotide
  Sense Strand Starting at position 1082 of SEQ ID NO: 318938
uggcaaagauaaugauguu

SEQ ID NO: 403626 - RNA, 19 nt, Artificial Sequence
  Description of Artificial Sequence: Synthetic oligonucleotide
  Antisense Strand to SEQ ID NO: 403625
aacaucauuaucuuugcca

SEQ ID NO: 403627 - RNA, 19 nt, Artificial Sequence
  Description of Artificial Sequence: Synthetic oligonucleotide
  Sense Strand Starting at position 1082 of SEQ ID NO: 318947
uaaugauguucugugcaga

SEQ ID NO: 403628 - RNA, 19 nt, Artificial Sequence
  Description of Artificial Sequence: Synthetic oligonucleotide
  Antisense Strand to SEQ ID NO: 403627
ucugcacagaacaucauua

SEQ ID NO: 403629 - RNA, 19 nt, Artificial Sequence
  Description of Artificial Sequence: Synthetic oligonucleotide
  Sense Strand Starting at position 1082 of SEQ ID NO: 318948
aaugauguucugugcagag

SEQ ID NO: 403630 - RNA, 19 nt, Artificial Sequence
  Description of Artificial Sequence: Synthetic oligonucleotide
  Antisense Strand to SEQ ID NO: 403629
cucugcacagaacaucauu

SEQ ID NO: 403631 - RNA, 19 nt, Artificial Sequence
  Description of Artificial Sequence: Synthetic oligonucleotide
  Sense Strand Starting at position 1082 of SEQ ID NO: 319011
uucuaacugugagaauauu

SEQ ID NO: 403632 - RNA, 19 nt, Artificial Sequence
  Description of Artificial Sequence: Synthetic oligonucleotide
  Antisense Strand to SEQ ID NO: 403631
aauauucucacaguuagaa

SEQ ID NO: 403633 - RNA, 19 nt, Artificial Sequence
  Description of Artificial Sequence: Synthetic oligonucleotide
  Sense Strand Starting at position 1082 of SEQ ID NO: 319040
agcugaagaucugauguga

SEQ ID NO: 403634 - RNA, 19 nt, Artificial Sequence
  Description of Artificial Sequence: Synthetic oligonucleotide
  Antisense Strand to SEQ ID NO: 403633
ucacaucagaucuucagcu

SEQ ID NO: 403635 - RNA, 19 nt, Artificial Sequence
  Description of Artificial Sequence: Synthetic oligonucleotide
  Sense Strand Starting at position 1082 of SEQ ID NO: 319045
aagaucugaugugaagacu

SEQ ID NO: 403636 - RNA, 19 nt, Artificial Sequence
  Description of Artificial Sequence: Synthetic oligonucleotide
  Antisense Strand to SEQ ID NO: 403635
agucuucacaucagaucuu

SEQ ID NO: 403637 - RNA, 19 nt, Artificial Sequence
  Description of Artificial Sequence: Synthetic oligonucleotide
  Sense Strand Starting at position 1082 of SEQ ID NO: 319061
acuggacaguccugaaacu

SEQ ID NO: 403638 - RNA, 19 nt, Artificial Sequence
  Description of Artificial Sequence: Synthetic oligonucleotide
  Antisense Strand to SEQ ID NO: 403637
aguuucaggacuguccagu

SEQ ID NO: 403639 - RNA, 19 nt, Artificial Sequence
  Description of Artificial Sequence: Synthetic oligonucleotide
  Sense Strand Starting at position 1082 of SEQ ID NO: 319112
ugugucuagccagaaguaa

SEQ ID NO: 403640 - RNA, 19 nt, Artificial Sequence
  Description of Artificial Sequence: Synthetic oligonucleotide
  Antisense Strand to SEQ ID NO: 403639
uuacuucuggcuagacaca

SEQ ID NO: 403641 - RNA, 19 nt, Artificial Sequence
  Description of Artificial Sequence: Synthetic oligonucleotide
  Sense Strand Starting at position 1082 of SEQ ID NO: 319192
auaaauguuuagcagucau

SEQ ID NO: 403642 - RNA, 19 nt, Artificial Sequence
  Description of Artificial Sequence: Synthetic oligonucleotide
  Antisense Strand to SEQ ID NO: 403641
augacugcuaaacauuuau

SEQ ID NO: 403643 - RNA, 19 nt, Artificial Sequence
  Description of Artificial Sequence: Synthetic oligonucleotide
  Sense Strand Starting at position 1083 of SEQ ID NO: 315247
acuaauugguagcuauuau

SEQ ID NO: 403644 - RNA, 19 nt, Artificial Sequence
  Description of Artificial Sequence: Synthetic oligonucleotide
  Antisense Strand to SEQ ID NO: 403643
auaauagcuaccaauuagu

SEQ ID NO: 403645 - RNA, 19 nt, Artificial Sequence
  Description of Artificial Sequence: Synthetic oligonucleotide
  Sense Strand Starting at position 1083 of SEQ ID NO: 315284
ccuggaauaugcuucccaa

SEQ ID NO: 403646 - RNA, 19 nt, Artificial Sequence
  Description of Artificial Sequence: Synthetic oligonucleotide
  Antisense Strand to SEQ ID NO: 403645
uugggaagcauauuccagg

SEQ ID NO: 403647 - RNA, 19 nt, Artificial Sequence
  Description of Artificial Sequence: Synthetic oligonucleotide
  Sense Strand Starting at position 1083 of SEQ ID NO: 315287
ggaauaugcuucccaaguc

SEQ ID NO: 403648 - RNA, 19 nt, Artificial Sequence
  Description of Artificial Sequence: Synthetic oligonucleotide
  Antisense Strand to SEQ ID NO: 403647
gacuugggaagcauauucc

SEQ ID NO: 403649 - RNA, 19 nt, Artificial Sequence
  Description of Artificial Sequence: Synthetic oligonucleotide
  Sense Strand Starting at position 1083 of SEQ ID NO: 315361
cccaauuccuagccaggua

SEQ ID NO: 403650 - RNA, 19 nt, Artificial Sequence
  Description of Artificial Sequence: Synthetic oligonucleotide
  Antisense Strand to SEQ ID NO: 403649
uaccuggcuaggaauuggg

SEQ ID NO: 403651 - RNA, 19 nt, Artificial Sequence
  Description of Artificial Sequence: Synthetic oligonucleotide
  Sense Strand Starting at position 1083 of SEQ ID NO: 315364
aauuccuagccagguaagu

SEQ ID NO: 403652 - RNA, 19 nt, Artificial Sequence
  Description of Artificial Sequence: Synthetic oligonucleotide
  Antisense Strand to SEQ ID NO: 403651
acuuaccuggcuaggaauu

SEQ ID NO: 403653 - RNA, 19 nt, Artificial Sequence
  Description of Artificial Sequence: Synthetic oligonucleotide
  Sense Strand Starting at position 1083 of SEQ ID NO: 315613
ugaggagucugagcugaau

SEQ ID NO: 403654 - RNA, 19 nt, Artificial Sequence
  Description of Artificial Sequence: Synthetic oligonucleotide
  Antisense Strand to SEQ ID NO: 403653
auucagcucagacuccuca

SEQ ID NO: 403655 - RNA, 19 nt, Artificial Sequence
  Description of Artificial Sequence: Synthetic oligonucleotide
  Sense Strand Starting at position 1083 of SEQ ID NO: 315615
aggagucugagcugaauuc

SEQ ID NO: 403656 - RNA, 19 nt, Artificial Sequence
  Description of Artificial Sequence: Synthetic oligonucleotide
  Antisense Strand to SEQ ID NO: 403655
gaauucagcucagacuccu

SEQ ID NO: 403657 - RNA, 19 nt, Artificial Sequence
  Description of Artificial Sequence: Synthetic oligonucleotide
  Sense Strand Starting at position 1083 of SEQ ID NO: 315616
ggagucugagcugaauucu

SEQ ID NO: 403658 - RNA, 19 nt, Artificial Sequence
  Description of Artificial Sequence: Synthetic oligonucleotide
  Antisense Strand to SEQ ID NO: 403657
agaauucagcucagacucc

SEQ ID NO: 403659 - RNA, 19 nt, Artificial Sequence
  Description of Artificial Sequence: Synthetic oligonucleotide
  Sense Strand Starting at position 1083 of SEQ ID NO: 315876
uucgauguuuagcuauuaa

SEQ ID NO: 403660 - RNA, 19 nt, Artificial Sequence
  Description of Artificial Sequence: Synthetic oligonucleotide
  Antisense Strand to SEQ ID NO: 403659
uuaauagcuaaacaucgaa

SEQ ID NO: 403661 - RNA, 19 nt, Artificial Sequence
  Description of Artificial Sequence: Synthetic oligonucleotide
  Sense Strand Starting at position 1083 of SEQ ID NO: 315958
gggcacuuaugacaauuua

SEQ ID NO: 403662 - RNA, 19 nt, Artificial Sequence
  Description of Artificial Sequence: Synthetic oligonucleotide
  Antisense Strand to SEQ ID NO: 403661
uaaauugucauaagugccc

SEQ ID NO: 403663 - RNA, 19 nt, Artificial Sequence
  Description of Artificial Sequence: Synthetic oligonucleotide
  Sense Strand Starting at position 1083 of SEQ ID NO: 316068
acuuaaauacuugggugaa

SEQ ID NO: 403664 - RNA, 19 nt, Artificial Sequence
  Description of Artificial Sequence: Synthetic oligonucleotide
  Antisense Strand to SEQ ID NO: 403663
uucacccaaguauuuaagu

SEQ ID NO: 403665 - RNA, 19 nt, Artificial Sequence
  Description of Artificial Sequence: Synthetic oligonucleotide
  Sense Strand Starting at position 1083 of SEQ ID NO: 316071
uaaauacuugggugaaggu

SEQ ID NO: 403666 - RNA, 19 nt, Artificial Sequence
  Description of Artificial Sequence: Synthetic oligonucleotide
  Antisense Strand to SEQ ID NO: 403665
accuucacccaaguauuua

SEQ ID NO: 403667 - RNA, 19 nt, Artificial Sequence
  Description of Artificial Sequence: Synthetic oligonucleotide
  Sense Strand Starting at position 1083 of SEQ ID NO: 316093
agugacaaauuguugauaa

SEQ ID NO: 403668 - RNA, 19 nt, Artificial Sequence
  Description of Artificial Sequence: Synthetic oligonucleotide
  Antisense Strand to SEQ ID NO: 403667
uuaucaacaauuugucacu

SEQ ID NO: 403669 - RNA, 19 nt, Artificial Sequence
  Description of Artificial Sequence: Synthetic oligonucleotide
  Sense Strand Starting at position 1083 of SEQ ID NO: 316097
acaaauuguugauaagaag

SEQ ID NO: 403670 - RNA, 19 nt, Artificial Sequence
  Description of Artificial Sequence: Synthetic oligonucleotide
  Antisense Strand to SEQ ID NO: 403669
cuucuuaucaacaauuugu

SEQ ID NO: 403671 - RNA, 19 nt, Artificial Sequence
  Description of Artificial Sequence: Synthetic oligonucleotide
  Sense Strand Starting at position 1083 of SEQ ID NO: 316172
gaagguguggcaggaagaa

SEQ ID NO: 403672 - RNA, 19 nt, Artificial Sequence
  Description of Artificial Sequence: Synthetic oligonucleotide
  Antisense Strand to SEQ ID NO: 403671
uucuuccugccacaccuuc

SEQ ID NO: 403673 - RNA, 19 nt, Artificial Sequence
  Description of Artificial Sequence: Synthetic oligonucleotide
  Sense Strand Starting at position 1083 of SEQ ID NO: 316200
gggaacucgacuugagacu

SEQ ID NO: 403674 - RNA, 19 nt, Artificial Sequence
  Description of Artificial Sequence: Synthetic oligonucleotide
  Antisense Strand to SEQ ID NO: 403673
agucucaagucgaguuccc

SEQ ID NO: 403675 - RNA, 19 nt, Artificial Sequence
  Description of Artificial Sequence: Synthetic oligonucleotide
  Sense Strand Starting at position 1083 of SEQ ID NO: 316250
ugaagaguuugagcccuga

SEQ ID NO: 403676 - RNA, 19 nt, Artificial Sequence
  Description of Artificial Sequence: Synthetic oligonucleotide
  Antisense Strand to SEQ ID NO: 403675
ucagggcucaaacucuuca

SEQ ID NO: 403677 - RNA, 19 nt, Artificial Sequence
  Description of Artificial Sequence: Synthetic oligonucleotide
  Sense Strand Starting at position 1083 of SEQ ID NO: 316335
gagaucucagaaugucuua

SEQ ID NO: 403678 - RNA, 19 nt, Artificial Sequence
  Description of Artificial Sequence: Synthetic oligonucleotide
  Antisense Strand to SEQ ID NO: 403677
uaagacauucugagaucuc

SEQ ID NO: 403679 - RNA, 19 nt, Artificial Sequence
  Description of Artificial Sequence: Synthetic oligonucleotide
  Sense Strand Starting at position 1083 of SEQ ID NO: 316355
uugucucuccuuugggaau

SEQ ID NO: 403680 - RNA, 19 nt, Artificial Sequence
  Description of Artificial Sequence: Synthetic oligonucleotide
  Antisense Strand to SEQ ID NO: 403679
auucccaaaggagagacaa

SEQ ID NO: 403681 - RNA, 19 nt, Artificial Sequence
  Description of Artificial Sequence: Synthetic oligonucleotide
  Sense Strand Starting at position 1083 of SEQ ID NO: 316367
ugggaauuccugggccuca

SEQ ID NO: 403682 - RNA, 19 nt, Artificial Sequence
  Description of Artificial Sequence: Synthetic oligonucleotide
  Antisense Strand to SEQ ID NO: 403681
ugaggcccaggaauuccca

SEQ ID NO: 403683 - RNA, 19 nt, Artificial Sequence
  Description of Artificial Sequence: Synthetic oligonucleotide
  Sense Strand Starting at position 1083 of SEQ ID NO: 316448
cuguuacaaggcugggaaa

SEQ ID NO: 403684 - RNA, 19 nt, Artificial Sequence
  Description of Artificial Sequence: Synthetic oligonucleotide
  Antisense Strand to SEQ ID NO: 403683
uuucccagccuuguaacag

SEQ ID NO: 403685 - RNA, 19 nt, Artificial Sequence
  Description of Artificial Sequence: Synthetic oligonucleotide
  Sense Strand Starting at position 1083 of SEQ ID NO: 316521
cauguugagugaucaugga

SEQ ID NO: 403686 - RNA, 19 nt, Artificial Sequence
  Description of Artificial Sequence: Synthetic oligonucleotide
  Antisense Strand to SEQ ID NO: 403685
uccaugaucacucaacaug

SEQ ID NO: 403687 - RNA, 19 nt, Artificial Sequence
  Description of Artificial Sequence: Synthetic oligonucleotide
  Sense Strand Starting at position 1083 of SEQ ID NO: 316528
agugaucauggauggcaaa

SEQ ID NO: 403688 - RNA, 19 nt, Artificial Sequence
  Description of Artificial Sequence: Synthetic oligonucleotide
  Antisense Strand to SEQ ID NO: 403687
uuugccauccaugaucacu

SEQ ID NO: 403689 - RNA, 19 nt, Artificial Sequence
  Description of Artificial Sequence: Synthetic oligonucleotide
  Sense Strand Starting at position 1083 of SEQ ID NO: 316602
auuauuucuuaagggauca

SEQ ID NO: 403690 - RNA, 19 nt, Artificial Sequence
  Description of Artificial Sequence: Synthetic oligonucleotide
  Antisense Strand to SEQ ID NO: 403689
ugaucccuuaagaaauaau

SEQ ID NO: 403691 - RNA, 19 nt, Artificial Sequence
  Description of Artificial Sequence: Synthetic oligonucleotide
  Sense Strand Starting at position 1083 of SEQ ID NO: 316793
cuucuuacauugguuugau

SEQ ID NO: 403692 - RNA, 19 nt, Artificial Sequence
  Description of Artificial Sequence: Synthetic oligonucleotide
  Antisense Strand to SEQ ID NO: 403691
aucaaaccaauguaagaag

SEQ ID NO: 403693 - RNA, 19 nt, Artificial Sequence
  Description of Artificial Sequence: Synthetic oligonucleotide
  Sense Strand Starting at position 1083 of SEQ ID NO: 316794
uucuuacauugguuugauu

SEQ ID NO: 403694 - RNA, 19 nt, Artificial Sequence
  Description of Artificial Sequence: Synthetic oligonucleotide
  Antisense Strand to SEQ ID NO: 403693
aaucaaaccaauguaagaa

SEQ ID NO: 403695 - RNA, 19 nt, Artificial Sequence
  Description of Artificial Sequence: Synthetic oligonucleotide
  Sense Strand Starting at position 1083 of SEQ ID NO: 316834
uuaucugaguccucacugu

SEQ ID NO: 403696 - RNA, 19 nt, Artificial Sequence
  Description of Artificial Sequence: Synthetic oligonucleotide
  Antisense Strand to SEQ ID NO: 403695
acagugaggacucagauaa

SEQ ID NO: 403697 - RNA, 19 nt, Artificial Sequence
  Description of Artificial Sequence: Synthetic oligonucleotide
  Sense Strand Starting at position 1083 of SEQ ID NO: 316838
cugaguccucacugugacu

SEQ ID NO: 403698 - RNA, 19 nt, Artificial Sequence
  Description of Artificial Sequence: Synthetic oligonucleotide
  Antisense Strand to SEQ ID NO: 403697
agucacagugaggacucag

SEQ ID NO: 403699 - RNA, 19 nt, Artificial Sequence
  Description of Artificial Sequence: Synthetic oligonucleotide
  Sense Strand Starting at position 1083 of SEQ ID NO: 316850
ugugacugucuguggaaga

SEQ ID NO: 403700 - RNA, 19 nt, Artificial Sequence
  Description of Artificial Sequence: Synthetic oligonucleotide
  Antisense Strand to SEQ ID NO: 403699
ucuuccacagacagucaca

SEQ ID NO: 403701 - RNA, 19 nt, Artificial Sequence
  Description of Artificial Sequence: Synthetic oligonucleotide
  Sense Strand Starting at position 1083 of SEQ ID NO: 317168
cugggacaucugggucauu

SEQ ID NO: 403702 - RNA, 19 nt, Artificial Sequence
  Description of Artificial Sequence: Synthetic oligonucleotide
  Antisense Strand to SEQ ID NO: 403701
aaugacccagaugucccag

SEQ ID NO: 403703 - RNA, 19 nt, Artificial Sequence
  Description of Artificial Sequence: Synthetic oligonucleotide
  Sense Strand Starting at position 1083 of SEQ ID NO: 317177
cugggucauucuccagcaa

SEQ ID NO: 403704 - RNA, 19 nt, Artificial Sequence
  Description of Artificial Sequence: Synthetic oligonucleotide
  Antisense Strand to SEQ ID NO: 403703
uugcuggagaaugacccag

SEQ ID NO: 403705 - RNA, 19 nt, Artificial Sequence
  Description of Artificial Sequence: Synthetic oligonucleotide
  Sense Strand Starting at position 1083 of SEQ ID NO: 317218
cagggagacugcucuggaa

SEQ ID NO: 403706 - RNA, 19 nt, Artificial Sequence
  Description of Artificial Sequence: Synthetic oligonucleotide
  Antisense Strand to SEQ ID NO: 403705
uuccagagcagucucccug

SEQ ID NO: 403707 - RNA, 19 nt, Artificial Sequence
  Description of Artificial Sequence: Synthetic oligonucleotide
  Sense Strand Starting at position 1083 of SEQ ID NO: 317222
gagacugcucuggaaggua

SEQ ID NO: 403708 - RNA, 19 nt, Artificial Sequence
  Description of Artificial Sequence: Synthetic oligonucleotide
  Antisense Strand to SEQ ID NO: 403707
uaccuuccagagcagucuc

SEQ ID NO: 403709 - RNA, 19 nt, Artificial Sequence
  Description of Artificial Sequence: Synthetic oligonucleotide
  Sense Strand Starting at position 1083 of SEQ ID NO: 317353
uugucuaccucaucuggaa

SEQ ID NO: 403710 - RNA, 19 nt, Artificial Sequence
  Description of Artificial Sequence: Synthetic oligonucleotide
  Antisense Strand to SEQ ID NO: 403709
uuccagaugagguagacaa

SEQ ID NO: 403711 - RNA, 19 nt, Artificial Sequence
  Description of Artificial Sequence: Synthetic oligonucleotide
  Sense Strand Starting at position 1083 of SEQ ID NO: 317367
uggaaacuuggccggguua

SEQ ID NO: 403712 - RNA, 19 nt, Artificial Sequence
  Description of Artificial Sequence: Synthetic oligonucleotide
  Antisense Strand to SEQ ID NO: 403711
uaacccggccaaguuucca

SEQ ID NO: 403713 - RNA, 19 nt, Artificial Sequence
  Description of Artificial Sequence: Synthetic oligonucleotide
  Sense Strand Starting at position 1083 of SEQ ID NO: 317492
uccuuaaauacgugagggu

SEQ ID NO: 403714 - RNA, 19 nt, Artificial Sequence
  Description of Artificial Sequence: Synthetic oligonucleotide
  Antisense Strand to SEQ ID NO: 403713
acccucacguauuuaagga

SEQ ID NO: 403715 - RNA, 19 nt, Artificial Sequence
  Description of Artificial Sequence: Synthetic oligonucleotide
  Sense Strand Starting at position 1083 of SEQ ID NO: 317957
gaggguuagagcugaucuu

SEQ ID NO: 403716 - RNA, 19 nt, Artificial Sequence
  Description of Artificial Sequence: Synthetic oligonucleotide
  Antisense Strand to SEQ ID NO: 403715
aagaucagcucuaacccuc

SEQ ID NO: 403717 - RNA, 19 nt, Artificial Sequence
  Description of Artificial Sequence: Synthetic oligonucleotide
  Sense Strand Starting at position 1083 of SEQ ID NO: 317967
gcugaucuuccugggaaga

SEQ ID NO: 403718 - RNA, 19 nt, Artificial Sequence
  Description of Artificial Sequence: Synthetic oligonucleotide
  Antisense Strand to SEQ ID NO: 403717
ucuucccaggaagaucagc

SEQ ID NO: 403719 - RNA, 19 nt, Artificial Sequence
  Description of Artificial Sequence: Synthetic oligonucleotide
  Sense Strand Starting at position 1083 of SEQ ID NO: 318955
cugagaaagcccgggauaa

SEQ ID NO: 403720 - RNA, 19 nt, Artificial Sequence
  Description of Artificial Sequence: Synthetic oligonucleotide
  Antisense Strand to SEQ ID NO: 403719
uuaucccgggcuuucucag

SEQ ID NO: 403721 - RNA, 19 nt, Artificial Sequence
  Description of Artificial Sequence: Synthetic oligonucleotide
  Sense Strand Starting at position 1083 of SEQ ID NO: 319015
ggagaagaaucuggacaag

SEQ ID NO: 403722 - RNA, 19 nt, Artificial Sequence
  Description of Artificial Sequence: Synthetic oligonucleotide
  Antisense Strand to SEQ ID NO: 403721
cuuguccagauucuucucc

SEQ ID NO: 403723 - RNA, 19 nt, Artificial Sequence
  Description of Artificial Sequence: Synthetic oligonucleotide
  Sense Strand Starting at position 1084 of SEQ ID NO: 315236
auuauuucuuaagggauca

SEQ ID NO: 403724 - RNA, 19 nt, Artificial Sequence
  Description of Artificial Sequence: Synthetic oligonucleotide
  Antisense Strand to SEQ ID NO: 403723
ugaucccuuaagaaauaau

SEQ ID NO: 403725 - RNA, 19 nt, Artificial Sequence
  Description of Artificial Sequence: Synthetic oligonucleotide
  Sense Strand Starting at position 1084 of SEQ ID NO: 315256
cucuccauuucuggguaga

SEQ ID NO: 403726 - RNA, 19 nt, Artificial Sequence
  Description of Artificial Sequence: Synthetic oligonucleotide
  Antisense Strand to SEQ ID NO: 403725
ucuacccagaaauggagag

SEQ ID NO: 403727 - RNA, 19 nt, Artificial Sequence
  Description of Artificial Sequence: Synthetic oligonucleotide
  Sense Strand Starting at position 1084 of SEQ ID NO: 315302
gcauguaacuaaugaucag

SEQ ID NO: 403728 - RNA, 19 nt, Artificial Sequence
  Description of Artificial Sequence: Synthetic oligonucleotide
  Antisense Strand to SEQ ID NO: 403727
cugaucauuaguuacaugc

SEQ ID NO: 403729 - RNA, 19 nt, Artificial Sequence
  Description of Artificial Sequence: Synthetic oligonucleotide
  Sense Strand Starting at position 1084 of SEQ ID NO: 315427
cuucuuacauugguuugau

SEQ ID NO: 403730 - RNA, 19 nt, Artificial Sequence
  Description of Artificial Sequence: Synthetic oligonucleotide
  Antisense Strand to SEQ ID NO: 403729
aucaaaccaauguaagaag

SEQ ID NO: 403731 - RNA, 19 nt, Artificial Sequence
  Description of Artificial Sequence: Synthetic oligonucleotide
  Sense Strand Starting at position 1084 of SEQ ID NO: 315428
uucuuacauugguuugauu

SEQ ID NO: 403732 - RNA, 19 nt, Artificial Sequence
  Description of Artificial Sequence: Synthetic oligonucleotide
  Antisense Strand to SEQ ID NO: 403731
aaucaaaccaauguaagaa

SEQ ID NO: 403733 - RNA, 19 nt, Artificial Sequence
  Description of Artificial Sequence: Synthetic oligonucleotide
  Sense Strand Starting at position 1084 of SEQ ID NO: 315468
uuaucugaguccucacugu

SEQ ID NO: 403734 - RNA, 19 nt, Artificial Sequence
  Description of Artificial Sequence: Synthetic oligonucleotide
  Antisense Strand to SEQ ID NO: 403733
acagugaggacucagauaa

SEQ ID NO: 403735 - RNA, 19 nt, Artificial Sequence
  Description of Artificial Sequence: Synthetic oligonucleotide
  Sense Strand Starting at position 1084 of SEQ ID NO: 315472
cugaguccucacugugacu

SEQ ID NO: 403736 - RNA, 19 nt, Artificial Sequence
  Description of Artificial Sequence: Synthetic oligonucleotide
  Antisense Strand to SEQ ID NO: 403735
agucacagugaggacucag

SEQ ID NO: 403737 - RNA, 19 nt, Artificial Sequence
  Description of Artificial Sequence: Synthetic oligonucleotide
  Sense Strand Starting at position 1084 of SEQ ID NO: 315484
ugugacugucuguggaaga

SEQ ID NO: 403738 - RNA, 19 nt, Artificial Sequence
  Description of Artificial Sequence: Synthetic oligonucleotide
  Antisense Strand to SEQ ID NO: 403737
ucuuccacagacagucaca

SEQ ID NO: 403739 - RNA, 19 nt, Artificial Sequence
  Description of Artificial Sequence: Synthetic oligonucleotide
  Sense Strand Starting at position 1084 of SEQ ID NO: 315675
aagggugcgcuguaauguu

SEQ ID NO: 403740 - RNA, 19 nt, Artificial Sequence
  Description of Artificial Sequence: Synthetic oligonucleotide
  Antisense Strand to SEQ ID NO: 403739
aacauuacagcgcacccuu

SEQ ID NO: 403741 - RNA, 19 nt, Artificial Sequence
  Description of Artificial Sequence: Synthetic oligonucleotide
  Sense Strand Starting at position 1084 of SEQ ID NO: 315683
gcuguaauguuugcaucca

SEQ ID NO: 403742 - RNA, 19 nt, Artificial Sequence
  Description of Artificial Sequence: Synthetic oligonucleotide
  Antisense Strand to SEQ ID NO: 403741
uggaugcaaacauuacagc

SEQ ID NO: 403743 - RNA, 19 nt, Artificial Sequence
  Description of Artificial Sequence: Synthetic oligonucleotide
  Sense Strand Starting at position 1084 of SEQ ID NO: 315802
cugggacaucugggucauu

SEQ ID NO: 403744 - RNA, 19 nt, Artificial Sequence
  Description of Artificial Sequence: Synthetic oligonucleotide
  Antisense Strand to SEQ ID NO: 403743
aaugacccagaugucccag

SEQ ID NO: 403745 - RNA, 19 nt, Artificial Sequence
  Description of Artificial Sequence: Synthetic oligonucleotide
  Sense Strand Starting at position 1084 of SEQ ID NO: 315811
cugggucauucuccagcaa

SEQ ID NO: 403746 - RNA, 19 nt, Artificial Sequence
  Description of Artificial Sequence: Synthetic oligonucleotide
  Antisense Strand to SEQ ID NO: 403745
uugcuggagaaugacccag

SEQ ID NO: 403747 - RNA, 19 nt, Artificial Sequence
  Description of Artificial Sequence: Synthetic oligonucleotide
  Sense Strand Starting at position 1084 of SEQ ID NO: 315831
cagggauccuggugaucug

SEQ ID NO: 403748 - RNA, 19 nt, Artificial Sequence
  Description of Artificial Sequence: Synthetic oligonucleotide
  Antisense Strand to SEQ ID NO: 403747
cagaucaccaggaucccug

SEQ ID NO: 403749 - RNA, 19 nt, Artificial Sequence
  Description of Artificial Sequence: Synthetic oligonucleotide
  Sense Strand Starting at position 1084 of SEQ ID NO: 315852
cagggagacugcucuggaa

SEQ ID NO: 403750 - RNA, 19 nt, Artificial Sequence
  Description of Artificial Sequence: Synthetic oligonucleotide
  Antisense Strand to SEQ ID NO: 403749
uuccagagcagucucccug

SEQ ID NO: 403751 - RNA, 19 nt, Artificial Sequence
  Description of Artificial Sequence: Synthetic oligonucleotide
  Sense Strand Starting at position 1084 of SEQ ID NO: 315855
ggagacugcucuggaaggu

SEQ ID NO: 403752 - RNA, 19 nt, Artificial Sequence
  Description of Artificial Sequence: Synthetic oligonucleotide
  Antisense Strand to SEQ ID NO: 403751
accuuccagagcagucucc

SEQ ID NO: 403753 - RNA, 19 nt, Artificial Sequence
  Description of Artificial Sequence: Synthetic oligonucleotide
  Sense Strand Starting at position 1084 of SEQ ID NO: 315856
gagacugcucuggaaggua

SEQ ID NO: 403754 - RNA, 19 nt, Artificial Sequence
  Description of Artificial Sequence: Synthetic oligonucleotide
  Antisense Strand to SEQ ID NO: 403753
uaccuuccagagcagucuc

SEQ ID NO: 403755 - RNA, 19 nt, Artificial Sequence
  Description of Artificial Sequence: Synthetic oligonucleotide
  Sense Strand Starting at position 1084 of SEQ ID NO: 315987
uugucuaccucaucuggaa

SEQ ID NO: 403756 - RNA, 19 nt, Artificial Sequence
  Description of Artificial Sequence: Synthetic oligonucleotide
  Antisense Strand to SEQ ID NO: 403755
uuccagaugagguagacaa

SEQ ID NO: 403757 - RNA, 19 nt, Artificial Sequence
  Description of Artificial Sequence: Synthetic oligonucleotide
  Sense Strand Starting at position 1084 of SEQ ID NO: 316001
uggaaacuuggccggguua

SEQ ID NO: 403758 - RNA, 19 nt, Artificial Sequence
  Description of Artificial Sequence: Synthetic oligonucleotide
  Antisense Strand to SEQ ID NO: 403757
uaacccggccaaguuucca

SEQ ID NO: 403759 - RNA, 19 nt, Artificial Sequence
  Description of Artificial Sequence: Synthetic oligonucleotide
  Sense Strand Starting at position 1084 of SEQ ID NO: 316126
uccuuaaauacgugagggu

SEQ ID NO: 403760 - RNA, 19 nt, Artificial Sequence
  Description of Artificial Sequence: Synthetic oligonucleotide
  Antisense Strand to SEQ ID NO: 403759
acccucacguauuuaagga

SEQ ID NO: 403761 - RNA, 19 nt, Artificial Sequence
  Description of Artificial Sequence: Synthetic oligonucleotide
  Sense Strand Starting at position 1084 of SEQ ID NO: 316543
ucaggacccuuugguagaa

SEQ ID NO: 403762 - RNA, 19 nt, Artificial Sequence
  Description of Artificial Sequence: Synthetic oligonucleotide
  Antisense Strand to SEQ ID NO: 403761
uucuaccaaaggguccuga

SEQ ID NO: 403763 - RNA, 19 nt, Artificial Sequence
  Description of Artificial Sequence: Synthetic oligonucleotide
  Sense Strand Starting at position 1084 of SEQ ID NO: 316591
gaggguuagagcugaucuu

SEQ ID NO: 403764 - RNA, 19 nt, Artificial Sequence
  Description of Artificial Sequence: Synthetic oligonucleotide
  Antisense Strand to SEQ ID NO: 403763
aagaucagcucuaacccuc

SEQ ID NO: 403765 - RNA, 19 nt, Artificial Sequence
  Description of Artificial Sequence: Synthetic oligonucleotide
  Sense Strand Starting at position 1084 of SEQ ID NO: 316600
agcugaucuuccugggaag

SEQ ID NO: 403766 - RNA, 19 nt, Artificial Sequence
  Description of Artificial Sequence: Synthetic oligonucleotide
  Antisense Strand to SEQ ID NO: 403765
cuucccaggaagaucagcu

SEQ ID NO: 403767 - RNA, 19 nt, Artificial Sequence
  Description of Artificial Sequence: Synthetic oligonucleotide
  Sense Strand Starting at position 1084 of SEQ ID NO: 316601
gcugaucuuccugggaaga

SEQ ID NO: 403768 - RNA, 19 nt, Artificial Sequence
  Description of Artificial Sequence: Synthetic oligonucleotide
  Antisense Strand to SEQ ID NO: 403767
ucuucccaggaagaucagc

SEQ ID NO: 403769 - RNA, 19 nt, Artificial Sequence
  Description of Artificial Sequence: Synthetic oligonucleotide
  Sense Strand Starting at position 1084 of SEQ ID NO: 316603
ugaucuuccugggaagaag

SEQ ID NO: 403770 - RNA, 19 nt, Artificial Sequence
  Description of Artificial Sequence: Synthetic oligonucleotide
  Antisense Strand to SEQ ID NO: 403769
cuucuucccaggaagauca

SEQ ID NO: 403771 - RNA, 19 nt, Artificial Sequence
  Description of Artificial Sequence: Synthetic oligonucleotide
  Sense Strand Starting at position 1084 of SEQ ID NO: 317589
cugagaaagcccgggauaa

SEQ ID NO: 403772 - RNA, 19 nt, Artificial Sequence
  Description of Artificial Sequence: Synthetic oligonucleotide
  Antisense Strand to SEQ ID NO: 403771
uuaucccgggcuuucucag

SEQ ID NO: 403773 - RNA, 19 nt, Artificial Sequence
  Description of Artificial Sequence: Synthetic oligonucleotide
  Sense Strand Starting at position 1084 of SEQ ID NO: 317649
ggagaagaaucuggacaag

SEQ ID NO: 403774 - RNA, 19 nt, Artificial Sequence
  Description of Artificial Sequence: Synthetic oligonucleotide
  Antisense Strand to SEQ ID NO: 403773
cuuguccagauucuucucc

SEQ ID NO: 403775 - RNA, 19 nt, Artificial Sequence
  Description of Artificial Sequence: Synthetic oligonucleotide
  Sense Strand Starting at position 1084 of SEQ ID NO: 318017
cccacaagccuuuguguga

SEQ ID NO: 403776 - RNA, 19 nt, Artificial Sequence
  Description of Artificial Sequence: Synthetic oligonucleotide
  Antisense Strand to SEQ ID NO: 403775
ucacacaaaggcuuguggg

SEQ ID NO: 403777 - RNA, 19 nt, Artificial Sequence
  Description of Artificial Sequence: Synthetic oligonucleotide
  Sense Strand Starting at position 1084 of SEQ ID NO: 318018
ccacaagccuuugugugaa

SEQ ID NO: 403778 - RNA, 19 nt, Artificial Sequence
  Description of Artificial Sequence: Synthetic oligonucleotide
  Antisense Strand to SEQ ID NO: 403777
uucacacaaaggcuugugg

SEQ ID NO: 403779 - RNA, 19 nt, Artificial Sequence
  Description of Artificial Sequence: Synthetic oligonucleotide
  Sense Strand Starting at position 1084 of SEQ ID NO: 318047
aauagagguuguucuucua

SEQ ID NO: 403780 - RNA, 19 nt, Artificial Sequence
  Description of Artificial Sequence: Synthetic oligonucleotide
  Antisense Strand to SEQ ID NO: 403779
uagaagaacaaccucuauu

SEQ ID NO: 403781 - RNA, 19 nt, Artificial Sequence
  Description of Artificial Sequence: Synthetic oligonucleotide
  Sense Strand Starting at position 1084 of SEQ ID NO: 318116
ucgcuucugcuccagcaaa

SEQ ID NO: 403782 - RNA, 19 nt, Artificial Sequence
  Description of Artificial Sequence: Synthetic oligonucleotide
  Antisense Strand to SEQ ID NO: 403781
uuugcuggagcagaagcga

SEQ ID NO: 403783 - RNA, 19 nt, Artificial Sequence
  Description of Artificial Sequence: Synthetic oligonucleotide
  Sense Strand Starting at position 1084 of SEQ ID NO: 318131
caaagacgcgugugaagau

SEQ ID NO: 403784 - RNA, 19 nt, Artificial Sequence
  Description of Artificial Sequence: Synthetic oligonucleotide
  Antisense Strand to SEQ ID NO: 403783
aucuucacacgcgucuuug

SEQ ID NO: 403785 - RNA, 19 nt, Artificial Sequence
  Description of Artificial Sequence: Synthetic oligonucleotide
  Sense Strand Starting at position 1084 of SEQ ID NO: 318134
agacgcgugugaagauaua

SEQ ID NO: 403786 - RNA, 19 nt, Artificial Sequence
  Description of Artificial Sequence: Synthetic oligonucleotide
  Antisense Strand to SEQ ID NO: 403785
uauaucuucacacgcgucu

SEQ ID NO: 403787 - RNA, 19 nt, Artificial Sequence
  Description of Artificial Sequence: Synthetic oligonucleotide
  Sense Strand Starting at position 1084 of SEQ ID NO: 318302
cgucuacccucagagguaa

SEQ ID NO: 403788 - RNA, 19 nt, Artificial Sequence
  Description of Artificial Sequence: Synthetic oligonucleotide
  Antisense Strand to SEQ ID NO: 403787
uuaccucugaggguagacg

SEQ ID NO: 403789 - RNA, 19 nt, Artificial Sequence
  Description of Artificial Sequence: Synthetic oligonucleotide
  Sense Strand Starting at position 1084 of SEQ ID NO: 318336
ucccgucucuauggauuua

SEQ ID NO: 403790 - RNA, 19 nt, Artificial Sequence
  Description of Artificial Sequence: Synthetic oligonucleotide
  Antisense Strand to SEQ ID NO: 403789
uaaauccauagagacggga

SEQ ID NO: 403791 - RNA, 19 nt, Artificial Sequence
  Description of Artificial Sequence: Synthetic oligonucleotide
  Sense Strand Starting at position 1084 of SEQ ID NO: 318622
uuggcaucugcaggaaauu

SEQ ID NO: 403792 - RNA, 19 nt, Artificial Sequence
  Description of Artificial Sequence: Synthetic oligonucleotide
  Antisense Strand to SEQ ID NO: 403791
aauuuccugcagaugccaa

SEQ ID NO: 403793 - RNA, 19 nt, Artificial Sequence
  Description of Artificial Sequence: Synthetic oligonucleotide
  Sense Strand Starting at position 1084 of SEQ ID NO: 318623
uggcaucugcaggaaauua

SEQ ID NO: 403794 - RNA, 19 nt, Artificial Sequence
  Description of Artificial Sequence: Synthetic oligonucleotide
  Antisense Strand to SEQ ID NO: 403793
uaauuuccugcagaugcca

SEQ ID NO: 403795 - RNA, 19 nt, Artificial Sequence
  Description of Artificial Sequence: Synthetic oligonucleotide
  Sense Strand Starting at position 1084 of SEQ ID NO: 318681
uuaagucccugauauaaag

SEQ ID NO: 403796 - RNA, 19 nt, Artificial Sequence
  Description of Artificial Sequence: Synthetic oligonucleotide
  Antisense Strand to SEQ ID NO: 403795
cuuuauaucagggacuuaa

SEQ ID NO: 403797 - RNA, 19 nt, Artificial Sequence
  Description of Artificial Sequence: Synthetic oligonucleotide
  Sense Strand Starting at position 1084 of SEQ ID NO: 318691
gauauaaagugauguagua

SEQ ID NO: 403798 - RNA, 19 nt, Artificial Sequence
  Description of Artificial Sequence: Synthetic oligonucleotide
  Antisense Strand to SEQ ID NO: 403797
uacuacaucacuuuauauc

SEQ ID NO: 403799 - RNA, 19 nt, Artificial Sequence
  Description of Artificial Sequence: Synthetic oligonucleotide
  Sense Strand Starting at position 1084 of SEQ ID NO: 318747
aagucaucuccagauuacg

SEQ ID NO: 403800 - RNA, 19 nt, Artificial Sequence
  Description of Artificial Sequence: Synthetic oligonucleotide
  Antisense Strand to SEQ ID NO: 403799
cguaaucuggagaugacuu

SEQ ID NO: 403801 - RNA, 19 nt, Artificial Sequence
  Description of Artificial Sequence: Synthetic oligonucleotide
  Sense Strand Starting at position 1084 of SEQ ID NO: 319058
uacauuaaagccugaguga

SEQ ID NO: 403802 - RNA, 19 nt, Artificial Sequence
  Description of Artificial Sequence: Synthetic oligonucleotide
  Antisense Strand to SEQ ID NO: 403801
ucacucaggcuuuaaugua

SEQ ID NO: 403803 - RNA, 19 nt, Artificial Sequence
  Description of Artificial Sequence: Synthetic oligonucleotide
  Sense Strand Starting at position 1085 of SEQ ID NO: 315245
ucaaaucaucuugguaggu

SEQ ID NO: 403804 - RNA, 19 nt, Artificial Sequence
  Description of Artificial Sequence: Synthetic oligonucleotide
  Antisense Strand to SEQ ID NO: 403803
accuaccaagaugauuuga

SEQ ID NO: 403805 - RNA, 19 nt, Artificial Sequence
  Description of Artificial Sequence: Synthetic oligonucleotide
  Sense Strand Starting at position 1085 of SEQ ID NO: 315246
caaaucaucuugguaggua

SEQ ID NO: 403806 - RNA, 19 nt, Artificial Sequence
  Description of Artificial Sequence: Synthetic oligonucleotide
  Antisense Strand to SEQ ID NO: 403805
uaccuaccaagaugauuug

SEQ ID NO: 403807 - RNA, 19 nt, Artificial Sequence
  Description of Artificial Sequence: Synthetic oligonucleotide
  Sense Strand Starting at position 1085 of SEQ ID NO: 315317
gugcuuauauuacugauuu

SEQ ID NO: 403808 - RNA, 19 nt, Artificial Sequence
  Description of Artificial Sequence: Synthetic oligonucleotide
  Antisense Strand to SEQ ID NO: 403807
aaaucaguaauauaagcac

SEQ ID NO: 403809 - RNA, 19 nt, Artificial Sequence
  Description of Artificial Sequence: Synthetic oligonucleotide
  Sense Strand Starting at position 1085 of SEQ ID NO: 315501
agagguagccuauggaaua

SEQ ID NO: 403810 - RNA, 19 nt, Artificial Sequence
  Description of Artificial Sequence: Synthetic oligonucleotide
  Antisense Strand to SEQ ID NO: 403809
uauuccauaggcuaccucu

SEQ ID NO: 403811 - RNA, 19 nt, Artificial Sequence
  Description of Artificial Sequence: Synthetic oligonucleotide
  Sense Strand Starting at position 1085 of SEQ ID NO: 315524
auauccaagcagugagauu

SEQ ID NO: 403812 - RNA, 19 nt, Artificial Sequence
  Description of Artificial Sequence: Synthetic oligonucleotide
  Antisense Strand to SEQ ID NO: 403811
aaucucacugcuuggauau

SEQ ID NO: 403813 - RNA, 19 nt, Artificial Sequence
  Description of Artificial Sequence: Synthetic oligonucleotide
  Sense Strand Starting at position 1085 of SEQ ID NO: 315689
gauuccuaaggguaagcua

SEQ ID NO: 403814 - RNA, 19 nt, Artificial Sequence
  Description of Artificial Sequence: Synthetic oligonucleotide
  Antisense Strand to SEQ ID NO: 403813
uagcuuacccuuaggaauc

SEQ ID NO: 403815 - RNA, 19 nt, Artificial Sequence
  Description of Artificial Sequence: Synthetic oligonucleotide
  Sense Strand Starting at position 1085 of SEQ ID NO: 315697
aggguaagcuaauugauca

SEQ ID NO: 403816 - RNA, 19 nt, Artificial Sequence
  Description of Artificial Sequence: Synthetic oligonucleotide
  Antisense Strand to SEQ ID NO: 403815
ugaucaauuagcuuacccu

SEQ ID NO: 403817 - RNA, 19 nt, Artificial Sequence
  Description of Artificial Sequence: Synthetic oligonucleotide
  Sense Strand Starting at position 1085 of SEQ ID NO: 315698
ggguaagcuaauugaucac

SEQ ID NO: 403818 - RNA, 19 nt, Artificial Sequence
  Description of Artificial Sequence: Synthetic oligonucleotide
  Antisense Strand to SEQ ID NO: 403817
gugaucaauuagcuuaccc

SEQ ID NO: 403819 - RNA, 19 nt, Artificial Sequence
  Description of Artificial Sequence: Synthetic oligonucleotide
  Sense Strand Starting at position 1085 of SEQ ID NO: 315716
ccuugacuuuaggcagagu

SEQ ID NO: 403820 - RNA, 19 nt, Artificial Sequence
  Description of Artificial Sequence: Synthetic oligonucleotide
  Antisense Strand to SEQ ID NO: 403819
acucugccuaaagucaagg

SEQ ID NO: 403821 - RNA, 19 nt, Artificial Sequence
  Description of Artificial Sequence: Synthetic oligonucleotide
  Sense Strand Starting at position 1085 of SEQ ID NO: 315717
cuugacuuuaggcagaguu

SEQ ID NO: 403822 - RNA, 19 nt, Artificial Sequence
  Description of Artificial Sequence: Synthetic oligonucleotide
  Antisense Strand to SEQ ID NO: 403821
aacucugccuaaagucaag

SEQ ID NO: 403823 - RNA, 19 nt, Artificial Sequence
  Description of Artificial Sequence: Synthetic oligonucleotide
  Sense Strand Starting at position 1085 of SEQ ID NO: 315719
ugacuuuaggcagaguucu

SEQ ID NO: 403824 - RNA, 19 nt, Artificial Sequence
  Description of Artificial Sequence: Synthetic oligonucleotide
  Antisense Strand to SEQ ID NO: 403823
agaacucugccuaaaguca

SEQ ID NO: 403825 - RNA, 19 nt, Artificial Sequence
  Description of Artificial Sequence: Synthetic oligonucleotide
  Sense Strand Starting at position 1085 of SEQ ID NO: 315725
uaggcagaguucuuaaauc

SEQ ID NO: 403826 - RNA, 19 nt, Artificial Sequence
  Description of Artificial Sequence: Synthetic oligonucleotide
  Antisense Strand to SEQ ID NO: 403825
gauuuaagaacucugccua

SEQ ID NO: 403827 - RNA, 19 nt, Artificial Sequence
  Description of Artificial Sequence: Synthetic oligonucleotide
  Sense Strand Starting at position 1085 of SEQ ID NO: 315836
uguaauauaucagucagaa

SEQ ID NO: 403828 - RNA, 19 nt, Artificial Sequence
  Description of Artificial Sequence: Synthetic oligonucleotide
  Antisense Strand to SEQ ID NO: 403827
uucugacugauauauuaca

SEQ ID NO: 403829 - RNA, 19 nt, Artificial Sequence
  Description of Artificial Sequence: Synthetic oligonucleotide
  Sense Strand Starting at position 1085 of SEQ ID NO: 315929
gguaucuguccucaguaca

SEQ ID NO: 403830 - RNA, 19 nt, Artificial Sequence
  Description of Artificial Sequence: Synthetic oligonucleotide
  Antisense Strand to SEQ ID NO: 403829
uguacugaggacagauacc

SEQ ID NO: 403831 - RNA, 19 nt, Artificial Sequence
  Description of Artificial Sequence: Synthetic oligonucleotide
  Sense Strand Starting at position 1085 of SEQ ID NO: 315989
guauauacaucuuugcaag

SEQ ID NO: 403832 - RNA, 19 nt, Artificial Sequence
  Description of Artificial Sequence: Synthetic oligonucleotide
  Antisense Strand to SEQ ID NO: 403831
cuugcaaagauguauauac

SEQ ID NO: 403833 - RNA, 19 nt, Artificial Sequence
  Description of Artificial Sequence: Synthetic oligonucleotide
  Sense Strand Starting at position 1085 of SEQ ID NO: 316009
agcccuaaauucuuuggga

SEQ ID NO: 403834 - RNA, 19 nt, Artificial Sequence
  Description of Artificial Sequence: Synthetic oligonucleotide
  Antisense Strand to SEQ ID NO: 403833
ucccaaagaauuuagggcu

SEQ ID NO: 403835 - RNA, 19 nt, Artificial Sequence
  Description of Artificial Sequence: Synthetic oligonucleotide
  Sense Strand Starting at position 1085 of SEQ ID NO: 316010
gcccuaaauucuuugggac

SEQ ID NO: 403836 - RNA, 19 nt, Artificial Sequence
  Description of Artificial Sequence: Synthetic oligonucleotide
  Antisense Strand to SEQ ID NO: 403835
gucccaaagaauuuagggc

SEQ ID NO: 403837 - RNA, 19 nt, Artificial Sequence
  Description of Artificial Sequence: Synthetic oligonucleotide
  Sense Strand Starting at position 1085 of SEQ ID NO: 316146
auaauagcuuguuugaaac

SEQ ID NO: 403838 - RNA, 19 nt, Artificial Sequence
  Description of Artificial Sequence: Synthetic oligonucleotide
  Antisense Strand to SEQ ID NO: 403837
guuucaaacaagcuauuau

SEQ ID NO: 403839 - RNA, 19 nt, Artificial Sequence
  Description of Artificial Sequence: Synthetic oligonucleotide
  Sense Strand Starting at position 1085 of SEQ ID NO: 316194
agcucacagcuugagaauu

SEQ ID NO: 403840 - RNA, 19 nt, Artificial Sequence
  Description of Artificial Sequence: Synthetic oligonucleotide
  Antisense Strand to SEQ ID NO: 403839
aauucucaagcugugagcu

SEQ ID NO: 403841 - RNA, 19 nt, Artificial Sequence
  Description of Artificial Sequence: Synthetic oligonucleotide
  Sense Strand Starting at position 1085 of SEQ ID NO: 316211
uuaugcaaucuggaguuua

SEQ ID NO: 403842 - RNA, 19 nt, Artificial Sequence
  Description of Artificial Sequence: Synthetic oligonucleotide
  Antisense Strand to SEQ ID NO: 403841
uaaacuccagauugcauaa

SEQ ID NO: 403843 - RNA, 19 nt, Artificial Sequence
  Description of Artificial Sequence: Synthetic oligonucleotide
  Sense Strand Starting at position 1085 of SEQ ID NO: 316568
ugaaacuuccauugguguu

SEQ ID NO: 403844 - RNA, 19 nt, Artificial Sequence
  Description of Artificial Sequence: Synthetic oligonucleotide
  Antisense Strand to SEQ ID NO: 403843
aacaccaauggaaguuuca

SEQ ID NO: 403845 - RNA, 19 nt, Artificial Sequence
  Description of Artificial Sequence: Synthetic oligonucleotide
  Sense Strand Starting at position 1085 of SEQ ID NO: 316578
auugguguucagcagaaga

SEQ ID NO: 403846 - RNA, 19 nt, Artificial Sequence
  Description of Artificial Sequence: Synthetic oligonucleotide
  Antisense Strand to SEQ ID NO: 403845
ucuucugcugaacaccaau

SEQ ID NO: 403847 - RNA, 19 nt, Artificial Sequence
  Description of Artificial Sequence: Synthetic oligonucleotide
  Sense Strand Starting at position 1085 of SEQ ID NO: 316580
ugguguucagcagaagacu

SEQ ID NO: 403848 - RNA, 19 nt, Artificial Sequence
  Description of Artificial Sequence: Synthetic oligonucleotide
  Antisense Strand to SEQ ID NO: 403847
agucuucugcugaacacca

SEQ ID NO: 403849 - RNA, 19 nt, Artificial Sequence
  Description of Artificial Sequence: Synthetic oligonucleotide
  Sense Strand Starting at position 1085 of SEQ ID NO: 316589
gcagaagacucugcacaca

SEQ ID NO: 403850 - RNA, 19 nt, Artificial Sequence
  Description of Artificial Sequence: Synthetic oligonucleotide
  Antisense Strand to SEQ ID NO: 403849
ugugugcagagucuucugc

SEQ ID NO: 403851 - RNA, 19 nt, Artificial Sequence
  Description of Artificial Sequence: Synthetic oligonucleotide
  Sense Strand Starting at position 1085 of SEQ ID NO: 316669
agacaagaaugcuugccaa

SEQ ID NO: 403852 - RNA, 19 nt, Artificial Sequence
  Description of Artificial Sequence: Synthetic oligonucleotide
  Antisense Strand to SEQ ID NO: 403851
uuggcaagcauucuugucu

SEQ ID NO: 403853 - RNA, 19 nt, Artificial Sequence
  Description of Artificial Sequence: Synthetic oligonucleotide
  Sense Strand Starting at position 1085 of SEQ ID NO: 316684
ccaaguuucccuggacauu

SEQ ID NO: 403854 - RNA, 19 nt, Artificial Sequence
  Description of Artificial Sequence: Synthetic oligonucleotide
  Antisense Strand to SEQ ID NO: 403853
aauguccagggaaacuugg

SEQ ID NO: 403855 - RNA, 19 nt, Artificial Sequence
  Description of Artificial Sequence: Synthetic oligonucleotide
  Sense Strand Starting at position 1085 of SEQ ID NO: 316794
ugcugcuuugucuucuuau

SEQ ID NO: 403856 - RNA, 19 nt, Artificial Sequence
  Description of Artificial Sequence: Synthetic oligonucleotide
  Antisense Strand to SEQ ID NO: 403855
auaagaagacaaagcagca

SEQ ID NO: 403857 - RNA, 19 nt, Artificial Sequence
  Description of Artificial Sequence: Synthetic oligonucleotide
  Sense Strand Starting at position 1085 of SEQ ID NO: 316816
aaggaagcuucuguuuaga

SEQ ID NO: 403858 - RNA, 19 nt, Artificial Sequence
  Description of Artificial Sequence: Synthetic oligonucleotide
  Antisense Strand to SEQ ID NO: 403857
ucuaaacagaagcuuccuu

SEQ ID NO: 403859 - RNA, 19 nt, Artificial Sequence
  Description of Artificial Sequence: Synthetic oligonucleotide
  Sense Strand Starting at position 1085 of SEQ ID NO: 316818
ggaagcuucuguuuagauu

SEQ ID NO: 403860 - RNA, 19 nt, Artificial Sequence
  Description of Artificial Sequence: Synthetic oligonucleotide
  Antisense Strand to SEQ ID NO: 403859
aaucuaaacagaagcuucc

SEQ ID NO: 403861 - RNA, 19 nt, Artificial Sequence
  Description of Artificial Sequence: Synthetic oligonucleotide
  Sense Strand Starting at position 1085 of SEQ ID NO: 316935
ggaggccauuccucucaga

SEQ ID NO: 403862 - RNA, 19 nt, Artificial Sequence
  Description of Artificial Sequence: Synthetic oligonucleotide
  Antisense Strand to SEQ ID NO: 403861
ucugagaggaauggccucc

SEQ ID NO: 403863 - RNA, 19 nt, Artificial Sequence
  Description of Artificial Sequence: Synthetic oligonucleotide
  Sense Strand Starting at position 1085 of SEQ ID NO: 317331
augcuagagaacugauuag

SEQ ID NO: 403864 - RNA, 19 nt, Artificial Sequence
  Description of Artificial Sequence: Synthetic oligonucleotide
  Antisense Strand to SEQ ID NO: 403863
cuaaucaguucucuagcau

SEQ ID NO: 403865 - RNA, 19 nt, Artificial Sequence
  Description of Artificial Sequence: Synthetic oligonucleotide
  Sense Strand Starting at position 1085 of SEQ ID NO: 317347
uagaaagucuauguuuaag

SEQ ID NO: 403866 - RNA, 19 nt, Artificial Sequence
  Description of Artificial Sequence: Synthetic oligonucleotide
  Antisense Strand to SEQ ID NO: 403865
cuuaaacauagacuuucua

SEQ ID NO: 403867 - RNA, 19 nt, Artificial Sequence
  Description of Artificial Sequence: Synthetic oligonucleotide
  Sense Strand Starting at position 1085 of SEQ ID NO: 317751
ggguaacaauagcuguaau

SEQ ID NO: 403868 - RNA, 19 nt, Artificial Sequence
  Description of Artificial Sequence: Synthetic oligonucleotide
  Antisense Strand to SEQ ID NO: 403867
auuacagcuauuguuaccc

SEQ ID NO: 403869 - RNA, 19 nt, Artificial Sequence
  Description of Artificial Sequence: Synthetic oligonucleotide
  Sense Strand Starting at position 1085 of SEQ ID NO: 317889
cccagagguuaagaaauuu

SEQ ID NO: 403870 - RNA, 19 nt, Artificial Sequence
  Description of Artificial Sequence: Synthetic oligonucleotide
  Antisense Strand to SEQ ID NO: 403869
aaauuucuuaaccucuggg

SEQ ID NO: 403871 - RNA, 19 nt, Artificial Sequence
  Description of Artificial Sequence: Synthetic oligonucleotide
  Sense Strand Starting at position 1085 of SEQ ID NO: 317954
ugccaugacagcugggaaa

SEQ ID NO: 403872 - RNA, 19 nt, Artificial Sequence
  Description of Artificial Sequence: Synthetic oligonucleotide
  Antisense Strand to SEQ ID NO: 403871
uuucccagcugucauggca

SEQ ID NO: 403873 - RNA, 19 nt, Artificial Sequence
  Description of Artificial Sequence: Synthetic oligonucleotide
  Sense Strand Starting at position 1085 of SEQ ID NO: 318081
uuuggaagauaagaaagau

SEQ ID NO: 403874 - RNA, 19 nt, Artificial Sequence
  Description of Artificial Sequence: Synthetic oligonucleotide
  Antisense Strand to SEQ ID NO: 403873
aucuuucuuaucuuccaaa

SEQ ID NO: 403875 - RNA, 19 nt, Artificial Sequence
  Description of Artificial Sequence: Synthetic oligonucleotide
  Sense Strand Starting at position 1085 of SEQ ID NO: 318370
cggagcaagacuugaaaga

SEQ ID NO: 403876 - RNA, 19 nt, Artificial Sequence
  Description of Artificial Sequence: Synthetic oligonucleotide
  Antisense Strand to SEQ ID NO: 403875
ucuuucaagucuugcuccg

SEQ ID NO: 403877 - RNA, 19 nt, Artificial Sequence
  Description of Artificial Sequence: Synthetic oligonucleotide
  Sense Strand Starting at position 1085 of SEQ ID NO: 318577
auauacauuugggaaccau

SEQ ID NO: 403878 - RNA, 19 nt, Artificial Sequence
  Description of Artificial Sequence: Synthetic oligonucleotide
  Antisense Strand to SEQ ID NO: 403877
augguucccaaauguauau

SEQ ID NO: 403879 - RNA, 19 nt, Artificial Sequence
  Description of Artificial Sequence: Synthetic oligonucleotide
  Sense Strand Starting at position 1085 of SEQ ID NO: 318701
accaguuacuuucuaggua

SEQ ID NO: 403880 - RNA, 19 nt, Artificial Sequence
  Description of Artificial Sequence: Synthetic oligonucleotide
  Antisense Strand to SEQ ID NO: 403879
uaccuagaaaguaacuggu

SEQ ID NO: 403881 - RNA, 19 nt, Artificial Sequence
  Description of Artificial Sequence: Synthetic oligonucleotide
  Sense Strand Starting at position 1085 of SEQ ID NO: 319194
cauuucugacuguggcauu

SEQ ID NO: 403882 - RNA, 19 nt, Artificial Sequence
  Description of Artificial Sequence: Synthetic oligonucleotide
  Antisense Strand to SEQ ID NO: 403881
aaugccacagucagaaaug

SEQ ID NO: 403883 - RNA, 19 nt, Artificial Sequence
  Description of Artificial Sequence: Synthetic oligonucleotide
  Sense Strand Starting at position 1086 of SEQ ID NO: 315250
cagaaaguugccugcccau

SEQ ID NO: 403884 - RNA, 19 nt, Artificial Sequence
  Description of Artificial Sequence: Synthetic oligonucleotide
  Antisense Strand to SEQ ID NO: 403883
augggcaggcaacuuucug

SEQ ID NO: 403885 - RNA, 19 nt, Artificial Sequence
  Description of Artificial Sequence: Synthetic oligonucleotide
  Sense Strand Starting at position 1086 of SEQ ID NO: 315319
ccuuuauuccucugcaagg

SEQ ID NO: 403886 - RNA, 19 nt, Artificial Sequence
  Description of Artificial Sequence: Synthetic oligonucleotide
  Antisense Strand to SEQ ID NO: 403885
ccuugcagaggaauaaagg

SEQ ID NO: 403887 - RNA, 19 nt, Artificial Sequence
  Description of Artificial Sequence: Synthetic oligonucleotide
  Sense Strand Starting at position 1086 of SEQ ID NO: 315460
gaagaaggccuagaguagu

SEQ ID NO: 403888 - RNA, 19 nt, Artificial Sequence
  Description of Artificial Sequence: Synthetic oligonucleotide
  Antisense Strand to SEQ ID NO: 403887
acuacucuaggccuucuuc

SEQ ID NO: 403889 - RNA, 19 nt, Artificial Sequence
  Description of Artificial Sequence: Synthetic oligonucleotide
  Sense Strand Starting at position 1086 of SEQ ID NO: 315466
ggccuagaguagucuguga

SEQ ID NO: 403890 - RNA, 19 nt, Artificial Sequence
  Description of Artificial Sequence: Synthetic oligonucleotide
  Antisense Strand to SEQ ID NO: 403889
ucacagacuacucuaggcc

SEQ ID NO: 403891 - RNA, 19 nt, Artificial Sequence
  Description of Artificial Sequence: Synthetic oligonucleotide
  Sense Strand Starting at position 1086 of SEQ ID NO: 315470
uagaguagucugugagcaa

SEQ ID NO: 403892 - RNA, 19 nt, Artificial Sequence
  Description of Artificial Sequence: Synthetic oligonucleotide
  Antisense Strand to SEQ ID NO: 403891
uugcucacagacuacucua

SEQ ID NO: 403893 - RNA, 19 nt, Artificial Sequence
  Description of Artificial Sequence: Synthetic oligonucleotide
  Sense Strand Starting at position 1086 of SEQ ID NO: 315481
gugagcaaucuggaagguu

SEQ ID NO: 403894 - RNA, 19 nt, Artificial Sequence
  Description of Artificial Sequence: Synthetic oligonucleotide
  Antisense Strand to SEQ ID NO: 403893
aaccuuccagauugcucac

SEQ ID NO: 403895 - RNA, 19 nt, Artificial Sequence
  Description of Artificial Sequence: Synthetic oligonucleotide
  Sense Strand Starting at position 1086 of SEQ ID NO: 315504
gggcuuugagaaugaugau

SEQ ID NO: 403896 - RNA, 19 nt, Artificial Sequence
  Description of Artificial Sequence: Synthetic oligonucleotide
  Antisense Strand to SEQ ID NO: 403895
aucaucauucucaaagccc

SEQ ID NO: 403897 - RNA, 19 nt, Artificial Sequence
  Description of Artificial Sequence: Synthetic oligonucleotide
  Sense Strand Starting at position 1086 of SEQ ID NO: 315558
ggcauaucacaacacguua

SEQ ID NO: 403898 - RNA, 19 nt, Artificial Sequence
  Description of Artificial Sequence: Synthetic oligonucleotide
  Antisense Strand to SEQ ID NO: 403897
uaacguguugugauaugcc

SEQ ID NO: 403899 - RNA, 19 nt, Artificial Sequence
  Description of Artificial Sequence: Synthetic oligonucleotide
  Sense Strand Starting at position 1086 of SEQ ID NO: 315569
acacguuagggcuggugaa

SEQ ID NO: 403900 - RNA, 19 nt, Artificial Sequence
  Description of Artificial Sequence: Synthetic oligonucleotide
  Antisense Strand to SEQ ID NO: 403899
uucaccagcccuaacgugu

SEQ ID NO: 403901 - RNA, 19 nt, Artificial Sequence
  Description of Artificial Sequence: Synthetic oligonucleotide
  Sense Strand Starting at position 1086 of SEQ ID NO: 315819
aaaguuaagcuuugguuaa

SEQ ID NO: 403902 - RNA, 19 nt, Artificial Sequence
  Description of Artificial Sequence: Synthetic oligonucleotide
  Antisense Strand to SEQ ID NO: 403901
uuaaccaaagcuuaacuuu

SEQ ID NO: 403903 - RNA, 19 nt, Artificial Sequence
  Description of Artificial Sequence: Synthetic oligonucleotide
  Sense Strand Starting at position 1086 of SEQ ID NO: 315821
aguuaagcuuugguuaaca

SEQ ID NO: 403904 - RNA, 19 nt, Artificial Sequence
  Description of Artificial Sequence: Synthetic oligonucleotide
  Antisense Strand to SEQ ID NO: 403903
uguuaaccaaagcuuaacu

SEQ ID NO: 403905 - RNA, 19 nt, Artificial Sequence
  Description of Artificial Sequence: Synthetic oligonucleotide
  Sense Strand Starting at position 1086 of SEQ ID NO: 315823
uuaagcuuugguuaacaca

SEQ ID NO: 403906 - RNA, 19 nt, Artificial Sequence
  Description of Artificial Sequence: Synthetic oligonucleotide
  Antisense Strand to SEQ ID NO: 403905
uguguuaaccaaagcuuaa

SEQ ID NO: 403907 - RNA, 19 nt, Artificial Sequence
  Description of Artificial Sequence: Synthetic oligonucleotide
  Sense Strand Starting at position 1086 of SEQ ID NO: 315834
uuaacacauuggucucuga

SEQ ID NO: 403908 - RNA, 19 nt, Artificial Sequence
  Description of Artificial Sequence: Synthetic oligonucleotide
  Antisense Strand to SEQ ID NO: 403907
ucagagaccaauguguuaa

SEQ ID NO: 403909 - RNA, 19 nt, Artificial Sequence
  Description of Artificial Sequence: Synthetic oligonucleotide
  Sense Strand Starting at position 1086 of SEQ ID NO: 315837
acacauuggucucugacaa

SEQ ID NO: 403910 - RNA, 19 nt, Artificial Sequence
  Description of Artificial Sequence: Synthetic oligonucleotide
  Antisense Strand to SEQ ID NO: 403909
uugucagagaccaaugugu

SEQ ID NO: 403911 - RNA, 19 nt, Artificial Sequence
  Description of Artificial Sequence: Synthetic oligonucleotide
  Sense Strand Starting at position 1086 of SEQ ID NO: 315899
gugaauguuuaaucccaga

SEQ ID NO: 403912 - RNA, 19 nt, Artificial Sequence
  Description of Artificial Sequence: Synthetic oligonucleotide
  Antisense Strand to SEQ ID NO: 403911
ucugggauuaaacauucac

SEQ ID NO: 403913 - RNA, 19 nt, Artificial Sequence
  Description of Artificial Sequence: Synthetic oligonucleotide
  Sense Strand Starting at position 1086 of SEQ ID NO: 315934
agaugagaauuauacagau

SEQ ID NO: 403914 - RNA, 19 nt, Artificial Sequence
  Description of Artificial Sequence: Synthetic oligonucleotide
  Antisense Strand to SEQ ID NO: 403913
aucuguauaauucucaucu

SEQ ID NO: 403915 - RNA, 19 nt, Artificial Sequence
  Description of Artificial Sequence: Synthetic oligonucleotide
  Sense Strand Starting at position 1086 of SEQ ID NO: 316137
gggacuggaugcuuucaga

SEQ ID NO: 403916 - RNA, 19 nt, Artificial Sequence
  Description of Artificial Sequence: Synthetic oligonucleotide
  Antisense Strand to SEQ ID NO: 403915
ucugaaagcauccaguccc

SEQ ID NO: 403917 - RNA, 19 nt, Artificial Sequence
  Description of Artificial Sequence: Synthetic oligonucleotide
  Sense Strand Starting at position 1086 of SEQ ID NO: 316239
cgcuuaguuauccacagga

SEQ ID NO: 403918 - RNA, 19 nt, Artificial Sequence
  Description of Artificial Sequence: Synthetic oligonucleotide
  Antisense Strand to SEQ ID NO: 403917
uccuguggauaacuaagcg

SEQ ID NO: 403919 - RNA, 19 nt, Artificial Sequence
  Description of Artificial Sequence: Synthetic oligonucleotide
  Sense Strand Starting at position 1086 of SEQ ID NO: 316255
ggacaaguccuagaguccu

SEQ ID NO: 403920 - RNA, 19 nt, Artificial Sequence
  Description of Artificial Sequence: Synthetic oligonucleotide
  Antisense Strand to SEQ ID NO: 403919
aggacucuaggacuugucc

SEQ ID NO: 403921 - RNA, 19 nt, Artificial Sequence
  Description of Artificial Sequence: Synthetic oligonucleotide
  Sense Strand Starting at position 1086 of SEQ ID NO: 316263
ccuagaguccuggauguuc

SEQ ID NO: 403922 - RNA, 19 nt, Artificial Sequence
  Description of Artificial Sequence: Synthetic oligonucleotide
  Antisense Strand to SEQ ID NO: 403921
gaacauccaggacucuagg

SEQ ID NO: 403923 - RNA, 19 nt, Artificial Sequence
  Description of Artificial Sequence: Synthetic oligonucleotide
  Sense Strand Starting at position 1086 of SEQ ID NO: 316675
aacauaugugcccaugguu

SEQ ID NO: 403924 - RNA, 19 nt, Artificial Sequence
  Description of Artificial Sequence: Synthetic oligonucleotide
  Antisense Strand to SEQ ID NO: 403923
aaccaugggcacauauguu

SEQ ID NO: 403925 - RNA, 19 nt, Artificial Sequence
  Description of Artificial Sequence: Synthetic oligonucleotide
  Sense Strand Starting at position 1086 of SEQ ID NO: 317265
uggugauagcugcauuaau

SEQ ID NO: 403926 - RNA, 19 nt, Artificial Sequence
  Description of Artificial Sequence: Synthetic oligonucleotide
  Antisense Strand to SEQ ID NO: 403925
auuaaugcagcuaucacca

SEQ ID NO: 403927 - RNA, 19 nt, Artificial Sequence
  Description of Artificial Sequence: Synthetic oligonucleotide
  Sense Strand Starting at position 1086 of SEQ ID NO: 317329
cuaggugugacuugggaag

SEQ ID NO: 403928 - RNA, 19 nt, Artificial Sequence
  Description of Artificial Sequence: Synthetic oligonucleotide
  Antisense Strand to SEQ ID NO: 403927
cuucccaagucacaccuag

SEQ ID NO: 403929 - RNA, 19 nt, Artificial Sequence
  Description of Artificial Sequence: Synthetic oligonucleotide
  Sense Strand Starting at position 1086 of SEQ ID NO: 317813
gagugagcuuagccaaaug

SEQ ID NO: 403930 - RNA, 19 nt, Artificial Sequence
  Description of Artificial Sequence: Synthetic oligonucleotide
  Antisense Strand to SEQ ID NO: 403929
cauuuggcuaagcucacuc

SEQ ID NO: 403931 - RNA, 19 nt, Artificial Sequence
  Description of Artificial Sequence: Synthetic oligonucleotide
  Sense Strand Starting at position 1086 of SEQ ID NO: 317827
aaauguuaagauggcuuau

SEQ ID NO: 403932 - RNA, 19 nt, Artificial Sequence
  Description of Artificial Sequence: Synthetic oligonucleotide
  Antisense Strand to SEQ ID NO: 403931
auaagccaucuuaacauuu

SEQ ID NO: 403933 - RNA, 19 nt, Artificial Sequence
  Description of Artificial Sequence: Synthetic oligonucleotide
  Sense Strand Starting at position 1086 of SEQ ID NO: 317829
auguuaagauggcuuauag

SEQ ID NO: 403934 - RNA, 19 nt, Artificial Sequence
  Description of Artificial Sequence: Synthetic oligonucleotide
  Antisense Strand to SEQ ID NO: 403933
cuauaagccaucuuaacau

SEQ ID NO: 403935 - RNA, 19 nt, Artificial Sequence
  Description of Artificial Sequence: Synthetic oligonucleotide
  Sense Strand Starting at position 1086 of SEQ ID NO: 318055
gcacuuagccugcagauaa

SEQ ID NO: 403936 - RNA, 19 nt, Artificial Sequence
  Description of Artificial Sequence: Synthetic oligonucleotide
  Antisense Strand to SEQ ID NO: 403935
uuaucugcaggcuaagugc

SEQ ID NO: 403937 - RNA, 19 nt, Artificial Sequence
  Description of Artificial Sequence: Synthetic oligonucleotide
  Sense Strand Starting at position 1086 of SEQ ID NO: 318097
ccucuugauccugaugauu

SEQ ID NO: 403938 - RNA, 19 nt, Artificial Sequence
  Description of Artificial Sequence: Synthetic oligonucleotide
  Antisense Strand to SEQ ID NO: 403937
aaucaucaggaucaagagg

SEQ ID NO: 403939 - RNA, 19 nt, Artificial Sequence
  Description of Artificial Sequence: Synthetic oligonucleotide
  Sense Strand Starting at position 1086 of SEQ ID NO: 318350
ugagcaaugucagugacaa

SEQ ID NO: 403940 - RNA, 19 nt, Artificial Sequence
  Description of Artificial Sequence: Synthetic oligonucleotide
  Antisense Strand to SEQ ID NO: 403939
uugucacugacauugcuca

SEQ ID NO: 403941 - RNA, 19 nt, Artificial Sequence
  Description of Artificial Sequence: Synthetic oligonucleotide
  Sense Strand Starting at position 1086 of SEQ ID NO: 318351
gagcaaugucagugacaau

SEQ ID NO: 403942 - RNA, 19 nt, Artificial Sequence
  Description of Artificial Sequence: Synthetic oligonucleotide
  Antisense Strand to SEQ ID NO: 403941
auugucacugacauugcuc

SEQ ID NO: 403943 - RNA, 19 nt, Artificial Sequence
  Description of Artificial Sequence: Synthetic oligonucleotide
  Sense Strand Starting at position 1086 of SEQ ID NO: 318581
gaagccuguuaaucaguca

SEQ ID NO: 403944 - RNA, 19 nt, Artificial Sequence
  Description of Artificial Sequence: Synthetic oligonucleotide
  Antisense Strand to SEQ ID NO: 403943
ugacugauuaacaggcuuc

SEQ ID NO: 403945 - RNA, 19 nt, Artificial Sequence
  Description of Artificial Sequence: Synthetic oligonucleotide
  Sense Strand Starting at position 1086 of SEQ ID NO: 318741
ucacuuagcuuccuugagu

SEQ ID NO: 403946 - RNA, 19 nt, Artificial Sequence
  Description of Artificial Sequence: Synthetic oligonucleotide
  Antisense Strand to SEQ ID NO: 403945
acucaaggaagcuaaguga

SEQ ID NO: 403947 - RNA, 19 nt, Artificial Sequence
  Description of Artificial Sequence: Synthetic oligonucleotide
  Sense Strand Starting at position 1086 of SEQ ID NO: 318744
cuuagcuuccuugaguguu

SEQ ID NO: 403948 - RNA, 19 nt, Artificial Sequence
  Description of Artificial Sequence: Synthetic oligonucleotide
  Antisense Strand to SEQ ID NO: 403947
aacacucaaggaagcuaag

SEQ ID NO: 403949 - RNA, 19 nt, Artificial Sequence
  Description of Artificial Sequence: Synthetic oligonucleotide
  Sense Strand Starting at position 1086 of SEQ ID NO: 318750
uuccuugaguguucuuauu

SEQ ID NO: 403950 - RNA, 19 nt, Artificial Sequence
  Description of Artificial Sequence: Synthetic oligonucleotide
  Antisense Strand to SEQ ID NO: 403949
aauaagaacacucaaggaa

SEQ ID NO: 403951 - RNA, 19 nt, Artificial Sequence
  Description of Artificial Sequence: Synthetic oligonucleotide
  Sense Strand Starting at position 1086 of SEQ ID NO: 318752
ccuugaguguucuuauucu

SEQ ID NO: 403952 - RNA, 19 nt, Artificial Sequence
  Description of Artificial Sequence: Synthetic oligonucleotide
  Antisense Strand to SEQ ID NO: 403951
agaauaagaacacucaagg

SEQ ID NO: 403953 - RNA, 19 nt, Artificial Sequence
  Description of Artificial Sequence: Synthetic oligonucleotide
  Sense Strand Starting at position 1086 of SEQ ID NO: 318927
uuuguuuggcuccaagcaa

SEQ ID NO: 403954 - RNA, 19 nt, Artificial Sequence
  Description of Artificial Sequence: Synthetic oligonucleotide
  Antisense Strand to SEQ ID NO: 403953
uugcuuggagccaaacaaa

SEQ ID NO: 403955 - RNA, 19 nt, Artificial Sequence
  Description of Artificial Sequence: Synthetic oligonucleotide
  Sense Strand Starting at position 1086 of SEQ ID NO: 319043
gguaaaggauggucucuaa

SEQ ID NO: 403956 - RNA, 19 nt, Artificial Sequence
  Description of Artificial Sequence: Synthetic oligonucleotide
  Antisense Strand to SEQ ID NO: 403955
uuagagaccauccuuuacc

SEQ ID NO: 403957 - RNA, 19 nt, Artificial Sequence
  Description of Artificial Sequence: Synthetic oligonucleotide
  Sense Strand Starting at position 1086 of SEQ ID NO: 319130
aagagugaggccugaucaa

SEQ ID NO: 403958 - RNA, 19 nt, Artificial Sequence
  Description of Artificial Sequence: Synthetic oligonucleotide
  Antisense Strand to SEQ ID NO: 403957
uugaucaggccucacucuu

SEQ ID NO: 403959 - RNA, 19 nt, Artificial Sequence
  Description of Artificial Sequence: Synthetic oligonucleotide
  Sense Strand Starting at position 1086 of SEQ ID NO: 319209
ccgaaugucacuggucuca

SEQ ID NO: 403960 - RNA, 19 nt, Artificial Sequence
  Description of Artificial Sequence: Synthetic oligonucleotide
  Antisense Strand to SEQ ID NO: 403959
ugagaccagugacauucgg

SEQ ID NO: 403961 - RNA, 19 nt, Artificial Sequence
  Description of Artificial Sequence: Synthetic oligonucleotide
  Sense Strand Starting at position 1086 of SEQ ID NO: 319211
gaaugucacuggucucaca

SEQ ID NO: 403962 - RNA, 19 nt, Artificial Sequence
  Description of Artificial Sequence: Synthetic oligonucleotide
  Antisense Strand to SEQ ID NO: 403961
ugugagaccagugacauuc

SEQ ID NO: 403963 - RNA, 19 nt, Artificial Sequence
  Description of Artificial Sequence: Synthetic oligonucleotide
  Sense Strand Starting at position 1087 of SEQ ID NO: 315277
gacucuguguccuguggga

SEQ ID NO: 403964 - RNA, 19 nt, Artificial Sequence
  Description of Artificial Sequence: Synthetic oligonucleotide
  Antisense Strand to SEQ ID NO: 403963
ucccacaggacacagaguc

SEQ ID NO: 403965 - RNA, 19 nt, Artificial Sequence
  Description of Artificial Sequence: Synthetic oligonucleotide
  Sense Strand Starting at position 1087 of SEQ ID NO: 315279
cucuguguccugugggauc

SEQ ID NO: 403966 - RNA, 19 nt, Artificial Sequence
  Description of Artificial Sequence: Synthetic oligonucleotide
  Antisense Strand to SEQ ID NO: 403965
gaucccacaggacacagag

SEQ ID NO: 403967 - RNA, 19 nt, Artificial Sequence
  Description of Artificial Sequence: Synthetic oligonucleotide
  Sense Strand Starting at position 1087 of SEQ ID NO: 315824
gggacucacuugucaguua

SEQ ID NO: 403968 - RNA, 19 nt, Artificial Sequence
  Description of Artificial Sequence: Synthetic oligonucleotide
  Antisense Strand to SEQ ID NO: 403967
uaacugacaagugaguccc

SEQ ID NO: 403969 - RNA, 19 nt, Artificial Sequence
  Description of Artificial Sequence: Synthetic oligonucleotide
  Sense Strand Starting at position 1087 of SEQ ID NO: 315825
ggacucacuugucaguuau

SEQ ID NO: 403970 - RNA, 19 nt, Artificial Sequence
  Description of Artificial Sequence: Synthetic oligonucleotide
  Antisense Strand to SEQ ID NO: 403969
auaacugacaagugagucc

SEQ ID NO: 403971 - RNA, 19 nt, Artificial Sequence
  Description of Artificial Sequence: Synthetic oligonucleotide
  Sense Strand Starting at position 1087 of SEQ ID NO: 315827
acucacuugucaguuauga

SEQ ID NO: 403972 - RNA, 19 nt, Artificial Sequence
  Description of Artificial Sequence: Synthetic oligonucleotide
  Antisense Strand to SEQ ID NO: 403971
ucauaacugacaagugagu

SEQ ID NO: 403973 - RNA, 19 nt, Artificial Sequence
  Description of Artificial Sequence: Synthetic oligonucleotide
  Sense Strand Starting at position 1087 of SEQ ID NO: 315930
agucaaacugugggucaga

SEQ ID NO: 403974 - RNA, 19 nt, Artificial Sequence
  Description of Artificial Sequence: Synthetic oligonucleotide
  Antisense Strand to SEQ ID NO: 403973
ucugacccacaguuugacu

SEQ ID NO: 403975 - RNA, 19 nt, Artificial Sequence
  Description of Artificial Sequence: Synthetic oligonucleotide
  Sense Strand Starting at position 1087 of SEQ ID NO: 315994
gacucaucccagcguggga

SEQ ID NO: 403976 - RNA, 19 nt, Artificial Sequence
  Description of Artificial Sequence: Synthetic oligonucleotide
  Antisense Strand to SEQ ID NO: 403975
ucccacgcugggaugaguc

SEQ ID NO: 403977 - RNA, 19 nt, Artificial Sequence
  Description of Artificial Sequence: Synthetic oligonucleotide
  Sense Strand Starting at position 1087 of SEQ ID NO: 316262
agggcggucuguguuguaa

SEQ ID NO: 403978 - RNA, 19 nt, Artificial Sequence
  Description of Artificial Sequence: Synthetic oligonucleotide
  Antisense Strand to SEQ ID NO: 403977
uuacaacacagaccgcccu

SEQ ID NO: 403979 - RNA, 19 nt, Artificial Sequence
  Description of Artificial Sequence: Synthetic oligonucleotide
  Sense Strand Starting at position 1087 of SEQ ID NO: 316263
gggcggucuguguuguaaa

SEQ ID NO: 403980 - RNA, 19 nt, Artificial Sequence
  Description of Artificial Sequence: Synthetic oligonucleotide
  Antisense Strand to SEQ ID NO: 403979
uuuacaacacagaccgccc

SEQ ID NO: 403981 - RNA, 19 nt, Artificial Sequence
  Description of Artificial Sequence: Synthetic oligonucleotide
  Sense Strand Starting at position 1087 of SEQ ID NO: 316315
guaagagaugccugaucaa

SEQ ID NO: 403982 - RNA, 19 nt, Artificial Sequence
  Description of Artificial Sequence: Synthetic oligonucleotide
  Antisense Strand to SEQ ID NO: 403981
uugaucaggcaucucuuac

SEQ ID NO: 403983 - RNA, 19 nt, Artificial Sequence
  Description of Artificial Sequence: Synthetic oligonucleotide
  Sense Strand Starting at position 1087 of SEQ ID NO: 316318
agagaugccugaucaaagc

SEQ ID NO: 403984 - RNA, 19 nt, Artificial Sequence
  Description of Artificial Sequence: Synthetic oligonucleotide
  Antisense Strand to SEQ ID NO: 403983
gcuuugaucaggcaucucu

SEQ ID NO: 403985 - RNA, 19 nt, Artificial Sequence
  Description of Artificial Sequence: Synthetic oligonucleotide
  Sense Strand Starting at position 1087 of SEQ ID NO: 316396
agcgauuucuuggacagau

SEQ ID NO: 403986 - RNA, 19 nt, Artificial Sequence
  Description of Artificial Sequence: Synthetic oligonucleotide
  Antisense Strand to SEQ ID NO: 403985
aucuguccaagaaaucgcu

SEQ ID NO: 403987 - RNA, 19 nt, Artificial Sequence
  Description of Artificial Sequence: Synthetic oligonucleotide
  Sense Strand Starting at position 1087 of SEQ ID NO: 316609
ccuguaggguaguuacaga

SEQ ID NO: 403988 - RNA, 19 nt, Artificial Sequence
  Description of Artificial Sequence: Synthetic oligonucleotide
  Antisense Strand to SEQ ID NO: 403987
ucuguaacuacccuacagg

SEQ ID NO: 403989 - RNA, 19 nt, Artificial Sequence
  Description of Artificial Sequence: Synthetic oligonucleotide
  Sense Strand Starting at position 1087 of SEQ ID NO: 317305
ucccuugcuuucuuaguua

SEQ ID NO: 403990 - RNA, 19 nt, Artificial Sequence
  Description of Artificial Sequence: Synthetic oligonucleotide
  Antisense Strand to SEQ ID NO: 403989
uaacuaagaaagcaaggga

SEQ ID NO: 403991 - RNA, 19 nt, Artificial Sequence
  Description of Artificial Sequence: Synthetic oligonucleotide
  Sense Strand Starting at position 1087 of SEQ ID NO: 317344
gcccaaccauccuggaguu

SEQ ID NO: 403992 - RNA, 19 nt, Artificial Sequence
  Description of Artificial Sequence: Synthetic oligonucleotide
  Antisense Strand to SEQ ID NO: 403991
aacuccaggaugguugggc

SEQ ID NO: 403993 - RNA, 19 nt, Artificial Sequence
  Description of Artificial Sequence: Synthetic oligonucleotide
  Sense Strand Starting at position 1087 of SEQ ID NO: 317401
gugcuucuguugucaugaa

SEQ ID NO: 403994 - RNA, 19 nt, Artificial Sequence
  Description of Artificial Sequence: Synthetic oligonucleotide
  Antisense Strand to SEQ ID NO: 403993
uucaugacaacagaagcac

SEQ ID NO: 403995 - RNA, 19 nt, Artificial Sequence
  Description of Artificial Sequence: Synthetic oligonucleotide
  Sense Strand Starting at position 1087 of SEQ ID NO: 317408
uguugucaugaaggacuaa

SEQ ID NO: 403996 - RNA, 19 nt, Artificial Sequence
  Description of Artificial Sequence: Synthetic oligonucleotide
  Antisense Strand to SEQ ID NO: 403995
uuaguccuucaugacaaca

SEQ ID NO: 403997 - RNA, 19 nt, Artificial Sequence
  Description of Artificial Sequence: Synthetic oligonucleotide
  Sense Strand Starting at position 1087 of SEQ ID NO: 317420
ggacuaaguucuuaggaac

SEQ ID NO: 403998 - RNA, 19 nt, Artificial Sequence
  Description of Artificial Sequence: Synthetic oligonucleotide
  Antisense Strand to SEQ ID NO: 403997
guuccuaagaacuuagucc

SEQ ID NO: 403999 - RNA, 19 nt, Artificial Sequence
  Description of Artificial Sequence: Synthetic oligonucleotide
  Sense Strand Starting at position 1087 of SEQ ID NO: 317485
cugagacaccaguggucuu

SEQ ID NO: 404000 - RNA, 19 nt, Artificial Sequence
  Description of Artificial Sequence: Synthetic oligonucleotide
  Antisense Strand to SEQ ID NO: 403999
aagaccacuggugucucag

SEQ ID NO: 404001 - RNA, 19 nt, Artificial Sequence
  Description of Artificial Sequence: Synthetic oligonucleotide
  Sense Strand Starting at position 1087 of SEQ ID NO: 317709
aguacugacugucagcaua

SEQ ID NO: 404002 - RNA, 19 nt, Artificial Sequence
  Description of Artificial Sequence: Synthetic oligonucleotide
  Antisense Strand to SEQ ID NO: 404001
uaugcugacagucaguacu

SEQ ID NO: 404003 - RNA, 19 nt, Artificial Sequence
  Description of Artificial Sequence: Synthetic oligonucleotide
  Sense Strand Starting at position 1087 of SEQ ID NO: 317712
acugacugucagcauauua

SEQ ID NO: 404004 - RNA, 19 nt, Artificial Sequence
  Description of Artificial Sequence: Synthetic oligonucleotide
  Antisense Strand to SEQ ID NO: 404003
uaauaugcugacagucagu

SEQ ID NO: 404005 - RNA, 19 nt, Artificial Sequence
  Description of Artificial Sequence: Synthetic oligonucleotide
  Sense Strand Starting at position 1087 of SEQ ID NO: 317847
aagcgagccuucucuaaag

SEQ ID NO: 404006 - RNA, 19 nt, Artificial Sequence
  Description of Artificial Sequence: Synthetic oligonucleotide
  Antisense Strand to SEQ ID NO: 404005
cuuuagagaaggcucgcuu

SEQ ID NO: 404007 - RNA, 19 nt, Artificial Sequence
  Description of Artificial Sequence: Synthetic oligonucleotide
  Sense Strand Starting at position 1087 of SEQ ID NO: 317849
gcgagccuucucuaaagga

SEQ ID NO: 404008 - RNA, 19 nt, Artificial Sequence
  Description of Artificial Sequence: Synthetic oligonucleotide
  Antisense Strand to SEQ ID NO: 404007
uccuuuagagaaggcucgc

SEQ ID NO: 404009 - RNA, 19 nt, Artificial Sequence
  Description of Artificial Sequence: Synthetic oligonucleotide
  Sense Strand Starting at position 1087 of SEQ ID NO: 317876
ucaaguugauucugcaaga

SEQ ID NO: 404010 - RNA, 19 nt, Artificial Sequence
  Description of Artificial Sequence: Synthetic oligonucleotide
  Antisense Strand to SEQ ID NO: 404009
ucuugcagaaucaacuuga

SEQ ID NO: 404011 - RNA, 19 nt, Artificial Sequence
  Description of Artificial Sequence: Synthetic oligonucleotide
  Sense Strand Starting at position 1087 of SEQ ID NO: 317877
caaguugauucugcaagac

SEQ ID NO: 404012 - RNA, 19 nt, Artificial Sequence
  Description of Artificial Sequence: Synthetic oligonucleotide
  Antisense Strand to SEQ ID NO: 404011
gucuugcagaaucaacuug

SEQ ID NO: 404013 - RNA, 19 nt, Artificial Sequence
  Description of Artificial Sequence: Synthetic oligonucleotide
  Sense Strand Starting at position 1087 of SEQ ID NO: 317889
gcaagacucucacagaggu

SEQ ID NO: 404014 - RNA, 19 nt, Artificial Sequence
  Description of Artificial Sequence: Synthetic oligonucleotide
  Antisense Strand to SEQ ID NO: 404013
accucugugagagucuugc

SEQ ID NO: 404015 - RNA, 19 nt, Artificial Sequence
  Description of Artificial Sequence: Synthetic oligonucleotide
  Sense Strand Starting at position 1087 of SEQ ID NO: 317983
uuagacugcagauguugaa

SEQ ID NO: 404016 - RNA, 19 nt, Artificial Sequence
  Description of Artificial Sequence: Synthetic oligonucleotide
  Antisense Strand to SEQ ID NO: 404015
uucaacaucugcagucuaa

SEQ ID NO: 404017 - RNA, 19 nt, Artificial Sequence
  Description of Artificial Sequence: Synthetic oligonucleotide
  Sense Strand Starting at position 1087 of SEQ ID NO: 317986
gacugcagauguugaaacu

SEQ ID NO: 404018 - RNA, 19 nt, Artificial Sequence
  Description of Artificial Sequence: Synthetic oligonucleotide
  Antisense Strand to SEQ ID NO: 404017
aguuucaacaucugcaguc

SEQ ID NO: 404019 - RNA, 19 nt, Artificial Sequence
  Description of Artificial Sequence: Synthetic oligonucleotide
  Sense Strand Starting at position 1087 of SEQ ID NO: 317992
agauguugaaacugucaga

SEQ ID NO: 404020 - RNA, 19 nt, Artificial Sequence
  Description of Artificial Sequence: Synthetic oligonucleotide
  Antisense Strand to SEQ ID NO: 404019
ucugacaguuucaacaucu

SEQ ID NO: 404021 - RNA, 19 nt, Artificial Sequence
  Description of Artificial Sequence: Synthetic oligonucleotide
  Sense Strand Starting at position 1087 of SEQ ID NO: 317995
uguugaaacugucagauac

SEQ ID NO: 404022 - RNA, 19 nt, Artificial Sequence
  Description of Artificial Sequence: Synthetic oligonucleotide
  Antisense Strand to SEQ ID NO: 404021
guaucugacaguuucaaca

SEQ ID NO: 404023 - RNA, 19 nt, Artificial Sequence
  Description of Artificial Sequence: Synthetic oligonucleotide
  Sense Strand Starting at position 1087 of SEQ ID NO: 317997
uugaaacugucagauacaa

SEQ ID NO: 404024 - RNA, 19 nt, Artificial Sequence
  Description of Artificial Sequence: Synthetic oligonucleotide
  Antisense Strand to SEQ ID NO: 404023
uuguaucugacaguuucaa

SEQ ID NO: 404025 - RNA, 19 nt, Artificial Sequence
  Description of Artificial Sequence: Synthetic oligonucleotide
  Sense Strand Starting at position 1087 of SEQ ID NO: 318020
uagaacagcuauuguauga

SEQ ID NO: 404026 - RNA, 19 nt, Artificial Sequence
  Description of Artificial Sequence: Synthetic oligonucleotide
  Antisense Strand to SEQ ID NO: 404025
ucauacaauagcuguucua

SEQ ID NO: 404027 - RNA, 19 nt, Artificial Sequence
  Description of Artificial Sequence: Synthetic oligonucleotide
  Sense Strand Starting at position 1087 of SEQ ID NO: 318024
acagcuauuguaugaacuu

SEQ ID NO: 404028 - RNA, 19 nt, Artificial Sequence
  Description of Artificial Sequence: Synthetic oligonucleotide
  Antisense Strand to SEQ ID NO: 404027
aaguucauacaauagcugu

SEQ ID NO: 404029 - RNA, 19 nt, Artificial Sequence
  Description of Artificial Sequence: Synthetic oligonucleotide
  Sense Strand Starting at position 1087 of SEQ ID NO: 318230
ggaauaaauugcugaaaug

SEQ ID NO: 404030 - RNA, 19 nt, Artificial Sequence
  Description of Artificial Sequence: Synthetic oligonucleotide
  Antisense Strand to SEQ ID NO: 404029
cauuucagcaauuuauucc

SEQ ID NO: 404031 - RNA, 19 nt, Artificial Sequence
  Description of Artificial Sequence: Synthetic oligonucleotide
  Sense Strand Starting at position 1087 of SEQ ID NO: 318237
auugcugaaaugugagaga

SEQ ID NO: 404032 - RNA, 19 nt, Artificial Sequence
  Description of Artificial Sequence: Synthetic oligonucleotide
  Antisense Strand to SEQ ID NO: 404031
ucucucacauuucagcaau

SEQ ID NO: 404033 - RNA, 19 nt, Artificial Sequence
  Description of Artificial Sequence: Synthetic oligonucleotide
  Sense Strand Starting at position 1087 of SEQ ID NO: 318258
gguaaagagacuugguaga

SEQ ID NO: 404034 - RNA, 19 nt, Artificial Sequence
  Description of Artificial Sequence: Synthetic oligonucleotide
  Antisense Strand to SEQ ID NO: 404033
ucuaccaagucucuuuacc

SEQ ID NO: 404035 - RNA, 19 nt, Artificial Sequence
  Description of Artificial Sequence: Synthetic oligonucleotide
  Sense Strand Starting at position 1087 of SEQ ID NO: 318384
auguaacuuaggcacgaua

SEQ ID NO: 404036 - RNA, 19 nt, Artificial Sequence
  Description of Artificial Sequence: Synthetic oligonucleotide
  Antisense Strand to SEQ ID NO: 404035
uaucgugccuaaguuacau

SEQ ID NO: 404037 - RNA, 19 nt, Artificial Sequence
  Description of Artificial Sequence: Synthetic oligonucleotide
  Sense Strand Starting at position 1087 of SEQ ID NO: 318386
guaacuuaggcacgauaaa

SEQ ID NO: 404038 - RNA, 19 nt, Artificial Sequence
  Description of Artificial Sequence: Synthetic oligonucleotide
  Antisense Strand to SEQ ID NO: 404037
uuuaucgugccuaaguuac

SEQ ID NO: 404039 - RNA, 19 nt, Artificial Sequence
  Description of Artificial Sequence: Synthetic oligonucleotide
  Sense Strand Starting at position 1087 of SEQ ID NO: 318898
ugucaagaacuaggguaaa

SEQ ID NO: 404040 - RNA, 19 nt, Artificial Sequence
  Description of Artificial Sequence: Synthetic oligonucleotide
  Antisense Strand to SEQ ID NO: 404039
uuuacccuaguucuugaca

SEQ ID NO: 404041 - RNA, 19 nt, Artificial Sequence
  Description of Artificial Sequence: Synthetic oligonucleotide
  Sense Strand Starting at position 1087 of SEQ ID NO: 318965
gagaccugauuugauugaa

SEQ ID NO: 404042 - RNA, 19 nt, Artificial Sequence
  Description of Artificial Sequence: Synthetic oligonucleotide
  Antisense Strand to SEQ ID NO: 404041
uucaaucaaaucaggucuc

SEQ ID NO: 404043 - RNA, 19 nt, Artificial Sequence
  Description of Artificial Sequence: Synthetic oligonucleotide
  Sense Strand Starting at position 1088 of SEQ ID NO: 315450
gaggcuuucugguugcuaa

SEQ ID NO: 404044 - RNA, 19 nt, Artificial Sequence
  Description of Artificial Sequence: Synthetic oligonucleotide
  Antisense Strand to SEQ ID NO: 404043
uuagcaaccagaaagccuc

SEQ ID NO: 404045 - RNA, 19 nt, Artificial Sequence
  Description of Artificial Sequence: Synthetic oligonucleotide
  Sense Strand Starting at position 1088 of SEQ ID NO: 315451
aggcuuucugguugcuaaa

SEQ ID NO: 404046 - RNA, 19 nt, Artificial Sequence
  Description of Artificial Sequence: Synthetic oligonucleotide
  Antisense Strand to SEQ ID NO: 404045
uuuagcaaccagaaagccu

SEQ ID NO: 404047 - RNA, 19 nt, Artificial Sequence
  Description of Artificial Sequence: Synthetic oligonucleotide
  Sense Strand Starting at position 1088 of SEQ ID NO: 315453
gcuuucugguugcuaaaua

SEQ ID NO: 404048 - RNA, 19 nt, Artificial Sequence
  Description of Artificial Sequence: Synthetic oligonucleotide
  Antisense Strand to SEQ ID NO: 404047
uauuuagcaaccagaaagc

SEQ ID NO: 404049 - RNA, 19 nt, Artificial Sequence
  Description of Artificial Sequence: Synthetic oligonucleotide
  Sense Strand Starting at position 1088 of SEQ ID NO: 315466
uaaauaugccagugagcau

SEQ ID NO: 404050 - RNA, 19 nt, Artificial Sequence
  Description of Artificial Sequence: Synthetic oligonucleotide
  Antisense Strand to SEQ ID NO: 404049
augcucacuggcauauuua

SEQ ID NO: 404051 - RNA, 19 nt, Artificial Sequence
  Description of Artificial Sequence: Synthetic oligonucleotide
  Sense Strand Starting at position 1088 of SEQ ID NO: 315564
aggagcaauauuugugugu

SEQ ID NO: 404052 - RNA, 19 nt, Artificial Sequence
  Description of Artificial Sequence: Synthetic oligonucleotide
  Antisense Strand to SEQ ID NO: 404051
acacacaaauauugcuccu

SEQ ID NO: 404053 - RNA, 19 nt, Artificial Sequence
  Description of Artificial Sequence: Synthetic oligonucleotide
  Sense Strand Starting at position 1088 of SEQ ID NO: 315700
agacaaucgucccucagua

SEQ ID NO: 404054 - RNA, 19 nt, Artificial Sequence
  Description of Artificial Sequence: Synthetic oligonucleotide
  Antisense Strand to SEQ ID NO: 404053
uacugagggacgauugucu

SEQ ID NO: 404055 - RNA, 19 nt, Artificial Sequence
  Description of Artificial Sequence: Synthetic oligonucleotide
  Sense Strand Starting at position 1088 of SEQ ID NO: 315702
acaaucgucccucaguaga

SEQ ID NO: 404056 - RNA, 19 nt, Artificial Sequence
  Description of Artificial Sequence: Synthetic oligonucleotide
  Antisense Strand to SEQ ID NO: 404055
ucuacugagggacgauugu

SEQ ID NO: 404057 - RNA, 19 nt, Artificial Sequence
  Description of Artificial Sequence: Synthetic oligonucleotide
  Sense Strand Starting at position 1088 of SEQ ID NO: 315704
aaucgucccucaguagaca

SEQ ID NO: 404058 - RNA, 19 nt, Artificial Sequence
  Description of Artificial Sequence: Synthetic oligonucleotide
  Antisense Strand to SEQ ID NO: 404057
ugucuacugagggacgauu

SEQ ID NO: 404059 - RNA, 19 nt, Artificial Sequence
  Description of Artificial Sequence: Synthetic oligonucleotide
  Sense Strand Starting at position 1088 of SEQ ID NO: 315839
cuggucuuccuauagaaug

SEQ ID NO: 404060 - RNA, 19 nt, Artificial Sequence
  Description of Artificial Sequence: Synthetic oligonucleotide
  Antisense Strand to SEQ ID NO: 404059
cauucuauaggaagaccag

SEQ ID NO: 404061 - RNA, 19 nt, Artificial Sequence
  Description of Artificial Sequence: Synthetic oligonucleotide
  Sense Strand Starting at position 1088 of SEQ ID NO: 315885
agcuccucucuuggaugaa

SEQ ID NO: 404062 - RNA, 19 nt, Artificial Sequence
  Description of Artificial Sequence: Synthetic oligonucleotide
  Antisense Strand to SEQ ID NO: 404061
uucauccaagagaggagcu

SEQ ID NO: 404063 - RNA, 19 nt, Artificial Sequence
  Description of Artificial Sequence: Synthetic oligonucleotide
  Sense Strand Starting at position 1088 of SEQ ID NO: 315956
cuauuucgcuguggaagaa

SEQ ID NO: 404064 - RNA, 19 nt, Artificial Sequence
  Description of Artificial Sequence: Synthetic oligonucleotide
  Antisense Strand to SEQ ID NO: 404063
uucuuccacagcgaaauag

SEQ ID NO: 404065 - RNA, 19 nt, Artificial Sequence
  Description of Artificial Sequence: Synthetic oligonucleotide
  Sense Strand Starting at position 1088 of SEQ ID NO: 316190
gggaauaguugagauauga

SEQ ID NO: 404066 - RNA, 19 nt, Artificial Sequence
  Description of Artificial Sequence: Synthetic oligonucleotide
  Antisense Strand to SEQ ID NO: 404065
ucauaucucaacuauuccc

SEQ ID NO: 404067 - RNA, 19 nt, Artificial Sequence
  Description of Artificial Sequence: Synthetic oligonucleotide
  Sense Strand Starting at position 1088 of SEQ ID NO: 316200
gagauaugauaugaggaag

SEQ ID NO: 404068 - RNA, 19 nt, Artificial Sequence
  Description of Artificial Sequence: Synthetic oligonucleotide
  Antisense Strand to SEQ ID NO: 404067
cuuccucauaucauaucuc

SEQ ID NO: 404069 - RNA, 19 nt, Artificial Sequence
  Description of Artificial Sequence: Synthetic oligonucleotide
  Sense Strand Starting at position 1088 of SEQ ID NO: 316280
ucaucugggaguugugaga

SEQ ID NO: 404070 - RNA, 19 nt, Artificial Sequence
  Description of Artificial Sequence: Synthetic oligonucleotide
  Antisense Strand to SEQ ID NO: 404069
ucucacaacucccagauga

SEQ ID NO: 404071 - RNA, 19 nt, Artificial Sequence
  Description of Artificial Sequence: Synthetic oligonucleotide
  Sense Strand Starting at position 1088 of SEQ ID NO: 316313
gugcaaagcugaucaccuu

SEQ ID NO: 404072 - RNA, 19 nt, Artificial Sequence
  Description of Artificial Sequence: Synthetic oligonucleotide
  Antisense Strand to SEQ ID NO: 404071
aaggugaucagcuuugcac

SEQ ID NO: 404073 - RNA, 19 nt, Artificial Sequence
  Description of Artificial Sequence: Synthetic oligonucleotide
  Sense Strand Starting at position 1088 of SEQ ID NO: 316352
ggucacugaggucaucauu

SEQ ID NO: 404074 - RNA, 19 nt, Artificial Sequence
  Description of Artificial Sequence: Synthetic oligonucleotide
  Antisense Strand to SEQ ID NO: 404073
aaugaugaccucagugacc

SEQ ID NO: 404075 - RNA, 19 nt, Artificial Sequence
  Description of Artificial Sequence: Synthetic oligonucleotide
  Sense Strand Starting at position 1088 of SEQ ID NO: 316367
cauugcuucucacagggau

SEQ ID NO: 404076 - RNA, 19 nt, Artificial Sequence
  Description of Artificial Sequence: Synthetic oligonucleotide
  Antisense Strand to SEQ ID NO: 404075
aucccugugagaagcaaug

SEQ ID NO: 404077 - RNA, 19 nt, Artificial Sequence
  Description of Artificial Sequence: Synthetic oligonucleotide
  Sense Strand Starting at position 1088 of SEQ ID NO: 316586
ccuuaacgauaauauuagu

SEQ ID NO: 404078 - RNA, 19 nt, Artificial Sequence
  Description of Artificial Sequence: Synthetic oligonucleotide
  Antisense Strand to SEQ ID NO: 404077
acuaauauuaucguuaagg

SEQ ID NO: 404079 - RNA, 19 nt, Artificial Sequence
  Description of Artificial Sequence: Synthetic oligonucleotide
  Sense Strand Starting at position 1088 of SEQ ID NO: 316596
aauauuaguguuggcugaa

SEQ ID NO: 404080 - RNA, 19 nt, Artificial Sequence
  Description of Artificial Sequence: Synthetic oligonucleotide
  Antisense Strand to SEQ ID NO: 404079
uucagccaacacuaauauu

SEQ ID NO: 404081 - RNA, 19 nt, Artificial Sequence
  Description of Artificial Sequence: Synthetic oligonucleotide
  Sense Strand Starting at position 1088 of SEQ ID NO: 316597
auauuaguguuggcugaaa

SEQ ID NO: 404082 - RNA, 19 nt, Artificial Sequence
  Description of Artificial Sequence: Synthetic oligonucleotide
  Antisense Strand to SEQ ID NO: 404081
uuucagccaacacuaauau

SEQ ID NO: 404083 - RNA, 19 nt, Artificial Sequence
  Description of Artificial Sequence: Synthetic oligonucleotide
  Sense Strand Starting at position 1088 of SEQ ID NO: 316625
uggagagacguuuauuccu

SEQ ID NO: 404084 - RNA, 19 nt, Artificial Sequence
  Description of Artificial Sequence: Synthetic oligonucleotide
  Antisense Strand to SEQ ID NO: 404083
aggaauaaacgucucucca

SEQ ID NO: 404085 - RNA, 19 nt, Artificial Sequence
  Description of Artificial Sequence: Synthetic oligonucleotide
  Sense Strand Starting at position 1088 of SEQ ID NO: 316627
gagagacguuuauuccuuc

SEQ ID NO: 404086 - RNA, 19 nt, Artificial Sequence
  Description of Artificial Sequence: Synthetic oligonucleotide
  Antisense Strand to SEQ ID NO: 404085
gaaggaauaaacgucucuc

SEQ ID NO: 404087 - RNA, 19 nt, Artificial Sequence
  Description of Artificial Sequence: Synthetic oligonucleotide
  Sense Strand Starting at position 1088 of SEQ ID NO: 316722
guuagaggcugcucacuuu

SEQ ID NO: 404088 - RNA, 19 nt, Artificial Sequence
  Description of Artificial Sequence: Synthetic oligonucleotide
  Antisense Strand to SEQ ID NO: 404087
aaagugagcagccucuaac

SEQ ID NO: 404089 - RNA, 19 nt, Artificial Sequence
  Description of Artificial Sequence: Synthetic oligonucleotide
  Sense Strand Starting at position 1088 of SEQ ID NO: 316808
uagacuucucacggaagcu

SEQ ID NO: 404090 - RNA, 19 nt, Artificial Sequence
  Description of Artificial Sequence: Synthetic oligonucleotide
  Antisense Strand to SEQ ID NO: 404089
agcuuccgugagaagucua

SEQ ID NO: 404091 - RNA, 19 nt, Artificial Sequence
  Description of Artificial Sequence: Synthetic oligonucleotide
  Sense Strand Starting at position 1088 of SEQ ID NO: 317290
ggccuauuccuccaggaag

SEQ ID NO: 404092 - RNA, 19 nt, Artificial Sequence
  Description of Artificial Sequence: Synthetic oligonucleotide
  Antisense Strand to SEQ ID NO: 404091
cuuccuggaggaauaggcc

SEQ ID NO: 404093 - RNA, 19 nt, Artificial Sequence
  Description of Artificial Sequence: Synthetic oligonucleotide
  Sense Strand Starting at position 1088 of SEQ ID NO: 317367
ucaauugcgcccugccaua

SEQ ID NO: 404094 - RNA, 19 nt, Artificial Sequence
  Description of Artificial Sequence: Synthetic oligonucleotide
  Antisense Strand to SEQ ID NO: 404093
uauggcagggcgcaauuga

SEQ ID NO: 404095 - RNA, 19 nt, Artificial Sequence
  Description of Artificial Sequence: Synthetic oligonucleotide
  Sense Strand Starting at position 1088 of SEQ ID NO: 317510
uaauaaguacuacggagaa

SEQ ID NO: 404096 - RNA, 19 nt, Artificial Sequence
  Description of Artificial Sequence: Synthetic oligonucleotide
  Antisense Strand to SEQ ID NO: 404095
uucuccguaguacuuauua

SEQ ID NO: 404097 - RNA, 19 nt, Artificial Sequence
  Description of Artificial Sequence: Synthetic oligonucleotide
  Sense Strand Starting at position 1088 of SEQ ID NO: 317723
ugagauggucugugccuga

SEQ ID NO: 404098 - RNA, 19 nt, Artificial Sequence
  Description of Artificial Sequence: Synthetic oligonucleotide
  Antisense Strand to SEQ ID NO: 404097
ucaggcacagaccaucuca

SEQ ID NO: 404099 - RNA, 19 nt, Artificial Sequence
  Description of Artificial Sequence: Synthetic oligonucleotide
  Sense Strand Starting at position 1088 of SEQ ID NO: 317726
gauggucugugccugacau

SEQ ID NO: 404100 - RNA, 19 nt, Artificial Sequence
  Description of Artificial Sequence: Synthetic oligonucleotide
  Antisense Strand to SEQ ID NO: 404099
augucaggcacagaccauc

SEQ ID NO: 404101 - RNA, 19 nt, Artificial Sequence
  Description of Artificial Sequence: Synthetic oligonucleotide
  Sense Strand Starting at position 1088 of SEQ ID NO: 317732
cugugccugacauguuuga

SEQ ID NO: 404102 - RNA, 19 nt, Artificial Sequence
  Description of Artificial Sequence: Synthetic oligonucleotide
  Antisense Strand to SEQ ID NO: 404101
ucaaacaugucaggcacag

SEQ ID NO: 404103 - RNA, 19 nt, Artificial Sequence
  Description of Artificial Sequence: Synthetic oligonucleotide
  Sense Strand Starting at position 1088 of SEQ ID NO: 317739
ugacauguuugagaaacca

SEQ ID NO: 404104 - RNA, 19 nt, Artificial Sequence
  Description of Artificial Sequence: Synthetic oligonucleotide
  Antisense Strand to SEQ ID NO: 404103
ugguuucucaaacauguca

SEQ ID NO: 404105 - RNA, 19 nt, Artificial Sequence
  Description of Artificial Sequence: Synthetic oligonucleotide
  Sense Strand Starting at position 1088 of SEQ ID NO: 317817
agguuugggccugguguua

SEQ ID NO: 404106 - RNA, 19 nt, Artificial Sequence
  Description of Artificial Sequence: Synthetic oligonucleotide
  Antisense Strand to SEQ ID NO: 404105
uaacaccaggcccaaaccu

SEQ ID NO: 404107 - RNA, 19 nt, Artificial Sequence
  Description of Artificial Sequence: Synthetic oligonucleotide
  Sense Strand Starting at position 1088 of SEQ ID NO: 317905
agaccagccugacuuauau

SEQ ID NO: 404108 - RNA, 19 nt, Artificial Sequence
  Description of Artificial Sequence: Synthetic oligonucleotide
  Antisense Strand to SEQ ID NO: 404107
auauaagucaggcuggucu

SEQ ID NO: 404109 - RNA, 19 nt, Artificial Sequence
  Description of Artificial Sequence: Synthetic oligonucleotide
  Sense Strand Starting at position 1088 of SEQ ID NO: 317917
cuuauauagcgagacucuu

SEQ ID NO: 404110 - RNA, 19 nt, Artificial Sequence
  Description of Artificial Sequence: Synthetic oligonucleotide
  Antisense Strand to SEQ ID NO: 404109
aagagucucgcuauauaag

SEQ ID NO: 404111 - RNA, 19 nt, Artificial Sequence
  Description of Artificial Sequence: Synthetic oligonucleotide
  Sense Strand Starting at position 1088 of SEQ ID NO: 318526
cugucucuccucugaagga

SEQ ID NO: 404112 - RNA, 19 nt, Artificial Sequence
  Description of Artificial Sequence: Synthetic oligonucleotide
  Antisense Strand to SEQ ID NO: 404111
uccuucagaggagagacag

SEQ ID NO: 404113 - RNA, 19 nt, Artificial Sequence
  Description of Artificial Sequence: Synthetic oligonucleotide
  Sense Strand Starting at position 1088 of SEQ ID NO: 318542
ggacguagaagucauugca

SEQ ID NO: 404114 - RNA, 19 nt, Artificial Sequence
  Description of Artificial Sequence: Synthetic oligonucleotide
  Antisense Strand to SEQ ID NO: 404113
ugcaaugacuucuacgucc

SEQ ID NO: 404115 - RNA, 19 nt, Artificial Sequence
  Description of Artificial Sequence: Synthetic oligonucleotide
  Sense Strand Starting at position 1088 of SEQ ID NO: 318587
cugacaucguuaucaggau

SEQ ID NO: 404116 - RNA, 19 nt, Artificial Sequence
  Description of Artificial Sequence: Synthetic oligonucleotide
  Antisense Strand to SEQ ID NO: 404115
auccugauaacgaugucag

SEQ ID NO: 404117 - RNA, 19 nt, Artificial Sequence
  Description of Artificial Sequence: Synthetic oligonucleotide
  Sense Strand Starting at position 1088 of SEQ ID NO: 318610
cuuugauugcugggugaaa

SEQ ID NO: 404118 - RNA, 19 nt, Artificial Sequence
  Description of Artificial Sequence: Synthetic oligonucleotide
  Antisense Strand to SEQ ID NO: 404117
uuucacccagcaaucaaag

SEQ ID NO: 404119 - RNA, 19 nt, Artificial Sequence
  Description of Artificial Sequence: Synthetic oligonucleotide
  Sense Strand Starting at position 1088 of SEQ ID NO: 318658
gagccuuaaggaggcuaaa

SEQ ID NO: 404120 - RNA, 19 nt, Artificial Sequence
  Description of Artificial Sequence: Synthetic oligonucleotide
  Antisense Strand to SEQ ID NO: 404119
uuuagccuccuuaaggcuc

SEQ ID NO: 404121 - RNA, 19 nt, Artificial Sequence
  Description of Artificial Sequence: Synthetic oligonucleotide
  Sense Strand Starting at position 1088 of SEQ ID NO: 319113
guugucaauuaauaggaua

SEQ ID NO: 404122 - RNA, 19 nt, Artificial Sequence
  Description of Artificial Sequence: Synthetic oligonucleotide
  Antisense Strand to SEQ ID NO: 404121
uauccuauuaauugacaac

SEQ ID NO: 404123 - RNA, 19 nt, Artificial Sequence
  Description of Artificial Sequence: Synthetic oligonucleotide
  Sense Strand Starting at position 1089 of SEQ ID NO: 315243
guuggaauaugagcuccaa

SEQ ID NO: 404124 - RNA, 19 nt, Artificial Sequence
  Description of Artificial Sequence: Synthetic oligonucleotide
  Antisense Strand to SEQ ID NO: 404123
uuggagcucauauuccaac

SEQ ID NO: 404125 - RNA, 19 nt, Artificial Sequence
  Description of Artificial Sequence: Synthetic oligonucleotide
  Sense Strand Starting at position 1089 of SEQ ID NO: 315422
acaggaauguuagcugaca

SEQ ID NO: 404126 - RNA, 19 nt, Artificial Sequence
  Description of Artificial Sequence: Synthetic oligonucleotide
  Antisense Strand to SEQ ID NO: 404125
ugucagcuaacauuccugu

SEQ ID NO: 404127 - RNA, 19 nt, Artificial Sequence
  Description of Artificial Sequence: Synthetic oligonucleotide
  Sense Strand Starting at position 1089 of SEQ ID NO: 315423
caggaauguuagcugacaa

SEQ ID NO: 404128 - RNA, 19 nt, Artificial Sequence
  Description of Artificial Sequence: Synthetic oligonucleotide
  Antisense Strand to SEQ ID NO: 404127
uugucagcuaacauuccug

SEQ ID NO: 404129 - RNA, 19 nt, Artificial Sequence
  Description of Artificial Sequence: Synthetic oligonucleotide
  Sense Strand Starting at position 1089 of SEQ ID NO: 315424
aggaauguuagcugacaaa

SEQ ID NO: 404130 - RNA, 19 nt, Artificial Sequence
  Description of Artificial Sequence: Synthetic oligonucleotide
  Antisense Strand to SEQ ID NO: 404129
uuugucagcuaacauuccu

SEQ ID NO: 404131 - RNA, 19 nt, Artificial Sequence
  Description of Artificial Sequence: Synthetic oligonucleotide
  Sense Strand Starting at position 1089 of SEQ ID NO: 315873
cuacaagucuggcuaagac

SEQ ID NO: 404132 - RNA, 19 nt, Artificial Sequence
  Description of Artificial Sequence: Synthetic oligonucleotide
  Antisense Strand to SEQ ID NO: 404131
gucuuagccagacuuguag

SEQ ID NO: 404133 - RNA, 19 nt, Artificial Sequence
  Description of Artificial Sequence: Synthetic oligonucleotide
  Sense Strand Starting at position 1089 of SEQ ID NO: 316045
uucgauaauuaagugacua

SEQ ID NO: 404134 - RNA, 19 nt, Artificial Sequence
  Description of Artificial Sequence: Synthetic oligonucleotide
  Antisense Strand to SEQ ID NO: 404133
uagucacuuaauuaucgaa

SEQ ID NO: 404135 - RNA, 19 nt, Artificial Sequence
  Description of Artificial Sequence: Synthetic oligonucleotide
  Sense Strand Starting at position 1089 of SEQ ID NO: 316182
ucuaguauccucuaccaga

SEQ ID NO: 404136 - RNA, 19 nt, Artificial Sequence
  Description of Artificial Sequence: Synthetic oligonucleotide
  Antisense Strand to SEQ ID NO: 404135
ucugguagaggauacuaga

SEQ ID NO: 404137 - RNA, 19 nt, Artificial Sequence
  Description of Artificial Sequence: Synthetic oligonucleotide
  Sense Strand Starting at position 1089 of SEQ ID NO: 316351
cuaggcuuggagcagaaau

SEQ ID NO: 404138 - RNA, 19 nt, Artificial Sequence
  Description of Artificial Sequence: Synthetic oligonucleotide
  Antisense Strand to SEQ ID NO: 404137
auuucugcuccaagccuag

SEQ ID NO: 404139 - RNA, 19 nt, Artificial Sequence
  Description of Artificial Sequence: Synthetic oligonucleotide
  Sense Strand Starting at position 1089 of SEQ ID NO: 316376
uuauguauugaaugaacag

SEQ ID NO: 404140 - RNA, 19 nt, Artificial Sequence
  Description of Artificial Sequence: Synthetic oligonucleotide
  Antisense Strand to SEQ ID NO: 404139
cuguucauucaauacauaa

SEQ ID NO: 404141 - RNA, 19 nt, Artificial Sequence
  Description of Artificial Sequence: Synthetic oligonucleotide
  Sense Strand Starting at position 1089 of SEQ ID NO: 316518
uucccaagaucucuagagu

SEQ ID NO: 404142 - RNA, 19 nt, Artificial Sequence
  Description of Artificial Sequence: Synthetic oligonucleotide
  Antisense Strand to SEQ ID NO: 404141
acucuagagaucuugggaa

SEQ ID NO: 404143 - RNA, 19 nt, Artificial Sequence
  Description of Artificial Sequence: Synthetic oligonucleotide
  Sense Strand Starting at position 1089 of SEQ ID NO: 316521
ccaagaucucuagaguagu

SEQ ID NO: 404144 - RNA, 19 nt, Artificial Sequence
  Description of Artificial Sequence: Synthetic oligonucleotide
  Antisense Strand to SEQ ID NO: 404143
acuacucuagagaucuugg

SEQ ID NO: 404145 - RNA, 19 nt, Artificial Sequence
  Description of Artificial Sequence: Synthetic oligonucleotide
  Sense Strand Starting at position 1089 of SEQ ID NO: 316562
guuaacaguguauaauaga

SEQ ID NO: 404146 - RNA, 19 nt, Artificial Sequence
  Description of Artificial Sequence: Synthetic oligonucleotide
  Antisense Strand to SEQ ID NO: 404145
ucuauuauacacuguuaac

SEQ ID NO: 404147 - RNA, 19 nt, Artificial Sequence
  Description of Artificial Sequence: Synthetic oligonucleotide
  Sense Strand Starting at position 1089 of SEQ ID NO: 317313
ucgggauccuaaucggaua

SEQ ID NO: 404148 - RNA, 19 nt, Artificial Sequence
  Description of Artificial Sequence: Synthetic oligonucleotide
  Antisense Strand to SEQ ID NO: 404147
uauccgauuaggaucccga

SEQ ID NO: 404149 - RNA, 19 nt, Artificial Sequence
  Description of Artificial Sequence: Synthetic oligonucleotide
  Sense Strand Starting at position 1089 of SEQ ID NO: 317314
cgggauccuaaucggauau

SEQ ID NO: 404150 - RNA, 19 nt, Artificial Sequence
  Description of Artificial Sequence: Synthetic oligonucleotide
  Antisense Strand to SEQ ID NO: 404149
auauccgauuaggaucccg

SEQ ID NO: 404151 - RNA, 19 nt, Artificial Sequence
  Description of Artificial Sequence: Synthetic oligonucleotide
  Sense Strand Starting at position 1089 of SEQ ID NO: 317315
gggauccuaaucggauauu

SEQ ID NO: 404152 - RNA, 19 nt, Artificial Sequence
  Description of Artificial Sequence: Synthetic oligonucleotide
  Antisense Strand to SEQ ID NO: 404151
aauauccgauuaggauccc

SEQ ID NO: 404153 - RNA, 19 nt, Artificial Sequence
  Description of Artificial Sequence: Synthetic oligonucleotide
  Sense Strand Starting at position 1089 of SEQ ID NO: 317443
guuuccugaccggaguuaa

SEQ ID NO: 404154 - RNA, 19 nt, Artificial Sequence
  Description of Artificial Sequence: Synthetic oligonucleotide
  Antisense Strand to SEQ ID NO: 404153
uuaacuccggucaggaaac

SEQ ID NO: 404155 - RNA, 19 nt, Artificial Sequence
  Description of Artificial Sequence: Synthetic oligonucleotide
  Sense Strand Starting at position 1089 of SEQ ID NO: 317520
ucaguuauuuaccugcuca

SEQ ID NO: 404156 - RNA, 19 nt, Artificial Sequence
  Description of Artificial Sequence: Synthetic oligonucleotide
  Antisense Strand to SEQ ID NO: 404155
ugagcagguaaauaacuga

SEQ ID NO: 404157 - RNA, 19 nt, Artificial Sequence
  Description of Artificial Sequence: Synthetic oligonucleotide
  Sense Strand Starting at position 1089 of SEQ ID NO: 317524
uuauuuaccugcucauguu

SEQ ID NO: 404158 - RNA, 19 nt, Artificial Sequence
  Description of Artificial Sequence: Synthetic oligonucleotide
  Antisense Strand to SEQ ID NO: 404157
aacaugagcagguaaauaa

SEQ ID NO: 404159 - RNA, 19 nt, Artificial Sequence
  Description of Artificial Sequence: Synthetic oligonucleotide
  Sense Strand Starting at position 1089 of SEQ ID NO: 317559
auguguacaccucaaagca

SEQ ID NO: 404160 - RNA, 19 nt, Artificial Sequence
  Description of Artificial Sequence: Synthetic oligonucleotide
  Antisense Strand to SEQ ID NO: 404159
ugcuuugagguguacacau

SEQ ID NO: 404161 - RNA, 19 nt, Artificial Sequence
  Description of Artificial Sequence: Synthetic oligonucleotide
  Sense Strand Starting at position 1089 of SEQ ID NO: 317597
uaacauuucuuggagugga

SEQ ID NO: 404162 - RNA, 19 nt, Artificial Sequence
  Description of Artificial Sequence: Synthetic oligonucleotide
  Antisense Strand to SEQ ID NO: 404161
uccacuccaagaaauguua

SEQ ID NO: 404163 - RNA, 19 nt, Artificial Sequence
  Description of Artificial Sequence: Synthetic oligonucleotide
  Sense Strand Starting at position 1089 of SEQ ID NO: 317612
uggaccugucuuuauuaaa

SEQ ID NO: 404164 - RNA, 19 nt, Artificial Sequence
  Description of Artificial Sequence: Synthetic oligonucleotide
  Antisense Strand to SEQ ID NO: 404163
uuuaauaaagacaggucca

SEQ ID NO: 404165 - RNA, 19 nt, Artificial Sequence
  Description of Artificial Sequence: Synthetic oligonucleotide
  Sense Strand Starting at position 1089 of SEQ ID NO: 317737
cuaugaugucagcaacacu

SEQ ID NO: 404166 - RNA, 19 nt, Artificial Sequence
  Description of Artificial Sequence: Synthetic oligonucleotide
  Antisense Strand to SEQ ID NO: 404165
aguguugcugacaucauag

SEQ ID NO: 404167 - RNA, 19 nt, Artificial Sequence
  Description of Artificial Sequence: Synthetic oligonucleotide
  Sense Strand Starting at position 1089 of SEQ ID NO: 317801
gacucaauguggcuacaga

SEQ ID NO: 404168 - RNA, 19 nt, Artificial Sequence
  Description of Artificial Sequence: Synthetic oligonucleotide
  Antisense Strand to SEQ ID NO: 404167
ucuguagccacauugaguc

SEQ ID NO: 404169 - RNA, 19 nt, Artificial Sequence
  Description of Artificial Sequence: Synthetic oligonucleotide
  Sense Strand Starting at position 1089 of SEQ ID NO: 317992
uagaaaugauacgcagaau

SEQ ID NO: 404170 - RNA, 19 nt, Artificial Sequence
  Description of Artificial Sequence: Synthetic oligonucleotide
  Antisense Strand to SEQ ID NO: 404169
auucugcguaucauuucua

SEQ ID NO: 404171 - RNA, 19 nt, Artificial Sequence
  Description of Artificial Sequence: Synthetic oligonucleotide
  Sense Strand Starting at position 1089 of SEQ ID NO: 318015
uuagguguuagauggaauu

SEQ ID NO: 404172 - RNA, 19 nt, Artificial Sequence
  Description of Artificial Sequence: Synthetic oligonucleotide
  Antisense Strand to SEQ ID NO: 404171
aauuccaucuaacaccuaa

SEQ ID NO: 404173 - RNA, 19 nt, Artificial Sequence
  Description of Artificial Sequence: Synthetic oligonucleotide
  Sense Strand Starting at position 1089 of SEQ ID NO: 318091
cuguaaaguggcgauaaug

SEQ ID NO: 404174 - RNA, 19 nt, Artificial Sequence
  Description of Artificial Sequence: Synthetic oligonucleotide
  Antisense Strand to SEQ ID NO: 404173
cauuaucgccacuuuacag

SEQ ID NO: 404175 - RNA, 19 nt, Artificial Sequence
  Description of Artificial Sequence: Synthetic oligonucleotide
  Sense Strand Starting at position 1089 of SEQ ID NO: 318102
cgauaaugauagucacuuu

SEQ ID NO: 404176 - RNA, 19 nt, Artificial Sequence
  Description of Artificial Sequence: Synthetic oligonucleotide
  Antisense Strand to SEQ ID NO: 404175
aaagugacuaucauuaucg

SEQ ID NO: 404177 - RNA, 19 nt, Artificial Sequence
  Description of Artificial Sequence: Synthetic oligonucleotide
  Sense Strand Starting at position 1089 of SEQ ID NO: 318180
uaguuccuggcucauagaa

SEQ ID NO: 404178 - RNA, 19 nt, Artificial Sequence
  Description of Artificial Sequence: Synthetic oligonucleotide
  Antisense Strand to SEQ ID NO: 404177
uucuaugagccaggaacua

SEQ ID NO: 404179 - RNA, 19 nt, Artificial Sequence
  Description of Artificial Sequence: Synthetic oligonucleotide
  Sense Strand Starting at position 1089 of SEQ ID NO: 318203
cucucuaaaggugauggua

SEQ ID NO: 404180 - RNA, 19 nt, Artificial Sequence
  Description of Artificial Sequence: Synthetic oligonucleotide
  Antisense Strand to SEQ ID NO: 404179
uaccaucaccuuuagagag

SEQ ID NO: 404181 - RNA, 19 nt, Artificial Sequence
  Description of Artificial Sequence: Synthetic oligonucleotide
  Sense Strand Starting at position 1089 of SEQ ID NO: 318222
auguuauuucccugcuuac

SEQ ID NO: 404182 - RNA, 19 nt, Artificial Sequence
  Description of Artificial Sequence: Synthetic oligonucleotide
  Antisense Strand to SEQ ID NO: 404181
guaagcagggaaauaacau

SEQ ID NO: 404183 - RNA, 19 nt, Artificial Sequence
  Description of Artificial Sequence: Synthetic oligonucleotide
  Sense Strand Starting at position 1089 of SEQ ID NO: 318454
ugucaaugccagcagaaga

SEQ ID NO: 404184 - RNA, 19 nt, Artificial Sequence
  Description of Artificial Sequence: Synthetic oligonucleotide
  Antisense Strand to SEQ ID NO: 404183
ucuucugcuggcauugaca

SEQ ID NO: 404185 - RNA, 19 nt, Artificial Sequence
  Description of Artificial Sequence: Synthetic oligonucleotide
  Sense Strand Starting at position 1089 of SEQ ID NO: 318616
caacauaaucaugguggua

SEQ ID NO: 404186 - RNA, 19 nt, Artificial Sequence
  Description of Artificial Sequence: Synthetic oligonucleotide
  Antisense Strand to SEQ ID NO: 404185
uaccaccaugauuauguug

SEQ ID NO: 404187 - RNA, 19 nt, Artificial Sequence
  Description of Artificial Sequence: Synthetic oligonucleotide
  Sense Strand Starting at position 1089 of SEQ ID NO: 318923
gucuauuucugcguaacaa

SEQ ID NO: 404188 - RNA, 19 nt, Artificial Sequence
  Description of Artificial Sequence: Synthetic oligonucleotide
  Antisense Strand to SEQ ID NO: 404187
uuguuacgcagaaauagac

SEQ ID NO: 404189 - RNA, 19 nt, Artificial Sequence
  Description of Artificial Sequence: Synthetic oligonucleotide
  Sense Strand Starting at position 1089 of SEQ ID NO: 319021
gagucauuuagcugggugu

SEQ ID NO: 404190 - RNA, 19 nt, Artificial Sequence
  Description of Artificial Sequence: Synthetic oligonucleotide
  Antisense Strand to SEQ ID NO: 404189
acacccagcuaaaugacuc

SEQ ID NO: 404191 - RNA, 19 nt, Artificial Sequence
  Description of Artificial Sequence: Synthetic oligonucleotide
  Sense Strand Starting at position 1089 of SEQ ID NO: 319022
agucauuuagcuggguguu

SEQ ID NO: 404192 - RNA, 19 nt, Artificial Sequence
  Description of Artificial Sequence: Synthetic oligonucleotide
  Antisense Strand to SEQ ID NO: 404191
aacacccagcuaaaugacu

SEQ ID NO: 404193 - RNA, 19 nt, Artificial Sequence
  Description of Artificial Sequence: Synthetic oligonucleotide
  Sense Strand Starting at position 1089 of SEQ ID NO: 319024
ucauuuagcuggguguuua

SEQ ID NO: 404194 - RNA, 19 nt, Artificial Sequence
  Description of Artificial Sequence: Synthetic oligonucleotide
  Antisense Strand to SEQ ID NO: 404193
uaaacacccagcuaaauga

SEQ ID NO: 404195 - RNA, 19 nt, Artificial Sequence
  Description of Artificial Sequence: Synthetic oligonucleotide
  Sense Strand Starting at position 1089 of SEQ ID NO: 319025
cauuuagcuggguguuuaa

SEQ ID NO: 404196 - RNA, 19 nt, Artificial Sequence
  Description of Artificial Sequence: Synthetic oligonucleotide
  Antisense Strand to SEQ ID NO: 404195
uuaaacacccagcuaaaug

SEQ ID NO: 404197 - RNA, 19 nt, Artificial Sequence
  Description of Artificial Sequence: Synthetic oligonucleotide
  Sense Strand Starting at position 1089 of SEQ ID NO: 319038
guuuaagacucagaaauuu

SEQ ID NO: 404198 - RNA, 19 nt, Artificial Sequence
  Description of Artificial Sequence: Synthetic oligonucleotide
  Antisense Strand to SEQ ID NO: 404197
aaauuucugagucuuaaac

SEQ ID NO: 404199 - RNA, 19 nt, Artificial Sequence
  Description of Artificial Sequence: Synthetic oligonucleotide
  Sense Strand Starting at position 1089 of SEQ ID NO: 319080
uggccagggccauaucaua

SEQ ID NO: 404200 - RNA, 19 nt, Artificial Sequence
  Description of Artificial Sequence: Synthetic oligonucleotide
  Antisense Strand to SEQ ID NO: 404199
uaugauauggcccuggcca

SEQ ID NO: 404201 - RNA, 19 nt, Artificial Sequence
  Description of Artificial Sequence: Synthetic oligonucleotide
  Sense Strand Starting at position 1089 of SEQ ID NO: 319144
ccauaacuggcagauuagu

SEQ ID NO: 404202 - RNA, 19 nt, Artificial Sequence
  Description of Artificial Sequence: Synthetic oligonucleotide
  Antisense Strand to SEQ ID NO: 404201
acuaaucugccaguuaugg

SEQ ID NO: 404203 - RNA, 19 nt, Artificial Sequence
  Description of Artificial Sequence: Synthetic oligonucleotide
  Sense Strand Starting at position 1090 of SEQ ID NO: 315414
ucuguaauacugugauuaa

SEQ ID NO: 404204 - RNA, 19 nt, Artificial Sequence
  Description of Artificial Sequence: Synthetic oligonucleotide
  Antisense Strand to SEQ ID NO: 404203
uuaaucacaguauuacaga

SEQ ID NO: 404205 - RNA, 19 nt, Artificial Sequence
  Description of Artificial Sequence: Synthetic oligonucleotide
  Sense Strand Starting at position 1090 of SEQ ID NO: 315417
guaauacugugauuaacua

SEQ ID NO: 404206 - RNA, 19 nt, Artificial Sequence
  Description of Artificial Sequence: Synthetic oligonucleotide
  Antisense Strand to SEQ ID NO: 404205
uaguuaaucacaguauuac

SEQ ID NO: 404207 - RNA, 19 nt, Artificial Sequence
  Description of Artificial Sequence: Synthetic oligonucleotide
  Sense Strand Starting at position 1090 of SEQ ID NO: 315428
auuaacuaauuggagagau

SEQ ID NO: 404208 - RNA, 19 nt, Artificial Sequence
  Description of Artificial Sequence: Synthetic oligonucleotide
  Antisense Strand to SEQ ID NO: 404207
aucucuccaauuaguuaau

SEQ ID NO: 404209 - RNA, 19 nt, Artificial Sequence
  Description of Artificial Sequence: Synthetic oligonucleotide
  Sense Strand Starting at position 1090 of SEQ ID NO: 315543
cagaaagauuaggaguaaa

SEQ ID NO: 404210 - RNA, 19 nt, Artificial Sequence
  Description of Artificial Sequence: Synthetic oligonucleotide
  Antisense Strand to SEQ ID NO: 404209
uuuacuccuaaucuuucug

SEQ ID NO: 404211 - RNA, 19 nt, Artificial Sequence
  Description of Artificial Sequence: Synthetic oligonucleotide
  Sense Strand Starting at position 1090 of SEQ ID NO: 316088
caguguccugaucaauaug

SEQ ID NO: 404212 - RNA, 19 nt, Artificial Sequence
  Description of Artificial Sequence: Synthetic oligonucleotide
  Antisense Strand to SEQ ID NO: 404211
cauauugaucaggacacug

SEQ ID NO: 404213 - RNA, 19 nt, Artificial Sequence
  Description of Artificial Sequence: Synthetic oligonucleotide
  Sense Strand Starting at position 1090 of SEQ ID NO: 316280
gaggguguuuggaaguuga

SEQ ID NO: 404214 - RNA, 19 nt, Artificial Sequence
  Description of Artificial Sequence: Synthetic oligonucleotide
  Antisense Strand to SEQ ID NO: 404213
ucaacuuccaaacacccuc

SEQ ID NO: 404215 - RNA, 19 nt, Artificial Sequence
  Description of Artificial Sequence: Synthetic oligonucleotide
  Sense Strand Starting at position 1090 of SEQ ID NO: 316335
agugaaguucugcaagucu

SEQ ID NO: 404216 - RNA, 19 nt, Artificial Sequence
  Description of Artificial Sequence: Synthetic oligonucleotide
  Antisense Strand to SEQ ID NO: 404215
agacuugcagaacuucacu

SEQ ID NO: 404217 - RNA, 19 nt, Artificial Sequence
  Description of Artificial Sequence: Synthetic oligonucleotide
  Sense Strand Starting at position 1090 of SEQ ID NO: 316374
cccagauuggcugguucuu

SEQ ID NO: 404218 - RNA, 19 nt, Artificial Sequence
  Description of Artificial Sequence: Synthetic oligonucleotide
  Antisense Strand to SEQ ID NO: 404217
aagaaccagccaaucuggg

SEQ ID NO: 404219 - RNA, 19 nt, Artificial Sequence
  Description of Artificial Sequence: Synthetic oligonucleotide
  Sense Strand Starting at position 1090 of SEQ ID NO: 316376
cagauuggcugguucuuau

SEQ ID NO: 404220 - RNA, 19 nt, Artificial Sequence
  Description of Artificial Sequence: Synthetic oligonucleotide
  Antisense Strand to SEQ ID NO: 404219
auaagaaccagccaaucug

SEQ ID NO: 404221 - RNA, 19 nt, Artificial Sequence
  Description of Artificial Sequence: Synthetic oligonucleotide
  Sense Strand Starting at position 1090 of SEQ ID NO: 316406
gggcacuucucugugacaa
